(19) United States
(12) Patent Application Publication
(10) Pub. No.: US 2024/0018598 A1
(43) Pub. Date: Jan. 18, 2024

(54) COMPOSITIONS AND METHODS OF USING TRANSFER RNAS (tRNAS)

(71) Applicant: Thomas Jefferson University, Philadelphia, PA (US)

(72) Inventor: Isidore Rigoutsos, Astoria, NY (US)

(21) Appl. No.: 17/938,428

(22) Filed: Oct. 6, 2022

Related U.S. Application Data
(63) Continuation of application No. 15/521,828, filed on Apr. 25, 2017, now abandoned.
(60) Provisional application No. 62/122,711, filed on Oct. 28, 2014.

(51) Int. Cl. C12Q 1/6886

(52) U.S. Cl. CPC C12Q 1/6886; C12Q 2600/106; C12Q 2600/178

(57) ABSTRACT

The present invention includes a method for analyzing tRNA fragments. In one aspect, the present invention includes a method of identifying a subject in need of therapeutic intervention to treat a disease or condition, disease recurrence, or disease progression comprises characterizing the identity of tRNA fragments. The invention further includes diagnosing, identifying or monitoring a disease or condition, a panel of engineered oligonucleotides, a kit for a high-throughput assay, and a method and system for identifying tRNA fragments.

### CROSS-REFERENCE TO RELATED APPLICATION

[0001] The present application is a continuation of and claims priority to U.S. patent application Ser. No. 15/521,828, filed Apr. 25, 2017, which is a 35 U.S.C. § 371 national phase application from, and claims priority to, International Application No. PCT/US2015/057643, filed Oct. 27, 2015, and published under PCT Article 21(2) in English, which entitled to priority under 35 U.S.C. § 119(e) to U.S. Provisional Patent Application No. 62/122,711, filed Oct. 28, 2014, all of which applications are incorporated herein by reference in their entireties.

### SEQUENCE LISTING

[0002] The instant application contains a Sequence Listing which has been submitted in ASCII format via EFS-Web and is hereby incorporated by reference in its entirety. Said ASCII copy, created on Oct. 4, 2022, is named 205961_7006US2_SeqListing_ST25.txt and is 25.95 megabytes in size.

### BACKGROUND OF THE INVENTION

[0003] Transfer RNAs (tRNAs) are ancient non-coding RNAs (ncRNAs) with a central role in the process of translation of a messenger RNA (mRNA) into an amino acid sequence. As such, tRNAs are present in archaea, bacteria, and eukaryotes. The conventional understanding had been that genomic loci harboring tRNAs produce a single precursor transcript that is processed to produce the mature tRNA. Recent reports suggest that “tRNA fragments” (tRFs) represent a novel and potentially important group of ncRNAs. However, knowledge about their biogenesis, roles and potential functions remains limited and fragmented. Studies with human cell lines have shown that tRNAs can be cleaved at the anticodon loop to produce “tRNA halves” that are (30-35 nts in length) a process that seems to be facilitated by the enzyme, Angiogenin, following induction of stress.

[0004] tRNA fragments (tRFs) have also been found to originate from cleavage of either the mature tRNA or the tRNA precursor molecule. In the latter case, RNase Z cleaves the 3′ part of the tRNA precursor as part of the maturation process and the resulting fragment is considered to be a tRF with reported functions. tRFs from the mature tRNA molecule emerge after cleavage at either the D-loop (giving rise to 5′-tRFs) or the T-loop (giving rise to 3′-tRFs with the CCA addition present) and are about 20 nucleotides long. Further investigation into the enzymes responsible for the fragments have been shown to be Dicer-dependent, angiogenin-dependent (cleaving the tRNA at the T-loop) or RNase-Z-dependent (producing 5′-tRFs).

[0005] The available evidence indicates that tRFs are not random degradation products. Indeed, some 3′-tRFs have been reported to be loaded onto Argonaute thereby exhibiting behavior akin to a microRNA (miRNA). Also, their involvement in regulation of gene expression affected physiological processes like cell proliferation and cellular responses to DNA damage. 3′-tRF have also been described to emerge in human MT4 T-cells after HIV infection from the host cell. Further supporting the non-random nature of tRFs is the fact that they have been described in mouse, in the yeast S. pombe, in the fruitfly D. melanogaster, in the protozoans G. lamblia and T. thermophile, in the bacterium S. coelicolor, and in the archaeon H. volcanii. Specifically in H. volcanii, four classes of fragments have been described. However, there is limited information detailing these non-coding RNAs (ncRNAs).

[0006] Therefore, a need exists for determining the full complement of tRNA fragments, and their regulatory roles and functions in diseased and healthy cells.

### SUMMARY OF THE INVENTION

[0007] As described herein, the present invention relates to methods characterizing fragments of tRNAs.

[0008] In one aspect, the invention includes a method of identifying a subject in need of therapeutic intervention to treat a disease or condition, disease recurrence, or disease progression comprising isolating fragments of tRNAs from a sample obtained from the subject and characterizing the tRNA fragments and their relative abundance in the sample to identify a signature, wherein when the signature is indicative of a diagnosis of the disease treatment of the subject is recommended.

[0009] In another aspect, the invention includes a method of diagnosing, identifying or monitoring breast cancer in a subject in need thereof, the method comprising isolating tRNA fragments from a cell obtained from the subject, hybridizing the tRNA fragments to a panel of oligonucleotides engineered to detect tRNA fragments, analyzing levels of the tRNA fragments present in the cell; wherein a differential in the measured tRNA fragments' levels to the reference is indicative of a diagnosis or identification of breast cancer in the subject, and providing a treatment regimen to the subject dependent on the differential in measured tRNA fragments' levels to the reference.

[0010] In yet another aspect, the invention includes a panel of engineered oligonucleotides comprising a mixture of oligonucleotides that are about 15 to about 40 nucleotides in length and capable of hybridizing tRNA fragments, wherein the tRNAs are less than 80 nucleotides in length.

[0011] In still another aspect, the invention includes a kit for high-throughput analysis of tRNAs fragments in a sample comprising the panel of engineered oligonucleotides as described herein, hybridization reagents, and tRNA isolation reagents.

[0012] In another aspect, the invention includes a method of identifying a cell's tissue of origin to treat a disease or condition, disease recurrence, or disease progression in a subject in need thereof comprising isolating fragments of tRNAs from a cell obtained from the subject, characterizing the identity of the tRNA fragments and their relative abundance in the cell to identify a signature, wherein the signature is indicative of the cell's tissue of origin, and providing a treatment regimen to the subject dependent on the cell's tissue of origin.

[0013] In yet another aspect, the invention includes a method for identifying tRNA fragments comprising defining tRNA loci, sequencing a population of RNA fragments, mapping the sequenced RNA fragments to at least one tRNA genomic loci comprising disregarding mapped RNA fragments that differ in sequence from the tRNA genomic loci by at least an insertion, deletion, or replacement of a nucleotide, adding back mapped RNA fragments that are post-transcriptionally modified that differ in sequence from the tRNA genomic loci only at the post-transcriptional modification, excluding mapped RNA fragments that map to locations in the genome outside of the tRNA genomic loci, and disregarding mapped RNA fragments with tRNA intron sequences, and characterizing the mapped RNA fragments.

[0014] In still another aspect, the invention includes a system for identifying tRNA fragments according to the method described herein comprising a processor capable of analyzing the tRNA fragments.

[0015] In various embodiments of the above aspects or any other aspect of the invention delineated herein, the sample is isolated from a cell, tissue or body fluid obtained from the subject. Examples of body fluid include amniotic fluid, aqueous humour and vitreous humour, bile, blood serum, breast milk, cerebrospinal fluid, cerumen, chyle, chyme, endolymph and perilymph, exudates, feces, female ejaculate, gastric acid, gastric juice, lymph, mucus, pericardial fluid, peritoneal fluid, pleural fluid, pus, rheum, saliva, sebum, serous fluid, semen, smegma, sputum, synovial fluid, sweat, tears, urine, vaginal secretion, and vomit. In one embodiment, the sample is selected from the group consisting of a peripheral blood cell, a tumor cell, a circulating tumor cell, an exosome, a bone marrow cell, a breast cell, a lung cell, and a pancreatic cell.

[0016] In another embodiment, the tRNA fragments are isolated by a method selected from the group consisting of size selection, sequencing, and amplification. In yet another embodiment, the step of isolating the tRNA fragments comprises isolating tRNA fragments with a length in the range of about 15 nucleotides to about 80 nucleotides. In still another embodiment, the step of isolating the tRNA fragments comprises isolating tRNA fragments having a predominant length of 16, 17, 26, or 29 nucleotides is indicative of a breast cancer subtype.

[0017] In one embodiment, the signature is obtained through sequence-specific methods that preserve at least one terminus of the tRNA fragments. In another embodiment, the signature is obtained by hybridization to a panel of oligonucleotides. In still another embodiment, the tRNA fragments are enriched prior to the hybridization. In yet another embodiment, the oligonucleotide panel comprises at least two or more polynucleotides that selectively hybridize to the tRNA fragments.

[0018] In one embodiment, the signature comprises at least one sequence with identifiers selected from the group consisting of SEQ ID NOs: 1-1802 to analyze brain; SEQ ID NOs: 8538-8852 to analyze breast tissue; SEQ ID NOs: 12462-14475 to analyze blood cells; SEQ ID NOs: 24833-25945 to analyze blood cells; SEQ ID NOs: 36100-37466 to analyze pancreatic cancer; SEQ ID NOs: 42349-43721 to analyze prostate tissue; and SEQ ID NOs: 51286-51793 to analyze platelets.

[0019] In one embodiment, the signature comprises at least one sequence with identifiers selected from the group consisting of SEQ ID NOs: 11, 18, 19, 28, 31, 34, 43, 51, 59, 83, 189, 194, 209, 268, 305, 306, 307, 316, 320, 398, 404, 611, 632, 653, 696, 751, 768, 816, 817, 860, 869, 870, 871, 920, 921, 925, 951, 960, 967, 989, 1005, 1030, 1133, 1201, 1202, 1223, 1229, 1230, 1231, 1240, 1248, 1298, 1318, 1406, 1412, 1421, 1425, 1453, 1510, 1577, 1582, 1631, 1637, 1645, 1661, 1695, 1727 and 1794 to distinguish Alzheimer's disease brain from normal brain.

[0020] In one embodiment, the signature comprises at least one sequence with identifiers selected from the group consisting of SEQ ID NO:8613 and SEQ ID NO: 8823 to distinguish triple negative breast cancer from HER2+ breast cancer.

[0021] In one embodiment, the signature comprises at least one sequence with identifiers selected from the group consisting of SEQ ID NOs: 8542, 8543, 8566, 8579, 8582, 8587, 8589, 8590, 8594, 8671-8673, 8707, 8731, 8774-8778, 8803, 8827-8828, 8831-8832, 8837-8838, and 8852 to distinguish triple negative breast cancer from normal.

[0022] In one embodiment, the signature comprises at least one sequence with identifiers selected from the group consisting of SEQ ID NOs: 8596, 8601, 8622, 8657, 8664, and 8811 to distinguish triple positive breast cancer from triple negative breast cancer.

[0023] In one embodiment, the signature comprises at least one sequence with identifiers selected from the group consisting of SEQ ID NOs: 8582, 8599-8601, 8622-8623, 8634, 8657, 8663-8665, 8676, 8698, 8703-8706, 8718-8720, 8722, 8724, 8738, 8745, 8758, 8761, 8767-8772, and 8840 to distinguish breast cancer from normal tissue.

[0024] In one embodiment, the signature comprises at least one sequence with identifiers selected from the group consisting of SEQ ID NOs: 12462, 12463, 12464, 12465, 12466, 12467, 12468, 12469, 12470, 12471, 12472, 12473, 12474, 12475, 12476, 12477, 12478, 12479, 12480, 12481, 12482, 12483, 12484, 12485, 12486, 12487, 12488, 12489, 12490, 12492, 12493, 12494, 12495, 12496, 12497, 12498, 12499, 12500, 12501, 12502, 12503, 12504, 12505, 12506, 12507, 12508, 12509, 12510, 12511, 12512, 12513, 12514, 12515, 12516, 12517, 12518, 12519, 12520, 12522, 12523, 12524, 12525, 12526, 12527, 12529, 12530, 12531, 12532, 12533, 12534, 12536, 12537, 12538, 12540, 12541, 12542, 12543, 12544, 12545, 12546, 12547, 12548, 12549, 12550, 12551, 12552, 12553, 12554, 12555, 12556, 12557, 12558, 12559, 12560, 12561, 12562, 12563, 12564, 12565, 12566, 12567, 12568, 12569, 12570, 12572, 12573, 12574, 12575, 12576, 12577, 12578, 12580, 12581, 12582, 12584, 12585, 12586, 12587, 12588, 12589, 12590, 12591, 12592, 12593, 12594, 12595, 12596, 12597, 12598, 12599, 12600, 12601, 12602, 12603, 12604, 12607, 12608, 12609, 12614, 12615, 12616, 12617, 12618, 12619, 12620, 12621, 12622, 12623, 12624, 12625, 12626, 12627, 12628, 12629, 12631, 12632, 12633, 12634, 12635, 12636, 12637, 12638, 12639, 12640, 12641, 12642, 12643, 12645, 12647, 12648, 12649, 12652, 12653, 12654, 12655, 12657, 12658, 12659, 12660, 12661, 12663, 12664, 12665, 12666, 12667, 12668, 12669, 12670, 12671, 12672, 12674, 12677, 12678, 12679, 12680, 12682, 12684, 12685, 12686, 12687, 12688, 12689, 12690, 12691, 12692, 12693, 12694, 12695, 12696, 12697, 12698, 12699, 12700, 12703, 12704, 12705, 12706, 12708, 12710, 12711, 12712, 12713, 12714, 12715, 12716, 12717, 12718, 12719, 12720, 12721, 12724, 12726, 12727, 12728, 12729, 12730, 12731, 12732, 12733, 12734, 12736, 12738, 12739, 12740, 12741, 12742, 12743, 12744, 12745, 12746, 12747, 12749, 12750, 12751, 12754, 12756, 12758, 12760, 12761, 12763, 12764, 12765, 12766, 12767, 12768, 12769, 12770, 12771, 12773, 12774, 12776, 12777, 12779, 12780, 12781, 12782, 12783, 12785, 12786, 12788, 12789, 12790, 12791, 12792, 12795, 12799, 12800, 12801, 12802, 12803, 12804, 12805, 12806, 12807, 12809, 12811, 12812, 12813, 12814, 12815, 12817, 12818, 12819, 12820, 12821, 12824, 12825, 12826, 12827, 12828, 12829, 12831, 12832, 12833, 12834, 12835, 12836, 12837, 12838, 12840, 12841, 12842, 12843, 12844, 12846, 12847, 12848, 12849, 12850, 12851, 12852, 12853, 12854, 12855, 12856, 12857, 12858, 12859, 12860, 12861, 12864, 12865, 12867, 12868, 12869, 12870, 12871, 12872, 12873, 12874, 12875, 12876, 12877, 12878, 12879, 12880, 12881, 12882, 12883, 12884, 12885, 12886, 12887, 12888, 12889, 12890, 12891, 12892, 12893, 12894, 12895, 12896, 12897, 12899, 12900, 12901, 12902, 12903, 12904, 12905, 12906, 12907, 12909, 12910, 12911, 12912, 12913, 12914, 12916, 12918, 12919, 12920, 12922, 12923, 12924, 12925, 12926, 12927, 12928, 12929, 12930, 12931, 12932, 12933, 12934, 12935, 12936, 12937, 12938, 12939, 12940, 12941, 12942, 12943, 12944, 12946, 12947, 12948, 12949, 12950, 12951, 12954, 12955, 12956, 12957, 12958, 12959, 12960, 12961, 12962, 12963, 12965, 12966, 12967, 12968, 12969, 12970, 12971, 12972, 12973, 12974, 12975, 12978, 12979, 12980, 12981, 12982, 12983, 12984, 12985, 12986, 12987, 12988, 12990, 12991, 12992, 12993, 12994, 12996, 12997, 12998, 12999, 13000, 13001, 13002, 13003, 13004, 13005, 13006, 13007, 13008, 13009, 13011, 13012, 13013, 13014, 13016, 13017, 13018, 13019, 13020, 13021, 13022, 13023, 13024, 13025, 13028, 13029, 13030, 13031, 13033, 13034, 13035, 13036, 13037, 13038, 13039, 13040, 13044, 13045, 13046, 13047, 13049, 13050, 13051, 13052, 13053, 13054, 13055, 13056, 13057, 13058, 13059, 13061, 13063, 13065, 13066, 13067, 13068, 13069, 13070, 13071, 13072, 13073, 13074, 13075, 13076, 13077, 13078, 13079, 13080, 13081, 13082, 13083, 13084, 13085, 13086, 13087, 13088, 13089, 13090, 13091, 13092, 13093, 13094, 13095, 13096, 13097, 13098, 13100, 13101, 13102, 13103, 13104, 13105, 13106, 13107, 13110, 13112, 13113, 13114, 13117, 13118, 13119, 13120, 13121, 13122, 13123, 13124, 13125, 13127, 13128, 13129, 13130, 13131, 13132, 13133, 13134, 13135, 13136, 13137, 13138, 13139, 13140, 13141, 13142, 13143, 13145, 13146, 13148, 13149, 13150, 13151, 13152, 13153, 13154, 13155, 13157, 13158, 13159, 13160, 13161, 13162, 13163, 13164, 13165, 13166, 13167, 13168, 13169, 13170, 13171, 13174, 13175, 13177, 13178, 13179, 13181, 13182, 13183, 13184, 13185, 13186, 13187, 13189, 13190, 13191, 13193, 13195, 13196, 13198, 13199, 13200, 13201, 13202, 13203, 13204, 13205, 13206, 13207, 13208, 13209, 13210, 13211, 13212, 13213, 13214, 13215, 13216, 13217, 13218, 13219, 13221, 13222, 13223, 13225, 13228, 13230, 13231, 13232, 13233, 13234, 13236, 13237, 13238, 13239, 13240, 13241, 13242, 13243, 13245, 13246, 13247, 13248, 13249, 13250, 13251, 13252, 13253, 13255, 13256, 13257, 13258, 13259, 13260, 13261, 13262, 13263, 13264, 13268, 13269, 13270, 13271, 13273, 13274, 13275, 13276, 13277, 13278, 13279, 13280, 13281, 13283, 13285, 13286, 13287, 13288, 13289, 13290, 13292, 13293, 13294, 13295, 13296, 13297, 13298, 13299, 13300, 13301, 13302, 13303, 13304, 13306, 13309, 13310, 13312, 13313, 13314, 13315, 13316, 13317, 13318, 13319, 13320, 13323, 13324, 13325, 13326, 13327, 13328, 13329, 13330, 13331, 13332, 13333, 13334, 13335, 13336, 13337, 13338, 13339, 13340, 13341, 13342, 13343, 13345, 13346, 13347, 13348, 13349, 13350, 13351, 13352, 13353, 13354, 13355, 13357, 13358, 13359, 13360, 13361, 13362, 13363, 13364, 13365, 13366, 13367, 13369, 13370, 13371, 13372, 13373, 13374, 13375, 13376, 13377, 13378, 13379, 13380, 13381, 13382, 13383, 13384, 13385, 13386, 13387, 13388, 13389, 13390, 13391, 13392, 13393, 13394, 13395, 13396, 13397, 13398, 13399, 13400, 13401, 13402, 13403, 13404, 13405, 13406, 13407, 13408, 13409, 13410, 13411, 13412, 13413, 13414, 13415, 13416, 13417, 13421, 13422, 13424, 13426, 13427, 13428, 13429, 13430, 13431, 13432, 13433, 13434, 13436, 13437, 13438, 13439, 13440, 13441, 13442, 13443, 13445, 13446, 13447, 13448, 13449, 13450, 13452, 13453, 13454, 13455, 13456, 13457, 13458, 13459, 13460, 13461, 13462, 13463, 13464, 13465, 13466, 13467, 13468, 13469, 13470, 13471, 13472, 13473, 13474, 13475, 13476, 13477, 13478, 13479, 13480, 13481, 13482, 13484, 13485, 13486, 13488, 13489, 13491, 13492, 13493, 13494, 13495, 13496, 13498, 13500, 13501, 13503, 13504, 13505, 13506, 13507, 13508, 13509, 13510, 13511, 13512, 13513, 13514, 13516, 13517, 13519, 13520, 13522, 13523, 13524, 13525, 13528, 13529, 13530, 13531, 13532, 13533, 13534, 13535, 13536, 13537, 13538, 13539, 13540, 13541, 13542, 13543, 13544, 13545, 13546, 13547, 13548, 13550, 13551, 13552, 13553, 13554, 13556, 13557, 13558, 13559, 13560, 13561, 13562, 13563, 13567, 13568, 13569, 13570, 13571, 13572, 13573, 13574, 13576, 13577, 13578, 13579, 13580, 13581, 13582, 13583, 13584, 13585, 13586, 13587, 13588, 13589, 13590, 13591, 13592, 13593, 13594, 13595, 13596, 13597, 13598, 13599, 13600, 13601, 13602, 13603, 13604, 13605, 13606, 13607, 13608, 13609, 13610, 13611, 13612, 13613, 13614, 13615, 13616, 13617, 13619, 13620, 13621, 13622, 13623, 13624, 13626, 13627, 13628, 13629, 13632, 13633, 13634, 13635, 13636, 13637, 13638, 13639, 13640, 13641, 13642, 13643, 13644, 13645, 13646, 13647, 13648, 13649, 13650, 13651, 13654, 13655, 13656, 13657, 13658, 13659, 13660, 13661, 13662, 13663, 13664, 13665, 13666, 13667, 13668, 13669, 13670, 13671, 13672, 13673, 13674, 13675, 13676, 13677, 13678, 13679, 13680, 13681, 13682, 13683, 13684, 13685, 13687, 13688, 13690, 13691, 13693, 13695, 13696, 13697, 13699, 13700, 13702, 13703, 13704, 13706, 13707, 13708, 13709, 13710, 13711, 13712, 13713, 13714, 13716, 13717, 13718, 13719, 13720, 13721, 13722, 13723, 13724, 13725, 13726, 13727, 13728, 13729, 13730, 13731, 13732, 13733, 13734, 13735, 13737, 13738, 13739, 13740, 13741, 13742, 13743, 13744, 13745, 13746, 13747, 13748, 13749, 13750, 13751, 13752, 13754, 13755, 13756, 13757, 13758, 13759, 13760, 13762, 13763, 13764, 13765, 13766, 13767, 13768, 13769, 13770, 13771, 13772, 13774, 13775, 13776, 13777, 13778, 13779, 13780, 13781, 13782, 13783, 13784, 13785, 13786, 13787, 13788, 13789, 13790, 13792, 13793, 13794, 13795, 13796, 13799, 13801, 13802, 13803, 13804, 13806, 13807, 13808, 13809, 13810, 13811, 13812, 13813, 13815, 13816, 13817, 13818, 13819, 13820, 13821, 13822, 13823, 13824, 13825, 13826, 13827, 13828, 13829, 13830, 13831, 13833, 13834, 13835, 13836, 13837, 13838, 13839, 13841, 13842, 13843, 13844, 13845, 13846, 13849, 13850, 13851, 13852, 13853, 13854, 13855, 13856, 13857, 13858, 13859, 13860, 13861, 13862, 13863, 13864, 13865, 13866, 13868, 13869, 13870, 13871, 13873, 13874, 13875, 13876, 13878, 13879, 13880, 13881, 13882, 13884, 13885, 13887, 13888, 13889, 13890, 13893, 13895, 13896, 13897, 13898, 13899, 13900, 13901, 13902, 13903, 13904, 13905, 13906, 13908, 13909, 13910, 13911, 13912, 13914, 13915, 13916, 13917, 13919, 13920, 13921, 13922, 13923, 13924, 13925, 13926, 13928, 13929, 13930, 13931, 13932, 13933, 13934, 13935, 13936, 13937, 13938, 13939, 13940, 13941, 13942, 13944, 13945, 13946, 13948, 13950, 13952, 13953, 13954, 13955, 13956, 13960, 13961, 13962, 13963, 13964, 13965, 13966, 13967, 13968, 13970, 13971, 13972, 13973, 13974, 13975, 13976, 13977, 13978, 13979, 13980, 13982, 13983, 13984, 13985, 13986, 13987, 13988, 13989, 13990, 13991, 13992, 13993, 13994, 13995, 13996, 13997, 13998, 13999, 14000, 14001, 14002, 14003, 14004, 14005, 14006, 14007, 14008, 14010, 14011, 14012, 14013, 14014, 14015, 14016, 14017, 14018, 14019, 14020, 14021, 14022, 14023, 14024, 14025, 14026, 14027, 14028, 14030, 14031, 14032, 14034, 14035, 14037, 14038, 14039, 14040, 14041, 14042, 14043, 14044, 14045, 14046, 14047, 14048, 14049, 14050, 14051, 14052, 14053, 14055, 14059, 14060, 14061, 14062, 14064, 14065, 14067, 14068, 14069, 14070, 14071, 14072, 14073, 14074, 14075, 14076, 14077, 14078, 14079, 14080, 14082, 14084, 14085, 14086, 14088, 14089, 14090, 14092, 14093, 14095, 14096, 14097, 14098, 14099, 14100, 14103, 14104, 14105, 14108, 14109, 14110, 14111, 14112, 14113, 14116, 14117, 14118, 14119, 14121, 14122, 14123, 14124, 14125, 14126, 14127, 14128, 14129, 14130, 14131, 14132, 14133, 14135, 14136, 14137, 14139, 14141, 14142, 14143, 14144, 14145, 14146, 14147, 14148, 14151, 14152, 14153, 14154, 14155, 14156, 14157, 14158, 14159, 14160, 14161, 14162, 14163, 14166, 14167, 14168, 14169, 14170, 14171, 14172, 14173, 14175, 14176, 14177, 14178, 14179, 14180, 14181, 14182, 14183, 14185, 14186, 14187, 14188, 14190, 14191, 14192, 14193, 14194, 14195, 14197, 14198, 14199, 14201, 14204, 14205, 14207, 14208, 14212, 14213, 14215, 14216, 14217, 14218, 14219, 14222, 14223, 14224, 14225, 14226, 14227, 14228, 14229, 14230, 14231, 14232, 14233, 14234, 14235, 14236, 14237, 14238, 14239, 14240, 14241, 14242, 14243, 14244, 14245, 14246, 14247, 14248, 14249, 14250, 14251, 14252, 14253, 14254, 14255, 14256, 14257, 14258, 14259, 14260, 14261, 14262, 14263, 14265, 14266, 14267, 14268, 14271, 14273, 14274, 14276, 14280, 14281, 14282, 14283, 14284, 14285, 14287, 14288, 14290, 14292, 14293, 14294, 14295, 14296, 14297, 14298, 14299, 14300, 14301, 14302, 14303, 14304, 14305, 14306, 14307, 14308, 14309, 14310, 14311, 14313, 14314, 14315, 14316, 14317, 14320, 14321, 14322, 14323, 14324, 14325, 14326, 14328, 14329, 14330, 14331, 14332, 14333, 14334, 14335, 14336, 14338, 14339, 14340, 14342, 14343, 14344, 14346, 14347, 14348, 14349, 14350, 14351, 14353, 14354, 14355, 14356, 14357, 14358, 14359, 14360, 14361, 14363, 14365, 14366, 14367, 14368, 14369, 14370, 14371, 14372, 14373, 14374, 14375, 14376, 14377, 14378, 14379, 14380, 14382, 14383, 14384, 14385, 14386, 14389, 14390, 14391, 14392, 14393, 14394, 14395, 14396, 14397, 14399, 14400, 14401, 14402, 14403, 14404, 14405, 14406, 14407, 14408, 14409, 14410, 14411, 14412, 14413, 14415, 14416, 14417, 14418, 14419, 14420, 14421, 14422, 14424, 14427, 14428, 14429, 14430, 14432, 14434, 14435, 14436, 14437, 14438, 14440, 14441, 14442, 14443, 14444, 14445, 14446, 14447, 14448, 14450, 14451, 14452, 14453, 14454, 14455, 14456, 14457, 14458, 14459, 14460, 14461, 14463, 14465, 14467, 14469, 14470, 14471, 14473, 14475 to distinguish chronic lymphocytic leukemia from normal B-cells.

[0025] In one embodiment, the signature comprises at least one sequence with identifiers selected from the group consisting of SEQ ID NOs: 24995-24996, 25025, 25031, 25033, 25087-25091, 25093-25094, 25128, 25150, 25161-25162, 25165, 25182, 25219-25220, 25230, 25277-25278, 25284, 25316, 25356-25357, 25359-25360, 25363-25364, 25397-25398, 25415, 25424, 25432, 25480, 25484-25486, 25498-25499, 25505, 25524, 25550-25552, 25570, 25580, 25583, 25609-25610, 25619, 25646-25647, 25685-25687, 25691, 25714, 25720, 25727-25728, 25731, 25741, 25746-25747, 25846-25847, 25868, 25882, 25904, 25908-25912, and 25914-25915 to distinguish B-cells from breast cells.

[0026] In one embodiment, the signature comprises at least one sequence with identifiers selected from the group consisting of SEQ ID NOs: 24880-24883, 24896-24897, 24959-24963, 24965, 24973, 25006, 25027, 25052, 25054, 25102-25103, 25110-25111, 25118, 25123, 25150, 25152-25153, 25183-25184, 25188, 25198, 25202, 25204-25206, 25210, 25212-25214, 25224-25225, 25245, 25252-25254, 25257, 25259-25261, 25270, 25273, 25286, 25294, 25296, 25313-25314, 25334, 25416, 25425, 25449-25450, 25454, 25476-25478, 25583, 25609-25612, 25665, 25667, 25705, 25714, 25786, 25894, and 25896-25897 to distinguish B-cells from white people from B-cells from black people.

[0027] In one embodiment, the signature comprises at least one sequence with identifiers selected from the group consisting of SEQ ID NO: 24881, 24926, 24952, 24981, 24990, 24995, 24998, 25010, 25047, 25051, 25075, 25101-25102, 2511 25111, 25118, 25121, 25149, 25211, 25218, 25238, 25309, 25359, 25373, 25376, 25386-25387, 25402, 25410, 25415-25416, 25420-25421, 25468, 25474, 25476, 25484-25487, 25493, 25524, 25536, 25560, 25596, 25604, 25620, 25631, 25651, 25662, 25664, 25714, 25723, 25803, 25829, 25850-25851, 25886-25887, 25898, 25902-25903, 25905, 25914, 25921, 25923, 25937 to distinguish B-cells from men from B-cells from women.

[0028] In one embodiment, the signature comprises at least one sequence with identifiers selected from the group consisting of SEQ ID NOs: 36100, 36101, 36105, 36107, 36111, 36112, 36114, 36115, 36116, 36119, 36120, 36121, 36122, 36123, 36139, 36143, 36146, 36147, 36148, 36149, 36155, 36156, 36157, 36163, 36171, 36173, 36176, 36177, 36178, 36179, 36180, 36181, 36182, 36183, 36188, 36189, 36194, 36197, 36200, 36203, 36204, 36215, 36217, 36218, 36219, 36222, 36223, 36227, 36228, 36230, 36231, 36234, 36238, 36239, 36240, 36241, 36242, 36243, 36246, 36248, 36252, 36254, 36262, 36265, 36266, 36269, 36270, 36271, 36272, 36273, 36276, 36278, 36279, 36282, 36285, 36287, 36288, 36289, 36293, 36294, 36295, 36296, 36297, 36298, 36299, 36303, 36304, 36305, 36306, 36307, 36308, 36313, 36319, 36320, 36322, 36323, 36326, 36327, 36331, 36332, 36333, 36335, 36336, 36338, 36339, 36341, 36342, 36344, 36347, 36355, 36356, 36357, 36372, 36373, 36374, 36375, 36376, 36378, 36381, 36384, 36387, 36391, 36392, 36395, 36397, 36399, 36400, 36401, 36405, 36406, 36408, 36409, 36428, 36429, 36430, 36431, 36432, 36433, 36435, 36436, 36437, 36444, 36450, 36451, 36452, 36453, 36455, 36456, 36457, 36460, 36461, 36462, 36463, 36464, 36465, 36466, 36467, 36468, 36469, 36470, 36471, 36472, 36478, 36485, 36490, 36491, 36498, 36499, 36504, 36505, 36506, 36507, 36508, 36509, 36510, 36511, 36512, 36513, 36517, 36520, 36521, 36523, 36524, 36529, 36530, 36533, 36534, 36535, 36538, 36539, 36541, 36542, 36543, 36544, 36545, 36546, 36547, 36550, 36553, 36554, 36561, 36562, 36572, 36573, 36574, 36575, 36578, 36579, 36580, 36581, 36582, 36584, 36586, 36589, 36590, 36591, 36593, 36594, 36597, 36599, 36600, 36601, 36607, 36608, 36609, 36610, 36611, 36612, 36614, 36615, 36616, 36617, 36618, 36619, 36620, 36621, 36627, 36628, 36629, 36637, 36638, 36639, 36640, 36641, 36642, 36643, 36644, 36645, 36646, 36647, 36649, 36650, 36658, 36665, 36669, 36670, 36671, 36673, 36674, 36675, 36676, 36677, 36678, 36679, 36680, 36682, 36683, 36684, 36689, 36690, 36691, 36692, 36693, 36694, 36695, 36696, 36697, 36698, 36701, 36702, 36703, 36705, 36706, 36707, 36708, 36709, 36710, 36711, 36712, 36714, 36715, 36716, 36718, 36719, 36720, 36721, 36722, 36726, 36727, 36728, 36729, 36730, 36731, 36732, 36733, 36734, 36735, 36738, 36739, 36741, 36742, 36744, 36745, 36746, 36747, 36749, 36751, 36754, 36755, 36756, 36757, 36759, 36760, 36761, 36762, 36763, 36764, 36765, 36768, 36769, 36770, 36771, 36772, 36775, 36776, 36777, 36778, 36788, 36789, 36793, 36794, 36796, 36797, 36798, 36799, 36800, 36803, 36805, 36806, 36809, 36810, 36812, 36814, 36817, 36825, 36826, 36827, 36829, 36830, 36831, 36832, 36834, 36835, 36838, 36839, 36841, 36844, 36846, 36848, 36849, 36851, 36854, 36855, 36857, 36859, 36860, 36861, 36862, 36863, 36864, 36868, 36869, 36871, 36872, 36877, 36878, 36879, 36880, 36881, 36883, 36884, 36885, 36886, 36887, 36889, 36890, 36891, 36892, 36895, 36897, 36901, 36902, 36903, 36904, 36905, 36907, 36909, 36910, 36911, 36913, 36914, 36915, 36916, 36917, 36918, 36919, 36925, 36931, 36938, 36939, 36941, 36942, 36945, 36946, 36948, 36952, 36953, 36955, 36956, 36957, 36958, 36961, 36963, 36964, 36965, 36967, 36968, 36973, 36976, 36977, 36978, 36979, 36980, 36981, 36982, 36983, 36985, 36988, 36989, 36990, 36991, 36992, 36997, 36998, 36999, 37001, 37004, 37005, 37008, 37009, 37012, 37013, 37014, 37021, 37022, 37023, 37024, 37025, 37026, 37029, 37032, 37033, 37036, 37039, 37044, 37046, 37048, 37049, 37050, 37051, 37054, 37055, 37056, 37057, 37058, 37059, 37060, 37063, 37065, 37066, 37075, 37077, 37078, 37079, 37080, 37081, 37083, 37087, 37088, 37089, 37090, 37091, 37094, 37095, 37099, 37100, 37101, 37110, 37115, 37116, 37117, 37119, 37120, 37121, 37123, 37124, 37125, 37127, 37132, 37133, 37134, 37135, 37137, 37138, 37139, 37141, 37142, 37143, 37144, 37145, 37146, 37149, 37150, 37151, 37152, 37155, 37157, 37160, 37161, 37162, 37163, 37164, 37165, 37166, 37167, 37168, 37169, 37171, 37174, 37175, 37177, 37178, 37181, 37182, 37183, 37184, 37185, 37187, 37193, 37194, 37195, 37196, 37197, 37198, 37199, 37201, 37202, 37203, 37206, 37207, 37208, 37209, 37211, 37213, 37214, 37216, 37217, 37226, 37227, 37228, 37229, 37230, 37231, 37234, 37235, 37237, 37244, 37245, 37247, 37248, 37249, 37251, 37253, 37254, 37255, 37261, 37262, 37265, 37271, 37272, 37273, 37274, 37278, 37279, 37283, 37303, 37304, 37305, 37306, 37307, 37308, 37312, 37316, 37319, 37321, 37323, 37324, 37325, 37326, 37327, 37334, 37335, 37336, 37337, 37338, 37339, 37340, 37341, 37342, 37348, 37356, 37363, 37365, 37368, 37369, 37370, 37372, 37374, 37375, 37376, 37382, 37383, 37385, 37386, 37388, 37391, 37394, 37395, 37398, 37400, 37401, 37402, 37403, 37404, 37405, 37407, 37408, 37410, 37419, 37420, 37422, 37423, 37424, 37425, 37426, 37429, 37430, 37431, 37432, 37433, 37445, 37446, 37448, 37449, 37453, 37454, 37456, 37461, 37462, 37463, 37464, and 37466 to distinguish normal pancreas from pancreatic cancer.

[0029] In one embodiment, the signature comprises at least one sequence with identifiers selected from the group consisting of SEQ ID NOs: 51377-51378, 51406, 51438, 51496, 51565, 51691, 51699, 51736-51737, 51745, and 51759 to distinguish platelets from people with a propensity to clot vs. platelets from people with a propensity to hemorrhage.

[0030] In one embodiment, the signature comprises at least one sequence with identifiers selected from the group consisting of SEQ ID NOs: 42434, 42520, 42537, 42577, 42751, 42979, 43019, 43090, 43128, 43156, 43310, 43352, 43398, 43426, 43437 to distinguish normal prostate from prostate cancer.

[0031] In one embodiment, the step of characterizing the tRNA fragments comprises at least one assessment selected from the group consisting of sequencing the tRNA fragments, measuring overall abundance of one of the tRNA fragments mapped to the genome, measuring a relative abundance of the one tRNA fragment to a reference, assessing a length of the one tRNA fragment, identifying starting and ending points of the one tRNA fragment, identifying genomic origin of the one tRNA fragment, and identifying a terminal modification of the one tRNA fragment. In another embodiment, the step of characterizing the mapped RNA fragments comprises at least one assessment selected from the group consisting of identifying one or more of the mapped RNA fragments in a population, measuring an overall abundance of one or more of the mapped RNA fragments, measuring a relative abundance of one or more of the mapped RNA fragments to a reference, assessing a length of one or more of the mapped RNA fragments, identifying starting and ending points of one or more of the mapped RNA fragments, identifying genomic origin of one or more of the mapped RNA fragments, and identifying a terminal modification of one or more of the mapped RNA fragments.

[0032] In one embodiment, the disease or condition, disease recurrence, or disease progression is selected from the group consisting of a cancer, and genetically predisposed disease or condition.

[0033] In another embodiment, the tRNA genomic loci comprise mitochondrial tRNA sequences from the mitochondrial genome, nuclear tRNA sequences from the nuclear genome, and mitochondria tRNA sequences from the nuclear genome. In another embodiment, the mapped RNA fragments post-transcriptionally modified comprises at least one modified with a CCA trinucleotide at a 3′ end.

### BRIEF DESCRIPTION OF THE DRAWINGS

[0034] FIG. 1 is an illustration showing the typical tRNA cloverleaf secondary structure and the five categories of tRNA fragments that are known currently as a result of the discovery that is discussed herein. In practice, a typical tRNA may produce more than just 11 distinct fragments or fewer.

[0035] FIG. 2 shows breast cancer (BRCA) subgroups and receptor expressions. In HER2 negative Luminal-type, the level of Ki67, an indicator of cell proliferation rate, is used to further classify Luminal A (low level) and Luminal B (high level).

[0036] FIGS. 3A-3D are graphs showing atypical tRNA fragment lengths in the 452 analyzed lymphoblastoid cell line (LCL) samples. Shown are the length distributions for all fragments supported by reads that land solely in the tRNA space and can be positioned anywhere along the length of a mature tRNA. FIG. 3A shows the length distribution for internal tRNA fragments (i-tRFs) only. FIG. 3B shows the length distribution for “+1” tRNA fragments only. FIG. 3C shows the length distribution for “CCA-ending” tRNA fragments. FIG. 3D shows the length distribution for all these tRNA fragments combined. See also text for a detailed explanation of these three shown regions. Error bars capture standard error across the 452 samples.

[0037] FIGS. 4A-4D are graphs showing atypical tRNA fragment lengths in the 311 analyzed breast samples from The Cancer Genome Atlas repository. Shown are the length distributions for all fragments supported by reads that land solely in the tRNA space and can be positioned anywhere along the length of a mature tRNA. FIG. 4A shows the length distribution for internal tRNA fragments (i-tRFs) only. FIG. 4B shows the length distribution for “+1” tRNA fragments only. FIG. 4C shows the length distribution for “CCA-ending” tRNA fragments. FIG. 4D shows the length distribution for all these tRNA fragments combined. Error bars capture standard error across the 311 samples. Note the right most label of the X-axis: it was labeled in such a way to indicate the possibility that some of the observed 30-mers have arisen from longer length fragments, as discussed elsewhere herein.

[0038] FIGS. 5A-5B are 3D graphs showing the distribution of starting position and lengths for internal tRNA fragments (i-tRFs), their span and lengths in the LCL (FIG. 5A) and BRCA (FIG. 5B) datasets. The positions are numbered with reference to the +1 position of the mature tRNA. The representative positions for the D- and T-loops as well as for the anticodon loop are highlighted with green boxes. The coloring of each bar is proportional to the relative abundance of each length of the fragments starting at that specific position as indicated by the respective color-key below each graph. The thickness of the projections on the right wall of the graph is proportional to the number of fragments spanning the specific position. For the LCL dataset, only the top 50% most expressed internal fragments are shown.

[0039] FIGS. 6A-6B are graphs showing the relative abundance of fragments from nuclear and mitochondrial tRNAs as a function of their length for the LCLs samples (FIG. 6A) and the BRCA samples (FIG. 6B). Error bars capture the standard error across the analyzed samples. The statistically significant difference in abundance (P-value; Mann-Whitney U-test) is indicated for two cases in each dataset.

[0040] FIGS. 7A-7B show heatmaps of the Pearson correlation coefficient for statistically significant fragments. FIG. 7A shows tRNA fragments that arise from the nuclear AspGTC (trna10 on chromosome 12) anticodon in the LCL dataset. FIG. 7B shows tRNA fragments that arise from the mitochondrial GluTTC anticodon in the BRCA dataset. Several mini-clusters are evident in each heatmap: however, there was correlation across the mini-clusters of the same tRNA (see text for a detailed explanation). Orange-colored labels mark the i-tRFs.

[0041] FIGS. 8A-8D show atypical tRNA fragment lengths in normal and tumor breast samples. FIG. 8A shows length distribution for the internal tRNA fragments (i-tRFs). FIG. 8B shows length distributions for fragments in the “+1” region. FIG. 8C shows length distribution for “CCA-ending” fragments. FIG. 8D shows length distributions for the all the fragments. Green curve: normal sample fragments. Red curve: tumor sample fragments.

[0042] FIGS. 9A-9B show common tRNA fragments have tissue- and tissue-state specific abundances. FIG. 9A shows that a principal components analysis (PCA) of the abundance levels of the ˜200 tRNA fragments, which were common to female LCL samples and to normal breast samples, can distinguish between the two groups. FIG. 9B shows that a partial Least Squares-Discriminant Analysis (PLS-DA) of the abundance levels of the 437 tRNA fragments found in normal breast and breast cancer samples can distinguish between the two groups.

[0043] FIGS. 10A-10C show race-dependent expression profiles for statistically significant tRNA fragments. FIG. 10A shows a PCA of fragment expression in LCLs. The CEU population (white) is represented by the yellow points whereas the YRI population (black) is represented by the magenta points. Both men and women from each of the two populations were included in this analysis. FIG. 10B shows a PLS-DA on the tRNA fragments in the 78 triple-negative-breast-cancer samples. The yellow points represent white patients where the magenta dots represent black patients. FIG. 10C shows relative abundances of CCA-ending 18-mers and 33-mers for the CEU and YRI samples. The differences for both 18-mers and 36-mers were statistically significant as indicated by the asterisks (p-val ≤10⁻⁴ using Student's t-test). Error bars capture the standard error of the relative abundance of each type of fragments for n=93 (CEU) and n=95 (YRI) samples.

[0044] FIGS. 11A-11C show differences in the abundance of tRNA fragments between men and women. FIG. 11A shows a detail from the length distributions for YRI men and women for internal fragments. FIG. 11B shows a detail from the length distributions for TSI men and women for CCA-ending fragments. FIG. 11C shows a PLS-DA graph of TSI men and TSI women showing a trend for gender-specific tRNA profiles.

[0045] FIGS. 12A-12D show differences in the tRNA profiles among normal and different disease states. FIG. 12A shows a PLS-DA for the discrimination of normal against triple positive samples. FIG. 12B shows a PLS-DA graph for the discrimination of normal against triple negative samples. FIG. 12C shows PLS-DA discriminated between the triple positive and triple negative subtypes. FIG. 12D shows that the fragments that were important for each separation can be used to identify disease subtype-specific abundance changes. The number of fragments with higher (T) or lower (1) expression is indicated next to each arrow. Each arrow represents a comparison between two groups: the start of the arrow indicates the “control” group compared to which the fragments in the “target” group (end of arrow) have altered expression.

[0046] FIG. 13 is a graph showing differential Ago-loading of tRNA fragments in three breast cancer model cell lines using only fragments with lengths <=30 nucleotides (nts). Note the difference in lengths of the Ago-loaded fragments across the three cell lines.

[0047] FIGS. 14A-14B are graphs showing the experimental verification of internal fragments in breast samples and breast model cell lines. (FIG. 14A): Quantification of the i-tRF from the nuclear AspGTC anticodon in 11 breast tumor and 11 adjacent normal breast samples. N.D.: not determined; in this case, the fragment's expression was too low to be detected. Asterisks indicate statistically significant changes in abundance (p-val <0.01; Student's t-test) between the tumor and adjacent normal tissue of the same subject. In all cases there were n=3 repetitions of the experiments. Error bars show the standard deviation. (FIG. 14B): Quantification of the i-tRF from the nuclear GlyTCC anticodon in eight different normal and breast cancer cell lines using an assay based on the FIREPLEX® (Firefly BioWorks, Boston, MA) method. Column height represents the average expression value and error bars the standard deviation of at least 10 independent measurements in each sample. On the right hand-side of (FIG. 14A) and (FIG. 14B), the tested fragment is highlighted. The anticodon triplet is indicated by the black rectangle. The genomic coordinates of the depicted AspGTC tRNA are from 125424264 to 125424193, inclusive, on chromosome 12, whereas for the depicted GlyTCC tRNA are from 8124866 to 8124937, inclusive, on chromosome 17. ER: Estrogen Receptor, PR: Progesterone Receptor, HER2: Human Epidermal Growth Factor Receptor 2.

[0048] FIG. 15 is a graph showing nuclear AspGTC tRNA as an example of the diversity of fragments that can arise from the same tRNA sequence.

### DETAILED DESCRIPTION OF THE INVENTION

### Definitions

[0049] Unless defined otherwise, all technical and scientific terms used herein have the same meaning as commonly understood by one of ordinary skill in the art to which the invention pertains. Although any methods and materials similar or equivalent to those described herein may be used in the practice for testing of the present invention, the preferred materials and methods are described herein. In describing and claiming the present invention, the following terminology will be used.

[0050] It is also to be understood that the terminology used herein is for the purpose of describing particular embodiments only, and is not intended to be limiting.

[0051] As used herein, the articles “a” and “an” are used to refer to one or to more than one (i.e., to at least one) of the grammatical object of the article. By way of example, “an element” means one element or more than one element.

[0052] As used herein when referring to a measurable value such as an amount, a temporal duration, and the like, the term “about” is meant to encompass variations of ±20% or within 10%, 9%, 8%, 7%, 6%, 5%, 4%, 3%, 2%, 1%, 0.5%, 0.1%, 0.05%, or 0.01% of the specified value, as such variations are appropriate to perform the disclosed methods. Unless otherwise clear from context, all numerical values provided herein are modified by the term about.

[0053] “About” as used herein when referring to a measurable value such as an amount, a temporal duration, and the like, is meant to encompass variations of 20% or ±10%, more preferably ±5%, even more preferably ±1%, and still more preferably +0.1% from the specified value, as such variations are appropriate to perform the disclosed methods.

[0054] By “alteration” is meant a change (increase or decrease) in the expression levels or activity of a gene or polypeptide as detected by standard art known methods such as those described herein. As used herein, an alteration includes a 10% change in expression levels, preferably a 25% change, more preferably a 40% change, and most preferably a 50% or greater change in expression levels.

[0055] By “complementary sequence” or “complement” is meant a nucleic acid base sequence that can form a double-stranded structure by matching base pairs to another polynucleotide sequence. Base pairing occurs through the formation of hydrogen bonds, which may be Watson-Crick, Hoogsteen or reversed Hoogsteen hydrogen bonding, between complementary nucleobases. For example, adenine and thymine are complementary nucleobases that pair through the formation of hydrogen bonds.

[0056] In this disclosure, “comprises,” “comprising,” “containing” and “having” and the like can have the meaning ascribed to them in U.S. Patent law and can mean “includes,” “including,” and the like; “consisting essentially of” or “consists essentially” likewise has the meaning ascribed in U.S. Patent law and the term is open-ended, allowing for the presence of more than that which is recited so long as basic or novel characteristics of that which is recited is not changed by the presence of more than that which is recited, but excludes prior art embodiments.

[0057] The term “cancer” as used herein is defined as disease characterized by the rapid and uncontrolled growth of aberrant cells. Cancer cells can spread locally or through the bloodstream and lymphatic system to other parts of the body. Examples of various cancers include but are not limited to, breast cancer, prostate cancer, ovarian cancer, cervical cancer, skin cancer, pancreatic cancer, colorectal cancer, renal cancer, liver cancer, brain cancer, lymphoma, leukemia, lung cancer and the like.

[0058] “Detect” refers to identifying the presence, absence or amount of the biomarker to be detected.

[0059] The phrase “differentially present” refers to differences in the quantity and/or the frequency of a biomarker present in a sample taken from subjects having a disease as compared to a control subject. A biomarker can be differentially present in terms of quantity, frequency or both. A polypeptide or polynucleotide is differentially present between two samples if the amount or frequency of the polypeptide or polynucleotide in one sample is statistically significantly different (either higher or lower) from the amount of the polypeptide or polynucleotide in the other sample, such as reference or control samples. Alternatively or additionally, a polypeptide or polynucleotide is differentially present between two sets of samples if the amount or frequency of the polypeptide or polynucleotide in samples of the first set, such as diseased subjects' samples, is statistically significantly (either higher or lower) from the amount of the polypeptide or polynucleotide in samples of the second set, such reference or control samples. A biomarker that is present in one sample, but undetectable in another sample is differentially present.

[0060] A “disease” is a state of health of an animal wherein the animal cannot maintain homeostasis, and wherein if the disease is not ameliorated then the animal's health continues to deteriorate. A “disease subtype” is a state of health of an animal wherein animals with the disease manifest different clinical features or symptoms. For example, Alzheimer's disease includes at least three subtypes, inflammatory, non-inflammatory, and cortical.

[0061] A “disorder” as used herein, is used interchangeably with “condition,” and refers to a state of health in an animal, wherein the animal is able to maintain homeostasis, but in which the animal's state of health is less favorable than it would be in the absence of the disorder. Left untreated, a disorder does not necessarily cause a further decrease in the animal's state of health.

[0062] By “effective amount” is meant the amount required to reduce or improve at least one symptom of a disease relative to an untreated patient. The effective amount of active compound(s) used to practice the present invention for therapeutic treatment of a disease varies depending upon the manner of administration, the age, body weight, and general health of the subject.

[0063] As used herein “endogenous” refers to any material from or produced inside an organism, cell, tissue or system.

[0064] The term “expression” as used herein is defined as the transcription and/or translation of a particular nucleotide sequence driven by its promoter.

[0065] By “fragment” is meant a portion of a polynucleotide or nucleic acid molecule.

[0066] This portion contains, preferably, at least 10%, 20%, 30%, 40%, 50%, 60%, 70%, 80%, 90%, 91%, 92%, 93%, 94%, 95%, 96%, 97%, 98%, or 99% of the entire length of the reference nucleic acids. A fragment may contain 10, 20, 30, 40, 50, 60, 70, 80, 90, or 100, 200, 300, 400, 500, 600, 700, 800, 900, 1000, 1500, 2000 or 2500 (and any integer value in between) nucleotides. The fragment, as applied to a nucleic acid molecule, refers to a subsequence of a larger nucleic acid. The fragment can be an autonomous and functional molecule. A fragment may contain modifications at neither, one or both of its termini. A modification can include but is not limited to a phosphate, a cyclic phosphate, a hydroxyl, and an amino acid. A “fragment” of a nucleic acid molecule may be at least about 15 nucleotides in length; for example, at least about 50 nucleotides to about 100 nucleotides; at least about 100 to about 500 nucleotides, at least about 500 to about 1000 nucleotides, at least about 1000 nucleotides to about 1500 nucleotides; or about 1500 nucleotides to about 2500 nucleotides; or about 2500 nucleotides (and any integer value in between).

[0067] “Similar” refers to the sequence similarity or sequence identity between two polypeptides or between two nucleic acid molecules. When a position in both of the two compared sequences is occupied by the same base or amino acid monomer subunit, e.g., if a position in each of two DNA molecules is occupied by adenine, then the molecules are similar at that position. The percent of similarity between two sequences is a function of the number of matching or similar positions shared by the two sequences divided by the number of positions compared×100. For example, if 6 of 10 of the positions in two sequences are matched or similar then the two sequences are 60% similar. By way of example, the DNA sequences ATTGCC and TATGGC share 50% similarity. Generally, a comparison is made when two sequences are aligned in a way that maximizes their similarity.

[0068] As used herein, the term “inhibit” is meant to refer to a decrease in biological state. For example, the term “inhibit” may be construed to refer to the ability to negatively regulate the expression, stability or activity of a protein, including but not limited to transcription of a protein mRNA, stability of a protein mRNA, translation of a protein mRNA, stability of a protein polypeptide, a protein post-translational modifications, a protein activity, a protein signaling pathway or any combination thereof.

[0069] Further, the term “inhibit” may be construed to refer to the ability to negatively affect the expression, stability or activity of a miRNA, wherein such inhibition of the miRNA may result in the modulation of a gene, a protein's mRNA abundance, the stability of a protein's mRNA, the translation of a protein's mRNA, the stability of a protein, the post-translational modifications of a protein, and/or the activity of a protein.

[0070] “Instructional material,” as that term is used herein, includes a publication, a recording, a diagram, or any other medium of expression that may be used to communicate the usefulness of the compounds of the invention. In some instances, the instructional material may be part of a kit useful for effecting alleviating or treating the various diseases or conditions recited herein. Optionally, or alternately, the instructional material may describe one or more methods of alleviating the diseases or conditions in a cell or a tissue of a mammal. The instructional material of the kit may, for example, be affixed to a container that contains the compounds of the invention or be shipped together with a container that contains the compounds. Alternatively, the instructional material may be shipped separately from the container with the intention that the recipient uses the instructional material and the compound cooperatively. For example, the instructional material is for use of a kit; instructions for use of the compound; or instructions for use of a formulation of the compound.

[0071] “Isolated” means altered or removed from the natural state. For example, a nucleic acid or a peptide naturally present in a living animal is not “isolated,” but the same nucleic acid or peptide partially or completely separated from the coexisting materials of its natural state is “isolated.” An isolated nucleic acid or protein can exist in substantially purified form, or can exist in a non-native environment such as, for example, a host cell.

[0072] The term “mitochondrial tRNAs” is used to refer to tRNAs encoded in the mitochondrial genome. The term “nuclear tRNAs” is used to refer to tRNAs encoded in the nuclear genome. The distinction of the origin of the DNA precursor template may not be entirely accurate from a biological standpoint: as it was recently reported, the nuclear genome contains numerous full-length lookalikes of mitochondrial tRNAs. It is currently unclear whether these nuclear lookalike sequences are transcribed or whether they act as tRNAs; thus, special consideration is needed to discard sequencing reads that may map to those lookalikes and to the tRNA space, which are defined elsewhere herein.

[0073] Unless otherwise specified, a “nucleotide sequence encoding an amino acid sequence” includes all nucleotide sequences that are degenerate versions of each other and that encode the same amino acid sequence. The phrase nucleotide sequence that encodes a protein or an RNA may also include introns to the extent that the nucleotide sequence encoding the protein may in some version contain an intron(s).

[0074] By “isolated polynucleotide” is meant a nucleic acid (e.g., a DNA or an RNA) that is free of the genes which, in the naturally-occurring genome of the organism from which the nucleic acid molecule of the invention is derived, flank the gene. The term therefore includes, for example, a recombinant DNA that is incorporated into a vector; into an autonomously replicating plasmid or virus; or into the genomic DNA of a prokaryote or eukaryote; or that exists as a separate molecule (for example, a tRNA, cDNA or a genomic or cDNA fragment produced by PCR or restriction endonuclease digestion) independent of other sequences. In addition, the term includes an RNA molecule that is transcribed from a DNA molecule, as well as a recombinant DNA that is part of a hybrid gene encoding additional polypeptide sequence.

[0075] The term “oligonucleotide panel” or “panel of oligonucleotides” refers to a collection of one or more oligonucleotides that may be used to identify DNA (e.g. genomic segments comprising a specific sequence, DNA sequences bound by particular protein, etc.) or RNA (e.g. mRNAs, microRNAs, tRNAs, etc.) through hybridization of complementary regions between the oligonucleotides and the DNA or RNA. If the sought molecule is RNA, it is commonly converted to DNA through a reverse transcription step). The oligonucleotides may include complementary sequences to known DNA or known RNA sequences. The oligonucleotides may be engineered to be between about 5 nucleotides to about 40 nucleotides, or about 5 nucleotides to about 30 nucleotides, or about 5 nucleotides to about 20 nucleotides, or about 5 nucleotides to about 15 nucleotides in length. The term “oligonucleotide panel” or “panel of oligonucleotides” could also refer to a system and accompanying collection of reagents that, in addition to being able to hybridize to molecules containing a complementary sequence, can also ensure that the identified molecule's 3′ terminus matches precisely the 3′ terminus of the sought molecule, or that the identified molecule's 5′ terminus matches precisely the 5′ terminus of the sought molecule, or both: this ability is unlike what can be achieved by conventional assays such as e.g. Affymetrix chips and methods (e.g. “dumbbell-PCR”) and systems (e.g. the Fireplex system of Firefly BioWorks) that can achieve this are now beginning to be available.

[0076] The term “operably linked” refers to functional linkage between a regulatory sequence and a heterologous nucleic acid sequence resulting in expression of the latter. For example, a first nucleic acid sequence is operably linked with a second nucleic acid sequence when the first nucleic acid sequence is placed in a functional relationship with the second nucleic acid sequence. For instance, a promoter is operably linked to a coding sequence if the promoter affects the transcription or expression of the coding sequence. Generally, operably linked DNA sequences are contiguous and, where necessary to join two protein coding regions, in the same reading frame.

[0077] The term “overexpressed” tumor antigen or “overexpression” of the tumor antigen is intended to indicate an abnormally high level of expression of the tumor antigen in a cell from a disease area like a solid tumor within a specific tissue or organ of the patient relative to the level of expression in a normal cell from that tissue or organ. Patients having solid tumors or a hematological malignancy characterized by overexpression of the tumor antigen can be determined by standard assays known in the art. The term “underexpressed” tumor antigen or “underexpression” of the tumor antigen is completely analogous.

[0078] The term “overexpressed” tumor promoter or “overexpression” of the tumor promoter is intended to indicate an abnormally high level of expression of the tumor promoter RNA or protein in a cell from a disease area like a solid tumor within a specific tissue or organ of the patient relative to the level of expression in a normal cell from that tissue or organ. Patients having solid tumors or a hematological malignancy characterized by overexpression of the tumor promoter can be determined by standard assays known in the art. The term “underexpressed” tumor promoter or “underexpression” of the tumor promoter is completely analogous.

[0079] The term “overexpressed” tumor suppressor or “overexpression” of the tumor suppressor is intended to indicate an abnormally high level of expression of the tumor suppressor RNA or protein in a cell from a specific area within a specific tissue or organ of an individual relative to the level of expression under typical circumstances in a cell from that tissue or organ. Individuals having characteristic overexpression of the tumor suppressor can be determined by standard assays known in the art. The term “underexpressed” tumor suppressor or “underexpression” of the tumor suppressor is completely analogous.

[0080] The terms “patient,” “subject,” “individual,” and the like are used interchangeably herein, and refer to a human or non-human mammal, or cells thereof whether in vitro or in situ, amenable to the methods described herein. Non-human mammals include, for example, livestock and pets, such as ovine, bovine, porcine, canine, feline and murine mammals. The term “subject” is intended to include living organisms in which an immune response can be elicited (e.g., mammals). Examples of subjects include humans, dogs, cats, mice, rats, and transgenic species thereof. In certain non-limiting embodiments, the patient, subject or individual is a human.

[0081] The term “polynucleotide” as used herein is defined as a chain of nucleotides. Furthermore, nucleic acids are polymers of nucleotides. Thus, nucleic acids and polynucleotides as used herein are interchangeable. One skilled in the art has the general knowledge that nucleic acids are polynucleotides, which may be hydrolyzed into the monomeric “nucleotides.” The monomeric nucleotides may be hydrolyzed into nucleosides. As used herein polynucleotides include, but are not limited to, all nucleic acid sequences that are obtained by any means available in the art, including, without limitation, recombinant means, i.e., the cloning of nucleic acid sequences from a recombinant library or a cell genome, using ordinary cloning technology and PCR™, and the like, and by synthetic means. The following abbreviations for the commonly occurring nucleic acid bases are used. “A” refers to adenosine, “C” refers to cytosine, “G” refers to guanosine, “T” refers to thymidine, and “U” refers to uridine. The term “RNA” as used herein is defined as ribonucleic acid. The term “recombinant DNA” as used herein is defined as DNA produced by joining pieces of DNA from different sources.

[0082] As used herein, the terms “prevent,” “preventing,” “prevention,” and the like refer to reducing the probability of developing a disease or condition in a subject, who does not have, but is at risk of or susceptible to developing a disease or condition.

[0083] As used herein, the term “promoter/regulatory sequence” means a nucleic acid sequence which is required for expression of a gene product operably linked to the promoter/regulatory sequence. In some instances, this sequence may be the core promoter sequence and in other instances, this sequence may also include an enhancer sequence and other regulatory elements which are required for expression of the gene product. The promoter/regulatory sequence may, for example, be one which expresses the gene product in a tissue specific manner.

[0084] The terms “purified,” or “biologically pure” refer to material that is free to varying degrees from components which normally accompany it as found in its native state. “Purify” denotes a degree of separation that is higher than isolation. A “purified” or “biologically pure” protein is sufficiently free of other materials such that any impurities do not materially affect the biological properties of the protein or cause other adverse consequences. That is, a nucleic acid or peptide of this invention is purified if it is substantially free of cellular material, viral material, or culture medium when produced by recombinant DNA techniques, or chemical precursors or other chemicals when chemically synthesized. Purity and homogeneity are typically determined using analytical chemistry techniques, for example, polyacrylamide gel electrophoresis or high performance liquid chromatography. The term “purified” can denote that a nucleic acid or protein gives rise to essentially one band in an electrophoretic gel. For a protein that can be subjected to modifications, for example, phosphorylation or glycosylation, different modifications may give rise to different isolated proteins, which can be separately purified.

[0085] A “recyclable tRNA” refers to a tRNA that is aminoacylated and can be repeatedly reaminoacylated with an amino acid (e.g., an unnatural amino acid) for the incorporation of the amino acid (e.g., the unnatural amino acid) into one or more polypeptide chains during translation.

[0086] By “reduces” or “decreases” is meant a negative alteration of at least 10%, 25%, 50%, 75%, or 100%.

[0087] By “reference” is meant a standard or control. A “reference” is also a defined standard or control used as a basis for comparison.

[0088] As used herein, “relative abundance” refers to the ratio of the quantities of two or more molecules of interest (e.g. tRNAs, tRNA fragments, miRNAs, etc.) present in a sample. The relative abundance of two or more molecules of interest in a given sample may differ from the relative abundance of the same two or more molecules in a second sample.

[0089] As used herein, “sample” or “biological sample” refers to anything, which may contain the biomarker (e.g., polypeptide, polynucleotide, or fragment thereof) for which a biomarker assay is desired. The sample may be a biological sample, such as a biological fluid or a biological tissue. In one embodiment, a biological sample is a tissue sample including pulmonary vascular cells. Such a sample may include diverse cells, proteins, and genetic material. Examples of biological tissues also include organs, tumors, lymph nodes, arteries and individual cell(s). Examples of biological fluids include urine, blood, plasma, serum, saliva, semen, stool, sputum, cerebral spinal fluid, tears, mucus, amniotic fluid or the like.

[0090] As used herein, the term “sensitivity” is the percentage of biomarker-detected subjects with a particular disease.

[0091] As used herein, “sample” or “biological sample” refers to anything, which may contain the biomarker (e.g., polypeptide, polynucleotide, or fragment thereof) for which a biomarker assay is desired. The sample may be a biological sample, such as a biological fluid or a biological tissue. In one embodiment, a biological sample is a tissue sample including pulmonary vascular cells. Such a sample may include diverse cells, proteins, and genetic material. Examples of biological tissues also include organs, tumors, lymph nodes, arteries and individual cell(s). Examples of biological fluids include urine, blood, plasma, serum, saliva, semen, stool, sputum, cerebral spinal fluid, tears, mucus, amniotic fluid or the like.

[0092] As used herein, the term “sensitivity” is the percentage of biomarker-detected subjects with a particular disease.

[0093] The terms “short RNA profile” or “RNA profile” or “tRNA fragment profile” are used interchangeably and refer to a genetic makeup of the RNA molecules that are present in a sample, such as a cell, tissue, or subject. Optionally, the abundance of an RNA molecule that is part of an RNA profile may also be sought. Optionally, other attributes of an RNA molecule that is part of an RNA profile may also be sought and include but are not limited to a molecule's location within the genomic locus of origin, the molecule's starting point, the molecule's ending point, the molecule's length, the identity of the molecule's terminal modifications, etc. The RNA molecules that can be used to form such a profile can be miRNAs, mRNAs, tRNAs, tRNA fragments, etc. as well as combinations thereof.

[0094] The term “signature” or “RNA signature” as used herein refers to a subset of an RNA profile and comprises the identity of one or more molecules that are selected from an RNA profile and optionally one or more of the attributes of the one or more molecules that are selected from the RNA profile.

[0095] By “substantially identical” is meant a polypeptide or nucleic acid molecule exhibiting at least 50% identity to a reference amino acid sequence (for example, any one of the amino acid sequences described herein) or nucleic acid sequence (for example, any one of the nucleic acid sequences described herein). Preferably, such a sequence is at least 60%, more preferably 80% or 85%, and more preferably 90%, 95% or even 99% identical at the amino acid level or nucleic acid to the sequence used for comparison.

[0096] A “suppressor tRNA” refers to a tRNA that alters the reading of a messenger RNA (mRNA) in a given translation system, e.g., by providing a mechanism for incorporating an amino acid into a polypeptide chain in response to a selector codon. For example, a suppressor tRNA can read through, e.g., a stop codon, a four base codon, a rare codon, and/or the like

[0097] The term “therapeutically effective amount” refers to the amount of the subject compound that will elicit the biological or medical response of a tissue, system, or subject that is being sought by the researcher, veterinarian, medical doctor or other clinician. The term “therapeutically effective amount” includes that amount of a compound that, when administered, is sufficient to prevent development of, or alleviate to some extent, one or more of the signs or symptoms of the disease or condition being treated. The therapeutically effective amount will vary depending on the compound, the disease and its severity and the age, weight, etc., of the subject to be treated.

[0098] The term “therapeutic” as used herein means a treatment and/or prophylaxis. A therapeutic effect is obtained by suppression, remission, or eradication of a disease state.

[0099] As used herein, the terms “treat,” treating,” “treatment,” and the like refer to reducing or improving a disease or condition and/or symptom associated therewith. It will be appreciated that, although not precluded, treating a disease or condition does not require that the disease, condition or symptoms associated therewith be completely ameliorated or eliminated.

[0100] The terms “tRNA fragment” or “tRF” (occasionally also referred to by us as “kuroko-RNA” or “kRNA”) are all used to refer to functional short non-coding RNAs generated from a tRNA locus. tRNA fragments have lengths that range from 10 to 40 or more nucleotides. Five structural categories of tRNA fragments include, the 5′-tRFs, the i-tRFs, the 3′-tRFs, the 5′-halves and the 3′-halves. The term “tRNA locus” refers to the genomic region that includes a tRNA gene and gives rise to the tRNA transcript. A given tRNA locus can produce zero, one, or more molecules belonging to zero, one, or more of the five structural categories.

[0101] Ranges provided herein are understood to be shorthand for all of the values within the range. For example, a range of 1 to 50 is understood to include any number, combination of numbers, or sub-range from the group consisting 1, 2, 3, 4, 5, 6, 7, 8, 9, 10, 11, 12, 13, 14, 15, 16, 17, 18, 19, 20, 21, 22, 23, 24, 25, 26, 27, 28, 29, 30, 31, 32, 33, 34, 35, 36, 37, 38, 39, 40, 41, 42, 43, 44, 45, 46, 47, 48, 49, or 50.

[0102] The recitation of an embodiment for a variable or aspect herein includes that embodiment as any single embodiment or in combination with any other embodiments or portions thereof.

[0103] Any compositions or methods provided herein can be combined with one or more of any of the other compositions and methods provided herein.

### Description

[0104] The present invention includes methods and compositions of analyzing tRNA fragments. tRNAs are ancient non-coding RNAs (ncRNAs) that have been heretofore understood to be molecules with well-defined roles confined to the translation of messenger RNA (mRNA) into amino acid sequences. As such, tRNAs are present in archaea, bacteria, and eukaryotes. The conventional understanding had been that a genomic tRNA locus produces a single transcript that is processed to give rise to the mature tRNA. Described herein, tRNA loci also produce fragments that are important novel regulators with roles in regulation, cellular physiology, post-transcriptional regulation, etc. The specifics of how tRNAs and tRFs effect these roles are currently understood poorly. The present invention utilizes tRNA fragment profiling to identify subjects in need of therapeutic intervention.

[0105] In one aspect, a method of identifying a subject in need of therapeutic intervention to treat a disease or disease progression comprising, isolating fragments of tRNAs from a cell obtained from the subject; characterizing the fragments of tRNA and their relative abundance in the cell to identify a signature, wherein when the signature is indicative of a diagnosis of the disease or of a disease subtype treatment of the subject is recommended.

[0106] In another aspect, a method of identifying a cell's tissue of origin to treat a disease or disease progression or disease recurrence in a subject in need thereof comprising, isolating fragments of tRNAs from a cell obtained from the subject characterizing the fragments of tRNA and their relative abundance in the cell to identify a signature, wherein the signature is indicative of the cell's tissue of origin, or the disease status of the tissue of origin; and providing a treatment regimen to the subject dependent on the cell's tissue of origin, or the disease status of the tissue of origin.

tRNA Fragments

[0107] Analysis of tRNA fragment profiles or signatures in one or more cells can lead to the discovery of tRNA signatures present in healthy cells or diseased cells. tRNA signatures of one or more cells, or a tissue may be used to identify a diseased cell, disease progression, or disease recurrence in a subject. Thus, the subject may be identified as in need of therapeutic intervention to delay the onset of, reduce, improve, and/or treat a disease or condition, such as breast cancer, in a subject in need thereof.

[0108] Also provided is a panel of engineered oligonucleotides comprising a mixture of oligonucleotides that are about 5 to about 15 nucleotides (nts) in length and capable of hybridizing tRNA fragments and/or tRNAs, wherein the tRNA fragments are generally at least 15 nts in length and the tRNAs are generally less than 80 nts in length. The panel may include one or more oligonucleotides that may be used to identify tRNA fragments or tRNAs through hybridization of complementary regions between the oligonucleotides and the tRNAs, or related techniques that are well known to those skilled in the art. The oligonucleotides may include complementary sequences to known tRNA sequences, such as tRNA fragments. The oligonucleotides may be engineered to be between about 5 nucleotides to about 40 nucleotides, or about 5 nucleotides to about 30 nucleotides, or about 5 nucleotides to about 20 nucleotides, or about 5 nucleotides to about 15 nucleotides in length. The panel may include engineered oligonucleotides that are specific to a cell type, disease type, disease subtype, stage of disease, a patient's gender, a patient's population of origin, a patient's race or other aspect that may differentiate tRNA fragment signatures. The kits and oligonucleotide panel may also be used to identify agents that modulate disease, or progression of disease, or disease recurrence, in patient samples, and/or in in vitro or in vivo animal models for the disease at hand.

[0109] In another aspect, the invention includes a method for identifying tRNA fragments from sequenced reads, typically obtained through next generation sequencing approaches. The method comprises the steps of defining tRNA loci; mapping the sequenced reads to at least one tRNA genomic locus comprising disregarding map locations that differ from the tRNA fragments by at least an insertion, deletion, or replacement of a nucleotide, excluding tRNA fragments that map to locations outside of the tRNA loci and disregarding sequenced reads with tRNA intron sequences; mapping sequenced reads that are post-transcriptionally modified; and characterizing the remaining sequenced reads.

[0110] Known tRNA loci include the mitochondrial genome loci of mitochondrial tRNA sequences, the nuclear genome loci of nuclear tRNA sequences, and the nuclear genome loci of some mitochondrial tRNA sequences. Currently, there are the 22 known human mitochondrial tRNA sequences in the mitochondrial genome. There are 610 (508 true tRNAs and 102 pseudo-tRNAs) nuclear tRNA sequences in the nuclear genome, as per the public genomic tRNA database “GtRNAdb.” Selenocysteine tRNAs, tRNAs with undetermined anticodon identity, and tRNAs mapping to contigs that were not part of the human chromosome assembly are excluded from the collection of tRNA sequences considered here. Including the selenocysteine tRNAs, tRNAs with undetermined anticodon identity, and tRNAs mapping to contigs not part of the human chromosome assembly would render 625 nuclear tRNA sequences. There are also eight intervals in the nuclear genome, chr1:+:566062-566129, chr1:+:568843-568912, chr1:−:564879-564950, chr1:−:566137-566205, chr14:+:32954252-32954320, chr1:−:566207-566279, chr1:−: 567997-568065, and, chr5:−:93905172-93905240, that correspond to identical instances of seven mitochondrial tRNAs TrpTCA, LysTTT, GlnTTG, AlaTGC (×2), AsnGTT, SerTGA, and, GluTTC, respectively.

[0111] The sequenced reads are further mapped to at least one tRNA genomic locus. Sequenced reads that differ from the map location by at least an insertion, deletion, or replacement of a nucleotide are disregarded. Thusly, for examples, two distinct 5′-tRF molecules that would otherwise be indistinguishable can then be differentiated from one another and properly mapped. Also, the misidentification of the genomic origin of a sequenced read that would lead to erroneous results can be avoided.

[0112] The human genome is also riddled with many nuclear and mitochondrial tRNA-lookalikes, as well as partial tRNA sequences. Excluding sequenced reads that map to locations outside of the tRNA loci prevents the tRNA-like fragments from being included and considered further.

[0113] Also disregarding sequenced reads with tRNA intron sequences improves identification of bonafide tRNA fragments. Many tRNAs include intronic sequences. Sequenced reads that include only exonic sequences of an intron-containing tRNA are included. Sequenced reads that straddle a tRNA's exon-exon junction are further examined for possible mapping outside tRNA loci: any such reads that map outside tRNA loci are discarded to avoid erroneous results.

[0114] tRNA fragments are also prone to post-transcriptional modifications. Mature tRNAs are commonly modified with a CCA trinucleotide added to the 3′ end. Without explicit provisions to include these tRNA fragments, they would be inadvertently excluded from consideration by lacking an exact genomic map location. However, simply allowing an adequate number of mismatches (e.g. replacements) during mapping the nontemplated CCA is not adequate. Prior to mapping, a modification to the genome is created where the trinucleotide CCA is used to replace the three genomic nucleotides immediately downstream of each of the reference mature tRNAs. Special care must be taken. Otherwise, a careless replacement of the genomic sequence downstream from a tRNA by the CCA trinucleotide could inadvertently “erase” part of an adjacent tRNA's sequence as is the case, for example, for some tRNAs in the mitochondrial genome.

[0115] The tRNA fragments thusly identified are characterized. The tRNA fragments can be assessed for one or more of, sequence of the tRNA fragments, the overall abundance of the tRNA fragments based on the number of sequenced reads that mapped to tRNA loci, the relative abundance of a tRNA fragment to a reference, the length of a tRNA fragment, the starting and ending points of a tRNA fragment, the genomic origin of a tRNA fragment, the terminal modifications of a tRNA fragment, and other analyses known in the art.

[0116] In another aspect, a system is described herein to perform the method of identifying tRNA fragments. In one embodiment, the system comprises a processor that aligns sequenced reads with a genome and processes the alignment. The processor of the system processes the alignments and disregards data from the alignments when the mapped sequenced reads differ from the genome by at least an insertion, deletion, or replacement of a nucleotide; the mapped sequenced reads align to locations in the genome that reside outside of designated tRNA loci; the sequenced reads map to locations in the genome that reside both inside and outside of designated tRNA loci; or the mapped sequenced reads span intron sequences of tRNAs. The portion of the algorithm that is run by the processor of the system and which processes the alignments may also have provisions to include sequenced reads that correspond to post-transcriptionally modified molecules and would otherwise not align perfectly with the genome.

### Diagnostics

[0117] Samples from subjects suffering from a disease or a condition have a specific tRNA fragment profile in the cell or cells that are diseased, including metastastic cancer cells. Identifying the cellular origin or tissue origin of a cancer metastasis, or a propensity for a cell to metasize by identifying a tRNA fragment profile associated with the cellular origin or tissue origin or a propensity to metasize in a sample obtained from the subject allows the subject to undergo a recommended treatment. In one aspect, the invention includes a method of identifying a cell's tissue of origin to treat a disease or disease progression, or disease recurrence in a subject in need thereof comprising isolating fragments of tRNAs from a cell obtained from the subject; characterizing the fragments of tRNA, which can include assessing one or more of, overall abundance, relative abundance, length of the fragment, starting and ending points of the fragment, terminal modifications, etc., in the cell to identify a signature, wherein the signature is indicative of the cell's tissue of origin, and/or disease status of the tissue of origin; and providing a treatment regimen to the subject dependent on the cell's tissue of origin and/or disease status of the tissue of origin.

[0118] In another embodiment, characterizing the tRNA fragments that are present in the RNA profile can identify subjects in need of treatment.

[0119] In one embodiment, analyzing the length of tRNA fragments in a cell, tissue or body fluid is used to identify subjects in need of treatment. In a particular embodiment, a subset of tRNA fragments in breast tissue are analyzed as having a length of 19 nt or 20 nt. A predominance of 19 nt tRNA fragments in breast tissue is indicative of a breast tumor. In contrast, a predominance of 20 nt tRNA fragments in breast tissue is indicative of healthy breast tissue.

[0120] In another embodiment, analyzing the length of tRNA fragments in cell, tissue or body fluid is used to identify subjects with a disease subtype. In a particular embodiment, a subset of tRNA fragments in breast tumor tissue are analyzed as having a length of 16 nt, 17 nt, 26 nt, or 29 nt. A predominance of 16 nt and 17 nt tRNA fragments in breast tumor tissue is indicative of a triple negative breast cancer. A predominance of 17 nt and 29 nt tRNA fragments in breast tumor tissue is indicative of ER-positive breast cancer. A predominance of 26 nt tRNA fragments in breast tumor tissue is indicative of HER2-positive breast cancer.

[0121] In yet another embodiment, the relative abundance of the tRNA fragments that are present in the RNA profile can identify subjects in need of treatment. In another approach, diagnostic methods are used to assess tRNA fragment profiles in a biological sample relative to a reference (e.g., tRNA fragment profile in a healthy cell or tissue or body fluid in a corresponding control sample). Examples of a body fluid may include, but are not limited to, amniotic fluid, aqueous humour and vitreous humour, bile, blood serum, breast milk, cerebrospinal fluid, cerumen, chyle, chyme, endolymph and perilymph, exudates, feces, female ejaculate, gastric acid, gastric juice, lymph, mucus, pericardial fluid, peritoneal fluid, pleural fluid, pus, rheum, saliva, sebum, serous fluid, semen, smegma, sputum, synovial fluid, sweat, tears, urine, vaginal secretion, and vomit.

[0122] In one embodiment, the sample, such as a cell or tissue or body fluid is obtained from the subject. In another embodiment, the cell or tissue or body fluid is isolated from the sample. In another embodiment, the cell or tissue is isolated from a body fluid. The sample may be a peripheral blood cell, a tumor cell, a circulating tumor cell, an exosome, a bone marrow cell, a breast cell, a lung cell, a pancreatic cell, or other cell of the body.

[0123] In another embodiment, a signature of tRNA fragments or a presence or absence of specific tRNA fragments are indicative a diagnosis of a disease or condition. In a particular embodiment, the methods or assays described herein can comprise analyzing the presence or absence or the signature of tRNA fragments to analyze brain can include, without limitations, at least one of the sequences with identifiers SEQ ID NOs: 1-1802.

[0124] In another embodiment, the methods or assays described herein can comprise analyzing the presence or absence or the signature of tRNA fragments to analyze breast tissue can include, without limitations, at least one of the sequences with identifiers SEQ ID NOs: 8538-8852.

[0125] In yet another embodiment, the methods or assays described herein can comprise analyzing the presence or absence or the signature of tRNA fragments to analyze blood cells can include, without limitations, at least one of the sequences with identifiers SEQ ID NOs: 12462-14475.

[0126] In still another embodiment, the methods or assays described herein can comprise analyzing the presence or absence or the signature of tRNA fragments to analyze blood cells can include, without limitations, at least one of the sequences with identifiers SEQ ID NOs: 24833-25945.

[0127] In another embodiment, the methods or assays described herein can comprise analyzing the presence or absence or the signature of tRNA fragments to analyze pancreatic tissue can include, without limitations, at least one of the sequences with identifiers SEQ ID NOs: 36100-37466.

[0128] In another embodiment, the methods or assays described herein can comprise analyzing the presence or absence or the signature of tRNA fragments to analyze prostate tissue can include, without limitations, at least one of the sequences with identifiers SEQ ID NOs: 42349-43721.

[0129] In another embodiment, the methods or assays described herein can comprise analyzing the presence or absence or the signature of tRNA fragments to analyze platelets can include, without limitations, at least one of the sequences with identifiers SEQ ID NOs: 51286-51793.

[0130] In one embodiment, the methods or assays described herein can comprise detecting the presence or absence of one or more tRNA fragments to distinguish Alzheimer's disease brain from normal brain can include, without limitations, at least one of the sequences with identifiers SEQ ID NOs: 11, 18, 19, 28, 31, 34, 43, 51, 59, 83, 189, 194, 209, 268, 305, 306, 307, 316, 320, 398, 404, 611, 632, 653, 696, 751, 768, 816, 817, 860, 869, 870, 871, 920, 921, 925, 951, 960, 967, 989, 1005, 1030, 1133, 1201, 1202, 1223, 1229, 1230, 1231, 1240, 1248, 1298, 1318, 1406, 1412, 1421, 1425, 1453, 1510, 1577, 1582, 1631, 1637, 1645, 1661, 1695, 1727, 1794, or any combinations comprising two or more of these sequences.

[0131] In another embodiment, the methods or assays described herein can comprise detecting the presence or absence of one or more tRNA fragments to distinguish triple negative breast cancer from HER2+ breast cancer can include, without limitations, at least one of the sequences with identifiers SEQ ID NO:8613 or SEQ ID NO: 8823 or a combination comprising these sequences.

[0132] In yet another embodiment, the methods or assays described herein can comprise detecting the presence or absence of one or more tRNA fragments to distinguish triple negative breast cancer from normal can include, without limitations, at least one of the sequences with identifiers SEQ ID NOs: 8542, 8543, 8566, 8579, 8582, 8587, 8589, 8590, 8594, 8671-8673, 8707, 8731, 8774-8778, 8803, 8827-8828, 8831-8832, 8837-8838, 8852, or any combinations comprising two or more of these sequences.

[0133] In still another embodiment, the methods or assays described herein can comprise detecting the presence or absence of one or more tRNA fragments distinguish triple positive breast cancer from normal can include, without limitations, at least one of the sequences with identifiers SEQ ID NOs: 8540, 8566, 8575, 8579, 8589-8590, 8593-8594, 8775-8776, 8803, 8827-8828, 8837-8838, 8852, or any combinations comprising two or more of these sequences.

[0134] In another embodiment, the methods or assays described herein can comprise detecting the presence or absence of one or more tRNA fragments to distinguish triple positive breast cancer from triple negative breast cancer can include, without limitations, at least one of the sequences with identifiers SEQ ID NOs: 8596, 8601, 8622, 8657, 8664, 8811, or any combinations comprising two or more of these sequences.

[0135] In yet another embodiment, the methods or assays described herein can comprise detecting the presence or absence of one or more tRNA fragments to distinguish breast cancer from normal tissue can include, without limitations, at least one of the sequences with identifiers SEQ ID NOs: 8582, 8599-8601, 8622-8623, 8634, 8657, 8663-8665, 8676, 8698, 8703-8706, 8718-8720, 8722, 8724, 8738, 8745, 8758, 8761, 8767-8772, 8840, or any combinations comprising two or more of these sequences.

[0136] In still another embodiment, the methods or assays described herein can comprise detecting the presence or absence of one or more tRNA fragments to distinguish chronic lymphocytic leukemia from normal B-cells can include, without limitations, at least one of the sequences with identifiers SEQ ID NOs: 12462, 12463, 12464, 12465, 12466, 12467, 12468, 12469, 12470, 12471, 12472, 12473, 12474, 12475, 12476, 12477, 12478, 12479, 12480, 12481, 12482, 12483, 12484, 12485, 12486, 12487, 12488, 12489, 12490, 12492, 12493, 12494, 12495, 12496, 12497, 12498, 12499, 12500, 12501, 12502, 12503, 12504, 12505, 12506, 12507, 12508, 12509, 12510, 12511, 12512, 12513, 12514, 12515, 12516, 12517, 12518, 12519, 12520, 12522, 12523, 12524, 12525, 12526, 12527, 12529, 12530, 12531, 12532, 12533, 12534, 12536, 12537, 12538, 12540, 12541, 12542, 12543, 12544, 12545, 12546, 12547, 12548, 12549, 12550, 12551, 12552, 12553, 12554, 12555, 12556, 12557, 12558, 12559, 12560, 12561, 12562, 12563, 12564, 12565, 12566, 12567, 12568, 12569, 12570, 12572, 12573, 12574, 12575, 12576, 12577, 12578, 12580, 12581, 12582, 12584, 12585, 12586, 12587, 12588, 12589, 12590, 12591, 12592, 12593, 12594, 12595, 12596, 12597, 12598, 12599, 12600, 12601, 12602, 12603, 12604, 12607, 12608, 12609, 12614, 12615, 12616, 12617, 12618, 12619, 12620, 12621, 12622, 12623, 12624, 12625, 12626, 12627, 12628, 12629, 12631, 12632, 12633, 12634, 12635, 12636, 12637, 12638, 12639, 12640, 12641, 12642, 12643, 12645, 12647, 12648, 12649, 12652, 12653, 12654, 12655, 12657, 12658, 12659, 12660, 12661, 12663, 12664, 12665, 12666, 12667, 12668, 12669, 12670, 12671, 12672, 12674, 12677, 12678, 12679, 12680, 12682, 12684, 12685, 12686, 12687, 12688, 12689, 12690, 12691, 12692, 12693, 12694, 12695, 12696, 12697, 12698, 12699, 12700, 12703, 12704, 12705, 12706, 12708, 12710, 12711, 12712, 12713, 12714, 12715, 12716, 12717, 12718, 12719, 12720, 12721, 12724, 12726, 12727, 12728, 12729, 12730, 12731, 12732, 12733, 12734, 12736, 12738, 12739, 12740, 12741, 12742, 12743, 12744, 12745, 12746, 12747, 12749, 12750, 12751, 12754, 12756, 12758, 12760, 12761, 12763, 12764, 12765, 12766, 12767, 12768, 12769, 12770, 12771, 12773, 12774, 12776, 12777, 12779, 12780, 12781, 12782, 12783, 12785, 12786, 12788, 12789, 12790, 12791, 12792, 12795, 12799, 12800, 12801, 12802, 12803, 12804, 12805, 12806, 12807, 12809, 12811, 12812, 12813, 12814, 12815, 12817, 12818, 12819, 12820, 12821, 12824, 12825, 12826, 12827, 12828, 12829, 12831, 12832, 12833, 12834, 12835, 12836, 12837, 12838, 12840, 12841, 12842, 12843, 12844, 12846, 12847, 12848, 12849, 12850, 12851, 12852, 12853, 12854, 12855, 12856, 12857, 12858, 12859, 12860, 12861, 12864, 12865, 12867, 12868, 12869, 12870, 12871, 12872, 12873, 12874, 12875, 12876, 12877, 12878, 12879, 12880, 12881, 12882, 12883, 12884, 12885, 12886, 12887, 12888, 12889, 12890, 12891, 12892, 12893, 12894, 12895, 12896, 12897, 12899, 12900, 12901, 12902, 12903, 12904, 12905, 12906, 12907, 12909, 12910, 12911, 12912, 12913, 12914, 12916, 12918, 12919, 12920, 12922, 12923, 12924, 12925, 12926, 12927, 12928, 12929, 12930, 12931, 12932, 12933, 12934, 12935, 12936, 12937, 12938, 12939, 12940, 12941, 12942, 12943, 12944, 12946, 12947, 12948, 12949, 12950, 12951, 12954, 12955, 12956, 12957, 12958, 12959, 12960, 12961, 12962, 12963, 12965, 12966, 12967, 12968, 12969, 12970, 12971, 12972, 12973, 12974, 12975, 12978, 12979, 12980, 12981, 12982, 12983, 12984, 12985, 12986, 12987, 12988, 12990, 12991, 12992, 12993, 12994, 12996, 12997, 12998, 12999, 13000, 13001, 13002, 13003, 13004, 13005, 13006, 13007, 13008, 13009, 13011, 13012, 13013, 13014, 13016, 13017, 13018, 13019, 13020, 13021, 13022, 13023, 13024, 13025, 13028, 13029, 13030, 13031, 13033, 13034, 13035, 13036, 13037, 13038, 13039, 13040, 13044, 13045, 13046, 13047, 13049, 13050, 13051, 13052, 13053, 13054, 13055, 13056, 13057, 13058, 13059, 13061, 13063, 13065, 13066, 13067, 13068, 13069, 13070, 13071, 13072, 13073, 13074, 13075, 13076, 13077, 13078, 13079, 13080, 13081, 13082, 13083, 13084, 13085, 13086, 13087, 13088, 13089, 13090, 13091, 13092, 13093, 13094, 13095, 13096, 13097, 13098, 13100, 13101, 13102, 13103, 13104, 13105, 13106, 13107, 13110, 13112, 13113, 13114, 13117, 13118, 13119, 13120, 13121, 13122, 13123, 13124, 13125, 13127, 13128, 13129, 13130, 13131, 13132, 13133, 13134, 13135, 13136, 13137, 13138, 13139, 13140, 13141, 13142, 13143, 13145, 13146, 13148, 13149, 13150, 13151, 13152, 13153, 13154, 13155, 13157, 13158, 13159, 13160, 13161, 13162, 13163, 13164, 13165, 13166, 13167, 13168, 13169, 13170, 13171, 13174, 13175, 13177, 13178, 13179, 13181, 13182, 13183, 13184, 13185, 13186, 13187, 13189, 13190, 13191, 13193, 13195, 13196, 13198, 13199, 13200, 13201, 13202, 13203, 13204, 13205, 13206, 13207, 13208, 13209, 13210, 13211, 13212, 13213, 13214, 13215, 13216, 13217, 13218, 13219, 13221, 13222, 13223, 13225, 13228, 13230, 13231, 13232, 13233, 13234, 13236, 13237, 13238, 13239, 13240, 13241, 13242, 13243, 13245, 13246, 13247, 13248, 13249, 13250, 13251, 13252, 13253, 13255, 13256, 13257, 13258, 13259, 13260, 13261, 13262, 13263, 13264, 13268, 13269, 13270, 13271, 13273, 13274, 13275, 13276, 13277, 13278, 13279, 13280, 13281, 13283, 13285, 13286, 13287, 13288, 13289, 13290, 13292, 13293, 13294, 13295, 13296, 13297, 13298, 13299, 13300, 13301, 13302, 13303, 13304, 13306, 13309, 13310, 13312, 13313, 13314, 13315, 13316, 13317, 13318, 13319, 13320, 13323, 13324, 13325, 13326, 13327, 13328, 13329, 13330, 13331, 13332, 13333, 13334, 13335, 13336, 13337, 13338, 13339, 13340, 13341, 13342, 13343, 13345, 13346, 13347, 13348, 13349, 13350, 13351, 13352, 13353, 13354, 13355, 13357, 13358, 13359, 13360, 13361, 13362, 13363, 13364, 13365, 13366, 13367, 13369, 13370, 13371, 13372, 13373, 13374, 13375, 13376, 13377, 13378, 13379, 13380, 13381, 13382, 13383, 13384, 13385, 13386, 13387, 13388, 13389, 13390, 13391, 13392, 13393, 13394, 13395, 13396, 13397, 13398, 13399, 13400, 13401, 13402, 13403, 13404, 13405, 13406, 13407, 13408, 13409, 13410, 13411, 13412, 13413, 13414, 13415, 13416, 13417, 13421, 13422, 13424, 13426, 13427, 13428, 13429, 13430, 13431, 13432, 13433, 13434, 13436, 13437, 13438, 13439, 13440, 13441, 13442, 13443, 13445, 13446, 13447, 13448, 13449, 13450, 13452, 13453, 13454, 13455, 13456, 13457, 13458, 13459, 13460, 13461, 13462, 13463, 13464, 13465, 13466, 13467, 13468, 13469, 13470, 13471, 13472, 13473, 13474, 13475, 13476, 13477, 13478, 13479, 13480, 13481, 13482, 13484, 13485, 13486, 13488, 13489, 13491, 13492, 13493, 13494, 13495, 13496, 13498, 13500, 13501, 13503, 13504, 13505, 13506, 13507, 13508, 13509, 13510, 13511, 13512, 13513, 13514, 13516, 13517, 13519, 13520, 13522, 13523, 13524, 13525, 13528, 13529, 13530, 13531, 13532, 13533, 13534, 13535, 13536, 13537, 13538, 13539, 13540, 13541, 13542, 13543, 13544, 13545, 13546, 13547, 13548, 13550, 13551, 13552, 13553, 13554, 13556, 13557, 13558, 13559, 13560, 13561, 13562, 13563, 13567, 13568, 13569, 13570, 13571, 13572, 13573, 13574, 13576, 13577, 13578, 13579, 13580, 13581, 13582, 13583, 13584, 13585, 13586, 13587, 13588, 13589, 13590, 13591, 13592, 13593, 13594, 13595, 13596, 13597, 13598, 13599, 13600, 13601, 13602, 13603, 13604, 13605, 13606, 13607, 13608, 13609, 13610, 13611, 13612, 13613, 13614, 13615, 13616, 13617, 13619, 13620, 13621, 13622, 13623, 13624, 13626, 13627, 13628, 13629, 13632, 13633, 13634, 13635, 13636, 13637, 13638, 13639, 13640, 13641, 13642, 13643, 13644, 13645, 13646, 13647, 13648, 13649, 13650, 13651, 13654, 13655, 13656, 13657, 13658, 13659, 13660, 13661, 13662, 13663, 13664, 13665, 13666, 13667, 13668, 13669, 13670, 13671, 13672, 13673, 13674, 13675, 13676, 13677, 13678, 13679, 13680, 13681, 13682, 13683, 13684, 13685, 13687, 13688, 13690, 13691, 13693, 13695, 13696, 13697, 13699, 13700, 13702, 13703, 13704, 13706, 13707, 13708, 13709, 13710, 13711, 13712, 13713, 13714, 13716, 13717, 13718, 13719, 13720, 13721, 13722, 13723, 13724, 13725, 13726, 13727, 13728, 13729, 13730, 13731, 13732, 13733, 13734, 13735, 13737, 13738, 13739, 13740, 13741, 13742, 13743, 13744, 13745, 13746, 13747, 13748, 13749, 13750, 13751, 13752, 13754, 13755, 13756, 13757, 13758, 13759, 13760, 13762, 13763, 13764, 13765, 13766, 13767, 13768, 13769, 13770, 13771, 13772, 13774, 13775, 13776, 13777, 13778, 13779, 13780, 13781, 13782, 13783, 13784, 13785, 13786, 13787, 13788, 13789, 13790, 13792, 13793, 13794, 13795, 13796, 13799, 13801, 13802, 13803, 13804, 13806, 13807, 13808, 13809, 13810, 13811, 13812, 13813, 13815, 13816, 13817, 13818, 13819, 13820, 13821, 13822, 13823, 13824, 13825, 13826, 13827, 13828, 13829, 13830, 13831, 13833, 13834, 13835, 13836, 13837, 13838, 13839, 13841, 13842, 13843, 13844, 13845, 13846, 13849, 13850, 13851, 13852, 13853, 13854, 13855, 13856, 13857, 13858, 13859, 13860, 13861, 13862, 13863, 13864, 13865, 13866, 13868, 13869, 13870, 13871, 13873, 13874, 13875, 13876, 13878, 13879, 13880, 13881, 13882, 13884, 13885, 13887, 13888, 13889, 13890, 13893, 13895, 13896, 13897, 13898, 13899, 13900, 13901, 13902, 13903, 13904, 13905, 13906, 13908, 13909, 13910, 13911, 13912, 13914, 13915, 13916, 13917, 13919, 13920, 13921, 13922, 13923, 13924, 13925, 13926, 13928, 13929, 13930, 13931, 13932, 13933, 13934, 13935, 13936, 13937, 13938, 13939, 13940, 13941, 13942, 13944, 13945, 13946, 13948, 13950, 13952, 13953, 13954, 13955, 13956, 13960, 13961, 13962, 13963, 13964, 13965, 13966, 13967, 13968, 13970, 13971, 13972, 13973, 13974, 13975, 13976, 13977, 13978, 13979, 13980, 13982, 13983, 13984, 13985, 13986, 13987, 13988, 13989, 13990, 13991, 13992, 13993, 13994, 13995, 13996, 13997, 13998, 13999, 14000, 14001, 14002, 14003, 14004, 14005, 14006, 14007, 14008, 14010, 14011, 14012, 14013, 14014, 14015, 14016, 14017, 14018, 14019, 14020, 14021, 14022, 14023, 14024, 14025, 14026, 14027, 14028, 14030, 14031, 14032, 14034, 14035, 14037, 14038, 14039, 14040, 14041, 14042, 14043, 14044, 14045, 14046, 14047, 14048, 14049, 14050, 14051, 14052, 14053, 14055, 14059, 14060, 14061, 14062, 14064, 14065, 14067, 14068, 14069, 14070, 14071, 14072, 14073, 14074, 14075, 14076, 14077, 14078, 14079, 14080, 14082, 14084, 14085, 14086, 14088, 14089, 14090, 14092, 14093, 14095, 14096, 14097, 14098, 14099, 14100, 14103, 14104, 14105, 14108, 14109, 14110, 14111, 14112, 14113, 14116, 14117, 14118, 14119, 14121, 14122, 14123, 14124, 14125, 14126, 14127, 14128, 14129, 14130, 14131, 14132, 14133, 14135, 14136, 14137, 14139, 14141, 14142, 14143, 14144, 14145, 14146, 14147, 14148, 14151, 14152, 14153, 14154, 14155, 14156, 14157, 14158, 14159, 14160, 14161, 14162, 14163, 14166, 14167, 14168, 14169, 14170, 14171, 14172, 14173, 14175, 14176, 14177, 14178, 14179, 14180, 14181, 14182, 14183, 14185, 14186, 14187, 14188, 14190, 14191, 14192, 14193, 14194, 14195, 14197, 14198, 14199, 14201, 14204, 14205, 14207, 14208, 14212, 14213, 14215, 14216, 14217, 14218, 14219, 14222, 14223, 14224, 14225, 14226, 14227, 14228, 14229, 14230, 14231, 14232, 14233, 14234, 14235, 14236, 14237, 14238, 14239, 14240, 14241, 14242, 14243, 14244, 14245, 14246, 14247, 14248, 14249, 14250, 14251, 14252, 14253, 14254, 14255, 14256, 14257, 14258, 14259, 14260, 14261, 14262, 14263, 14265, 14266, 14267, 14268, 14271, 14273, 14274, 14276, 14280, 14281, 14282, 14283, 14284, 14285, 14287, 14288, 14290, 14292, 14293, 14294, 14295, 14296, 14297, 14298, 14299, 14300, 14301, 14302, 14303, 14304, 14305, 14306, 14307, 14308, 14309, 14310, 14311, 14313, 14314, 14315, 14316, 14317, 14320, 14321, 14322, 14323, 14324, 14325, 14326, 14328, 14329, 14330, 14331, 14332, 14333, 14334, 14335, 14336, 14338, 14339, 14340, 14342, 14343, 14344, 14346, 14347, 14348, 14349, 14350, 14351, 14353, 14354, 14355, 14356, 14357, 14358, 14359, 14360, 14361, 14363, 14365, 14366, 14367, 14368, 14369, 14370, 14371, 14372, 14373, 14374, 14375, 14376, 14377, 14378, 14379, 14380, 14382, 14383, 14384, 14385, 14386, 14389, 14390, 14391, 14392, 14393, 14394, 14395, 14396, 14397, 14399, 14400, 14401, 14402, 14403, 14404, 14405, 14406, 14407, 14408, 14409, 14410, 14411, 14412, 14413, 14415, 14416, 14417, 14418, 14419, 14420, 14421, 14422, 14424, 14427, 14428, 14429, 14430, 14432, 14434, 14435, 14436, 14437, 14438, 14440, 14441, 14442, 14443, 14444, 14445, 14446, 14447, 14448, 14450, 14451, 14452, 14453, 14454, 14455, 14456, 14457, 14458, 14459, 14460, 14461, 14463, 14465, 14467, 14469, 14470, 14471, 14473, 14475, or any combinations comprising two or more of these sequences.

[0137] In another embodiment, the methods or assays described herein can comprise detecting the presence or absence of one or more tRNA fragments to distinguish B-cells from breast cells can include, without limitations, at least one of the sequences with identifiers SEQ ID NOs: 24995-24996, 25025, 25031, 25033, 25087-25091, 25093-25094, 25128, 25150, 25161-25162, 25165, 25182, 25219-25220, 25230, 25277-25278, 25284, 25316, 25356-25357, 25359-25360, 25363-25364, 25397-25398, 25415, 25424, 25432, 25480, 25484-25486, 25498-25499, 25505, 25524, 25550-25552, 25570, 25580, 25583, 25609-25610, 25619, 25646-25647, 25685-25687, 25691, 25714, 25720, 25727-25728, 25731, 25741, 25746-25747, 25846-25847, 25868, 25882, 25904, 25908-25912, 25914-25915, or any combinations comprising two or more of these sequences.

[0138] In yet another embodiment, the methods or assays described herein can comprise detecting the presence or absence of one or more tRNA fragments to distinguish B-cells from white people from B-cells from black people can include, without limitations, at least one of the sequences with identifiers SEQ ID NOs: 24880-24883, 24896-24897, 24959-24963, 24965, 24973, 25006, 25027, 25052, 25054, 25102-25103, 25110-25111, 25118, 25123, 25150, 25152-25153, 25183-25184, 25188, 25198, 25202, 25204-25206, 25210, 25212-25214, 25224-25225, 25245, 25252-25254, 25257, 25259-25261, 25270, 25273, 25286, 25294, 25296, 25313-25314, 25334, 25416, 25425, 25449-25450, 25454, 25476-25478, 25583, 25609-25612, 25665, 25667, 25705, 25714, 25786, 25894, 25896-25897, or any combinations comprising two or more of these sequences.

[0139] In still another embodiment, the methods or assays described herein can comprise detecting the presence or absence of one or more tRNA fragments to distinguish B-cells from men from B-cells from women can include, without limitations, at least one of the sequences with identifiers SEQ ID NO: 24881, 24926, 24952, 24981, 24990, 24995, 24998, 25010, 25047, 25051, 25075, 25101-25102, 2511 25111, 25118, 25121, 25149, 25211, 25218, 25238, 25309, 25359, 25373, 25376, 25386-25387, 25402, 25410, 25415-25416, 25420-25421, 25468, 25474, 25476, 25484-25487, 25493, 25524, 25536, 25560, 25596, 25604, 25620, 25631, 25651, 25662, 25664, 25714, 25723, 25803, 25829, 25850-25851, 25886-25887, 25898, 25902-25903, 25905, 25914, 25921, 25923, 25937, or any combinations comprising two or more of these sequences.

[0140] In another embodiment, the methods or assays described herein can comprise detecting the presence or absence of one or more tRNA fragments to distinguish normal pancreas from pancreatic cancer can include, without limitations, at least one of the sequences with identifiers SEQ ID NOs: 36100, 36101, 36105, 36107, 36111, 36112, 36114, 36115, 36116, 36119, 36120, 36121, 36122, 36123, 36139, 36143, 36146, 36147, 36148, 36149, 36155, 36156, 36157, 36163, 36171, 36173, 36176, 36177, 36178, 36179, 36180, 36181, 36182, 36183, 36188, 36189, 36194, 36197, 36200, 36203, 36204, 36215, 36217, 36218, 36219, 36222, 36223, 36227, 36228, 36230, 36231, 36234, 36238, 36239, 36240, 36241, 36242, 36243, 36246, 36248, 36252, 36254, 36262, 36265, 36266, 36269, 36270, 36271, 36272, 36273, 36276, 36278, 36279, 36282, 36285, 36287, 36288, 36289, 36293, 36294, 36295, 36296, 36297, 36298, 36299, 36303, 36304, 36305, 36306, 36307, 36308, 36313, 36319, 36320, 36322, 36323, 36326, 36327, 36331, 36332, 36333, 36335, 36336, 36338, 36339, 36341, 36342, 36344, 36347, 36355, 36356, 36357, 36372, 36373, 36374, 36375, 36376, 36378, 36381, 36384, 36387, 36391, 36392, 36395, 36397, 36399, 36400, 36401, 36405, 36406, 36408, 36409, 36428, 36429, 36430, 36431, 36432, 36433, 36435, 36436, 36437, 36444, 36450, 36451, 36452, 36453, 36455, 36456, 36457, 36460, 36461, 36462, 36463, 36464, 36465, 36466, 36467, 36468, 36469, 36470, 36471, 36472, 36478, 36485, 36490, 36491, 36498, 36499, 36504, 36505, 36506, 36507, 36508, 36509, 36510, 36511, 36512, 36513, 36517, 36520, 36521, 36523, 36524, 36529, 36530, 36533, 36534, 36535, 36538, 36539, 36541, 36542, 36543, 36544, 36545, 36546, 36547, 36550, 36553, 36554, 36561, 36562, 36572, 36573, 36574, 36575, 36578, 36579, 36580, 36581, 36582, 36584, 36586, 36589, 36590, 36591, 36593, 36594, 36597, 36599, 36600, 36601, 36607, 36608, 36609, 36610, 36611, 36612, 36614, 36615, 36616, 36617, 36618, 36619, 36620, 36621, 36627, 36628, 36629, 36637, 36638, 36639, 36640, 36641, 36642, 36643, 36644, 36645, 36646, 36647, 36649, 36650, 36658, 36665, 36669, 36670, 36671, 36673, 36674, 36675, 36676, 36677, 36678, 36679, 36680, 36682, 36683, 36684, 36689, 36690, 36691, 36692, 36693, 36694, 36695, 36696, 36697, 36698, 36701, 36702, 36703, 36705, 36706, 36707, 36708, 36709, 36710, 36711, 36712, 36714, 36715, 36716, 36718, 36719, 36720, 36721, 36722, 36726, 36727, 36728, 36729, 36730, 36731, 36732, 36733, 36734, 36735, 36738, 36739, 36741, 36742, 36744, 36745, 36746, 36747, 36749, 36751, 36754, 36755, 36756, 36757, 36759, 36760, 36761, 36762, 36763, 36764, 36765, 36768, 36769, 36770, 36771, 36772, 36775, 36776, 36777, 36778, 36788, 36789, 36793, 36794, 36796, 36797, 36798, 36799, 36800, 36803, 36805, 36806, 36809, 36810, 36812, 36814, 36817, 36825, 36826, 36827, 36829, 36830, 36831, 36832, 36834, 36835, 36838, 36839, 36841, 36844, 36846, 36848, 36849, 36851, 36854, 36855, 36857, 36859, 36860, 36861, 36862, 36863, 36864, 36868, 36869, 36871, 36872, 36877, 36878, 36879, 36880, 36881, 36883, 36884, 36885, 36886, 36887, 36889, 36890, 36891, 36892, 36895, 36897, 36901, 36902, 36903, 36904, 36905, 36907, 36909, 36910, 36911, 36913, 36914, 36915, 36916, 36917, 36918, 36919, 36925, 36931, 36938, 36939, 36941, 36942, 36945, 36946, 36948, 36952, 36953, 36955, 36956, 36957, 36958, 36961, 36963, 36964, 36965, 36967, 36968, 36973, 36976, 36977, 36978, 36979, 36980, 36981, 36982, 36983, 36985, 36988, 36989, 36990, 36991, 36992, 36997, 36998, 36999, 37001, 37004, 37005, 37008, 37009, 37012, 37013, 37014, 37021, 37022, 37023, 37024, 37025, 37026, 37029, 37032, 37033, 37036, 37039, 37044, 37046, 37048, 37049, 37050, 37051, 37054, 37055, 37056, 37057, 37058, 37059, 37060, 37063, 37065, 37066, 37075, 37077, 37078, 37079, 37080, 37081, 37083, 37087, 37088, 37089, 37090, 37091, 37094, 37095, 37099, 37100, 37101, 37110, 37115, 37116, 37117, 37119, 37120, 37121, 37123, 37124, 37125, 37127, 37132, 37133, 37134, 37135, 37137, 37138, 37139, 37141, 37142, 37143, 37144, 37145, 37146, 37149, 37150, 37151, 37152, 37155, 37157, 37160, 37161, 37162, 37163, 37164, 37165, 37166, 37167, 37168, 37169, 37171, 37174, 37175, 37177, 37178, 37181, 37182, 37183, 37184, 37185, 37187, 37193, 37194, 37195, 37196, 37197, 37198, 37199, 37201, 37202, 37203, 37206, 37207, 37208, 37209, 37211, 37213, 37214, 37216, 37217, 37226, 37227, 37228, 37229, 37230, 37231, 37234, 37235, 37237, 37244, 37245, 37247, 37248, 37249, 37251, 37253, 37254, 37255, 37261, 37262, 37265, 37271, 37272, 37273, 37274, 37278, 37279, 37283, 37303, 37304, 37305, 37306, 37307, 37308, 37312, 37316, 37319, 37321, 37323, 37324, 37325, 37326, 37327, 37334, 37335, 37336, 37337, 37338, 37339, 37340, 37341, 37342, 37348, 37356, 37363, 37365, 37368, 37369, 37370, 37372, 37374, 37375, 37376, 37382, 37383, 37385, 37386, 37388, 37391, 37394, 37395, 37398, 37400, 37401, 37402, 37403, 37404, 37405, 37407, 37408, 37410, 37419, 37420, 37422, 37423, 37424, 37425, 37426, 37429, 37430, 37431, 37432, 37433, 37445, 37446, 37448, 37449, 37453, 37454, 37456, 37461, 37462, 37463, 37464, 37466, or any combinations comprising two or more of these sequences.

[0141] In yet another embodiment, the methods or assays described herein can comprise detecting the presence or absence of one or more tRNA fragments to distinguish platelets from people with a propensity to clot vs. platelets from people with a propensity to hemorrhage can include, without limitations, at least one of the sequences with identifiers SEQ ID NOs: 51377-51378, 51406, 51438, 51496, 51565, 51691, 51699, 51736-51737, 51745, 51759, or any combinations comprising two or more of these sequences.

[0142] In still another embodiment, the methods or assays described herein can comprise detecting the presence or absence of one or more tRNA fragments to distinguish normal prostate from prostate cancer can include, without limitations, at least one of the sequences with identifiers SEQ ID NOs: 42434, 42520, 42537, 42577, 42751, 42979, 43019, 43090, 43128, 43156, 43310, 43352, 43398, 43426, 43437, or any combinations comprising two or more of these sequences.

[0143] In general, characterizing the tRNA fragments identifies a signature that may be indicative of a diagnosis of a disease or condition. The character of the tRNA fragments in the sample may be compared with a reference, such as other tRNAs present within the cell, a healthy cell or a diseased cell will yield a relative abundance of the tRNA fragments to identify a signature. The signature may be established by comparing the tRNA fragments' locations within the genomic loci of origin, the starting and ending points of the fragments, the length of the fragment, and any other feature of the fragments as compared to other tRNA fragments within the same sample or another sample or reference to distinguish a diseased state, a propensity to develop a disease or condition, and/or the absence of a disease or condition. The skilled artisan will appreciate that the diagnostic can be adjusted to increase sensitivity or specificity of the assay. In general, any significant increase (e.g., at least about 10%, 15%, 30%, 50%, 60%, 75%, 80%, or 90%) in the level of a polynucleotide or polypeptide biomarker in the subject sample relative to a reference may be used to diagnose a diseased state, a propensity to develop a disease or condition, and/or the absence of a disease or condition.

[0144] Accordingly, a tRNA fragment profile may be obtained from a sample from a subject and compared to a reference tRNA fragment profile obtained from a reference cell or tissue or body fluid, so that it is possible to classify the subject as belonging to or not belonging to the reference population. The correlation may take into account the presence or absence of one or more tRNA fragments in a test sample and the frequency of detection of the tRNA fragments in a test sample compared to a control. The correlation may take into account both of such factors to facilitate a diagnosis of a disease or condition. In one embodiment, the reference is the identity and abundance level of the tRNA fragments present in a control sample, such as non-diseased cell, a cell obtained from a patient that does not have the disease or condition at issue or a propensity to develop such a disease or condition. In another embodiment, the reference is a baseline level of the tRNA fragment presence and abundance in a biologic sample derived from the patient prior to, during, or after treatment for the disease or condition. In yet another embodiment, the reference is a standardized curve.

### Methods of Use

[0145] The method described herein includes diagnosing, identifying or monitoring a disease or condition, such as breast cancer, in a subject in need of therapeutic intervention. In one embodiment, the method includes isolating tRNA fragments from a cell, tissue or body fluid obtained from the subject; hybridizing the tRNA fragments to a panel of oligonucleotides engineered to detect tRNA fragments; analyzing an identity and levels of the tRNA fragments present in the cell; wherein a differential in the identity or measured tRNA fragments' levels to the reference is indicative of a diagnosis or identification of breast cancer in the subject; and providing a treatment regimen to the subject dependent on the differential in the identity and measured tRNA fragments' levels to the reference. The tRNAs may be isolated by a method known in the art or selected from the group consisting of size selection, sequencing, amplification, dumbbell-PCR and FIREPLEX®. In some embodiments, the size of the tRNA fragments is in the range of about 10 nucleotides to about 80 nucleotides are isolated. The range of sizes may include, but are not limited to, from about 15 nucleotides to about 55 nucleotides, and from about 17 nucleotides to about 52 nucleotides. The size of the tRNAs may be about 10 nucleotides, 11, 12, 13, 14, 15, 16, 17, 18, 19, 20, 21, 22, 23, 24, 25, 26, 27, 28, 29, 30, 31, 32, 33, 34, 35, 36, 37, 38, 39, 40, 41, 42, 43, 44, 45, 46, 47, 48, 49, 50, 51, 52, 53, 54, 55, 56, 57, 58, 59, 60, 61, 62, 63, 64, 65, 66, 67, 68, 69, 70, 71, 72, 73, 74, 75, 76, 77, 78, 79 or about 80 nucleotides.

[0146] The signature is a tRNA fragment profile that comprises the identity, abundance and relative abundance of tRNA fragments. The tRNA fragments' location within the genomic loci of origin, the starting and ending points of the fragments, the length of the fragments, and any other feature of the fragments as compared to other tRNA fragments within the same sample or another sample or reference may be included in the tRNA fragment signature. In one embodiment, the signature is obtained by hybridization to a single oligonucleotide, or to a panel of oligonucleotides, such as those that comprise at least two or more oligonucleotides that selectively hybridize to the tRNAs. To prepare the sample for characterization, the tRNAs and tRNA fragments may be amplified prior to the hybridization.

[0147] The therapeutic methods (which include prophylactic treatments) to treat a disease or condition, such as a disease selected from the group consisting of a cancer, and genetically predisposed disease, in a subject include administering a therapeutically effective amount of an agent or therapeutic to a subject (e.g., animal, human) in need thereof, including a mammal, particularly a human. Such treatment will be suitably administered to subjects, particularly humans, suffering from, having, susceptible to, or at risk for the disease or condition or a symptom thereof. The agent may be identified in a screening using tRNA signatures or relative abundance of tRNAs in in vitro or in vivo animal model for the disease or condition.

### Monitoring

[0148] Methods of monitoring subjects that are at high risk of developing a disease or condition, or are at risk of disease or condition recurrence, or who are receiving therapeutic intervention to reduce, improve, or treat a symptom of the disease or condition, such as breast cancer, are also useful in determining whether to administer treatment and in managing treatment. Provided are methods where the tRNA fragments are measured and characterized. In some cases, the tRNA fragments are measured and characterized as part of a routine course of action. In other cases, the tRNA fragments are measured and characterized before and again after subject management or treatment. In these cases, the methods are used to monitor the onset of a disease or condition, the recurrence of the disease or condition, the status of the disease or condition, or a propensity to develop such disease or condition, e.g., breast cancer.

[0149] For example, characterization of tRNA fragments or signatures can be used to monitor a subject's response to certain treatments. Such characterization can be used to monitor for the presence or absence of the disease or condition. The changes in the relative abundance or tRNA signature delineated herein before treatment, during treatment, or following the conclusion of a treatment regimen may be indicative of the course of the disease or condition, progression of disease or condition, or response to treatment. In some embodiments, characterization of tRNA fragments or signatures may be assessed at one or more times (e.g., 2, 3, 4, 5). Analysis of the tRNA fragments are made, for example, using a size selection, sequencing, and amplification, or other standard method to determine the tRNA fragment profile. If desired, tRNA fragment profile is compared to a reference to determine if any alteration in the tRNA fragment profile is present. Such monitoring may be useful, for example, in assessing the efficacy of a particular treatment in a patient. Therapeutics that normalize the tRNA fragment profile are taken as particularly useful.

### Kits

[0150] Kits for diagnosing, identifying or monitoring a disease or condition, such as breast cancer, are included. In one aspect, the invention includes a panel of engineered oligonucleotides comprising a mixture of oligonucleotides that are about 5 to about 15 nucleotides (nts) in length and capable of hybridizing tRNAs and tRNA fragments, wherein the tRNAs and tRNA fragments are less than about 80 nts in length. In another aspect, the invention includes a kit for high-throughput analysis of tRNA or tRNA fragments in a sample comprising the panel of engineered oligonucleotides of claim 12; hybridization reagents; and tRNA isolation reagents. Other kits with variations on the components and olignucleotide panels may be used in the context of the present invention. For example, the panel of engineered oligonucleotides may be specific to a cell type, disease type, stage of disease, or other aspect that may differentiate tRNA signatures. The kits and oligonucleotide panel may also be used to identify agents that modulate disease, or progression of disease in in vitro or in vivo animal models for the disease.

[0151] The practice of the present invention employs, unless otherwise indicated, conventional techniques of molecular biology (including recombinant techniques), microbiology, cell biology, biochemistry and immunology, which are well within the purview of the skilled artisan. Such techniques are explained fully in the literature, such as, “Molecular Cloning: A Laboratory Manual”, fourth edition (Sambrook, 2012); “Oligonucleotide Synthesis” (Gait, 1984); “Culture of Animal Cells” (Freshney, 2010); “Methods in Enzymology” “Handbook of Experimental Immunology” (Weir, 1997); “Gene Transfer Vectors for Mammalian Cells” (Miller and Calos, 1987); “Short Protocols in Molecular Biology” (Ausubel, 2002); “Polymerase Chain Reaction: Principles, Applications and Troubleshooting”, (Babar, 2011); “Current Protocols in Immunology” (Coligan, 2002). These techniques are applicable to the production of the polynucleotides and polypeptides of the invention, and, as such, may be considered in making and practicing the invention. Particularly useful techniques for particular embodiments will be discussed in the sections that follow.

[0152] It is to be understood that wherever values and ranges are provided herein, all values and ranges encompassed by these values and ranges, are meant to be encompassed within the scope of the present invention. Moreover, all values that fall within these ranges, as well as the upper or lower limits of a range of values, are also contemplated by the present application.

[0153] The following examples further illustrate aspects of the present invention. However, they are in no way a limitation of the teachings or disclosure of the present invention as set forth herein.

### Examples

[0154] The invention is further described in detail by reference to the following experimental examples. These examples are provided for purposes of illustration only, and are not intended to be limiting unless otherwise specified. Thus, the invention should in no way be construed as being limited to the following examples, but rather, should be construed to encompass any and all variations which become evident as a result of the teaching provided herein.

[0155] Without further description, it is believed that one of ordinary skill in the art can, using the preceding description and the following illustrative examples, make and utilize the compounds of the present invention and practice the claimed methods. The following working examples therefore, specifically point out the preferred embodiments of the present invention, and are not to be construed as limiting in any way the remainder of the disclosure.

[0156] The Results of the experiments disclosed herein are now described.

[0157] Transfer RNAs (tRNAs) are a class of non-coding RNAs (ncRNAs) and an integral component of the process of translating messenger RNAs (mRNAs) into the respective amino acid sequences. Each tRNA locus had been thought to give rise to a single transcript with a concrete single concrete role during the mRNA translation. However, recent studies have provided evidence that additional, functional short ncRNAs (“tRNA fragments” or “tRFs”) can also be generated from tRNA loci. TRNAs have traditionally been thought as producing a single transcript, the tRNA, a molecule that is an integral component of the process of translation of a messenger RNA (mRNA) into an amino acid sequence.

[0158] The present invention described herein includes two large datasets of short RNA profiles. Collections of tRNA fragments were generated and analyzed for several datasets. The results of the analyses were summarized in 7 tables on compact disc (CD) created on Oct. 27, 2014 that were submitted in the Provisional Patent Application No. 62/122,711, filed Oct. 28, 2014, where the results are in files: 205961-7006P2_Excel_Breast_TCGA.csv; 205961-7006P2_Excel_Brain_2N_2D.csv; 205961-7006P2_Excel_CLL.csv; 205961-7006P2_Excel_EBI_LCLs.csv; 205961-7006P2_Excel_Pancreas.csv; 205961-7006P2_Excel_Platelets.csv; and 205961-7006P2_Excel_Prostate.csv, all of which are incorporated by reference.

[0159] The two large public datasets of short RNA profiles that were systematically analyzed include: a first set that corresponds to lymphoblastoid cell lines derived from 452 individuals, men and women, from five different populations; and a second set that corresponds to 311 breast cancer samples from The Cancer Genome Atlas repository.

[0160] Nearly every known tRNA locus of the human genome gives rise to multiple and overlapping tRNA fragments with each fragment having concrete endpoints and a distinct length. Many of the discovered fragments are internal to the mature tRNA locus, i.e., they differ from previously reported 5′ and 3′ tRFs. The relative abundance and the endpoints of these tRNA fragments remain characteristically consistent across individuals, thus indicating a constitutive nature and a presumed participation in the molecular biology of the corresponding tissue through currently unknown interactions.

[0161] Importantly, the abundance and the choice of endpoints for these constitutive tRNA fragments depend on several features including tissue type, gender, population, ethnic background, and disease subtype. For a given locus, the choice of endpoints varied as a function of the amino acid and of the anticodon at hand. Independent experimental investigation of several previously unreported fragments found them to be present in model cell lines and in human tissues. Based on the findings, tRNA loci are rich sources of many distinct shorter tRNA fragments that can be functional molecules in addition to giving rise to mature tRNAs.

[0162] tRNAs are ancient non-coding RNAs (ncRNAs) that are present in archaea, bacteria, and eukaryotes. The role of tRNAs has been long presumed to be confined to the process of translation of a messenger RNA (mRNA) into an amino acid sequence. There is increasing evidence that tRNAs and tRNA fragments also have roles in cellular physiology, post-transcriptional regulation, etc. The specifics of how tRNAs and tRNA fragments effect these other events remains largely unclear.

[0163] The conventional understanding had been that genomic loci harboring tRNAs produce a single precursor transcript that is eventually processed and gives rise to the mature tRNA. Recent evidence, however, suggests that tRNA fragments, which presumably arise from the processing of the longer tRNA transcript, represent a novel and potentially important group of ncRNAs. Currently, the knowledge about the biogenesis of these fragments, their roles, and their potential function remains limited.

[0164] Studies with human cell lines have shown that tRNAs can be cleaved at the anticodon loop to produce “tRNA halves” that are (30-35 nts in length) a process that seems to be facilitated by the enzyme, Angiogenin, following induction of stress. Referred to as “tRFs,” tRNA fragments have also been found to originate from cleavage of either the mature tRNA or the tRNA precursor molecule. In the latter case, RNase Z cleaves the 3′ part of the tRNA precursor as part of the maturation process and the resulting fragment is considered to be a tRF with reported functions. tRFs that are derived from mature tRNAs emerge after cleavage at either the D-loop (giving rise to 5′-tRFs) or the T-loop (giving rise to 3′-tRFs with the CCA addition present) and are about 20 nucleotides long. Further investigation into the enzymes responsible for the fragments has shown that the process is Dicer-dependent, Angiogenin-dependent (cleaving the tRNA at the T-loop) or RNase-Z-dependent (producing 5′-tRFs).

[0165] tRFs are likely not random degradation products. Some 3′-tRFs are loaded on Argonaute, thereby, admitting a miRNA-like behavior and are involved in regulation of gene expression affecting physiological processes like cell growth, cell proliferation and cellular responses to DNA damage. These fragments have also been shown to have regulatory roles in translation initiation and stress granule formation, so it is reasonable to anticipate that additional functions await discovery. 3′-tRFs have also been described to emerge in human MT4 T-cells after HIV infection from the host cell.

[0166] Further adding to the likelihood that they are not random in nature is the fact that tRFs have been described in mouse, a yeast, two protozoans, a bacterium, and an archaeon. As described herein, the presence of tRNA fragments is discussed in different human tissues.

[0167] Unlike previous studies that focused on 5′-tRFs, 3′-tRFs, and on tRFs overlapping with the 3′ of the precursor tRNA transcripts in what follows, no restrictions were imposed on the sought fragments in terms of their relative position with respect to the span of a mature tRNA. tRNA fragments were systematically studied by analyzing 452 short RNA profiles from lymphoblastoid cell lines and 311 breast samples from The Cancer Genome Atlas (TCGA) repository at the National Institutes of Health (NIH).

[0168] Four previously known categories were observed, namely 5′-tRFs, 3′-tRFs, 5′-halves and 3′-halves, in the two human tissues types (all previous reports were based on model cell lines). A fifth structural category of tRFs was found, the internal-tRFs or “i-tRFs,” in human tissues. The i-tRFs begin and end anywhere along the interior of the mature tRNA. The i-tRF category was found to be rich and diverse, with numerous tRNA genomic loci producing many distinct i-tRFs. The 5′-tRF and 3′-tRF categories were found to be more diverse than previously thought: each contained multiple tRFs with distinct, quantized lengths that changed from tissue to tissue, and between health and disease.

[0169] The tRFs from nuclear tRNA loci were also found to differ greatly from mitochondrial (mt or MT) tRFs. Within a tissue, the lengths and abundances of 5′-tRFs, i-tRFs, and 3′-tRFs depended on the genomic origin (i.e. nuclear vs. mitochondrial) of the parent tRNA locus. Notably, this observation held true even for tRFs from the same anticodon, i.e. nuclear AspGTC vs mitochondrial AspGTC.

[0170] The tissue type and disease type/sub-type appeared to shape the tRF population. All tRF categories exhibited diversities and abundances that were tissue-specific, specific between health and disease, and dependent on disease subtype.

[0171] Moreover, it was surprising to find that gender, population, and enthicity shaped the tRF population. In fact, the tRFs had gender-, population- and ethnicity-dependent differences at the molecular, cellular, and tissue levels, in healthy and diseased tissues.

[0172] The tRFs also loaded on Argonaut (Ago) in a cell-line-specific manner. The analyses of Ago CLIP-seq data from cell lines modeling three BRCA subtypes showed that different populations of tRFs were Ago-loaded in each cell line.

[0173] The i-tRFs were also present in clinical samples. Using sequence-specific amplification methods, the presence of several novel molecules was independently confirmed in clinical samples from BRCA patients.

[0174] The analysis of tRNA sequences required a number of special considerations that went beyond what is typically done when mapping RNA-seq data for the purpose of e.g., profiling the expression of miRNAs or mRNAs. These considerations stemmed from the observations that tRNAs are in fact repeat elements. In addition to bonafide tRNAs having multiple copies, tRNA segments appeared elsewhere on the genome outside of tRNA space, the latter being the full complement of genomic locations harboring tRNA genes.

Method for Identifying Bona Fide tRNA Fragments from Deep Sequencing Transcriptomic Data

[0175] The proper analysis and handling of tRNA sequences and identification of tRNA fragments in deep sequencing data required several considerations that went beyond typical protocols to map RNA-seq data for the purpose of e.g., profiling the expression of miRNAs or mRNAs. These considerations stemmed from the fact that tRNAs are repeat elements. Considering the logical hierarchy that pertains to tRNA sequences, where each amino acid (few amino acids; at the top of the pyramid) has multiple associated anticodons (more isoacceptors than amino acids; in the middle of the pyramid) and each anticodon has multiple associated genomic instances (a multitude of isodecoders; at the bottom of the pyramid), the presented analyses sought to unravel, for each tRNA fragment, details at the lowest possible level of the hierarchy. It is stressed that the nature of the sequences at hand is such that achieving this goal is unattainable in some instances. As many isodecoders have indistinguishable sequences, results were reported at the anticodon level, an intermediate level between isoacceptors and isodecoders. Also, the method kept track of the genomic origins of all the reported fragments.

Defining the tRNA Space

[0176] All shown sequences are in 5′→3′ orientation. Directly linked to the mapping is the definition of what constitutes the genome's tRNA space. For the purposes of the method described herein, the following sequences were combined to make up the tRNA space:
[0177] a) the 22 known human mitochondrial tRNA sequences (NCBI entry NC_012920.1
[0178] b) 610 (508 true tRNAs and 102 pseudo-tRNAs) of the 625 nuclear tRNA sequences from the genomic tRNA database (GtRNAdb); excluded from the 625 nuclear tRNAs listed in GtRNAdb were the entries that included the selenocysteine tRNAs, tRNAs with undetermined anticodon identity, and tRNAs mapping to contigs that were not part of the human chromosome assembly;
[0179] c) the eight genomic intervals chr1:+:566062-566129, chr1:+:568843-568912, chr1:−:564879-564950, chr1:−:566137-566205, chr14:+:32954252-32954320, chr1:−: 566207-566279, chr1:−:567997-568065, and, chr5:−:93905172-93905240—all coordinates were from the hg19 assembly of the human genome—that corresponded to identical instances of seven mitochondrial tRNAs TrpTCA, LysTTT, GlnTTG, AlaTGC (×2), AsnGTT, SerTGA, and, GluTTC, respectively.

[0180] In total, the reference tRNA space used to implement the method described herein included 640 sequences.

Sequenced Reads were Mapped “Exactly” Since Mapping with Mismatches Generated Erroneous Results

[0181] Multiple sequence alignments of the genomic copies for a given anticodon revealed many instances of sequence segments that were shared among these copies and made to look like one another if one permitted a small number of insertions, deletions, or replacements. These segments were found across the length of the mature tRNA, and were present in tRNA fragments. Moreover, these segments were found in the sequences of distinct anticodons of the same amino acid. Consequently, permitting insertions, deletions or replacements during read mapping misidentified the genomic origin of a read and led to erroneous results. Problems occurred even if indels were excluded and a single replacement allowed.

[0182] For example, the following 5′-tRF sequence GGGGAATTAGCTCAAG-T-GGTAGAGCGCTTGCT (SEQ ID NO:55729) appeared at five genomic locations, all of which were instances of the AlaAGC anticodon sequence.

[0183] By contrast, the 32 nt sequence GGGGAATTAGCTCAAG-C-GGTAGAGCGCTTGCT (SEQ ID NO:55730), differed from the previous sequence at a single location (T→C), a 5′-tRF of AlaAGC, but appeared at two different genomic locations that were distinct from the previous five. If read mapping with a single mismatch was allowed, these two distinct 5′-tRF molecules would become indistinguishable, thereby, confounding any transcriptional differences that potentially exist among the seven full length loci that comprise GGGGAATTAGCTCAAG-N-GGTAGAGCGCTTGCT (SEQ ID NO:55731).

[0184] This problem was accentuated further when the typically shorter reads contained in “short RNA-seq” datasets were mapped. The 22 nt sequence GGGGGTGTAG-A-TCAGTGGTAGA (SEQ ID NO:55732) is a 5′-tRF from the AlaAGC anticodon (trnal 17 on chromosome 6). Allowing for exactly one mismatch made this 5′-tRF indistinguishable from GGGGGTGTAG-C-TCAGTGGTAGA (SEQ ID NO:55733), which appeared in 11 isodecoders of three Ala anticodons (AlaAGC, AlaCGC, AlaTGC) as well as in two non-Ala anticodons, namely CysGCA (trna7 on chromosome 3) and ValAAC (tma115 on chromosome 6). Thus, if a single replacement was allowed during mapping, reads from any one of these 14 genomic locations were indistinguishable, and led to cross-talk and consequent erroneous estimates about the abundance of 5′-tRFs arising from the tRNAs. To avoid such confounding events, insertions, deletions, or replacements were not permitted.

Sequenced Reads were Mapped on the Full Genome (Nuclear and Mitochondrial) Since Mapping on tRNA Space Alone Generated Erroneous Results

[0185] It was tempting to consider compiling a database of tRNA sequences (e.g. by combining all the spliced nuclear and mitochondrial tRNA sequences into a single collection) and then mapping the sequenced reads on this subset of the genomic real estate. Such an approach would be easy to implement, fast to execute, and seemingly adequate. Unfortunately, this approach was error-prone and led to misrepresentation of expressed tRNA fragments and miscalculation of the relative abundances of the various tRNA anticodons.

[0186] In addition to the multiple instances of bona fide nuclear tRNAs, the human genome is also riddled with many instances of nuclear and mitochondrial tRNA-lookalikes, as well as partial tRNA sequences. Thus, any and all reads that simultaneously land inside and outside tRNA space were excluded from consideration since their integrity could not be guaranteed.

[0187] To achieve this objective all sequenced reads were mapped on the entire genome. The 24 nt sequence GCTCCAGTGGCGCAATCGGTTAGC (SEQ ID NO:55734) helped illustrate the reasoning for this requirement. The sequence is a 5′-tRF of the IleTAT anticodon and appeared identical to five genomic locations. However, this sequence also appeared outside tRNA space on the forward strand of chromosome 7, between locations 44465584 and 44465607 inclusive (GCh37). This sequence forms part of the 38 nt sequence GCTCCAGTGGCGCAATCGGTTAGCATGCGGTACTTATA (SEQ ID NO:55735) (note the underline segment) that spans locations 44465584 through 44465621. Even though this 38-mer is labeled as a “tRNA” by RepeatMasker, it is much shorter than the 93 nt of the typical IleTAT and thus not a bonafide tRNA. Consequently, the sequenced reads were mapped on the whole genome, which allowed the identification of such events. Since the integrity of the reads that fall in this category could not be established unambiguously, all reads that landed simultaneously inside and outside tRNA space were discarded and excluded from further consideration.

Sequenced Reads were Mapped Using Exact Multi-Mapping Since Mapping Uniquely Generated Erroneous Results

[0188] Typical pipelines that map deep-sequencing datasets report reads that can be mapped either unambiguously to a single location (“unique-mapping”) or only to handful of genomic locations. However, considering that the typical tRNA anticodon has multiple genomic instances, neither of these two choices was appropriate under the circumstances.

[0189] As an example, the 72 nt AspGTC sequence TCCTCGTTAGTATAGTGGTGAGTATCCCCGCCTGTCACGCGGGAGACCGGGGT TCGATTCCCCGACGGGGAG (SEQ ID NO:55736) was presented. This sequence appeared identically at 11 genomic loci: five on chromosome 1, two on chromosome 6, three on chromosome 12 and one on chromosome 17. The typical read for short RNA-seq profiles was shorter than 72 nt, which increased the chance that a read was present at multiple genomic locations some of which were not related to tRNAs. The multiple instances of tRNA anticodons, the existence of the previously reported tRNA lookalikes, and the existence of repeating elements, like the previously reported pyknons, required “exact multi-mapping” (i.e. no indels, no replacements) to be carried out. A sequenced read was permitted to map as many locations as practically possible. The resulting maps were post-processed and any sequenced reads with one or more of instances outside the tRNA space were discarded and excluded from further consideration. On the other hand, sequenced reads with all of instances exclusively inside tRNA space were kept. In an example case, the method only read counts from one of the multiple genomic loci to avoid mis-counting the fragment's abundance.

Sequenced Reads were Mapped “Exactly” while Accounting for the Nontemplated CCA Addition

[0190] As shown in FIG. 1, mature tRNA sequences contain the CCA trinucleotide that is added post-transcriptionally to the 3′ end of mature tRNAs. Since this CCA “tail” of the mature tRNA has no counterpart in the genomic DNA, from which the precursor tRNA sequence was transcribed, explicit provisions were made to map such reads or they would be inadvertently excluded from consideration and from reporting. These provisions were necessary since the method presented herein required a strict-exact mapping of the sequenced reads. Consequently, the nontemplated CCA's presence in a read could not simply be accommodated by allowing an adequate number of mismatches (e.g. replacements) during mapping. Prior to mapping, a modified instance of the genome was created where the trinucleotide CCA was used to replace the three genomic nucleotides immediately downstream (in the 5′→3′ direction) of each of the 640 reference mature tRNAs.

[0191] Special bookkeeping was required in the case of mitochondrial tRNAs, some of which are either very close to one another (e.g. MT_AlaTGC and MT_AsnGTT) or overlapping (e.g. MT_CysGCA and MT_TyrGTA). A careless replacement of the genomic sequence downstream from a tRNA by the CCA trinucleotide would inadvertently “erase” part of another tRNA's sequence.

[0192] Lastly, it was important to realize that depending on its length, a sequenced read that ended in CCA could simply be a transcript that originated elsewhere on the genome from a location that was outside tRNA space. In such an event, the reads that fall in this category could not be established unambiguously and these particular CCA-ending reads were discarded and excluded from further consideration.

Sequenced Reads were Mapped Using Special Provisions for Intron-Containing tRNAs

[0193] An abundance of tRNAs contains introns. The method described herein focuses on mature tRNAs. Sequenced reads that mapped on the genome under the above constraints yet straddled a tRNA exon-intron or a tRNA intron-exon boundary were discarded and excluded from further consideration. At the same time, the sequence space on which reads were mapped needed to be augmented to include spliced versions of all intron-containing tRNAs.

[0194] However, attention was required as follows: a) mapped reads that were wholly in an exon of an intron-containing tRNA were counted once (e.g. only their genome instances were counted and not their spliced-tRNA instances; or vice versa); and, b) mapped reads that straddled a tRNA exon-exon junction were examined for possible instances outside tRNA space. The mapped reads that straddled such a junction but also had instances outside tRNA space were discarded and excluded from further consideration.

[0195] As a specific example of a tRNA fragment that highlighted the need for this step, the following TyrGTA sequence is described. The tRNA fragment's sequence comprises the tail of the first exon and the head of the second exon, which indicates that the fragment arose from a mature or semi-mature tRNA molecule. Specifically, the 19-nucleotide fragment trna14_nTyrGTA_6_+_26569086_26569176@32.50.19_1_0_12 is an internal fragment that maps solely on the 12 genes of the nuclear TyrGTA anticodon and spans the exon-exon junction in all 12 cases. This 19-mer, which does not appear elsewhere in the genome, would have been discarded if special provisions were not made for handling tRNA introns.

Distinguishing Among Three Regions of the Mature tRNA that were Sources of tRNA Fragments

[0196] For each of the considered tRNAs, and for the reads with instances exclusively in tRNA space, three categories of tRNA fragments were identified that arose from three regions of the tRNA: a) fragments whose 5′ terminus began exactly at the 1^{st} nucleotide of the corresponding mature tRNA (“+1” fragments; the category comprises 5′-tRFs and 5′-halves); b) fragments that were strictly internal to the mature tRNA sequence, i.e. whose 5′ terminus began at the 2^{nd} nucleotide or further to the right and whose 3′ terminus ends to the left of the first “C” of the nontemplated “CCA” addition to the mature tRNA (“internal” fragments or i-tRFs); and, c) fragments whose 3′ terminus coincided with any of the bases of the “CCA” terminal addition (“CCA-ending” fragments; the category comprised 3′-tRFs and 3′-halves). It was also recognized that there were instances of mature tRNAs, e.g. the histidine (His) tRNA, that gave rise to fragments that started at the “−1” position i.e. one position to the left of the start of the mature tRNA. For simplicity of presentation, these were considered subsumed by the “+1” region and were not treated separately.

[0197] The categories of fragments starting at position +1, and the ones ending at the CCA tail have been described previously. However, until now, i-tRFs had not been described as a distinct and rich category of abundant tRFs, in either cell lines or in human tissues.

### Analyzed Datasets

[0198] The first analyzed dataset contained the short-RNA sequencing profiles of lymphoblastoid cell lines (LCLs) from 452 men and women belonging to five different populations: Utah residents with Northern- and Western-European ancestry (CEU), Finnish (FIN), British (GBR), Toscani Italians (TSI) and Yoruba African from the city of Ibadan (YRI). The second analyzed dataset was drawn from The Cancer Genome Atlas (TCGA) repository at the National Institutes of Health (NIH) and comprised 17 normal and 294 breast cancer samples covering the basic hormone profiles (FIG. 2).

[0199] In what follows, LCL refers to both the analyzed 452 primary datasets and the corresponding collection of 1,113 statistically significant tRNA fragments. Analogously, BRCA is used to refer both to the analyzed 311 primary datasets and the corresponding collection of statistically significant tRNA fragments.

[0200] Sequenced reads were mapped as mentioned above and all tRNA fragments that were supported by at least one read in at least one of each collection's analyzed samples were collected. Then, filtering criteria were applied that ensured that each tRNA fragment had enough statistical support. For the LCL dataset, the filtering led to 1,113 statistically significant tRNA fragments, SEQ ID NOs: 24833-25945. For the BRCA dataset, the filtering led to 315 statistically significant tRNA fragments, SEQ ID NOs: 8538-8852. For the Brain dataset, the filtering led to 1802 statistically significant tRNA fragments, SEQ ID NOs: 1-1802. For the CLL dataset, the filtering led to 2014 statistically significant tRNA fragments, SEQ ID NOs: 12462-14475. For the Pancreas dataset, the filtering led to 1367 statistically significant tRNA fragments, SEQ ID NOs: 36100-37466. For the Platelets dataset, the filtering led to 508 statistically significant tRNA fragments, SEQ ID NOs: 51286-51793. For the Prostate dataset, the filtering led to 1373 statistically significant tRNA fragments, SEQ ID NOs: 42349-43721.

[0201] Breast cancer is the most frequently diagnosed cancer and the leading cause of cancer death among women. In the United States, one in eight women will develop breast cancer during her lifetime. In 2013 alone, nearly 300,000 individuals were diagnosed with either invasive or non-invasive breast cancer whereas 40,000 died from breast cancer. Breast cancer is also a heterogeneous disease. The discovery of specific prognostic and predictive biomarkers in the past decades has enabled the clinical classification of breast cancer into three basic therapeutic subgroups (FIG. 2). The estrogen receptor (ER) positive group, known as Luminal-type breast cancer, represents the most frequently occurring and diverse type, and its treatment often includes endocrine therapy. The Basal-like subgroup, also termed “triple-negative”, lacks transcription from either the ER, the progesterone receptor (PR) or the epidermal growth factor receptor 2 (HER2) locus: this is a group with poorer prognosis and chemotherapy is the only option in this case. It is standard practice for pathological features (e.g. hormone receptor positivity, tumor stage and node positivity) to be used to guide clinicians in prescribing the appropriate therapy. Sustained efforts in understanding further the molecular etiology behind the onset and development of breast cancer are necessary before improved biomarkers of risk and of therapy response can be developed and applied towards higher-quality diagnosis and treatment approaches.

Exact Multi-Mapping Reveals Atypical tRNA Length Fragments

[0202] The lengths of the reads mapping to the internal region were plotted on a histogram and compared to the two known categories of tRNA fragments (5′-tRFs and 3′-tRFs). FIGS. 3A-3D show the length distributions for the 452 individuals of the LCL dataset. As can be seen from FIG. 3A, i-tRFs are dominated by a single length, namely 36 nt. The 5′ terminus of the i-tRFs begins at position +2 of the mature tRNA, or further to the right. Consequently, the internal 36-mers comprise the full anticodon triplet (typically centered at position +34 of the mature tRNA sequence) and thus they straddle the point that has been typically associated with the terminus of tRNA halves.

[0203] FIGS. 3B-3C show the length distributions for the +1 and the CCA-ending regions. In FIG. 3D, the combined length distribution is shown. Each of the three tRNA regions gave rise to fragments with characteristic length profiles and specific relative abundances. Importantly, the very small standard errors (too small to be visible in the four panels) indicate that the lengths of these fragments persisted across each of the three regions and across the 452 individuals and, thus, were not random degradation products.

[0204] In the tRNA literature, the 5′-tRFs have been associated with lengths of 18, 22, and 32 nt. In addition to identifying fragments with these lengths, the analysis of the LCL datasets revealed a prevalence for fragments with lengths of 20, 26, 33 and 36 nt. These lengths have not been previously associated with 5′-tRFs.

[0205] Similarly in the LCL datasets, the CCA-ending fragments (3′-tRFs) show prevalence for lengths of 18, 22, 33 and 36 nt. More than half of these 33-mers and 36-mers start after the anticodon, which makes many of these fragments distinct from the typical tRNA-halves and complementary to the previously reported length-families of 3′-tRFs. It is also worth noting that all the 3′-tRF 33-mers and more than half of the 3′-tRF 36-mers (26 out of 43) originated in mitochondrial tRNA genes.

[0206] The same analysis was repeated for the 311 TCGA BRCA datasets. FIGS. 4A-4D show the corresponding length distributions. The i-tRF distribution (FIG. 4A) is significantly different from those of the 5′-tRFs (FIG. 4B) and the 3′-tRFs (FIG. 4C). The i-tRFs comprise fragments that are 20 nt long and virtually no fragments ≥30 nt, whereas the +1 category is characterized by a prevalence of fragments with lengths 19, 20, 24 and ≥30 nt. Similar to the LCLs, the lengths of the fragments that arise from the three regions have characteristic profiles and specific relative abundances.

[0207] Moreover, the small standard error for each length indicates that atypical lengths of these fragments are rare across the analyzed datasets. It is important to emphasize that these NIH-TCGA datasets were obtained through deep sequencing PCR with a total of 30 sequencing cycles. Consequently, short fragments or fragments longer than 30 nt that may exist in each sample's milieu were represented by a 30-mer “proxy”.

[0208] A considerable portion of the CCA-ending fragments in the BRCA datasets have lengths that have not been previously associated with 3′-tRFs. In all, these datasets revealed several length families that have not been previously reported. These families comprise fragments with lengths of 16, 20, 21, and 23-29 nt and collectively account for 21.2% of all tRNA fragments in the BRCA datasets. In FIG. 4D, the combined length distribution is shown.

i-tRFs Represent a Diverse New Family of tRNA Fragments

[0209] The analyses described herein reveal that i-tRFs are a surprisingly rich category with many of its members having 5′ termini that are away from the 5′ end of the mature tRNA. The i-tRFs represented 27.5% of all fragments in the LCL and 21.0% of all fragments in the BRCA dataset.

[0210] FIGS. 5A-5B shows the distribution of the starting positions of the i-tRFs for the LCL (FIG. 5A) and BRCA datasets (FIG. 5B). For each starting position, the length distribution is also shown as bars, with the intensity of each bar representing the average expression of the respective fragment in the LCL or BRCA dataset.

[0211] For the LCL dataset, internal 36-mers began anywhere within the D loop of the mature tRNA (generally positions 12-22) or immediately after it (in 5′→3′ orientation). No specific position is singled out as the preferred starting position of internal fragments in this dataset (FIG. 5A). On the contrary, in the BRCA dataset, there are two main “clusters” of starting positions for the i-tRFs: a first cluster spanning positions 11-17 that generally reside in the D loop and a second cluster spanning positions 32-43 comprising the anticodon loop and the variable loop of the mature tRNA (FIG. 5B). Each of the starting positions exhibited its own associated range of lengths for the fragments that began there. Fragments that began at position 13 were 23, 22 or 21 nt long, whereas fragments that began at position 15 or 16 were slightly shorter with lengths 19, 20, or 21 nt.

[0212] These fragment lengths recurred in both the LCL and BRCA datasets and have small standard deviations. It is thought that the mechanisms behind the production of these fragments have specific preferences for the starting and ending positions and/or the length of the tRNA fragment. The 30-mers in FIG. 2B, starting at positions 2-6, 34 and 36, are likely tRNA-halves that cannot be “seen” due to the 30-PCR-cycle limitation in the breast datasets mentioned herein.

tRFs Differ Between Nuclearly- and Mitochondrially-Encoded tRNAs

[0213] The relationship between tRNA fragment lengths and abundances, and their genomic origin (i.e. whether nuclearly-encoded vs. mitochondrially-encoded) was examined. To this end, the graphs of FIGS. 3D and 4D were decomposed into their nuclear and the mitochondrial contributions (FIGS. 6A-6B). Several statistically significant differences were identified in the expression of nuclear and mitochondrial tRNAs in both the LCL (FIG. 6A) and the BRCA dataset (FIG. 6B). Notably, the 36-mers in the LCL dataset were predominantly from mitochondrially encoded tRNAs, while the 33-mers were from nuclearly encoded ones.

tRFs from all Three Regions Exhibit Diversities and Abundances that Depend Strongly on the Choice of Anticodon

[0214] For each of the two collections of analyzed datasets, and separately for each anticodon, the fragments arising from all of the bonafide genomic instances of the anticodon being considered each time were enumerated. In each case, the number of fragments arising from each of the three regions of the mature tRNA, namely “+1”, “internal,” or “CCA-ending” was determined. The fragments originating from pseudo-tRNAs and from sequences of potential pseudo-tRNA origin were also enumerated and found to be considerably fewer than those from true tRNAs.

[0215] In the LCL collection, 63 anticodons (from a possible total of 75 nuclear and mitochondrial ones) that generated fragments with abundance levels that meet the mapping and filtering criteria were found. The mitochondrial tRNA GluTTC generated the highest number of distinct tRNA fragments followed by the nuclear LysCTT. Notably, the diversity of fragments that arose from each of the three regions of the mature tRNA strongly depended on the anticodon at hand. For some anticodons, the “+1” region gave rise to the most diverse set of tRNA fragments (e.g. nuclear GluTTC), whereas for other anticodons most of the diversity was encountered in the internal (e.g. mitochondrial HisGTG) or the CCA-ending regions (e.g. mitochondrial ValTAC).

[0216] Analogously, in the BRCA collection, 52 of the 75 possible nuclear and mitochondrial anticodons generated fragments satisfying the filtering criteria. As with the LCL datasets, the diversity of fragments that arose from each of the three regions of the mature tRNA strongly depended on the considered anticodon. Similarly to the LCL collection, the mitochondrial GluTTC produced the highest number of distinct fragments as well, whereas the mitochondrial ValTAC gave rise mainly to CCA-ending fragments.

[0217] The analysis of these two different types of datasets also revealed examples of anticodons where the fragment profile changed with the tissue type (see also below). For example, in the LCL datasets, the nuclear AlaACG generated predominantly CCA-ending fragments. On the other hand, in the BRCA datasets the anticodon's 5′-tRFs were favored as well and were produced at a ratio of 1:1 compared to the 3′-tRFs.

[0218] Additionally, the abundance of the tRNA fragments exhibited anticodon-dependencies as well. In fact, from this standpoint the differences between the LCL and the BRCA collections were more pronounced. In the LCL dataset, the relative abundances of different fragment lengths were due to fragments from different anticodons. For example, the mitochondrial SerGTC anticodon was responsible for 68.7% and 80.4% of the contribution to fragments with the previously unreported lengths of 20 and 26 nt. On the other hand, for fragments of length 36 nt, it was the nuclear GluCTC, nuclear GluTTC, and the mitochondrial GluTTC anticodons that accounted for 37.9% of all 36-mers, with the rest being contributed by an assortment of anticodons. Interestingly, in the BRCA datasets, the mitochondrial ValTAC anticodon generated approximately 30.0% of the fragments with lengths of 20-23 nt.

The Fragments Arising from Different Regions of the Same Anticodon have Uncorrelated Abundances

[0219] Considering the richness of fragments that can arise from a given anticodon, it was investigated whether the abundances of the fragments were correlated. FIG. 7A shows a Pearson correlation heatmap for the fragments that arose from the nuclear AspGTC in the LCL datasets. FIG. 7B shows the analogous heatmap for the mitochondrial GluTTC in the BRCA datasets. This anticodon produced the largest number of fragments in the BRCA datasets and most of them were internal, i.e. i-tRFs. The abundances of reads originating from the three tRNA regions (i.e., “+1,” “internal,” “CCA-ending”) have a poor correlation.

[0220] A poor correlation also characterizes the fragments that arise from the same anticodon, yet are of different lengths. Several small clusters of poorly correlated regions are apparent in the heatmaps.

[0221] For the nuclear AspGTC (LCL datasets—FIG. 7A), cluster 1a comprises internal and CCA-ending 36-mers, whereas cluster 1b captures mainly internal 32-mers and 33-mers. Cluster 2 comprises CCA-ending fragments that are 37 nt or longer. Cluster 3b contains CCA-ending fragments between 24 and 27 nt, whereas cluster 3c comprises internal fragments between 17 and 23 nt.

[0222] Analogous observations can be made for the fragments for the mitochondrial GluTTC fragments (BRCA datasets—FIG. 7B). Short internal fragments, generally of length 21 nt or shorter, form cluster 3, while internal fragments of intermediate length (21-27 nt) comprise cluster 1. On the other hand, cluster 2 contains long internal fragments and all of the CCA-ending fragments from this anticodon. A mini sub-cluster of cluster 2 comprises shorter CCA-ending fragments (22-25 nt).

[0223] Examination of the Pearson correlation maps for the other anticodons shows that they are qualitatively similar to the ones shown in the two panels of FIGS. 7A-7B. Two general observations are apparent. First, evidence was found in all anticodons for well-defined mini-clusters, each containing only a few of the anticodon's fragments. The members of each such mini-cluster had correlated abundances.

[0224] Second, when a given anticodon's mini-clusters was compared with another, a characteristic absence of correlation was observed, even in cases where fragments from two mini-clusters overlapped on the mature tRNA sequence from which they originated (see, for example, the mini-clusters 1a and 2 in FIG. 7A, or clusters 1 and 3 in FIG. 7B). These observations, in conjunction with the small standard error across the 452 (LCL) and 311 (BRCA) individuals shown in FIG. 1, lend more weight to the view that the fragments from all three regions of the mature tRNA are constitutive in nature and not random degradation products.

The tRNA Fragments have Lengths that are Specific to Tissue and Tissue-State

[0225] Inspection of the distributions shown in FIGS. 3A-3D and FIGS. 4A-4D indicates that the specifics of 5′-tRFs, i-tRFs, and 3′-tRFs depend strongly on the tissue. Looking at the BRCA datasets (and without distinguishing between the normal and tumor datasets), it was evident that the dominant fragments have lengths between 19 and 24 nt and account for 60.2% of all tRNA fragments in this collection. By contrast, the LCL datasets have dominant fragments with lengths of 18, 33, and 36 nt and account for nearly 50% of all tRFs.

[0226] To increase the resolution, the BRCA fragment distributions of FIGS. 4A-4D were further decomposed into their two constituent parts, namely the subset of normal datasets and that of the tumor datasets (FIGS. 4A-4D).

[0227] The tissue-type differences that existed between the normal BRCA and the normal LCL datasets were now more evident. In the internal region, 36-mers i-tRFs were the lion's share in the LCL set (FIG. 3A), whereas in the BRCA set, 20-mer i-tRFs provided a modest contribution to the total pool of fragments in the normal breast datasets (FIG. 8A).

[0228] In the +1 region, 5′-tRFs with length 19 nt (FIG. 8B) were the dominant population in normal breast (compare this with the 33-mers and 36-mers in the +1 region in LCLs, shown in FIG. 3B).

[0229] Lastly, the CCA-ending region was dominated by 17-mer, 18-mer and 33-mer 3′-tRFs in LCL (FIG. 3C), yet a fairly uniform distribution was found in i-tRFs with lengths between 17-24 nt in normal breast (FIG. 8C).

[0230] Having decomposed the BRCA distribution into its normal (17 datasets) and tumor (294) components, the similarities and differences that might depend on tissue state were identified. The most striking differences were among the i′-tRFs and the 5′-tRFs, suggesting an intriguing and currently unexplored interconnection between the two categories of fragments.

[0231] As can be seen from FIGS. 8A-8D, the proportion of internal fragments with 20 nt length was nearly halved in the tumor datasets compared to normal (p-val <10⁻³). The proportion of 5′-tRFs with 19 nt length and with lengths ≥30 nt were more than doubled in the tumor datasets (p-val <10⁻³ for both comparisons). It appears as if the normal datasets preferentially produced i-tRFs while also reducing the expression of the 5′-tRFs, with a reversal of this situation occurring in the tumor. Notably, the relative abundance for the rest of the i-tRFs and 5′-tRFs remained largely unchanged between normal and tumor.

The tRNA Fragments have Relative Abundances that are Tissue-Specific and Tissue-State-Specific

[0232] In the context of messenger RNA (mRNA) expression studies, the abundance profiles of mRNAs that are common to two tissues can be used to tell the tissues apart (tissue-specific mRNA “signatures”). Similarly, for a given tissue, mRNA abundance profiles can distinguish between normal and disease states (tissue-state-specific mRNA “signatures”). It was determined whether tRFs possess similar properties.

[0233] To investigate the possibility of a tissue-specific profile, 200 tRFs common to the datasets were focused on: a) the subset of 253 female datasets from the LCL dataset (all of whom are healthy), and b) the 17 normal (female) datasets from the BRCA dataset.

[0234] In FIG. 9A, a principal component analysis (unsupervised) of the abundances of the 200 fragments is shown to distinguish between the two tissues. It is important to note how characteristically tight each of the two point clusters is. This indicates that the abundance profiles of these 200 tRNA fragments were very similar across all datasets belonging to the same cluster. The within-group similarity of the tRF abundance profiles further supports the view that these fragments were constitutive in nature and not degradation products.

[0235] As the LCL and BRCA datasets come from two distinct studies, the possibility that the differences were due to biases caused by either the sequencing methods and/or by the whole experimental handling of the datasets needed to be excluded. Due to the lack of standard datasets that were common to both studies, the data was truncated by rank-normalizing the two datasets. By ranking the expression in each dataset, much of the quantitative information was lost and only the relative ordering based on abundance was retained.

[0236] By performing PCA on this truncated dataset, the two datasets were easily distinguished, which indicates that the differences in the abundance profiles were of a biological basis, not due to experimental biases. SAM, a non-parametric significance analysis method, was used to identify quantitative differences between the two datasets. Most of the fragments were differentially abundant between the two tissues. More than 30% of the significantly differentiated fragments were i-tRFs, which further argues for the importance of this novel category of tRFs.

[0237] To investigate the possibility of a tissue-state-specific profile, a single group was formed by combining all tumor datasets, independent of hormone status. Unlike the above example, this dataset has an artificially increased underlying heterogeneity, the result of having combined all breast cancer subtypes into a single group of datasets. A supervised clustering approach was used, namely PLS-DA. FIG. 9B shows that PLS-DA can easily distinguish between the two sets based on the abundance levels of these tRFs. It is also worth noting that the tumor dataset heterogeneity is reflected by the lack of tightness in the formed tumor cluster of FIG. 9B.

The tRNA Fragments Exhibit Race-Dependent Differences at the Tissue, Cellular, and Molecular Levels

[0238] In recent work, transcripts whose abundance differed across human races, between males and females, or between population groups was reported. Considering that both the LCL and the BRCA samples included individuals belonging to different races, it was determined whether the abundance profiles of the tRNA fragments exhibited any differences along this dimension.

[0239] The transcriptional profiles in the LCL samples of the 93 samples originating from the CEU (white) group vs those of the 95 from the YRI (black) group were compared. FIG. 10A shows the results of the (unsupervised) Principal Component Analysis (PCA) for the CEU/YRI subset of the LCL dataset. The 1^{st} and 3^{rd} principal component provided a good separation of the two groups with modest cross-talk, indicating that the tRNA fragments exhibited race-dependent transcriptional differences at the cellular level (EBV-immortalized B-cells).

[0240] The subset of 78 triple negative breast cancer samples from the BRCA dataset were examined. This subset contained adequate numbers of black (16) and white (51) patients to permit statistical analyses. Because of the underlying heterogeneity of the analyzed cells, a supervised approach (Partial Least Squares-Discriminant Analysis, PLS-DA) was used. FIG. 10B shows the results: as with the LCL samples, there was an evident separation between the white and the black patients that was characterized by only modest cross-talk, indicating that the tRNA fragment profile differed between human races at the tissue level as well.

[0241] To investigate the possibility that differences existed among different populations, the graphs of FIGS. 3A-3D were decomposed into their constituent population components to determine if the curves of all five populations followed a similar pattern. However, a closer look allowed the identification of significant differences in the length distributions among races. FIG. 10C shows a detail for the CEU and YRI populations. As can be seen, there were nearly twice as many 18-mers among the fragments of the YRI population compared to the CEU population (p-val ≤10⁻⁴). For fragments with a length of 33 nts, the situation was reversed with the CEU population making twice as many compared to the YRI (p-val ≤10⁻⁴). In other words, even though the curves of the five populations were qualitatively similar, there were quantitative and statistically significant differences in the lengths and abundances of the fragments produced by members of the CEU and YRI groups at the molecular level as well.

[0242] In light of these observations, identification of which tRNA fragments had significantly different abundances between the two populations was determined. SAM, a nonparametric clustering method, was used. At a strict FDR of 0.00%, SAM identified 93 differentially expressed tRNA fragments: 48 had lower expression in the YRI samples compared to the CEU ones, whereas the remaining 45 had higher expression. Interestingly, the vast majority of the tRNA fragments with lower expression in the YRI group were of mitochondrial origin. Specifically, they were i-tRFs of the mitochondrial SerGCT tRNA that started around position +13 and ended around position +43. Mitochondrial tRNAs, ValTAC and PheGAA, also contributed significantly to the list of fragments that were differentially expressed between CEU and YRI.

[0243] Among the fragments that had higher expression in the YRI samples compared to the CEU ones and were identified by SAM, those originating from the LysCTT anticodon were dominant. Of the 45 tRNA fragments emerging from the template, 30 were statistically significant. An additional 5 statistically significant fragments in this category came from the LysTTT anticodon. The majority of the LysCTT fragments began before position +8 of the mature tRNA and ended just before the anticodon triplet (nucleotide 33 using trna13 of LysCTT on chromosome 14 as a reference). Only 2 of the 30 were classic 5′ tRNA halves (they start at position +1), whereas the rest were novel internal fragments. The 5′ terminus of these fragments was located between positions +1 and +7 inclusive and there was no consensus length: their length ranged between 21 and 33 nts.

The tRNA Fragments Exhibit Gender-Dependencies

[0244] The possibility that the tRNA fragments showed differences across gender boundaries was examined. Among the 452 LCL samples, men and women as well as the five populations (CEU, FIN, GBR, TSI, YRI) were evenly represented. There was a tendency for separation, but not a clear discrimination of the two genders. Specifically, the read length distributions of FIGS. 3A-3D were decomposed, but separately for men and women and for the five populations.

[0245] FIG. 11A shows the distributions for i-tRFs from men and women (YRI datasets only) for the internal 36-mers. These i-tRFs are less abundant in YRI males compared to YRI females (p-val=0.036). FIG. 11B shows analogously a portion of the distribution for CCA-ending fragments from men and women (TSI datasets only).

[0246] In the TSI population, these 22-mers were more abundant in women compared to men with the difference statistically significant (p-val=0.018). Using PLS-DA on the TSI men and women, a trend is seen for separation of the two genders (FIG. 11C). Among the fragments that are significant for the construction of the PLS-DA-driven separation (VIP scores >1.5), more than half (49 out of 94) are i-tRFs.

The tRNA Fragments Exhibit Abundances that Depend on Disease Subtype

[0247] The different tumor subtypes captured by the BRCA datasets were analyzed to investigate whether the profiles of tRFs differed between tumor subcategories. For this analysis, three subsets were used: the normal breast datasets, the ER−/PR−/HER2− (triple negative) datasets, and the ER+/PR+/HER2+(triple positive) datasets. Since the tRF profiles have been shown to be ethnicity-dependent, a single race was chosen, in particular white women who were represented in the BRCA collection at adequately high numbers (15 normal, 24 triple positive and 51 triple negative datasets).

[0248] Pair-wise PLS-DA analyses were performed. In all three cases, the two categories being compared were distinguished clearly from one another (FIGS. 12A-12C). Importantly, the ability to discriminate the two tumor subtypes based on tRNA fragment abundance suggests a potentially significant role for these fragments in the respective biology of breast cancer subtypes.

[0249] All of the statistically significant tRFs had lower abundance in the tumor datasets compared to the normal datasets (FIG. 12D). The findings were cross-validated through an independent SAM analysis. In concordance with the PLS-DA model, SAM also identified the same 17 fragments as having lower abundance in each tumor subtype compared to the normal datasets. Triple negative tumors were characterized by an additional 19 fragments with lower abundances in the tumor compared to the normal datasets (for a total of 36 fragments in the triple negative subtype).

[0250] It is important to note that the majority of differentially abundant tRFs in the two normal vs. tumor comparisons were from the internal region, i.e. i-tRFs (FIG. 12D). In the intra-tumor comparison, the differentially abundant tRFs were all 5′-tRFs and most of them were 19-mers from different genomic loci of the nuclear ArgTCG anticodon. These findings are in concordance with FIGS. 4A and 4B, validated by two independent statistical methods (PLS-DA and SAM), which in turn suggests the existence of concrete differences in the abundance of the tRNA fragment population in the two disease subtypes.

### TRFs are Loaded on Argonaute in a Cell-Line-Specific Manner

[0251] Previous work demonstrated that tRFs could be loaded on Argonaute (Ago), which indicates that one tRF function is through the RNAi pathway. No previous reports have examined differential Ago-loading of tRFs as a function of tissue, disease-state, ethnicity, or disease subtype.

[0252] To this end, publicly available Ago HITS-CLIP datasets were analyzed for three different breast cancer cell lines, each of which models specific breast cancer categories: MDA-MB-231 (ER−/PR−/HER2−), MCF7 (ER+), and BT-474 (HER2+). For consistency, and since the TCGA-BRCA dataset contained only reads ≤30 nt, the HITS-CLIP datasets were analyzed using only sequenced reads that were ≤30 nt long.

[0253] 70 of the abundant fragments originated in the internal (i-tRFs) and 68 in the CCA-ending (3′-tRFs) regions. By comparison, only 25 abundant 5′-tRFs were loaded on Argonaute.

[0254] The length distributions of all Ago-loaded tRFs with length ≤30 nt were analyzed in the three cell lines. Interestingly, each cell line was found to have its own distinct profile of Ago-loaded fragments (FIG. 13). In particular, BT-474 cells exhibited a peak for 26-mers that mainly included i-tRFs. On the other hand, MDA-MB-231 had a prevalence for Ago-loaded 16-mers, 17-mers, and 21-mers 3′-tRFs and 23-mers from the internal origin (i-tRFs). MCF-7 cells exhibited a prevalence for Ago-loaded 17-mers and 29-mers. These findings support a model where the tRNA fragments are preferentially Ago-loaded in a manner that is cell-line-specific, presumably reflecting disease-subtype specificity. Also, the results further corroborate the functional roles for the shorter tRFs through their participation in the RNAi pathway as miRNA-like entities.

[0255] Fragment-Specific PCR-Based Validation of Internal tRNA Fragments in Clinical Samples and Cell Lines

[0256] The tRFs that arise from the internal region of mature tRNAs represent a novel category of tRFs. Independent experimental validation was sought for these novel molecules. For this purpose, one i-tRF was selected that begins within the loop region of the D-loop of AspGTC and ends at the anticodon (FIG. 14A) and one that starts just before the anticodon loop and ends at the T-loop of GlyTCC (FIG. 14B). Both fragments were identified repeatedly in the analyses of the BRCA datasets. The quantification task challenging is due to the requirement that the fragment must be amplified while ensuring that the amplified molecule has the same endpoints captured by the RNA-seq datasets. To this end, the “dumbbell-PCR” was used to detect RNA molecules with a specified length and specified endpoints.

[0257] The FIREPLEX® (Firefly BioWorks, Boston, MA) approach, a method with single nucleotide specificity, for quantification of the second tRF, was also used. Total RNA extracted from 11 breast tumor and 11 adjacent normal breast samples was used for starting material. Quantification of the AspGTC tRNA fragment and total RNA from eight different normal or breast cancer cell lines, as well as quantification of the GlyTCC-derived fragment, was performed.

[0258] The tRF from the AspGTC anticodon was specifically amplified and its expression was quantified in 21 of the 22 experiments (FIG. 14A). In five of the 11 analyzed pairs, there was a statistically significant decrease in the tumor sample (p-val <0.01; Student's t-test). In two other samples, the fragment's expression was statistically significantly increased in the tumor (p-val <0.01; Student's t-test).

[0259] These results validate the existence of the novel i-tRFs in independent samples and provide initial evidence that such fragments have differential abundancies in healthy and breast tumor tissue. The results further agree with the analysis of the BRCA datasets. The second i-tRF, from the GlyTCC tRNA, spanning the anticodon triplet was quantified in eight different normal and breast cancer cell lines using the multiplex miRNA assay, which is based on the FIREPLEX® approach (FIG. 14B). In all of the cases, the i-tRF was detected and present at significantly increased levels over the background threshold.

A Single Locus can Give Rise to Many tRNA Fragments in a Single Tissue

[0260] In the analysis of the breast samples from the TCGA repository, many short RNAs were identified that were statistically significant, and present in the samples of multiple individuals. Even though the specifics may have differed slightly from one isodecoder to the next (e.g. nuclear trna78-AspGTC vs. nuclear tma144-AspGTC), the basic behavior for instances of the same tRNA anticodon remained the same. For example, nuclear AspGTC gave rise to diverse fragments (FIG. 15).

Targeting by tRFs Loading of tRNA fragments on Argonaute indicates that they act as miRNA-like guide-RNAs for Ago and possibly participate in the RNA interference pathway. The targets of these miRNA-like tRNA fragments are referred to as “interlocked” targets. In addition, others have published work where it was shown that a transcript A can “target” and modulate the abundance of another transcript B simply by acting as a molecular decoy for a miRNA or an RNA binding protein (RBP) that would otherwise interact with B. In this case, B is a “decoyed” target of A (and vice versa). Clearly, both modes of targeting are of interest in the tRNA fragment setting. To this end, two algorithms were devised: one for predicting interlocked targets and one for predicting decoyed targets.

### Algorithm for Predicting Interlocked Targets

[0261] The methodology used to design ma22, a very popular miRNA target prediction algorithm, was used. Briefly: a) a list was made of the sequences of all tRFs that were statistically significant across all analyzed datasets for the cancer being studied; b) the sequences were analyzed with Teiresias, a publicly available pattern discovery algorithm, to identify salient sequence features that were shared by two or more tRFs—the similarity in the isodecoder sequences guaranteed that such patterns do exist; c) the patterns were reverse-complemented and populated with a hash-table; d) the hash-table was used to process the transcripts of all mRNAs and ncRNAs whose abundance was above the threshold in the long RNA-seq datasets of the cancer's samples. A target site contained in an mRNA or ncRNA led to a pattern accumulation at that site and the formation of a “bump;” e) using a threshold obtained through a Monte Carlo simulation with random strings, the bumps with low heights were filtered out (support by only a few patterns); f) for each putative target site, the RNAfold or a similar algorithm was used to generate patterns of each tRFs to form the final candidate tRF:target heteroduplexes. Table 1 shows an example target.

TABLE 1
Examples of predicted tRF mRNA interactions from the TCGA BRCA
analyses.

```
A) RAB34: AspGTC tRF [positions 31-53]
SEQ ID NO: 55729 5′->ATTCT--TCTTCCGTGTGGCAGC->3′
                                          |::|: |||:|||:|||:||||
SEQ ID NO: 55730 3′<-TGGGGCCAGAGGGCGCACTGTCC<-5′
B) SIKE1: GlnTTG tRF [positions 1-30]
SEQ ID NO: 55731 5′->GGCCCCATTGTGTAATAGTTAGCACTCTAA->3′
                                          || ||||| ||||||| |||||||||||
SEQ ID NO: 55732 5′->GGTCCCATGGTGTAATGGTTAGCACTCTGG->3′
A) an interlocked target prediction (RAB34).
B) a decoyed target prediction (SIKE1).
```

### Algorithm for Predicting Decoyed Targets.

[0262] For this, the steps of the interlocked-target algorithm were followed with the following key modifications: i) in step c) the patterns were not reverse-complemented prior to populating the hash-table; ii) in step f) any of a number of standard algorithms were used, such as BLAST, FASTA etc., to search the patterns generated by each of the tRFs to see which matched the target site the best (=best local alignment). Unlike the previous algorithm, in this algorithm a “bump” indicated that the mRNA or ncRNA sequence fragment under it resembled a similarly-sized segment among the tRFs at hand. Table 1 shows one such example target.

[0263] The Materials and Methods used in the performance of the experiments disclosed herein, which have not been covered already, are now described.

[0264] Notation

[0265] To facilitate the discussion, the notation that is used by tRNAscan-SE was augmented. In particular, the existing labels were tagged with fragment-specific information, namely the relative positions inside a reference tRNA and the number of appearances in other tRNAs of the same or different anticodons. For example, the augmented label

[0266] trna116_GluCTC_1_-_145399233_145399304@23.45.23_1_0_8 refers to the tRNA fragment that has length of 23 and spans positions 23 through 45 inclusive of the mature trnal 16 of GluCTC. The latter being located on the reverse (negative) strand of chromosome 1 between positions 145399233 and 145399304 inclusive. In the cases where more than one genomic tRNA loci produces the fragment, only one tRNA locus was chosen to serve as a source-proxy.

[0267] The last three numbers of the augmented label that follow the double underscore captured the following information: a) the number of different anticodons that may give rise to this fragment (1 in the above example), the number of pseudo tRNAs that also contain this fragment sequence (0 in the example), and the total number of genomic loci within the tRNA space (see below) that are possible sources of the fragment (8 in this case). Lastly, for fragments whose 3′ end is within the span of the terminal CCA, the infix “CCA” was added before the double underscore, e.g., trna75_MetCAT_6_+_28912352_28912424@57.76.20.CCA_1_0_2.

[0268] Defining the tRNA Space

[0269] Directly linked to mapping is the definition of what constitutes the genome's tRNA space. For the purposes described herein, the following were combined:
[0270] a) the 22 known human mitochondrial tRNA sequences (NCBI entry NC_012920.1);
[0271] b) 610 (508 true tRNAs and 102 pseudo-tRNAs) of the 625 nuclear tRNA sequences from gtRNAdb. The selenocysteine tRNAs were excluded from the considered gtRNAdb entries, tRNAs with undetermined anticodon identity, and tRNAs mapping to contigs that were not part of the human chromosome assembly;
[0272] c) the eight genomic intervals chr1:+:566062-566129, chr1:+:568843-568912, chr1:−:564879-564950, chr1:−:566137-566205, chr14:+:32954252-32954320, chr1:−: 566207-566279, chr1:−:567997-568065, and, chr5:−:93905172-93905240—all coordinates were from the hg19 assembly of the human genome—that corresponded to identical instances of seven mitochondrial tRNAs TrpTCA, LysTTT, GlnTTG, AlaTGC (×2), AsnGTT, SerTGA, and, GluTTC respectively.

[0273] In total, the tRNA space included 640 sequences.

[0274] Mapping on the Genome

[0275] The repeating nature of tRNA sequences required that special steps be taken when mapping the RNA-seq data on the genome.
[0276] i) Multiple hits: To account for any given tRNA anticodon having multiple genomic locations and properly mapping the sequenced reads arising from such loci, any given sequenced read was permitted to potentially map up to 10,000 distinct genomic locations.
[0277] ii) Exact matches: To accommodate the possibility of occasional errors manifested in the form of nucleotide replacements, nucleotide insertions or deletions (indels), or various combinations thereof, a small number of indels and mismatches was permitted during the mapping step of the deep sequencing. More flexibility and improved mapping rates translated into localization errors, when working with tRNAs. Therefore, a conservative mapping strategy and exact mapping of reads on the genome was employed to map without any insertions or deletions.
[0278] iii) Mapping the full genome: As disclosed herein, compiling a database of all known tRNA sequences and then mapping the sequenced reads would miss the fact that some segments of the known tRNAs also appear inside non-tRNA sequences, and lead to incorrect conclusions. Mapping the sequenced reads on the full genome then post-processing each mapped read and discarding those that map both inside and outside the known tRNAs.
[0279] iv) Presence of terminal CCA: Any sequenced reads that corresponded to the 3′ of mature tRNAs included the post-transcriptionally added terminal triplet CCA. Exact mapping of the reads did not accommodate CCA's presence. Instead, prior to mapping, a modified instance of the genome was created where CCA was used to replace the three genomic nucleotides immediately downstream of each of the 640 reference mature tRNAs.

### OTHER EMBODIMENTS

[0280] The recitation of a listing of elements in any definition of a variable herein includes definitions of that variable as any single element or combination (or subcombination) of listed elements. The recitation of an embodiment herein includes that embodiment as any single embodiment or in combination with any other embodiments or portions thereof.

[0281] The disclosures of each and every patent, patent application, and publication cited herein are hereby incorporated herein by reference in their entirety. While this invention has been disclosed with reference to specific embodiments, it is apparent that other embodiments and variations of this invention may be devised by others skilled in the art without departing from the true spirit and scope of the invention. The appended claims are intended to be construed to include all such embodiments and equivalent variations.

The application's sequence listing, which the Patent Office published only in electronic form, follows.

SEQUENCE LISTING (55746 sequences)

SEQ ID NO: 1 - DNA, 43 bp, synthetic construct
  misc_feature 1..43: note = Probe
  source 1..43: mol_type = other DNA
aaaacatcagattgtgaatctgacaacagaggcttacgacccc

SEQ ID NO: 2 - DNA, 45 bp, synthetic construct
  misc_feature 1..45: note = Probe
  source 1..45: mol_type = other DNA
aaaacatcagattgtgaatctgacaacagaggcttacgacccctt

SEQ ID NO: 3 - DNA, 46 bp, synthetic construct
  misc_feature 1..46: note = Probe
  source 1..46: mol_type = other DNA
aaaacatcagattgtgaatctgacaacagaggcttacgacccctta

SEQ ID NO: 4 - DNA, 50 bp, synthetic construct
  misc_feature 1..50: note = Probe
  source 1..50: mol_type = other DNA
aaaacatcagattgtgaatctgacaacagaggcttacgaccccttattta

SEQ ID NO: 5 - DNA, 28 bp, synthetic construct
  misc_feature 1..28: note = Probe
  source 1..28: mol_type = other DNA
aaaacttaaaactttacagtcagaggtt

SEQ ID NO: 6 - DNA, 39 bp, synthetic construct
  misc_feature 1..39: note = Probe
  source 1..39: mol_type = other DNA
aaaacttaaaactttacagtcagaggttcaattcctctt

SEQ ID NO: 7 - DNA, 40 bp, synthetic construct
  misc_feature 1..40: note = Probe
  source 1..40: mol_type = other DNA
aaaacttaaaactttacagtcagaggttcaattcctcttc

SEQ ID NO: 8 - DNA, 21 bp, synthetic construct
  misc_feature 1..21: note = Probe
  source 1..21: mol_type = other DNA
aaaactttacagtcagaggtt

SEQ ID NO: 9 - DNA, 33 bp, synthetic construct
  misc_feature 1..33: note = Probe
  source 1..33: mol_type = other DNA
aaaactttacagtcagaggttcaattcctcttc

SEQ ID NO: 10 - DNA, 22 bp, synthetic construct
  misc_feature 1..22: note = Probe
  source 1..22: mol_type = other DNA
aaaatgtttagacgggctcaca

SEQ ID NO: 11 - DNA, 23 bp, synthetic construct
  misc_feature 1..23: note = Probe
  source 1..23: mol_type = other DNA
aaaatgtttagacgggctcacat

SEQ ID NO: 12 - DNA, 44 bp, synthetic construct
  misc_feature 1..44: note = Probe
  source 1..44: mol_type = other DNA
aaacatcagattgtgaatctgacaacagaggcttacgacccctt

SEQ ID NO: 13 - DNA, 45 bp, synthetic construct
  misc_feature 1..45: note = Probe
  source 1..45: mol_type = other DNA
aaacatcagattgtgaatctgacaacagaggcttacgacccctta

SEQ ID NO: 14 - DNA, 50 bp, synthetic construct
  misc_feature 1..50: note = Probe
  source 1..50: mol_type = other DNA
aaacatcagattgtgaatctgacaacagaggcttacgaccccttatttac

SEQ ID NO: 15 - DNA, 32 bp, synthetic construct
  misc_feature 1..32: note = Probe
  source 1..32: mol_type = other DNA
aaaccggagatgaaaacctttttccaaggaca

SEQ ID NO: 16 - DNA, 39 bp, synthetic construct
  misc_feature 1..39: note = Probe
  source 1..39: mol_type = other DNA
aaacttaaaactttacagtcagaggttcaattcctcttc

SEQ ID NO: 17 - DNA, 32 bp, synthetic construct
  misc_feature 1..32: note = Probe
  source 1..32: mol_type = other DNA
aaactttacagtcagaggttcaattcctcttc

SEQ ID NO: 18 - DNA, 20 bp, synthetic construct
  misc_feature 1..20: note = Probe
  source 1..20: mol_type = other DNA
aaagacaggggttaggcctc

SEQ ID NO: 19 - DNA, 29 bp, synthetic construct
  misc_feature 1..29: note = Probe
  source 1..29: mol_type = other DNA
aaagacaggggttaggcctctttttacca

SEQ ID NO: 20 - DNA, 34 bp, synthetic construct
  misc_feature 1..34: note = Probe
  source 1..34: mol_type = other DNA
aaagcaatacactgaaaatgtttagacgggctca

SEQ ID NO: 21 - DNA, 36 bp, synthetic construct
  misc_feature 1..36: note = Probe
  source 1..36: mol_type = other DNA
aaagcaatacactgaaaatgtttagacgggctcaca

SEQ ID NO: 22 - DNA, 44 bp, synthetic construct
  misc_feature 1..44: note = Probe
  source 1..44: mol_type = other DNA
aaagcaatacactgaaaatgtttagacgggctcacatcacccca

SEQ ID NO: 23 - DNA, 45 bp, synthetic construct
  misc_feature 1..45: note = Probe
  source 1..45: mol_type = other DNA
aaagcaatacactgaaaatgtttagacgggctcacatcaccccat

SEQ ID NO: 24 - DNA, 49 bp, synthetic construct
  misc_feature 1..49: note = Probe
  source 1..49: mol_type = other DNA
aaagcaatacactgaaaatgtttagacgggctcacatcaccccataaac

SEQ ID NO: 25 - DNA, 50 bp, synthetic construct
  misc_feature 1..50: note = Probe
  source 1..50: mol_type = other DNA
aaagcaatacactgaaaatgtttagacgggctcacatcaccccataaaca

SEQ ID NO: 26 - DNA, 19 bp, synthetic construct
  misc_feature 1..19: note = Probe
  source 1..19: mol_type = other DNA
aaagctcacaagaactgct

SEQ ID NO: 27 - DNA, 23 bp, synthetic construct
  misc_feature 1..23: note = Probe
  source 1..23: mol_type = other DNA
aaagctcacaagaactgctaact

SEQ ID NO: 28 - DNA, 24 bp, synthetic construct
  misc_feature 1..24: note = Probe
  source 1..24: mol_type = other DNA
aaagctcacaagaactgctaactc

SEQ ID NO: 29 - DNA, 25 bp, synthetic construct
  misc_feature 1..25: note = Probe
  source 1..25: mol_type = other DNA
aaagctcacaagaactgctaactca

SEQ ID NO: 30 - DNA, 28 bp, synthetic construct
  misc_feature 1..28: note = Probe
  source 1..28: mol_type = other DNA
aaagctcacaagaactgctaactcatgc

SEQ ID NO: 31 - DNA, 29 bp, synthetic construct
  misc_feature 1..29: note = Probe
  source 1..29: mol_type = other DNA
aaagctcacaagaactgctaactcatgcc

SEQ ID NO: 32 - DNA, 50 bp, synthetic construct
  misc_feature 1..50: note = Probe
  source 1..50: mol_type = other DNA
aaagctcacaagaactgctaactcatgcccccatgtctaacaacatggct

SEQ ID NO: 33 - DNA, 34 bp, synthetic construct
  misc_feature 1..34: note = Probe
  source 1..34: mol_type = other DNA
aaatctaaagacaggggttaggcctctttttacc

SEQ ID NO: 34 - DNA, 35 bp, synthetic construct
  misc_feature 1..35: note = Probe
  source 1..35: mol_type = other DNA
aaatctaaagacaggggttaggcctctttttacca

SEQ ID NO: 35 - DNA, 21 bp, synthetic construct
  misc_feature 1..21: note = Probe
  source 1..21: mol_type = other DNA
aaatgtttagacgggctcaca

SEQ ID NO: 36 - DNA, 50 bp, synthetic construct
  misc_feature 1..50: note = Probe
  source 1..50: mol_type = other DNA
aaattagaatcttagctttgggtgctaatggtggagttaaagactttttc

SEQ ID NO: 37 - DNA, 41 bp, synthetic construct
  misc_feature 1..41: note = Probe
  source 1..41: mol_type = other DNA
aacacaaagcacccaacttacacttaggagatttcaactta

SEQ ID NO: 38 - DNA, 43 bp, synthetic construct
  misc_feature 1..43: note = Probe
  source 1..43: mol_type = other DNA
aacacaaagcacccaacttacacttaggagatttcaacttaac

SEQ ID NO: 39 - DNA, 50 bp, synthetic construct
  misc_feature 1..50: note = Probe
  source 1..50: mol_type = other DNA
aacacaaagcacccaacttacacttaggagatttcaacttaacttgaccg

SEQ ID NO: 40 - DNA, 43 bp, synthetic construct
  misc_feature 1..43: note = Probe
  source 1..43: mol_type = other DNA
aacatcagattgtgaatctgacaacagaggcttacgacccctt

SEQ ID NO: 41 - DNA, 44 bp, synthetic construct
  misc_feature 1..44: note = Probe
  source 1..44: mol_type = other DNA
aacatcagattgtgaatctgacaacagaggcttacgacccctta

SEQ ID NO: 42 - DNA, 50 bp, synthetic construct
  misc_feature 1..50: note = Probe
  source 1..50: mol_type = other DNA
aacatcagattgtgaatctgacaacagaggcttacgaccccttatttacc

SEQ ID NO: 43 - DNA, 40 bp, synthetic construct
  misc_feature 1..40: note = Probe
  source 1..40: mol_type = other DNA
aaccaaaacatcagattgtgaatctgacaacagaggctta

SEQ ID NO: 44 - DNA, 43 bp, synthetic construct
  misc_feature 1..43: note = Probe
  source 1..43: mol_type = other DNA
aaccaaaacatcagattgtgaatctgacaacagaggcttacga

SEQ ID NO: 45 - DNA, 46 bp, synthetic construct
  misc_feature 1..46: note = Probe
  source 1..46: mol_type = other DNA
aaccaaaacatcagattgtgaatctgacaacagaggcttacgaccc

SEQ ID NO: 46 - DNA, 49 bp, synthetic construct
  misc_feature 1..49: note = Probe
  source 1..49: mol_type = other DNA
aaccaaaacatcagattgtgaatctgacaacagaggcttacgacccctt

SEQ ID NO: 47 - DNA, 50 bp, synthetic construct
  misc_feature 1..50: note = Probe
  source 1..50: mol_type = other DNA
aaccaaaacatcagattgtgaatctgacaacagaggcttacgacccctta

SEQ ID NO: 48 - DNA, 21 bp, synthetic construct
  misc_feature 1..21: note = Probe
  source 1..21: mol_type = other DNA
aaccgaagatcacgggttcga

SEQ ID NO: 49 - DNA, 21 bp, synthetic construct
  misc_feature 1..21: note = Probe
  source 1..21: mol_type = other DNA
aaccgaagatcgcgggttcga

SEQ ID NO: 50 - DNA, 17 bp, synthetic construct
  misc_feature 1..17: note = Probe
  source 1..17: mol_type = other DNA
aaccggagatgaaaacc

SEQ ID NO: 51 - DNA, 29 bp, synthetic construct
  misc_feature 1..29: note = Probe
  source 1..29: mol_type = other DNA
aaccggagatgaaaacctttttccaagga

SEQ ID NO: 52 - DNA, 30 bp, synthetic construct
  misc_feature 1..30: note = Probe
  source 1..30: mol_type = other DNA
aaccggagatgaaaacctttttccaaggac

SEQ ID NO: 53 - DNA, 31 bp, synthetic construct
  misc_feature 1..31: note = Probe
  source 1..31: mol_type = other DNA
aaccggagatgaaaacctttttccaaggaca

SEQ ID NO: 54 - DNA, 17 bp, synthetic construct
  misc_feature 1..17: note = Probe
  source 1..17: mol_type = other DNA
aaccgggcggaaacacc

SEQ ID NO: 55 - DNA, 35 bp, synthetic construct
  misc_feature 1..35: note = Probe
  source 1..35: mol_type = other DNA
aactaagtgtttgtgggtttaagtcccattggtct

SEQ ID NO: 56 - DNA, 36 bp, synthetic construct
  misc_feature 1..36: note = Probe
  source 1..36: mol_type = other DNA
aactaagtgtttgtgggtttaagtcccattggtcta

SEQ ID NO: 57 - DNA, 26 bp, synthetic construct
  misc_feature 1..26: note = Probe
  source 1..26: mol_type = other DNA
aacttaaaactttacagtcagaggtt

SEQ ID NO: 58 - DNA, 27 bp, synthetic construct
  misc_feature 1..27: note = Probe
  source 1..27: mol_type = other DNA
aacttaaaactttacagtcagaggttc

SEQ ID NO: 59 - DNA, 28 bp, synthetic construct
  misc_feature 1..28: note = Probe
  source 1..28: mol_type = other DNA
aacttaaaactttacagtcagaggttca

SEQ ID NO: 60 - DNA, 37 bp, synthetic construct
  misc_feature 1..37: note = Probe
  source 1..37: mol_type = other DNA
aacttaaaactttacagtcagaggttcaattcctctt

SEQ ID NO: 61 - DNA, 38 bp, synthetic construct
  misc_feature 1..38: note = Probe
  source 1..38: mol_type = other DNA
aacttaaaactttacagtcagaggttcaattcctcttc

SEQ ID NO: 62 - DNA, 39 bp, synthetic construct
  misc_feature 1..39: note = Probe
  source 1..39: mol_type = other DNA
aacttaaaactttacagtcagaggttcaattcctcttct

SEQ ID NO: 63 - DNA, 19 bp, synthetic construct
  misc_feature 1..19: note = Probe
  source 1..19: mol_type = other DNA
aactttacagtcagaggtt

SEQ ID NO: 64 - DNA, 30 bp, synthetic construct
  misc_feature 1..30: note = Probe
  source 1..30: mol_type = other DNA
aactttacagtcagaggttcaattcctctt

SEQ ID NO: 65 - DNA, 31 bp, synthetic construct
  misc_feature 1..31: note = Probe
  source 1..31: mol_type = other DNA
aactttacagtcagaggttcaattcctcttc

SEQ ID NO: 66 - DNA, 41 bp, synthetic construct
  misc_feature 1..41: note = Probe
  source 1..41: mol_type = other DNA
aagaactgctaactcatgcccccatgtctaacaacatggct

SEQ ID NO: 67 - DNA, 43 bp, synthetic construct
  misc_feature 1..43: note = Probe
  source 1..43: mol_type = other DNA
aagaactgctaactcatgcccccatgtctaacaacatggcttt

SEQ ID NO: 68 - DNA, 44 bp, synthetic construct
  misc_feature 1..44: note = Probe
  source 1..44: mol_type = other DNA
aagaactgctaactcatgcccccatgtctaacaacatggctttc

SEQ ID NO: 69 - DNA, 45 bp, synthetic construct
  misc_feature 1..45: note = Probe
  source 1..45: mol_type = other DNA
aagaactgctaactcatgcccccatgtctaacaacatggctttct

SEQ ID NO: 70 - DNA, 46 bp, synthetic construct
  misc_feature 1..46: note = Probe
  source 1..46: mol_type = other DNA
aagaactgctaactcatgcccccatgtctaacaacatggctttctc

SEQ ID NO: 71 - DNA, 22 bp, synthetic construct
  misc_feature 1..22: note = Probe
  source 1..22: mol_type = other DNA
aagacaggggttaggcctcttt

SEQ ID NO: 72 - DNA, 29 bp, synthetic construct
  misc_feature 1..29: note = Probe
  source 1..29: mol_type = other DNA
aagattctaggttcgactcctggctggct

SEQ ID NO: 73 - DNA, 24 bp, synthetic construct
  misc_feature 1..24: note = Probe
  source 1..24: mol_type = other DNA
aagattgagggttcgagtcccttc

SEQ ID NO: 74 - DNA, 25 bp, synthetic construct
  misc_feature 1..25: note = Probe
  source 1..25: mol_type = other DNA
aagattgagggttcgagtcccttcg

SEQ ID NO: 75 - DNA, 29 bp, synthetic construct
  misc_feature 1..29: note = Probe
  source 1..29: mol_type = other DNA
aagattgagggttcgagtcccttcgtggt

SEQ ID NO: 76 - DNA, 24 bp, synthetic construct
  misc_feature 1..24: note = Probe
  source 1..24: mol_type = other DNA
aagattgcaggttcgagtcctgcc

SEQ ID NO: 77 - DNA, 35 bp, synthetic construct
  misc_feature 1..35: note = Probe
  source 1..35: mol_type = other DNA
aagcaatacactgaaaatgtttagacgggctcaca

SEQ ID NO: 78 - DNA, 43 bp, synthetic construct
  misc_feature 1..43: note = Probe
  source 1..43: mol_type = other DNA
aagcaatacactgaaaatgtttagacgggctcacatcacccca

SEQ ID NO: 79 - DNA, 21 bp, synthetic construct
  misc_feature 1..21: note = Probe
  source 1..21: mol_type = other DNA
aagccagggattgtgggttcg

SEQ ID NO: 80 - DNA, 50 bp, synthetic construct
  misc_feature 1..50: note = Probe
  source 1..50: mol_type = other DNA
aagctatcgggcccataccccgaaaatgttggttatacccttcccgtact

SEQ ID NO: 81 - DNA, 17 bp, synthetic construct
  misc_feature 1..17: note = Probe
  source 1..17: mol_type = other DNA
aagctcacaagaactgc

SEQ ID NO: 82 - DNA, 21 bp, synthetic construct
  misc_feature 1..21: note = Probe
  source 1..21: mol_type = other DNA
aagctcacaagaactgctaac

SEQ ID NO: 83 - DNA, 23 bp, synthetic construct
  misc_feature 1..23: note = Probe
  source 1..23: mol_type = other DNA
aagctcacaagaactgctaactc

SEQ ID NO: 84 - DNA, 50 bp, synthetic construct
  misc_feature 1..50: note = Probe
  source 1..50: mol_type = other DNA
aagctcacaagaactgctaactcatgcccccatgtctaacaacatggctt

SEQ ID NO: 85 - DNA, 18 bp, synthetic construct
  misc_feature 1..18: note = Probe
  source 1..18: mol_type = other DNA
aaggtattagaaaaacca

SEQ ID NO: 86 - DNA, 31 bp, synthetic construct
  misc_feature 1..31: note = Probe
  source 1..31: mol_type = other DNA
aagtgtttgtgggtttaagtcccattggtct

SEQ ID NO: 87 - DNA, 19 bp, synthetic construct
  misc_feature 1..19: note = Probe
  source 1..19: mol_type = other DNA
aatccagcgatccgagttc

SEQ ID NO: 88 - DNA, 20 bp, synthetic construct
  misc_feature 1..20: note = Probe
  source 1..20: mol_type = other DNA
aatccagcgatccgagttca

SEQ ID NO: 89 - DNA, 21 bp, synthetic construct
  misc_feature 1..21: note = Probe
  source 1..21: mol_type = other DNA
aatccagcgatccgagttcaa

SEQ ID NO: 90 - DNA, 22 bp, synthetic construct
  misc_feature 1..22: note = Probe
  source 1..22: mol_type = other DNA
aatccagcgatccgagttcaaa

SEQ ID NO: 91 - DNA, 23 bp, synthetic construct
  misc_feature 1..23: note = Probe
  source 1..23: mol_type = other DNA
aatccagcgatccgagttcaaat

SEQ ID NO: 92 - DNA, 24 bp, synthetic construct
  misc_feature 1..24: note = Probe
  source 1..24: mol_type = other DNA
aatccagcgatccgagttcaaatc

SEQ ID NO: 93 - DNA, 36 bp, synthetic construct
  misc_feature 1..36: note = Probe
  source 1..36: mol_type = other DNA
aatccagcgatccgagttcaaatctcggtggaacct

SEQ ID NO: 94 - DNA, 35 bp, synthetic construct
  misc_feature 1..35: note = Probe
  source 1..35: mol_type = other DNA
aatccagcgatccgagttcaaatctcggtgggacc

SEQ ID NO: 95 - DNA, 36 bp, synthetic construct
  misc_feature 1..36: note = Probe
  source 1..36: mol_type = other DNA
aatccagcgatccgagttcaaatctcggtgggacct

SEQ ID NO: 96 - DNA, 37 bp, synthetic construct
  misc_feature 1..37: note = Probe
  source 1..37: mol_type = other DNA
aatccagcgatccgagttcaaatctcggtgggacctc

SEQ ID NO: 97 - DNA, 21 bp, synthetic construct
  misc_feature 1..21: note = Probe
  source 1..21: mol_type = other DNA
aatccagcgatccgagttcga

SEQ ID NO: 98 - DNA, 23 bp, synthetic construct
  misc_feature 1..23: note = Probe
  source 1..23: mol_type = other DNA
aatccagcgatccgagttcgagt

SEQ ID NO: 99 - DNA, 23 bp, synthetic construct
  misc_feature 1..23: note = Probe
  source 1..23: mol_type = other DNA
aatccattggggtctccccgcgc

SEQ ID NO: 100 - DNA, 36 bp, synthetic construct
  misc_feature 1..36: note = Probe
  source 1..36: mol_type = other DNA
aatcgcataaaacttaaaactttacagtcagaggtt

SEQ ID NO: 101 - DNA, 50 bp, synthetic construct
  misc_feature 1..50: note = Probe
  source 1..50: mol_type = other DNA
aatcgcataaaacttaaaactttacagtcagaggttcaattcctcttctt

SEQ ID NO: 102 - DNA, 33 bp, synthetic construct
  misc_feature 1..33: note = Probe
  source 1..33: mol_type = other DNA
aatctaaagacaggggttaggcctctttttacc

SEQ ID NO: 103 - DNA, 34 bp, synthetic construct
  misc_feature 1..34: note = Probe
  source 1..34: mol_type = other DNA
aatctaaagacaggggttaggcctctttttacca

SEQ ID NO: 104 - DNA, 27 bp, synthetic construct
  misc_feature 1..27: note = Probe
  source 1..27: mol_type = other DNA
aatctgacaacagaggcttacgacccc

SEQ ID NO: 105 - DNA, 29 bp, synthetic construct
  misc_feature 1..29: note = Probe
  source 1..29: mol_type = other DNA
aatctgacaacagaggcttacgacccctt

SEQ ID NO: 106 - DNA, 30 bp, synthetic construct
  misc_feature 1..30: note = Probe
  source 1..30: mol_type = other DNA
aatctgacaacagaggcttacgacccctta

SEQ ID NO: 107 - DNA, 31 bp, synthetic construct
  misc_feature 1..31: note = Probe
  source 1..31: mol_type = other DNA
aatctgacaacagaggcttacgaccccttat

SEQ ID NO: 108 - DNA, 32 bp, synthetic construct
  misc_feature 1..32: note = Probe
  source 1..32: mol_type = other DNA
aatctgacaacagaggcttacgaccccttatt

SEQ ID NO: 109 - DNA, 34 bp, synthetic construct
  misc_feature 1..34: note = Probe
  source 1..34: mol_type = other DNA
aatctgacaacagaggcttacgaccccttattta

SEQ ID NO: 110 - DNA, 35 bp, synthetic construct
  misc_feature 1..35: note = Probe
  source 1..35: mol_type = other DNA
aatctgacaacagaggcttacgaccccttatttac

SEQ ID NO: 111 - DNA, 36 bp, synthetic construct
  misc_feature 1..36: note = Probe
  source 1..36: mol_type = other DNA
aatctgacaacagaggcttacgaccccttatttacc

SEQ ID NO: 112 - DNA, 20 bp, synthetic construct
  misc_feature 1..20: note = Probe
  source 1..20: mol_type = other DNA
aatgtttagacgggctcaca

SEQ ID NO: 113 - DNA, 50 bp, synthetic construct
  misc_feature 1..50: note = Probe
  source 1..50: mol_type = other DNA
aattagaatcttagctttgggtgctaatggtggagttaaagactttttct

SEQ ID NO: 114 - DNA, 37 bp, synthetic construct
  misc_feature 1..37: note = Probe
  source 1..37: mol_type = other DNA
acaaagcacccaacttacacttaggagatttcaactt

SEQ ID NO: 115 - DNA, 38 bp, synthetic construct
  misc_feature 1..38: note = Probe
  source 1..38: mol_type = other DNA
acaaagcacccaacttacacttaggagatttcaactta

SEQ ID NO: 116 - DNA, 40 bp, synthetic construct
  misc_feature 1..40: note = Probe
  source 1..40: mol_type = other DNA
acaaagcacccaacttacacttaggagatttcaacttaac

SEQ ID NO: 117 - DNA, 50 bp, synthetic construct
  misc_feature 1..50: note = Probe
  source 1..50: mol_type = other DNA
acaaagcacccaacttacacttaggagatttcaacttaacttgaccgctc

SEQ ID NO: 118 - DNA, 50 bp, synthetic construct
  misc_feature 1..50: note = Probe
  source 1..50: mol_type = other DNA
acaacgatggtttttcatatcattggtcgtggttgtagtccgtgcgagaa

SEQ ID NO: 119 - DNA, 43 bp, synthetic construct
  misc_feature 1..43: note = Probe
  source 1..43: mol_type = other DNA
acaagaactgctaactcatgcccccatgtctaacaacatggct

SEQ ID NO: 120 - DNA, 44 bp, synthetic construct
  misc_feature 1..44: note = Probe
  source 1..44: mol_type = other DNA
acaagaactgctaactcatgcccccatgtctaacaacatggctt

SEQ ID NO: 121 - DNA, 45 bp, synthetic construct
  misc_feature 1..45: note = Probe
  source 1..45: mol_type = other DNA
acaagaactgctaactcatgcccccatgtctaacaacatggcttt

SEQ ID NO: 122 - DNA, 46 bp, synthetic construct
  misc_feature 1..46: note = Probe
  source 1..46: mol_type = other DNA
acaagaactgctaactcatgcccccatgtctaacaacatggctttc

SEQ ID NO: 123 - DNA, 49 bp, synthetic construct
  misc_feature 1..49: note = Probe
  source 1..49: mol_type = other DNA
acacaaagcacccaacttacacttaggagatttcaacttaacttgaccg

SEQ ID NO: 124 - DNA, 50 bp, synthetic construct
  misc_feature 1..50: note = Probe
  source 1..50: mol_type = other DNA
acacaaagcacccaacttacacttaggagatttcaacttaacttgaccgc

SEQ ID NO: 125 - DNA, 18 bp, synthetic construct
  misc_feature 1..18: note = Probe
  source 1..18: mol_type = other DNA
acacgcgaaaggtccccg

SEQ ID NO: 126 - DNA, 19 bp, synthetic construct
  misc_feature 1..19: note = Probe
  source 1..19: mol_type = other DNA
acacgcgaaaggtccccgg

SEQ ID NO: 127 - DNA, 20 bp, synthetic construct
  misc_feature 1..20: note = Probe
  source 1..20: mol_type = other DNA
acacgcgaaaggtccccggt

SEQ ID NO: 128 - DNA, 18 bp, synthetic construct
  misc_feature 1..18: note = Probe
  source 1..18: mol_type = other DNA
acagaccaagagccttca

SEQ ID NO: 129 - DNA, 50 bp, synthetic construct
  misc_feature 1..50: note = Probe
  source 1..50: mol_type = other DNA
acagaccaagagccttcaaagccctcagtaagttgcaatacttaatttct

SEQ ID NO: 130 - DNA, 17 bp, synthetic construct
  misc_feature 1..17: note = Probe
  source 1..17: mol_type = other DNA
acagctatccattggtc

SEQ ID NO: 131 - DNA, 25 bp, synthetic construct
  misc_feature 1..25: note = Probe
  source 1..25: mol_type = other DNA
acagtcagaggttcaattcctcttc

SEQ ID NO: 132 - DNA, 42 bp, synthetic construct
  misc_feature 1..42: note = Probe
  source 1..42: mol_type = other DNA
acatcagattgtgaatctgacaacagaggcttacgacccctt

SEQ ID NO: 133 - DNA, 43 bp, synthetic construct
  misc_feature 1..43: note = Probe
  source 1..43: mol_type = other DNA
acatcagattgtgaatctgacaacagaggcttacgacccctta

SEQ ID NO: 134 - DNA, 26 bp, synthetic construct
  misc_feature 1..26: note = Probe
  source 1..26: mol_type = other DNA
acatggtctagcggttaggattcctg

SEQ ID NO: 135 - DNA, 32 bp, synthetic construct
  misc_feature 1..32: note = Probe
  source 1..32: mol_type = other DNA
acatggtctagcggttaggattcctggttttc

SEQ ID NO: 136 - DNA, 46 bp, synthetic construct
  misc_feature 1..46: note = Probe
  source 1..46: mol_type = other DNA
accaaaacatcagattgtgaatctgacaacagaggcttacgacccc

SEQ ID NO: 137 - DNA, 49 bp, synthetic construct
  misc_feature 1..49: note = Probe
  source 1..49: mol_type = other DNA
accaaaacatcagattgtgaatctgacaacagaggcttacgacccctta

SEQ ID NO: 138 - DNA, 50 bp, synthetic construct
  misc_feature 1..50: note = Probe
  source 1..50: mol_type = other DNA
accaaaacatcagattgtgaatctgacaacagaggcttacgaccccttat

SEQ ID NO: 139 - DNA, 24 bp, synthetic construct
  misc_feature 1..24: note = Probe
  source 1..24: mol_type = other DNA
accagaatggccgagtggttaagg

SEQ ID NO: 140 - DNA, 16 bp, synthetic construct
  misc_feature 1..16: note = Probe
  source 1..16: mol_type = other DNA
accaggatggccgagt

SEQ ID NO: 141 - DNA, 17 bp, synthetic construct
  misc_feature 1..17: note = Probe
  source 1..17: mol_type = other DNA
accaggatggccgagtg

SEQ ID NO: 142 - DNA, 18 bp, synthetic construct
  misc_feature 1..18: note = Probe
  source 1..18: mol_type = other DNA
accaggatggccgagtgg

SEQ ID NO: 143 - DNA, 19 bp, synthetic construct
  misc_feature 1..19: note = Probe
  source 1..19: mol_type = other DNA
accaggatggccgagtggt

SEQ ID NO: 144 - DNA, 20 bp, synthetic construct
  misc_feature 1..20: note = Probe
  source 1..20: mol_type = other DNA
accaggatggccgagtggtt

SEQ ID NO: 145 - DNA, 23 bp, synthetic construct
  misc_feature 1..23: note = Probe
  source 1..23: mol_type = other DNA
accaggatggccgagtggttaag

SEQ ID NO: 146 - DNA, 24 bp, synthetic construct
  misc_feature 1..24: note = Probe
  source 1..24: mol_type = other DNA
accaggatggccgagtggttaagg

SEQ ID NO: 147 - DNA, 20 bp, synthetic construct
  misc_feature 1..20: note = Probe
  source 1..20: mol_type = other DNA
acccagaggtcgatggatcg

SEQ ID NO: 148 - DNA, 21 bp, synthetic construct
  misc_feature 1..21: note = Probe
  source 1..21: mol_type = other DNA
acccagaggtcgatggatcga

SEQ ID NO: 149 - DNA, 35 bp, synthetic construct
  misc_feature 1..35: note = Probe
  source 1..35: mol_type = other DNA
acccaggcggcccgggttcgactcccggtgtggga

SEQ ID NO: 150 - DNA, 36 bp, synthetic construct
  misc_feature 1..36: note = Probe
  source 1..36: mol_type = other DNA
acccaggcggcccgggttcgactcccggtgtgggaa

SEQ ID NO: 151 - DNA, 37 bp, synthetic construct
  misc_feature 1..37: note = Probe
  source 1..37: mol_type = other DNA
acccaggcggcccgggttcgactcccggtgtgggaac

SEQ ID NO: 152 - DNA, 37 bp, synthetic construct
  misc_feature 1..37: note = Probe
  source 1..37: mol_type = other DNA
acccaggtggcccgggttcgactcccggtatgggaac

SEQ ID NO: 153 - DNA, 32 bp, synthetic construct
  misc_feature 1..32: note = Probe
  source 1..32: mol_type = other DNA
accccgaaaatgttggttatacccttcccgta

SEQ ID NO: 154 - DNA, 33 bp, synthetic construct
  misc_feature 1..33: note = Probe
  source 1..33: mol_type = other DNA
accccgaaaatgttggttatacccttcccgtac

SEQ ID NO: 155 - DNA, 34 bp, synthetic construct
  misc_feature 1..34: note = Probe
  source 1..34: mol_type = other DNA
accccgaaaatgttggttatacccttcccgtact

SEQ ID NO: 156 - DNA, 35 bp, synthetic construct
  misc_feature 1..35: note = Probe
  source 1..35: mol_type = other DNA
accccgaaaatgttggttatacccttcccgtacta

SEQ ID NO: 157 - DNA, 34 bp, synthetic construct
  misc_feature 1..34: note = Probe
  source 1..34: mol_type = other DNA
accgaaaggttggtggttcgagcccacccaggga

SEQ ID NO: 158 - DNA, 36 bp, synthetic construct
  misc_feature 1..36: note = Probe
  source 1..36: mol_type = other DNA
accgaaaggttggtggttcgagcccacccagggacg

SEQ ID NO: 159 - DNA, 37 bp, synthetic construct
  misc_feature 1..37: note = Probe
  source 1..37: mol_type = other DNA
accgaaaggttggtggttcgagcccacccagggacgc

SEQ ID NO: 160 - DNA, 16 bp, synthetic construct
  misc_feature 1..16: note = Probe
  source 1..16: mol_type = other DNA
accggagatgaaaacc

SEQ ID NO: 161 - DNA, 17 bp, synthetic construct
  misc_feature 1..17: note = Probe
  source 1..17: mol_type = other DNA
accggagatgaaaacct

SEQ ID NO: 162 - DNA, 18 bp, synthetic construct
  misc_feature 1..18: note = Probe
  source 1..18: mol_type = other DNA
accggagatgaaaacctt

SEQ ID NO: 163 - DNA, 28 bp, synthetic construct
  misc_feature 1..28: note = Probe
  source 1..28: mol_type = other DNA
accggagatgaaaacctttttccaagga

SEQ ID NO: 164 - DNA, 29 bp, synthetic construct
  misc_feature 1..29: note = Probe
  source 1..29: mol_type = other DNA
accggagatgaaaacctttttccaaggac

SEQ ID NO: 165 - DNA, 30 bp, synthetic construct
  misc_feature 1..30: note = Probe
  source 1..30: mol_type = other DNA
accggagatgaaaacctttttccaaggaca

SEQ ID NO: 166 - DNA, 37 bp, synthetic construct
  misc_feature 1..37: note = Probe
  source 1..37: mol_type = other DNA
acgcagaaggtcctgggttcgagccccagtggaacca

SEQ ID NO: 167 - DNA, 38 bp, synthetic construct
  misc_feature 1..38: note = Probe
  source 1..38: mol_type = other DNA
acgcagaaggtcctgggttcgagccccagtggaaccac

SEQ ID NO: 168 - DNA, 19 bp, synthetic construct
  misc_feature 1..19: note = Probe
  source 1..19: mol_type = other DNA
acgccaaggtcgcgggttc

SEQ ID NO: 169 - DNA, 16 bp, synthetic construct
  misc_feature 1..16: note = Probe
  source 1..16: mol_type = other DNA
acgcgaaaggtccccg

SEQ ID NO: 170 - DNA, 17 bp, synthetic construct
  misc_feature 1..17: note = Probe
  source 1..17: mol_type = other DNA
acgcgaaaggtccccgg

SEQ ID NO: 171 - DNA, 18 bp, synthetic construct
  misc_feature 1..18: note = Probe
  source 1..18: mol_type = other DNA
acgcgaaaggtccccggt

SEQ ID NO: 172 - DNA, 19 bp, synthetic construct
  misc_feature 1..19: note = Probe
  source 1..19: mol_type = other DNA
acgcgaaaggtccccggtt

SEQ ID NO: 173 - DNA, 39 bp, synthetic construct
  misc_feature 1..39: note = Probe
  source 1..39: mol_type = other DNA
acgcgaaaggtccccggttcgaaaccgggcggaaacacc

SEQ ID NO: 174 - DNA, 17 bp, synthetic construct
  misc_feature 1..17: note = Probe
  source 1..17: mol_type = other DNA
acgcgggagaccggggt

SEQ ID NO: 175 - DNA, 18 bp, synthetic construct
  misc_feature 1..18: note = Probe
  source 1..18: mol_type = other DNA
acgcgggagaccggggtt

SEQ ID NO: 176 - DNA, 31 bp, synthetic construct
  misc_feature 1..31: note = Probe
  source 1..31: mol_type = other DNA
acgcgggagaccggggttcaattccccgacg

SEQ ID NO: 177 - DNA, 32 bp, synthetic construct
  misc_feature 1..32: note = Probe
  source 1..32: mol_type = other DNA
acgcgggagaccggggttcaattccccgacgg

SEQ ID NO: 178 - DNA, 33 bp, synthetic construct
  misc_feature 1..33: note = Probe
  source 1..33: mol_type = other DNA
acgcgggagaccggggttcaattccccgacggg

SEQ ID NO: 179 - DNA, 34 bp, synthetic construct
  misc_feature 1..34: note = Probe
  source 1..34: mol_type = other DNA
acgcgggagaccggggttcaattccccgacgggg

SEQ ID NO: 180 - DNA, 36 bp, synthetic construct
  misc_feature 1..36: note = Probe
  source 1..36: mol_type = other DNA
acgcgggagaccggggttcaattccccgacggggag

SEQ ID NO: 181 - DNA, 29 bp, synthetic construct
  misc_feature 1..29: note = Probe
  source 1..29: mol_type = other DNA
acgcgggagaccggggttcgattccccga

SEQ ID NO: 182 - DNA, 30 bp, synthetic construct
  misc_feature 1..30: note = Probe
  source 1..30: mol_type = other DNA
acgcgggagaccggggttcgattccccgac

SEQ ID NO: 183 - DNA, 31 bp, synthetic construct
  misc_feature 1..31: note = Probe
  source 1..31: mol_type = other DNA
acgcgggagaccggggttcgattccccgacg

SEQ ID NO: 184 - DNA, 32 bp, synthetic construct
  misc_feature 1..32: note = Probe
  source 1..32: mol_type = other DNA
acgcgggagaccggggttcgattccccgacgg

SEQ ID NO: 185 - DNA, 33 bp, synthetic construct
  misc_feature 1..33: note = Probe
  source 1..33: mol_type = other DNA
acgcgggagaccggggttcgattccccgacggg

SEQ ID NO: 186 - DNA, 34 bp, synthetic construct
  misc_feature 1..34: note = Probe
  source 1..34: mol_type = other DNA
acgcgggagaccggggttcgattccccgacgggg

SEQ ID NO: 187 - DNA, 35 bp, synthetic construct
  misc_feature 1..35: note = Probe
  source 1..35: mol_type = other DNA
acgcgggagaccggggttcgattccccgacgggga

SEQ ID NO: 188 - DNA, 36 bp, synthetic construct
  misc_feature 1..36: note = Probe
  source 1..36: mol_type = other DNA
acgcgggagaccggggttcgattccccgacggggag

SEQ ID NO: 189 - DNA, 19 bp, synthetic construct
  misc_feature 1..19: note = Probe
  source 1..19: mol_type = other DNA
acgcgggaggcccgggttc

SEQ ID NO: 190 - DNA, 20 bp, synthetic construct
  misc_feature 1..20: note = Probe
  source 1..20: mol_type = other DNA
acgcgggaggcccgggttcg

SEQ ID NO: 191 - DNA, 33 bp, synthetic construct
  misc_feature 1..33: note = Probe
  source 1..33: mol_type = other DNA
actaagtgtttgtgggtttaagtcccattggtc

SEQ ID NO: 192 - DNA, 34 bp, synthetic construct
  misc_feature 1..34: note = Probe
  source 1..34: mol_type = other DNA
actaagtgtttgtgggtttaagtcccattggtct

SEQ ID NO: 193 - DNA, 35 bp, synthetic construct
  misc_feature 1..35: note = Probe
  source 1..35: mol_type = other DNA
actaagtgtttgtgggtttaagtcccattggtcta

SEQ ID NO: 194 - DNA, 21 bp, synthetic construct
  misc_feature 1..21: note = Probe
  source 1..21: mol_type = other DNA
actctgaatccagcgatccga

SEQ ID NO: 195 - DNA, 32 bp, synthetic construct
  misc_feature 1..32: note = Probe
  source 1..32: mol_type = other DNA
actcttttagtataaatagtaccgttaacttc

SEQ ID NO: 196 - DNA, 33 bp, synthetic construct
  misc_feature 1..33: note = Probe
  source 1..33: mol_type = other DNA
actcttttagtataaatagtaccgttaacttcc

SEQ ID NO: 197 - DNA, 34 bp, synthetic construct
  misc_feature 1..34: note = Probe
  source 1..34: mol_type = other DNA
actcttttagtataaatagtaccgttaacttcca

SEQ ID NO: 198 - DNA, 37 bp, synthetic construct
  misc_feature 1..37: note = Probe
  source 1..37: mol_type = other DNA
actcttttagtataaatagtaccgttaacttccaatt

SEQ ID NO: 199 - DNA, 50 bp, synthetic construct
  misc_feature 1..50: note = Probe
  source 1..50: mol_type = other DNA
actcttttagtataaatagtaccgttaacttccaattaactagttttgac

SEQ ID NO: 200 - DNA, 37 bp, synthetic construct
  misc_feature 1..37: note = Probe
  source 1..37: mol_type = other DNA
acttaaaactttacagtcagaggttcaattcctcttc

SEQ ID NO: 201 - DNA, 50 bp, synthetic construct
  misc_feature 1..50: note = Probe
  source 1..50: mol_type = other DNA
acttagcattaaccttttaagttaaagattaagagaaccaacacctcttt

SEQ ID NO: 202 - DNA, 30 bp, synthetic construct
  misc_feature 1..30: note = Probe
  source 1..30: mol_type = other DNA
actttacagtcagaggttcaattcctcttc

SEQ ID NO: 203 - DNA, 37 bp, synthetic construct
  misc_feature 1..37: note = Probe
  source 1..37: mol_type = other DNA
actttgatagagtaaataataggagcttaaaccccct

SEQ ID NO: 204 - DNA, 38 bp, synthetic construct
  misc_feature 1..38: note = Probe
  source 1..38: mol_type = other DNA
actttgatagagtaaataataggagcttaaaccccctt

SEQ ID NO: 205 - DNA, 39 bp, synthetic construct
  misc_feature 1..39: note = Probe
  source 1..39: mol_type = other DNA
actttgatagagtaaataataggagcttaaaccccctta

SEQ ID NO: 206 - DNA, 45 bp, synthetic construct
  misc_feature 1..45: note = Probe
  source 1..45: mol_type = other DNA
actttgatagagtaaataataggagcttaaacccccttatttcta

SEQ ID NO: 207 - DNA, 27 bp, synthetic construct
  misc_feature 1..27: note = Probe
  source 1..27: mol_type = other DNA
acttttaaaggataacagctatccatt

SEQ ID NO: 208 - DNA, 28 bp, synthetic construct
  misc_feature 1..28: note = Probe
  source 1..28: mol_type = other DNA
acttttaaaggataacagctatccattg

SEQ ID NO: 209 - DNA, 30 bp, synthetic construct
  misc_feature 1..30: note = Probe
  source 1..30: mol_type = other DNA
acttttaaaggataacagctatccattggt

SEQ ID NO: 210 - DNA, 31 bp, synthetic construct
  misc_feature 1..31: note = Probe
  source 1..31: mol_type = other DNA
acttttaaaggataacagctatccattggtc

SEQ ID NO: 211 - DNA, 32 bp, synthetic construct
  misc_feature 1..32: note = Probe
  source 1..32: mol_type = other DNA
acttttaaaggataacagctatccattggtct

SEQ ID NO: 212 - DNA, 34 bp, synthetic construct
  misc_feature 1..34: note = Probe
  source 1..34: mol_type = other DNA
acttttaaaggataacagctatccattggtctta

SEQ ID NO: 213 - DNA, 27 bp, synthetic construct
  misc_feature 1..27: note = Probe
  source 1..27: mol_type = other DNA
agaaagctcacaagaactgctaactca

SEQ ID NO: 214 - DNA, 29 bp, synthetic construct
  misc_feature 1..29: note = Probe
  source 1..29: mol_type = other DNA
agaaagctcacaagaactgctaactcatg

SEQ ID NO: 215 - DNA, 49 bp, synthetic construct
  misc_feature 1..49: note = Probe
  source 1..49: mol_type = other DNA
agaaagctcacaagaactgctaactcatgcccccatgtctaacaacatg

SEQ ID NO: 216 - DNA, 50 bp, synthetic construct
  misc_feature 1..50: note = Probe
  source 1..50: mol_type = other DNA
agaaagctcacaagaactgctaactcatgcccccatgtctaacaacatgg

SEQ ID NO: 217 - DNA, 50 bp, synthetic construct
  misc_feature 1..50: note = Probe
  source 1..50: mol_type = other DNA
agaaatatgtctgataaaagagttactttgatagagtaaataataggagc

SEQ ID NO: 218 - DNA, 40 bp, synthetic construct
  misc_feature 1..40: note = Probe
  source 1..40: mol_type = other DNA
agaactgctaactcatgcccccatgtctaacaacatggct

SEQ ID NO: 219 - DNA, 41 bp, synthetic construct
  misc_feature 1..41: note = Probe
  source 1..41: mol_type = other DNA
agaactgctaactcatgcccccatgtctaacaacatggctt

SEQ ID NO: 220 - DNA, 42 bp, synthetic construct
  misc_feature 1..42: note = Probe
  source 1..42: mol_type = other DNA
agaactgctaactcatgcccccatgtctaacaacatggcttt

SEQ ID NO: 221 - DNA, 43 bp, synthetic construct
  misc_feature 1..43: note = Probe
  source 1..43: mol_type = other DNA
agaactgctaactcatgcccccatgtctaacaacatggctttc

SEQ ID NO: 222 - DNA, 44 bp, synthetic construct
  misc_feature 1..44: note = Probe
  source 1..44: mol_type = other DNA
agaactgctaactcatgcccccatgtctaacaacatggctttct

SEQ ID NO: 223 - DNA, 45 bp, synthetic construct
  misc_feature 1..45: note = Probe
  source 1..45: mol_type = other DNA
agaactgctaactcatgcccccatgtctaacaacatggctttctc

SEQ ID NO: 224 - DNA, 46 bp, synthetic construct
  misc_feature 1..46: note = Probe
  source 1..46: mol_type = other DNA
agaactgctaactcatgcccccatgtctaacaacatggctttctca

SEQ ID NO: 225 - DNA, 31 bp, synthetic construct
  misc_feature 1..31: note = Probe
  source 1..31: mol_type = other DNA
agaagattccaggttcgactcctggctggct

SEQ ID NO: 226 - DNA, 31 bp, synthetic construct
  misc_feature 1..31: note = Probe
  source 1..31: mol_type = other DNA
agaagattctaggttcgactcctggctggct

SEQ ID NO: 227 - DNA, 17 bp, synthetic construct
  misc_feature 1..17: note = Probe
  source 1..17: mol_type = other DNA
agaagattgagggttcg

SEQ ID NO: 228 - DNA, 26 bp, synthetic construct
  misc_feature 1..26: note = Probe
  source 1..26: mol_type = other DNA
agaagattgagggttcgagtcccttc

SEQ ID NO: 229 - DNA, 27 bp, synthetic construct
  misc_feature 1..27: note = Probe
  source 1..27: mol_type = other DNA
agaagattgagggttcgagtcccttcg

SEQ ID NO: 230 - DNA, 31 bp, synthetic construct
  misc_feature 1..31: note = Probe
  source 1..31: mol_type = other DNA
agaagattgagggttcgagtcccttcgtggt

SEQ ID NO: 231 - DNA, 33 bp, synthetic construct
  misc_feature 1..33: note = Probe
  source 1..33: mol_type = other DNA
agaagattgagggttcgagtcccttcgtggtcg

SEQ ID NO: 232 - DNA, 34 bp, synthetic construct
  misc_feature 1..34: note = Probe
  source 1..34: mol_type = other DNA
agaaggtcctgggttcgagccccagtggaaccac

SEQ ID NO: 233 - DNA, 29 bp, synthetic construct
  misc_feature 1..29: note = Probe
  source 1..29: mol_type = other DNA
agaatcttagctttgggtgctaatggtgg

SEQ ID NO: 234 - DNA, 49 bp, synthetic construct
  misc_feature 1..49: note = Probe
  source 1..49: mol_type = other DNA
agaatcttagctttgggtgctaatggtggagttaaagactttttctctg

SEQ ID NO: 235 - DNA, 50 bp, synthetic construct
  misc_feature 1..50: note = Probe
  source 1..50: mol_type = other DNA
agaatcttagctttgggtgctaatggtggagttaaagactttttctctga

SEQ ID NO: 236 - DNA, 34 bp, synthetic construct
  misc_feature 1..34: note = Probe
  source 1..34: mol_type = other DNA
agaccaagagccttcaaagccctcagtaagttgc

SEQ ID NO: 237 - DNA, 35 bp, synthetic construct
  misc_feature 1..35: note = Probe
  source 1..35: mol_type = other DNA
agaccaagagccttcaaagccctcagtaagttgca

SEQ ID NO: 238 - DNA, 22 bp, synthetic construct
  misc_feature 1..22: note = Probe
  source 1..22: mol_type = other DNA
agaccggggttcaattccccga

SEQ ID NO: 239 - DNA, 23 bp, synthetic construct
  misc_feature 1..23: note = Probe
  source 1..23: mol_type = other DNA
agaccggggttcaattccccgac

SEQ ID NO: 240 - DNA, 29 bp, synthetic construct
  misc_feature 1..29: note = Probe
  source 1..29: mol_type = other DNA
agaccggggttcaattccccgacggggag

SEQ ID NO: 241 - DNA, 23 bp, synthetic construct
  misc_feature 1..23: note = Probe
  source 1..23: mol_type = other DNA
agaccggggttcgattccccgac

SEQ ID NO: 242 - DNA, 24 bp, synthetic construct
  misc_feature 1..24: note = Probe
  source 1..24: mol_type = other DNA
agaccggggttcgattccccgacg

SEQ ID NO: 243 - DNA, 27 bp, synthetic construct
  misc_feature 1..27: note = Probe
  source 1..27: mol_type = other DNA
agaccggggttcgattccccgacgggg

SEQ ID NO: 244 - DNA, 28 bp, synthetic construct
  misc_feature 1..28: note = Probe
  source 1..28: mol_type = other DNA
agaccggggttcgattccccgacgggga

SEQ ID NO: 245 - DNA, 29 bp, synthetic construct
  misc_feature 1..29: note = Probe
  source 1..29: mol_type = other DNA
agaccggggttcgattccccgacggggag

SEQ ID NO: 246 - DNA, 50 bp, synthetic construct
  misc_feature 1..50: note = Probe
  source 1..50: mol_type = other DNA
agagcatgagactcttaatctcagggtcgtgggttcgagccccacgttgg

SEQ ID NO: 247 - DNA, 26 bp, synthetic construct
  misc_feature 1..26: note = Probe
  source 1..26: mol_type = other DNA
agagcccggtaatcgcataaaactta

SEQ ID NO: 248 - DNA, 31 bp, synthetic construct
  misc_feature 1..31: note = Probe
  source 1..31: mol_type = other DNA
agagcccggtaatcgcataaaacttaaaact

SEQ ID NO: 249 - DNA, 46 bp, synthetic construct
  misc_feature 1..46: note = Probe
  source 1..46: mol_type = other DNA
agagcccggtaatcgcataaaacttaaaactttacagtcagaggtt

SEQ ID NO: 250 - DNA, 28 bp, synthetic construct
  misc_feature 1..28: note = Probe
  source 1..28: mol_type = other DNA
agagtaaataataggagcttaaaccccc

SEQ ID NO: 251 - DNA, 30 bp, synthetic construct
  misc_feature 1..30: note = Probe
  source 1..30: mol_type = other DNA
agagtaaataataggagcttaaaccccctt

SEQ ID NO: 252 - DNA, 31 bp, synthetic construct
  misc_feature 1..31: note = Probe
  source 1..31: mol_type = other DNA
agagtaaataataggagcttaaaccccctta

SEQ ID NO: 253 - DNA, 32 bp, synthetic construct
  misc_feature 1..32: note = Probe
  source 1..32: mol_type = other DNA
agagtaaataataggagcttaaacccccttat

SEQ ID NO: 254 - DNA, 35 bp, synthetic construct
  misc_feature 1..35: note = Probe
  source 1..35: mol_type = other DNA
agagtaaataataggagcttaaacccccttatttc

SEQ ID NO: 255 - DNA, 36 bp, synthetic construct
  misc_feature 1..36: note = Probe
  source 1..36: mol_type = other DNA
agagtaaataataggagcttaaacccccttatttct

SEQ ID NO: 256 - DNA, 37 bp, synthetic construct
  misc_feature 1..37: note = Probe
  source 1..37: mol_type = other DNA
agagtaaataataggagcttaaacccccttatttcta

SEQ ID NO: 257 - DNA, 32 bp, synthetic construct
  misc_feature 1..32: note = Probe
  source 1..32: mol_type = other DNA
agagtggcgcagcggaagcgtgctgggcccat

SEQ ID NO: 258 - DNA, 23 bp, synthetic construct
  misc_feature 1..23: note = Probe
  source 1..23: mol_type = other DNA
agattctaggttcgactcctggc

SEQ ID NO: 259 - DNA, 28 bp, synthetic construct
  misc_feature 1..28: note = Probe
  source 1..28: mol_type = other DNA
agattctaggttcgactcctggctggct

SEQ ID NO: 260 - DNA, 22 bp, synthetic construct
  misc_feature 1..22: note = Probe
  source 1..22: mol_type = other DNA
agattgagggttcgagtccctt

SEQ ID NO: 261 - DNA, 23 bp, synthetic construct
  misc_feature 1..23: note = Probe
  source 1..23: mol_type = other DNA
agattgagggttcgagtcccttc

SEQ ID NO: 262 - DNA, 24 bp, synthetic construct
  misc_feature 1..24: note = Probe
  source 1..24: mol_type = other DNA
agattgagggttcgagtcccttcg

SEQ ID NO: 263 - DNA, 25 bp, synthetic construct
  misc_feature 1..25: note = Probe
  source 1..25: mol_type = other DNA
agattgagggttcgagtcccttcgt

SEQ ID NO: 264 - DNA, 28 bp, synthetic construct
  misc_feature 1..28: note = Probe
  source 1..28: mol_type = other DNA
agattgagggttcgagtcccttcgtggt

SEQ ID NO: 265 - DNA, 28 bp, synthetic construct
  misc_feature 1..28: note = Probe
  source 1..28: mol_type = other DNA
agattgcaggttcgagtcctgccgcggt

SEQ ID NO: 266 - DNA, 37 bp, synthetic construct
  misc_feature 1..37: note = Probe
  source 1..37: mol_type = other DNA
agattgtgaatctgacaacagaggcttacgacccctt

SEQ ID NO: 267 - DNA, 38 bp, synthetic construct
  misc_feature 1..38: note = Probe
  source 1..38: mol_type = other DNA
agattgtgaatctgacaacagaggcttacgacccctta

SEQ ID NO: 268 - DNA, 39 bp, synthetic construct
  misc_feature 1..39: note = Probe
  source 1..39: mol_type = other DNA
agattgtgaatctgacaacagaggcttacgaccccttat

SEQ ID NO: 269 - DNA, 29 bp, synthetic construct
  misc_feature 1..29: note = Probe
  source 1..29: mol_type = other DNA
agcactctggactctgaatccagcgatcc

SEQ ID NO: 270 - DNA, 30 bp, synthetic construct
  misc_feature 1..30: note = Probe
  source 1..30: mol_type = other DNA
agcactctggactctgaatccagcgatccg

SEQ ID NO: 271 - DNA, 31 bp, synthetic construct
  misc_feature 1..31: note = Probe
  source 1..31: mol_type = other DNA
agcactctggactctgaatccagcgatccga

SEQ ID NO: 272 - DNA, 50 bp, synthetic construct
  misc_feature 1..50: note = Probe
  source 1..50: mol_type = other DNA
agcactctggactctgaatccagcgatccgagttcaaatctcggtggaac

SEQ ID NO: 273 - DNA, 50 bp, synthetic construct
  misc_feature 1..50: note = Probe
  source 1..50: mol_type = other DNA
agcactctggactttgaatccagcgatccgagttcaaatctcggtgggac

SEQ ID NO: 274 - DNA, 24 bp, synthetic construct
  misc_feature 1..24: note = Probe
  source 1..24: mol_type = other DNA
agcagagtggcgcagcggaagcgt

SEQ ID NO: 275 - DNA, 31 bp, synthetic construct
  misc_feature 1..31: note = Probe
  source 1..31: mol_type = other DNA
agcagagtggcgcagcggaagcgtgctgggc

SEQ ID NO: 276 - DNA, 32 bp, synthetic construct
  misc_feature 1..32: note = Probe
  source 1..32: mol_type = other DNA
agcagagtggcgcagcggaagcgtgctgggcc

SEQ ID NO: 277 - DNA, 33 bp, synthetic construct
  misc_feature 1..33: note = Probe
  source 1..33: mol_type = other DNA
agcagagtggcgcagcggaagcgtgctgggccc

SEQ ID NO: 278 - DNA, 34 bp, synthetic construct
  misc_feature 1..34: note = Probe
  source 1..34: mol_type = other DNA
agcagagtggcgcagcggaagcgtgctgggccca

SEQ ID NO: 279 - DNA, 35 bp, synthetic construct
  misc_feature 1..35: note = Probe
  source 1..35: mol_type = other DNA
agcagagtggcgcagcggaagcgtgctgggcccat

SEQ ID NO: 280 - DNA, 35 bp, synthetic construct
  misc_feature 1..35: note = Probe
  source 1..35: mol_type = other DNA
agcattaaccttttaagttaaagattaagagaacc

SEQ ID NO: 281 - DNA, 36 bp, synthetic construct
  misc_feature 1..36: note = Probe
  source 1..36: mol_type = other DNA
agcattaaccttttaagttaaagattaagagaacca

SEQ ID NO: 282 - DNA, 37 bp, synthetic construct
  misc_feature 1..37: note = Probe
  source 1..37: mol_type = other DNA
agcattaaccttttaagttaaagattaagagaaccaa

SEQ ID NO: 283 - DNA, 39 bp, synthetic construct
  misc_feature 1..39: note = Probe
  source 1..39: mol_type = other DNA
agcattaaccttttaagttaaagattaagagaaccaaca

SEQ ID NO: 284 - DNA, 42 bp, synthetic construct
  misc_feature 1..42: note = Probe
  source 1..42: mol_type = other DNA
agcattaaccttttaagttaaagattaagagaaccaacacct

SEQ ID NO: 285 - DNA, 50 bp, synthetic construct
  misc_feature 1..50: note = Probe
  source 1..50: mol_type = other DNA
agcattaaccttttaagttaaagattaagagaaccaacacctctttacag

SEQ ID NO: 286 - DNA, 20 bp, synthetic construct
  misc_feature 1..20: note = Probe
  source 1..20: mol_type = other DNA
agccagggattgtgggttcg

SEQ ID NO: 287 - DNA, 34 bp, synthetic construct
  misc_feature 1..34: note = Probe
  source 1..34: mol_type = other DNA
agccagggattgtgggttcgagtcccatctgggg

SEQ ID NO: 288 - DNA, 36 bp, synthetic construct
  misc_feature 1..36: note = Probe
  source 1..36: mol_type = other DNA
agccagggattgtgggttcgagtcccatctggggtg

SEQ ID NO: 289 - DNA, 34 bp, synthetic construct
  misc_feature 1..34: note = Probe
  source 1..34: mol_type = other DNA
agcccggctagctcagtcggtagagcatgggact

SEQ ID NO: 290 - DNA, 17 bp, synthetic construct
  misc_feature 1..17: note = Probe
  source 1..17: mol_type = other DNA
agcccggtaatcgcata

SEQ ID NO: 291 - DNA, 24 bp, synthetic construct
  misc_feature 1..24: note = Probe
  source 1..24: mol_type = other DNA
agcccggtaatcgcataaaactta

SEQ ID NO: 292 - DNA, 38 bp, synthetic construct
  misc_feature 1..38: note = Probe
  source 1..38: mol_type = other DNA
agcccggtaatcgcataaaacttaaaactttacagtca

SEQ ID NO: 293 - DNA, 46 bp, synthetic construct
  misc_feature 1..46: note = Probe
  source 1..46: mol_type = other DNA
agcccggtaatcgcataaaacttaaaactttacagtcagaggttca

SEQ ID NO: 294 - DNA, 17 bp, synthetic construct
  misc_feature 1..17: note = Probe
  source 1..17: mol_type = other DNA
agccctcagtaagttgc

SEQ ID NO: 295 - DNA, 31 bp, synthetic construct
  misc_feature 1..31: note = Probe
  source 1..31: mol_type = other DNA
agcgatccgagttcaaatctcggtggaacct

SEQ ID NO: 296 - DNA, 29 bp, synthetic construct
  misc_feature 1..29: note = Probe
  source 1..29: mol_type = other DNA
agcgatccgagttcaaatctcggtgggac

SEQ ID NO: 297 - DNA, 30 bp, synthetic construct
  misc_feature 1..30: note = Probe
  source 1..30: mol_type = other DNA
agcgatccgagttcaaatctcggtgggacc

SEQ ID NO: 298 - DNA, 31 bp, synthetic construct
  misc_feature 1..31: note = Probe
  source 1..31: mol_type = other DNA
agcgatccgagttcaaatctcggtgggacct

SEQ ID NO: 299 - DNA, 32 bp, synthetic construct
  misc_feature 1..32: note = Probe
  source 1..32: mol_type = other DNA
agcgatccgagttcaaatctcggtgggacctc

SEQ ID NO: 300 - DNA, 20 bp, synthetic construct
  misc_feature 1..20: note = Probe
  source 1..20: mol_type = other DNA
agcggaagcgtgctgggccc

SEQ ID NO: 301 - DNA, 30 bp, synthetic construct
  misc_feature 1..30: note = Probe
  source 1..30: mol_type = other DNA
agcgtgctgggcccataacccagaggtcga

SEQ ID NO: 302 - DNA, 32 bp, synthetic construct
  misc_feature 1..32: note = Probe
  source 1..32: mol_type = other DNA
agcgtgctgggcccataacccagaggtcgatg

SEQ ID NO: 303 - DNA, 50 bp, synthetic construct
  misc_feature 1..50: note = Probe
  source 1..50: mol_type = other DNA
agctatcgggcccataccccgaaaatgttggttatacccttcccgtacta

SEQ ID NO: 304 - DNA, 17 bp, synthetic construct
  misc_feature 1..17: note = Probe
  source 1..17: mol_type = other DNA
agctcacaagaactgct

SEQ ID NO: 305 - DNA, 19 bp, synthetic construct
  misc_feature 1..19: note = Probe
  source 1..19: mol_type = other DNA
agctcacaagaactgctaa

SEQ ID NO: 306 - DNA, 20 bp, synthetic construct
  misc_feature 1..20: note = Probe
  source 1..20: mol_type = other DNA
agctcacaagaactgctaac

SEQ ID NO: 307 - DNA, 23 bp, synthetic construct
  misc_feature 1..23: note = Probe
  source 1..23: mol_type = other DNA
agctcacaagaactgctaactca

SEQ ID NO: 308 - DNA, 24 bp, synthetic construct
  misc_feature 1..24: note = Probe
  source 1..24: mol_type = other DNA
agctcacaagaactgctaactcat

SEQ ID NO: 309 - DNA, 25 bp, synthetic construct
  misc_feature 1..25: note = Probe
  source 1..25: mol_type = other DNA
agctcacaagaactgctaactcatg

SEQ ID NO: 310 - DNA, 27 bp, synthetic construct
  misc_feature 1..27: note = Probe
  source 1..27: mol_type = other DNA
agctcacaagaactgctaactcatgcc

SEQ ID NO: 311 - DNA, 50 bp, synthetic construct
  misc_feature 1..50: note = Probe
  source 1..50: mol_type = other DNA
agctcacaagaactgctaactcatgcccccatgtctaacaacatggcttt

SEQ ID NO: 312 - DNA, 25 bp, synthetic construct
  misc_feature 1..25: note = Probe
  source 1..25: mol_type = other DNA
agctcagtcggtagagcatgggact

SEQ ID NO: 313 - DNA, 28 bp, synthetic construct
  misc_feature 1..28: note = Probe
  source 1..28: mol_type = other DNA
agctcagtcggtagagcatgggactctt

SEQ ID NO: 314 - DNA, 30 bp, synthetic construct
  misc_feature 1..30: note = Probe
  source 1..30: mol_type = other DNA
agctccgaggtgattttcatattgaattgc

SEQ ID NO: 315 - DNA, 31 bp, synthetic construct
  misc_feature 1..31: note = Probe
  source 1..31: mol_type = other DNA
agctccgaggtgattttcatattgaattgca

SEQ ID NO: 316 - DNA, 32 bp, synthetic construct
  misc_feature 1..32: note = Probe
  source 1..32: mol_type = other DNA
agctccgaggtgattttcatattgaattgcaa

SEQ ID NO: 317 - DNA, 17 bp, synthetic construct
  misc_feature 1..17: note = Probe
  source 1..17: mol_type = other DNA
aggagatcctgggttcg

SEQ ID NO: 318 - DNA, 33 bp, synthetic construct
  misc_feature 1..33: note = Probe
  source 1..33: mol_type = other DNA
aggagatcctgggttcgaatcccagcggtgcct

SEQ ID NO: 319 - DNA, 19 bp, synthetic construct
  misc_feature 1..19: note = Probe
  source 1..19: mol_type = other DNA
aggagcttaaaccccctta

SEQ ID NO: 320 - DNA, 21 bp, synthetic construct
  misc_feature 1..21: note = Probe
  source 1..21: mol_type = other DNA
aggatggccgagtggtctaag

SEQ ID NO: 321 - DNA, 29 bp, synthetic construct
  misc_feature 1..29: note = Probe
  source 1..29: mol_type = other DNA
aggattcggcgctctcaccgccgcggccc

SEQ ID NO: 322 - DNA, 29 bp, synthetic construct
  misc_feature 1..29: note = Probe
  source 1..29: mol_type = other DNA
aggcattggcctcctaagccagggattgt

SEQ ID NO: 323 - DNA, 24 bp, synthetic construct
  misc_feature 1..24: note = Probe
  source 1..24: mol_type = other DNA
aggccccgggttcaatccccggca

SEQ ID NO: 324 - DNA, 29 bp, synthetic construct
  misc_feature 1..29: note = Probe
  source 1..29: mol_type = other DNA
aggcggcccgggttcgactcccggtgtgg

SEQ ID NO: 325 - DNA, 31 bp, synthetic construct
  misc_feature 1..31: note = Probe
  source 1..31: mol_type = other DNA
aggcggcccgggttcgactcccggtgtggga

SEQ ID NO: 326 - DNA, 32 bp, synthetic construct
  misc_feature 1..32: note = Probe
  source 1..32: mol_type = other DNA
aggcggcccgggttcgactcccggtgtgggaa

SEQ ID NO: 327 - DNA, 33 bp, synthetic construct
  misc_feature 1..33: note = Probe
  source 1..33: mol_type = other DNA
aggcggcccgggttcgactcccggtgtgggaac

SEQ ID NO: 328 - DNA, 16 bp, synthetic construct
  misc_feature 1..16: note = Probe
  source 1..16: mol_type = other DNA
agggattgtgggttcg

SEQ ID NO: 329 - DNA, 22 bp, synthetic construct
  misc_feature 1..22: note = Probe
  source 1..22: mol_type = other DNA
agggattgtgggttcgagtccc

SEQ ID NO: 330 - DNA, 25 bp, synthetic construct
  misc_feature 1..25: note = Probe
  source 1..25: mol_type = other DNA
agggattgtgggttcgagtcccatc

SEQ ID NO: 331 - DNA, 26 bp, synthetic construct
  misc_feature 1..26: note = Probe
  source 1..26: mol_type = other DNA
agggattgtgggttcgagtcccatct

SEQ ID NO: 332 - DNA, 16 bp, synthetic construct
  misc_feature 1..16: note = Probe
  source 1..16: mol_type = other DNA
aggggtcgcgagttca

SEQ ID NO: 333 - DNA, 31 bp, synthetic construct
  misc_feature 1..31: note = Probe
  source 1..31: mol_type = other DNA
agggtcgtgggttcgagccccacgttgggcg

SEQ ID NO: 334 - DNA, 50 bp, synthetic construct
  misc_feature 1..50: note = Probe
  source 1..50: mol_type = other DNA
agggtgcttagctgttaactaagtgtttgtgggtttaagtcccattggtc

SEQ ID NO: 335 - DNA, 23 bp, synthetic construct
  misc_feature 1..23: note = Probe
  source 1..23: mol_type = other DNA
aggttccgggttcgagtcccggc

SEQ ID NO: 336 - DNA, 29 bp, synthetic construct
  misc_feature 1..29: note = Probe
  source 1..29: mol_type = other DNA
agtaaataataggagcttaaaccccctta

SEQ ID NO: 337 - DNA, 50 bp, synthetic construct
  misc_feature 1..50: note = Probe
  source 1..50: mol_type = other DNA
agtaccgttaacttccaattaactagttttgacaacattcaaaaaagagt

SEQ ID NO: 338 - DNA, 23 bp, synthetic construct
  misc_feature 1..23: note = Probe
  source 1..23: mol_type = other DNA
agtcagaggttcaattcctcttc

SEQ ID NO: 339 - DNA, 16 bp, synthetic construct
  misc_feature 1..16: note = Probe
  source 1..16: mol_type = other DNA
agtcggtagagcatca

SEQ ID NO: 340 - DNA, 17 bp, synthetic construct
  misc_feature 1..17: note = Probe
  source 1..17: mol_type = other DNA
agtcggtagagcatcag

SEQ ID NO: 341 - DNA, 18 bp, synthetic construct
  misc_feature 1..18: note = Probe
  source 1..18: mol_type = other DNA
agtcggtagagcatcaga

SEQ ID NO: 342 - DNA, 19 bp, synthetic construct
  misc_feature 1..19: note = Probe
  source 1..19: mol_type = other DNA
agtcggtagagcatcagac

SEQ ID NO: 343 - DNA, 20 bp, synthetic construct
  misc_feature 1..20: note = Probe
  source 1..20: mol_type = other DNA
agtcggtagagcatcagact

SEQ ID NO: 344 - DNA, 27 bp, synthetic construct
  misc_feature 1..27: note = Probe
  source 1..27: mol_type = other DNA
agtcggtagagcatgagactcttaatc

SEQ ID NO: 345 - DNA, 28 bp, synthetic construct
  misc_feature 1..28: note = Probe
  source 1..28: mol_type = other DNA
agtcggtagagcatgagactcttaatct

SEQ ID NO: 346 - DNA, 36 bp, synthetic construct
  misc_feature 1..36: note = Probe
  source 1..36: mol_type = other DNA
agtcggtagagcatgagactcttaatctcagggtcg

SEQ ID NO: 347 - DNA, 39 bp, synthetic construct
  misc_feature 1..39: note = Probe
  source 1..39: mol_type = other DNA
agtcggtagagcatgagactcttaatctcagggtcgtgg

SEQ ID NO: 348 - DNA, 16 bp, synthetic construct
  misc_feature 1..16: note = Probe
  source 1..16: mol_type = other DNA
agtcggtagagcatgg

SEQ ID NO: 349 - DNA, 17 bp, synthetic construct
  misc_feature 1..17: note = Probe
  source 1..17: mol_type = other DNA
agtcggtagagcatggg

SEQ ID NO: 350 - DNA, 19 bp, synthetic construct
  misc_feature 1..19: note = Probe
  source 1..19: mol_type = other DNA
agtcggtagagcatgggac

SEQ ID NO: 351 - DNA, 20 bp, synthetic construct
  misc_feature 1..20: note = Probe
  source 1..20: mol_type = other DNA
agtcggtagagcatgggact

SEQ ID NO: 352 - DNA, 21 bp, synthetic construct
  misc_feature 1..21: note = Probe
  source 1..21: mol_type = other DNA
agtcggtagagcatgggactc

SEQ ID NO: 353 - DNA, 29 bp, synthetic construct
  misc_feature 1..29: note = Probe
  source 1..29: mol_type = other DNA
agtcggtagagcatgggactcttaatccc

SEQ ID NO: 354 - DNA, 36 bp, synthetic construct
  misc_feature 1..36: note = Probe
  source 1..36: mol_type = other DNA
agtcggtagagcatgggactcttaatcccagggtcg

SEQ ID NO: 355 - DNA, 38 bp, synthetic construct
  misc_feature 1..38: note = Probe
  source 1..38: mol_type = other DNA
agtcggtagagcatgggactcttaatcccagggtcgtg

SEQ ID NO: 356 - DNA, 22 bp, synthetic construct
  misc_feature 1..22: note = Probe
  source 1..22: mol_type = other DNA
agtctcataatctgaaggtcgt

SEQ ID NO: 357 - DNA, 23 bp, synthetic construct
  misc_feature 1..23: note = Probe
  source 1..23: mol_type = other DNA
agtctcataatctgaaggtcgtg

SEQ ID NO: 358 - DNA, 24 bp, synthetic construct
  misc_feature 1..24: note = Probe
  source 1..24: mol_type = other DNA
agtctcataatctgaaggtcgtga

SEQ ID NO: 359 - DNA, 23 bp, synthetic construct
  misc_feature 1..23: note = Probe
  source 1..23: mol_type = other DNA
agtctcttcgggggcgtgggttc

SEQ ID NO: 360 - DNA, 20 bp, synthetic construct
  misc_feature 1..20: note = Probe
  source 1..20: mol_type = other DNA
agtggttaggattcggcgct

SEQ ID NO: 361 - DNA, 36 bp, synthetic construct
  misc_feature 1..36: note = Probe
  source 1..36: mol_type = other DNA
agtggttaggattcggcgctctcaccgccgcggccc

SEQ ID NO: 362 - DNA, 25 bp, synthetic construct
  misc_feature 1..25: note = Probe
  source 1..25: mol_type = other DNA
agtggttatcacgttcgcctcacac

SEQ ID NO: 363 - DNA, 39 bp, synthetic construct
  misc_feature 1..39: note = Probe
  source 1..39: mol_type = other DNA
agtggttatcacgttcgcctcacacgcgaaaggtccccg

SEQ ID NO: 364 - DNA, 43 bp, synthetic construct
  misc_feature 1..43: note = Probe
  source 1..43: mol_type = other DNA
agttgattagggtgcttagctgttaactaagtgtttgtgggtt

SEQ ID NO: 365 - DNA, 50 bp, synthetic construct
  misc_feature 1..50: note = Probe
  source 1..50: mol_type = other DNA
agttgattagggtgcttagctgttaactaagtgtttgtgggtttaagtcc

SEQ ID NO: 366 - DNA, 50 bp, synthetic construct
  misc_feature 1..50: note = Probe
  source 1..50: mol_type = other DNA
agtttaaccaaaacatcagattgtgaatctgacaacagaggcttacgacc

SEQ ID NO: 367 - DNA, 32 bp, synthetic construct
  misc_feature 1..32: note = Probe
  source 1..32: mol_type = other DNA
atagagtaaataataggagcttaaaccccctt

SEQ ID NO: 368 - DNA, 33 bp, synthetic construct
  misc_feature 1..33: note = Probe
  source 1..33: mol_type = other DNA
atagagtaaataataggagcttaaaccccctta

SEQ ID NO: 369 - DNA, 34 bp, synthetic construct
  misc_feature 1..34: note = Probe
  source 1..34: mol_type = other DNA
atagagtaaataataggagcttaaacccccttat

SEQ ID NO: 370 - DNA, 38 bp, synthetic construct
  misc_feature 1..38: note = Probe
  source 1..38: mol_type = other DNA
atagagtaaataataggagcttaaacccccttatttct

SEQ ID NO: 371 - DNA, 39 bp, synthetic construct
  misc_feature 1..39: note = Probe
  source 1..39: mol_type = other DNA
atagagtaaataataggagcttaaacccccttatttcta

SEQ ID NO: 372 - DNA, 36 bp, synthetic construct
  misc_feature 1..36: note = Probe
  source 1..36: mol_type = other DNA
atatcattggtcgtggttgtagtccgtgcgagaata

SEQ ID NO: 373 - DNA, 20 bp, synthetic construct
  misc_feature 1..20: note = Probe
  source 1..20: mol_type = other DNA
atcagaagattccaggttcg

SEQ ID NO: 374 - DNA, 34 bp, synthetic construct
  misc_feature 1..34: note = Probe
  source 1..34: mol_type = other DNA
atcagaagattccaggttcgactcctggctggct

SEQ ID NO: 375 - DNA, 34 bp, synthetic construct
  misc_feature 1..34: note = Probe
  source 1..34: mol_type = other DNA
atcagaagattctaggttcgactcctggctggct

SEQ ID NO: 376 - DNA, 18 bp, synthetic construct
  misc_feature 1..18: note = Probe
  source 1..18: mol_type = other DNA
atccagcgatccgagttc

SEQ ID NO: 377 - DNA, 19 bp, synthetic construct
  misc_feature 1..19: note = Probe
  source 1..19: mol_type = other DNA
atccagcgatccgagttca

SEQ ID NO: 378 - DNA, 21 bp, synthetic construct
  misc_feature 1..21: note = Probe
  source 1..21: mol_type = other DNA
atccagcgatccgagttcaaa

SEQ ID NO: 379 - DNA, 35 bp, synthetic construct
  misc_feature 1..35: note = Probe
  source 1..35: mol_type = other DNA
atccagcgatccgagttcaaatctcggtggaacct

SEQ ID NO: 380 - DNA, 35 bp, synthetic construct
  misc_feature 1..35: note = Probe
  source 1..35: mol_type = other DNA
atccagcgatccgagttcaaatctcggtgggacct

SEQ ID NO: 381 - DNA, 17 bp, synthetic construct
  misc_feature 1..17: note = Probe
  source 1..17: mol_type = other DNA
atcccagcggtgcctcc

SEQ ID NO: 382 - DNA, 19 bp, synthetic construct
  misc_feature 1..19: note = Probe
  source 1..19: mol_type = other DNA
atccccggcacctccacca

SEQ ID NO: 383 - DNA, 16 bp, synthetic construct
  misc_feature 1..16: note = Probe
  source 1..16: mol_type = other DNA
atccgggtgccccctc

SEQ ID NO: 384 - DNA, 29 bp, synthetic construct
  misc_feature 1..29: note = Probe
  source 1..29: mol_type = other DNA
atcgcataaaacttaaaactttacagtca

SEQ ID NO: 385 - DNA, 26 bp, synthetic construct
  misc_feature 1..26: note = Probe
  source 1..26: mol_type = other DNA
atcgtatagtggttagtactctgcgt

SEQ ID NO: 386 - DNA, 32 bp, synthetic construct
  misc_feature 1..32: note = Probe
  source 1..32: mol_type = other DNA
atctaaagacaggggttaggcctctttttacc

SEQ ID NO: 387 - DNA, 33 bp, synthetic construct
  misc_feature 1..33: note = Probe
  source 1..33: mol_type = other DNA
atctaaagacaggggttaggcctctttttacca

SEQ ID NO: 388 - DNA, 20 bp, synthetic construct
  misc_feature 1..20: note = Probe
  source 1..20: mol_type = other DNA
atctaaaggtccctggttcg

SEQ ID NO: 389 - DNA, 21 bp, synthetic construct
  misc_feature 1..21: note = Probe
  source 1..21: mol_type = other DNA
atctaaaggtccctggttcga

SEQ ID NO: 390 - DNA, 22 bp, synthetic construct
  misc_feature 1..22: note = Probe
  source 1..22: mol_type = other DNA
atctaaaggtccctggttcgat

SEQ ID NO: 391 - DNA, 23 bp, synthetic construct
  misc_feature 1..23: note = Probe
  source 1..23: mol_type = other DNA
atctaaaggtccctggttcgatc

SEQ ID NO: 392 - DNA, 24 bp, synthetic construct
  misc_feature 1..24: note = Probe
  source 1..24: mol_type = other DNA
atctaaaggtccctggttcgatcc

SEQ ID NO: 393 - DNA, 36 bp, synthetic construct
  misc_feature 1..36: note = Probe
  source 1..36: mol_type = other DNA
atctaaaggtccctggttcgatcccgggtttcggca

SEQ ID NO: 394 - DNA, 37 bp, synthetic construct
  misc_feature 1..37: note = Probe
  source 1..37: mol_type = other DNA
atctaaaggtccctggttcgatcccgggtttcggcac

SEQ ID NO: 395 - DNA, 28 bp, synthetic construct
  misc_feature 1..28: note = Probe
  source 1..28: mol_type = other DNA
atctgacaacagaggcttacgacccctt

SEQ ID NO: 396 - DNA, 29 bp, synthetic construct
  misc_feature 1..29: note = Probe
  source 1..29: mol_type = other DNA
atctgacaacagaggcttacgacccctta

SEQ ID NO: 397 - DNA, 30 bp, synthetic construct
  misc_feature 1..30: note = Probe
  source 1..30: mol_type = other DNA
atctgacaacagaggcttacgaccccttat

SEQ ID NO: 398 - DNA, 31 bp, synthetic construct
  misc_feature 1..31: note = Probe
  source 1..31: mol_type = other DNA
atctgacaacagaggcttacgaccccttatt

SEQ ID NO: 399 - DNA, 35 bp, synthetic construct
  misc_feature 1..35: note = Probe
  source 1..35: mol_type = other DNA
atctgacaacagaggcttacgaccccttatttacc

SEQ ID NO: 400 - DNA, 19 bp, synthetic construct
  misc_feature 1..19: note = Probe
  source 1..19: mol_type = other DNA
atctgagggtccagggttt

SEQ ID NO: 401 - DNA, 27 bp, synthetic construct
  misc_feature 1..27: note = Probe
  source 1..27: mol_type = other DNA
atgggtggttcagtggtagaattctcg

SEQ ID NO: 402 - DNA, 29 bp, synthetic construct
  misc_feature 1..29: note = Probe
  source 1..29: mol_type = other DNA
atgggtggttcagtggtagaattctcgcc

SEQ ID NO: 403 - DNA, 30 bp, synthetic construct
  misc_feature 1..30: note = Probe
  source 1..30: mol_type = other DNA
atgggtggttcagtggtagaattctcgcct

SEQ ID NO: 404 - DNA, 31 bp, synthetic construct
  misc_feature 1..31: note = Probe
  source 1..31: mol_type = other DNA
atgggtggttcagtggtagaattctcgcctg

SEQ ID NO: 405 - DNA, 32 bp, synthetic construct
  misc_feature 1..32: note = Probe
  source 1..32: mol_type = other DNA
atgggtggttcagtggtagaattctcgcctgc

SEQ ID NO: 406 - DNA, 33 bp, synthetic construct
  misc_feature 1..33: note = Probe
  source 1..33: mol_type = other DNA
atgggtggttcagtggtagaattctcgcctgcc

SEQ ID NO: 407 - DNA, 34 bp, synthetic construct
  misc_feature 1..34: note = Probe
  source 1..34: mol_type = other DNA
atgggtggttcagtggtagaattctcgcctgcca

SEQ ID NO: 408 - DNA, 17 bp, synthetic construct
  misc_feature 1..17: note = Probe
  source 1..17: mol_type = other DNA
atgtttagacgggctca

SEQ ID NO: 409 - DNA, 18 bp, synthetic construct
  misc_feature 1..18: note = Probe
  source 1..18: mol_type = other DNA
atgtttagacgggctcac

SEQ ID NO: 410 - DNA, 19 bp, synthetic construct
  misc_feature 1..19: note = Probe
  source 1..19: mol_type = other DNA
atgtttagacgggctcaca

SEQ ID NO: 411 - DNA, 20 bp, synthetic construct
  misc_feature 1..20: note = Probe
  source 1..20: mol_type = other DNA
atgtttagacgggctcacat

SEQ ID NO: 412 - DNA, 21 bp, synthetic construct
  misc_feature 1..21: note = Probe
  source 1..21: mol_type = other DNA
atgtttagacgggctcacatc

SEQ ID NO: 413 - DNA, 22 bp, synthetic construct
  misc_feature 1..22: note = Probe
  source 1..22: mol_type = other DNA
atgtttagacgggctcacatca

SEQ ID NO: 414 - DNA, 25 bp, synthetic construct
  misc_feature 1..25: note = Probe
  source 1..25: mol_type = other DNA
atgtttagacgggctcacatcaccc

SEQ ID NO: 415 - DNA, 26 bp, synthetic construct
  misc_feature 1..26: note = Probe
  source 1..26: mol_type = other DNA
atgtttagacgggctcacatcacccc

SEQ ID NO: 416 - DNA, 27 bp, synthetic construct
  misc_feature 1..27: note = Probe
  source 1..27: mol_type = other DNA
atgtttagacgggctcacatcacccca

SEQ ID NO: 417 - DNA, 28 bp, synthetic construct
  misc_feature 1..28: note = Probe
  source 1..28: mol_type = other DNA
atgtttagacgggctcacatcaccccat

SEQ ID NO: 418 - DNA, 29 bp, synthetic construct
  misc_feature 1..29: note = Probe
  source 1..29: mol_type = other DNA
atgtttagacgggctcacatcaccccata

SEQ ID NO: 419 - DNA, 30 bp, synthetic construct
  misc_feature 1..30: note = Probe
  source 1..30: mol_type = other DNA
atgtttagacgggctcacatcaccccataa

SEQ ID NO: 420 - DNA, 50 bp, synthetic construct
  misc_feature 1..50: note = Probe
  source 1..50: mol_type = other DNA
attagaatcttagctttgggtgctaatggtggagttaaagactttttctc

SEQ ID NO: 421 - DNA, 50 bp, synthetic construct
  misc_feature 1..50: note = Probe
  source 1..50: mol_type = other DNA
attagggtgcttagctgttaactaagtgtttgtgggtttaagtcccattg

SEQ ID NO: 422 - DNA, 21 bp, synthetic construct
  misc_feature 1..21: note = Probe
  source 1..21: mol_type = other DNA
attcttgcgacccgggttcga

SEQ ID NO: 423 - DNA, 22 bp, synthetic construct
  misc_feature 1..22: note = Probe
  source 1..22: mol_type = other DNA
attcttgcgacccgggttcgat

SEQ ID NO: 424 - DNA, 23 bp, synthetic construct
  misc_feature 1..23: note = Probe
  source 1..23: mol_type = other DNA
attcttgcgacccgggttcgatt

SEQ ID NO: 425 - DNA, 23 bp, synthetic construct
  misc_feature 1..23: note = Probe
  source 1..23: mol_type = other DNA
attggtcgtggttgtagtccgtg

SEQ ID NO: 426 - DNA, 31 bp, synthetic construct
  misc_feature 1..31: note = Probe
  source 1..31: mol_type = other DNA
attggtcgtggttgtagtccgtgcgagaata

SEQ ID NO: 427 - DNA, 36 bp, synthetic construct
  misc_feature 1..36: note = Probe
  source 1..36: mol_type = other DNA
caaaacatcagattgtgaatctgacaacagaggctt

SEQ ID NO: 428 - DNA, 37 bp, synthetic construct
  misc_feature 1..37: note = Probe
  source 1..37: mol_type = other DNA
caaaacatcagattgtgaatctgacaacagaggctta

SEQ ID NO: 429 - DNA, 39 bp, synthetic construct
  misc_feature 1..39: note = Probe
  source 1..39: mol_type = other DNA
caaaacatcagattgtgaatctgacaacagaggcttacg

SEQ ID NO: 430 - DNA, 40 bp, synthetic construct
  misc_feature 1..40: note = Probe
  source 1..40: mol_type = other DNA
caaaacatcagattgtgaatctgacaacagaggcttacga

SEQ ID NO: 431 - DNA, 41 bp, synthetic construct
  misc_feature 1..41: note = Probe
  source 1..41: mol_type = other DNA
caaaacatcagattgtgaatctgacaacagaggcttacgac

SEQ ID NO: 432 - DNA, 42 bp, synthetic construct
  misc_feature 1..42: note = Probe
  source 1..42: mol_type = other DNA
caaaacatcagattgtgaatctgacaacagaggcttacgacc

SEQ ID NO: 433 - DNA, 43 bp, synthetic construct
  misc_feature 1..43: note = Probe
  source 1..43: mol_type = other DNA
caaaacatcagattgtgaatctgacaacagaggcttacgaccc

SEQ ID NO: 434 - DNA, 44 bp, synthetic construct
  misc_feature 1..44: note = Probe
  source 1..44: mol_type = other DNA
caaaacatcagattgtgaatctgacaacagaggcttacgacccc

SEQ ID NO: 435 - DNA, 45 bp, synthetic construct
  misc_feature 1..45: note = Probe
  source 1..45: mol_type = other DNA
caaaacatcagattgtgaatctgacaacagaggcttacgacccct

SEQ ID NO: 436 - DNA, 46 bp, synthetic construct
  misc_feature 1..46: note = Probe
  source 1..46: mol_type = other DNA
caaaacatcagattgtgaatctgacaacagaggcttacgacccctt

SEQ ID NO: 437 - DNA, 50 bp, synthetic construct
  misc_feature 1..50: note = Probe
  source 1..50: mol_type = other DNA
caaaacatcagattgtgaatctgacaacagaggcttacgaccccttattt

SEQ ID NO: 438 - DNA, 35 bp, synthetic construct
  misc_feature 1..35: note = Probe
  source 1..35: mol_type = other DNA
caaagcaatacactgaaaatgtttagacgggctca

SEQ ID NO: 439 - DNA, 37 bp, synthetic construct
  misc_feature 1..37: note = Probe
  source 1..37: mol_type = other DNA
caaagcaatacactgaaaatgtttagacgggctcaca

SEQ ID NO: 440 - DNA, 38 bp, synthetic construct
  misc_feature 1..38: note = Probe
  source 1..38: mol_type = other DNA
caaagcaatacactgaaaatgtttagacgggctcacat

SEQ ID NO: 441 - DNA, 45 bp, synthetic construct
  misc_feature 1..45: note = Probe
  source 1..45: mol_type = other DNA
caaagcaatacactgaaaatgtttagacgggctcacatcacccca

SEQ ID NO: 442 - DNA, 50 bp, synthetic construct
  misc_feature 1..50: note = Probe
  source 1..50: mol_type = other DNA
caaagcaatacactgaaaatgtttagacgggctcacatcaccccataaac

SEQ ID NO: 443 - DNA, 37 bp, synthetic construct
  misc_feature 1..37: note = Probe
  source 1..37: mol_type = other DNA
caaagcacccaacttacacttaggagatttcaactta

SEQ ID NO: 444 - DNA, 39 bp, synthetic construct
  misc_feature 1..39: note = Probe
  source 1..39: mol_type = other DNA
caaagcacccaacttacacttaggagatttcaacttaac

SEQ ID NO: 445 - DNA, 44 bp, synthetic construct
  misc_feature 1..44: note = Probe
  source 1..44: mol_type = other DNA
caaagcacccaacttacacttaggagatttcaacttaacttgac

SEQ ID NO: 446 - DNA, 46 bp, synthetic construct
  misc_feature 1..46: note = Probe
  source 1..46: mol_type = other DNA
caaagcacccaacttacacttaggagatttcaacttaacttgaccg

SEQ ID NO: 447 - DNA, 50 bp, synthetic construct
  misc_feature 1..50: note = Probe
  source 1..50: mol_type = other DNA
caaagcacccaacttacacttaggagatttcaacttaacttgaccgctct

SEQ ID NO: 448 - DNA, 29 bp, synthetic construct
  misc_feature 1..29: note = Probe
  source 1..29: mol_type = other DNA
caacagaggcttacgaccccttatttacc

SEQ ID NO: 449 - DNA, 42 bp, synthetic construct
  misc_feature 1..42: note = Probe
  source 1..42: mol_type = other DNA
caagaactgctaactcatgcccccatgtctaacaacatggct

SEQ ID NO: 450 - DNA, 44 bp, synthetic construct
  misc_feature 1..44: note = Probe
  source 1..44: mol_type = other DNA
caagaactgctaactcatgcccccatgtctaacaacatggcttt

SEQ ID NO: 451 - DNA, 45 bp, synthetic construct
  misc_feature 1..45: note = Probe
  source 1..45: mol_type = other DNA
caagaactgctaactcatgcccccatgtctaacaacatggctttc

SEQ ID NO: 452 - DNA, 46 bp, synthetic construct
  misc_feature 1..46: note = Probe
  source 1..46: mol_type = other DNA
caagaactgctaactcatgcccccatgtctaacaacatggctttct

SEQ ID NO: 453 - DNA, 20 bp, synthetic construct
  misc_feature 1..20: note = Probe
  source 1..20: mol_type = other DNA
caagcagttgacccgggttc

SEQ ID NO: 454 - DNA, 21 bp, synthetic construct
  misc_feature 1..21: note = Probe
  source 1..21: mol_type = other DNA
caagcagttgacccgggttcg

SEQ ID NO: 455 - DNA, 22 bp, synthetic construct
  misc_feature 1..22: note = Probe
  source 1..22: mol_type = other DNA
caagcagttgacccgggttcga

SEQ ID NO: 456 - DNA, 23 bp, synthetic construct
  misc_feature 1..23: note = Probe
  source 1..23: mol_type = other DNA
caagcagttgacccgggttcgat

SEQ ID NO: 457 - DNA, 31 bp, synthetic construct
  misc_feature 1..31: note = Probe
  source 1..31: mol_type = other DNA
caagcagttgacccgggttcgattcccggcc

SEQ ID NO: 458 - DNA, 21 bp, synthetic construct
  misc_feature 1..21: note = Probe
  source 1..21: mol_type = other DNA
caatccccggcacctccacca

SEQ ID NO: 459 - DNA, 25 bp, synthetic construct
  misc_feature 1..25: note = Probe
  source 1..25: mol_type = other DNA
caattaactagttttgacaacattc

SEQ ID NO: 460 - DNA, 36 bp, synthetic construct
  misc_feature 1..36: note = Probe
  source 1..36: mol_type = other DNA
caattaactagttttgacaacattcaaaaaagagta

SEQ ID NO: 461 - DNA, 41 bp, synthetic construct
  misc_feature 1..41: note = Probe
  source 1..41: mol_type = other DNA
cacaaagcacccaacttacacttaggagatttcaacttaac

SEQ ID NO: 462 - DNA, 50 bp, synthetic construct
  misc_feature 1..50: note = Probe
  source 1..50: mol_type = other DNA
cacaaagcacccaacttacacttaggagatttcaacttaacttgaccgct

SEQ ID NO: 463 - DNA, 44 bp, synthetic construct
  misc_feature 1..44: note = Probe
  source 1..44: mol_type = other DNA
cacaagaactgctaactcatgcccccatgtctaacaacatggct

SEQ ID NO: 464 - DNA, 45 bp, synthetic construct
  misc_feature 1..45: note = Probe
  source 1..45: mol_type = other DNA
cacaagaactgctaactcatgcccccatgtctaacaacatggctt

SEQ ID NO: 465 - DNA, 46 bp, synthetic construct
  misc_feature 1..46: note = Probe
  source 1..46: mol_type = other DNA
cacaagaactgctaactcatgcccccatgtctaacaacatggcttt

SEQ ID NO: 466 - DNA, 50 bp, synthetic construct
  misc_feature 1..50: note = Probe
  source 1..50: mol_type = other DNA
cacaagaactgctaactcatgcccccatgtctaacaacatggctttctca

SEQ ID NO: 467 - DNA, 27 bp, synthetic construct
  misc_feature 1..27: note = Probe
  source 1..27: mol_type = other DNA
cacatggtctagcggttaggattcctg

SEQ ID NO: 468 - DNA, 28 bp, synthetic construct
  misc_feature 1..28: note = Probe
  source 1..28: mol_type = other DNA
cacatggtctagcggttaggattcctgg

SEQ ID NO: 469 - DNA, 30 bp, synthetic construct
  misc_feature 1..30: note = Probe
  source 1..30: mol_type = other DNA
cacatggtctagcggttaggattcctggtt

SEQ ID NO: 470 - DNA, 31 bp, synthetic construct
  misc_feature 1..31: note = Probe
  source 1..31: mol_type = other DNA
cacatggtctagcggttaggattcctggttt

SEQ ID NO: 471 - DNA, 32 bp, synthetic construct
  misc_feature 1..32: note = Probe
  source 1..32: mol_type = other DNA
cacatggtctagcggttaggattcctggtttt

SEQ ID NO: 472 - DNA, 33 bp, synthetic construct
  misc_feature 1..33: note = Probe
  source 1..33: mol_type = other DNA
cacatggtctagcggttaggattcctggttttc

SEQ ID NO: 473 - DNA, 23 bp, synthetic construct
  misc_feature 1..23: note = Probe
  source 1..23: mol_type = other DNA
cacgcgaaaggtccccggttcga

SEQ ID NO: 474 - DNA, 19 bp, synthetic construct
  misc_feature 1..19: note = Probe
  source 1..19: mol_type = other DNA
cacgcgggagaccggggtt

SEQ ID NO: 475 - DNA, 32 bp, synthetic construct
  misc_feature 1..32: note = Probe
  source 1..32: mol_type = other DNA
cacgcgggagaccggggttcaattccccgacg

SEQ ID NO: 476 - DNA, 33 bp, synthetic construct
  misc_feature 1..33: note = Probe
  source 1..33: mol_type = other DNA
cacgcgggagaccggggttcaattccccgacgg

SEQ ID NO: 477 - DNA, 36 bp, synthetic construct
  misc_feature 1..36: note = Probe
  source 1..36: mol_type = other DNA
cacgcgggagaccggggttcaattccccgacgggga

SEQ ID NO: 478 - DNA, 37 bp, synthetic construct
  misc_feature 1..37: note = Probe
  source 1..37: mol_type = other DNA
cacgcgggagaccggggttcaattccccgacggggag

SEQ ID NO: 479 - DNA, 30 bp, synthetic construct
  misc_feature 1..30: note = Probe
  source 1..30: mol_type = other DNA
cacgcgggagaccggggttcgattccccga

SEQ ID NO: 480 - DNA, 31 bp, synthetic construct
  misc_feature 1..31: note = Probe
  source 1..31: mol_type = other DNA
cacgcgggagaccggggttcgattccccgac

SEQ ID NO: 481 - DNA, 32 bp, synthetic construct
  misc_feature 1..32: note = Probe
  source 1..32: mol_type = other DNA
cacgcgggagaccggggttcgattccccgacg

SEQ ID NO: 482 - DNA, 33 bp, synthetic construct
  misc_feature 1..33: note = Probe
  source 1..33: mol_type = other DNA
cacgcgggagaccggggttcgattccccgacgg

SEQ ID NO: 483 - DNA, 34 bp, synthetic construct
  misc_feature 1..34: note = Probe
  source 1..34: mol_type = other DNA
cacgcgggagaccggggttcgattccccgacggg

SEQ ID NO: 484 - DNA, 35 bp, synthetic construct
  misc_feature 1..35: note = Probe
  source 1..35: mol_type = other DNA
cacgcgggagaccggggttcgattccccgacgggg

SEQ ID NO: 485 - DNA, 36 bp, synthetic construct
  misc_feature 1..36: note = Probe
  source 1..36: mol_type = other DNA
cacgcgggagaccggggttcgattccccgacgggga

SEQ ID NO: 486 - DNA, 37 bp, synthetic construct
  misc_feature 1..37: note = Probe
  source 1..37: mol_type = other DNA
cacgcgggagaccggggttcgattccccgacggggag

SEQ ID NO: 487 - DNA, 27 bp, synthetic construct
  misc_feature 1..27: note = Probe
  source 1..27: mol_type = other DNA
cactctggactctgaatccagcgatcc

SEQ ID NO: 488 - DNA, 28 bp, synthetic construct
  misc_feature 1..28: note = Probe
  source 1..28: mol_type = other DNA
cactctggactctgaatccagcgatccg

SEQ ID NO: 489 - DNA, 23 bp, synthetic construct
  misc_feature 1..23: note = Probe
  source 1..23: mol_type = other DNA
cactgtaaagctaacttagcatt

SEQ ID NO: 490 - DNA, 27 bp, synthetic construct
  misc_feature 1..27: note = Probe
  source 1..27: mol_type = other DNA
cactgtaaagctaacttagcattaacc

SEQ ID NO: 491 - DNA, 28 bp, synthetic construct
  misc_feature 1..28: note = Probe
  source 1..28: mol_type = other DNA
cactgtaaagctaacttagcattaacct

SEQ ID NO: 492 - DNA, 29 bp, synthetic construct
  misc_feature 1..29: note = Probe
  source 1..29: mol_type = other DNA
cactgtaaagctaacttagcattaacctt

SEQ ID NO: 493 - DNA, 30 bp, synthetic construct
  misc_feature 1..30: note = Probe
  source 1..30: mol_type = other DNA
cactgtaaagctaacttagcattaaccttt

SEQ ID NO: 494 - DNA, 31 bp, synthetic construct
  misc_feature 1..31: note = Probe
  source 1..31: mol_type = other DNA
cactgtaaagctaacttagcattaacctttt

SEQ ID NO: 495 - DNA, 32 bp, synthetic construct
  misc_feature 1..32: note = Probe
  source 1..32: mol_type = other DNA
cactgtaaagctaacttagcattaacctttta

SEQ ID NO: 496 - DNA, 34 bp, synthetic construct
  misc_feature 1..34: note = Probe
  source 1..34: mol_type = other DNA
cactgtaaagctaacttagcattaaccttttaag

SEQ ID NO: 497 - DNA, 35 bp, synthetic construct
  misc_feature 1..35: note = Probe
  source 1..35: mol_type = other DNA
cactgtaaagctaacttagcattaaccttttaagt

SEQ ID NO: 498 - DNA, 36 bp, synthetic construct
  misc_feature 1..36: note = Probe
  source 1..36: mol_type = other DNA
cactgtaaagctaacttagcattaaccttttaagtt

SEQ ID NO: 499 - DNA, 39 bp, synthetic construct
  misc_feature 1..39: note = Probe
  source 1..39: mol_type = other DNA
cactgtaaagctaacttagcattaaccttttaagttaaa

SEQ ID NO: 500 - DNA, 41 bp, synthetic construct
  misc_feature 1..41: note = Probe
  source 1..41: mol_type = other DNA
cactgtaaagctaacttagcattaaccttttaagttaaaga

SEQ ID NO: 501 - DNA, 43 bp, synthetic construct
  misc_feature 1..43: note = Probe
  source 1..43: mol_type = other DNA
cactgtaaagctaacttagcattaaccttttaagttaaagatt

SEQ ID NO: 502 - DNA, 50 bp, synthetic construct
  misc_feature 1..50: note = Probe
  source 1..50: mol_type = other DNA
cactgtaaagctaacttagcattaaccttttaagttaaagattaagagaa

SEQ ID NO: 503 - DNA, 17 bp, synthetic construct
  misc_feature 1..17: note = Probe
  source 1..17: mol_type = other DNA
cagaagattccaggttc

SEQ ID NO: 504 - DNA, 32 bp, synthetic construct
  misc_feature 1..32: note = Probe
  source 1..32: mol_type = other DNA
cagaagattccaggttcgactcctggctggct

SEQ ID NO: 505 - DNA, 32 bp, synthetic construct
  misc_feature 1..32: note = Probe
  source 1..32: mol_type = other DNA
cagaagattctaggttcgactcctggctggct

SEQ ID NO: 506 - DNA, 35 bp, synthetic construct
  misc_feature 1..35: note = Probe
  source 1..35: mol_type = other DNA
cagaagattctaggttcgactcctggctggctcgc

SEQ ID NO: 507 - DNA, 17 bp, synthetic construct
  misc_feature 1..17: note = Probe
  source 1..17: mol_type = other DNA
cagaagattgagggttc

SEQ ID NO: 508 - DNA, 18 bp, synthetic construct
  misc_feature 1..18: note = Probe
  source 1..18: mol_type = other DNA
cagaagattgagggttcg

SEQ ID NO: 509 - DNA, 27 bp, synthetic construct
  misc_feature 1..27: note = Probe
  source 1..27: mol_type = other DNA
cagaagattgagggttcgagtcccttc

SEQ ID NO: 510 - DNA, 28 bp, synthetic construct
  misc_feature 1..28: note = Probe
  source 1..28: mol_type = other DNA
cagaagattgagggttcgagtcccttcg

SEQ ID NO: 511 - DNA, 32 bp, synthetic construct
  misc_feature 1..32: note = Probe
  source 1..32: mol_type = other DNA
cagaagattgagggttcgagtcccttcgtggt

SEQ ID NO: 512 - DNA, 17 bp, synthetic construct
  misc_feature 1..17: note = Probe
  source 1..17: mol_type = other DNA
cagaccaagagccttca

SEQ ID NO: 513 - DNA, 36 bp, synthetic construct
  misc_feature 1..36: note = Probe
  source 1..36: mol_type = other DNA
cagaccaagagccttcaaagccctcagtaagttgca

SEQ ID NO: 514 - DNA, 50 bp, synthetic construct
  misc_feature 1..50: note = Probe
  source 1..50: mol_type = other DNA
cagaccaagagccttcaaagccctcagtaagttgcaatacttaatttctg

SEQ ID NO: 515 - DNA, 24 bp, synthetic construct
  misc_feature 1..24: note = Probe
  source 1..24: mol_type = other DNA
cagagaatagtttaaattagaatc

SEQ ID NO: 516 - DNA, 27 bp, synthetic construct
  misc_feature 1..27: note = Probe
  source 1..27: mol_type = other DNA
cagagaatagtttaaattagaatctta

SEQ ID NO: 517 - DNA, 28 bp, synthetic construct
  misc_feature 1..28: note = Probe
  source 1..28: mol_type = other DNA
cagagaatagtttaaattagaatcttag

SEQ ID NO: 518 - DNA, 29 bp, synthetic construct
  misc_feature 1..29: note = Probe
  source 1..29: mol_type = other DNA
cagagaatagtttaaattagaatcttagc

SEQ ID NO: 519 - DNA, 30 bp, synthetic construct
  misc_feature 1..30: note = Probe
  source 1..30: mol_type = other DNA
cagagaatagtttaaattagaatcttagct

SEQ ID NO: 520 - DNA, 31 bp, synthetic construct
  misc_feature 1..31: note = Probe
  source 1..31: mol_type = other DNA
cagagaatagtttaaattagaatcttagctt

SEQ ID NO: 521 - DNA, 32 bp, synthetic construct
  misc_feature 1..32: note = Probe
  source 1..32: mol_type = other DNA
cagagaatagtttaaattagaatcttagcttt

SEQ ID NO: 522 - DNA, 33 bp, synthetic construct
  misc_feature 1..33: note = Probe
  source 1..33: mol_type = other DNA
cagagaatagtttaaattagaatcttagctttg

SEQ ID NO: 523 - DNA, 34 bp, synthetic construct
  misc_feature 1..34: note = Probe
  source 1..34: mol_type = other DNA
cagagaatagtttaaattagaatcttagctttgg

SEQ ID NO: 524 - DNA, 40 bp, synthetic construct
  misc_feature 1..40: note = Probe
  source 1..40: mol_type = other DNA
cagagaatagtttaaattagaatcttagctttgggtgcta

SEQ ID NO: 525 - DNA, 43 bp, synthetic construct
  misc_feature 1..43: note = Probe
  source 1..43: mol_type = other DNA
cagagaatagtttaaattagaatcttagctttgggtgctaatg

SEQ ID NO: 526 - DNA, 50 bp, synthetic construct
  misc_feature 1..50: note = Probe
  source 1..50: mol_type = other DNA
cagagaatagtttaaattagaatcttagctttgggtgctaatggtggagt

SEQ ID NO: 527 - DNA, 32 bp, synthetic construct
  misc_feature 1..32: note = Probe
  source 1..32: mol_type = other DNA
cagagtggcgcagcggaagcgtgctgggccca

SEQ ID NO: 528 - DNA, 33 bp, synthetic construct
  misc_feature 1..33: note = Probe
  source 1..33: mol_type = other DNA
cagagtggcgcagcggaagcgtgctgggcccat

SEQ ID NO: 529 - DNA, 31 bp, synthetic construct
  misc_feature 1..31: note = Probe
  source 1..31: mol_type = other DNA
cagcgatccgagttcaaatctcggtggaacc

SEQ ID NO: 530 - DNA, 32 bp, synthetic construct
  misc_feature 1..32: note = Probe
  source 1..32: mol_type = other DNA
cagcgatccgagttcaaatctcggtggaacct

SEQ ID NO: 531 - DNA, 32 bp, synthetic construct
  misc_feature 1..32: note = Probe
  source 1..32: mol_type = other DNA
cagcgatccgagttcaaatctcggtgggacct

SEQ ID NO: 532 - DNA, 50 bp, synthetic construct
  misc_feature 1..50: note = Probe
  source 1..50: mol_type = other DNA
cagctaaataagctatcgggcccataccccgaaaatgttggttataccct

SEQ ID NO: 533 - DNA, 34 bp, synthetic construct
  misc_feature 1..34: note = Probe
  source 1..34: mol_type = other DNA
caggcggcccgggttcgactcccggtgtgggaac

SEQ ID NO: 534 - DNA, 30 bp, synthetic construct
  misc_feature 1..30: note = Probe
  source 1..30: mol_type = other DNA
cagggtcgtgggttcgagccccacgttggg

SEQ ID NO: 535 - DNA, 24 bp, synthetic construct
  misc_feature 1..24: note = Probe
  source 1..24: mol_type = other DNA
cagtcagaggttcaattcctcttc

SEQ ID NO: 536 - DNA, 17 bp, synthetic construct
  misc_feature 1..17: note = Probe
  source 1..17: mol_type = other DNA
cagtcggtagagcatca

SEQ ID NO: 537 - DNA, 17 bp, synthetic construct
  misc_feature 1..17: note = Probe
  source 1..17: mol_type = other DNA
cagtcggtagagcatgg

SEQ ID NO: 538 - DNA, 50 bp, synthetic construct
  misc_feature 1..50: note = Probe
  source 1..50: mol_type = other DNA
cagttgattagggtgcttagctgttaactaagtgtttgtgggtttaagtc

SEQ ID NO: 539 - DNA, 29 bp, synthetic construct
  misc_feature 1..29: note = Probe
  source 1..29: mol_type = other DNA
catatcattggtcgtggttgtagtccgtg

SEQ ID NO: 540 - DNA, 31 bp, synthetic construct
  misc_feature 1..31: note = Probe
  source 1..31: mol_type = other DNA
catatcattggtcgtggttgtagtccgtgcg

SEQ ID NO: 541 - DNA, 33 bp, synthetic construct
  misc_feature 1..33: note = Probe
  source 1..33: mol_type = other DNA
catatggtctagcggttaggattcctggttttc

SEQ ID NO: 542 - DNA, 33 bp, synthetic construct
  misc_feature 1..33: note = Probe
  source 1..33: mol_type = other DNA
catgggtggttcagtggtagaattctcgcctgc

SEQ ID NO: 543 - DNA, 19 bp, synthetic construct
  misc_feature 1..19: note = Probe
  source 1..19: mol_type = other DNA
cattcttgcgacccgggtt

SEQ ID NO: 544 - DNA, 20 bp, synthetic construct
  misc_feature 1..20: note = Probe
  source 1..20: mol_type = other DNA
cattcttgcgacccgggttc

SEQ ID NO: 545 - DNA, 22 bp, synthetic construct
  misc_feature 1..22: note = Probe
  source 1..22: mol_type = other DNA
cattcttgcgacccgggttcga

SEQ ID NO: 546 - DNA, 23 bp, synthetic construct
  misc_feature 1..23: note = Probe
  source 1..23: mol_type = other DNA
cattcttgcgacccgggttcgat

SEQ ID NO: 547 - DNA, 24 bp, synthetic construct
  misc_feature 1..24: note = Probe
  source 1..24: mol_type = other DNA
cattcttgcgacccgggttcgatt

SEQ ID NO: 548 - DNA, 32 bp, synthetic construct
  misc_feature 1..32: note = Probe
  source 1..32: mol_type = other DNA
cattggtcgtggttgtagtccgtgcgagaata

SEQ ID NO: 549 - DNA, 37 bp, synthetic construct
  misc_feature 1..37: note = Probe
  source 1..37: mol_type = other DNA
ccaaaacatcagattgtgaatctgacaacagaggctt

SEQ ID NO: 550 - DNA, 38 bp, synthetic construct
  misc_feature 1..38: note = Probe
  source 1..38: mol_type = other DNA
ccaaaacatcagattgtgaatctgacaacagaggctta

SEQ ID NO: 551 - DNA, 39 bp, synthetic construct
  misc_feature 1..39: note = Probe
  source 1..39: mol_type = other DNA
ccaaaacatcagattgtgaatctgacaacagaggcttac

SEQ ID NO: 552 - DNA, 40 bp, synthetic construct
  misc_feature 1..40: note = Probe
  source 1..40: mol_type = other DNA
ccaaaacatcagattgtgaatctgacaacagaggcttacg

SEQ ID NO: 553 - DNA, 41 bp, synthetic construct
  misc_feature 1..41: note = Probe
  source 1..41: mol_type = other DNA
ccaaaacatcagattgtgaatctgacaacagaggcttacga

SEQ ID NO: 554 - DNA, 42 bp, synthetic construct
  misc_feature 1..42: note = Probe
  source 1..42: mol_type = other DNA
ccaaaacatcagattgtgaatctgacaacagaggcttacgac

SEQ ID NO: 555 - DNA, 43 bp, synthetic construct
  misc_feature 1..43: note = Probe
  source 1..43: mol_type = other DNA
ccaaaacatcagattgtgaatctgacaacagaggcttacgacc

SEQ ID NO: 556 - DNA, 44 bp, synthetic construct
  misc_feature 1..44: note = Probe
  source 1..44: mol_type = other DNA
ccaaaacatcagattgtgaatctgacaacagaggcttacgaccc

SEQ ID NO: 557 - DNA, 45 bp, synthetic construct
  misc_feature 1..45: note = Probe
  source 1..45: mol_type = other DNA
ccaaaacatcagattgtgaatctgacaacagaggcttacgacccc

SEQ ID NO: 558 - DNA, 46 bp, synthetic construct
  misc_feature 1..46: note = Probe
  source 1..46: mol_type = other DNA
ccaaaacatcagattgtgaatctgacaacagaggcttacgacccct

SEQ ID NO: 559 - DNA, 16 bp, synthetic construct
  misc_feature 1..16: note = Probe
  source 1..16: mol_type = other DNA
ccaaggtcgcgggttc

SEQ ID NO: 560 - DNA, 27 bp, synthetic construct
  misc_feature 1..27: note = Probe
  source 1..27: mol_type = other DNA
ccacatggtctagcggttaggattcct

SEQ ID NO: 561 - DNA, 28 bp, synthetic construct
  misc_feature 1..28: note = Probe
  source 1..28: mol_type = other DNA
ccacatggtctagcggttaggattcctg

SEQ ID NO: 562 - DNA, 29 bp, synthetic construct
  misc_feature 1..29: note = Probe
  source 1..29: mol_type = other DNA
ccacatggtctagcggttaggattcctgg

SEQ ID NO: 563 - DNA, 31 bp, synthetic construct
  misc_feature 1..31: note = Probe
  source 1..31: mol_type = other DNA
ccacatggtctagcggttaggattcctggtt

SEQ ID NO: 564 - DNA, 32 bp, synthetic construct
  misc_feature 1..32: note = Probe
  source 1..32: mol_type = other DNA
ccacatggtctagcggttaggattcctggttt

SEQ ID NO: 565 - DNA, 33 bp, synthetic construct
  misc_feature 1..33: note = Probe
  source 1..33: mol_type = other DNA
ccacatggtctagcggttaggattcctggtttt

SEQ ID NO: 566 - DNA, 34 bp, synthetic construct
  misc_feature 1..34: note = Probe
  source 1..34: mol_type = other DNA
ccacatggtctagcggttaggattcctggttttc

SEQ ID NO: 567 - DNA, 35 bp, synthetic construct
  misc_feature 1..35: note = Probe
  source 1..35: mol_type = other DNA
ccacatggtctagcggttaggattcctggttttca

SEQ ID NO: 568 - DNA, 20 bp, synthetic construct
  misc_feature 1..20: note = Probe
  source 1..20: mol_type = other DNA
ccacgcgggaggcccgggtt

SEQ ID NO: 569 - DNA, 16 bp, synthetic construct
  misc_feature 1..16: note = Probe
  source 1..16: mol_type = other DNA
ccagcgatccgagttc

SEQ ID NO: 570 - DNA, 17 bp, synthetic construct
  misc_feature 1..17: note = Probe
  source 1..17: mol_type = other DNA
ccagcgatccgagttca

SEQ ID NO: 571 - DNA, 33 bp, synthetic construct
  misc_feature 1..33: note = Probe
  source 1..33: mol_type = other DNA
ccagcgatccgagttcaaatctcggtgggacct

SEQ ID NO: 572 - DNA, 35 bp, synthetic construct
  misc_feature 1..35: note = Probe
  source 1..35: mol_type = other DNA
ccaggcggcccgggttcgactcccggtgtgggaac

SEQ ID NO: 573 - DNA, 17 bp, synthetic construct
  misc_feature 1..17: note = Probe
  source 1..17: mol_type = other DNA
ccagggtcgtgggttcg

SEQ ID NO: 574 - DNA, 27 bp, synthetic construct
  misc_feature 1..27: note = Probe
  source 1..27: mol_type = other DNA
ccatatggtctagcggttaggattcct

SEQ ID NO: 575 - DNA, 32 bp, synthetic construct
  misc_feature 1..32: note = Probe
  source 1..32: mol_type = other DNA
ccatatggtctagcggttaggattcctggttt

SEQ ID NO: 576 - DNA, 33 bp, synthetic construct
  misc_feature 1..33: note = Probe
  source 1..33: mol_type = other DNA
ccatatggtctagcggttaggattcctggtttt

SEQ ID NO: 577 - DNA, 34 bp, synthetic construct
  misc_feature 1..34: note = Probe
  source 1..34: mol_type = other DNA
ccatatggtctagcggttaggattcctggttttc

SEQ ID NO: 578 - DNA, 20 bp, synthetic construct
  misc_feature 1..20: note = Probe
  source 1..20: mol_type = other DNA
ccattggggtttccccgcgc

SEQ ID NO: 579 - DNA, 29 bp, synthetic construct
  misc_feature 1..29: note = Probe
  source 1..29: mol_type = other DNA
cccacatggtctagcggttaggattcctg

SEQ ID NO: 580 - DNA, 32 bp, synthetic construct
  misc_feature 1..32: note = Probe
  source 1..32: mol_type = other DNA
cccacatggtctagcggttaggattcctggtt

SEQ ID NO: 581 - DNA, 33 bp, synthetic construct
  misc_feature 1..33: note = Probe
  source 1..33: mol_type = other DNA
cccacatggtctagcggttaggattcctggttt

SEQ ID NO: 582 - DNA, 34 bp, synthetic construct
  misc_feature 1..34: note = Probe
  source 1..34: mol_type = other DNA
cccacatggtctagcggttaggattcctggtttt

SEQ ID NO: 583 - DNA, 35 bp, synthetic construct
  misc_feature 1..35: note = Probe
  source 1..35: mol_type = other DNA
cccacatggtctagcggttaggattcctggttttc

SEQ ID NO: 584 - DNA, 19 bp, synthetic construct
  misc_feature 1..19: note = Probe
  source 1..19: mol_type = other DNA
cccagaggtcgatggatcg

SEQ ID NO: 585 - DNA, 32 bp, synthetic construct
  misc_feature 1..32: note = Probe
  source 1..32: mol_type = other DNA
cccaggcggcccgggttcgactcccggtgtgg

SEQ ID NO: 586 - DNA, 36 bp, synthetic construct
  misc_feature 1..36: note = Probe
  source 1..36: mol_type = other DNA
cccaggcggcccgggttcgactcccggtgtgggaac

SEQ ID NO: 587 - DNA, 33 bp, synthetic construct
  misc_feature 1..33: note = Probe
  source 1..33: mol_type = other DNA
cccagtggcctaatggataaggcatcagcctcc

SEQ ID NO: 588 - DNA, 19 bp, synthetic construct
  misc_feature 1..19: note = Probe
  source 1..19: mol_type = other DNA
cccataacccagaggtcga

SEQ ID NO: 589 - DNA, 21 bp, synthetic construct
  misc_feature 1..21: note = Probe
  source 1..21: mol_type = other DNA
cccataacccagaggtcgatg

SEQ ID NO: 590 - DNA, 32 bp, synthetic construct
  misc_feature 1..32: note = Probe
  source 1..32: mol_type = other DNA
cccatatggtctagcggttaggattcctggtt

SEQ ID NO: 591 - DNA, 34 bp, synthetic construct
  misc_feature 1..34: note = Probe
  source 1..34: mol_type = other DNA
cccatatggtctagcggttaggattcctggtttt

SEQ ID NO: 592 - DNA, 35 bp, synthetic construct
  misc_feature 1..35: note = Probe
  source 1..35: mol_type = other DNA
cccatatggtctagcggttaggattcctggttttc

SEQ ID NO: 593 - DNA, 21 bp, synthetic construct
  misc_feature 1..21: note = Probe
  source 1..21: mol_type = other DNA
cccattcttgcgacccgggtt

SEQ ID NO: 594 - DNA, 22 bp, synthetic construct
  misc_feature 1..22: note = Probe
  source 1..22: mol_type = other DNA
cccattcttgcgacccgggttc

SEQ ID NO: 595 - DNA, 24 bp, synthetic construct
  misc_feature 1..24: note = Probe
  source 1..24: mol_type = other DNA
cccattcttgcgacccgggttcga

SEQ ID NO: 596 - DNA, 26 bp, synthetic construct
  misc_feature 1..26: note = Probe
  source 1..26: mol_type = other DNA
cccattcttgcgacccgggttcgatt

SEQ ID NO: 597 - DNA, 29 bp, synthetic construct
  misc_feature 1..29: note = Probe
  source 1..29: mol_type = other DNA
cccattcttgcgacccgggttcgattccc

SEQ ID NO: 598 - DNA, 35 bp, synthetic construct
  misc_feature 1..35: note = Probe
  source 1..35: mol_type = other DNA
cccattcttgcgacccgggttcgattcccgggcgg

SEQ ID NO: 599 - DNA, 37 bp, synthetic construct
  misc_feature 1..37: note = Probe
  source 1..37: mol_type = other DNA
cccattcttgcgacccgggttcgattcccgggcggcg

SEQ ID NO: 600 - DNA, 39 bp, synthetic construct
  misc_feature 1..39: note = Probe
  source 1..39: mol_type = other DNA
cccattcttgcgacccgggttcgattcccgggcggcgca

SEQ ID NO: 601 - DNA, 34 bp, synthetic construct
  misc_feature 1..34: note = Probe
  source 1..34: mol_type = other DNA
ccccatggtgtaatggttagcactctggactttg

SEQ ID NO: 602 - DNA, 31 bp, synthetic construct
  misc_feature 1..31: note = Probe
  source 1..31: mol_type = other DNA
ccccgaaaatgttggttatacccttcccgta

SEQ ID NO: 603 - DNA, 33 bp, synthetic construct
  misc_feature 1..33: note = Probe
  source 1..33: mol_type = other DNA
ccccgaaaatgttggttatacccttcccgtact

SEQ ID NO: 604 - DNA, 34 bp, synthetic construct
  misc_feature 1..34: note = Probe
  source 1..34: mol_type = other DNA
ccccgaaaatgttggttatacccttcccgtacta

SEQ ID NO: 605 - DNA, 21 bp, synthetic construct
  misc_feature 1..21: note = Probe
  source 1..21: mol_type = other DNA
ccccgcgcaggttcgaatcct

SEQ ID NO: 606 - DNA, 17 bp, synthetic construct
  misc_feature 1..17: note = Probe
  source 1..17: mol_type = other DNA
ccccggcacctccacca

SEQ ID NO: 607 - DNA, 24 bp, synthetic construct
  misc_feature 1..24: note = Probe
  source 1..24: mol_type = other DNA
ccccgggttcaatccccggcacct

SEQ ID NO: 608 - DNA, 27 bp, synthetic construct
  misc_feature 1..27: note = Probe
  source 1..27: mol_type = other DNA
ccccgggttcaatccccggcacctcca

SEQ ID NO: 609 - DNA, 27 bp, synthetic construct
  misc_feature 1..27: note = Probe
  source 1..27: mol_type = other DNA
ccccgggttcaatccccggcatctcca

SEQ ID NO: 610 - DNA, 27 bp, synthetic construct
  misc_feature 1..27: note = Probe
  source 1..27: mol_type = other DNA
ccccgggttcgatccccggcatctcca

SEQ ID NO: 611 - DNA, 30 bp, synthetic construct
  misc_feature 1..30: note = Probe
  source 1..30: mol_type = other DNA
cccgaaaatgttggttatacccttcccgta

SEQ ID NO: 612 - DNA, 31 bp, synthetic construct
  misc_feature 1..31: note = Probe
  source 1..31: mol_type = other DNA
cccgaaaatgttggttatacccttcccgtac

SEQ ID NO: 613 - DNA, 32 bp, synthetic construct
  misc_feature 1..32: note = Probe
  source 1..32: mol_type = other DNA
cccgaaaatgttggttatacccttcccgtact

SEQ ID NO: 614 - DNA, 33 bp, synthetic construct
  misc_feature 1..33: note = Probe
  source 1..33: mol_type = other DNA
cccgaaaatgttggttatacccttcccgtacta

SEQ ID NO: 615 - DNA, 30 bp, synthetic construct
  misc_feature 1..30: note = Probe
  source 1..30: mol_type = other DNA
cccggatagctcagtcggtagagcatcaga

SEQ ID NO: 616 - DNA, 31 bp, synthetic construct
  misc_feature 1..31: note = Probe
  source 1..31: mol_type = other DNA
cccggatagctcagtcggtagagcatcagac

SEQ ID NO: 617 - DNA, 32 bp, synthetic construct
  misc_feature 1..32: note = Probe
  source 1..32: mol_type = other DNA
cccggatagctcagtcggtagagcatcagact

SEQ ID NO: 618 - DNA, 33 bp, synthetic construct
  misc_feature 1..33: note = Probe
  source 1..33: mol_type = other DNA
cccggatagctcagtcggtagagcatcagactt

SEQ ID NO: 619 - DNA, 34 bp, synthetic construct
  misc_feature 1..34: note = Probe
  source 1..34: mol_type = other DNA
cccggatagctcagtcggtagagcatcagacttt

SEQ ID NO: 620 - DNA, 35 bp, synthetic construct
  misc_feature 1..35: note = Probe
  source 1..35: mol_type = other DNA
cccggatagctcagtcggtagagcatcagactttt

SEQ ID NO: 621 - DNA, 31 bp, synthetic construct
  misc_feature 1..31: note = Probe
  source 1..31: mol_type = other DNA
cccggctagctcagtcggtagagcatgagac

SEQ ID NO: 622 - DNA, 32 bp, synthetic construct
  misc_feature 1..32: note = Probe
  source 1..32: mol_type = other DNA
cccggctagctcagtcggtagagcatgagact

SEQ ID NO: 623 - DNA, 33 bp, synthetic construct
  misc_feature 1..33: note = Probe
  source 1..33: mol_type = other DNA
cccggctagctcagtcggtagagcatgagactc

SEQ ID NO: 624 - DNA, 34 bp, synthetic construct
  misc_feature 1..34: note = Probe
  source 1..34: mol_type = other DNA
cccggctagctcagtcggtagagcatgagactct

SEQ ID NO: 625 - DNA, 35 bp, synthetic construct
  misc_feature 1..35: note = Probe
  source 1..35: mol_type = other DNA
cccggctagctcagtcggtagagcatgagactctt

SEQ ID NO: 626 - DNA, 31 bp, synthetic construct
  misc_feature 1..31: note = Probe
  source 1..31: mol_type = other DNA
cccggctagctcagtcggtagagcatgggac

SEQ ID NO: 627 - DNA, 32 bp, synthetic construct
  misc_feature 1..32: note = Probe
  source 1..32: mol_type = other DNA
cccggctagctcagtcggtagagcatgggact

SEQ ID NO: 628 - DNA, 33 bp, synthetic construct
  misc_feature 1..33: note = Probe
  source 1..33: mol_type = other DNA
cccggctagctcagtcggtagagcatgggactc

SEQ ID NO: 629 - DNA, 34 bp, synthetic construct
  misc_feature 1..34: note = Probe
  source 1..34: mol_type = other DNA
cccggctagctcagtcggtagagcatgggactct

SEQ ID NO: 630 - DNA, 35 bp, synthetic construct
  misc_feature 1..35: note = Probe
  source 1..35: mol_type = other DNA
cccggctagctcagtcggtagagcatgggactctt

SEQ ID NO: 631 - DNA, 26 bp, synthetic construct
  misc_feature 1..26: note = Probe
  source 1..26: mol_type = other DNA
cccgggttcgatccccagcatctcca

SEQ ID NO: 632 - DNA, 50 bp, synthetic construct
  misc_feature 1..50: note = Probe
  source 1..50: mol_type = other DNA
cccggtaatcgcataaaacttaaaactttacagtcagaggttcaattcct

SEQ ID NO: 633 - DNA, 31 bp, synthetic construct
  misc_feature 1..31: note = Probe
  source 1..31: mol_type = other DNA
ccctggtggtctagtggctaggattcggcgc

SEQ ID NO: 634 - DNA, 32 bp, synthetic construct
  misc_feature 1..32: note = Probe
  source 1..32: mol_type = other DNA
ccctggtggtctagtggctaggattcggcgct

SEQ ID NO: 635 - DNA, 34 bp, synthetic construct
  misc_feature 1..34: note = Probe
  source 1..34: mol_type = other DNA
ccctggtggtctagtggctaggattcggcgcttt

SEQ ID NO: 636 - DNA, 35 bp, synthetic construct
  misc_feature 1..35: note = Probe
  source 1..35: mol_type = other DNA
ccctggtggtctagtggctaggattcggcgctttc

SEQ ID NO: 637 - DNA, 30 bp, synthetic construct
  misc_feature 1..30: note = Probe
  source 1..30: mol_type = other DNA
ccctggtggtctagtggttaggattcggcg

SEQ ID NO: 638 - DNA, 31 bp, synthetic construct
  misc_feature 1..31: note = Probe
  source 1..31: mol_type = other DNA
ccctggtggtctagtggttaggattcggcgc

SEQ ID NO: 639 - DNA, 32 bp, synthetic construct
  misc_feature 1..32: note = Probe
  source 1..32: mol_type = other DNA
ccctggtggtctagtggttaggattcggcgct

SEQ ID NO: 640 - DNA, 33 bp, synthetic construct
  misc_feature 1..33: note = Probe
  source 1..33: mol_type = other DNA
ccctggtggtctagtggttaggattcggcgctc

SEQ ID NO: 641 - DNA, 34 bp, synthetic construct
  misc_feature 1..34: note = Probe
  source 1..34: mol_type = other DNA
ccctggtggtctagtggttaggattcggcgctct

SEQ ID NO: 642 - DNA, 35 bp, synthetic construct
  misc_feature 1..35: note = Probe
  source 1..35: mol_type = other DNA
ccctggtggtctagtggttaggattcggcgctctc

SEQ ID NO: 643 - DNA, 36 bp, synthetic construct
  misc_feature 1..36: note = Probe
  source 1..36: mol_type = other DNA
ccctggtggtctagtggttaggattcggcgctctca

SEQ ID NO: 644 - DNA, 30 bp, synthetic construct
  misc_feature 1..30: note = Probe
  source 1..30: mol_type = other DNA
ccgaaaatgttggttatacccttcccgtac

SEQ ID NO: 645 - DNA, 33 bp, synthetic construct
  misc_feature 1..33: note = Probe
  source 1..33: mol_type = other DNA
ccgaaaggttggtggttcgagcccacccaggga

SEQ ID NO: 646 - DNA, 35 bp, synthetic construct
  misc_feature 1..35: note = Probe
  source 1..35: mol_type = other DNA
ccgaaaggttggtggttcgagcccacccagggacg

SEQ ID NO: 647 - DNA, 16 bp, synthetic construct
  misc_feature 1..16: note = Probe
  source 1..16: mol_type = other DNA
ccgaagatcacgggtt

SEQ ID NO: 648 - DNA, 17 bp, synthetic construct
  misc_feature 1..17: note = Probe
  source 1..17: mol_type = other DNA
ccgaagatcacgggttc

SEQ ID NO: 649 - DNA, 16 bp, synthetic construct
  misc_feature 1..16: note = Probe
  source 1..16: mol_type = other DNA
ccgaagatcgcgggtt

SEQ ID NO: 650 - DNA, 17 bp, synthetic construct
  misc_feature 1..17: note = Probe
  source 1..17: mol_type = other DNA
ccgaagatcgcgggttc

SEQ ID NO: 651 - DNA, 18 bp, synthetic construct
  misc_feature 1..18: note = Probe
  source 1..18: mol_type = other DNA
ccgcagcaacctcggttc

SEQ ID NO: 652 - DNA, 23 bp, synthetic construct
  misc_feature 1..23: note = Probe
  source 1..23: mol_type = other DNA
ccgctggtgtagtggtatcatgc

SEQ ID NO: 653 - DNA, 25 bp, synthetic construct
  misc_feature 1..25: note = Probe
  source 1..25: mol_type = other DNA
ccgctggtgtagtggtatcatgcaa

SEQ ID NO: 654 - DNA, 26 bp, synthetic construct
  misc_feature 1..26: note = Probe
  source 1..26: mol_type = other DNA
ccgctggtgtagtggtatcatgcaag

SEQ ID NO: 655 - DNA, 27 bp, synthetic construct
  misc_feature 1..27: note = Probe
  source 1..27: mol_type = other DNA
ccgctggtgtagtggtatcatgcaaga

SEQ ID NO: 656 - DNA, 29 bp, synthetic construct
  misc_feature 1..29: note = Probe
  source 1..29: mol_type = other DNA
ccgctggtgtagtggtatcatgcaagatt

SEQ ID NO: 657 - DNA, 30 bp, synthetic construct
  misc_feature 1..30: note = Probe
  source 1..30: mol_type = other DNA
ccgctggtgtagtggtatcatgcaagattc

SEQ ID NO: 658 - DNA, 31 bp, synthetic construct
  misc_feature 1..31: note = Probe
  source 1..31: mol_type = other DNA
ccgctggtgtagtggtatcatgcaagattcc

SEQ ID NO: 659 - DNA, 32 bp, synthetic construct
  misc_feature 1..32: note = Probe
  source 1..32: mol_type = other DNA
ccgctggtgtagtggtatcatgcaagattccc

SEQ ID NO: 660 - DNA, 33 bp, synthetic construct
  misc_feature 1..33: note = Probe
  source 1..33: mol_type = other DNA
ccgctggtgtagtggtatcatgcaagattccca

SEQ ID NO: 661 - DNA, 16 bp, synthetic construct
  misc_feature 1..16: note = Probe
  source 1..16: mol_type = other DNA
ccggagatgaaaacct

SEQ ID NO: 662 - DNA, 23 bp, synthetic construct
  misc_feature 1..23: note = Probe
  source 1..23: mol_type = other DNA
ccggagatgaaaacctttttcca

SEQ ID NO: 663 - DNA, 27 bp, synthetic construct
  misc_feature 1..27: note = Probe
  source 1..27: mol_type = other DNA
ccggagatgaaaacctttttccaagga

SEQ ID NO: 664 - DNA, 28 bp, synthetic construct
  misc_feature 1..28: note = Probe
  source 1..28: mol_type = other DNA
ccggagatgaaaacctttttccaaggac

SEQ ID NO: 665 - DNA, 29 bp, synthetic construct
  misc_feature 1..29: note = Probe
  source 1..29: mol_type = other DNA
ccggagatgaaaacctttttccaaggaca

SEQ ID NO: 666 - DNA, 27 bp, synthetic construct
  misc_feature 1..27: note = Probe
  source 1..27: mol_type = other DNA
ccggatagctcagtcggtagagcatca

SEQ ID NO: 667 - DNA, 29 bp, synthetic construct
  misc_feature 1..29: note = Probe
  source 1..29: mol_type = other DNA
ccggatagctcagtcggtagagcatcaga

SEQ ID NO: 668 - DNA, 30 bp, synthetic construct
  misc_feature 1..30: note = Probe
  source 1..30: mol_type = other DNA
ccggatagctcagtcggtagagcatcagac

SEQ ID NO: 669 - DNA, 31 bp, synthetic construct
  misc_feature 1..31: note = Probe
  source 1..31: mol_type = other DNA
ccggatagctcagtcggtagagcatcagact

SEQ ID NO: 670 - DNA, 32 bp, synthetic construct
  misc_feature 1..32: note = Probe
  source 1..32: mol_type = other DNA
ccggatagctcagtcggtagagcatcagactt

SEQ ID NO: 671 - DNA, 33 bp, synthetic construct
  misc_feature 1..33: note = Probe
  source 1..33: mol_type = other DNA
ccggatagctcagtcggtagagcatcagacttt

SEQ ID NO: 672 - DNA, 34 bp, synthetic construct
  misc_feature 1..34: note = Probe
  source 1..34: mol_type = other DNA
ccggatagctcagtcggtagagcatcagactttt

SEQ ID NO: 673 - DNA, 27 bp, synthetic construct
  misc_feature 1..27: note = Probe
  source 1..27: mol_type = other DNA
ccggctagctcagtcggtagagcatga

SEQ ID NO: 674 - DNA, 29 bp, synthetic construct
  misc_feature 1..29: note = Probe
  source 1..29: mol_type = other DNA
ccggctagctcagtcggtagagcatgaga

SEQ ID NO: 675 - DNA, 30 bp, synthetic construct
  misc_feature 1..30: note = Probe
  source 1..30: mol_type = other DNA
ccggctagctcagtcggtagagcatgagac

SEQ ID NO: 676 - DNA, 31 bp, synthetic construct
  misc_feature 1..31: note = Probe
  source 1..31: mol_type = other DNA
ccggctagctcagtcggtagagcatgagact

SEQ ID NO: 677 - DNA, 32 bp, synthetic construct
  misc_feature 1..32: note = Probe
  source 1..32: mol_type = other DNA
ccggctagctcagtcggtagagcatgagactc

SEQ ID NO: 678 - DNA, 27 bp, synthetic construct
  misc_feature 1..27: note = Probe
  source 1..27: mol_type = other DNA
ccggctagctcagtcggtagagcatgg

SEQ ID NO: 679 - DNA, 29 bp, synthetic construct
  misc_feature 1..29: note = Probe
  source 1..29: mol_type = other DNA
ccggctagctcagtcggtagagcatggga

SEQ ID NO: 680 - DNA, 30 bp, synthetic construct
  misc_feature 1..30: note = Probe
  source 1..30: mol_type = other DNA
ccggctagctcagtcggtagagcatgggac

SEQ ID NO: 681 - DNA, 31 bp, synthetic construct
  misc_feature 1..31: note = Probe
  source 1..31: mol_type = other DNA
ccggctagctcagtcggtagagcatgggact

SEQ ID NO: 682 - DNA, 32 bp, synthetic construct
  misc_feature 1..32: note = Probe
  source 1..32: mol_type = other DNA
ccggctagctcagtcggtagagcatgggactc

SEQ ID NO: 683 - DNA, 33 bp, synthetic construct
  misc_feature 1..33: note = Probe
  source 1..33: mol_type = other DNA
ccggctagctcagtcggtagagcatgggactct

SEQ ID NO: 684 - DNA, 34 bp, synthetic construct
  misc_feature 1..34: note = Probe
  source 1..34: mol_type = other DNA
ccggctagctcagtcggtagagcatgggactctt

SEQ ID NO: 685 - DNA, 50 bp, synthetic construct
  misc_feature 1..50: note = Probe
  source 1..50: mol_type = other DNA
ccggtaatcgcataaaacttaaaactttacagtcagaggttcaattcctc

SEQ ID NO: 686 - DNA, 29 bp, synthetic construct
  misc_feature 1..29: note = Probe
  source 1..29: mol_type = other DNA
ccgtgatcgtatagtggttagtactctgc

SEQ ID NO: 687 - DNA, 31 bp, synthetic construct
  misc_feature 1..31: note = Probe
  source 1..31: mol_type = other DNA
ccgtgatcgtatagtggttagtactctgcgt

SEQ ID NO: 688 - DNA, 33 bp, synthetic construct
  misc_feature 1..33: note = Probe
  source 1..33: mol_type = other DNA
ccgtgatcgtatagtggttagtactctgcgttg

SEQ ID NO: 689 - DNA, 34 bp, synthetic construct
  misc_feature 1..34: note = Probe
  source 1..34: mol_type = other DNA
ccgtgatcgtatagtggttagtactctgcgttgt

SEQ ID NO: 690 - DNA, 35 bp, synthetic construct
  misc_feature 1..35: note = Probe
  source 1..35: mol_type = other DNA
ccgtgatcgtatagtggttagtactctgcgttgtg

SEQ ID NO: 691 - DNA, 50 bp, synthetic construct
  misc_feature 1..50: note = Probe
  source 1..50: mol_type = other DNA
cctcaaagcaatacactgaaaatgtttagacgggctcacatcaccccata

SEQ ID NO: 692 - DNA, 22 bp, synthetic construct
  misc_feature 1..22: note = Probe
  source 1..22: mol_type = other DNA
cctcctcaaagcaatacactga

SEQ ID NO: 693 - DNA, 33 bp, synthetic construct
  misc_feature 1..33: note = Probe
  source 1..33: mol_type = other DNA
cctcgttagtatagtggtgagtatccccgcctg

SEQ ID NO: 694 - DNA, 34 bp, synthetic construct
  misc_feature 1..34: note = Probe
  source 1..34: mol_type = other DNA
cctcgttagtatagtggtgagtatccccgcctgt

SEQ ID NO: 695 - DNA, 35 bp, synthetic construct
  misc_feature 1..35: note = Probe
  source 1..35: mol_type = other DNA
cctcgttagtatagtggtgagtatccccgcctgtc

SEQ ID NO: 696 - DNA, 33 bp, synthetic construct
  misc_feature 1..33: note = Probe
  source 1..33: mol_type = other DNA
cctggtggtctagtggctaggattcggcgcttt

SEQ ID NO: 697 - DNA, 34 bp, synthetic construct
  misc_feature 1..34: note = Probe
  source 1..34: mol_type = other DNA
cctggtggtctagtggctaggattcggcgctttc

SEQ ID NO: 698 - DNA, 29 bp, synthetic construct
  misc_feature 1..29: note = Probe
  source 1..29: mol_type = other DNA
cctggtggtctagtggttaggattcggcg

SEQ ID NO: 699 - DNA, 30 bp, synthetic construct
  misc_feature 1..30: note = Probe
  source 1..30: mol_type = other DNA
cctggtggtctagtggttaggattcggcgc

SEQ ID NO: 700 - DNA, 31 bp, synthetic construct
  misc_feature 1..31: note = Probe
  source 1..31: mol_type = other DNA
cctggtggtctagtggttaggattcggcgct

SEQ ID NO: 701 - DNA, 32 bp, synthetic construct
  misc_feature 1..32: note = Probe
  source 1..32: mol_type = other DNA
cctggtggtctagtggttaggattcggcgctc

SEQ ID NO: 702 - DNA, 33 bp, synthetic construct
  misc_feature 1..33: note = Probe
  source 1..33: mol_type = other DNA
cctggtggtctagtggttaggattcggcgctct

SEQ ID NO: 703 - DNA, 34 bp, synthetic construct
  misc_feature 1..34: note = Probe
  source 1..34: mol_type = other DNA
cctggtggtctagtggttaggattcggcgctctc

SEQ ID NO: 704 - DNA, 35 bp, synthetic construct
  misc_feature 1..35: note = Probe
  source 1..35: mol_type = other DNA
cctggtggtctagtggttaggattcggcgctctca

SEQ ID NO: 705 - DNA, 37 bp, synthetic construct
  misc_feature 1..37: note = Probe
  source 1..37: mol_type = other DNA
cctggtggtctagtggttaggattcggcgctctcacc

SEQ ID NO: 706 - DNA, 42 bp, synthetic construct
  misc_feature 1..42: note = Probe
  source 1..42: mol_type = other DNA
cctgtcacgcgggagaccggggttcgattccccgacggggag

SEQ ID NO: 707 - DNA, 28 bp, synthetic construct
  misc_feature 1..28: note = Probe
  source 1..28: mol_type = other DNA
cgaaaatgttggttatacccttcccgta

SEQ ID NO: 708 - DNA, 29 bp, synthetic construct
  misc_feature 1..29: note = Probe
  source 1..29: mol_type = other DNA
cgaaaatgttggttatacccttcccgtac

SEQ ID NO: 709 - DNA, 30 bp, synthetic construct
  misc_feature 1..30: note = Probe
  source 1..30: mol_type = other DNA
cgaaaatgttggttatacccttcccgtact

SEQ ID NO: 710 - DNA, 31 bp, synthetic construct
  misc_feature 1..31: note = Probe
  source 1..31: mol_type = other DNA
cgaaaatgttggttatacccttcccgtacta

SEQ ID NO: 711 - DNA, 32 bp, synthetic construct
  misc_feature 1..32: note = Probe
  source 1..32: mol_type = other DNA
cgaaaggttggtggttcgagcccacccaggga

SEQ ID NO: 712 - DNA, 18 bp, synthetic construct
  misc_feature 1..18: note = Probe
  source 1..18: mol_type = other DNA
cgattctcatagtcctag

SEQ ID NO: 713 - DNA, 17 bp, synthetic construct
  misc_feature 1..17: note = Probe
  source 1..17: mol_type = other DNA
cgcagcaacctcggttc

SEQ ID NO: 714 - DNA, 26 bp, synthetic construct
  misc_feature 1..26: note = Probe
  source 1..26: mol_type = other DNA
cgcataaaacttaaaactttacagtc

SEQ ID NO: 715 - DNA, 27 bp, synthetic construct
  misc_feature 1..27: note = Probe
  source 1..27: mol_type = other DNA
cgcataaaacttaaaactttacagtca

SEQ ID NO: 716 - DNA, 33 bp, synthetic construct
  misc_feature 1..33: note = Probe
  source 1..33: mol_type = other DNA
cgcataaaacttaaaactttacagtcagaggtt

SEQ ID NO: 717 - DNA, 44 bp, synthetic construct
  misc_feature 1..44: note = Probe
  source 1..44: mol_type = other DNA
cgcataaaacttaaaactttacagtcagaggttcaattcctctt

SEQ ID NO: 718 - DNA, 45 bp, synthetic construct
  misc_feature 1..45: note = Probe
  source 1..45: mol_type = other DNA
cgcataaaacttaaaactttacagtcagaggttcaattcctcttc

SEQ ID NO: 719 - DNA, 33 bp, synthetic construct
  misc_feature 1..33: note = Probe
  source 1..33: mol_type = other DNA
cgcccggatagctcagtcggtagagcatcagac

SEQ ID NO: 720 - DNA, 34 bp, synthetic construct
  misc_feature 1..34: note = Probe
  source 1..34: mol_type = other DNA
cgcccggatagctcagtcggtagagcatcagact

SEQ ID NO: 721 - DNA, 34 bp, synthetic construct
  misc_feature 1..34: note = Probe
  source 1..34: mol_type = other DNA
cgcccggctagctcagtcggtagagcatgggact

SEQ ID NO: 722 - DNA, 31 bp, synthetic construct
  misc_feature 1..31: note = Probe
  source 1..31: mol_type = other DNA
cgccgctggtgtagtggtatcatgcaagatt

SEQ ID NO: 723 - DNA, 32 bp, synthetic construct
  misc_feature 1..32: note = Probe
  source 1..32: mol_type = other DNA
cgccgctggtgtagtggtatcatgcaagattc

SEQ ID NO: 724 - DNA, 34 bp, synthetic construct
  misc_feature 1..34: note = Probe
  source 1..34: mol_type = other DNA
cgccgctggtgtagtggtatcatgcaagattccc

SEQ ID NO: 725 - DNA, 41 bp, synthetic construct
  misc_feature 1..41: note = Probe
  source 1..41: mol_type = other DNA
cgcctgtcacgcgggagaccggggttcgattccccgacggg

SEQ ID NO: 726 - DNA, 19 bp, synthetic construct
  misc_feature 1..19: note = Probe
  source 1..19: mol_type = other DNA
cgcgaaaggtccccggttc

SEQ ID NO: 727 - DNA, 32 bp, synthetic construct
  misc_feature 1..32: note = Probe
  source 1..32: mol_type = other DNA
cgcgggagaccggggttcaattccccgacggg

SEQ ID NO: 728 - DNA, 34 bp, synthetic construct
  misc_feature 1..34: note = Probe
  source 1..34: mol_type = other DNA
cgcgggagaccggggttcaattccccgacgggga

SEQ ID NO: 729 - DNA, 35 bp, synthetic construct
  misc_feature 1..35: note = Probe
  source 1..35: mol_type = other DNA
cgcgggagaccggggttcaattccccgacggggag

SEQ ID NO: 730 - DNA, 30 bp, synthetic construct
  misc_feature 1..30: note = Probe
  source 1..30: mol_type = other DNA
cgcgggagaccggggttcgattccccgacg

SEQ ID NO: 731 - DNA, 31 bp, synthetic construct
  misc_feature 1..31: note = Probe
  source 1..31: mol_type = other DNA
cgcgggagaccggggttcgattccccgacgg

SEQ ID NO: 732 - DNA, 32 bp, synthetic construct
  misc_feature 1..32: note = Probe
  source 1..32: mol_type = other DNA
cgcgggagaccggggttcgattccccgacggg

SEQ ID NO: 733 - DNA, 33 bp, synthetic construct
  misc_feature 1..33: note = Probe
  source 1..33: mol_type = other DNA
cgcgggagaccggggttcgattccccgacgggg

SEQ ID NO: 734 - DNA, 34 bp, synthetic construct
  misc_feature 1..34: note = Probe
  source 1..34: mol_type = other DNA
cgcgggagaccggggttcgattccccgacgggga

SEQ ID NO: 735 - DNA, 35 bp, synthetic construct
  misc_feature 1..35: note = Probe
  source 1..35: mol_type = other DNA
cgcgggagaccggggttcgattccccgacggggag

SEQ ID NO: 736 - DNA, 19 bp, synthetic construct
  misc_feature 1..19: note = Probe
  source 1..19: mol_type = other DNA
cgcgggaggcccgggttcg

SEQ ID NO: 737 - DNA, 31 bp, synthetic construct
  misc_feature 1..31: note = Probe
  source 1..31: mol_type = other DNA
cgctggtgtagtggtatcatgcaagattccc

SEQ ID NO: 738 - DNA, 17 bp, synthetic construct
  misc_feature 1..17: note = Probe
  source 1..17: mol_type = other DNA
cggaagcgtgctgggcc

SEQ ID NO: 739 - DNA, 18 bp, synthetic construct
  misc_feature 1..18: note = Probe
  source 1..18: mol_type = other DNA
cggaagcgtgctgggccc

SEQ ID NO: 740 - DNA, 19 bp, synthetic construct
  misc_feature 1..19: note = Probe
  source 1..19: mol_type = other DNA
cggaagcgtgctgggccca

SEQ ID NO: 741 - DNA, 20 bp, synthetic construct
  misc_feature 1..20: note = Probe
  source 1..20: mol_type = other DNA
cggaagcgtgctgggcccat

SEQ ID NO: 742 - DNA, 23 bp, synthetic construct
  misc_feature 1..23: note = Probe
  source 1..23: mol_type = other DNA
cggaagcgtgctgggcccataac

SEQ ID NO: 743 - DNA, 24 bp, synthetic construct
  misc_feature 1..24: note = Probe
  source 1..24: mol_type = other DNA
cggaagcgtgctgggcccataacc

SEQ ID NO: 744 - DNA, 25 bp, synthetic construct
  misc_feature 1..25: note = Probe
  source 1..25: mol_type = other DNA
cggaagcgtgctgggcccataaccc

SEQ ID NO: 745 - DNA, 32 bp, synthetic construct
  misc_feature 1..32: note = Probe
  source 1..32: mol_type = other DNA
cggaagcgtgctgggcccataacccagaggtc

SEQ ID NO: 746 - DNA, 33 bp, synthetic construct
  misc_feature 1..33: note = Probe
  source 1..33: mol_type = other DNA
cggaagcgtgctgggcccataacccagaggtcg

SEQ ID NO: 747 - DNA, 34 bp, synthetic construct
  misc_feature 1..34: note = Probe
  source 1..34: mol_type = other DNA
cggaagcgtgctgggcccataacccagaggtcga

SEQ ID NO: 748 - DNA, 35 bp, synthetic construct
  misc_feature 1..35: note = Probe
  source 1..35: mol_type = other DNA
cggaagcgtgctgggcccataacccagaggtcgat

SEQ ID NO: 749 - DNA, 36 bp, synthetic construct
  misc_feature 1..36: note = Probe
  source 1..36: mol_type = other DNA
cggaagcgtgctgggcccataacccagaggtcgatg

SEQ ID NO: 750 - DNA, 37 bp, synthetic construct
  misc_feature 1..37: note = Probe
  source 1..37: mol_type = other DNA
cggaagcgtgctgggcccataacccagaggtcgatgg

SEQ ID NO: 751 - DNA, 38 bp, synthetic construct
  misc_feature 1..38: note = Probe
  source 1..38: mol_type = other DNA
cggaagcgtgctgggcccataacccagaggtcgatgga

SEQ ID NO: 752 - DNA, 39 bp, synthetic construct
  misc_feature 1..39: note = Probe
  source 1..39: mol_type = other DNA
cggaagcgtgctgggcccataacccagaggtcgatggat

SEQ ID NO: 753 - DNA, 41 bp, synthetic construct
  misc_feature 1..41: note = Probe
  source 1..41: mol_type = other DNA
cggaagcgtgctgggcccataacccagaggtcgatggatcg

SEQ ID NO: 754 - DNA, 26 bp, synthetic construct
  misc_feature 1..26: note = Probe
  source 1..26: mol_type = other DNA
cggagatgaaaacctttttccaagga

SEQ ID NO: 755 - DNA, 27 bp, synthetic construct
  misc_feature 1..27: note = Probe
  source 1..27: mol_type = other DNA
cggagatgaaaacctttttccaaggac

SEQ ID NO: 756 - DNA, 28 bp, synthetic construct
  misc_feature 1..28: note = Probe
  source 1..28: mol_type = other DNA
cggagatgaaaacctttttccaaggaca

SEQ ID NO: 757 - DNA, 25 bp, synthetic construct
  misc_feature 1..25: note = Probe
  source 1..25: mol_type = other DNA
cggatagctcagtcggtagagcatc

SEQ ID NO: 758 - DNA, 26 bp, synthetic construct
  misc_feature 1..26: note = Probe
  source 1..26: mol_type = other DNA
cggatagctcagtcggtagagcatca

SEQ ID NO: 759 - DNA, 27 bp, synthetic construct
  misc_feature 1..27: note = Probe
  source 1..27: mol_type = other DNA
cggatagctcagtcggtagagcatcag

SEQ ID NO: 760 - DNA, 28 bp, synthetic construct
  misc_feature 1..28: note = Probe
  source 1..28: mol_type = other DNA
cggatagctcagtcggtagagcatcaga

SEQ ID NO: 761 - DNA, 29 bp, synthetic construct
  misc_feature 1..29: note = Probe
  source 1..29: mol_type = other DNA
cggatagctcagtcggtagagcatcagac

SEQ ID NO: 762 - DNA, 30 bp, synthetic construct
  misc_feature 1..30: note = Probe
  source 1..30: mol_type = other DNA
cggatagctcagtcggtagagcatcagact

SEQ ID NO: 763 - DNA, 31 bp, synthetic construct
  misc_feature 1..31: note = Probe
  source 1..31: mol_type = other DNA
cggatagctcagtcggtagagcatcagactt

SEQ ID NO: 764 - DNA, 32 bp, synthetic construct
  misc_feature 1..32: note = Probe
  source 1..32: mol_type = other DNA
cggatagctcagtcggtagagcatcagacttt

SEQ ID NO: 765 - DNA, 33 bp, synthetic construct
  misc_feature 1..33: note = Probe
  source 1..33: mol_type = other DNA
cggatagctcagtcggtagagcatcagactttt

SEQ ID NO: 766 - DNA, 30 bp, synthetic construct
  misc_feature 1..30: note = Probe
  source 1..30: mol_type = other DNA
cggcccgggttcgactcccggtgtgggaac

SEQ ID NO: 767 - DNA, 25 bp, synthetic construct
  misc_feature 1..25: note = Probe
  source 1..25: mol_type = other DNA
cggctagctcagtcggtagagcatg

SEQ ID NO: 768 - DNA, 26 bp, synthetic construct
  misc_feature 1..26: note = Probe
  source 1..26: mol_type = other DNA
cggctagctcagtcggtagagcatga

SEQ ID NO: 769 - DNA, 28 bp, synthetic construct
  misc_feature 1..28: note = Probe
  source 1..28: mol_type = other DNA
cggctagctcagtcggtagagcatgaga

SEQ ID NO: 770 - DNA, 29 bp, synthetic construct
  misc_feature 1..29: note = Probe
  source 1..29: mol_type = other DNA
cggctagctcagtcggtagagcatgagac

SEQ ID NO: 771 - DNA, 30 bp, synthetic construct
  misc_feature 1..30: note = Probe
  source 1..30: mol_type = other DNA
cggctagctcagtcggtagagcatgagact

SEQ ID NO: 772 - DNA, 31 bp, synthetic construct
  misc_feature 1..31: note = Probe
  source 1..31: mol_type = other DNA
cggctagctcagtcggtagagcatgagactc

SEQ ID NO: 773 - DNA, 32 bp, synthetic construct
  misc_feature 1..32: note = Probe
  source 1..32: mol_type = other DNA
cggctagctcagtcggtagagcatgagactct

SEQ ID NO: 774 - DNA, 33 bp, synthetic construct
  misc_feature 1..33: note = Probe
  source 1..33: mol_type = other DNA
cggctagctcagtcggtagagcatgagactctt

SEQ ID NO: 775 - DNA, 26 bp, synthetic construct
  misc_feature 1..26: note = Probe
  source 1..26: mol_type = other DNA
cggctagctcagtcggtagagcatgg

SEQ ID NO: 776 - DNA, 28 bp, synthetic construct
  misc_feature 1..28: note = Probe
  source 1..28: mol_type = other DNA
cggctagctcagtcggtagagcatggga

SEQ ID NO: 777 - DNA, 29 bp, synthetic construct
  misc_feature 1..29: note = Probe
  source 1..29: mol_type = other DNA
cggctagctcagtcggtagagcatgggac

SEQ ID NO: 778 - DNA, 30 bp, synthetic construct
  misc_feature 1..30: note = Probe
  source 1..30: mol_type = other DNA
cggctagctcagtcggtagagcatgggact

SEQ ID NO: 779 - DNA, 31 bp, synthetic construct
  misc_feature 1..31: note = Probe
  source 1..31: mol_type = other DNA
cggctagctcagtcggtagagcatgggactc

SEQ ID NO: 780 - DNA, 32 bp, synthetic construct
  misc_feature 1..32: note = Probe
  source 1..32: mol_type = other DNA
cggctagctcagtcggtagagcatgggactct

SEQ ID NO: 781 - DNA, 33 bp, synthetic construct
  misc_feature 1..33: note = Probe
  source 1..33: mol_type = other DNA
cggctagctcagtcggtagagcatgggactctt

SEQ ID NO: 782 - DNA, 27 bp, synthetic construct
  misc_feature 1..27: note = Probe
  source 1..27: mol_type = other DNA
cgggagaccggggttcaattccccgac

SEQ ID NO: 783 - DNA, 32 bp, synthetic construct
  misc_feature 1..32: note = Probe
  source 1..32: mol_type = other DNA
cgggagaccggggttcaattccccgacgggga

SEQ ID NO: 784 - DNA, 33 bp, synthetic construct
  misc_feature 1..33: note = Probe
  source 1..33: mol_type = other DNA
cgggagaccggggttcaattccccgacggggag

SEQ ID NO: 785 - DNA, 29 bp, synthetic construct
  misc_feature 1..29: note = Probe
  source 1..29: mol_type = other DNA
cgggagaccggggttcgattccccgacgg

SEQ ID NO: 786 - DNA, 30 bp, synthetic construct
  misc_feature 1..30: note = Probe
  source 1..30: mol_type = other DNA
cgggagaccggggttcgattccccgacggg

SEQ ID NO: 787 - DNA, 31 bp, synthetic construct
  misc_feature 1..31: note = Probe
  source 1..31: mol_type = other DNA
cgggagaccggggttcgattccccgacgggg

SEQ ID NO: 788 - DNA, 32 bp, synthetic construct
  misc_feature 1..32: note = Probe
  source 1..32: mol_type = other DNA
cgggagaccggggttcgattccccgacgggga

SEQ ID NO: 789 - DNA, 33 bp, synthetic construct
  misc_feature 1..33: note = Probe
  source 1..33: mol_type = other DNA
cgggagaccggggttcgattccccgacggggag

SEQ ID NO: 790 - DNA, 34 bp, synthetic construct
  misc_feature 1..34: note = Probe
  source 1..34: mol_type = other DNA
cggtaatcgcataaaacttaaaactttacagtca

SEQ ID NO: 791 - DNA, 50 bp, synthetic construct
  misc_feature 1..50: note = Probe
  source 1..50: mol_type = other DNA
cggtaatcgcataaaacttaaaactttacagtcagaggttcaattcctct

SEQ ID NO: 792 - DNA, 28 bp, synthetic construct
  misc_feature 1..28: note = Probe
  source 1..28: mol_type = other DNA
cgtatagtggttagtactctgcgttgtg

SEQ ID NO: 793 - DNA, 28 bp, synthetic construct
  misc_feature 1..28: note = Probe
  source 1..28: mol_type = other DNA
cgtgatcgtatagtggttagtactctgc

SEQ ID NO: 794 - DNA, 32 bp, synthetic construct
  misc_feature 1..32: note = Probe
  source 1..32: mol_type = other DNA
cgtgatcgtatagtggttagtactctgcgttg

SEQ ID NO: 795 - DNA, 33 bp, synthetic construct
  misc_feature 1..33: note = Probe
  source 1..33: mol_type = other DNA
cgtgatcgtatagtggttagtactctgcgttgt

SEQ ID NO: 796 - DNA, 34 bp, synthetic construct
  misc_feature 1..34: note = Probe
  source 1..34: mol_type = other DNA
cgtgatcgtatagtggttagtactctgcgttgtg

SEQ ID NO: 797 - DNA, 22 bp, synthetic construct
  misc_feature 1..22: note = Probe
  source 1..22: mol_type = other DNA
cgtgctgggcccataacccaga

SEQ ID NO: 798 - DNA, 27 bp, synthetic construct
  misc_feature 1..27: note = Probe
  source 1..27: mol_type = other DNA
cgtgctgggcccataacccagaggtcg

SEQ ID NO: 799 - DNA, 28 bp, synthetic construct
  misc_feature 1..28: note = Probe
  source 1..28: mol_type = other DNA
cgtgctgggcccataacccagaggtcga

SEQ ID NO: 800 - DNA, 29 bp, synthetic construct
  misc_feature 1..29: note = Probe
  source 1..29: mol_type = other DNA
cgtgctgggcccataacccagaggtcgat

SEQ ID NO: 801 - DNA, 30 bp, synthetic construct
  misc_feature 1..30: note = Probe
  source 1..30: mol_type = other DNA
cgtgctgggcccataacccagaggtcgatg

SEQ ID NO: 802 - DNA, 31 bp, synthetic construct
  misc_feature 1..31: note = Probe
  source 1..31: mol_type = other DNA
cgtgctgggcccataacccagaggtcgatgg

SEQ ID NO: 803 - DNA, 32 bp, synthetic construct
  misc_feature 1..32: note = Probe
  source 1..32: mol_type = other DNA
cgttagtatagtggtgagtatccccgcctgtc

SEQ ID NO: 804 - DNA, 50 bp, synthetic construct
  misc_feature 1..50: note = Probe
  source 1..50: mol_type = other DNA
ctaaataagctatcgggcccataccccgaaaatgttggttatacccttcc

SEQ ID NO: 805 - DNA, 23 bp, synthetic construct
  misc_feature 1..23: note = Probe
  source 1..23: mol_type = other DNA
ctaagccagggattgtgggttcg

SEQ ID NO: 806 - DNA, 50 bp, synthetic construct
  misc_feature 1..50: note = Probe
  source 1..50: mol_type = other DNA
ctaatacaccagtcttgtaaaccggagatgaaaacctttttccaaggaca

SEQ ID NO: 807 - DNA, 30 bp, synthetic construct
  misc_feature 1..30: note = Probe
  source 1..30: mol_type = other DNA
ctagctcagtcggtagagcatgggactctt

SEQ ID NO: 808 - DNA, 22 bp, synthetic construct
  misc_feature 1..22: note = Probe
  source 1..22: mol_type = other DNA
ctagtggttaggattcggcgct

SEQ ID NO: 809 - DNA, 46 bp, synthetic construct
  misc_feature 1..46: note = Probe
  source 1..46: mol_type = other DNA
ctcaaagcaatacactgaaaatgtttagacgggctcacatcacccc

SEQ ID NO: 810 - DNA, 21 bp, synthetic construct
  misc_feature 1..21: note = Probe
  source 1..21: mol_type = other DNA
ctcacaagaactgctaactca

SEQ ID NO: 811 - DNA, 46 bp, synthetic construct
  misc_feature 1..46: note = Probe
  source 1..46: mol_type = other DNA
ctcacaagaactgctaactcatgcccccatgtctaacaacatggct

SEQ ID NO: 812 - DNA, 49 bp, synthetic construct
  misc_feature 1..49: note = Probe
  source 1..49: mol_type = other DNA
ctcacaagaactgctaactcatgcccccatgtctaacaacatggctttc

SEQ ID NO: 813 - DNA, 50 bp, synthetic construct
  misc_feature 1..50: note = Probe
  source 1..50: mol_type = other DNA
ctcacaagaactgctaactcatgcccccatgtctaacaacatggctttct

SEQ ID NO: 814 - DNA, 19 bp, synthetic construct
  misc_feature 1..19: note = Probe
  source 1..19: mol_type = other DNA
ctcacacgcgaaaggtccc

SEQ ID NO: 815 - DNA, 23 bp, synthetic construct
  misc_feature 1..23: note = Probe
  source 1..23: mol_type = other DNA
ctcacacgcgaaaggtccccggt

SEQ ID NO: 816 - DNA, 32 bp, synthetic construct
  misc_feature 1..32: note = Probe
  source 1..32: mol_type = other DNA
ctcagggatgggttcgattctcatagtcctag

SEQ ID NO: 817 - DNA, 28 bp, synthetic construct
  misc_feature 1..28: note = Probe
  source 1..28: mol_type = other DNA
ctccgaggtgattttcatattgaattgc

SEQ ID NO: 818 - DNA, 29 bp, synthetic construct
  misc_feature 1..29: note = Probe
  source 1..29: mol_type = other DNA
ctccgaggtgattttcatattgaattgca

SEQ ID NO: 819 - DNA, 33 bp, synthetic construct
  misc_feature 1..33: note = Probe
  source 1..33: mol_type = other DNA
ctcgttagtatagtggtgagtatccccgcctgt

SEQ ID NO: 820 - DNA, 34 bp, synthetic construct
  misc_feature 1..34: note = Probe
  source 1..34: mol_type = other DNA
ctcgttagtatagtggtgagtatccccgcctgtc

SEQ ID NO: 821 - DNA, 35 bp, synthetic construct
  misc_feature 1..35: note = Probe
  source 1..35: mol_type = other DNA
ctcgttagtatagtggtgagtatccccgcctgtca

SEQ ID NO: 822 - DNA, 34 bp, synthetic construct
  misc_feature 1..34: note = Probe
  source 1..34: mol_type = other DNA
ctcgttagtatagtggttagtatccccgcctgtc

SEQ ID NO: 823 - DNA, 18 bp, synthetic construct
  misc_feature 1..18: note = Probe
  source 1..18: mol_type = other DNA
ctctgaatccagcgatcc

SEQ ID NO: 824 - DNA, 19 bp, synthetic construct
  misc_feature 1..19: note = Probe
  source 1..19: mol_type = other DNA
ctctgaatccagcgatccg

SEQ ID NO: 825 - DNA, 20 bp, synthetic construct
  misc_feature 1..20: note = Probe
  source 1..20: mol_type = other DNA
ctctgaatccagcgatccga

SEQ ID NO: 826 - DNA, 24 bp, synthetic construct
  misc_feature 1..24: note = Probe
  source 1..24: mol_type = other DNA
ctctgaatccagcgatccgagttc

SEQ ID NO: 827 - DNA, 25 bp, synthetic construct
  misc_feature 1..25: note = Probe
  source 1..25: mol_type = other DNA
ctctgaatccagcgatccgagttca

SEQ ID NO: 828 - DNA, 18 bp, synthetic construct
  misc_feature 1..18: note = Probe
  source 1..18: mol_type = other DNA
ctgaaggtcgtgagttcg

SEQ ID NO: 829 - DNA, 18 bp, synthetic construct
  misc_feature 1..18: note = Probe
  source 1..18: mol_type = other DNA
ctgaatccagcgatccga

SEQ ID NO: 830 - DNA, 19 bp, synthetic construct
  misc_feature 1..19: note = Probe
  source 1..19: mol_type = other DNA
ctgaatccagcgatccgag

SEQ ID NO: 831 - DNA, 22 bp, synthetic construct
  misc_feature 1..22: note = Probe
  source 1..22: mol_type = other DNA
ctgaatccagcgatccgagttc

SEQ ID NO: 832 - DNA, 23 bp, synthetic construct
  misc_feature 1..23: note = Probe
  source 1..23: mol_type = other DNA
ctgaatccagcgatccgagttca

SEQ ID NO: 833 - DNA, 39 bp, synthetic construct
  misc_feature 1..39: note = Probe
  source 1..39: mol_type = other DNA
ctgaatccagcgatccgagttcaaatctcggtggaacct

SEQ ID NO: 834 - DNA, 27 bp, synthetic construct
  misc_feature 1..27: note = Probe
  source 1..27: mol_type = other DNA
ctgacaacagaggcttacgacccctta

SEQ ID NO: 835 - DNA, 32 bp, synthetic construct
  misc_feature 1..32: note = Probe
  source 1..32: mol_type = other DNA
ctgacaacagaggcttacgaccccttatttac

SEQ ID NO: 836 - DNA, 33 bp, synthetic construct
  misc_feature 1..33: note = Probe
  source 1..33: mol_type = other DNA
ctgacaacagaggcttacgaccccttatttacc

SEQ ID NO: 837 - DNA, 28 bp, synthetic construct
  misc_feature 1..28: note = Probe
  source 1..28: mol_type = other DNA
ctggtggtctagtggttaggattcggcg

SEQ ID NO: 838 - DNA, 29 bp, synthetic construct
  misc_feature 1..29: note = Probe
  source 1..29: mol_type = other DNA
ctggtggtctagtggttaggattcggcgc

SEQ ID NO: 839 - DNA, 30 bp, synthetic construct
  misc_feature 1..30: note = Probe
  source 1..30: mol_type = other DNA
ctggtggtctagtggttaggattcggcgct

SEQ ID NO: 840 - DNA, 31 bp, synthetic construct
  misc_feature 1..31: note = Probe
  source 1..31: mol_type = other DNA
ctggtggtctagtggttaggattcggcgctc

SEQ ID NO: 841 - DNA, 32 bp, synthetic construct
  misc_feature 1..32: note = Probe
  source 1..32: mol_type = other DNA
ctggtggtctagtggttaggattcggcgctct

SEQ ID NO: 842 - DNA, 33 bp, synthetic construct
  misc_feature 1..33: note = Probe
  source 1..33: mol_type = other DNA
ctggtggtctagtggttaggattcggcgctctc

SEQ ID NO: 843 - DNA, 29 bp, synthetic construct
  misc_feature 1..29: note = Probe
  source 1..29: mol_type = other DNA
ctggtgtagtggtatcatgcaagattccc

SEQ ID NO: 844 - DNA, 50 bp, synthetic construct
  misc_feature 1..50: note = Probe
  source 1..50: mol_type = other DNA
ctgtaaagctaacttagcattaaccttttaagttaaagattaagagaacc

SEQ ID NO: 845 - DNA, 22 bp, synthetic construct
  misc_feature 1..22: note = Probe
  source 1..22: mol_type = other DNA
ctgtcacgcgggagaccggggt

SEQ ID NO: 846 - DNA, 39 bp, synthetic construct
  misc_feature 1..39: note = Probe
  source 1..39: mol_type = other DNA
ctgtcacgcgggagaccggggttcaattccccgacgggg

SEQ ID NO: 847 - DNA, 21 bp, synthetic construct
  misc_feature 1..21: note = Probe
  source 1..21: mol_type = other DNA
ctgttaaccgaaaggttggtg

SEQ ID NO: 848 - DNA, 24 bp, synthetic construct
  misc_feature 1..24: note = Probe
  source 1..24: mol_type = other DNA
cttaaaactttacagtcagaggtt

SEQ ID NO: 849 - DNA, 50 bp, synthetic construct
  misc_feature 1..50: note = Probe
  source 1..50: mol_type = other DNA
cttaacacaaagcacccaacttacacttaggagatttcaacttaacttga

SEQ ID NO: 850 - DNA, 50 bp, synthetic construct
  misc_feature 1..50: note = Probe
  source 1..50: mol_type = other DNA
cttagcattaaccttttaagttaaagattaagagaaccaacacctcttta

SEQ ID NO: 851 - DNA, 17 bp, synthetic construct
  misc_feature 1..17: note = Probe
  source 1..17: mol_type = other DNA
ctttacagtcagaggtt

SEQ ID NO: 852 - DNA, 29 bp, synthetic construct
  misc_feature 1..29: note = Probe
  source 1..29: mol_type = other DNA
ctttacagtcagaggttcaattcctcttc

SEQ ID NO: 853 - DNA, 18 bp, synthetic construct
  misc_feature 1..18: note = Probe
  source 1..18: mol_type = other DNA
gaaaaagtcatggaggcc

SEQ ID NO: 854 - DNA, 19 bp, synthetic construct
  misc_feature 1..19: note = Probe
  source 1..19: mol_type = other DNA
gaaaaagtcatggaggcca

SEQ ID NO: 855 - DNA, 21 bp, synthetic construct
  misc_feature 1..21: note = Probe
  source 1..21: mol_type = other DNA
gaaaaagtcatggaggccatg

SEQ ID NO: 856 - DNA, 26 bp, synthetic construct
  misc_feature 1..26: note = Probe
  source 1..26: mol_type = other DNA
gaaaaagtcatggaggccatggggtt

SEQ ID NO: 857 - DNA, 27 bp, synthetic construct
  misc_feature 1..27: note = Probe
  source 1..27: mol_type = other DNA
gaaaaagtcatggaggccatggggttg

SEQ ID NO: 858 - DNA, 28 bp, synthetic construct
  misc_feature 1..28: note = Probe
  source 1..28: mol_type = other DNA
gaaaaagtcatggaggccatggggttgg

SEQ ID NO: 859 - DNA, 23 bp, synthetic construct
  misc_feature 1..23: note = Probe
  source 1..23: mol_type = other DNA
gaaaatgtttagacgggctcaca

SEQ ID NO: 860 - DNA, 24 bp, synthetic construct
  misc_feature 1..24: note = Probe
  source 1..24: mol_type = other DNA
gaaaatgtttagacgggctcacat

SEQ ID NO: 861 - DNA, 30 bp, synthetic construct
  misc_feature 1..30: note = Probe
  source 1..30: mol_type = other DNA
gaaaatgtttagacgggctcacatcacccc

SEQ ID NO: 862 - DNA, 31 bp, synthetic construct
  misc_feature 1..31: note = Probe
  source 1..31: mol_type = other DNA
gaaaatgtttagacgggctcacatcacccca

SEQ ID NO: 863 - DNA, 32 bp, synthetic construct
  misc_feature 1..32: note = Probe
  source 1..32: mol_type = other DNA
gaaaatgtttagacgggctcacatcaccccat

SEQ ID NO: 864 - DNA, 33 bp, synthetic construct
  misc_feature 1..33: note = Probe
  source 1..33: mol_type = other DNA
gaaaatgtttagacgggctcacatcaccccata

SEQ ID NO: 865 - DNA, 17 bp, synthetic construct
  misc_feature 1..17: note = Probe
  source 1..17: mol_type = other DNA
gaaagctcacaagaact

SEQ ID NO: 866 - DNA, 19 bp, synthetic construct
  misc_feature 1..19: note = Probe
  source 1..19: mol_type = other DNA
gaaagctcacaagaactgc

SEQ ID NO: 867 - DNA, 20 bp, synthetic construct
  misc_feature 1..20: note = Probe
  source 1..20: mol_type = other DNA
gaaagctcacaagaactgct

SEQ ID NO: 868 - DNA, 21 bp, synthetic construct
  misc_feature 1..21: note = Probe
  source 1..21: mol_type = other DNA
gaaagctcacaagaactgcta

SEQ ID NO: 869 - DNA, 23 bp, synthetic construct
  misc_feature 1..23: note = Probe
  source 1..23: mol_type = other DNA
gaaagctcacaagaactgctaac

SEQ ID NO: 870 - DNA, 24 bp, synthetic construct
  misc_feature 1..24: note = Probe
  source 1..24: mol_type = other DNA
gaaagctcacaagaactgctaact

SEQ ID NO: 871 - DNA, 25 bp, synthetic construct
  misc_feature 1..25: note = Probe
  source 1..25: mol_type = other DNA
gaaagctcacaagaactgctaactc

SEQ ID NO: 872 - DNA, 26 bp, synthetic construct
  misc_feature 1..26: note = Probe
  source 1..26: mol_type = other DNA
gaaagctcacaagaactgctaactca

SEQ ID NO: 873 - DNA, 27 bp, synthetic construct
  misc_feature 1..27: note = Probe
  source 1..27: mol_type = other DNA
gaaagctcacaagaactgctaactcat

SEQ ID NO: 874 - DNA, 28 bp, synthetic construct
  misc_feature 1..28: note = Probe
  source 1..28: mol_type = other DNA
gaaagctcacaagaactgctaactcatg

SEQ ID NO: 875 - DNA, 29 bp, synthetic construct
  misc_feature 1..29: note = Probe
  source 1..29: mol_type = other DNA
gaaagctcacaagaactgctaactcatgc

SEQ ID NO: 876 - DNA, 31 bp, synthetic construct
  misc_feature 1..31: note = Probe
  source 1..31: mol_type = other DNA
gaaagctcacaagaactgctaactcatgccc

SEQ ID NO: 877 - DNA, 41 bp, synthetic construct
  misc_feature 1..41: note = Probe
  source 1..41: mol_type = other DNA
gaaagctcacaagaactgctaactcatgcccccatgtctaa

SEQ ID NO: 878 - DNA, 49 bp, synthetic construct
  misc_feature 1..49: note = Probe
  source 1..49: mol_type = other DNA
gaaagctcacaagaactgctaactcatgcccccatgtctaacaacatgg

SEQ ID NO: 879 - DNA, 50 bp, synthetic construct
  misc_feature 1..50: note = Probe
  source 1..50: mol_type = other DNA
gaaagctcacaagaactgctaactcatgcccccatgtctaacaacatggc

SEQ ID NO: 880 - DNA, 31 bp, synthetic construct
  misc_feature 1..31: note = Probe
  source 1..31: mol_type = other DNA
gaaaggttggtggttcgagcccacccaggga

SEQ ID NO: 881 - DNA, 32 bp, synthetic construct
  misc_feature 1..32: note = Probe
  source 1..32: mol_type = other DNA
gaaaggttggtggttcgagcccacccagggac

SEQ ID NO: 882 - DNA, 30 bp, synthetic construct
  misc_feature 1..30: note = Probe
  source 1..30: mol_type = other DNA
gaagattccaggttcgactcctggctggct

SEQ ID NO: 883 - DNA, 30 bp, synthetic construct
  misc_feature 1..30: note = Probe
  source 1..30: mol_type = other DNA
gaagattctaggttcgactcctggctggct

SEQ ID NO: 884 - DNA, 31 bp, synthetic construct
  misc_feature 1..31: note = Probe
  source 1..31: mol_type = other DNA
gaagattctaggttcgactcctggctggctc

SEQ ID NO: 885 - DNA, 32 bp, synthetic construct
  misc_feature 1..32: note = Probe
  source 1..32: mol_type = other DNA
gaagattctaggttcgactcctggctggctcg

SEQ ID NO: 886 - DNA, 33 bp, synthetic construct
  misc_feature 1..33: note = Probe
  source 1..33: mol_type = other DNA
gaagattctaggttcgactcctggctggctcgc

SEQ ID NO: 887 - DNA, 16 bp, synthetic construct
  misc_feature 1..16: note = Probe
  source 1..16: mol_type = other DNA
gaagattgagggttcg

SEQ ID NO: 888 - DNA, 25 bp, synthetic construct
  misc_feature 1..25: note = Probe
  source 1..25: mol_type = other DNA
gaagattgagggttcgagtcccttc

SEQ ID NO: 889 - DNA, 26 bp, synthetic construct
  misc_feature 1..26: note = Probe
  source 1..26: mol_type = other DNA
gaagattgagggttcgagtcccttcg

SEQ ID NO: 890 - DNA, 30 bp, synthetic construct
  misc_feature 1..30: note = Probe
  source 1..30: mol_type = other DNA
gaagattgagggttcgagtcccttcgtggt

SEQ ID NO: 891 - DNA, 31 bp, synthetic construct
  misc_feature 1..31: note = Probe
  source 1..31: mol_type = other DNA
gaaggtcctgggttcgagccccagtggaacc

SEQ ID NO: 892 - DNA, 33 bp, synthetic construct
  misc_feature 1..33: note = Probe
  source 1..33: mol_type = other DNA
gaaggtcctgggttcgagccccagtggaaccac

SEQ ID NO: 893 - DNA, 16 bp, synthetic construct
  misc_feature 1..16: note = Probe
  source 1..16: mol_type = other DNA
gaatccagcgatccga

SEQ ID NO: 894 - DNA, 20 bp, synthetic construct
  misc_feature 1..20: note = Probe
  source 1..20: mol_type = other DNA
gaatccagcgatccgagttc

SEQ ID NO: 895 - DNA, 21 bp, synthetic construct
  misc_feature 1..21: note = Probe
  source 1..21: mol_type = other DNA
gaatccagcgatccgagttca

SEQ ID NO: 896 - DNA, 31 bp, synthetic construct
  misc_feature 1..31: note = Probe
  source 1..31: mol_type = other DNA
gaatccagcgatccgagttcaaatctcggtg

SEQ ID NO: 897 - DNA, 37 bp, synthetic construct
  misc_feature 1..37: note = Probe
  source 1..37: mol_type = other DNA
gaatccagcgatccgagttcaaatctcggtggaacct

SEQ ID NO: 898 - DNA, 30 bp, synthetic construct
  misc_feature 1..30: note = Probe
  source 1..30: mol_type = other DNA
gaatctgacaacagaggcttacgacccctt

SEQ ID NO: 899 - DNA, 31 bp, synthetic construct
  misc_feature 1..31: note = Probe
  source 1..31: mol_type = other DNA
gaatctgacaacagaggcttacgacccctta

SEQ ID NO: 900 - DNA, 32 bp, synthetic construct
  misc_feature 1..32: note = Probe
  source 1..32: mol_type = other DNA
gaatctgacaacagaggcttacgaccccttat

SEQ ID NO: 901 - DNA, 37 bp, synthetic construct
  misc_feature 1..37: note = Probe
  source 1..37: mol_type = other DNA
gaatctgacaacagaggcttacgaccccttatttacc

SEQ ID NO: 902 - DNA, 25 bp, synthetic construct
  misc_feature 1..25: note = Probe
  source 1..25: mol_type = other DNA
gacaacagaggcttacgacccctta

SEQ ID NO: 903 - DNA, 31 bp, synthetic construct
  misc_feature 1..31: note = Probe
  source 1..31: mol_type = other DNA
gacaacagaggcttacgaccccttatttacc

SEQ ID NO: 904 - DNA, 31 bp, synthetic construct
  misc_feature 1..31: note = Probe
  source 1..31: mol_type = other DNA
gacccagtggcctaatggataaggcatcagc

SEQ ID NO: 905 - DNA, 32 bp, synthetic construct
  misc_feature 1..32: note = Probe
  source 1..32: mol_type = other DNA
gacccagtggcctaatggataaggcatcagcc

SEQ ID NO: 906 - DNA, 33 bp, synthetic construct
  misc_feature 1..33: note = Probe
  source 1..33: mol_type = other DNA
gacccagtggcctaatggataaggcatcagcct

SEQ ID NO: 907 - DNA, 34 bp, synthetic construct
  misc_feature 1..34: note = Probe
  source 1..34: mol_type = other DNA
gacccagtggcctaatggataaggcatcagcctc

SEQ ID NO: 908 - DNA, 35 bp, synthetic construct
  misc_feature 1..35: note = Probe
  source 1..35: mol_type = other DNA
gacccagtggcctaatggataaggcatcagcctcc

SEQ ID NO: 909 - DNA, 36 bp, synthetic construct
  misc_feature 1..36: note = Probe
  source 1..36: mol_type = other DNA
gacccagtggcctaatggataaggcatcagcctccg

SEQ ID NO: 910 - DNA, 19 bp, synthetic construct
  misc_feature 1..19: note = Probe
  source 1..19: mol_type = other DNA
gaccgcgtggcctaatgga

SEQ ID NO: 911 - DNA, 27 bp, synthetic construct
  misc_feature 1..27: note = Probe
  source 1..27: mol_type = other DNA
gaccggggttcgattccccgacgggga

SEQ ID NO: 912 - DNA, 28 bp, synthetic construct
  misc_feature 1..28: note = Probe
  source 1..28: mol_type = other DNA
gaccggggttcgattccccgacggggag

SEQ ID NO: 913 - DNA, 18 bp, synthetic construct
  misc_feature 1..18: note = Probe
  source 1..18: mol_type = other DNA
gacctcgtggcgcaacgg

SEQ ID NO: 914 - DNA, 18 bp, synthetic construct
  misc_feature 1..18: note = Probe
  source 1..18: mol_type = other DNA
gacctcgtggcgcaatgg

SEQ ID NO: 915 - DNA, 21 bp, synthetic construct
  misc_feature 1..21: note = Probe
  source 1..21: mol_type = other DNA
gacctcgtggcgcaatggtag

SEQ ID NO: 916 - DNA, 23 bp, synthetic construct
  misc_feature 1..23: note = Probe
  source 1..23: mol_type = other DNA
gacctcgtggcgcaatggtagcg

SEQ ID NO: 917 - DNA, 24 bp, synthetic construct
  misc_feature 1..24: note = Probe
  source 1..24: mol_type = other DNA
gacctcgtggcgcaatggtagcgc

SEQ ID NO: 918 - DNA, 24 bp, synthetic construct
  misc_feature 1..24: note = Probe
  source 1..24: mol_type = other DNA
gacgaggtggccgagtggttaagg

SEQ ID NO: 919 - DNA, 25 bp, synthetic construct
  misc_feature 1..25: note = Probe
  source 1..25: mol_type = other DNA
gacgaggtggccgagtggttaaggc

SEQ ID NO: 920 - DNA, 18 bp, synthetic construct
  misc_feature 1..18: note = Probe
  source 1..18: mol_type = other DNA
gagaaagctcacaagaac

SEQ ID NO: 921 - DNA, 19 bp, synthetic construct
  misc_feature 1..19: note = Probe
  source 1..19: mol_type = other DNA
gagaaagctcacaagaact

SEQ ID NO: 922 - DNA, 20 bp, synthetic construct
  misc_feature 1..20: note = Probe
  source 1..20: mol_type = other DNA
gagaaagctcacaagaactg

SEQ ID NO: 923 - DNA, 21 bp, synthetic construct
  misc_feature 1..21: note = Probe
  source 1..21: mol_type = other DNA
gagaaagctcacaagaactgc

SEQ ID NO: 924 - DNA, 22 bp, synthetic construct
  misc_feature 1..22: note = Probe
  source 1..22: mol_type = other DNA
gagaaagctcacaagaactgct

SEQ ID NO: 925 - DNA, 23 bp, synthetic construct
  misc_feature 1..23: note = Probe
  source 1..23: mol_type = other DNA
gagaaagctcacaagaactgcta

SEQ ID NO: 926 - DNA, 24 bp, synthetic construct
  misc_feature 1..24: note = Probe
  source 1..24: mol_type = other DNA
gagaaagctcacaagaactgctaa

SEQ ID NO: 927 - DNA, 25 bp, synthetic construct
  misc_feature 1..25: note = Probe
  source 1..25: mol_type = other DNA
gagaaagctcacaagaactgctaac

SEQ ID NO: 928 - DNA, 26 bp, synthetic construct
  misc_feature 1..26: note = Probe
  source 1..26: mol_type = other DNA
gagaaagctcacaagaactgctaact

SEQ ID NO: 929 - DNA, 27 bp, synthetic construct
  misc_feature 1..27: note = Probe
  source 1..27: mol_type = other DNA
gagaaagctcacaagaactgctaactc

SEQ ID NO: 930 - DNA, 28 bp, synthetic construct
  misc_feature 1..28: note = Probe
  source 1..28: mol_type = other DNA
gagaaagctcacaagaactgctaactca

SEQ ID NO: 931 - DNA, 29 bp, synthetic construct
  misc_feature 1..29: note = Probe
  source 1..29: mol_type = other DNA
gagaaagctcacaagaactgctaactcat

SEQ ID NO: 932 - DNA, 30 bp, synthetic construct
  misc_feature 1..30: note = Probe
  source 1..30: mol_type = other DNA
gagaaagctcacaagaactgctaactcatg

SEQ ID NO: 933 - DNA, 31 bp, synthetic construct
  misc_feature 1..31: note = Probe
  source 1..31: mol_type = other DNA
gagaaagctcacaagaactgctaactcatgc

SEQ ID NO: 934 - DNA, 32 bp, synthetic construct
  misc_feature 1..32: note = Probe
  source 1..32: mol_type = other DNA
gagaaagctcacaagaactgctaactcatgcc

SEQ ID NO: 935 - DNA, 33 bp, synthetic construct
  misc_feature 1..33: note = Probe
  source 1..33: mol_type = other DNA
gagaaagctcacaagaactgctaactcatgccc

SEQ ID NO: 936 - DNA, 34 bp, synthetic construct
  misc_feature 1..34: note = Probe
  source 1..34: mol_type = other DNA
gagaaagctcacaagaactgctaactcatgcccc

SEQ ID NO: 937 - DNA, 35 bp, synthetic construct
  misc_feature 1..35: note = Probe
  source 1..35: mol_type = other DNA
gagaaagctcacaagaactgctaactcatgccccc

SEQ ID NO: 938 - DNA, 36 bp, synthetic construct
  misc_feature 1..36: note = Probe
  source 1..36: mol_type = other DNA
gagaaagctcacaagaactgctaactcatgccccca

SEQ ID NO: 939 - DNA, 37 bp, synthetic construct
  misc_feature 1..37: note = Probe
  source 1..37: mol_type = other DNA
gagaaagctcacaagaactgctaactcatgcccccat

SEQ ID NO: 940 - DNA, 38 bp, synthetic construct
  misc_feature 1..38: note = Probe
  source 1..38: mol_type = other DNA
gagaaagctcacaagaactgctaactcatgcccccatg

SEQ ID NO: 941 - DNA, 39 bp, synthetic construct
  misc_feature 1..39: note = Probe
  source 1..39: mol_type = other DNA
gagaaagctcacaagaactgctaactcatgcccccatgt

SEQ ID NO: 942 - DNA, 40 bp, synthetic construct
  misc_feature 1..40: note = Probe
  source 1..40: mol_type = other DNA
gagaaagctcacaagaactgctaactcatgcccccatgtc

SEQ ID NO: 943 - DNA, 41 bp, synthetic construct
  misc_feature 1..41: note = Probe
  source 1..41: mol_type = other DNA
gagaaagctcacaagaactgctaactcatgcccccatgtct

SEQ ID NO: 944 - DNA, 42 bp, synthetic construct
  misc_feature 1..42: note = Probe
  source 1..42: mol_type = other DNA
gagaaagctcacaagaactgctaactcatgcccccatgtcta

SEQ ID NO: 945 - DNA, 43 bp, synthetic construct
  misc_feature 1..43: note = Probe
  source 1..43: mol_type = other DNA
gagaaagctcacaagaactgctaactcatgcccccatgtctaa

SEQ ID NO: 946 - DNA, 44 bp, synthetic construct
  misc_feature 1..44: note = Probe
  source 1..44: mol_type = other DNA
gagaaagctcacaagaactgctaactcatgcccccatgtctaac

SEQ ID NO: 947 - DNA, 45 bp, synthetic construct
  misc_feature 1..45: note = Probe
  source 1..45: mol_type = other DNA
gagaaagctcacaagaactgctaactcatgcccccatgtctaaca

SEQ ID NO: 948 - DNA, 46 bp, synthetic construct
  misc_feature 1..46: note = Probe
  source 1..46: mol_type = other DNA
gagaaagctcacaagaactgctaactcatgcccccatgtctaacaa

SEQ ID NO: 949 - DNA, 49 bp, synthetic construct
  misc_feature 1..49: note = Probe
  source 1..49: mol_type = other DNA
gagaaagctcacaagaactgctaactcatgcccccatgtctaacaacat

SEQ ID NO: 950 - DNA, 50 bp, synthetic construct
  misc_feature 1..50: note = Probe
  source 1..50: mol_type = other DNA
gagaaagctcacaagaactgctaactcatgcccccatgtctaacaacatg

SEQ ID NO: 951 - DNA, 31 bp, synthetic construct
  misc_feature 1..31: note = Probe
  source 1..31: mol_type = other DNA
gagaatagtttaaattagaatcttagctttg

SEQ ID NO: 952 - DNA, 32 bp, synthetic construct
  misc_feature 1..32: note = Probe
  source 1..32: mol_type = other DNA
gagaatagtttaaattagaatcttagctttgg

SEQ ID NO: 953 - DNA, 24 bp, synthetic construct
  misc_feature 1..24: note = Probe
  source 1..24: mol_type = other DNA
gagaccggggttcaattccccgac

SEQ ID NO: 954 - DNA, 29 bp, synthetic construct
  misc_feature 1..29: note = Probe
  source 1..29: mol_type = other DNA
gagaccggggttcaattccccgacgggga

SEQ ID NO: 955 - DNA, 24 bp, synthetic construct
  misc_feature 1..24: note = Probe
  source 1..24: mol_type = other DNA
gagaccggggttcgattccccgac

SEQ ID NO: 956 - DNA, 29 bp, synthetic construct
  misc_feature 1..29: note = Probe
  source 1..29: mol_type = other DNA
gagaccggggttcgattccccgacgggga

SEQ ID NO: 957 - DNA, 30 bp, synthetic construct
  misc_feature 1..30: note = Probe
  source 1..30: mol_type = other DNA
gagaccggggttcgattccccgacggggag

SEQ ID NO: 958 - DNA, 18 bp, synthetic construct
  misc_feature 1..18: note = Probe
  source 1..18: mol_type = other DNA
gagcccggtaatcgcata

SEQ ID NO: 959 - DNA, 25 bp, synthetic construct
  misc_feature 1..25: note = Probe
  source 1..25: mol_type = other DNA
gagcccggtaatcgcataaaactta

SEQ ID NO: 960 - DNA, 30 bp, synthetic construct
  misc_feature 1..30: note = Probe
  source 1..30: mol_type = other DNA
gagcccggtaatcgcataaaacttaaaact

SEQ ID NO: 961 - DNA, 31 bp, synthetic construct
  misc_feature 1..31: note = Probe
  source 1..31: mol_type = other DNA
gagcccggtaatcgcataaaacttaaaactt

SEQ ID NO: 962 - DNA, 38 bp, synthetic construct
  misc_feature 1..38: note = Probe
  source 1..38: mol_type = other DNA
gagcccggtaatcgcataaaacttaaaactttacagtc

SEQ ID NO: 963 - DNA, 39 bp, synthetic construct
  misc_feature 1..39: note = Probe
  source 1..39: mol_type = other DNA
gagcccggtaatcgcataaaacttaaaactttacagtca

SEQ ID NO: 964 - DNA, 45 bp, synthetic construct
  misc_feature 1..45: note = Probe
  source 1..45: mol_type = other DNA
gagcccggtaatcgcataaaacttaaaactttacagtcagaggtt

SEQ ID NO: 965 - DNA, 50 bp, synthetic construct
  misc_feature 1..50: note = Probe
  source 1..50: mol_type = other DNA
gagcccggtaatcgcataaaacttaaaactttacagtcagaggttcaatt

SEQ ID NO: 966 - DNA, 17 bp, synthetic construct
  misc_feature 1..17: note = Probe
  source 1..17: mol_type = other DNA
gagcttaaaccccctta

SEQ ID NO: 967 - DNA, 23 bp, synthetic construct
  misc_feature 1..23: note = Probe
  source 1..23: mol_type = other DNA
gagcttaaacccccttatttcta

SEQ ID NO: 968 - DNA, 29 bp, synthetic construct
  misc_feature 1..29: note = Probe
  source 1..29: mol_type = other DNA
gagtaaataataggagcttaaaccccctt

SEQ ID NO: 969 - DNA, 30 bp, synthetic construct
  misc_feature 1..30: note = Probe
  source 1..30: mol_type = other DNA
gagtaaataataggagcttaaaccccctta

SEQ ID NO: 970 - DNA, 31 bp, synthetic construct
  misc_feature 1..31: note = Probe
  source 1..31: mol_type = other DNA
gagtaaataataggagcttaaacccccttat

SEQ ID NO: 971 - DNA, 35 bp, synthetic construct
  misc_feature 1..35: note = Probe
  source 1..35: mol_type = other DNA
gagtaaataataggagcttaaacccccttatttct

SEQ ID NO: 972 - DNA, 36 bp, synthetic construct
  misc_feature 1..36: note = Probe
  source 1..36: mol_type = other DNA
gagtaaataataggagcttaaacccccttatttcta

SEQ ID NO: 973 - DNA, 50 bp, synthetic construct
  misc_feature 1..50: note = Probe
  source 1..50: mol_type = other DNA
gataaaagagttactttgatagagtaaataataggagcttaaaccccctt

SEQ ID NO: 974 - DNA, 33 bp, synthetic construct
  misc_feature 1..33: note = Probe
  source 1..33: mol_type = other DNA
gatagagtaaataataggagcttaaaccccctt

SEQ ID NO: 975 - DNA, 34 bp, synthetic construct
  misc_feature 1..34: note = Probe
  source 1..34: mol_type = other DNA
gatagagtaaataataggagcttaaaccccctta

SEQ ID NO: 976 - DNA, 40 bp, synthetic construct
  misc_feature 1..40: note = Probe
  source 1..40: mol_type = other DNA
gatagagtaaataataggagcttaaacccccttatttcta

SEQ ID NO: 977 - DNA, 50 bp, synthetic construct
  misc_feature 1..50: note = Probe
  source 1..50: mol_type = other DNA
gattagggtgcttagctgttaactaagtgtttgtgggtttaagtcccatt

SEQ ID NO: 978 - DNA, 17 bp, synthetic construct
  misc_feature 1..17: note = Probe
  source 1..17: mol_type = other DNA
gattccggatcagaaga

SEQ ID NO: 979 - DNA, 22 bp, synthetic construct
  misc_feature 1..22: note = Probe
  source 1..22: mol_type = other DNA
gattgagggttcgagtcccttc

SEQ ID NO: 980 - DNA, 23 bp, synthetic construct
  misc_feature 1..23: note = Probe
  source 1..23: mol_type = other DNA
gattgagggttcgagtcccttcg

SEQ ID NO: 981 - DNA, 27 bp, synthetic construct
  misc_feature 1..27: note = Probe
  source 1..27: mol_type = other DNA
gattgagggttcgagtcccttcgtggt

SEQ ID NO: 982 - DNA, 33 bp, synthetic construct
  misc_feature 1..33: note = Probe
  source 1..33: mol_type = other DNA
gattgtgaatctgacaacagaggcttacgaccc

SEQ ID NO: 983 - DNA, 34 bp, synthetic construct
  misc_feature 1..34: note = Probe
  source 1..34: mol_type = other DNA
gattgtgaatctgacaacagaggcttacgacccc

SEQ ID NO: 984 - DNA, 37 bp, synthetic construct
  misc_feature 1..37: note = Probe
  source 1..37: mol_type = other DNA
gattgtgaatctgacaacagaggcttacgacccctta

SEQ ID NO: 985 - DNA, 38 bp, synthetic construct
  misc_feature 1..38: note = Probe
  source 1..38: mol_type = other DNA
gattgtgaatctgacaacagaggcttacgaccccttat

SEQ ID NO: 986 - DNA, 39 bp, synthetic construct
  misc_feature 1..39: note = Probe
  source 1..39: mol_type = other DNA
gattgtgaatctgacaacagaggcttacgaccccttatt

SEQ ID NO: 987 - DNA, 42 bp, synthetic construct
  misc_feature 1..42: note = Probe
  source 1..42: mol_type = other DNA
gattgtgaatctgacaacagaggcttacgaccccttatttac

SEQ ID NO: 988 - DNA, 43 bp, synthetic construct
  misc_feature 1..43: note = Probe
  source 1..43: mol_type = other DNA
gattgtgaatctgacaacagaggcttacgaccccttatttacc

SEQ ID NO: 989 - DNA, 33 bp, synthetic construct
  misc_feature 1..33: note = Probe
  source 1..33: mol_type = other DNA
gcaatacactgaaaatgtttagacgggctcaca

SEQ ID NO: 990 - DNA, 30 bp, synthetic construct
  misc_feature 1..30: note = Probe
  source 1..30: mol_type = other DNA
gcactctggactctgaatccagcgatccga

SEQ ID NO: 991 - DNA, 32 bp, synthetic construct
  misc_feature 1..32: note = Probe
  source 1..32: mol_type = other DNA
gcactggtggttcagtggtagaattctcgcct

SEQ ID NO: 992 - DNA, 35 bp, synthetic construct
  misc_feature 1..35: note = Probe
  source 1..35: mol_type = other DNA
gcagaaggtcctgggttcgagccccagtggaacca

SEQ ID NO: 993 - DNA, 36 bp, synthetic construct
  misc_feature 1..36: note = Probe
  source 1..36: mol_type = other DNA
gcagaaggtcctgggttcgagccccagtggaaccac

SEQ ID NO: 994 - DNA, 17 bp, synthetic construct
  misc_feature 1..17: note = Probe
  source 1..17: mol_type = other DNA
gcagcaacctcggttcg

SEQ ID NO: 995 - DNA, 24 bp, synthetic construct
  misc_feature 1..24: note = Probe
  source 1..24: mol_type = other DNA
gcagcgatggccgagtggttaagg

SEQ ID NO: 996 - DNA, 25 bp, synthetic construct
  misc_feature 1..25: note = Probe
  source 1..25: mol_type = other DNA
gcagcgatggccgagtggttaaggc

SEQ ID NO: 997 - DNA, 24 bp, synthetic construct
  misc_feature 1..24: note = Probe
  source 1..24: mol_type = other DNA
gcagcggaagcgtgctgggcccat

SEQ ID NO: 998 - DNA, 26 bp, synthetic construct
  misc_feature 1..26: note = Probe
  source 1..26: mol_type = other DNA
gcataaaacttaaaactttacagtca

SEQ ID NO: 999 - DNA, 44 bp, synthetic construct
  misc_feature 1..44: note = Probe
  source 1..44: mol_type = other DNA
gcataaaacttaaaactttacagtcagaggttcaattcctcttc

SEQ ID NO: 1000 - DNA, 28 bp, synthetic construct
  misc_feature 1..28: note = Probe
  source 1..28: mol_type = other DNA
gcatgggtggttcagtggtagaattctc

SEQ ID NO: 1001 - DNA, 29 bp, synthetic construct
  misc_feature 1..29: note = Probe
  source 1..29: mol_type = other DNA
gcatgggtggttcagtggtagaattctcg

SEQ ID NO: 1002 - DNA, 30 bp, synthetic construct
  misc_feature 1..30: note = Probe
  source 1..30: mol_type = other DNA
gcatgggtggttcagtggtagaattctcgc

SEQ ID NO: 1003 - DNA, 31 bp, synthetic construct
  misc_feature 1..31: note = Probe
  source 1..31: mol_type = other DNA
gcatgggtggttcagtggtagaattctcgcc

SEQ ID NO: 1004 - DNA, 32 bp, synthetic construct
  misc_feature 1..32: note = Probe
  source 1..32: mol_type = other DNA
gcatgggtggttcagtggtagaattctcgcct

SEQ ID NO: 1005 - DNA, 33 bp, synthetic construct
  misc_feature 1..33: note = Probe
  source 1..33: mol_type = other DNA
gcatgggtggttcagtggtagaattctcgcctg

SEQ ID NO: 1006 - DNA, 34 bp, synthetic construct
  misc_feature 1..34: note = Probe
  source 1..34: mol_type = other DNA
gcatgggtggttcagtggtagaattctcgcctgc

SEQ ID NO: 1007 - DNA, 35 bp, synthetic construct
  misc_feature 1..35: note = Probe
  source 1..35: mol_type = other DNA
gcatgggtggttcagtggtagaattctcgcctgcc

SEQ ID NO: 1008 - DNA, 36 bp, synthetic construct
  misc_feature 1..36: note = Probe
  source 1..36: mol_type = other DNA
gcatgggtggttcagtggtagaattctcgcctgcca

SEQ ID NO: 1009 - DNA, 38 bp, synthetic construct
  misc_feature 1..38: note = Probe
  source 1..38: mol_type = other DNA
gcatgggtggttcagtggtagaattctcgcctgccacg

SEQ ID NO: 1010 - DNA, 50 bp, synthetic construct
  misc_feature 1..50: note = Probe
  source 1..50: mol_type = other DNA
gcatgggtggttcagtggtagaattctcgcctgccacgcgggaggcccgg

SEQ ID NO: 1011 - DNA, 34 bp, synthetic construct
  misc_feature 1..34: note = Probe
  source 1..34: mol_type = other DNA
gcattaaccttttaagttaaagattaagagaacc

SEQ ID NO: 1012 - DNA, 50 bp, synthetic construct
  misc_feature 1..50: note = Probe
  source 1..50: mol_type = other DNA
gcattaaccttttaagttaaagattaagagaaccaacacctctttacagt

SEQ ID NO: 1013 - DNA, 32 bp, synthetic construct
  misc_feature 1..32: note = Probe
  source 1..32: mol_type = other DNA
gcattggtggttcaatggtagaattctcgcct

SEQ ID NO: 1014 - DNA, 38 bp, synthetic construct
  misc_feature 1..38: note = Probe
  source 1..38: mol_type = other DNA
gcattggtggttcagtggtagaattctcgcctgccacg

SEQ ID NO: 1015 - DNA, 39 bp, synthetic construct
  misc_feature 1..39: note = Probe
  source 1..39: mol_type = other DNA
gcattggtggttcagtggtagaattctcgcctgccacgc

SEQ ID NO: 1016 - DNA, 40 bp, synthetic construct
  misc_feature 1..40: note = Probe
  source 1..40: mol_type = other DNA
gcattggtggttcagtggtagaattctcgcctgccacgcg

SEQ ID NO: 1017 - DNA, 41 bp, synthetic construct
  misc_feature 1..41: note = Probe
  source 1..41: mol_type = other DNA
gcattggtggttcagtggtagaattctcgcctgccacgcgg

SEQ ID NO: 1018 - DNA, 44 bp, synthetic construct
  misc_feature 1..44: note = Probe
  source 1..44: mol_type = other DNA
gcattggtggttcagtggtagaattctcgcctgccacgcgggag

SEQ ID NO: 1019 - DNA, 49 bp, synthetic construct
  misc_feature 1..49: note = Probe
  source 1..49: mol_type = other DNA
gcattggtggttcagtggtagaattctcgcctgccacgcgggaggcccg

SEQ ID NO: 1020 - DNA, 50 bp, synthetic construct
  misc_feature 1..50: note = Probe
  source 1..50: mol_type = other DNA
gcattggtggttcagtggtagaattctcgcctgccacgcgggaggcccgg

SEQ ID NO: 1021 - DNA, 17 bp, synthetic construct
  misc_feature 1..17: note = Probe
  source 1..17: mol_type = other DNA
gccaaggtcgcgggttc

SEQ ID NO: 1022 - DNA, 23 bp, synthetic construct
  misc_feature 1..23: note = Probe
  source 1..23: mol_type = other DNA
gccacgcgggaggcccgggttcg

SEQ ID NO: 1023 - DNA, 19 bp, synthetic construct
  misc_feature 1..19: note = Probe
  source 1..19: mol_type = other DNA
gccagggattgtgggttcg

SEQ ID NO: 1024 - DNA, 50 bp, synthetic construct
  misc_feature 1..50: note = Probe
  source 1..50: mol_type = other DNA
gccagttgattagggtgcttagctgttaactaagtgtttgtgggtttaag

SEQ ID NO: 1025 - DNA, 36 bp, synthetic construct
  misc_feature 1..36: note = Probe
  source 1..36: mol_type = other DNA
gccccagtggcctaatggataaggcattggcctcct

SEQ ID NO: 1026 - DNA, 19 bp, synthetic construct
  misc_feature 1..19: note = Probe
  source 1..19: mol_type = other DNA
gccccggtggcctaatgga

SEQ ID NO: 1027 - DNA, 18 bp, synthetic construct
  misc_feature 1..18: note = Probe
  source 1..18: mol_type = other DNA
gcccggatagctcagtcg

SEQ ID NO: 1028 - DNA, 19 bp, synthetic construct
  misc_feature 1..19: note = Probe
  source 1..19: mol_type = other DNA
gcccggatagctcagtcgg

SEQ ID NO: 1029 - DNA, 20 bp, synthetic construct
  misc_feature 1..20: note = Probe
  source 1..20: mol_type = other DNA
gcccggatagctcagtcggt

SEQ ID NO: 1030 - DNA, 21 bp, synthetic construct
  misc_feature 1..21: note = Probe
  source 1..21: mol_type = other DNA
gcccggatagctcagtcggta

SEQ ID NO: 1031 - DNA, 22 bp, synthetic construct
  misc_feature 1..22: note = Probe
  source 1..22: mol_type = other DNA
gcccggatagctcagtcggtag

SEQ ID NO: 1032 - DNA, 23 bp, synthetic construct
  misc_feature 1..23: note = Probe
  source 1..23: mol_type = other DNA
gcccggatagctcagtcggtaga

SEQ ID NO: 1033 - DNA, 24 bp, synthetic construct
  misc_feature 1..24: note = Probe
  source 1..24: mol_type = other DNA
gcccggatagctcagtcggtagag

SEQ ID NO: 1034 - DNA, 25 bp, synthetic construct
  misc_feature 1..25: note = Probe
  source 1..25: mol_type = other DNA
gcccggatagctcagtcggtagagc

SEQ ID NO: 1035 - DNA, 26 bp, synthetic construct
  misc_feature 1..26: note = Probe
  source 1..26: mol_type = other DNA
gcccggatagctcagtcggtagagca

SEQ ID NO: 1036 - DNA, 28 bp, synthetic construct
  misc_feature 1..28: note = Probe
  source 1..28: mol_type = other DNA
gcccggatagctcagtcggtagagcatc

SEQ ID NO: 1037 - DNA, 29 bp, synthetic construct
  misc_feature 1..29: note = Probe
  source 1..29: mol_type = other DNA
gcccggatagctcagtcggtagagcatca

SEQ ID NO: 1038 - DNA, 30 bp, synthetic construct
  misc_feature 1..30: note = Probe
  source 1..30: mol_type = other DNA
gcccggatagctcagtcggtagagcatcag

SEQ ID NO: 1039 - DNA, 31 bp, synthetic construct
  misc_feature 1..31: note = Probe
  source 1..31: mol_type = other DNA
gcccggatagctcagtcggtagagcatcaga

SEQ ID NO: 1040 - DNA, 32 bp, synthetic construct
  misc_feature 1..32: note = Probe
  source 1..32: mol_type = other DNA
gcccggatagctcagtcggtagagcatcagac

SEQ ID NO: 1041 - DNA, 33 bp, synthetic construct
  misc_feature 1..33: note = Probe
  source 1..33: mol_type = other DNA
gcccggatagctcagtcggtagagcatcagact

SEQ ID NO: 1042 - DNA, 34 bp, synthetic construct
  misc_feature 1..34: note = Probe
  source 1..34: mol_type = other DNA
gcccggatagctcagtcggtagagcatcagactt

SEQ ID NO: 1043 - DNA, 35 bp, synthetic construct
  misc_feature 1..35: note = Probe
  source 1..35: mol_type = other DNA
gcccggatagctcagtcggtagagcatcagacttt

SEQ ID NO: 1044 - DNA, 36 bp, synthetic construct
  misc_feature 1..36: note = Probe
  source 1..36: mol_type = other DNA
gcccggatagctcagtcggtagagcatcagactttt

SEQ ID NO: 1045 - DNA, 37 bp, synthetic construct
  misc_feature 1..37: note = Probe
  source 1..37: mol_type = other DNA
gcccggatagctcagtcggtagagcatcagactttta

SEQ ID NO: 1046 - DNA, 50 bp, synthetic construct
  misc_feature 1..50: note = Probe
  source 1..50: mol_type = other DNA
gcccggatagctcagtcggtagagcatcagacttttaatctgagggtcca

SEQ ID NO: 1047 - DNA, 16 bp, synthetic construct
  misc_feature 1..16: note = Probe
  source 1..16: mol_type = other DNA
gcccggctagctcagt

SEQ ID NO: 1048 - DNA, 17 bp, synthetic construct
  misc_feature 1..17: note = Probe
  source 1..17: mol_type = other DNA
gcccggctagctcagtc

SEQ ID NO: 1049 - DNA, 18 bp, synthetic construct
  misc_feature 1..18: note = Probe
  source 1..18: mol_type = other DNA
gcccggctagctcagtcg

SEQ ID NO: 1050 - DNA, 31 bp, synthetic construct
  misc_feature 1..31: note = Probe
  source 1..31: mol_type = other DNA
gcccggctagctcagtcgatagagcatgaga

SEQ ID NO: 1051 - DNA, 33 bp, synthetic construct
  misc_feature 1..33: note = Probe
  source 1..33: mol_type = other DNA
gcccggctagctcagtcgatagagcatgagact

SEQ ID NO: 1052 - DNA, 19 bp, synthetic construct
  misc_feature 1..19: note = Probe
  source 1..19: mol_type = other DNA
gcccggctagctcagtcgg

SEQ ID NO: 1053 - DNA, 21 bp, synthetic construct
  misc_feature 1..21: note = Probe
  source 1..21: mol_type = other DNA
gcccggctagctcagtcggta

SEQ ID NO: 1054 - DNA, 22 bp, synthetic construct
  misc_feature 1..22: note = Probe
  source 1..22: mol_type = other DNA
gcccggctagctcagtcggtag

SEQ ID NO: 1055 - DNA, 23 bp, synthetic construct
  misc_feature 1..23: note = Probe
  source 1..23: mol_type = other DNA
gcccggctagctcagtcggtaga

SEQ ID NO: 1056 - DNA, 24 bp, synthetic construct
  misc_feature 1..24: note = Probe
  source 1..24: mol_type = other DNA
gcccggctagctcagtcggtagag

SEQ ID NO: 1057 - DNA, 25 bp, synthetic construct
  misc_feature 1..25: note = Probe
  source 1..25: mol_type = other DNA
gcccggctagctcagtcggtagagc

SEQ ID NO: 1058 - DNA, 26 bp, synthetic construct
  misc_feature 1..26: note = Probe
  source 1..26: mol_type = other DNA
gcccggctagctcagtcggtagagca

SEQ ID NO: 1059 - DNA, 27 bp, synthetic construct
  misc_feature 1..27: note = Probe
  source 1..27: mol_type = other DNA
gcccggctagctcagtcggtagagcat

SEQ ID NO: 1060 - DNA, 28 bp, synthetic construct
  misc_feature 1..28: note = Probe
  source 1..28: mol_type = other DNA
gcccggctagctcagtcggtagagcatg

SEQ ID NO: 1061 - DNA, 29 bp, synthetic construct
  misc_feature 1..29: note = Probe
  source 1..29: mol_type = other DNA
gcccggctagctcagtcggtagagcatga

SEQ ID NO: 1062 - DNA, 30 bp, synthetic construct
  misc_feature 1..30: note = Probe
  source 1..30: mol_type = other DNA
gcccggctagctcagtcggtagagcatgag

SEQ ID NO: 1063 - DNA, 31 bp, synthetic construct
  misc_feature 1..31: note = Probe
  source 1..31: mol_type = other DNA
gcccggctagctcagtcggtagagcatgaga

SEQ ID NO: 1064 - DNA, 32 bp, synthetic construct
  misc_feature 1..32: note = Probe
  source 1..32: mol_type = other DNA
gcccggctagctcagtcggtagagcatgagac

SEQ ID NO: 1065 - DNA, 33 bp, synthetic construct
  misc_feature 1..33: note = Probe
  source 1..33: mol_type = other DNA
gcccggctagctcagtcggtagagcatgagacc

SEQ ID NO: 1066 - DNA, 34 bp, synthetic construct
  misc_feature 1..34: note = Probe
  source 1..34: mol_type = other DNA
gcccggctagctcagtcggtagagcatgagaccc

SEQ ID NO: 1067 - DNA, 35 bp, synthetic construct
  misc_feature 1..35: note = Probe
  source 1..35: mol_type = other DNA
gcccggctagctcagtcggtagagcatgagaccct

SEQ ID NO: 1068 - DNA, 36 bp, synthetic construct
  misc_feature 1..36: note = Probe
  source 1..36: mol_type = other DNA
gcccggctagctcagtcggtagagcatgagaccctt

SEQ ID NO: 1069 - DNA, 37 bp, synthetic construct
  misc_feature 1..37: note = Probe
  source 1..37: mol_type = other DNA
gcccggctagctcagtcggtagagcatgagaccctta

SEQ ID NO: 1070 - DNA, 33 bp, synthetic construct
  misc_feature 1..33: note = Probe
  source 1..33: mol_type = other DNA
gcccggctagctcagtcggtagagcatgagact

SEQ ID NO: 1071 - DNA, 34 bp, synthetic construct
  misc_feature 1..34: note = Probe
  source 1..34: mol_type = other DNA
gcccggctagctcagtcggtagagcatgagactc

SEQ ID NO: 1072 - DNA, 35 bp, synthetic construct
  misc_feature 1..35: note = Probe
  source 1..35: mol_type = other DNA
gcccggctagctcagtcggtagagcatgagactct

SEQ ID NO: 1073 - DNA, 36 bp, synthetic construct
  misc_feature 1..36: note = Probe
  source 1..36: mol_type = other DNA
gcccggctagctcagtcggtagagcatgagactctt

SEQ ID NO: 1074 - DNA, 37 bp, synthetic construct
  misc_feature 1..37: note = Probe
  source 1..37: mol_type = other DNA
gcccggctagctcagtcggtagagcatgagactctta

SEQ ID NO: 1075 - DNA, 39 bp, synthetic construct
  misc_feature 1..39: note = Probe
  source 1..39: mol_type = other DNA
gcccggctagctcagtcggtagagcatgagactcttaat

SEQ ID NO: 1076 - DNA, 40 bp, synthetic construct
  misc_feature 1..40: note = Probe
  source 1..40: mol_type = other DNA
gcccggctagctcagtcggtagagcatgagactcttaatc

SEQ ID NO: 1077 - DNA, 42 bp, synthetic construct
  misc_feature 1..42: note = Probe
  source 1..42: mol_type = other DNA
gcccggctagctcagtcggtagagcatgagactcttaatctc

SEQ ID NO: 1078 - DNA, 50 bp, synthetic construct
  misc_feature 1..50: note = Probe
  source 1..50: mol_type = other DNA
gcccggctagctcagtcggtagagcatgagactcttaatctcagggtcgt

SEQ ID NO: 1079 - DNA, 29 bp, synthetic construct
  misc_feature 1..29: note = Probe
  source 1..29: mol_type = other DNA
gcccggctagctcagtcggtagagcatgg

SEQ ID NO: 1080 - DNA, 30 bp, synthetic construct
  misc_feature 1..30: note = Probe
  source 1..30: mol_type = other DNA
gcccggctagctcagtcggtagagcatggg

SEQ ID NO: 1081 - DNA, 31 bp, synthetic construct
  misc_feature 1..31: note = Probe
  source 1..31: mol_type = other DNA
gcccggctagctcagtcggtagagcatggga

SEQ ID NO: 1082 - DNA, 32 bp, synthetic construct
  misc_feature 1..32: note = Probe
  source 1..32: mol_type = other DNA
gcccggctagctcagtcggtagagcatgggac

SEQ ID NO: 1083 - DNA, 33 bp, synthetic construct
  misc_feature 1..33: note = Probe
  source 1..33: mol_type = other DNA
gcccggctagctcagtcggtagagcatgggact

SEQ ID NO: 1084 - DNA, 34 bp, synthetic construct
  misc_feature 1..34: note = Probe
  source 1..34: mol_type = other DNA
gcccggctagctcagtcggtagagcatgggactc

SEQ ID NO: 1085 - DNA, 35 bp, synthetic construct
  misc_feature 1..35: note = Probe
  source 1..35: mol_type = other DNA
gcccggctagctcagtcggtagagcatgggactct

SEQ ID NO: 1086 - DNA, 36 bp, synthetic construct
  misc_feature 1..36: note = Probe
  source 1..36: mol_type = other DNA
gcccggctagctcagtcggtagagcatgggactctt

SEQ ID NO: 1087 - DNA, 37 bp, synthetic construct
  misc_feature 1..37: note = Probe
  source 1..37: mol_type = other DNA
gcccggctagctcagtcggtagagcatgggactctta

SEQ ID NO: 1088 - DNA, 40 bp, synthetic construct
  misc_feature 1..40: note = Probe
  source 1..40: mol_type = other DNA
gcccggctagctcagtcggtagagcatgggactcttaatc

SEQ ID NO: 1089 - DNA, 42 bp, synthetic construct
  misc_feature 1..42: note = Probe
  source 1..42: mol_type = other DNA
gcccggctagctcagtcggtagagcatgggactcttaatccc

SEQ ID NO: 1090 - DNA, 45 bp, synthetic construct
  misc_feature 1..45: note = Probe
  source 1..45: mol_type = other DNA
gcccggctagctcagtcggtagagcatgggactcttaatcccagg

SEQ ID NO: 1091 - DNA, 50 bp, synthetic construct
  misc_feature 1..50: note = Probe
  source 1..50: mol_type = other DNA
gcccggctagctcagtcggtagagcatgggactcttaatcccagggtcgt

SEQ ID NO: 1092 - DNA, 23 bp, synthetic construct
  misc_feature 1..23: note = Probe
  source 1..23: mol_type = other DNA
gcccggtaatcgcataaaactta

SEQ ID NO: 1093 - DNA, 37 bp, synthetic construct
  misc_feature 1..37: note = Probe
  source 1..37: mol_type = other DNA
gcccggtaatcgcataaaacttaaaactttacagtca

SEQ ID NO: 1094 - DNA, 17 bp, synthetic construct
  misc_feature 1..17: note = Probe
  source 1..17: mol_type = other DNA
gccctcagtaagttgca

SEQ ID NO: 1095 - DNA, 24 bp, synthetic construct
  misc_feature 1..24: note = Probe
  source 1..24: mol_type = other DNA
gccgctggtgtagtggtatcatgc

SEQ ID NO: 1096 - DNA, 25 bp, synthetic construct
  misc_feature 1..25: note = Probe
  source 1..25: mol_type = other DNA
gccgctggtgtagtggtatcatgca

SEQ ID NO: 1097 - DNA, 26 bp, synthetic construct
  misc_feature 1..26: note = Probe
  source 1..26: mol_type = other DNA
gccgctggtgtagtggtatcatgcaa

SEQ ID NO: 1098 - DNA, 27 bp, synthetic construct
  misc_feature 1..27: note = Probe
  source 1..27: mol_type = other DNA
gccgctggtgtagtggtatcatgcaag

SEQ ID NO: 1099 - DNA, 28 bp, synthetic construct
  misc_feature 1..28: note = Probe
  source 1..28: mol_type = other DNA
gccgctggtgtagtggtatcatgcaaga

SEQ ID NO: 1100 - DNA, 30 bp, synthetic construct
  misc_feature 1..30: note = Probe
  source 1..30: mol_type = other DNA
gccgctggtgtagtggtatcatgcaagatt

SEQ ID NO: 1101 - DNA, 31 bp, synthetic construct
  misc_feature 1..31: note = Probe
  source 1..31: mol_type = other DNA
gccgctggtgtagtggtatcatgcaagattc

SEQ ID NO: 1102 - DNA, 32 bp, synthetic construct
  misc_feature 1..32: note = Probe
  source 1..32: mol_type = other DNA
gccgctggtgtagtggtatcatgcaagattcc

SEQ ID NO: 1103 - DNA, 33 bp, synthetic construct
  misc_feature 1..33: note = Probe
  source 1..33: mol_type = other DNA
gccgctggtgtagtggtatcatgcaagattccc

SEQ ID NO: 1104 - DNA, 34 bp, synthetic construct
  misc_feature 1..34: note = Probe
  source 1..34: mol_type = other DNA
gccgctggtgtagtggtatcatgcaagattccca

SEQ ID NO: 1105 - DNA, 30 bp, synthetic construct
  misc_feature 1..30: note = Probe
  source 1..30: mol_type = other DNA
gccgtgatcgtatagtggttagtactctgc

SEQ ID NO: 1106 - DNA, 31 bp, synthetic construct
  misc_feature 1..31: note = Probe
  source 1..31: mol_type = other DNA
gccgtgatcgtatagtggttagtactctgcg

SEQ ID NO: 1107 - DNA, 32 bp, synthetic construct
  misc_feature 1..32: note = Probe
  source 1..32: mol_type = other DNA
gccgtgatcgtatagtggttagtactctgcgt

SEQ ID NO: 1108 - DNA, 33 bp, synthetic construct
  misc_feature 1..33: note = Probe
  source 1..33: mol_type = other DNA
gccgtgatcgtatagtggttagtactctgcgtt

SEQ ID NO: 1109 - DNA, 34 bp, synthetic construct
  misc_feature 1..34: note = Probe
  source 1..34: mol_type = other DNA
gccgtgatcgtatagtggttagtactctgcgttg

SEQ ID NO: 1110 - DNA, 35 bp, synthetic construct
  misc_feature 1..35: note = Probe
  source 1..35: mol_type = other DNA
gccgtgatcgtatagtggttagtactctgcgttgt

SEQ ID NO: 1111 - DNA, 36 bp, synthetic construct
  misc_feature 1..36: note = Probe
  source 1..36: mol_type = other DNA
gccgtgatcgtatagtggttagtactctgcgttgtg

SEQ ID NO: 1112 - DNA, 32 bp, synthetic construct
  misc_feature 1..32: note = Probe
  source 1..32: mol_type = other DNA
gcctcgttagcgcagtaggtagcgcgtcagtc

SEQ ID NO: 1113 - DNA, 33 bp, synthetic construct
  misc_feature 1..33: note = Probe
  source 1..33: mol_type = other DNA
gcctcgttagcgcagtaggtagcgcgtcagtct

SEQ ID NO: 1114 - DNA, 35 bp, synthetic construct
  misc_feature 1..35: note = Probe
  source 1..35: mol_type = other DNA
gcctcgttagcgcagtaggtagcgcgtcagtctca

SEQ ID NO: 1115 - DNA, 31 bp, synthetic construct
  misc_feature 1..31: note = Probe
  source 1..31: mol_type = other DNA
gcctggatagctcagtcggtagagcatcaga

SEQ ID NO: 1116 - DNA, 32 bp, synthetic construct
  misc_feature 1..32: note = Probe
  source 1..32: mol_type = other DNA
gcctggatagctcagtcggtagagcatcagac

SEQ ID NO: 1117 - DNA, 33 bp, synthetic construct
  misc_feature 1..33: note = Probe
  source 1..33: mol_type = other DNA
gcctggatagctcagtcggtagagcatcagact

SEQ ID NO: 1118 - DNA, 35 bp, synthetic construct
  misc_feature 1..35: note = Probe
  source 1..35: mol_type = other DNA
gcctggatagctcagtcggtagagcatcagacttt

SEQ ID NO: 1119 - DNA, 36 bp, synthetic construct
  misc_feature 1..36: note = Probe
  source 1..36: mol_type = other DNA
gcctggatagctcagtcggtagagcatcagactttt

SEQ ID NO: 1120 - DNA, 31 bp, synthetic construct
  misc_feature 1..31: note = Probe
  source 1..31: mol_type = other DNA
gcctggatagctcagttggtagagcatcaga

SEQ ID NO: 1121 - DNA, 32 bp, synthetic construct
  misc_feature 1..32: note = Probe
  source 1..32: mol_type = other DNA
gcctggatagctcagttggtagagcatcagac

SEQ ID NO: 1122 - DNA, 33 bp, synthetic construct
  misc_feature 1..33: note = Probe
  source 1..33: mol_type = other DNA
gcctggatagctcagttggtagagcatcagact

SEQ ID NO: 1123 - DNA, 34 bp, synthetic construct
  misc_feature 1..34: note = Probe
  source 1..34: mol_type = other DNA
gcctggatagctcagttggtagagcatcagactt

SEQ ID NO: 1124 - DNA, 35 bp, synthetic construct
  misc_feature 1..35: note = Probe
  source 1..35: mol_type = other DNA
gcctggatagctcagttggtagagcatcagacttt

SEQ ID NO: 1125 - DNA, 36 bp, synthetic construct
  misc_feature 1..36: note = Probe
  source 1..36: mol_type = other DNA
gcctggatagctcagttggtagagcatcagactttt

SEQ ID NO: 1126 - DNA, 31 bp, synthetic construct
  misc_feature 1..31: note = Probe
  source 1..31: mol_type = other DNA
gcctgggtagctcagtcggtagagcatcaga

SEQ ID NO: 1127 - DNA, 32 bp, synthetic construct
  misc_feature 1..32: note = Probe
  source 1..32: mol_type = other DNA
gcctgggtagctcagtcggtagagcatcagac

SEQ ID NO: 1128 - DNA, 33 bp, synthetic construct
  misc_feature 1..33: note = Probe
  source 1..33: mol_type = other DNA
gcctgggtagctcagtcggtagagcatcagact

SEQ ID NO: 1129 - DNA, 35 bp, synthetic construct
  misc_feature 1..35: note = Probe
  source 1..35: mol_type = other DNA
gcctgggtagctcagtcggtagagcatcagacttt

SEQ ID NO: 1130 - DNA, 36 bp, synthetic construct
  misc_feature 1..36: note = Probe
  source 1..36: mol_type = other DNA
gcctgggtagctcagtcggtagagcatcagactttt

SEQ ID NO: 1131 - DNA, 40 bp, synthetic construct
  misc_feature 1..40: note = Probe
  source 1..40: mol_type = other DNA
gcctgtcacgcgggagaccggggttcgattccccgacggg

SEQ ID NO: 1132 - DNA, 43 bp, synthetic construct
  misc_feature 1..43: note = Probe
  source 1..43: mol_type = other DNA
gcctgtcacgcgggagaccggggttcgattccccgacggggag

SEQ ID NO: 1133 - DNA, 16 bp, synthetic construct
  misc_feature 1..16: note = Probe
  source 1..16: mol_type = other DNA
gcgaaaggtccccggt

SEQ ID NO: 1134 - DNA, 17 bp, synthetic construct
  misc_feature 1..17: note = Probe
  source 1..17: mol_type = other DNA
gcgaaaggtccccggtt

SEQ ID NO: 1135 - DNA, 25 bp, synthetic construct
  misc_feature 1..25: note = Probe
  source 1..25: mol_type = other DNA
gcgcagcggaagcgtgctgggccca

SEQ ID NO: 1136 - DNA, 16 bp, synthetic construct
  misc_feature 1..16: note = Probe
  source 1..16: mol_type = other DNA
gcgccgctggtgtagt

SEQ ID NO: 1137 - DNA, 17 bp, synthetic construct
  misc_feature 1..17: note = Probe
  source 1..17: mol_type = other DNA
gcgccgctggtgtagtg

SEQ ID NO: 1138 - DNA, 18 bp, synthetic construct
  misc_feature 1..18: note = Probe
  source 1..18: mol_type = other DNA
gcgccgctggtgtagtgg

SEQ ID NO: 1139 - DNA, 20 bp, synthetic construct
  misc_feature 1..20: note = Probe
  source 1..20: mol_type = other DNA
gcgccgctggtgtagtggta

SEQ ID NO: 1140 - DNA, 21 bp, synthetic construct
  misc_feature 1..21: note = Probe
  source 1..21: mol_type = other DNA
gcgccgctggtgtagtggtat

SEQ ID NO: 1141 - DNA, 22 bp, synthetic construct
  misc_feature 1..22: note = Probe
  source 1..22: mol_type = other DNA
gcgccgctggtgtagtggtatc

SEQ ID NO: 1142 - DNA, 23 bp, synthetic construct
  misc_feature 1..23: note = Probe
  source 1..23: mol_type = other DNA
gcgccgctggtgtagtggtatca

SEQ ID NO: 1143 - DNA, 24 bp, synthetic construct
  misc_feature 1..24: note = Probe
  source 1..24: mol_type = other DNA
gcgccgctggtgtagtggtatcat

SEQ ID NO: 1144 - DNA, 25 bp, synthetic construct
  misc_feature 1..25: note = Probe
  source 1..25: mol_type = other DNA
gcgccgctggtgtagtggtatcatg

SEQ ID NO: 1145 - DNA, 26 bp, synthetic construct
  misc_feature 1..26: note = Probe
  source 1..26: mol_type = other DNA
gcgccgctggtgtagtggtatcatgc

SEQ ID NO: 1146 - DNA, 27 bp, synthetic construct
  misc_feature 1..27: note = Probe
  source 1..27: mol_type = other DNA
gcgccgctggtgtagtggtatcatgca

SEQ ID NO: 1147 - DNA, 28 bp, synthetic construct
  misc_feature 1..28: note = Probe
  source 1..28: mol_type = other DNA
gcgccgctggtgtagtggtatcatgcaa

SEQ ID NO: 1148 - DNA, 29 bp, synthetic construct
  misc_feature 1..29: note = Probe
  source 1..29: mol_type = other DNA
gcgccgctggtgtagtggtatcatgcaag

SEQ ID NO: 1149 - DNA, 30 bp, synthetic construct
  misc_feature 1..30: note = Probe
  source 1..30: mol_type = other DNA
gcgccgctggtgtagtggtatcatgcaaga

SEQ ID NO: 1150 - DNA, 31 bp, synthetic construct
  misc_feature 1..31: note = Probe
  source 1..31: mol_type = other DNA
gcgccgctggtgtagtggtatcatgcaagat

SEQ ID NO: 1151 - DNA, 32 bp, synthetic construct
  misc_feature 1..32: note = Probe
  source 1..32: mol_type = other DNA
gcgccgctggtgtagtggtatcatgcaagatt

SEQ ID NO: 1152 - DNA, 33 bp, synthetic construct
  misc_feature 1..33: note = Probe
  source 1..33: mol_type = other DNA
gcgccgctggtgtagtggtatcatgcaagattc

SEQ ID NO: 1153 - DNA, 34 bp, synthetic construct
  misc_feature 1..34: note = Probe
  source 1..34: mol_type = other DNA
gcgccgctggtgtagtggtatcatgcaagattcc

SEQ ID NO: 1154 - DNA, 35 bp, synthetic construct
  misc_feature 1..35: note = Probe
  source 1..35: mol_type = other DNA
gcgccgctggtgtagtggtatcatgcaagattccc

SEQ ID NO: 1155 - DNA, 36 bp, synthetic construct
  misc_feature 1..36: note = Probe
  source 1..36: mol_type = other DNA
gcgccgctggtgtagtggtatcatgcaagattccca

SEQ ID NO: 1156 - DNA, 37 bp, synthetic construct
  misc_feature 1..37: note = Probe
  source 1..37: mol_type = other DNA
gcgccgctggtgtagtggtatcatgcaagattcccat

SEQ ID NO: 1157 - DNA, 39 bp, synthetic construct
  misc_feature 1..39: note = Probe
  source 1..39: mol_type = other DNA
gcgccgctggtgtagtggtatcatgcaagattcccattc

SEQ ID NO: 1158 - DNA, 40 bp, synthetic construct
  misc_feature 1..40: note = Probe
  source 1..40: mol_type = other DNA
gcgccgctggtgtagtggtatcatgcaagattcccattct

SEQ ID NO: 1159 - DNA, 41 bp, synthetic construct
  misc_feature 1..41: note = Probe
  source 1..41: mol_type = other DNA
gcgccgctggtgtagtggtatcatgcaagattcccattctt

SEQ ID NO: 1160 - DNA, 46 bp, synthetic construct
  misc_feature 1..46: note = Probe
  source 1..46: mol_type = other DNA
gcgccgctggtgtagtggtatcatgcaagattcccattcttgcgac

SEQ ID NO: 1161 - DNA, 50 bp, synthetic construct
  misc_feature 1..50: note = Probe
  source 1..50: mol_type = other DNA
gcgccgctggtgtagtggtatcatgcaagattcccattcttgcgacccgg

SEQ ID NO: 1162 - DNA, 21 bp, synthetic construct
  misc_feature 1..21: note = Probe
  source 1..21: mol_type = other DNA
gcggaagcgtgctgggcccat

SEQ ID NO: 1163 - DNA, 35 bp, synthetic construct
  misc_feature 1..35: note = Probe
  source 1..35: mol_type = other DNA
gcggaagcgtgctgggcccataacccagaggtcga

SEQ ID NO: 1164 - DNA, 37 bp, synthetic construct
  misc_feature 1..37: note = Probe
  source 1..37: mol_type = other DNA
gcggaagcgtgctgggcccataacccagaggtcgatg

SEQ ID NO: 1165 - DNA, 31 bp, synthetic construct
  misc_feature 1..31: note = Probe
  source 1..31: mol_type = other DNA
gcggcccgggttcgactcccggtgtgggaac

SEQ ID NO: 1166 - DNA, 28 bp, synthetic construct
  misc_feature 1..28: note = Probe
  source 1..28: mol_type = other DNA
gcgggagaccggggttcaattccccgac

SEQ ID NO: 1167 - DNA, 34 bp, synthetic construct
  misc_feature 1..34: note = Probe
  source 1..34: mol_type = other DNA
gcgggagaccggggttcaattccccgacggggag

SEQ ID NO: 1168 - DNA, 28 bp, synthetic construct
  misc_feature 1..28: note = Probe
  source 1..28: mol_type = other DNA
gcgggagaccggggttcgattccccgac

SEQ ID NO: 1169 - DNA, 30 bp, synthetic construct
  misc_feature 1..30: note = Probe
  source 1..30: mol_type = other DNA
gcgggagaccggggttcgattccccgacgg

SEQ ID NO: 1170 - DNA, 31 bp, synthetic construct
  misc_feature 1..31: note = Probe
  source 1..31: mol_type = other DNA
gcgggagaccggggttcgattccccgacggg

SEQ ID NO: 1171 - DNA, 32 bp, synthetic construct
  misc_feature 1..32: note = Probe
  source 1..32: mol_type = other DNA
gcgggagaccggggttcgattccccgacgggg

SEQ ID NO: 1172 - DNA, 33 bp, synthetic construct
  misc_feature 1..33: note = Probe
  source 1..33: mol_type = other DNA
gcgggagaccggggttcgattccccgacgggga

SEQ ID NO: 1173 - DNA, 34 bp, synthetic construct
  misc_feature 1..34: note = Probe
  source 1..34: mol_type = other DNA
gcgggagaccggggttcgattccccgacggggag

SEQ ID NO: 1174 - DNA, 23 bp, synthetic construct
  misc_feature 1..23: note = Probe
  source 1..23: mol_type = other DNA
gcgtgctgggcccataacccaga

SEQ ID NO: 1175 - DNA, 28 bp, synthetic construct
  misc_feature 1..28: note = Probe
  source 1..28: mol_type = other DNA
gcgtgctgggcccataacccagaggtcg

SEQ ID NO: 1176 - DNA, 29 bp, synthetic construct
  misc_feature 1..29: note = Probe
  source 1..29: mol_type = other DNA
gcgtgctgggcccataacccagaggtcga

SEQ ID NO: 1177 - DNA, 30 bp, synthetic construct
  misc_feature 1..30: note = Probe
  source 1..30: mol_type = other DNA
gcgtgctgggcccataacccagaggtcgat

SEQ ID NO: 1178 - DNA, 31 bp, synthetic construct
  misc_feature 1..31: note = Probe
  source 1..31: mol_type = other DNA
gcgtgctgggcccataacccagaggtcgatg

SEQ ID NO: 1179 - DNA, 24 bp, synthetic construct
  misc_feature 1..24: note = Probe
  source 1..24: mol_type = other DNA
gcgttggtggtatagtggtaagca

SEQ ID NO: 1180 - DNA, 26 bp, synthetic construct
  misc_feature 1..26: note = Probe
  source 1..26: mol_type = other DNA
gcgttggtggtatagtggtaagcata

SEQ ID NO: 1181 - DNA, 27 bp, synthetic construct
  misc_feature 1..27: note = Probe
  source 1..27: mol_type = other DNA
gcgttggtggtatagtggtaagcatag

SEQ ID NO: 1182 - DNA, 29 bp, synthetic construct
  misc_feature 1..29: note = Probe
  source 1..29: mol_type = other DNA
gcgttggtggtatagtggtaagcatagct

SEQ ID NO: 1183 - DNA, 30 bp, synthetic construct
  misc_feature 1..30: note = Probe
  source 1..30: mol_type = other DNA
gcgttggtggtatagtggtaagcatagctg

SEQ ID NO: 1184 - DNA, 31 bp, synthetic construct
  misc_feature 1..31: note = Probe
  source 1..31: mol_type = other DNA
gcgttggtggtatagtggtaagcatagctgc

SEQ ID NO: 1185 - DNA, 32 bp, synthetic construct
  misc_feature 1..32: note = Probe
  source 1..32: mol_type = other DNA
gcgttggtggtatagtggtaagcatagctgcc

SEQ ID NO: 1186 - DNA, 33 bp, synthetic construct
  misc_feature 1..33: note = Probe
  source 1..33: mol_type = other DNA
gcgttggtggtatagtggtaagcatagctgcct

SEQ ID NO: 1187 - DNA, 34 bp, synthetic construct
  misc_feature 1..34: note = Probe
  source 1..34: mol_type = other DNA
gcgttggtggtatagtggtaagcatagctgcctt

SEQ ID NO: 1188 - DNA, 35 bp, synthetic construct
  misc_feature 1..35: note = Probe
  source 1..35: mol_type = other DNA
gcgttggtggtatagtggtaagcatagctgccttc

SEQ ID NO: 1189 - DNA, 36 bp, synthetic construct
  misc_feature 1..36: note = Probe
  source 1..36: mol_type = other DNA
gcgttggtggtatagtggtaagcatagctgccttcc

SEQ ID NO: 1190 - DNA, 37 bp, synthetic construct
  misc_feature 1..37: note = Probe
  source 1..37: mol_type = other DNA
gcgttggtggtatagtggtaagcatagctgccttcca

SEQ ID NO: 1191 - DNA, 44 bp, synthetic construct
  misc_feature 1..44: note = Probe
  source 1..44: mol_type = other DNA
gcgttggtggtatagtggtaagcatagctgccttccaagcagtt

SEQ ID NO: 1192 - DNA, 50 bp, synthetic construct
  misc_feature 1..50: note = Probe
  source 1..50: mol_type = other DNA
gcgttggtggtatagtggtaagcatagctgccttccaagcagttgacccg

SEQ ID NO: 1193 - DNA, 40 bp, synthetic construct
  misc_feature 1..40: note = Probe
  source 1..40: mol_type = other DNA
gcgttggtggtatagtggtgagcatagctgccttccaagc

SEQ ID NO: 1194 - DNA, 44 bp, synthetic construct
  misc_feature 1..44: note = Probe
  source 1..44: mol_type = other DNA
gcgttggtggtatagtggtgagcatagctgccttccaagcagtt

SEQ ID NO: 1195 - DNA, 50 bp, synthetic construct
  misc_feature 1..50: note = Probe
  source 1..50: mol_type = other DNA
gcgttggtggtatagtggtgagcatagctgccttccaagcagttgacccg

SEQ ID NO: 1196 - DNA, 44 bp, synthetic construct
  misc_feature 1..44: note = Probe
  source 1..44: mol_type = other DNA
gcgttggtggtatagtggttagcatagctgccttccaagcagtt

SEQ ID NO: 1197 - DNA, 50 bp, synthetic construct
  misc_feature 1..50: note = Probe
  source 1..50: mol_type = other DNA
gcgttggtggtatagtggttagcatagctgccttccaagcagttgacccg

SEQ ID NO: 1198 - DNA, 32 bp, synthetic construct
  misc_feature 1..32: note = Probe
  source 1..32: mol_type = other DNA
gctaatggtggagttaaagactttttctctga

SEQ ID NO: 1199 - DNA, 29 bp, synthetic construct
  misc_feature 1..29: note = Probe
  source 1..29: mol_type = other DNA
gctagctcagtcggtagagcatgggactc

SEQ ID NO: 1200 - DNA, 31 bp, synthetic construct
  misc_feature 1..31: note = Probe
  source 1..31: mol_type = other DNA
gctagctcagtcggtagagcatgggactctt

SEQ ID NO: 1201 - DNA, 19 bp, synthetic construct
  misc_feature 1..19: note = Probe
  source 1..19: mol_type = other DNA
gctcacaagaactgctaac

SEQ ID NO: 1202 - DNA, 21 bp, synthetic construct
  misc_feature 1..21: note = Probe
  source 1..21: mol_type = other DNA
gctcacaagaactgctaactc

SEQ ID NO: 1203 - DNA, 23 bp, synthetic construct
  misc_feature 1..23: note = Probe
  source 1..23: mol_type = other DNA
gctcacaagaactgctaactcat

SEQ ID NO: 1204 - DNA, 24 bp, synthetic construct
  misc_feature 1..24: note = Probe
  source 1..24: mol_type = other DNA
gctcacaagaactgctaactcatg

SEQ ID NO: 1205 - DNA, 50 bp, synthetic construct
  misc_feature 1..50: note = Probe
  source 1..50: mol_type = other DNA
gctcacaagaactgctaactcatgcccccatgtctaacaacatggctttc

SEQ ID NO: 1206 - DNA, 30 bp, synthetic construct
  misc_feature 1..30: note = Probe
  source 1..30: mol_type = other DNA
gctccgaggtgattttcatattgaattgca

SEQ ID NO: 1207 - DNA, 30 bp, synthetic construct
  misc_feature 1..30: note = Probe
  source 1..30: mol_type = other DNA
gctggtgtagtggtatcatgcaagattccc

SEQ ID NO: 1208 - DNA, 16 bp, synthetic construct
  misc_feature 1..16: note = Probe
  source 1..16: mol_type = other DNA
gcttacgaccccttat

SEQ ID NO: 1209 - DNA, 23 bp, synthetic construct
  misc_feature 1..23: note = Probe
  source 1..23: mol_type = other DNA
gcttctgtagtgtagtggttatc

SEQ ID NO: 1210 - DNA, 24 bp, synthetic construct
  misc_feature 1..24: note = Probe
  source 1..24: mol_type = other DNA
gcttctgtagtgtagtggttatca

SEQ ID NO: 1211 - DNA, 25 bp, synthetic construct
  misc_feature 1..25: note = Probe
  source 1..25: mol_type = other DNA
gcttctgtagtgtagtggttatcac

SEQ ID NO: 1212 - DNA, 28 bp, synthetic construct
  misc_feature 1..28: note = Probe
  source 1..28: mol_type = other DNA
gcttctgtagtgtagtggttatcacgtt

SEQ ID NO: 1213 - DNA, 31 bp, synthetic construct
  misc_feature 1..31: note = Probe
  source 1..31: mol_type = other DNA
gcttctgtagtgtagtggttatcacgttcgc

SEQ ID NO: 1214 - DNA, 32 bp, synthetic construct
  misc_feature 1..32: note = Probe
  source 1..32: mol_type = other DNA
gcttctgtagtgtagtggttatcacgttcgcc

SEQ ID NO: 1215 - DNA, 33 bp, synthetic construct
  misc_feature 1..33: note = Probe
  source 1..33: mol_type = other DNA
gcttctgtagtgtagtggttatcacgttcgcct

SEQ ID NO: 1216 - DNA, 34 bp, synthetic construct
  misc_feature 1..34: note = Probe
  source 1..34: mol_type = other DNA
gcttctgtagtgtagtggttatcacgttcgcctc

SEQ ID NO: 1217 - DNA, 35 bp, synthetic construct
  misc_feature 1..35: note = Probe
  source 1..35: mol_type = other DNA
gcttctgtagtgtagtggttatcacgttcgcctca

SEQ ID NO: 1218 - DNA, 36 bp, synthetic construct
  misc_feature 1..36: note = Probe
  source 1..36: mol_type = other DNA
gcttctgtagtgtagtggttatcacgttcgcctcac

SEQ ID NO: 1219 - DNA, 50 bp, synthetic construct
  misc_feature 1..50: note = Probe
  source 1..50: mol_type = other DNA
gcttctgtagtgtagtggttatcacgttcgcctcacacgcgaaaggtccc

SEQ ID NO: 1220 - DNA, 17 bp, synthetic construct
  misc_feature 1..17: note = Probe
  source 1..17: mol_type = other DNA
ggaagcgtgctgggccc

SEQ ID NO: 1221 - DNA, 19 bp, synthetic construct
  misc_feature 1..19: note = Probe
  source 1..19: mol_type = other DNA
ggaagcgtgctgggcccat

SEQ ID NO: 1222 - DNA, 24 bp, synthetic construct
  misc_feature 1..24: note = Probe
  source 1..24: mol_type = other DNA
ggaagcgtgctgggcccataaccc

SEQ ID NO: 1223 - DNA, 27 bp, synthetic construct
  misc_feature 1..27: note = Probe
  source 1..27: mol_type = other DNA
ggaagcgtgctgggcccataacccaga

SEQ ID NO: 1224 - DNA, 31 bp, synthetic construct
  misc_feature 1..31: note = Probe
  source 1..31: mol_type = other DNA
ggaagcgtgctgggcccataacccagaggtc

SEQ ID NO: 1225 - DNA, 32 bp, synthetic construct
  misc_feature 1..32: note = Probe
  source 1..32: mol_type = other DNA
ggaagcgtgctgggcccataacccagaggtcg

SEQ ID NO: 1226 - DNA, 33 bp, synthetic construct
  misc_feature 1..33: note = Probe
  source 1..33: mol_type = other DNA
ggaagcgtgctgggcccataacccagaggtcga

SEQ ID NO: 1227 - DNA, 34 bp, synthetic construct
  misc_feature 1..34: note = Probe
  source 1..34: mol_type = other DNA
ggaagcgtgctgggcccataacccagaggtcgat

SEQ ID NO: 1228 - DNA, 35 bp, synthetic construct
  misc_feature 1..35: note = Probe
  source 1..35: mol_type = other DNA
ggaagcgtgctgggcccataacccagaggtcgatg

SEQ ID NO: 1229 - DNA, 36 bp, synthetic construct
  misc_feature 1..36: note = Probe
  source 1..36: mol_type = other DNA
ggaagcgtgctgggcccataacccagaggtcgatgg

SEQ ID NO: 1230 - DNA, 38 bp, synthetic construct
  misc_feature 1..38: note = Probe
  source 1..38: mol_type = other DNA
ggaagcgtgctgggcccataacccagaggtcgatggat

SEQ ID NO: 1231 - DNA, 40 bp, synthetic construct
  misc_feature 1..40: note = Probe
  source 1..40: mol_type = other DNA
ggaagcgtgctgggcccataacccagaggtcgatggatcg

SEQ ID NO: 1232 - DNA, 24 bp, synthetic construct
  misc_feature 1..24: note = Probe
  source 1..24: mol_type = other DNA
ggagaccggggttcaattccccga

SEQ ID NO: 1233 - DNA, 25 bp, synthetic construct
  misc_feature 1..25: note = Probe
  source 1..25: mol_type = other DNA
ggagaccggggttcaattccccgac

SEQ ID NO: 1234 - DNA, 29 bp, synthetic construct
  misc_feature 1..29: note = Probe
  source 1..29: mol_type = other DNA
ggagaccggggttcaattccccgacgggg

SEQ ID NO: 1235 - DNA, 30 bp, synthetic construct
  misc_feature 1..30: note = Probe
  source 1..30: mol_type = other DNA
ggagaccggggttcaattccccgacgggga

SEQ ID NO: 1236 - DNA, 31 bp, synthetic construct
  misc_feature 1..31: note = Probe
  source 1..31: mol_type = other DNA
ggagaccggggttcaattccccgacggggag

SEQ ID NO: 1237 - DNA, 25 bp, synthetic construct
  misc_feature 1..25: note = Probe
  source 1..25: mol_type = other DNA
ggagaccggggttcgattccccgac

SEQ ID NO: 1238 - DNA, 27 bp, synthetic construct
  misc_feature 1..27: note = Probe
  source 1..27: mol_type = other DNA
ggagaccggggttcgattccccgacgg

SEQ ID NO: 1239 - DNA, 28 bp, synthetic construct
  misc_feature 1..28: note = Probe
  source 1..28: mol_type = other DNA
ggagaccggggttcgattccccgacggg

SEQ ID NO: 1240 - DNA, 29 bp, synthetic construct
  misc_feature 1..29: note = Probe
  source 1..29: mol_type = other DNA
ggagaccggggttcgattccccgacgggg

SEQ ID NO: 1241 - DNA, 30 bp, synthetic construct
  misc_feature 1..30: note = Probe
  source 1..30: mol_type = other DNA
ggagaccggggttcgattccccgacgggga

SEQ ID NO: 1242 - DNA, 31 bp, synthetic construct
  misc_feature 1..31: note = Probe
  source 1..31: mol_type = other DNA
ggagaccggggttcgattccccgacggggag

SEQ ID NO: 1243 - DNA, 26 bp, synthetic construct
  misc_feature 1..26: note = Probe
  source 1..26: mol_type = other DNA
ggagatgaaaacctttttccaaggac

SEQ ID NO: 1244 - DNA, 27 bp, synthetic construct
  misc_feature 1..27: note = Probe
  source 1..27: mol_type = other DNA
ggagatgaaaacctttttccaaggaca

SEQ ID NO: 1245 - DNA, 17 bp, synthetic construct
  misc_feature 1..17: note = Probe
  source 1..17: mol_type = other DNA
ggagcttaaaccccctt

SEQ ID NO: 1246 - DNA, 18 bp, synthetic construct
  misc_feature 1..18: note = Probe
  source 1..18: mol_type = other DNA
ggagcttaaaccccctta

SEQ ID NO: 1247 - DNA, 19 bp, synthetic construct
  misc_feature 1..19: note = Probe
  source 1..19: mol_type = other DNA
ggagcttaaacccccttat

SEQ ID NO: 1248 - DNA, 23 bp, synthetic construct
  misc_feature 1..23: note = Probe
  source 1..23: mol_type = other DNA
ggagcttaaacccccttatttct

SEQ ID NO: 1249 - DNA, 24 bp, synthetic construct
  misc_feature 1..24: note = Probe
  source 1..24: mol_type = other DNA
ggagcttaaacccccttatttcta

SEQ ID NO: 1250 - DNA, 28 bp, synthetic construct
  misc_feature 1..28: note = Probe
  source 1..28: mol_type = other DNA
ggatagctcagtcggtagagcatcagac

SEQ ID NO: 1251 - DNA, 29 bp, synthetic construct
  misc_feature 1..29: note = Probe
  source 1..29: mol_type = other DNA
ggatagctcagtcggtagagcatcagact

SEQ ID NO: 1252 - DNA, 31 bp, synthetic construct
  misc_feature 1..31: note = Probe
  source 1..31: mol_type = other DNA
ggatagctcagtcggtagagcatcagacttt

SEQ ID NO: 1253 - DNA, 32 bp, synthetic construct
  misc_feature 1..32: note = Probe
  source 1..32: mol_type = other DNA
ggatagctcagtcggtagagcatcagactttt

SEQ ID NO: 1254 - DNA, 34 bp, synthetic construct
  misc_feature 1..34: note = Probe
  source 1..34: mol_type = other DNA
ggatggggtgtgataggtggcacggagaattttg

SEQ ID NO: 1255 - DNA, 28 bp, synthetic construct
  misc_feature 1..28: note = Probe
  source 1..28: mol_type = other DNA
ggattcggcgctctcaccgccgcggccc

SEQ ID NO: 1256 - DNA, 23 bp, synthetic construct
  misc_feature 1..23: note = Probe
  source 1..23: mol_type = other DNA
ggattgtgggttcgagtcccatc

SEQ ID NO: 1257 - DNA, 24 bp, synthetic construct
  misc_feature 1..24: note = Probe
  source 1..24: mol_type = other DNA
ggattgtgggttcgagtcccatct

SEQ ID NO: 1258 - DNA, 28 bp, synthetic construct
  misc_feature 1..28: note = Probe
  source 1..28: mol_type = other DNA
ggcatcagcctccggagctggggattgt

SEQ ID NO: 1259 - DNA, 30 bp, synthetic construct
  misc_feature 1..30: note = Probe
  source 1..30: mol_type = other DNA
ggcatcagcctccggagctggggattgtgg

SEQ ID NO: 1260 - DNA, 36 bp, synthetic construct
  misc_feature 1..36: note = Probe
  source 1..36: mol_type = other DNA
ggccccatggtgtaatggtcagcactctggactctg

SEQ ID NO: 1261 - DNA, 23 bp, synthetic construct
  misc_feature 1..23: note = Probe
  source 1..23: mol_type = other DNA
ggccccatggtgtaatggttagc

SEQ ID NO: 1262 - DNA, 32 bp, synthetic construct
  misc_feature 1..32: note = Probe
  source 1..32: mol_type = other DNA
ggccccatggtgtaatggttagcactctggac

SEQ ID NO: 1263 - DNA, 33 bp, synthetic construct
  misc_feature 1..33: note = Probe
  source 1..33: mol_type = other DNA
ggccccatggtgtaatggttagcactctggact

SEQ ID NO: 1264 - DNA, 36 bp, synthetic construct
  misc_feature 1..36: note = Probe
  source 1..36: mol_type = other DNA
ggccccatggtgtaatggttagcactctggactttg

SEQ ID NO: 1265 - DNA, 37 bp, synthetic construct
  misc_feature 1..37: note = Probe
  source 1..37: mol_type = other DNA
ggccccatggtgtaatggttagcactctggactttga

SEQ ID NO: 1266 - DNA, 29 bp, synthetic construct
  misc_feature 1..29: note = Probe
  source 1..29: mol_type = other DNA
ggcccgggttcgactcccggtgtgggaac

SEQ ID NO: 1267 - DNA, 30 bp, synthetic construct
  misc_feature 1..30: note = Probe
  source 1..30: mol_type = other DNA
ggccctatagctcaggggttagagcactgg

SEQ ID NO: 1268 - DNA, 31 bp, synthetic construct
  misc_feature 1..31: note = Probe
  source 1..31: mol_type = other DNA
ggccctatagctcaggggttagagcactggt

SEQ ID NO: 1269 - DNA, 32 bp, synthetic construct
  misc_feature 1..32: note = Probe
  source 1..32: mol_type = other DNA
ggccctatagctcaggggttagagcactggtc

SEQ ID NO: 1270 - DNA, 33 bp, synthetic construct
  misc_feature 1..33: note = Probe
  source 1..33: mol_type = other DNA
ggccctatagctcaggggttagagcactggtct

SEQ ID NO: 1271 - DNA, 36 bp, synthetic construct
  misc_feature 1..36: note = Probe
  source 1..36: mol_type = other DNA
ggccctatagctcaggggttagagcactggtcttgt

SEQ ID NO: 1272 - DNA, 50 bp, synthetic construct
  misc_feature 1..50: note = Probe
  source 1..50: mol_type = other DNA
ggccctatagctcaggggttagagcactggtcttgtaaaccaggggtcgc

SEQ ID NO: 1273 - DNA, 19 bp, synthetic construct
  misc_feature 1..19: note = Probe
  source 1..19: mol_type = other DNA
ggccgcgtggcctaatgga

SEQ ID NO: 1274 - DNA, 18 bp, synthetic construct
  misc_feature 1..18: note = Probe
  source 1..18: mol_type = other DNA
ggcctcgtggcgcaacgg

SEQ ID NO: 1275 - DNA, 26 bp, synthetic construct
  misc_feature 1..26: note = Probe
  source 1..26: mol_type = other DNA
ggcgccgtggcttagttggttaaagc

SEQ ID NO: 1276 - DNA, 24 bp, synthetic construct
  misc_feature 1..24: note = Probe
  source 1..24: mol_type = other DNA
ggcgcggtggccaagtggtaaggc

SEQ ID NO: 1277 - DNA, 28 bp, synthetic construct
  misc_feature 1..28: note = Probe
  source 1..28: mol_type = other DNA
ggcggcccgggttcgactcccggtgtgg

SEQ ID NO: 1278 - DNA, 30 bp, synthetic construct
  misc_feature 1..30: note = Probe
  source 1..30: mol_type = other DNA
ggcggcccgggttcgactcccggtgtggga

SEQ ID NO: 1279 - DNA, 31 bp, synthetic construct
  misc_feature 1..31: note = Probe
  source 1..31: mol_type = other DNA
ggcggcccgggttcgactcccggtgtgggaa

SEQ ID NO: 1280 - DNA, 32 bp, synthetic construct
  misc_feature 1..32: note = Probe
  source 1..32: mol_type = other DNA
ggcggcccgggttcgactcccggtgtgggaac

SEQ ID NO: 1281 - DNA, 24 bp, synthetic construct
  misc_feature 1..24: note = Probe
  source 1..24: mol_type = other DNA
ggctagctcagtcggtagagcatg

SEQ ID NO: 1282 - DNA, 25 bp, synthetic construct
  misc_feature 1..25: note = Probe
  source 1..25: mol_type = other DNA
ggctagctcagtcggtagagcatga

SEQ ID NO: 1283 - DNA, 28 bp, synthetic construct
  misc_feature 1..28: note = Probe
  source 1..28: mol_type = other DNA
ggctagctcagtcggtagagcatgagac

SEQ ID NO: 1284 - DNA, 29 bp, synthetic construct
  misc_feature 1..29: note = Probe
  source 1..29: mol_type = other DNA
ggctagctcagtcggtagagcatgagact

SEQ ID NO: 1285 - DNA, 30 bp, synthetic construct
  misc_feature 1..30: note = Probe
  source 1..30: mol_type = other DNA
ggctagctcagtcggtagagcatgagactc

SEQ ID NO: 1286 - DNA, 31 bp, synthetic construct
  misc_feature 1..31: note = Probe
  source 1..31: mol_type = other DNA
ggctagctcagtcggtagagcatgagactct

SEQ ID NO: 1287 - DNA, 32 bp, synthetic construct
  misc_feature 1..32: note = Probe
  source 1..32: mol_type = other DNA
ggctagctcagtcggtagagcatgagactctt

SEQ ID NO: 1288 - DNA, 25 bp, synthetic construct
  misc_feature 1..25: note = Probe
  source 1..25: mol_type = other DNA
ggctagctcagtcggtagagcatgg

SEQ ID NO: 1289 - DNA, 27 bp, synthetic construct
  misc_feature 1..27: note = Probe
  source 1..27: mol_type = other DNA
ggctagctcagtcggtagagcatggga

SEQ ID NO: 1290 - DNA, 28 bp, synthetic construct
  misc_feature 1..28: note = Probe
  source 1..28: mol_type = other DNA
ggctagctcagtcggtagagcatgggac

SEQ ID NO: 1291 - DNA, 29 bp, synthetic construct
  misc_feature 1..29: note = Probe
  source 1..29: mol_type = other DNA
ggctagctcagtcggtagagcatgggact

SEQ ID NO: 1292 - DNA, 30 bp, synthetic construct
  misc_feature 1..30: note = Probe
  source 1..30: mol_type = other DNA
ggctagctcagtcggtagagcatgggactc

SEQ ID NO: 1293 - DNA, 31 bp, synthetic construct
  misc_feature 1..31: note = Probe
  source 1..31: mol_type = other DNA
ggctagctcagtcggtagagcatgggactct

SEQ ID NO: 1294 - DNA, 32 bp, synthetic construct
  misc_feature 1..32: note = Probe
  source 1..32: mol_type = other DNA
ggctagctcagtcggtagagcatgggactctt

SEQ ID NO: 1295 - DNA, 33 bp, synthetic construct
  misc_feature 1..33: note = Probe
  source 1..33: mol_type = other DNA
ggctagctcagtcggtagagcatgggactctta

SEQ ID NO: 1296 - DNA, 50 bp, synthetic construct
  misc_feature 1..50: note = Probe
  source 1..50: mol_type = other DNA
ggctccatagctcaggggttagagcactggtcttgtaaaccaggggtcgc

SEQ ID NO: 1297 - DNA, 25 bp, synthetic construct
  misc_feature 1..25: note = Probe
  source 1..25: mol_type = other DNA
ggctccatagctcagtggttagagc

SEQ ID NO: 1298 - DNA, 31 bp, synthetic construct
  misc_feature 1..31: note = Probe
  source 1..31: mol_type = other DNA
ggctccatagctcagtggttagagcactggt

SEQ ID NO: 1299 - DNA, 32 bp, synthetic construct
  misc_feature 1..32: note = Probe
  source 1..32: mol_type = other DNA
ggctccatagctcagtggttagagcactggtc

SEQ ID NO: 1300 - DNA, 33 bp, synthetic construct
  misc_feature 1..33: note = Probe
  source 1..33: mol_type = other DNA
ggctccatagctcagtggttagagcactggtct

SEQ ID NO: 1301 - DNA, 36 bp, synthetic construct
  misc_feature 1..36: note = Probe
  source 1..36: mol_type = other DNA
ggctccatagctcagtggttagagcactggtcttgt

SEQ ID NO: 1302 - DNA, 26 bp, synthetic construct
  misc_feature 1..26: note = Probe
  source 1..26: mol_type = other DNA
ggctccgtagcttagttggttaaagc

SEQ ID NO: 1303 - DNA, 19 bp, synthetic construct
  misc_feature 1..19: note = Probe
  source 1..19: mol_type = other DNA
ggctccgtggcgcaatgga

SEQ ID NO: 1304 - DNA, 32 bp, synthetic construct
  misc_feature 1..32: note = Probe
  source 1..32: mol_type = other DNA
ggctccgtggcgcaatggatagcgcattggac

SEQ ID NO: 1305 - DNA, 26 bp, synthetic construct
  misc_feature 1..26: note = Probe
  source 1..26: mol_type = other DNA
ggctccgtggcttagctggttaaagc

SEQ ID NO: 1306 - DNA, 33 bp, synthetic construct
  misc_feature 1..33: note = Probe
  source 1..33: mol_type = other DNA
ggctcgttggtctaggggtatgattctcgcttc

SEQ ID NO: 1307 - DNA, 33 bp, synthetic construct
  misc_feature 1..33: note = Probe
  source 1..33: mol_type = other DNA
ggctcgttggtctaggggtatgattctcgcttt

SEQ ID NO: 1308 - DNA, 32 bp, synthetic construct
  misc_feature 1..32: note = Probe
  source 1..32: mol_type = other DNA
ggctcgttggtctaggggtatgattctcggtt

SEQ ID NO: 1309 - DNA, 25 bp, synthetic construct
  misc_feature 1..25: note = Probe
  source 1..25: mol_type = other DNA
gggagaccggggttcaattccccga

SEQ ID NO: 1310 - DNA, 26 bp, synthetic construct
  misc_feature 1..26: note = Probe
  source 1..26: mol_type = other DNA
gggagaccggggttcaattccccgac

SEQ ID NO: 1311 - DNA, 27 bp, synthetic construct
  misc_feature 1..27: note = Probe
  source 1..27: mol_type = other DNA
gggagaccggggttcaattccccgacg

SEQ ID NO: 1312 - DNA, 30 bp, synthetic construct
  misc_feature 1..30: note = Probe
  source 1..30: mol_type = other DNA
gggagaccggggttcaattccccgacgggg

SEQ ID NO: 1313 - DNA, 26 bp, synthetic construct
  misc_feature 1..26: note = Probe
  source 1..26: mol_type = other DNA
gggagaccggggttcgattccccgac

SEQ ID NO: 1314 - DNA, 29 bp, synthetic construct
  misc_feature 1..29: note = Probe
  source 1..29: mol_type = other DNA
gggagaccggggttcgattccccgacggg

SEQ ID NO: 1315 - DNA, 30 bp, synthetic construct
  misc_feature 1..30: note = Probe
  source 1..30: mol_type = other DNA
gggagaccggggttcgattccccgacgggg

SEQ ID NO: 1316 - DNA, 31 bp, synthetic construct
  misc_feature 1..31: note = Probe
  source 1..31: mol_type = other DNA
gggagaccggggttcgattccccgacgggga

SEQ ID NO: 1317 - DNA, 32 bp, synthetic construct
  misc_feature 1..32: note = Probe
  source 1..32: mol_type = other DNA
gggagaccggggttcgattccccgacggggag

SEQ ID NO: 1318 - DNA, 28 bp, synthetic construct
  misc_feature 1..28: note = Probe
  source 1..28: mol_type = other DNA
gggatgggttcgattctcatagtcctag

SEQ ID NO: 1319 - DNA, 21 bp, synthetic construct
  misc_feature 1..21: note = Probe
  source 1..21: mol_type = other DNA
gggattgtgggttcgagtccc

SEQ ID NO: 1320 - DNA, 24 bp, synthetic construct
  misc_feature 1..24: note = Probe
  source 1..24: mol_type = other DNA
gggattgtgggttcgagtcccacc

SEQ ID NO: 1321 - DNA, 24 bp, synthetic construct
  misc_feature 1..24: note = Probe
  source 1..24: mol_type = other DNA
gggattgtgggttcgagtcccatc

SEQ ID NO: 1322 - DNA, 25 bp, synthetic construct
  misc_feature 1..25: note = Probe
  source 1..25: mol_type = other DNA
gggattgtgggttcgagtcccatct

SEQ ID NO: 1323 - DNA, 32 bp, synthetic construct
  misc_feature 1..32: note = Probe
  source 1..32: mol_type = other DNA
gggcatagctcagtggtagagcatttgactgc

SEQ ID NO: 1324 - DNA, 33 bp, synthetic construct
  misc_feature 1..33: note = Probe
  source 1..33: mol_type = other DNA
gggcatagctcagtggtagagcatttgactgca

SEQ ID NO: 1325 - DNA, 23 bp, synthetic construct
  misc_feature 1..23: note = Probe
  source 1..23: mol_type = other DNA
ggggaattagctcaaatggtaga

SEQ ID NO: 1326 - DNA, 25 bp, synthetic construct
  misc_feature 1..25: note = Probe
  source 1..25: mol_type = other DNA
ggggaattagctcaaatggtagagc

SEQ ID NO: 1327 - DNA, 25 bp, synthetic construct
  misc_feature 1..25: note = Probe
  source 1..25: mol_type = other DNA
ggggaattagctcaagtggtagagc

SEQ ID NO: 1328 - DNA, 16 bp, synthetic construct
  misc_feature 1..16: note = Probe
  source 1..16: mol_type = other DNA
ggggatgtagctcagt

SEQ ID NO: 1329 - DNA, 17 bp, synthetic construct
  misc_feature 1..17: note = Probe
  source 1..17: mol_type = other DNA
ggggatgtagctcagtg

SEQ ID NO: 1330 - DNA, 18 bp, synthetic construct
  misc_feature 1..18: note = Probe
  source 1..18: mol_type = other DNA
ggggatgtagctcagtgg

SEQ ID NO: 1331 - DNA, 19 bp, synthetic construct
  misc_feature 1..19: note = Probe
  source 1..19: mol_type = other DNA
ggggatgtagctcagtggt

SEQ ID NO: 1332 - DNA, 20 bp, synthetic construct
  misc_feature 1..20: note = Probe
  source 1..20: mol_type = other DNA
ggggatgtagctcagtggta

SEQ ID NO: 1333 - DNA, 22 bp, synthetic construct
  misc_feature 1..22: note = Probe
  source 1..22: mol_type = other DNA
ggggatgtagctcagtggtaga

SEQ ID NO: 1334 - DNA, 24 bp, synthetic construct
  misc_feature 1..24: note = Probe
  source 1..24: mol_type = other DNA
ggggatgtagctcagtggtagagc

SEQ ID NO: 1335 - DNA, 30 bp, synthetic construct
  misc_feature 1..30: note = Probe
  source 1..30: mol_type = other DNA
ggggatgtagctcagtggtagagcgcatgc

SEQ ID NO: 1336 - DNA, 31 bp, synthetic construct
  misc_feature 1..31: note = Probe
  source 1..31: mol_type = other DNA
ggggatgtagctcagtggtagagcgcatgct

SEQ ID NO: 1337 - DNA, 32 bp, synthetic construct
  misc_feature 1..32: note = Probe
  source 1..32: mol_type = other DNA
ggggatgtagctcagtggtagagcgcatgctt

SEQ ID NO: 1338 - DNA, 33 bp, synthetic construct
  misc_feature 1..33: note = Probe
  source 1..33: mol_type = other DNA
ggggatgtagctcagtggtagagcgcatgcttt

SEQ ID NO: 1339 - DNA, 35 bp, synthetic construct
  misc_feature 1..35: note = Probe
  source 1..35: mol_type = other DNA
ggggatgtagctcagtggtagagcgcatgctttgc

SEQ ID NO: 1340 - DNA, 32 bp, synthetic construct
  misc_feature 1..32: note = Probe
  source 1..32: mol_type = other DNA
ggggatgtagctcagtggtagagcgcgcgctt

SEQ ID NO: 1341 - DNA, 16 bp, synthetic construct
  misc_feature 1..16: note = Probe
  source 1..16: mol_type = other DNA
ggggattgtgggttcg

SEQ ID NO: 1342 - DNA, 22 bp, synthetic construct
  misc_feature 1..22: note = Probe
  source 1..22: mol_type = other DNA
ggggattgtgggttcgagtccc

SEQ ID NO: 1343 - DNA, 25 bp, synthetic construct
  misc_feature 1..25: note = Probe
  source 1..25: mol_type = other DNA
ggggattgtgggttcgagtcccatc

SEQ ID NO: 1344 - DNA, 26 bp, synthetic construct
  misc_feature 1..26: note = Probe
  source 1..26: mol_type = other DNA
ggggattgtgggttcgagtcccatct

SEQ ID NO: 1345 - DNA, 19 bp, synthetic construct
  misc_feature 1..19: note = Probe
  source 1..19: mol_type = other DNA
gggggattagctcaaatgg

SEQ ID NO: 1346 - DNA, 20 bp, synthetic construct
  misc_feature 1..20: note = Probe
  source 1..20: mol_type = other DNA
gggggattagctcaaatggt

SEQ ID NO: 1347 - DNA, 21 bp, synthetic construct
  misc_feature 1..21: note = Probe
  source 1..21: mol_type = other DNA
gggggattagctcaaatggta

SEQ ID NO: 1348 - DNA, 23 bp, synthetic construct
  misc_feature 1..23: note = Probe
  source 1..23: mol_type = other DNA
gggggattagctcaaatggtaga

SEQ ID NO: 1349 - DNA, 24 bp, synthetic construct
  misc_feature 1..24: note = Probe
  source 1..24: mol_type = other DNA
gggggattagctcaaatggtagag

SEQ ID NO: 1350 - DNA, 25 bp, synthetic construct
  misc_feature 1..25: note = Probe
  source 1..25: mol_type = other DNA
gggggattagctcaaatggtagagc

SEQ ID NO: 1351 - DNA, 32 bp, synthetic construct
  misc_feature 1..32: note = Probe
  source 1..32: mol_type = other DNA
gggggcatagctcagtggtagagcatttgact

SEQ ID NO: 1352 - DNA, 33 bp, synthetic construct
  misc_feature 1..33: note = Probe
  source 1..33: mol_type = other DNA
gggggcatagctcagtggtagagcatttgactg

SEQ ID NO: 1353 - DNA, 34 bp, synthetic construct
  misc_feature 1..34: note = Probe
  source 1..34: mol_type = other DNA
gggggcatagctcagtggtagagcatttgactgc

SEQ ID NO: 1354 - DNA, 35 bp, synthetic construct
  misc_feature 1..35: note = Probe
  source 1..35: mol_type = other DNA
gggggcatagctcagtggtagagcatttgactgca

SEQ ID NO: 1355 - DNA, 32 bp, synthetic construct
  misc_feature 1..32: note = Probe
  source 1..32: mol_type = other DNA
gggggtatagctcaggggtagagcatttgact

SEQ ID NO: 1356 - DNA, 33 bp, synthetic construct
  misc_feature 1..33: note = Probe
  source 1..33: mol_type = other DNA
gggggtatagctcaggggtagagcatttgactg

SEQ ID NO: 1357 - DNA, 34 bp, synthetic construct
  misc_feature 1..34: note = Probe
  source 1..34: mol_type = other DNA
gggggtatagctcaggggtagagcatttgactgc

SEQ ID NO: 1358 - DNA, 35 bp, synthetic construct
  misc_feature 1..35: note = Probe
  source 1..35: mol_type = other DNA
gggggtatagctcagtgggtagagcatttgactgc

SEQ ID NO: 1359 - DNA, 50 bp, synthetic construct
  misc_feature 1..50: note = Probe
  source 1..50: mol_type = other DNA
gggggtatagctcagtggtagagcatttgactgcagatcaagaggtcccc

SEQ ID NO: 1360 - DNA, 32 bp, synthetic construct
  misc_feature 1..32: note = Probe
  source 1..32: mol_type = other DNA
gggggtatagcttagcggtagagcatttgact

SEQ ID NO: 1361 - DNA, 19 bp, synthetic construct
  misc_feature 1..19: note = Probe
  source 1..19: mol_type = other DNA
gggggtgtagctcagtggt

SEQ ID NO: 1362 - DNA, 22 bp, synthetic construct
  misc_feature 1..22: note = Probe
  source 1..22: mol_type = other DNA
gggggtgtagctcagtggtaga

SEQ ID NO: 1363 - DNA, 23 bp, synthetic construct
  misc_feature 1..23: note = Probe
  source 1..23: mol_type = other DNA
gggggtgtagctcagtggtagag

SEQ ID NO: 1364 - DNA, 24 bp, synthetic construct
  misc_feature 1..24: note = Probe
  source 1..24: mol_type = other DNA
gggggtgtagctcagtggtagagc

SEQ ID NO: 1365 - DNA, 32 bp, synthetic construct
  misc_feature 1..32: note = Probe
  source 1..32: mol_type = other DNA
gggggtgtagctcagtggtagagcatttgact

SEQ ID NO: 1366 - DNA, 34 bp, synthetic construct
  misc_feature 1..34: note = Probe
  source 1..34: mol_type = other DNA
gggggtgtagctcagtggtagagcatttgactgc

SEQ ID NO: 1367 - DNA, 30 bp, synthetic construct
  misc_feature 1..30: note = Probe
  source 1..30: mol_type = other DNA
gggggtgtagctcagtggtagagcgcgtgc

SEQ ID NO: 1368 - DNA, 31 bp, synthetic construct
  misc_feature 1..31: note = Probe
  source 1..31: mol_type = other DNA
gggggtgtagctcagtggtagagcgcgtgct

SEQ ID NO: 1369 - DNA, 32 bp, synthetic construct
  misc_feature 1..32: note = Probe
  source 1..32: mol_type = other DNA
gggggtgtagctcagtggtagagcgcgtgctt

SEQ ID NO: 1370 - DNA, 31 bp, synthetic construct
  misc_feature 1..31: note = Probe
  source 1..31: mol_type = other DNA
gggtatagctcaggggtagagcatttgactg

SEQ ID NO: 1371 - DNA, 32 bp, synthetic construct
  misc_feature 1..32: note = Probe
  source 1..32: mol_type = other DNA
gggtatagctcaggggtagagcatttgactgc

SEQ ID NO: 1372 - DNA, 33 bp, synthetic construct
  misc_feature 1..33: note = Probe
  source 1..33: mol_type = other DNA
gggtatagctcaggggtagagcatttgactgca

SEQ ID NO: 1373 - DNA, 33 bp, synthetic construct
  misc_feature 1..33: note = Probe
  source 1..33: mol_type = other DNA
gggtatagctcagtgggtagagcatttgactgc

SEQ ID NO: 1374 - DNA, 33 bp, synthetic construct
  misc_feature 1..33: note = Probe
  source 1..33: mol_type = other DNA
gggtatagcttagcggtagagcatttgactgca

SEQ ID NO: 1375 - DNA, 27 bp, synthetic construct
  misc_feature 1..27: note = Probe
  source 1..27: mol_type = other DNA
gggtggttcagtggtagaattctcgcc

SEQ ID NO: 1376 - DNA, 31 bp, synthetic construct
  misc_feature 1..31: note = Probe
  source 1..31: mol_type = other DNA
gggtggttcagtggtagaattctcgcctgcc

SEQ ID NO: 1377 - DNA, 31 bp, synthetic construct
  misc_feature 1..31: note = Probe
  source 1..31: mol_type = other DNA
gggtgtagctcagtggtagagcatttgactg

SEQ ID NO: 1378 - DNA, 32 bp, synthetic construct
  misc_feature 1..32: note = Probe
  source 1..32: mol_type = other DNA
gggtgtagctcagtggtagagcatttgactgc

SEQ ID NO: 1379 - DNA, 33 bp, synthetic construct
  misc_feature 1..33: note = Probe
  source 1..33: mol_type = other DNA
gggtgtagctcagtggtagagcatttgactgca

SEQ ID NO: 1380 - DNA, 23 bp, synthetic construct
  misc_feature 1..23: note = Probe
  source 1..23: mol_type = other DNA
gggttcgatccccggcatctcca

SEQ ID NO: 1381 - DNA, 33 bp, synthetic construct
  misc_feature 1..33: note = Probe
  source 1..33: mol_type = other DNA
ggtaatcgcataaaacttaaaactttacagtca

SEQ ID NO: 1382 - DNA, 25 bp, synthetic construct
  misc_feature 1..25: note = Probe
  source 1..25: mol_type = other DNA
ggtagagcatgagactcttaatctc

SEQ ID NO: 1383 - DNA, 23 bp, synthetic construct
  misc_feature 1..23: note = Probe
  source 1..23: mol_type = other DNA
ggtagagcatgggactcttaatc

SEQ ID NO: 1384 - DNA, 25 bp, synthetic construct
  misc_feature 1..25: note = Probe
  source 1..25: mol_type = other DNA
ggtagagcatgggactcttaatccc

SEQ ID NO: 1385 - DNA, 16 bp, synthetic construct
  misc_feature 1..16: note = Probe
  source 1..16: mol_type = other DNA
ggtagcgtggccgagc

SEQ ID NO: 1386 - DNA, 17 bp, synthetic construct
  misc_feature 1..17: note = Probe
  source 1..17: mol_type = other DNA
ggtagcgtggccgagcg

SEQ ID NO: 1387 - DNA, 18 bp, synthetic construct
  misc_feature 1..18: note = Probe
  source 1..18: mol_type = other DNA
ggtagcgtggccgagcgg

SEQ ID NO: 1388 - DNA, 19 bp, synthetic construct
  misc_feature 1..19: note = Probe
  source 1..19: mol_type = other DNA
ggtagcgtggccgagcggt

SEQ ID NO: 1389 - DNA, 20 bp, synthetic construct
  misc_feature 1..20: note = Probe
  source 1..20: mol_type = other DNA
ggtagcgtggccgagcggtc

SEQ ID NO: 1390 - DNA, 21 bp, synthetic construct
  misc_feature 1..21: note = Probe
  source 1..21: mol_type = other DNA
ggtagcgtggccgagcggtct

SEQ ID NO: 1391 - DNA, 22 bp, synthetic construct
  misc_feature 1..22: note = Probe
  source 1..22: mol_type = other DNA
ggtagcgtggccgagcggtcta

SEQ ID NO: 1392 - DNA, 23 bp, synthetic construct
  misc_feature 1..23: note = Probe
  source 1..23: mol_type = other DNA
ggtagcgtggccgagcggtctaa

SEQ ID NO: 1393 - DNA, 24 bp, synthetic construct
  misc_feature 1..24: note = Probe
  source 1..24: mol_type = other DNA
ggtagcgtggccgagcggtctaag

SEQ ID NO: 1394 - DNA, 25 bp, synthetic construct
  misc_feature 1..25: note = Probe
  source 1..25: mol_type = other DNA
ggtagcgtggccgagcggtctaagg

SEQ ID NO: 1395 - DNA, 26 bp, synthetic construct
  misc_feature 1..26: note = Probe
  source 1..26: mol_type = other DNA
ggtagcgtggccgagcggtctaaggc

SEQ ID NO: 1396 - DNA, 16 bp, synthetic construct
  misc_feature 1..16: note = Probe
  source 1..16: mol_type = other DNA
ggtagcgtggccgagt

SEQ ID NO: 1397 - DNA, 19 bp, synthetic construct
  misc_feature 1..19: note = Probe
  source 1..19: mol_type = other DNA
ggtagcgtggccgagtggt

SEQ ID NO: 1398 - DNA, 20 bp, synthetic construct
  misc_feature 1..20: note = Probe
  source 1..20: mol_type = other DNA
ggtagcgtggccgagtggtc

SEQ ID NO: 1399 - DNA, 22 bp, synthetic construct
  misc_feature 1..22: note = Probe
  source 1..22: mol_type = other DNA
ggtagcgtggccgagtggtcta

SEQ ID NO: 1400 - DNA, 23 bp, synthetic construct
  misc_feature 1..23: note = Probe
  source 1..23: mol_type = other DNA
ggtagcgtggccgagtggtctaa

SEQ ID NO: 1401 - DNA, 24 bp, synthetic construct
  misc_feature 1..24: note = Probe
  source 1..24: mol_type = other DNA
ggtagcgtggccgagtggtctaag

SEQ ID NO: 1402 - DNA, 25 bp, synthetic construct
  misc_feature 1..25: note = Probe
  source 1..25: mol_type = other DNA
ggtagcgtggccgagtggtctaagg

SEQ ID NO: 1403 - DNA, 26 bp, synthetic construct
  misc_feature 1..26: note = Probe
  source 1..26: mol_type = other DNA
ggtagcgtggccgagtggtctaaggc

SEQ ID NO: 1404 - DNA, 34 bp, synthetic construct
  misc_feature 1..34: note = Probe
  source 1..34: mol_type = other DNA
ggtagcgtggccgagtggtctaaggcgctggatt

SEQ ID NO: 1405 - DNA, 35 bp, synthetic construct
  misc_feature 1..35: note = Probe
  source 1..35: mol_type = other DNA
ggtagcgtggccgagtggtctaaggcgctggattt

SEQ ID NO: 1406 - DNA, 25 bp, synthetic construct
  misc_feature 1..25: note = Probe
  source 1..25: mol_type = other DNA
ggtagtgtggccgagcggtctaagg

SEQ ID NO: 1407 - DNA, 33 bp, synthetic construct
  misc_feature 1..33: note = Probe
  source 1..33: mol_type = other DNA
ggtatgattctcgctttgggtgcgagaggtccc

SEQ ID NO: 1408 - DNA, 33 bp, synthetic construct
  misc_feature 1..33: note = Probe
  source 1..33: mol_type = other DNA
ggtatgattctcggtttgggtccgagaggtccc

SEQ ID NO: 1409 - DNA, 34 bp, synthetic construct
  misc_feature 1..34: note = Probe
  source 1..34: mol_type = other DNA
ggtatgattctcggtttgggtccgagaggtcccg

SEQ ID NO: 1410 - DNA, 50 bp, synthetic construct
  misc_feature 1..50: note = Probe
  source 1..50: mol_type = other DNA
ggtcagctaaataagctatcgggcccataccccgaaaatgttggttatac

SEQ ID NO: 1411 - DNA, 19 bp, synthetic construct
  misc_feature 1..19: note = Probe
  source 1..19: mol_type = other DNA
ggtcccatggtgtaatggt

SEQ ID NO: 1412 - DNA, 23 bp, synthetic construct
  misc_feature 1..23: note = Probe
  source 1..23: mol_type = other DNA
ggtcccatggtgtaatggttagc

SEQ ID NO: 1413 - DNA, 29 bp, synthetic construct
  misc_feature 1..29: note = Probe
  source 1..29: mol_type = other DNA
ggtcccatggtgtaatggttagcactctg

SEQ ID NO: 1414 - DNA, 32 bp, synthetic construct
  misc_feature 1..32: note = Probe
  source 1..32: mol_type = other DNA
ggtcccatggtgtaatggttagcactctggac

SEQ ID NO: 1415 - DNA, 33 bp, synthetic construct
  misc_feature 1..33: note = Probe
  source 1..33: mol_type = other DNA
ggtcccatggtgtaatggttagcactctggact

SEQ ID NO: 1416 - DNA, 36 bp, synthetic construct
  misc_feature 1..36: note = Probe
  source 1..36: mol_type = other DNA
ggtcccatggtgtaatggttagcactctggactttg

SEQ ID NO: 1417 - DNA, 50 bp, synthetic construct
  misc_feature 1..50: note = Probe
  source 1..50: mol_type = other DNA
ggtcccatggtgtaatggttagcactctggactttgaatccagcgatccg

SEQ ID NO: 1418 - DNA, 28 bp, synthetic construct
  misc_feature 1..28: note = Probe
  source 1..28: mol_type = other DNA
ggtcgtggttgtagtccgtgcgagaata

SEQ ID NO: 1419 - DNA, 25 bp, synthetic construct
  misc_feature 1..25: note = Probe
  source 1..25: mol_type = other DNA
ggtctagtggttaggattcggcgct

SEQ ID NO: 1420 - DNA, 17 bp, synthetic construct
  misc_feature 1..17: note = Probe
  source 1..17: mol_type = other DNA
ggtggagttaaagactt

SEQ ID NO: 1421 - DNA, 26 bp, synthetic construct
  misc_feature 1..26: note = Probe
  source 1..26: mol_type = other DNA
ggtggagttaaagactttttctctga

SEQ ID NO: 1422 - DNA, 25 bp, synthetic construct
  misc_feature 1..25: note = Probe
  source 1..25: mol_type = other DNA
ggttcaatccccggcacctccacca

SEQ ID NO: 1423 - DNA, 16 bp, synthetic construct
  misc_feature 1..16: note = Probe
  source 1..16: mol_type = other DNA
ggttccatagtgtagc

SEQ ID NO: 1424 - DNA, 17 bp, synthetic construct
  misc_feature 1..17: note = Probe
  source 1..17: mol_type = other DNA
ggttccatagtgtagcg

SEQ ID NO: 1425 - DNA, 19 bp, synthetic construct
  misc_feature 1..19: note = Probe
  source 1..19: mol_type = other DNA
ggttccatagtgtagcggt

SEQ ID NO: 1426 - DNA, 22 bp, synthetic construct
  misc_feature 1..22: note = Probe
  source 1..22: mol_type = other DNA
ggttccatagtgtagcggttat

SEQ ID NO: 1427 - DNA, 23 bp, synthetic construct
  misc_feature 1..23: note = Probe
  source 1..23: mol_type = other DNA
ggttccatagtgtagcggttatc

SEQ ID NO: 1428 - DNA, 24 bp, synthetic construct
  misc_feature 1..24: note = Probe
  source 1..24: mol_type = other DNA
ggttccatagtgtagcggttatca

SEQ ID NO: 1429 - DNA, 25 bp, synthetic construct
  misc_feature 1..25: note = Probe
  source 1..25: mol_type = other DNA
ggttccatagtgtagcggttatcac

SEQ ID NO: 1430 - DNA, 28 bp, synthetic construct
  misc_feature 1..28: note = Probe
  source 1..28: mol_type = other DNA
ggttccatagtgtagcggttatcacgtc

SEQ ID NO: 1431 - DNA, 29 bp, synthetic construct
  misc_feature 1..29: note = Probe
  source 1..29: mol_type = other DNA
ggttccatagtgtagcggttatcacgtct

SEQ ID NO: 1432 - DNA, 31 bp, synthetic construct
  misc_feature 1..31: note = Probe
  source 1..31: mol_type = other DNA
ggttccatagtgtagcggttatcacgtctgc

SEQ ID NO: 1433 - DNA, 32 bp, synthetic construct
  misc_feature 1..32: note = Probe
  source 1..32: mol_type = other DNA
ggttccatagtgtagcggttatcacgtctgct

SEQ ID NO: 1434 - DNA, 33 bp, synthetic construct
  misc_feature 1..33: note = Probe
  source 1..33: mol_type = other DNA
ggttccatagtgtagcggttatcacgtctgctt

SEQ ID NO: 1435 - DNA, 34 bp, synthetic construct
  misc_feature 1..34: note = Probe
  source 1..34: mol_type = other DNA
ggttccatagtgtagcggttatcacgtctgcttt

SEQ ID NO: 1436 - DNA, 36 bp, synthetic construct
  misc_feature 1..36: note = Probe
  source 1..36: mol_type = other DNA
ggttccatagtgtagcggttatcacgtctgctttac

SEQ ID NO: 1437 - DNA, 22 bp, synthetic construct
  misc_feature 1..22: note = Probe
  source 1..22: mol_type = other DNA
ggttccatagtgtagtggttat

SEQ ID NO: 1438 - DNA, 23 bp, synthetic construct
  misc_feature 1..23: note = Probe
  source 1..23: mol_type = other DNA
ggttccatagtgtagtggttatc

SEQ ID NO: 1439 - DNA, 24 bp, synthetic construct
  misc_feature 1..24: note = Probe
  source 1..24: mol_type = other DNA
ggttccatagtgtagtggttatca

SEQ ID NO: 1440 - DNA, 25 bp, synthetic construct
  misc_feature 1..25: note = Probe
  source 1..25: mol_type = other DNA
ggttccatagtgtagtggttatcac

SEQ ID NO: 1441 - DNA, 26 bp, synthetic construct
  misc_feature 1..26: note = Probe
  source 1..26: mol_type = other DNA
ggttccatagtgtagtggttatcaca

SEQ ID NO: 1442 - DNA, 29 bp, synthetic construct
  misc_feature 1..29: note = Probe
  source 1..29: mol_type = other DNA
ggttccatagtgtagtggttatcacatct

SEQ ID NO: 1443 - DNA, 31 bp, synthetic construct
  misc_feature 1..31: note = Probe
  source 1..31: mol_type = other DNA
ggttccatagtgtagtggttatcacatctgc

SEQ ID NO: 1444 - DNA, 32 bp, synthetic construct
  misc_feature 1..32: note = Probe
  source 1..32: mol_type = other DNA
ggttccatagtgtagtggttatcacatctgct

SEQ ID NO: 1445 - DNA, 33 bp, synthetic construct
  misc_feature 1..33: note = Probe
  source 1..33: mol_type = other DNA
ggttccatagtgtagtggttatcacatctgctt

SEQ ID NO: 1446 - DNA, 34 bp, synthetic construct
  misc_feature 1..34: note = Probe
  source 1..34: mol_type = other DNA
ggttccatagtgtagtggttatcacatctgcttt

SEQ ID NO: 1447 - DNA, 26 bp, synthetic construct
  misc_feature 1..26: note = Probe
  source 1..26: mol_type = other DNA
ggttccatagtgtagtggttatcacg

SEQ ID NO: 1448 - DNA, 27 bp, synthetic construct
  misc_feature 1..27: note = Probe
  source 1..27: mol_type = other DNA
ggttccatagtgtagtggttatcacgt

SEQ ID NO: 1449 - DNA, 28 bp, synthetic construct
  misc_feature 1..28: note = Probe
  source 1..28: mol_type = other DNA
ggttccatagtgtagtggttatcacgtc

SEQ ID NO: 1450 - DNA, 29 bp, synthetic construct
  misc_feature 1..29: note = Probe
  source 1..29: mol_type = other DNA
ggttccatagtgtagtggttatcacgtct

SEQ ID NO: 1451 - DNA, 30 bp, synthetic construct
  misc_feature 1..30: note = Probe
  source 1..30: mol_type = other DNA
ggttccatagtgtagtggttatcacgtctg

SEQ ID NO: 1452 - DNA, 31 bp, synthetic construct
  misc_feature 1..31: note = Probe
  source 1..31: mol_type = other DNA
ggttccatagtgtagtggttatcacgtctgc

SEQ ID NO: 1453 - DNA, 32 bp, synthetic construct
  misc_feature 1..32: note = Probe
  source 1..32: mol_type = other DNA
ggttccatagtgtagtggttatcacgtctgct

SEQ ID NO: 1454 - DNA, 33 bp, synthetic construct
  misc_feature 1..33: note = Probe
  source 1..33: mol_type = other DNA
ggttccatagtgtagtggttatcacgtctgctt

SEQ ID NO: 1455 - DNA, 34 bp, synthetic construct
  misc_feature 1..34: note = Probe
  source 1..34: mol_type = other DNA
ggttccatagtgtagtggttatcacgtctgcttt

SEQ ID NO: 1456 - DNA, 36 bp, synthetic construct
  misc_feature 1..36: note = Probe
  source 1..36: mol_type = other DNA
ggttccatagtgtagtggttatcacgtctgctttac

SEQ ID NO: 1457 - DNA, 50 bp, synthetic construct
  misc_feature 1..50: note = Probe
  source 1..50: mol_type = other DNA
ggttccatagtgtagtggttatcacgtctgctttacacgcagaaggtcct

SEQ ID NO: 1458 - DNA, 33 bp, synthetic construct
  misc_feature 1..33: note = Probe
  source 1..33: mol_type = other DNA
ggttccatggtgtaatggttagcactctggact

SEQ ID NO: 1459 - DNA, 34 bp, synthetic construct
  misc_feature 1..34: note = Probe
  source 1..34: mol_type = other DNA
ggttccatggtgtaatggttagcactctggactc

SEQ ID NO: 1460 - DNA, 36 bp, synthetic construct
  misc_feature 1..36: note = Probe
  source 1..36: mol_type = other DNA
ggttccatggtgtaatggttagcactctggactctg

SEQ ID NO: 1461 - DNA, 37 bp, synthetic construct
  misc_feature 1..37: note = Probe
  source 1..37: mol_type = other DNA
ggttccatggtgtaatggttagcactctggactctga

SEQ ID NO: 1462 - DNA, 22 bp, synthetic construct
  misc_feature 1..22: note = Probe
  source 1..22: mol_type = other DNA
ggttcgattctcatagtcctag

SEQ ID NO: 1463 - DNA, 33 bp, synthetic construct
  misc_feature 1..33: note = Probe
  source 1..33: mol_type = other DNA
gtaaaccggagatgaaaacctttttccaaggac

SEQ ID NO: 1464 - DNA, 34 bp, synthetic construct
  misc_feature 1..34: note = Probe
  source 1..34: mol_type = other DNA
gtaaaccggagatgaaaacctttttccaaggaca

SEQ ID NO: 1465 - DNA, 50 bp, synthetic construct
  misc_feature 1..50: note = Probe
  source 1..50: mol_type = other DNA
gtaccgttaacttccaattaactagttttgacaacattcaaaaaagagta

SEQ ID NO: 1466 - DNA, 16 bp, synthetic construct
  misc_feature 1..16: note = Probe
  source 1..16: mol_type = other DNA
gtagtcgtggccgagt

SEQ ID NO: 1467 - DNA, 23 bp, synthetic construct
  misc_feature 1..23: note = Probe
  source 1..23: mol_type = other DNA
gtagtcgtggccgagtggttaag

SEQ ID NO: 1468 - DNA, 24 bp, synthetic construct
  misc_feature 1..24: note = Probe
  source 1..24: mol_type = other DNA
gtagtcgtggccgagtggttaagg

SEQ ID NO: 1469 - DNA, 25 bp, synthetic construct
  misc_feature 1..25: note = Probe
  source 1..25: mol_type = other DNA
gtagtcgtggccgagtggttaaggc

SEQ ID NO: 1470 - DNA, 26 bp, synthetic construct
  misc_feature 1..26: note = Probe
  source 1..26: mol_type = other DNA
gtatagtggtgagtatccccgcctgt

SEQ ID NO: 1471 - DNA, 23 bp, synthetic construct
  misc_feature 1..23: note = Probe
  source 1..23: mol_type = other DNA
gtatagtggttagtactctgcgt

SEQ ID NO: 1472 - DNA, 32 bp, synthetic construct
  misc_feature 1..32: note = Probe
  source 1..32: mol_type = other DNA
gtatgattctcgctttgggtgcgagaggtccc

SEQ ID NO: 1473 - DNA, 32 bp, synthetic construct
  misc_feature 1..32: note = Probe
  source 1..32: mol_type = other DNA
gtatgattctcggtttgggtccgagaggtccc

SEQ ID NO: 1474 - DNA, 39 bp, synthetic construct
  misc_feature 1..39: note = Probe
  source 1..39: mol_type = other DNA
gtcacgcgggagaccggggttcgattccccgacggggag

SEQ ID NO: 1475 - DNA, 23 bp, synthetic construct
  misc_feature 1..23: note = Probe
  source 1..23: mol_type = other DNA
gtcacggtggccgagtggttaag

SEQ ID NO: 1476 - DNA, 24 bp, synthetic construct
  misc_feature 1..24: note = Probe
  source 1..24: mol_type = other DNA
gtcacggtggccgagtggttaagg

SEQ ID NO: 1477 - DNA, 25 bp, synthetic construct
  misc_feature 1..25: note = Probe
  source 1..25: mol_type = other DNA
gtcacggtggccgagtggttaaggc

SEQ ID NO: 1478 - DNA, 50 bp, synthetic construct
  misc_feature 1..50: note = Probe
  source 1..50: mol_type = other DNA
gtcagctaaataagctatcgggcccataccccgaaaatgttggttatacc

SEQ ID NO: 1479 - DNA, 34 bp, synthetic construct
  misc_feature 1..34: note = Probe
  source 1..34: mol_type = other DNA
gtcaggatggccgagcggtctaaggcgctgcgtt

SEQ ID NO: 1480 - DNA, 35 bp, synthetic construct
  misc_feature 1..35: note = Probe
  source 1..35: mol_type = other DNA
gtcaggatggccgagcggtctaaggcgctgcgttc

SEQ ID NO: 1481 - DNA, 25 bp, synthetic construct
  misc_feature 1..25: note = Probe
  source 1..25: mol_type = other DNA
gtcaggatggccgagtggtctaagg

SEQ ID NO: 1482 - DNA, 18 bp, synthetic construct
  misc_feature 1..18: note = Probe
  source 1..18: mol_type = other DNA
gtccttgtagtataaact

SEQ ID NO: 1483 - DNA, 26 bp, synthetic construct
  misc_feature 1..26: note = Probe
  source 1..26: mol_type = other DNA
gtccttgtagtataaactaatacacc

SEQ ID NO: 1484 - DNA, 27 bp, synthetic construct
  misc_feature 1..27: note = Probe
  source 1..27: mol_type = other DNA
gtccttgtagtataaactaatacacca

SEQ ID NO: 1485 - DNA, 28 bp, synthetic construct
  misc_feature 1..28: note = Probe
  source 1..28: mol_type = other DNA
gtccttgtagtataaactaatacaccag

SEQ ID NO: 1486 - DNA, 29 bp, synthetic construct
  misc_feature 1..29: note = Probe
  source 1..29: mol_type = other DNA
gtccttgtagtataaactaatacaccagt

SEQ ID NO: 1487 - DNA, 30 bp, synthetic construct
  misc_feature 1..30: note = Probe
  source 1..30: mol_type = other DNA
gtccttgtagtataaactaatacaccagtc

SEQ ID NO: 1488 - DNA, 31 bp, synthetic construct
  misc_feature 1..31: note = Probe
  source 1..31: mol_type = other DNA
gtccttgtagtataaactaatacaccagtct

SEQ ID NO: 1489 - DNA, 50 bp, synthetic construct
  misc_feature 1..50: note = Probe
  source 1..50: mol_type = other DNA
gtccttgtagtataaactaatacaccagtcttgtaaaccggagatgaaaa

SEQ ID NO: 1490 - DNA, 18 bp, synthetic construct
  misc_feature 1..18: note = Probe
  source 1..18: mol_type = other DNA
gtcggtagagcatcagac

SEQ ID NO: 1491 - DNA, 27 bp, synthetic construct
  misc_feature 1..27: note = Probe
  source 1..27: mol_type = other DNA
gtcggtagagcatgagactcttaatct

SEQ ID NO: 1492 - DNA, 35 bp, synthetic construct
  misc_feature 1..35: note = Probe
  source 1..35: mol_type = other DNA
gtcggtagagcatgagactcttaatctcagggtcg

SEQ ID NO: 1493 - DNA, 37 bp, synthetic construct
  misc_feature 1..37: note = Probe
  source 1..37: mol_type = other DNA
gtcggtagagcatgagactcttaatctcagggtcgtg

SEQ ID NO: 1494 - DNA, 18 bp, synthetic construct
  misc_feature 1..18: note = Probe
  source 1..18: mol_type = other DNA
gtcggtagagcatgggac

SEQ ID NO: 1495 - DNA, 35 bp, synthetic construct
  misc_feature 1..35: note = Probe
  source 1..35: mol_type = other DNA
gtcggtagagcatgggactcttaatcccagggtcg

SEQ ID NO: 1496 - DNA, 27 bp, synthetic construct
  misc_feature 1..27: note = Probe
  source 1..27: mol_type = other DNA
gtcgtggttgtagtccgtgcgagaata

SEQ ID NO: 1497 - DNA, 24 bp, synthetic construct
  misc_feature 1..24: note = Probe
  source 1..24: mol_type = other DNA
gtctagcggttaggattcctggtt

SEQ ID NO: 1498 - DNA, 24 bp, synthetic construct
  misc_feature 1..24: note = Probe
  source 1..24: mol_type = other DNA
gtctagtggttaggattcggcgct

SEQ ID NO: 1499 - DNA, 26 bp, synthetic construct
  misc_feature 1..26: note = Probe
  source 1..26: mol_type = other DNA
gtctagtggttaggattcggcgctct

SEQ ID NO: 1500 - DNA, 23 bp, synthetic construct
  misc_feature 1..23: note = Probe
  source 1..23: mol_type = other DNA
gtctcataatctgaaggtcgtga

SEQ ID NO: 1501 - DNA, 33 bp, synthetic construct
  misc_feature 1..33: note = Probe
  source 1..33: mol_type = other DNA
gtgaatctgacaacagaggcttacgacccctta

SEQ ID NO: 1502 - DNA, 39 bp, synthetic construct
  misc_feature 1..39: note = Probe
  source 1..39: mol_type = other DNA
gtgaatctgacaacagaggcttacgaccccttatttacc

SEQ ID NO: 1503 - DNA, 28 bp, synthetic construct
  misc_feature 1..28: note = Probe
  source 1..28: mol_type = other DNA
gtgatcgtatagtggttagtactctgcg

SEQ ID NO: 1504 - DNA, 29 bp, synthetic construct
  misc_feature 1..29: note = Probe
  source 1..29: mol_type = other DNA
gtgatcgtatagtggttagtactctgcgt

SEQ ID NO: 1505 - DNA, 30 bp, synthetic construct
  misc_feature 1..30: note = Probe
  source 1..30: mol_type = other DNA
gtgatcgtatagtggttagtactctgcgtt

SEQ ID NO: 1506 - DNA, 31 bp, synthetic construct
  misc_feature 1..31: note = Probe
  source 1..31: mol_type = other DNA
gtgatcgtatagtggttagtactctgcgttg

SEQ ID NO: 1507 - DNA, 32 bp, synthetic construct
  misc_feature 1..32: note = Probe
  source 1..32: mol_type = other DNA
gtgatcgtatagtggttagtactctgcgttgt

SEQ ID NO: 1508 - DNA, 33 bp, synthetic construct
  misc_feature 1..33: note = Probe
  source 1..33: mol_type = other DNA
gtgatcgtatagtggttagtactctgcgttgtg

SEQ ID NO: 1509 - DNA, 26 bp, synthetic construct
  misc_feature 1..26: note = Probe
  source 1..26: mol_type = other DNA
gtggtctagtggttaggattcggcgc

SEQ ID NO: 1510 - DNA, 27 bp, synthetic construct
  misc_feature 1..27: note = Probe
  source 1..27: mol_type = other DNA
gtggtctagtggttaggattcggcgct

SEQ ID NO: 1511 - DNA, 21 bp, synthetic construct
  misc_feature 1..21: note = Probe
  source 1..21: mol_type = other DNA
gtggtgagtatccccgcctgt

SEQ ID NO: 1512 - DNA, 22 bp, synthetic construct
  misc_feature 1..22: note = Probe
  source 1..22: mol_type = other DNA
gtggtgagtatccccgcctgtc

SEQ ID NO: 1513 - DNA, 19 bp, synthetic construct
  misc_feature 1..19: note = Probe
  source 1..19: mol_type = other DNA
gtggttaggattcggcgct

SEQ ID NO: 1514 - DNA, 23 bp, synthetic construct
  misc_feature 1..23: note = Probe
  source 1..23: mol_type = other DNA
gtggttaggattcggcgctctca

SEQ ID NO: 1515 - DNA, 18 bp, synthetic construct
  misc_feature 1..18: note = Probe
  source 1..18: mol_type = other DNA
gtggttagtactctgcgt

SEQ ID NO: 1516 - DNA, 20 bp, synthetic construct
  misc_feature 1..20: note = Probe
  source 1..20: mol_type = other DNA
gtggttagtactctgcgttg

SEQ ID NO: 1517 - DNA, 21 bp, synthetic construct
  misc_feature 1..21: note = Probe
  source 1..21: mol_type = other DNA
gtggttagtactctgcgttgt

SEQ ID NO: 1518 - DNA, 29 bp, synthetic construct
  misc_feature 1..29: note = Probe
  source 1..29: mol_type = other DNA
gtgtttgtgggtttaagtcccattggtct

SEQ ID NO: 1519 - DNA, 30 bp, synthetic construct
  misc_feature 1..30: note = Probe
  source 1..30: mol_type = other DNA
gtgtttgtgggtttaagtcccattggtcta

SEQ ID NO: 1520 - DNA, 21 bp, synthetic construct
  misc_feature 1..21: note = Probe
  source 1..21: mol_type = other DNA
gttaagatggcagagcccggt

SEQ ID NO: 1521 - DNA, 30 bp, synthetic construct
  misc_feature 1..30: note = Probe
  source 1..30: mol_type = other DNA
gttaagatggcagagcccggtaatcgcata

SEQ ID NO: 1522 - DNA, 34 bp, synthetic construct
  misc_feature 1..34: note = Probe
  source 1..34: mol_type = other DNA
gttaagatggcagagcccggtaatcgcataaaac

SEQ ID NO: 1523 - DNA, 37 bp, synthetic construct
  misc_feature 1..37: note = Probe
  source 1..37: mol_type = other DNA
gttaagatggcagagcccggtaatcgcataaaactta

SEQ ID NO: 1524 - DNA, 42 bp, synthetic construct
  misc_feature 1..42: note = Probe
  source 1..42: mol_type = other DNA
gttaagatggcagagcccggtaatcgcataaaacttaaaact

SEQ ID NO: 1525 - DNA, 18 bp, synthetic construct
  misc_feature 1..18: note = Probe
  source 1..18: mol_type = other DNA
gttcaaatccgggtgccc

SEQ ID NO: 1526 - DNA, 21 bp, synthetic construct
  misc_feature 1..21: note = Probe
  source 1..21: mol_type = other DNA
gttcaaatccgggtgccccct

SEQ ID NO: 1527 - DNA, 24 bp, synthetic construct
  misc_feature 1..24: note = Probe
  source 1..24: mol_type = other DNA
gttcaatccccggcacctccacca

SEQ ID NO: 1528 - DNA, 46 bp, synthetic construct
  misc_feature 1..46: note = Probe
  source 1..46: mol_type = other DNA
gttcttgtagttgaaatacaacgatggtttttcatatcattggtcg

SEQ ID NO: 1529 - DNA, 50 bp, synthetic construct
  misc_feature 1..50: note = Probe
  source 1..50: mol_type = other DNA
gttcttgtagttgaaatacaacgatggtttttcatatcattggtcgtggt

SEQ ID NO: 1530 - DNA, 50 bp, synthetic construct
  misc_feature 1..50: note = Probe
  source 1..50: mol_type = other DNA
gtttaaattagaatcttagctttgggtgctaatggtggagttaaagactt

SEQ ID NO: 1531 - DNA, 50 bp, synthetic construct
  misc_feature 1..50: note = Probe
  source 1..50: mol_type = other DNA
gtttaaccaaaacatcagattgtgaatctgacaacagaggcttacgaccc

SEQ ID NO: 1532 - DNA, 19 bp, synthetic construct
  misc_feature 1..19: note = Probe
  source 1..19: mol_type = other DNA
gtttatgtagcttacctcc

SEQ ID NO: 1533 - DNA, 20 bp, synthetic construct
  misc_feature 1..20: note = Probe
  source 1..20: mol_type = other DNA
gtttatgtagcttacctcct

SEQ ID NO: 1534 - DNA, 27 bp, synthetic construct
  misc_feature 1..27: note = Probe
  source 1..27: mol_type = other DNA
gtttatgtagcttacctcctcaaagca

SEQ ID NO: 1535 - DNA, 29 bp, synthetic construct
  misc_feature 1..29: note = Probe
  source 1..29: mol_type = other DNA
gtttatgtagcttacctcctcaaagcaat

SEQ ID NO: 1536 - DNA, 30 bp, synthetic construct
  misc_feature 1..30: note = Probe
  source 1..30: mol_type = other DNA
gtttatgtagcttacctcctcaaagcaata

SEQ ID NO: 1537 - DNA, 33 bp, synthetic construct
  misc_feature 1..33: note = Probe
  source 1..33: mol_type = other DNA
gtttatgtagcttacctcctcaaagcaatacac

SEQ ID NO: 1538 - DNA, 34 bp, synthetic construct
  misc_feature 1..34: note = Probe
  source 1..34: mol_type = other DNA
gtttatgtagcttacctcctcaaagcaatacact

SEQ ID NO: 1539 - DNA, 35 bp, synthetic construct
  misc_feature 1..35: note = Probe
  source 1..35: mol_type = other DNA
gtttatgtagcttacctcctcaaagcaatacactg

SEQ ID NO: 1540 - DNA, 36 bp, synthetic construct
  misc_feature 1..36: note = Probe
  source 1..36: mol_type = other DNA
gtttatgtagcttacctcctcaaagcaatacactga

SEQ ID NO: 1541 - DNA, 37 bp, synthetic construct
  misc_feature 1..37: note = Probe
  source 1..37: mol_type = other DNA
gtttatgtagcttacctcctcaaagcaatacactgaa

SEQ ID NO: 1542 - DNA, 16 bp, synthetic construct
  misc_feature 1..16: note = Probe
  source 1..16: mol_type = other DNA
gtttccgtagtgtagc

SEQ ID NO: 1543 - DNA, 23 bp, synthetic construct
  misc_feature 1..23: note = Probe
  source 1..23: mol_type = other DNA
gtttccgtagtgtagcggttatc

SEQ ID NO: 1544 - DNA, 24 bp, synthetic construct
  misc_feature 1..24: note = Probe
  source 1..24: mol_type = other DNA
gtttccgtagtgtagcggttatca

SEQ ID NO: 1545 - DNA, 28 bp, synthetic construct
  misc_feature 1..28: note = Probe
  source 1..28: mol_type = other DNA
gtttccgtagtgtagcggttatcacatt

SEQ ID NO: 1546 - DNA, 29 bp, synthetic construct
  misc_feature 1..29: note = Probe
  source 1..29: mol_type = other DNA
gtttccgtagtgtagcggttatcacattc

SEQ ID NO: 1547 - DNA, 31 bp, synthetic construct
  misc_feature 1..31: note = Probe
  source 1..31: mol_type = other DNA
gtttccgtagtgtagcggttatcacattcgc

SEQ ID NO: 1548 - DNA, 32 bp, synthetic construct
  misc_feature 1..32: note = Probe
  source 1..32: mol_type = other DNA
gtttccgtagtgtagcggttatcacattcgcc

SEQ ID NO: 1549 - DNA, 33 bp, synthetic construct
  misc_feature 1..33: note = Probe
  source 1..33: mol_type = other DNA
gtttccgtagtgtagcggttatcacattcgcct

SEQ ID NO: 1550 - DNA, 34 bp, synthetic construct
  misc_feature 1..34: note = Probe
  source 1..34: mol_type = other DNA
gtttccgtagtgtagcggttatcacattcgcctc

SEQ ID NO: 1551 - DNA, 35 bp, synthetic construct
  misc_feature 1..35: note = Probe
  source 1..35: mol_type = other DNA
gtttccgtagtgtagcggttatcacattcgcctca

SEQ ID NO: 1552 - DNA, 36 bp, synthetic construct
  misc_feature 1..36: note = Probe
  source 1..36: mol_type = other DNA
gtttccgtagtgtagcggttatcacattcgcctcac

SEQ ID NO: 1553 - DNA, 20 bp, synthetic construct
  misc_feature 1..20: note = Probe
  source 1..20: mol_type = other DNA
gtttccgtagtgtagtggtc

SEQ ID NO: 1554 - DNA, 23 bp, synthetic construct
  misc_feature 1..23: note = Probe
  source 1..23: mol_type = other DNA
gtttccgtagtgtagtggtcatc

SEQ ID NO: 1555 - DNA, 24 bp, synthetic construct
  misc_feature 1..24: note = Probe
  source 1..24: mol_type = other DNA
gtttccgtagtgtagtggtcatca

SEQ ID NO: 1556 - DNA, 25 bp, synthetic construct
  misc_feature 1..25: note = Probe
  source 1..25: mol_type = other DNA
gtttccgtagtgtagtggtcatcac

SEQ ID NO: 1557 - DNA, 28 bp, synthetic construct
  misc_feature 1..28: note = Probe
  source 1..28: mol_type = other DNA
gtttccgtagtgtagtggtcatcacgtt

SEQ ID NO: 1558 - DNA, 29 bp, synthetic construct
  misc_feature 1..29: note = Probe
  source 1..29: mol_type = other DNA
gtttccgtagtgtagtggtcatcacgttc

SEQ ID NO: 1559 - DNA, 31 bp, synthetic construct
  misc_feature 1..31: note = Probe
  source 1..31: mol_type = other DNA
gtttccgtagtgtagtggtcatcacgttcgc

SEQ ID NO: 1560 - DNA, 32 bp, synthetic construct
  misc_feature 1..32: note = Probe
  source 1..32: mol_type = other DNA
gtttccgtagtgtagtggtcatcacgttcgcc

SEQ ID NO: 1561 - DNA, 33 bp, synthetic construct
  misc_feature 1..33: note = Probe
  source 1..33: mol_type = other DNA
gtttccgtagtgtagtggtcatcacgttcgcct

SEQ ID NO: 1562 - DNA, 34 bp, synthetic construct
  misc_feature 1..34: note = Probe
  source 1..34: mol_type = other DNA
gtttccgtagtgtagtggttatcacgttcgccta

SEQ ID NO: 1563 - DNA, 38 bp, synthetic construct
  misc_feature 1..38: note = Probe
  source 1..38: mol_type = other DNA
gtttccgtagtgtagtggttatcacgttcgcctcacac

SEQ ID NO: 1564 - DNA, 50 bp, synthetic construct
  misc_feature 1..50: note = Probe
  source 1..50: mol_type = other DNA
gtttccgtagtgtagtggttatcacgttcgcctcacacgcgaaaggtccc

SEQ ID NO: 1565 - DNA, 23 bp, synthetic construct
  misc_feature 1..23: note = Probe
  source 1..23: mol_type = other DNA
gtttccgtagtgtagtggttatt

SEQ ID NO: 1566 - DNA, 22 bp, synthetic construct
  misc_feature 1..22: note = Probe
  source 1..22: mol_type = other DNA
gtttgtgggtttaagtcccatt

SEQ ID NO: 1567 - DNA, 50 bp, synthetic construct
  misc_feature 1..50: note = Probe
  source 1..50: mol_type = other DNA
taaattagaatcttagctttgggtgctaatggtggagttaaagacttttt

SEQ ID NO: 1568 - DNA, 50 bp, synthetic construct
  misc_feature 1..50: note = Probe
  source 1..50: mol_type = other DNA
taacacaaagcacccaacttacacttaggagatttcaacttaacttgacc

SEQ ID NO: 1569 - DNA, 50 bp, synthetic construct
  misc_feature 1..50: note = Probe
  source 1..50: mol_type = other DNA
taaccaaaacatcagattgtgaatctgacaacagaggcttacgacccctt

SEQ ID NO: 1570 - DNA, 40 bp, synthetic construct
  misc_feature 1..40: note = Probe
  source 1..40: mol_type = other DNA
taaccgaaaggttggtggttcgagcccacccagggacgcc

SEQ ID NO: 1571 - DNA, 44 bp, synthetic construct
  misc_feature 1..44: note = Probe
  source 1..44: mol_type = other DNA
taagctatcgggcccataccccgaaaatgttggttatacccttc

SEQ ID NO: 1572 - DNA, 45 bp, synthetic construct
  misc_feature 1..45: note = Probe
  source 1..45: mol_type = other DNA
taagctatcgggcccataccccgaaaatgttggttatacccttcc

SEQ ID NO: 1573 - DNA, 50 bp, synthetic construct
  misc_feature 1..50: note = Probe
  source 1..50: mol_type = other DNA
taagctatcgggcccataccccgaaaatgttggttatacccttcccgtac

SEQ ID NO: 1574 - DNA, 50 bp, synthetic construct
  misc_feature 1..50: note = Probe
  source 1..50: mol_type = other DNA
tacaacgatggtttttcatatcattggtcgtggttgtagtccgtgcgaga

SEQ ID NO: 1575 - DNA, 26 bp, synthetic construct
  misc_feature 1..26: note = Probe
  source 1..26: mol_type = other DNA
tacagtcagaggttcaattcctcttc

SEQ ID NO: 1576 - DNA, 35 bp, synthetic construct
  misc_feature 1..35: note = Probe
  source 1..35: mol_type = other DNA
taccccgaaaatgttggttatacccttcccgtact

SEQ ID NO: 1577 - DNA, 36 bp, synthetic construct
  misc_feature 1..36: note = Probe
  source 1..36: mol_type = other DNA
taccccgaaaatgttggttatacccttcccgtacta

SEQ ID NO: 1578 - DNA, 18 bp, synthetic construct
  misc_feature 1..18: note = Probe
  source 1..18: mol_type = other DNA
tacctcctcaaagcaata

SEQ ID NO: 1579 - DNA, 50 bp, synthetic construct
  misc_feature 1..50: note = Probe
  source 1..50: mol_type = other DNA
tacctcctcaaagcaatacactgaaaatgtttagacgggctcacatcacc

SEQ ID NO: 1580 - DNA, 50 bp, synthetic construct
  misc_feature 1..50: note = Probe
  source 1..50: mol_type = other DNA
tagaatcttagctttgggtgctaatggtggagttaaagactttttctctg

SEQ ID NO: 1581 - DNA, 32 bp, synthetic construct
  misc_feature 1..32: note = Probe
  source 1..32: mol_type = other DNA
tagagtaaataataggagcttaaaccccctta

SEQ ID NO: 1582 - DNA, 50 bp, synthetic construct
  misc_feature 1..50: note = Probe
  source 1..50: mol_type = other DNA
tagattgaagccagttgattagggtgcttagctgttaactaagtgtttgt

SEQ ID NO: 1583 - DNA, 50 bp, synthetic construct
  misc_feature 1..50: note = Probe
  source 1..50: mol_type = other DNA
tagcactctggactttgaatccagcgatccgagttcaaatctcggtggga

SEQ ID NO: 1584 - DNA, 36 bp, synthetic construct
  misc_feature 1..36: note = Probe
  source 1..36: mol_type = other DNA
tagcattaaccttttaagttaaagattaagagaacc

SEQ ID NO: 1585 - DNA, 49 bp, synthetic construct
  misc_feature 1..49: note = Probe
  source 1..49: mol_type = other DNA
tagcattaaccttttaagttaaagattaagagaaccaacacctctttac

SEQ ID NO: 1586 - DNA, 50 bp, synthetic construct
  misc_feature 1..50: note = Probe
  source 1..50: mol_type = other DNA
tagcattaaccttttaagttaaagattaagagaaccaacacctctttaca

SEQ ID NO: 1587 - DNA, 27 bp, synthetic construct
  misc_feature 1..27: note = Probe
  source 1..27: mol_type = other DNA
tagctcagtcggtagagcatgggactc

SEQ ID NO: 1588 - DNA, 28 bp, synthetic construct
  misc_feature 1..28: note = Probe
  source 1..28: mol_type = other DNA
tagctcagtcggtagagcatgggactct

SEQ ID NO: 1589 - DNA, 29 bp, synthetic construct
  misc_feature 1..29: note = Probe
  source 1..29: mol_type = other DNA
tagctcagtcggtagagcatgggactctt

SEQ ID NO: 1590 - DNA, 21 bp, synthetic construct
  misc_feature 1..21: note = Probe
  source 1..21: mol_type = other DNA
taggatggggtgtgataggtg

SEQ ID NO: 1591 - DNA, 29 bp, synthetic construct
  misc_feature 1..29: note = Probe
  source 1..29: mol_type = other DNA
taggatggggtgtgataggtggcacggag

SEQ ID NO: 1592 - DNA, 30 bp, synthetic construct
  misc_feature 1..30: note = Probe
  source 1..30: mol_type = other DNA
taggatggggtgtgataggtggcacggaga

SEQ ID NO: 1593 - DNA, 32 bp, synthetic construct
  misc_feature 1..32: note = Probe
  source 1..32: mol_type = other DNA
taggatggggtgtgataggtggcacggagaat

SEQ ID NO: 1594 - DNA, 33 bp, synthetic construct
  misc_feature 1..33: note = Probe
  source 1..33: mol_type = other DNA
taggatggggtgtgataggtggcacggagaatt

SEQ ID NO: 1595 - DNA, 36 bp, synthetic construct
  misc_feature 1..36: note = Probe
  source 1..36: mol_type = other DNA
taggatggggtgtgataggtggcacggagaattttg

SEQ ID NO: 1596 - DNA, 50 bp, synthetic construct
  misc_feature 1..50: note = Probe
  source 1..50: mol_type = other DNA
tagggtgcttagctgttaactaagtgtttgtgggtttaagtcccattggt

SEQ ID NO: 1597 - DNA, 35 bp, synthetic construct
  misc_feature 1..35: note = Probe
  source 1..35: mol_type = other DNA
tagtaccgttaacttccaattaactagttttgaca

SEQ ID NO: 1598 - DNA, 23 bp, synthetic construct
  misc_feature 1..23: note = Probe
  source 1..23: mol_type = other DNA
tagtggtgagtatccccgcctgt

SEQ ID NO: 1599 - DNA, 21 bp, synthetic construct
  misc_feature 1..21: note = Probe
  source 1..21: mol_type = other DNA
tagtggttaggattcggcgct

SEQ ID NO: 1600 - DNA, 23 bp, synthetic construct
  misc_feature 1..23: note = Probe
  source 1..23: mol_type = other DNA
tagtggttaggattcggcgctct

SEQ ID NO: 1601 - DNA, 25 bp, synthetic construct
  misc_feature 1..25: note = Probe
  source 1..25: mol_type = other DNA
tagtggttaggattcggcgctctca

SEQ ID NO: 1602 - DNA, 19 bp, synthetic construct
  misc_feature 1..19: note = Probe
  source 1..19: mol_type = other DNA
tagtggttagtactctgcg

SEQ ID NO: 1603 - DNA, 20 bp, synthetic construct
  misc_feature 1..20: note = Probe
  source 1..20: mol_type = other DNA
tagtggttagtactctgcgt

SEQ ID NO: 1604 - DNA, 37 bp, synthetic construct
  misc_feature 1..37: note = Probe
  source 1..37: mol_type = other DNA
tcaaagcaatacactgaaaatgtttagacgggctcac

SEQ ID NO: 1605 - DNA, 50 bp, synthetic construct
  misc_feature 1..50: note = Probe
  source 1..50: mol_type = other DNA
tcaaagcaatacactgaaaatgtttagacgggctcacatcaccccataaa

SEQ ID NO: 1606 - DNA, 22 bp, synthetic construct
  misc_feature 1..22: note = Probe
  source 1..22: mol_type = other DNA
tcaatccccggcacctccacca

SEQ ID NO: 1607 - DNA, 45 bp, synthetic construct
  misc_feature 1..45: note = Probe
  source 1..45: mol_type = other DNA
tcacaagaactgctaactcatgcccccatgtctaacaacatggct

SEQ ID NO: 1608 - DNA, 46 bp, synthetic construct
  misc_feature 1..46: note = Probe
  source 1..46: mol_type = other DNA
tcacaagaactgctaactcatgcccccatgtctaacaacatggctt

SEQ ID NO: 1609 - DNA, 49 bp, synthetic construct
  misc_feature 1..49: note = Probe
  source 1..49: mol_type = other DNA
tcacaagaactgctaactcatgcccccatgtctaacaacatggctttct

SEQ ID NO: 1610 - DNA, 50 bp, synthetic construct
  misc_feature 1..50: note = Probe
  source 1..50: mol_type = other DNA
tcacaagaactgctaactcatgcccccatgtctaacaacatggctttctc

SEQ ID NO: 1611 - DNA, 19 bp, synthetic construct
  misc_feature 1..19: note = Probe
  source 1..19: mol_type = other DNA
tcacacgcgaaaggtcccc

SEQ ID NO: 1612 - DNA, 22 bp, synthetic construct
  misc_feature 1..22: note = Probe
  source 1..22: mol_type = other DNA
tcacacgcgaaaggtccccggt

SEQ ID NO: 1613 - DNA, 20 bp, synthetic construct
  misc_feature 1..20: note = Probe
  source 1..20: mol_type = other DNA
tcacgcgggagaccggggtt

SEQ ID NO: 1614 - DNA, 33 bp, synthetic construct
  misc_feature 1..33: note = Probe
  source 1..33: mol_type = other DNA
tcacgcgggagaccggggttcaattccccgacg

SEQ ID NO: 1615 - DNA, 34 bp, synthetic construct
  misc_feature 1..34: note = Probe
  source 1..34: mol_type = other DNA
tcacgcgggagaccggggttcaattccccgacgg

SEQ ID NO: 1616 - DNA, 36 bp, synthetic construct
  misc_feature 1..36: note = Probe
  source 1..36: mol_type = other DNA
tcacgcgggagaccggggttcaattccccgacgggg

SEQ ID NO: 1617 - DNA, 38 bp, synthetic construct
  misc_feature 1..38: note = Probe
  source 1..38: mol_type = other DNA
tcacgcgggagaccggggttcaattccccgacggggag

SEQ ID NO: 1618 - DNA, 32 bp, synthetic construct
  misc_feature 1..32: note = Probe
  source 1..32: mol_type = other DNA
tcacgcgggagaccggggttcgattccccgac

SEQ ID NO: 1619 - DNA, 33 bp, synthetic construct
  misc_feature 1..33: note = Probe
  source 1..33: mol_type = other DNA
tcacgcgggagaccggggttcgattccccgacg

SEQ ID NO: 1620 - DNA, 34 bp, synthetic construct
  misc_feature 1..34: note = Probe
  source 1..34: mol_type = other DNA
tcacgcgggagaccggggttcgattccccgacgg

SEQ ID NO: 1621 - DNA, 35 bp, synthetic construct
  misc_feature 1..35: note = Probe
  source 1..35: mol_type = other DNA
tcacgcgggagaccggggttcgattccccgacggg

SEQ ID NO: 1622 - DNA, 36 bp, synthetic construct
  misc_feature 1..36: note = Probe
  source 1..36: mol_type = other DNA
tcacgcgggagaccggggttcgattccccgacgggg

SEQ ID NO: 1623 - DNA, 38 bp, synthetic construct
  misc_feature 1..38: note = Probe
  source 1..38: mol_type = other DNA
tcacgcgggagaccggggttcgattccccgacggggag

SEQ ID NO: 1624 - DNA, 33 bp, synthetic construct
  misc_feature 1..33: note = Probe
  source 1..33: mol_type = other DNA
tcagaagattctaggttcgactcctggctggct

SEQ ID NO: 1625 - DNA, 17 bp, synthetic construct
  misc_feature 1..17: note = Probe
  source 1..17: mol_type = other DNA
tccagcgatccgagttc

SEQ ID NO: 1626 - DNA, 18 bp, synthetic construct
  misc_feature 1..18: note = Probe
  source 1..18: mol_type = other DNA
tccagcgatccgagttca

SEQ ID NO: 1627 - DNA, 34 bp, synthetic construct
  misc_feature 1..34: note = Probe
  source 1..34: mol_type = other DNA
tccagcgatccgagttcaaatctcggtggaacct

SEQ ID NO: 1628 - DNA, 34 bp, synthetic construct
  misc_feature 1..34: note = Probe
  source 1..34: mol_type = other DNA
tccagcgatccgagttcaaatctcggtgggacct

SEQ ID NO: 1629 - DNA, 28 bp, synthetic construct
  misc_feature 1..28: note = Probe
  source 1..28: mol_type = other DNA
tccatagtgtagtggttatcacgtctgc

SEQ ID NO: 1630 - DNA, 33 bp, synthetic construct
  misc_feature 1..33: note = Probe
  source 1..33: mol_type = other DNA
tccatagtgtagtggttatcacgtctgctttac

SEQ ID NO: 1631 - DNA, 21 bp, synthetic construct
  misc_feature 1..21: note = Probe
  source 1..21: mol_type = other DNA
tccattggggtttccccgcgc

SEQ ID NO: 1632 - DNA, 18 bp, synthetic construct
  misc_feature 1..18: note = Probe
  source 1..18: mol_type = other DNA
tcccacatggtctagcgg

SEQ ID NO: 1633 - DNA, 19 bp, synthetic construct
  misc_feature 1..19: note = Probe
  source 1..19: mol_type = other DNA
tcccacatggtctagcggt

SEQ ID NO: 1634 - DNA, 20 bp, synthetic construct
  misc_feature 1..20: note = Probe
  source 1..20: mol_type = other DNA
tcccacatggtctagcggtt

SEQ ID NO: 1635 - DNA, 22 bp, synthetic construct
  misc_feature 1..22: note = Probe
  source 1..22: mol_type = other DNA
tcccacatggtctagcggttag

SEQ ID NO: 1636 - DNA, 23 bp, synthetic construct
  misc_feature 1..23: note = Probe
  source 1..23: mol_type = other DNA
tcccacatggtctagcggttagg

SEQ ID NO: 1637 - DNA, 24 bp, synthetic construct
  misc_feature 1..24: note = Probe
  source 1..24: mol_type = other DNA
tcccacatggtctagcggttagga

SEQ ID NO: 1638 - DNA, 25 bp, synthetic construct
  misc_feature 1..25: note = Probe
  source 1..25: mol_type = other DNA
tcccacatggtctagcggttaggat

SEQ ID NO: 1639 - DNA, 26 bp, synthetic construct
  misc_feature 1..26: note = Probe
  source 1..26: mol_type = other DNA
tcccacatggtctagcggttaggatt

SEQ ID NO: 1640 - DNA, 27 bp, synthetic construct
  misc_feature 1..27: note = Probe
  source 1..27: mol_type = other DNA
tcccacatggtctagcggttaggattc

SEQ ID NO: 1641 - DNA, 28 bp, synthetic construct
  misc_feature 1..28: note = Probe
  source 1..28: mol_type = other DNA
tcccacatggtctagcggttaggattcc

SEQ ID NO: 1642 - DNA, 29 bp, synthetic construct
  misc_feature 1..29: note = Probe
  source 1..29: mol_type = other DNA
tcccacatggtctagcggttaggattcct

SEQ ID NO: 1643 - DNA, 30 bp, synthetic construct
  misc_feature 1..30: note = Probe
  source 1..30: mol_type = other DNA
tcccacatggtctagcggttaggattcctg

SEQ ID NO: 1644 - DNA, 31 bp, synthetic construct
  misc_feature 1..31: note = Probe
  source 1..31: mol_type = other DNA
tcccacatggtctagcggttaggattcctgg

SEQ ID NO: 1645 - DNA, 32 bp, synthetic construct
  misc_feature 1..32: note = Probe
  source 1..32: mol_type = other DNA
tcccacatggtctagcggttaggattcctggt

SEQ ID NO: 1646 - DNA, 33 bp, synthetic construct
  misc_feature 1..33: note = Probe
  source 1..33: mol_type = other DNA
tcccacatggtctagcggttaggattcctggtt

SEQ ID NO: 1647 - DNA, 34 bp, synthetic construct
  misc_feature 1..34: note = Probe
  source 1..34: mol_type = other DNA
tcccacatggtctagcggttaggattcctggttt

SEQ ID NO: 1648 - DNA, 35 bp, synthetic construct
  misc_feature 1..35: note = Probe
  source 1..35: mol_type = other DNA
tcccacatggtctagcggttaggattcctggtttt

SEQ ID NO: 1649 - DNA, 36 bp, synthetic construct
  misc_feature 1..36: note = Probe
  source 1..36: mol_type = other DNA
tcccacatggtctagcggttaggattcctggttttc

SEQ ID NO: 1650 - DNA, 37 bp, synthetic construct
  misc_feature 1..37: note = Probe
  source 1..37: mol_type = other DNA
tcccacatggtctagcggttaggattcctggttttca

SEQ ID NO: 1651 - DNA, 40 bp, synthetic construct
  misc_feature 1..40: note = Probe
  source 1..40: mol_type = other DNA
tcccacatggtctagcggttaggattcctggttttcaccc

SEQ ID NO: 1652 - DNA, 17 bp, synthetic construct
  misc_feature 1..17: note = Probe
  source 1..17: mol_type = other DNA
tcccatatggtctagcg

SEQ ID NO: 1653 - DNA, 18 bp, synthetic construct
  misc_feature 1..18: note = Probe
  source 1..18: mol_type = other DNA
tcccatatggtctagcgg

SEQ ID NO: 1654 - DNA, 19 bp, synthetic construct
  misc_feature 1..19: note = Probe
  source 1..19: mol_type = other DNA
tcccatatggtctagcggt

SEQ ID NO: 1655 - DNA, 23 bp, synthetic construct
  misc_feature 1..23: note = Probe
  source 1..23: mol_type = other DNA
tcccatatggtctagcggttagg

SEQ ID NO: 1656 - DNA, 26 bp, synthetic construct
  misc_feature 1..26: note = Probe
  source 1..26: mol_type = other DNA
tcccatatggtctagcggttaggatt

SEQ ID NO: 1657 - DNA, 28 bp, synthetic construct
  misc_feature 1..28: note = Probe
  source 1..28: mol_type = other DNA
tcccatatggtctagcggttaggattcc

SEQ ID NO: 1658 - DNA, 29 bp, synthetic construct
  misc_feature 1..29: note = Probe
  source 1..29: mol_type = other DNA
tcccatatggtctagcggttaggattcct

SEQ ID NO: 1659 - DNA, 30 bp, synthetic construct
  misc_feature 1..30: note = Probe
  source 1..30: mol_type = other DNA
tcccatatggtctagcggttaggattcctg

SEQ ID NO: 1660 - DNA, 31 bp, synthetic construct
  misc_feature 1..31: note = Probe
  source 1..31: mol_type = other DNA
tcccatatggtctagcggttaggattcctgg

SEQ ID NO: 1661 - DNA, 32 bp, synthetic construct
  misc_feature 1..32: note = Probe
  source 1..32: mol_type = other DNA
tcccatatggtctagcggttaggattcctggt

SEQ ID NO: 1662 - DNA, 33 bp, synthetic construct
  misc_feature 1..33: note = Probe
  source 1..33: mol_type = other DNA
tcccatatggtctagcggttaggattcctggtt

SEQ ID NO: 1663 - DNA, 34 bp, synthetic construct
  misc_feature 1..34: note = Probe
  source 1..34: mol_type = other DNA
tcccatatggtctagcggttaggattcctggttt

SEQ ID NO: 1664 - DNA, 35 bp, synthetic construct
  misc_feature 1..35: note = Probe
  source 1..35: mol_type = other DNA
tcccatatggtctagcggttaggattcctggtttt

SEQ ID NO: 1665 - DNA, 36 bp, synthetic construct
  misc_feature 1..36: note = Probe
  source 1..36: mol_type = other DNA
tcccatatggtctagcggttaggattcctggttttc

SEQ ID NO: 1666 - DNA, 37 bp, synthetic construct
  misc_feature 1..37: note = Probe
  source 1..37: mol_type = other DNA
tcccatatggtctagcggttaggattcctggttttca

SEQ ID NO: 1667 - DNA, 34 bp, synthetic construct
  misc_feature 1..34: note = Probe
  source 1..34: mol_type = other DNA
tcccatggtgtaatggttagcactctggactttg

SEQ ID NO: 1668 - DNA, 22 bp, synthetic construct
  misc_feature 1..22: note = Probe
  source 1..22: mol_type = other DNA
tccccgcgcaggttcgaatcct

SEQ ID NO: 1669 - DNA, 17 bp, synthetic construct
  misc_feature 1..17: note = Probe
  source 1..17: mol_type = other DNA
tccccggcacctccacc

SEQ ID NO: 1670 - DNA, 18 bp, synthetic construct
  misc_feature 1..18: note = Probe
  source 1..18: mol_type = other DNA
tccccggcacctccacca

SEQ ID NO: 1671 - DNA, 31 bp, synthetic construct
  misc_feature 1..31: note = Probe
  source 1..31: mol_type = other DNA
tccctggtggtctagtggctaggattcggcg

SEQ ID NO: 1672 - DNA, 32 bp, synthetic construct
  misc_feature 1..32: note = Probe
  source 1..32: mol_type = other DNA
tccctggtggtctagtggctaggattcggcgc

SEQ ID NO: 1673 - DNA, 33 bp, synthetic construct
  misc_feature 1..33: note = Probe
  source 1..33: mol_type = other DNA
tccctggtggtctagtggctaggattcggcgct

SEQ ID NO: 1674 - DNA, 34 bp, synthetic construct
  misc_feature 1..34: note = Probe
  source 1..34: mol_type = other DNA
tccctggtggtctagtggctaggattcggcgctt

SEQ ID NO: 1675 - DNA, 35 bp, synthetic construct
  misc_feature 1..35: note = Probe
  source 1..35: mol_type = other DNA
tccctggtggtctagtggctaggattcggcgcttt

SEQ ID NO: 1676 - DNA, 36 bp, synthetic construct
  misc_feature 1..36: note = Probe
  source 1..36: mol_type = other DNA
tccctggtggtctagtggctaggattcggcgctttc

SEQ ID NO: 1677 - DNA, 37 bp, synthetic construct
  misc_feature 1..37: note = Probe
  source 1..37: mol_type = other DNA
tccctggtggtctagtggctaggattcggcgctttca

SEQ ID NO: 1678 - DNA, 50 bp, synthetic construct
  misc_feature 1..50: note = Probe
  source 1..50: mol_type = other DNA
tccctggtggtctagtggctaggattcggcgctttcaccgccgcggcccg

SEQ ID NO: 1679 - DNA, 31 bp, synthetic construct
  misc_feature 1..31: note = Probe
  source 1..31: mol_type = other DNA
tccctggtggtctagtggttaggattcggcg

SEQ ID NO: 1680 - DNA, 32 bp, synthetic construct
  misc_feature 1..32: note = Probe
  source 1..32: mol_type = other DNA
tccctggtggtctagtggttaggattcggcgc

SEQ ID NO: 1681 - DNA, 33 bp, synthetic construct
  misc_feature 1..33: note = Probe
  source 1..33: mol_type = other DNA
tccctggtggtctagtggttaggattcggcgct

SEQ ID NO: 1682 - DNA, 34 bp, synthetic construct
  misc_feature 1..34: note = Probe
  source 1..34: mol_type = other DNA
tccctggtggtctagtggttaggattcggcgctc

SEQ ID NO: 1683 - DNA, 35 bp, synthetic construct
  misc_feature 1..35: note = Probe
  source 1..35: mol_type = other DNA
tccctggtggtctagtggttaggattcggcgctct

SEQ ID NO: 1684 - DNA, 36 bp, synthetic construct
  misc_feature 1..36: note = Probe
  source 1..36: mol_type = other DNA
tccctggtggtctagtggttaggattcggcgctctc

SEQ ID NO: 1685 - DNA, 37 bp, synthetic construct
  misc_feature 1..37: note = Probe
  source 1..37: mol_type = other DNA
tccctggtggtctagtggttaggattcggcgctctca

SEQ ID NO: 1686 - DNA, 38 bp, synthetic construct
  misc_feature 1..38: note = Probe
  source 1..38: mol_type = other DNA
tccctggtggtctagtggttaggattcggcgctctcac

SEQ ID NO: 1687 - DNA, 39 bp, synthetic construct
  misc_feature 1..39: note = Probe
  source 1..39: mol_type = other DNA
tccctggtggtctagtggttaggattcggcgctctcacc

SEQ ID NO: 1688 - DNA, 40 bp, synthetic construct
  misc_feature 1..40: note = Probe
  source 1..40: mol_type = other DNA
tccctggtggtctagtggttaggattcggcgctctcaccg

SEQ ID NO: 1689 - DNA, 42 bp, synthetic construct
  misc_feature 1..42: note = Probe
  source 1..42: mol_type = other DNA
tccctggtggtctagtggttaggattcggcgctctcaccgcc

SEQ ID NO: 1690 - DNA, 49 bp, synthetic construct
  misc_feature 1..49: note = Probe
  source 1..49: mol_type = other DNA
tccctggtggtctagtggttaggattcggcgctctcaccgccgcggccc

SEQ ID NO: 1691 - DNA, 50 bp, synthetic construct
  misc_feature 1..50: note = Probe
  source 1..50: mol_type = other DNA
tccctggtggtctagtggttaggattcggcgctctcaccgccgcggcccg

SEQ ID NO: 1692 - DNA, 33 bp, synthetic construct
  misc_feature 1..33: note = Probe
  source 1..33: mol_type = other DNA
tccgtagtgtagcggttatcacattcgcctcac

SEQ ID NO: 1693 - DNA, 29 bp, synthetic construct
  misc_feature 1..29: note = Probe
  source 1..29: mol_type = other DNA
tccgtagtgtagtggtcatcacgttcgcc

SEQ ID NO: 1694 - DNA, 50 bp, synthetic construct
  misc_feature 1..50: note = Probe
  source 1..50: mol_type = other DNA
tcctcaaagcaatacactgaaaatgtttagacgggctcacatcaccccat

SEQ ID NO: 1695 - DNA, 22 bp, synthetic construct
  misc_feature 1..22: note = Probe
  source 1..22: mol_type = other DNA
tcctcgttagtatagtggtgag

SEQ ID NO: 1696 - DNA, 23 bp, synthetic construct
  misc_feature 1..23: note = Probe
  source 1..23: mol_type = other DNA
tcctcgttagtatagtggtgagt

SEQ ID NO: 1697 - DNA, 24 bp, synthetic construct
  misc_feature 1..24: note = Probe
  source 1..24: mol_type = other DNA
tcctcgttagtatagtggtgagta

SEQ ID NO: 1698 - DNA, 26 bp, synthetic construct
  misc_feature 1..26: note = Probe
  source 1..26: mol_type = other DNA
tcctcgttagtatagtggtgagtatc

SEQ ID NO: 1699 - DNA, 28 bp, synthetic construct
  misc_feature 1..28: note = Probe
  source 1..28: mol_type = other DNA
tcctcgttagtatagtggtgagtatccc

SEQ ID NO: 1700 - DNA, 29 bp, synthetic construct
  misc_feature 1..29: note = Probe
  source 1..29: mol_type = other DNA
tcctcgttagtatagtggtgagtatcccc

SEQ ID NO: 1701 - DNA, 30 bp, synthetic construct
  misc_feature 1..30: note = Probe
  source 1..30: mol_type = other DNA
tcctcgttagtatagtggtgagtatccccg

SEQ ID NO: 1702 - DNA, 31 bp, synthetic construct
  misc_feature 1..31: note = Probe
  source 1..31: mol_type = other DNA
tcctcgttagtatagtggtgagtatccccgc

SEQ ID NO: 1703 - DNA, 32 bp, synthetic construct
  misc_feature 1..32: note = Probe
  source 1..32: mol_type = other DNA
tcctcgttagtatagtggtgagtatccccgcc

SEQ ID NO: 1704 - DNA, 33 bp, synthetic construct
  misc_feature 1..33: note = Probe
  source 1..33: mol_type = other DNA
tcctcgttagtatagtggtgagtatccccgcct

SEQ ID NO: 1705 - DNA, 34 bp, synthetic construct
  misc_feature 1..34: note = Probe
  source 1..34: mol_type = other DNA
tcctcgttagtatagtggtgagtatccccgcctg

SEQ ID NO: 1706 - DNA, 35 bp, synthetic construct
  misc_feature 1..35: note = Probe
  source 1..35: mol_type = other DNA
tcctcgttagtatagtggtgagtatccccgcctgt

SEQ ID NO: 1707 - DNA, 36 bp, synthetic construct
  misc_feature 1..36: note = Probe
  source 1..36: mol_type = other DNA
tcctcgttagtatagtggtgagtatccccgcctgtc

SEQ ID NO: 1708 - DNA, 37 bp, synthetic construct
  misc_feature 1..37: note = Probe
  source 1..37: mol_type = other DNA
tcctcgttagtatagtggtgagtatccccgcctgtca

SEQ ID NO: 1709 - DNA, 38 bp, synthetic construct
  misc_feature 1..38: note = Probe
  source 1..38: mol_type = other DNA
tcctcgttagtatagtggtgagtatccccgcctgtcac

SEQ ID NO: 1710 - DNA, 39 bp, synthetic construct
  misc_feature 1..39: note = Probe
  source 1..39: mol_type = other DNA
tcctcgttagtatagtggtgagtatccccgcctgtcacg

SEQ ID NO: 1711 - DNA, 50 bp, synthetic construct
  misc_feature 1..50: note = Probe
  source 1..50: mol_type = other DNA
tcctcgttagtatagtggtgagtatccccgcctgtcacgcgggagaccgg

SEQ ID NO: 1712 - DNA, 24 bp, synthetic construct
  misc_feature 1..24: note = Probe
  source 1..24: mol_type = other DNA
tcctcgttagtatagtggttagta

SEQ ID NO: 1713 - DNA, 28 bp, synthetic construct
  misc_feature 1..28: note = Probe
  source 1..28: mol_type = other DNA
tcctcgttagtatagtggttagtatccc

SEQ ID NO: 1714 - DNA, 32 bp, synthetic construct
  misc_feature 1..32: note = Probe
  source 1..32: mol_type = other DNA
tcctcgttagtatagtggttagtatccccgcc

SEQ ID NO: 1715 - DNA, 33 bp, synthetic construct
  misc_feature 1..33: note = Probe
  source 1..33: mol_type = other DNA
tcctcgttagtatagtggttagtatccccgcct

SEQ ID NO: 1716 - DNA, 34 bp, synthetic construct
  misc_feature 1..34: note = Probe
  source 1..34: mol_type = other DNA
tcctcgttagtatagtggttagtatccccgcctg

SEQ ID NO: 1717 - DNA, 35 bp, synthetic construct
  misc_feature 1..35: note = Probe
  source 1..35: mol_type = other DNA
tcctcgttagtatagtggttagtatccccgcctgt

SEQ ID NO: 1718 - DNA, 36 bp, synthetic construct
  misc_feature 1..36: note = Probe
  source 1..36: mol_type = other DNA
tcctcgttagtatagtggttagtatccccgcctgtc

SEQ ID NO: 1719 - DNA, 37 bp, synthetic construct
  misc_feature 1..37: note = Probe
  source 1..37: mol_type = other DNA
tcctcgttagtatagtggttagtatccccgcctgtca

SEQ ID NO: 1720 - DNA, 19 bp, synthetic construct
  misc_feature 1..19: note = Probe
  source 1..19: mol_type = other DNA
tcgaatccgagtcacggca

SEQ ID NO: 1721 - DNA, 20 bp, synthetic construct
  misc_feature 1..20: note = Probe
  source 1..20: mol_type = other DNA
tcgactcccggtgtgggaac

SEQ ID NO: 1722 - DNA, 28 bp, synthetic construct
  misc_feature 1..28: note = Probe
  source 1..28: mol_type = other DNA
tcgcataaaacttaaaactttacagtca

SEQ ID NO: 1723 - DNA, 19 bp, synthetic construct
  misc_feature 1..19: note = Probe
  source 1..19: mol_type = other DNA
tcgggtgcgagaggtcccg

SEQ ID NO: 1724 - DNA, 27 bp, synthetic construct
  misc_feature 1..27: note = Probe
  source 1..27: mol_type = other DNA
tcggtagagcatgggactcttaatccc

SEQ ID NO: 1725 - DNA, 33 bp, synthetic construct
  misc_feature 1..33: note = Probe
  source 1..33: mol_type = other DNA
tcgttagtatagtggtgagtatccccgcctgtc

SEQ ID NO: 1726 - DNA, 33 bp, synthetic construct
  misc_feature 1..33: note = Probe
  source 1..33: mol_type = other DNA
tctcagggatgggttcgattctcatagtcctag

SEQ ID NO: 1727 - DNA, 31 bp, synthetic construct
  misc_feature 1..31: note = Probe
  source 1..31: mol_type = other DNA
tcttttagtataaatagtaccgttaacttcc

SEQ ID NO: 1728 - DNA, 21 bp, synthetic construct
  misc_feature 1..21: note = Probe
  source 1..21: mol_type = other DNA
tgaatccagcgatccgagttc

SEQ ID NO: 1729 - DNA, 22 bp, synthetic construct
  misc_feature 1..22: note = Probe
  source 1..22: mol_type = other DNA
tgaatccagcgatccgagttca

SEQ ID NO: 1730 - DNA, 25 bp, synthetic construct
  misc_feature 1..25: note = Probe
  source 1..25: mol_type = other DNA
tgaatctgacaacagaggcttacga

SEQ ID NO: 1731 - DNA, 27 bp, synthetic construct
  misc_feature 1..27: note = Probe
  source 1..27: mol_type = other DNA
tgaatctgacaacagaggcttacgacc

SEQ ID NO: 1732 - DNA, 28 bp, synthetic construct
  misc_feature 1..28: note = Probe
  source 1..28: mol_type = other DNA
tgaatctgacaacagaggcttacgaccc

SEQ ID NO: 1733 - DNA, 29 bp, synthetic construct
  misc_feature 1..29: note = Probe
  source 1..29: mol_type = other DNA
tgaatctgacaacagaggcttacgacccc

SEQ ID NO: 1734 - DNA, 30 bp, synthetic construct
  misc_feature 1..30: note = Probe
  source 1..30: mol_type = other DNA
tgaatctgacaacagaggcttacgacccct

SEQ ID NO: 1735 - DNA, 31 bp, synthetic construct
  misc_feature 1..31: note = Probe
  source 1..31: mol_type = other DNA
tgaatctgacaacagaggcttacgacccctt

SEQ ID NO: 1736 - DNA, 32 bp, synthetic construct
  misc_feature 1..32: note = Probe
  source 1..32: mol_type = other DNA
tgaatctgacaacagaggcttacgacccctta

SEQ ID NO: 1737 - DNA, 33 bp, synthetic construct
  misc_feature 1..33: note = Probe
  source 1..33: mol_type = other DNA
tgaatctgacaacagaggcttacgaccccttat

SEQ ID NO: 1738 - DNA, 34 bp, synthetic construct
  misc_feature 1..34: note = Probe
  source 1..34: mol_type = other DNA
tgaatctgacaacagaggcttacgaccccttatt

SEQ ID NO: 1739 - DNA, 35 bp, synthetic construct
  misc_feature 1..35: note = Probe
  source 1..35: mol_type = other DNA
tgaatctgacaacagaggcttacgaccccttattt

SEQ ID NO: 1740 - DNA, 36 bp, synthetic construct
  misc_feature 1..36: note = Probe
  source 1..36: mol_type = other DNA
tgaatctgacaacagaggcttacgaccccttattta

SEQ ID NO: 1741 - DNA, 37 bp, synthetic construct
  misc_feature 1..37: note = Probe
  source 1..37: mol_type = other DNA
tgaatctgacaacagaggcttacgaccccttatttac

SEQ ID NO: 1742 - DNA, 38 bp, synthetic construct
  misc_feature 1..38: note = Probe
  source 1..38: mol_type = other DNA
tgaatctgacaacagaggcttacgaccccttatttacc

SEQ ID NO: 1743 - DNA, 26 bp, synthetic construct
  misc_feature 1..26: note = Probe
  source 1..26: mol_type = other DNA
tgacaacagaggcttacgacccctta

SEQ ID NO: 1744 - DNA, 31 bp, synthetic construct
  misc_feature 1..31: note = Probe
  source 1..31: mol_type = other DNA
tgacaacagaggcttacgaccccttatttac

SEQ ID NO: 1745 - DNA, 32 bp, synthetic construct
  misc_feature 1..32: note = Probe
  source 1..32: mol_type = other DNA
tgacaacagaggcttacgaccccttatttacc

SEQ ID NO: 1746 - DNA, 32 bp, synthetic construct
  misc_feature 1..32: note = Probe
  source 1..32: mol_type = other DNA
tgatcgtatagtggttagtactctgcgttgtg

SEQ ID NO: 1747 - DNA, 18 bp, synthetic construct
  misc_feature 1..18: note = Probe
  source 1..18: mol_type = other DNA
tgccgtgatcgtatagtg

SEQ ID NO: 1748 - DNA, 19 bp, synthetic construct
  misc_feature 1..19: note = Probe
  source 1..19: mol_type = other DNA
tgccgtgatcgtatagtgg

SEQ ID NO: 1749 - DNA, 20 bp, synthetic construct
  misc_feature 1..20: note = Probe
  source 1..20: mol_type = other DNA
tgccgtgatcgtatagtggt

SEQ ID NO: 1750 - DNA, 21 bp, synthetic construct
  misc_feature 1..21: note = Probe
  source 1..21: mol_type = other DNA
tgccgtgatcgtatagtggtt

SEQ ID NO: 1751 - DNA, 22 bp, synthetic construct
  misc_feature 1..22: note = Probe
  source 1..22: mol_type = other DNA
tgccgtgatcgtatagtggtta

SEQ ID NO: 1752 - DNA, 23 bp, synthetic construct
  misc_feature 1..23: note = Probe
  source 1..23: mol_type = other DNA
tgccgtgatcgtatagtggttag

SEQ ID NO: 1753 - DNA, 24 bp, synthetic construct
  misc_feature 1..24: note = Probe
  source 1..24: mol_type = other DNA
tgccgtgatcgtatagtggttagt

SEQ ID NO: 1754 - DNA, 33 bp, synthetic construct
  misc_feature 1..33: note = Probe
  source 1..33: mol_type = other DNA
tgccgtgatcgtatagtggttagtactctgcgt

SEQ ID NO: 1755 - DNA, 35 bp, synthetic construct
  misc_feature 1..35: note = Probe
  source 1..35: mol_type = other DNA
tgccgtgatcgtatagtggttagtactctgcgttg

SEQ ID NO: 1756 - DNA, 36 bp, synthetic construct
  misc_feature 1..36: note = Probe
  source 1..36: mol_type = other DNA
tgccgtgatcgtatagtggttagtactctgcgttgt

SEQ ID NO: 1757 - DNA, 37 bp, synthetic construct
  misc_feature 1..37: note = Probe
  source 1..37: mol_type = other DNA
tgccgtgatcgtatagtggttagtactctgcgttgtg

SEQ ID NO: 1758 - DNA, 33 bp, synthetic construct
  misc_feature 1..33: note = Probe
  source 1..33: mol_type = other DNA
tgctaatggtggagttaaagactttttctctga

SEQ ID NO: 1759 - DNA, 23 bp, synthetic construct
  misc_feature 1..23: note = Probe
  source 1..23: mol_type = other DNA
tggccgcagcaacctcggttcga

SEQ ID NO: 1760 - DNA, 17 bp, synthetic construct
  misc_feature 1..17: note = Probe
  source 1..17: mol_type = other DNA
tggggattgtgggttcg

SEQ ID NO: 1761 - DNA, 23 bp, synthetic construct
  misc_feature 1..23: note = Probe
  source 1..23: mol_type = other DNA
tggggattgtgggttcgagtccc

SEQ ID NO: 1762 - DNA, 26 bp, synthetic construct
  misc_feature 1..26: note = Probe
  source 1..26: mol_type = other DNA
tggggattgtgggttcgagtcccatc

SEQ ID NO: 1763 - DNA, 27 bp, synthetic construct
  misc_feature 1..27: note = Probe
  source 1..27: mol_type = other DNA
tggggattgtgggttcgagtcccatct

SEQ ID NO: 1764 - DNA, 29 bp, synthetic construct
  misc_feature 1..29: note = Probe
  source 1..29: mol_type = other DNA
tgggtggttcagtggtagaattctcgcct

SEQ ID NO: 1765 - DNA, 30 bp, synthetic construct
  misc_feature 1..30: note = Probe
  source 1..30: mol_type = other DNA
tgggtggttcagtggtagaattctcgcctg

SEQ ID NO: 1766 - DNA, 31 bp, synthetic construct
  misc_feature 1..31: note = Probe
  source 1..31: mol_type = other DNA
tgggtggttcagtggtagaattctcgcctgc

SEQ ID NO: 1767 - DNA, 32 bp, synthetic construct
  misc_feature 1..32: note = Probe
  source 1..32: mol_type = other DNA
tgggtggttcagtggtagaattctcgcctgcc

SEQ ID NO: 1768 - DNA, 33 bp, synthetic construct
  misc_feature 1..33: note = Probe
  source 1..33: mol_type = other DNA
tggtagaattctcgcctgccacgcgggaggccc

SEQ ID NO: 1769 - DNA, 42 bp, synthetic construct
  misc_feature 1..42: note = Probe
  source 1..42: mol_type = other DNA
tggtatagtggtaagcatagctgccttccaagcagttgaccc

SEQ ID NO: 1770 - DNA, 42 bp, synthetic construct
  misc_feature 1..42: note = Probe
  source 1..42: mol_type = other DNA
tggtatagtggttagcatagctgccttccaagcagttgaccc

SEQ ID NO: 1771 - DNA, 36 bp, synthetic construct
  misc_feature 1..36: note = Probe
  source 1..36: mol_type = other DNA
tggtatatagtttaaacaaaacgaatgatttcgact

SEQ ID NO: 1772 - DNA, 37 bp, synthetic construct
  misc_feature 1..37: note = Probe
  source 1..37: mol_type = other DNA
tggtatatagtttaaacaaaacgaatgatttcgactc

SEQ ID NO: 1773 - DNA, 50 bp, synthetic construct
  misc_feature 1..50: note = Probe
  source 1..50: mol_type = other DNA
tggtatatagtttaaacaaaacgaatgatttcgactcattaaattatgat

SEQ ID NO: 1774 - DNA, 31 bp, synthetic construct
  misc_feature 1..31: note = Probe
  source 1..31: mol_type = other DNA
tggtggtctagtggttaggattcggcgctct

SEQ ID NO: 1775 - DNA, 32 bp, synthetic construct
  misc_feature 1..32: note = Probe
  source 1..32: mol_type = other DNA
tggtggtctagtggttaggattcggcgctctc

SEQ ID NO: 1776 - DNA, 22 bp, synthetic construct
  misc_feature 1..22: note = Probe
  source 1..22: mol_type = other DNA
tggttaggattcggcgctctca

SEQ ID NO: 1777 - DNA, 23 bp, synthetic construct
  misc_feature 1..23: note = Probe
  source 1..23: mol_type = other DNA
tggttaggattcggcgctctcac

SEQ ID NO: 1778 - DNA, 23 bp, synthetic construct
  misc_feature 1..23: note = Probe
  source 1..23: mol_type = other DNA
tggttcaaatccgggtgccccct

SEQ ID NO: 1779 - DNA, 34 bp, synthetic construct
  misc_feature 1..34: note = Probe
  source 1..34: mol_type = other DNA
tgtaaaccggagatgaaaacctttttccaaggac

SEQ ID NO: 1780 - DNA, 35 bp, synthetic construct
  misc_feature 1..35: note = Probe
  source 1..35: mol_type = other DNA
tgtaaaccggagatgaaaacctttttccaaggaca

SEQ ID NO: 1781 - DNA, 23 bp, synthetic construct
  misc_feature 1..23: note = Probe
  source 1..23: mol_type = other DNA
tgtagcggttatcacattcgcct

SEQ ID NO: 1782 - DNA, 40 bp, synthetic construct
  misc_feature 1..40: note = Probe
  source 1..40: mol_type = other DNA
tgtcacgcgggagaccggggttcgattccccgacggggag

SEQ ID NO: 1783 - DNA, 34 bp, synthetic construct
  misc_feature 1..34: note = Probe
  source 1..34: mol_type = other DNA
tgtgaatctgacaacagaggcttacgacccctta

SEQ ID NO: 1784 - DNA, 49 bp, synthetic construct
  misc_feature 1..49: note = Probe
  source 1..49: mol_type = other DNA
ttaaccaaaacatcagattgtgaatctgacaacagaggcttacgacccc

SEQ ID NO: 1785 - DNA, 50 bp, synthetic construct
  misc_feature 1..50: note = Probe
  source 1..50: mol_type = other DNA
ttaaccaaaacatcagattgtgaatctgacaacagaggcttacgacccct

SEQ ID NO: 1786 - DNA, 37 bp, synthetic construct
  misc_feature 1..37: note = Probe
  source 1..37: mol_type = other DNA
ttaaccgaaaggttggtggttcgagcccacccaggga

SEQ ID NO: 1787 - DNA, 41 bp, synthetic construct
  misc_feature 1..41: note = Probe
  source 1..41: mol_type = other DNA
ttaaccgaaaggttggtggttcgagcccacccagggacgcc

SEQ ID NO: 1788 - DNA, 33 bp, synthetic construct
  misc_feature 1..33: note = Probe
  source 1..33: mol_type = other DNA
ttaactaagtgtttgtgggtttaagtcccattg

SEQ ID NO: 1789 - DNA, 36 bp, synthetic construct
  misc_feature 1..36: note = Probe
  source 1..36: mol_type = other DNA
ttaactaagtgtttgtgggtttaagtcccattggtc

SEQ ID NO: 1790 - DNA, 37 bp, synthetic construct
  misc_feature 1..37: note = Probe
  source 1..37: mol_type = other DNA
ttaactaagtgtttgtgggtttaagtcccattggtct

SEQ ID NO: 1791 - DNA, 38 bp, synthetic construct
  misc_feature 1..38: note = Probe
  source 1..38: mol_type = other DNA
ttaactaagtgtttgtgggtttaagtcccattggtcta

SEQ ID NO: 1792 - DNA, 27 bp, synthetic construct
  misc_feature 1..27: note = Probe
  source 1..27: mol_type = other DNA
ttacagtcagaggttcaattcctcttc

SEQ ID NO: 1793 - DNA, 50 bp, synthetic construct
  misc_feature 1..50: note = Probe
  source 1..50: mol_type = other DNA
ttagaatcttagctttgggtgctaatggtggagttaaagactttttctct

SEQ ID NO: 1794 - DNA, 23 bp, synthetic construct
  misc_feature 1..23: note = Probe
  source 1..23: mol_type = other DNA
ttagagccagactgcctgggttt

SEQ ID NO: 1795 - DNA, 50 bp, synthetic construct
  misc_feature 1..50: note = Probe
  source 1..50: mol_type = other DNA
ttagcattaaccttttaagttaaagattaagagaaccaacacctctttac

SEQ ID NO: 1796 - DNA, 35 bp, synthetic construct
  misc_feature 1..35: note = Probe
  source 1..35: mol_type = other DNA
ttcagttgatgcagagtggggttttgcagtcctta

SEQ ID NO: 1797 - DNA, 29 bp, synthetic construct
  misc_feature 1..29: note = Probe
  source 1..29: mol_type = other DNA
ttccatagtgtagtggttatcacgtctgc

SEQ ID NO: 1798 - DNA, 23 bp, synthetic construct
  misc_feature 1..23: note = Probe
  source 1..23: mol_type = other DNA
ttccccgcacaggttcgaatcct

SEQ ID NO: 1799 - DNA, 35 bp, synthetic construct
  misc_feature 1..35: note = Probe
  source 1..35: mol_type = other DNA
ttgtaaaccggagatgaaaacctttttccaaggac

SEQ ID NO: 1800 - DNA, 36 bp, synthetic construct
  misc_feature 1..36: note = Probe
  source 1..36: mol_type = other DNA
ttgtaaaccggagatgaaaacctttttccaaggaca

SEQ ID NO: 1801 - DNA, 50 bp, synthetic construct
  misc_feature 1..50: note = Probe
  source 1..50: mol_type = other DNA
tttaaccaaaacatcagattgtgaatctgacaacagaggcttacgacccc

SEQ ID NO: 1802 - DNA, 19 bp, synthetic construct
  misc_feature 1..19: note = Probe
  source 1..19: mol_type = other DNA
tttgggtgcgagaggtccc

SEQ ID NO: 1803 - DNA, 25 bp, synthetic construct
  misc_feature 1..25: note = Probe
  source 1..25: mol_type = other DNA
aaaaattttggtgcaactccaaata

SEQ ID NO: 1804 - DNA, 25 bp, synthetic construct
  misc_feature 1..25: note = Probe
  source 1..25: mol_type = other DNA
aaaacatcagattgtgaatctgaca

SEQ ID NO: 1805 - DNA, 33 bp, synthetic construct
  misc_feature 1..33: note = Probe
  source 1..33: mol_type = other DNA
aaaacatcagattgtgaatctgacaacagaggc

SEQ ID NO: 1806 - DNA, 34 bp, synthetic construct
  misc_feature 1..34: note = Probe
  source 1..34: mol_type = other DNA
aaaacatcagattgtgaatctgacaacagaggct

SEQ ID NO: 1807 - DNA, 35 bp, synthetic construct
  misc_feature 1..35: note = Probe
  source 1..35: mol_type = other DNA
aaaacatcagattgtgaatctgacaacagaggctt

SEQ ID NO: 1808 - DNA, 38 bp, synthetic construct
  misc_feature 1..38: note = Probe
  source 1..38: mol_type = other DNA
aaaacatcagattgtgaatctgacaacagaggcttacg

SEQ ID NO: 1809 - DNA, 40 bp, synthetic construct
  misc_feature 1..40: note = Probe
  source 1..40: mol_type = other DNA
aaaacatcagattgtgaatctgacaacagaggcttacgac

SEQ ID NO: 1810 - DNA, 44 bp, synthetic construct
  misc_feature 1..44: note = Probe
  source 1..44: mol_type = other DNA
aaaacatcagattgtgaatctgacaacagaggcttacgacccct

SEQ ID NO: 1811 - DNA, 48 bp, synthetic construct
  misc_feature 1..48: note = Probe
  source 1..48: mol_type = other DNA
aaaacatcagattgtgaatctgacaacagaggcttacgaccccttatt

SEQ ID NO: 1812 - DNA, 49 bp, synthetic construct
  misc_feature 1..49: note = Probe
  source 1..49: mol_type = other DNA
aaaacatcagattgtgaatctgacaacagaggcttacgaccccttattt

SEQ ID NO: 1813 - DNA, 23 bp, synthetic construct
  misc_feature 1..23: note = Probe
  source 1..23: mol_type = other DNA
aaaacctttttccaaggacaaat

SEQ ID NO: 1814 - DNA, 33 bp, synthetic construct
  misc_feature 1..33: note = Probe
  source 1..33: mol_type = other DNA
aaaacgaatgatttcgactcattaaattatgat

SEQ ID NO: 1815 - DNA, 34 bp, synthetic construct
  misc_feature 1..34: note = Probe
  source 1..34: mol_type = other DNA
aaaacgaatgatttcgactcattaaattatgata

SEQ ID NO: 1816 - DNA, 46 bp, synthetic construct
  misc_feature 1..46: note = Probe
  source 1..46: mol_type = other DNA
aaaacgaatgatttcgactcattaaattatgataatcatatttacc

SEQ ID NO: 1817 - DNA, 49 bp, synthetic construct
  misc_feature 1..49: note = Probe
  source 1..49: mol_type = other DNA
aaaacgaatgatttcgactcattaaattatgataatcatatttaccaaa

SEQ ID NO: 1818 - DNA, 50 bp, synthetic construct
  misc_feature 1..50: note = Probe
  source 1..50: mol_type = other DNA
aaaacgaatgatttcgactcattaaattatgataatcatatttaccaaat

SEQ ID NO: 1819 - DNA, 17 bp, synthetic construct
  misc_feature 1..17: note = Probe
  source 1..17: mol_type = other DNA
aaaacttaaaactttac

SEQ ID NO: 1820 - DNA, 29 bp, synthetic construct
  misc_feature 1..29: note = Probe
  source 1..29: mol_type = other DNA
aaaacttaaaactttacagtcagaggttc

SEQ ID NO: 1821 - DNA, 30 bp, synthetic construct
  misc_feature 1..30: note = Probe
  source 1..30: mol_type = other DNA
aaaacttaaaactttacagtcagaggttca

SEQ ID NO: 1822 - DNA, 31 bp, synthetic construct
  misc_feature 1..31: note = Probe
  source 1..31: mol_type = other DNA
aaaacttaaaactttacagtcagaggttcaa

SEQ ID NO: 1823 - DNA, 41 bp, synthetic construct
  misc_feature 1..41: note = Probe
  source 1..41: mol_type = other DNA
aaaacttaaaactttacagtcagaggttcaattcctcttct

SEQ ID NO: 1824 - DNA, 42 bp, synthetic construct
  misc_feature 1..42: note = Probe
  source 1..42: mol_type = other DNA
aaaacttaaaactttacagtcagaggttcaattcctcttctt

SEQ ID NO: 1825 - DNA, 43 bp, synthetic construct
  misc_feature 1..43: note = Probe
  source 1..43: mol_type = other DNA
aaaacttaaaactttacagtcagaggttcaattcctcttctta

SEQ ID NO: 1826 - DNA, 44 bp, synthetic construct
  misc_feature 1..44: note = Probe
  source 1..44: mol_type = other DNA
aaaacttaaaactttacagtcagaggttcaattcctcttcttaa

SEQ ID NO: 1827 - DNA, 45 bp, synthetic construct
  misc_feature 1..45: note = Probe
  source 1..45: mol_type = other DNA
aaaacttaaaactttacagtcagaggttcaattcctcttcttaac

SEQ ID NO: 1828 - DNA, 46 bp, synthetic construct
  misc_feature 1..46: note = Probe
  source 1..46: mol_type = other DNA
aaaacttaaaactttacagtcagaggttcaattcctcttcttaaca

SEQ ID NO: 1829 - DNA, 49 bp, synthetic construct
  misc_feature 1..49: note = Probe
  source 1..49: mol_type = other DNA
aaaacttaaaactttacagtcagaggttcaattcctcttcttaacaaca

SEQ ID NO: 1830 - DNA, 50 bp, synthetic construct
  misc_feature 1..50: note = Probe
  source 1..50: mol_type = other DNA
aaaacttaaaactttacagtcagaggttcaattcctcttcttaacaacat

SEQ ID NO: 1831 - DNA, 34 bp, synthetic construct
  misc_feature 1..34: note = Probe
  source 1..34: mol_type = other DNA
aaaactttacagtcagaggttcaattcctcttct

SEQ ID NO: 1832 - DNA, 35 bp, synthetic construct
  misc_feature 1..35: note = Probe
  source 1..35: mol_type = other DNA
aaaactttacagtcagaggttcaattcctcttctt

SEQ ID NO: 1833 - DNA, 38 bp, synthetic construct
  misc_feature 1..38: note = Probe
  source 1..38: mol_type = other DNA
aaaactttacagtcagaggttcaattcctcttcttaac

SEQ ID NO: 1834 - DNA, 39 bp, synthetic construct
  misc_feature 1..39: note = Probe
  source 1..39: mol_type = other DNA
aaaactttacagtcagaggttcaattcctcttcttaaca

SEQ ID NO: 1835 - DNA, 40 bp, synthetic construct
  misc_feature 1..40: note = Probe
  source 1..40: mol_type = other DNA
aaaactttacagtcagaggttcaattcctcttcttaacaa

SEQ ID NO: 1836 - DNA, 41 bp, synthetic construct
  misc_feature 1..41: note = Probe
  source 1..41: mol_type = other DNA
aaaactttacagtcagaggttcaattcctcttcttaacaac

SEQ ID NO: 1837 - DNA, 42 bp, synthetic construct
  misc_feature 1..42: note = Probe
  source 1..42: mol_type = other DNA
aaaactttacagtcagaggttcaattcctcttcttaacaaca

SEQ ID NO: 1838 - DNA, 50 bp, synthetic construct
  misc_feature 1..50: note = Probe
  source 1..50: mol_type = other DNA
aaaagagttactttgatagagtaaataataggagcttaaacccccttatt

SEQ ID NO: 1839 - DNA, 25 bp, synthetic construct
  misc_feature 1..25: note = Probe
  source 1..25: mol_type = other DNA
aaaatgtttagacgggctcacatca

SEQ ID NO: 1840 - DNA, 31 bp, synthetic construct
  misc_feature 1..31: note = Probe
  source 1..31: mol_type = other DNA
aaaatgtttagacgggctcacatcaccccat

SEQ ID NO: 1841 - DNA, 39 bp, synthetic construct
  misc_feature 1..39: note = Probe
  source 1..39: mol_type = other DNA
aaaatgtttagacgggctcacatcaccccataaacaaat

SEQ ID NO: 1842 - DNA, 40 bp, synthetic construct
  misc_feature 1..40: note = Probe
  source 1..40: mol_type = other DNA
aaaatgtttagacgggctcacatcaccccataaacaaata

SEQ ID NO: 1843 - DNA, 24 bp, synthetic construct
  misc_feature 1..24: note = Probe
  source 1..24: mol_type = other DNA
aaaattttggtgcaactccaaata

SEQ ID NO: 1844 - DNA, 32 bp, synthetic construct
  misc_feature 1..32: note = Probe
  source 1..32: mol_type = other DNA
aaaattttggtgcaactccaaataaaagtaat

SEQ ID NO: 1845 - DNA, 37 bp, synthetic construct
  misc_feature 1..37: note = Probe
  source 1..37: mol_type = other DNA
aaacaaaacgaatgatttcgactcattaaattatgat

SEQ ID NO: 1846 - DNA, 50 bp, synthetic construct
  misc_feature 1..50: note = Probe
  source 1..50: mol_type = other DNA
aaacaaaacgaatgatttcgactcattaaattatgataatcatatttacc

SEQ ID NO: 1847 - DNA, 40 bp, synthetic construct
  misc_feature 1..40: note = Probe
  source 1..40: mol_type = other DNA
aaacaggagatcctgggttcgaatcccagcggtgcctccg

SEQ ID NO: 1848 - DNA, 24 bp, synthetic construct
  misc_feature 1..24: note = Probe
  source 1..24: mol_type = other DNA
aaacatcagattgtgaatctgaca

SEQ ID NO: 1849 - DNA, 27 bp, synthetic construct
  misc_feature 1..27: note = Probe
  source 1..27: mol_type = other DNA
aaacatcagattgtgaatctgacaaca

SEQ ID NO: 1850 - DNA, 32 bp, synthetic construct
  misc_feature 1..32: note = Probe
  source 1..32: mol_type = other DNA
aaacatcagattgtgaatctgacaacagaggc

SEQ ID NO: 1851 - DNA, 43 bp, synthetic construct
  misc_feature 1..43: note = Probe
  source 1..43: mol_type = other DNA
aaacatcagattgtgaatctgacaacagaggcttacgacccct

SEQ ID NO: 1852 - DNA, 46 bp, synthetic construct
  misc_feature 1..46: note = Probe
  source 1..46: mol_type = other DNA
aaacatcagattgtgaatctgacaacagaggcttacgaccccttat

SEQ ID NO: 1853 - DNA, 49 bp, synthetic construct
  misc_feature 1..49: note = Probe
  source 1..49: mol_type = other DNA
aaacatcagattgtgaatctgacaacagaggcttacgaccccttattta

SEQ ID NO: 1854 - DNA, 40 bp, synthetic construct
  misc_feature 1..40: note = Probe
  source 1..40: mol_type = other DNA
aaaccaggggtcgcgagttcaattctcgctggggcctgtg

SEQ ID NO: 1855 - DNA, 17 bp, synthetic construct
  misc_feature 1..17: note = Probe
  source 1..17: mol_type = other DNA
aaaccatttcataactt

SEQ ID NO: 1856 - DNA, 20 bp, synthetic construct
  misc_feature 1..20: note = Probe
  source 1..20: mol_type = other DNA
aaaccatttcataactttgt

SEQ ID NO: 1857 - DNA, 21 bp, synthetic construct
  misc_feature 1..21: note = Probe
  source 1..21: mol_type = other DNA
aaaccatttcataactttgtc

SEQ ID NO: 1858 - DNA, 23 bp, synthetic construct
  misc_feature 1..23: note = Probe
  source 1..23: mol_type = other DNA
aaaccatttcataactttgtcaa

SEQ ID NO: 1859 - DNA, 24 bp, synthetic construct
  misc_feature 1..24: note = Probe
  source 1..24: mol_type = other DNA
aaaccatttcataactttgtcaaa

SEQ ID NO: 1860 - DNA, 25 bp, synthetic construct
  misc_feature 1..25: note = Probe
  source 1..25: mol_type = other DNA
aaaccatttcataactttgtcaaag

SEQ ID NO: 1861 - DNA, 26 bp, synthetic construct
  misc_feature 1..26: note = Probe
  source 1..26: mol_type = other DNA
aaaccatttcataactttgtcaaagt

SEQ ID NO: 1862 - DNA, 27 bp, synthetic construct
  misc_feature 1..27: note = Probe
  source 1..27: mol_type = other DNA
aaaccatttcataactttgtcaaagtt

SEQ ID NO: 1863 - DNA, 28 bp, synthetic construct
  misc_feature 1..28: note = Probe
  source 1..28: mol_type = other DNA
aaaccatttcataactttgtcaaagtta

SEQ ID NO: 1864 - DNA, 29 bp, synthetic construct
  misc_feature 1..29: note = Probe
  source 1..29: mol_type = other DNA
aaaccatttcataactttgtcaaagttaa

SEQ ID NO: 1865 - DNA, 30 bp, synthetic construct
  misc_feature 1..30: note = Probe
  source 1..30: mol_type = other DNA
aaaccatttcataactttgtcaaagttaaa

SEQ ID NO: 1866 - DNA, 32 bp, synthetic construct
  misc_feature 1..32: note = Probe
  source 1..32: mol_type = other DNA
aaaccatttcataactttgtcaaagttaaatt

SEQ ID NO: 1867 - DNA, 39 bp, synthetic construct
  misc_feature 1..39: note = Probe
  source 1..39: mol_type = other DNA
aaaccatttcataactttgtcaaagttaaattataggct

SEQ ID NO: 1868 - DNA, 45 bp, synthetic construct
  misc_feature 1..45: note = Probe
  source 1..45: mol_type = other DNA
aaaccatttcataactttgtcaaagttaaattataggctaaatcc

SEQ ID NO: 1869 - DNA, 46 bp, synthetic construct
  misc_feature 1..46: note = Probe
  source 1..46: mol_type = other DNA
aaaccatttcataactttgtcaaagttaaattataggctaaatcct

SEQ ID NO: 1870 - DNA, 49 bp, synthetic construct
  misc_feature 1..49: note = Probe
  source 1..49: mol_type = other DNA
aaaccatttcataactttgtcaaagttaaattataggctaaatcctata

SEQ ID NO: 1871 - DNA, 50 bp, synthetic construct
  misc_feature 1..50: note = Probe
  source 1..50: mol_type = other DNA
aaaccatttcataactttgtcaaagttaaattataggctaaatcctatat

SEQ ID NO: 1872 - DNA, 15 bp, synthetic construct
  misc_feature 1..15: note = Probe
  source 1..15: mol_type = other DNA
aaacccactccacct

SEQ ID NO: 1873 - DNA, 31 bp, synthetic construct
  misc_feature 1..31: note = Probe
  source 1..31: mol_type = other DNA
aaaccggagatgaaaacctttttccaaggac

SEQ ID NO: 1874 - DNA, 33 bp, synthetic construct
  misc_feature 1..33: note = Probe
  source 1..33: mol_type = other DNA
aaaccggagatgaaaacctttttccaaggacaa

SEQ ID NO: 1875 - DNA, 34 bp, synthetic construct
  misc_feature 1..34: note = Probe
  source 1..34: mol_type = other DNA
aaaccggagatgaaaacctttttccaaggacaaa

SEQ ID NO: 1876 - DNA, 35 bp, synthetic construct
  misc_feature 1..35: note = Probe
  source 1..35: mol_type = other DNA
aaaccggagatgaaaacctttttccaaggacaaat

SEQ ID NO: 1877 - DNA, 36 bp, synthetic construct
  misc_feature 1..36: note = Probe
  source 1..36: mol_type = other DNA
aaaccggagatgaaaacctttttccaaggacaaatc

SEQ ID NO: 1878 - DNA, 19 bp, synthetic construct
  misc_feature 1..19: note = Probe
  source 1..19: mol_type = other DNA
aaaccgggcggaaacacct

SEQ ID NO: 1879 - DNA, 20 bp, synthetic construct
  misc_feature 1..20: note = Probe
  source 1..20: mol_type = other DNA
aaaccgggcggaaacacgtt

SEQ ID NO: 1880 - DNA, 20 bp, synthetic construct
  misc_feature 1..20: note = Probe
  source 1..20: mol_type = other DNA
aaaccgggcggaaacaggta

SEQ ID NO: 1881 - DNA, 27 bp, synthetic construct
  misc_feature 1..27: note = Probe
  source 1..27: mol_type = other DNA
aaacctagccccaaacccactccacct

SEQ ID NO: 1882 - DNA, 29 bp, synthetic construct
  misc_feature 1..29: note = Probe
  source 1..29: mol_type = other DNA
aaacctgccggggcttctcccgccttttt

SEQ ID NO: 1883 - DNA, 45 bp, synthetic construct
  misc_feature 1..45: note = Probe
  source 1..45: mol_type = other DNA
aaacgaatgatttcgactcattaaattatgataatcatatttacc

SEQ ID NO: 1884 - DNA, 49 bp, synthetic construct
  misc_feature 1..49: note = Probe
  source 1..49: mol_type = other DNA
aaacgaatgatttcgactcattaaattatgataatcatatttaccaaat

SEQ ID NO: 1885 - DNA, 50 bp, synthetic construct
  misc_feature 1..50: note = Probe
  source 1..50: mol_type = other DNA
aaacgaatgatttcgactcattaaattatgataatcatatttaccaaatg

SEQ ID NO: 1886 - DNA, 40 bp, synthetic construct
  misc_feature 1..40: note = Probe
  source 1..40: mol_type = other DNA
aaacttaaaactttacagtcagaggttcaattcctcttct

SEQ ID NO: 1887 - DNA, 41 bp, synthetic construct
  misc_feature 1..41: note = Probe
  source 1..41: mol_type = other DNA
aaacttaaaactttacagtcagaggttcaattcctcttctt

SEQ ID NO: 1888 - DNA, 44 bp, synthetic construct
  misc_feature 1..44: note = Probe
  source 1..44: mol_type = other DNA
aaacttaaaactttacagtcagaggttcaattcctcttcttaac

SEQ ID NO: 1889 - DNA, 49 bp, synthetic construct
  misc_feature 1..49: note = Probe
  source 1..49: mol_type = other DNA
aaacttaaaactttacagtcagaggttcaattcctcttcttaacaacat

SEQ ID NO: 1890 - DNA, 50 bp, synthetic construct
  misc_feature 1..50: note = Probe
  source 1..50: mol_type = other DNA
aaacttaaaactttacagtcagaggttcaattcctcttcttaacaacata

SEQ ID NO: 1891 - DNA, 31 bp, synthetic construct
  misc_feature 1..31: note = Probe
  source 1..31: mol_type = other DNA
aaactttacagtcagaggttcaattcctctt

SEQ ID NO: 1892 - DNA, 33 bp, synthetic construct
  misc_feature 1..33: note = Probe
  source 1..33: mol_type = other DNA
aaactttacagtcagaggttcaattcctcttct

SEQ ID NO: 1893 - DNA, 34 bp, synthetic construct
  misc_feature 1..34: note = Probe
  source 1..34: mol_type = other DNA
aaactttacagtcagaggttcaattcctcttctt

SEQ ID NO: 1894 - DNA, 35 bp, synthetic construct
  misc_feature 1..35: note = Probe
  source 1..35: mol_type = other DNA
aaactttacagtcagaggttcaattcctcttctta

SEQ ID NO: 1895 - DNA, 38 bp, synthetic construct
  misc_feature 1..38: note = Probe
  source 1..38: mol_type = other DNA
aaactttacagtcagaggttcaattcctcttcttaaca

SEQ ID NO: 1896 - DNA, 39 bp, synthetic construct
  misc_feature 1..39: note = Probe
  source 1..39: mol_type = other DNA
aaactttacagtcagaggttcaattcctcttcttaacaa

SEQ ID NO: 1897 - DNA, 40 bp, synthetic construct
  misc_feature 1..40: note = Probe
  source 1..40: mol_type = other DNA
aaactttacagtcagaggttcaattcctcttcttaacaac

SEQ ID NO: 1898 - DNA, 41 bp, synthetic construct
  misc_feature 1..41: note = Probe
  source 1..41: mol_type = other DNA
aaactttacagtcagaggttcaattcctcttcttaacaaca

SEQ ID NO: 1899 - DNA, 39 bp, synthetic construct
  misc_feature 1..39: note = Probe
  source 1..39: mol_type = other DNA
aaagaacagagaatagtttaaattagaatcttagctttg

SEQ ID NO: 1900 - DNA, 16 bp, synthetic construct
  misc_feature 1..16: note = Probe
  source 1..16: mol_type = other DNA
aaagacaccccccaca

SEQ ID NO: 1901 - DNA, 17 bp, synthetic construct
  misc_feature 1..17: note = Probe
  source 1..17: mol_type = other DNA
aaagacaccccccacag

SEQ ID NO: 1902 - DNA, 19 bp, synthetic construct
  misc_feature 1..19: note = Probe
  source 1..19: mol_type = other DNA
aaagacaccccccacagtt

SEQ ID NO: 1903 - DNA, 21 bp, synthetic construct
  misc_feature 1..21: note = Probe
  source 1..21: mol_type = other DNA
aaagacaccccccacagttta

SEQ ID NO: 1904 - DNA, 27 bp, synthetic construct
  misc_feature 1..27: note = Probe
  source 1..27: mol_type = other DNA
aaagacaccccccacagtttatgtagc

SEQ ID NO: 1905 - DNA, 28 bp, synthetic construct
  misc_feature 1..28: note = Probe
  source 1..28: mol_type = other DNA
aaagacaccccccacagtttatgtagct

SEQ ID NO: 1906 - DNA, 29 bp, synthetic construct
  misc_feature 1..29: note = Probe
  source 1..29: mol_type = other DNA
aaagacaccccccacagtttatgtagctt

SEQ ID NO: 1907 - DNA, 30 bp, synthetic construct
  misc_feature 1..30: note = Probe
  source 1..30: mol_type = other DNA
aaagacaccccccacagtttatgtagctta

SEQ ID NO: 1908 - DNA, 32 bp, synthetic construct
  misc_feature 1..32: note = Probe
  source 1..32: mol_type = other DNA
aaagacaccccccacagtttatgtagcttacc

SEQ ID NO: 1909 - DNA, 33 bp, synthetic construct
  misc_feature 1..33: note = Probe
  source 1..33: mol_type = other DNA
aaagacaccccccacagtttatgtagcttacct

SEQ ID NO: 1910 - DNA, 35 bp, synthetic construct
  misc_feature 1..35: note = Probe
  source 1..35: mol_type = other DNA
aaagacaccccccacagtttatgtagcttacctcc

SEQ ID NO: 1911 - DNA, 36 bp, synthetic construct
  misc_feature 1..36: note = Probe
  source 1..36: mol_type = other DNA
aaagacaccccccacagtttatgtagcttacctcct

SEQ ID NO: 1912 - DNA, 37 bp, synthetic construct
  misc_feature 1..37: note = Probe
  source 1..37: mol_type = other DNA
aaagacaccccccacagtttatgtagcttacctcctc

SEQ ID NO: 1913 - DNA, 38 bp, synthetic construct
  misc_feature 1..38: note = Probe
  source 1..38: mol_type = other DNA
aaagacaccccccacagtttatgtagcttacctcctca

SEQ ID NO: 1914 - DNA, 39 bp, synthetic construct
  misc_feature 1..39: note = Probe
  source 1..39: mol_type = other DNA
aaagacaccccccacagtttatgtagcttacctcctcaa

SEQ ID NO: 1915 - DNA, 43 bp, synthetic construct
  misc_feature 1..43: note = Probe
  source 1..43: mol_type = other DNA
aaagacaccccccacagtttatgtagcttacctcctcaaagca

SEQ ID NO: 1916 - DNA, 46 bp, synthetic construct
  misc_feature 1..46: note = Probe
  source 1..46: mol_type = other DNA
aaagacaccccccacagtttatgtagcttacctcctcaaagcaata

SEQ ID NO: 1917 - DNA, 49 bp, synthetic construct
  misc_feature 1..49: note = Probe
  source 1..49: mol_type = other DNA
aaagacaccccccacagtttatgtagcttacctcctcaaagcaatacac

SEQ ID NO: 1918 - DNA, 50 bp, synthetic construct
  misc_feature 1..50: note = Probe
  source 1..50: mol_type = other DNA
aaagacaccccccacagtttatgtagcttacctcctcaaagcaatacact

SEQ ID NO: 1919 - DNA, 22 bp, synthetic construct
  misc_feature 1..22: note = Probe
  source 1..22: mol_type = other DNA
aaagacaggggttaggcctctt

SEQ ID NO: 1920 - DNA, 23 bp, synthetic construct
  misc_feature 1..23: note = Probe
  source 1..23: mol_type = other DNA
aaagacaggggttaggcctcttt

SEQ ID NO: 1921 - DNA, 24 bp, synthetic construct
  misc_feature 1..24: note = Probe
  source 1..24: mol_type = other DNA
aaagacaggggttaggcctctttt

SEQ ID NO: 1922 - DNA, 25 bp, synthetic construct
  misc_feature 1..25: note = Probe
  source 1..25: mol_type = other DNA
aaagacaggggttaggcctcttttt

SEQ ID NO: 1923 - DNA, 28 bp, synthetic construct
  misc_feature 1..28: note = Probe
  source 1..28: mol_type = other DNA
aaagacaggggttaggcctctttttacc

SEQ ID NO: 1924 - DNA, 31 bp, synthetic construct
  misc_feature 1..31: note = Probe
  source 1..31: mol_type = other DNA
aaagacaggggttaggcctctttttaccagc

SEQ ID NO: 1925 - DNA, 32 bp, synthetic construct
  misc_feature 1..32: note = Probe
  source 1..32: mol_type = other DNA
aaagacaggggttaggcctctttttaccagct

SEQ ID NO: 1926 - DNA, 33 bp, synthetic construct
  misc_feature 1..33: note = Probe
  source 1..33: mol_type = other DNA
aaagattaagagaaccaacacctctttacagtg

SEQ ID NO: 1927 - DNA, 34 bp, synthetic construct
  misc_feature 1..34: note = Probe
  source 1..34: mol_type = other DNA
aaagattaagagaaccaacacctctttacagtga

SEQ ID NO: 1928 - DNA, 35 bp, synthetic construct
  misc_feature 1..35: note = Probe
  source 1..35: mol_type = other DNA
aaagattaagagaaccaacacctctttacagtgaa

SEQ ID NO: 1929 - DNA, 36 bp, synthetic construct
  misc_feature 1..36: note = Probe
  source 1..36: mol_type = other DNA
aaagattaagagaaccaacacctctttacagtgaaa

SEQ ID NO: 1930 - DNA, 37 bp, synthetic construct
  misc_feature 1..37: note = Probe
  source 1..37: mol_type = other DNA
aaagattaagagaaccaacacctctttacagtgaaat

SEQ ID NO: 1931 - DNA, 16 bp, synthetic construct
  misc_feature 1..16: note = Probe
  source 1..16: mol_type = other DNA
aaagcaatacactgaa

SEQ ID NO: 1932 - DNA, 29 bp, synthetic construct
  misc_feature 1..29: note = Probe
  source 1..29: mol_type = other DNA
aaagcaatacactgaaaatgtttagacgg

SEQ ID NO: 1933 - DNA, 31 bp, synthetic construct
  misc_feature 1..31: note = Probe
  source 1..31: mol_type = other DNA
aaagcaatacactgaaaatgtttagacgggc

SEQ ID NO: 1934 - DNA, 32 bp, synthetic construct
  misc_feature 1..32: note = Probe
  source 1..32: mol_type = other DNA
aaagcaatacactgaaaatgtttagacgggct

SEQ ID NO: 1935 - DNA, 33 bp, synthetic construct
  misc_feature 1..33: note = Probe
  source 1..33: mol_type = other DNA
aaagcaatacactgaaaatgtttagacgggctc

SEQ ID NO: 1936 - DNA, 37 bp, synthetic construct
  misc_feature 1..37: note = Probe
  source 1..37: mol_type = other DNA
aaagcaatacactgaaaatgtttagacgggctcacat

SEQ ID NO: 1937 - DNA, 38 bp, synthetic construct
  misc_feature 1..38: note = Probe
  source 1..38: mol_type = other DNA
aaagcaatacactgaaaatgtttagacgggctcacatc

SEQ ID NO: 1938 - DNA, 39 bp, synthetic construct
  misc_feature 1..39: note = Probe
  source 1..39: mol_type = other DNA
aaagcaatacactgaaaatgtttagacgggctcacatca

SEQ ID NO: 1939 - DNA, 43 bp, synthetic construct
  misc_feature 1..43: note = Probe
  source 1..43: mol_type = other DNA
aaagcaatacactgaaaatgtttagacgggctcacatcacccc

SEQ ID NO: 1940 - DNA, 46 bp, synthetic construct
  misc_feature 1..46: note = Probe
  source 1..46: mol_type = other DNA
aaagcaatacactgaaaatgtttagacgggctcacatcaccccata

SEQ ID NO: 1941 - DNA, 48 bp, synthetic construct
  misc_feature 1..48: note = Probe
  source 1..48: mol_type = other DNA
aaagcaatacactgaaaatgtttagacgggctcacatcaccccataaa

SEQ ID NO: 1942 - DNA, 16 bp, synthetic construct
  misc_feature 1..16: note = Probe
  source 1..16: mol_type = other DNA
aaagcacccaacttac

SEQ ID NO: 1943 - DNA, 17 bp, synthetic construct
  misc_feature 1..17: note = Probe
  source 1..17: mol_type = other DNA
aaagcacccaacttaca

SEQ ID NO: 1944 - DNA, 18 bp, synthetic construct
  misc_feature 1..18: note = Probe
  source 1..18: mol_type = other DNA
aaagcacccaacttacac

SEQ ID NO: 1945 - DNA, 19 bp, synthetic construct
  misc_feature 1..19: note = Probe
  source 1..19: mol_type = other DNA
aaagcacccaacttacact

SEQ ID NO: 1946 - DNA, 20 bp, synthetic construct
  misc_feature 1..20: note = Probe
  source 1..20: mol_type = other DNA
aaagcacccaacttacactt

SEQ ID NO: 1947 - DNA, 21 bp, synthetic construct
  misc_feature 1..21: note = Probe
  source 1..21: mol_type = other DNA
aaagcacccaacttacactta

SEQ ID NO: 1948 - DNA, 23 bp, synthetic construct
  misc_feature 1..23: note = Probe
  source 1..23: mol_type = other DNA
aaagcacccaacttacacttagg

SEQ ID NO: 1949 - DNA, 24 bp, synthetic construct
  misc_feature 1..24: note = Probe
  source 1..24: mol_type = other DNA
aaagcacccaacttacacttagga

SEQ ID NO: 1950 - DNA, 25 bp, synthetic construct
  misc_feature 1..25: note = Probe
  source 1..25: mol_type = other DNA
aaagcacccaacttacacttaggag

SEQ ID NO: 1951 - DNA, 26 bp, synthetic construct
  misc_feature 1..26: note = Probe
  source 1..26: mol_type = other DNA
aaagcacccaacttacacttaggaga

SEQ ID NO: 1952 - DNA, 28 bp, synthetic construct
  misc_feature 1..28: note = Probe
  source 1..28: mol_type = other DNA
aaagcacccaacttacacttaggagatt

SEQ ID NO: 1953 - DNA, 30 bp, synthetic construct
  misc_feature 1..30: note = Probe
  source 1..30: mol_type = other DNA
aaagcacccaacttacacttaggagatttc

SEQ ID NO: 1954 - DNA, 31 bp, synthetic construct
  misc_feature 1..31: note = Probe
  source 1..31: mol_type = other DNA
aaagcacccaacttacacttaggagatttca

SEQ ID NO: 1955 - DNA, 33 bp, synthetic construct
  misc_feature 1..33: note = Probe
  source 1..33: mol_type = other DNA
aaagcacccaacttacacttaggagatttcaac

SEQ ID NO: 1956 - DNA, 37 bp, synthetic construct
  misc_feature 1..37: note = Probe
  source 1..37: mol_type = other DNA
aaagcacccaacttacacttaggagatttcaacttaa

SEQ ID NO: 1957 - DNA, 39 bp, synthetic construct
  misc_feature 1..39: note = Probe
  source 1..39: mol_type = other DNA
aaagcacccaacttacacttaggagatttcaacttaact

SEQ ID NO: 1958 - DNA, 43 bp, synthetic construct
  misc_feature 1..43: note = Probe
  source 1..43: mol_type = other DNA
aaagcacccaacttacacttaggagatttcaacttaacttgac

SEQ ID NO: 1959 - DNA, 45 bp, synthetic construct
  misc_feature 1..45: note = Probe
  source 1..45: mol_type = other DNA
aaagcacccaacttacacttaggagatttcaacttaacttgaccg

SEQ ID NO: 1960 - DNA, 46 bp, synthetic construct
  misc_feature 1..46: note = Probe
  source 1..46: mol_type = other DNA
aaagcacccaacttacacttaggagatttcaacttaacttgaccgc

SEQ ID NO: 1961 - DNA, 49 bp, synthetic construct
  misc_feature 1..49: note = Probe
  source 1..49: mol_type = other DNA
aaagcacccaacttacacttaggagatttcaacttaacttgaccgctct

SEQ ID NO: 1962 - DNA, 50 bp, synthetic construct
  misc_feature 1..50: note = Probe
  source 1..50: mol_type = other DNA
aaagcacccaacttacacttaggagatttcaacttaacttgaccgctctg

SEQ ID NO: 1963 - DNA, 20 bp, synthetic construct
  misc_feature 1..20: note = Probe
  source 1..20: mol_type = other DNA
aaagcatgctccagtggcgc

SEQ ID NO: 1964 - DNA, 24 bp, synthetic construct
  misc_feature 1..24: note = Probe
  source 1..24: mol_type = other DNA
aaagcatgctccagtggcgcaatc

SEQ ID NO: 1965 - DNA, 50 bp, synthetic construct
  misc_feature 1..50: note = Probe
  source 1..50: mol_type = other DNA
aaagctaacttagcattaaccttttaagttaaagattaagagaaccaaca

SEQ ID NO: 1966 - DNA, 27 bp, synthetic construct
  misc_feature 1..27: note = Probe
  source 1..27: mol_type = other DNA
aaagctcacaagaactgctaactcatg

SEQ ID NO: 1967 - DNA, 33 bp, synthetic construct
  misc_feature 1..33: note = Probe
  source 1..33: mol_type = other DNA
aaagctcacaagaactgctaactcatgccccca

SEQ ID NO: 1968 - DNA, 31 bp, synthetic construct
  misc_feature 1..31: note = Probe
  source 1..31: mol_type = other DNA
aaaggttggtggttcgagcccacccagggac

SEQ ID NO: 1969 - DNA, 50 bp, synthetic construct
  misc_feature 1..50: note = Probe
  source 1..50: mol_type = other DNA
aaagtaaggtcagctaaataagctatcgggcccataccccgaaaatgttg

SEQ ID NO: 1970 - DNA, 23 bp, synthetic construct
  misc_feature 1..23: note = Probe
  source 1..23: mol_type = other DNA
aaagtcatggaggccatggggtt

SEQ ID NO: 1971 - DNA, 24 bp, synthetic construct
  misc_feature 1..24: note = Probe
  source 1..24: mol_type = other DNA
aaagtcatggaggccatggggttg

SEQ ID NO: 1972 - DNA, 30 bp, synthetic construct
  misc_feature 1..30: note = Probe
  source 1..30: mol_type = other DNA
aaagttaaattataggctaaatcctatata

SEQ ID NO: 1973 - DNA, 32 bp, synthetic construct
  misc_feature 1..32: note = Probe
  source 1..32: mol_type = other DNA
aaagttaaattataggctaaatcctatatatc

SEQ ID NO: 1974 - DNA, 19 bp, synthetic construct
  misc_feature 1..19: note = Probe
  source 1..19: mol_type = other DNA
aaataagctatcgggccca

SEQ ID NO: 1975 - DNA, 22 bp, synthetic construct
  misc_feature 1..22: note = Probe
  source 1..22: mol_type = other DNA
aaataagctatcgggcccatac

SEQ ID NO: 1976 - DNA, 24 bp, synthetic construct
  misc_feature 1..24: note = Probe
  source 1..24: mol_type = other DNA
aaataagctatcgggcccataccc

SEQ ID NO: 1977 - DNA, 25 bp, synthetic construct
  misc_feature 1..25: note = Probe
  source 1..25: mol_type = other DNA
aaataagctatcgggcccatacccc

SEQ ID NO: 1978 - DNA, 26 bp, synthetic construct
  misc_feature 1..26: note = Probe
  source 1..26: mol_type = other DNA
aaataagctatcgggcccataccccg

SEQ ID NO: 1979 - DNA, 27 bp, synthetic construct
  misc_feature 1..27: note = Probe
  source 1..27: mol_type = other DNA
aaataagctatcgggcccataccccga

SEQ ID NO: 1980 - DNA, 28 bp, synthetic construct
  misc_feature 1..28: note = Probe
  source 1..28: mol_type = other DNA
aaataagctatcgggcccataccccgaa

SEQ ID NO: 1981 - DNA, 29 bp, synthetic construct
  misc_feature 1..29: note = Probe
  source 1..29: mol_type = other DNA
aaataagctatcgggcccataccccgaaa

SEQ ID NO: 1982 - DNA, 30 bp, synthetic construct
  misc_feature 1..30: note = Probe
  source 1..30: mol_type = other DNA
aaataagctatcgggcccataccccgaaaa

SEQ ID NO: 1983 - DNA, 31 bp, synthetic construct
  misc_feature 1..31: note = Probe
  source 1..31: mol_type = other DNA
aaataagctatcgggcccataccccgaaaat

SEQ ID NO: 1984 - DNA, 32 bp, synthetic construct
  misc_feature 1..32: note = Probe
  source 1..32: mol_type = other DNA
aaataagctatcgggcccataccccgaaaatg

SEQ ID NO: 1985 - DNA, 33 bp, synthetic construct
  misc_feature 1..33: note = Probe
  source 1..33: mol_type = other DNA
aaataagctatcgggcccataccccgaaaatgt

SEQ ID NO: 1986 - DNA, 36 bp, synthetic construct
  misc_feature 1..36: note = Probe
  source 1..36: mol_type = other DNA
aaataagctatcgggcccataccccgaaaatgttgg

SEQ ID NO: 1987 - DNA, 39 bp, synthetic construct
  misc_feature 1..39: note = Probe
  source 1..39: mol_type = other DNA
aaataagctatcgggcccataccccgaaaatgttggtta

SEQ ID NO: 1988 - DNA, 49 bp, synthetic construct
  misc_feature 1..49: note = Probe
  source 1..49: mol_type = other DNA
aaataagctatcgggcccataccccgaaaatgttggttatacccttccc

SEQ ID NO: 1989 - DNA, 50 bp, synthetic construct
  misc_feature 1..50: note = Probe
  source 1..50: mol_type = other DNA
aaataagctatcgggcccataccccgaaaatgttggttatacccttcccg

SEQ ID NO: 1990 - DNA, 33 bp, synthetic construct
  misc_feature 1..33: note = Probe
  source 1..33: mol_type = other DNA
aaataataggagcttaaacccccttatttctag

SEQ ID NO: 1991 - DNA, 21 bp, synthetic construct
  misc_feature 1..21: note = Probe
  source 1..21: mol_type = other DNA
aaatacagaccaagagccttc

SEQ ID NO: 1992 - DNA, 50 bp, synthetic construct
  misc_feature 1..50: note = Probe
  source 1..50: mol_type = other DNA
aaatagtaccgttaacttccaattaactagttttgacaacattcaaaaaa

SEQ ID NO: 1993 - DNA, 40 bp, synthetic construct
  misc_feature 1..40: note = Probe
  source 1..40: mol_type = other DNA
aaatatagtttaaccaaaacatcagattgtgaatctgaca

SEQ ID NO: 1994 - DNA, 27 bp, synthetic construct
  misc_feature 1..27: note = Probe
  source 1..27: mol_type = other DNA
aaatctaaagacaggggttaggcctct

SEQ ID NO: 1995 - DNA, 29 bp, synthetic construct
  misc_feature 1..29: note = Probe
  source 1..29: mol_type = other DNA
aaatctaaagacaggggttaggcctcttt

SEQ ID NO: 1996 - DNA, 30 bp, synthetic construct
  misc_feature 1..30: note = Probe
  source 1..30: mol_type = other DNA
aaatctaaagacaggggttaggcctctttt

SEQ ID NO: 1997 - DNA, 31 bp, synthetic construct
  misc_feature 1..31: note = Probe
  source 1..31: mol_type = other DNA
aaatctaaagacaggggttaggcctcttttt

SEQ ID NO: 1998 - DNA, 32 bp, synthetic construct
  misc_feature 1..32: note = Probe
  source 1..32: mol_type = other DNA
aaatctaaagacaggggttaggcctcttttta

SEQ ID NO: 1999 - DNA, 33 bp, synthetic construct
  misc_feature 1..33: note = Probe
  source 1..33: mol_type = other DNA
aaatctaaagacaggggttaggcctctttttac

SEQ ID NO: 2000 - DNA, 36 bp, synthetic construct
  misc_feature 1..36: note = Probe
  source 1..36: mol_type = other DNA
aaatctaaagacaggggttaggcctctttttaccag

SEQ ID NO: 2001 - DNA, 37 bp, synthetic construct
  misc_feature 1..37: note = Probe
  source 1..37: mol_type = other DNA
aaatctaaagacaggggttaggcctctttttaccagc

SEQ ID NO: 2002 - DNA, 38 bp, synthetic construct
  misc_feature 1..38: note = Probe
  source 1..38: mol_type = other DNA
aaatctaaagacaggggttaggcctctttttaccagct

SEQ ID NO: 2003 - DNA, 39 bp, synthetic construct
  misc_feature 1..39: note = Probe
  source 1..39: mol_type = other DNA
aaatctaaagacaggggttaggcctctttttaccagctc

SEQ ID NO: 2004 - DNA, 27 bp, synthetic construct
  misc_feature 1..27: note = Probe
  source 1..27: mol_type = other DNA
aaatgtttagacgggctcacatcaccc

SEQ ID NO: 2005 - DNA, 39 bp, synthetic construct
  misc_feature 1..39: note = Probe
  source 1..39: mol_type = other DNA
aaatgtttagacgggctcacatcaccccataaacaaata

SEQ ID NO: 2006 - DNA, 31 bp, synthetic construct
  misc_feature 1..31: note = Probe
  source 1..31: mol_type = other DNA
aaattcgaagaagcagcttcaaacctgccgg

SEQ ID NO: 2007 - DNA, 37 bp, synthetic construct
  misc_feature 1..37: note = Probe
  source 1..37: mol_type = other DNA
aaattcgaagaagcagcttcaaacctgccggggcttc

SEQ ID NO: 2008 - DNA, 38 bp, synthetic construct
  misc_feature 1..38: note = Probe
  source 1..38: mol_type = other DNA
aaattcgaagaagcagcttcaaacctgccggggcttct

SEQ ID NO: 2009 - DNA, 39 bp, synthetic construct
  misc_feature 1..39: note = Probe
  source 1..39: mol_type = other DNA
aaattcgaagaagcagcttcaaacctgccggggcttctc

SEQ ID NO: 2010 - DNA, 50 bp, synthetic construct
  misc_feature 1..50: note = Probe
  source 1..50: mol_type = other DNA
aaattcgaagaagcagcttcaaacctgccggggcttctcccgcctttttt

SEQ ID NO: 2011 - DNA, 23 bp, synthetic construct
  misc_feature 1..23: note = Probe
  source 1..23: mol_type = other DNA
aaattttggtgcaactccaaata

SEQ ID NO: 2012 - DNA, 49 bp, synthetic construct
  misc_feature 1..49: note = Probe
  source 1..49: mol_type = other DNA
aacaaaacgaatgatttcgactcattaaattatgataatcatatttacc

SEQ ID NO: 2013 - DNA, 50 bp, synthetic construct
  misc_feature 1..50: note = Probe
  source 1..50: mol_type = other DNA
aacaaaacgaatgatttcgactcattaaattatgataatcatatttacca

SEQ ID NO: 2014 - DNA, 20 bp, synthetic construct
  misc_feature 1..20: note = Probe
  source 1..20: mol_type = other DNA
aacaacatggctttctcaac

SEQ ID NO: 2015 - DNA, 16 bp, synthetic construct
  misc_feature 1..16: note = Probe
  source 1..16: mol_type = other DNA
aacacaaagcacccaa

SEQ ID NO: 2016 - DNA, 17 bp, synthetic construct
  misc_feature 1..17: note = Probe
  source 1..17: mol_type = other DNA
aacacaaagcacccaac

SEQ ID NO: 2017 - DNA, 18 bp, synthetic construct
  misc_feature 1..18: note = Probe
  source 1..18: mol_type = other DNA
aacacaaagcacccaact

SEQ ID NO: 2018 - DNA, 19 bp, synthetic construct
  misc_feature 1..19: note = Probe
  source 1..19: mol_type = other DNA
aacacaaagcacccaactt

SEQ ID NO: 2019 - DNA, 21 bp, synthetic construct
  misc_feature 1..21: note = Probe
  source 1..21: mol_type = other DNA
aacacaaagcacccaacttac

SEQ ID NO: 2020 - DNA, 22 bp, synthetic construct
  misc_feature 1..22: note = Probe
  source 1..22: mol_type = other DNA
aacacaaagcacccaacttaca

SEQ ID NO: 2021 - DNA, 24 bp, synthetic construct
  misc_feature 1..24: note = Probe
  source 1..24: mol_type = other DNA
aacacaaagcacccaacttacact

SEQ ID NO: 2022 - DNA, 25 bp, synthetic construct
  misc_feature 1..25: note = Probe
  source 1..25: mol_type = other DNA
aacacaaagcacccaacttacactt

SEQ ID NO: 2023 - DNA, 26 bp, synthetic construct
  misc_feature 1..26: note = Probe
  source 1..26: mol_type = other DNA
aacacaaagcacccaacttacactta

SEQ ID NO: 2024 - DNA, 27 bp, synthetic construct
  misc_feature 1..27: note = Probe
  source 1..27: mol_type = other DNA
aacacaaagcacccaacttacacttag

SEQ ID NO: 2025 - DNA, 28 bp, synthetic construct
  misc_feature 1..28: note = Probe
  source 1..28: mol_type = other DNA
aacacaaagcacccaacttacacttagg

SEQ ID NO: 2026 - DNA, 29 bp, synthetic construct
  misc_feature 1..29: note = Probe
  source 1..29: mol_type = other DNA
aacacaaagcacccaacttacacttagga

SEQ ID NO: 2027 - DNA, 30 bp, synthetic construct
  misc_feature 1..30: note = Probe
  source 1..30: mol_type = other DNA
aacacaaagcacccaacttacacttaggag

SEQ ID NO: 2028 - DNA, 31 bp, synthetic construct
  misc_feature 1..31: note = Probe
  source 1..31: mol_type = other DNA
aacacaaagcacccaacttacacttaggaga

SEQ ID NO: 2029 - DNA, 32 bp, synthetic construct
  misc_feature 1..32: note = Probe
  source 1..32: mol_type = other DNA
aacacaaagcacccaacttacacttaggagat

SEQ ID NO: 2030 - DNA, 33 bp, synthetic construct
  misc_feature 1..33: note = Probe
  source 1..33: mol_type = other DNA
aacacaaagcacccaacttacacttaggagatt

SEQ ID NO: 2031 - DNA, 36 bp, synthetic construct
  misc_feature 1..36: note = Probe
  source 1..36: mol_type = other DNA
aacacaaagcacccaacttacacttaggagatttca

SEQ ID NO: 2032 - DNA, 37 bp, synthetic construct
  misc_feature 1..37: note = Probe
  source 1..37: mol_type = other DNA
aacacaaagcacccaacttacacttaggagatttcaa

SEQ ID NO: 2033 - DNA, 38 bp, synthetic construct
  misc_feature 1..38: note = Probe
  source 1..38: mol_type = other DNA
aacacaaagcacccaacttacacttaggagatttcaac

SEQ ID NO: 2034 - DNA, 39 bp, synthetic construct
  misc_feature 1..39: note = Probe
  source 1..39: mol_type = other DNA
aacacaaagcacccaacttacacttaggagatttcaact

SEQ ID NO: 2035 - DNA, 40 bp, synthetic construct
  misc_feature 1..40: note = Probe
  source 1..40: mol_type = other DNA
aacacaaagcacccaacttacacttaggagatttcaactt

SEQ ID NO: 2036 - DNA, 49 bp, synthetic construct
  misc_feature 1..49: note = Probe
  source 1..49: mol_type = other DNA
aacacaaagcacccaacttacacttaggagatttcaacttaacttgacc

SEQ ID NO: 2037 - DNA, 20 bp, synthetic construct
  misc_feature 1..20: note = Probe
  source 1..20: mol_type = other DNA
aacacctctttacagtgaaa

SEQ ID NO: 2038 - DNA, 21 bp, synthetic construct
  misc_feature 1..21: note = Probe
  source 1..21: mol_type = other DNA
aacacctctttacagtgaaat

SEQ ID NO: 2039 - DNA, 31 bp, synthetic construct
  misc_feature 1..31: note = Probe
  source 1..31: mol_type = other DNA
aacagaggcttacgaccccttatttaccgag

SEQ ID NO: 2040 - DNA, 25 bp, synthetic construct
  misc_feature 1..25: note = Probe
  source 1..25: mol_type = other DNA
aacagctaaggactgcaaaacccca

SEQ ID NO: 2041 - DNA, 17 bp, synthetic construct
  misc_feature 1..17: note = Probe
  source 1..17: mol_type = other DNA
aacagctatccattggt

SEQ ID NO: 2042 - DNA, 19 bp, synthetic construct
  misc_feature 1..19: note = Probe
  source 1..19: mol_type = other DNA
aacagctatccattggtct

SEQ ID NO: 2043 - DNA, 20 bp, synthetic construct
  misc_feature 1..20: note = Probe
  source 1..20: mol_type = other DNA
aacagctatccattggtctt

SEQ ID NO: 2044 - DNA, 50 bp, synthetic construct
  misc_feature 1..50: note = Probe
  source 1..50: mol_type = other DNA
aacagctatccattggtcttaggccccaaaaattttggtgcaactccaaa

SEQ ID NO: 2045 - DNA, 21 bp, synthetic construct
  misc_feature 1..21: note = Probe
  source 1..21: mol_type = other DNA
aacaggagatcctgggttcga

SEQ ID NO: 2046 - DNA, 39 bp, synthetic construct
  misc_feature 1..39: note = Probe
  source 1..39: mol_type = other DNA
aacaggagatcctgggttcgaatcccagcggggccttac

SEQ ID NO: 2047 - DNA, 33 bp, synthetic construct
  misc_feature 1..33: note = Probe
  source 1..33: mol_type = other DNA
aacaggagatcctgggttcgaatcccagcggtg

SEQ ID NO: 2048 - DNA, 34 bp, synthetic construct
  misc_feature 1..34: note = Probe
  source 1..34: mol_type = other DNA
aacaggagatcctgggttcgaatcccagcggtgc

SEQ ID NO: 2049 - DNA, 36 bp, synthetic construct
  misc_feature 1..36: note = Probe
  source 1..36: mol_type = other DNA
aacaggagatcctgggttcgaatcccagcggtgcct

SEQ ID NO: 2050 - DNA, 37 bp, synthetic construct
  misc_feature 1..37: note = Probe
  source 1..37: mol_type = other DNA
aacaggagatcctgggttcgaatcccagcggtgcctc

SEQ ID NO: 2051 - DNA, 39 bp, synthetic construct
  misc_feature 1..39: note = Probe
  source 1..39: mol_type = other DNA
aacaggagatcctgggttcgaatcccagcggtgcctccg

SEQ ID NO: 2052 - DNA, 39 bp, synthetic construct
  misc_feature 1..39: note = Probe
  source 1..39: mol_type = other DNA
aacaggagatcctgggttcgactcccagcggggccttgg

SEQ ID NO: 2053 - DNA, 23 bp, synthetic construct
  misc_feature 1..23: note = Probe
  source 1..23: mol_type = other DNA
aacatcagattgtgaatctgaca

SEQ ID NO: 2054 - DNA, 32 bp, synthetic construct
  misc_feature 1..32: note = Probe
  source 1..32: mol_type = other DNA
aacatcagattgtgaatctgacaacagaggct

SEQ ID NO: 2055 - DNA, 33 bp, synthetic construct
  misc_feature 1..33: note = Probe
  source 1..33: mol_type = other DNA
aacatcagattgtgaatctgacaacagaggctt

SEQ ID NO: 2056 - DNA, 41 bp, synthetic construct
  misc_feature 1..41: note = Probe
  source 1..41: mol_type = other DNA
aacatcagattgtgaatctgacaacagaggcttacgacccc

SEQ ID NO: 2057 - DNA, 42 bp, synthetic construct
  misc_feature 1..42: note = Probe
  source 1..42: mol_type = other DNA
aacatcagattgtgaatctgacaacagaggcttacgacccct

SEQ ID NO: 2058 - DNA, 45 bp, synthetic construct
  misc_feature 1..45: note = Probe
  source 1..45: mol_type = other DNA
aacatcagattgtgaatctgacaacagaggcttacgaccccttat

SEQ ID NO: 2059 - DNA, 46 bp, synthetic construct
  misc_feature 1..46: note = Probe
  source 1..46: mol_type = other DNA
aacatcagattgtgaatctgacaacagaggcttacgaccccttatt

SEQ ID NO: 2060 - DNA, 49 bp, synthetic construct
  misc_feature 1..49: note = Probe
  source 1..49: mol_type = other DNA
aacatcagattgtgaatctgacaacagaggcttacgaccccttatttac

SEQ ID NO: 2061 - DNA, 24 bp, synthetic construct
  misc_feature 1..24: note = Probe
  source 1..24: mol_type = other DNA
aaccaaaacatcagattgtgaatc

SEQ ID NO: 2062 - DNA, 29 bp, synthetic construct
  misc_feature 1..29: note = Probe
  source 1..29: mol_type = other DNA
aaccaaaacatcagattgtgaatctgaca

SEQ ID NO: 2063 - DNA, 30 bp, synthetic construct
  misc_feature 1..30: note = Probe
  source 1..30: mol_type = other DNA
aaccaaaacatcagattgtgaatctgacaa

SEQ ID NO: 2064 - DNA, 31 bp, synthetic construct
  misc_feature 1..31: note = Probe
  source 1..31: mol_type = other DNA
aaccaaaacatcagattgtgaatctgacaac

SEQ ID NO: 2065 - DNA, 32 bp, synthetic construct
  misc_feature 1..32: note = Probe
  source 1..32: mol_type = other DNA
aaccaaaacatcagattgtgaatctgacaaca

SEQ ID NO: 2066 - DNA, 33 bp, synthetic construct
  misc_feature 1..33: note = Probe
  source 1..33: mol_type = other DNA
aaccaaaacatcagattgtgaatctgacaacag

SEQ ID NO: 2067 - DNA, 36 bp, synthetic construct
  misc_feature 1..36: note = Probe
  source 1..36: mol_type = other DNA
aaccaaaacatcagattgtgaatctgacaacagagg

SEQ ID NO: 2068 - DNA, 37 bp, synthetic construct
  misc_feature 1..37: note = Probe
  source 1..37: mol_type = other DNA
aaccaaaacatcagattgtgaatctgacaacagaggc

SEQ ID NO: 2069 - DNA, 38 bp, synthetic construct
  misc_feature 1..38: note = Probe
  source 1..38: mol_type = other DNA
aaccaaaacatcagattgtgaatctgacaacagaggct

SEQ ID NO: 2070 - DNA, 39 bp, synthetic construct
  misc_feature 1..39: note = Probe
  source 1..39: mol_type = other DNA
aaccaaaacatcagattgtgaatctgacaacagaggctt

SEQ ID NO: 2071 - DNA, 47 bp, synthetic construct
  misc_feature 1..47: note = Probe
  source 1..47: mol_type = other DNA
aaccaaaacatcagattgtgaatctgacaacagaggcttacgacccc

SEQ ID NO: 2072 - DNA, 48 bp, synthetic construct
  misc_feature 1..48: note = Probe
  source 1..48: mol_type = other DNA
aaccaaaacatcagattgtgaatctgacaacagaggcttacgacccct

SEQ ID NO: 2073 - DNA, 23 bp, synthetic construct
  misc_feature 1..23: note = Probe
  source 1..23: mol_type = other DNA
aaccaacacctctttacagtgaa

SEQ ID NO: 2074 - DNA, 24 bp, synthetic construct
  misc_feature 1..24: note = Probe
  source 1..24: mol_type = other DNA
aaccaacacctctttacagtgaaa

SEQ ID NO: 2075 - DNA, 25 bp, synthetic construct
  misc_feature 1..25: note = Probe
  source 1..25: mol_type = other DNA
aaccaacacctctttacagtgaaat

SEQ ID NO: 2076 - DNA, 50 bp, synthetic construct
  misc_feature 1..50: note = Probe
  source 1..50: mol_type = other DNA
aaccagagtgtagcttaacacaaagcacccaacttacacttaggagattt

SEQ ID NO: 2077 - DNA, 19 bp, synthetic construct
  misc_feature 1..19: note = Probe
  source 1..19: mol_type = other DNA
aaccagctttggggggttc

SEQ ID NO: 2078 - DNA, 37 bp, synthetic construct
  misc_feature 1..37: note = Probe
  source 1..37: mol_type = other DNA
aaccaggggtcgcgagttcaaatctcgctggggcctc

SEQ ID NO: 2079 - DNA, 39 bp, synthetic construct
  misc_feature 1..39: note = Probe
  source 1..39: mol_type = other DNA
aaccaggggtcgcgagttcaaatctcgctggggcctcgg

SEQ ID NO: 2080 - DNA, 39 bp, synthetic construct
  misc_feature 1..39: note = Probe
  source 1..39: mol_type = other DNA
aaccaggggtcgcgagttcaattctcgctggggcctgtg

SEQ ID NO: 2081 - DNA, 39 bp, synthetic construct
  misc_feature 1..39: note = Probe
  source 1..39: mol_type = other DNA
aaccaggggtcgcgagttcgatcctcgctggggcctcct

SEQ ID NO: 2082 - DNA, 19 bp, synthetic construct
  misc_feature 1..19: note = Probe
  source 1..19: mol_type = other DNA
aaccatttcataactttgt

SEQ ID NO: 2083 - DNA, 23 bp, synthetic construct
  misc_feature 1..23: note = Probe
  source 1..23: mol_type = other DNA
aaccatttcataactttgtcaaa

SEQ ID NO: 2084 - DNA, 25 bp, synthetic construct
  misc_feature 1..25: note = Probe
  source 1..25: mol_type = other DNA
aaccatttcataactttgtcaaagt

SEQ ID NO: 2085 - DNA, 49 bp, synthetic construct
  misc_feature 1..49: note = Probe
  source 1..49: mol_type = other DNA
aaccatttcataactttgtcaaagttaaattataggctaaatcctatat

SEQ ID NO: 2086 - DNA, 40 bp, synthetic construct
  misc_feature 1..40: note = Probe
  source 1..40: mol_type = other DNA
aacccagaggtcgatggatcgaaaccatcctctgctaggt

SEQ ID NO: 2087 - DNA, 15 bp, synthetic construct
  misc_feature 1..15: note = Probe
  source 1..15: mol_type = other DNA
aacccatccctgaga

SEQ ID NO: 2088 - DNA, 40 bp, synthetic construct
  misc_feature 1..40: note = Probe
  source 1..40: mol_type = other DNA
aaccgaaaggttggtggttcgagcccacccagggacgcct

SEQ ID NO: 2089 - DNA, 22 bp, synthetic construct
  misc_feature 1..22: note = Probe
  source 1..22: mol_type = other DNA
aaccgaagatcacgggttcgaa

SEQ ID NO: 2090 - DNA, 39 bp, synthetic construct
  misc_feature 1..39: note = Probe
  source 1..39: mol_type = other DNA
aaccgaagatcacgggttcgaaccccgtccgtgcctgat

SEQ ID NO: 2091 - DNA, 22 bp, synthetic construct
  misc_feature 1..22: note = Probe
  source 1..22: mol_type = other DNA
aaccgaagatcgcgggttcgaa

SEQ ID NO: 2092 - DNA, 21 bp, synthetic construct
  misc_feature 1..21: note = Probe
  source 1..21: mol_type = other DNA
aaccgagcgtccaagctcttt

SEQ ID NO: 2093 - DNA, 22 bp, synthetic construct
  misc_feature 1..22: note = Probe
  source 1..22: mol_type = other DNA
aaccgagcgtccaagctctttc

SEQ ID NO: 2094 - DNA, 23 bp, synthetic construct
  misc_feature 1..23: note = Probe
  source 1..23: mol_type = other DNA
aaccgagcgtccaagctctttcc

SEQ ID NO: 2095 - DNA, 24 bp, synthetic construct
  misc_feature 1..24: note = Probe
  source 1..24: mol_type = other DNA
aaccgagcgtccaagctctttcca

SEQ ID NO: 2096 - DNA, 25 bp, synthetic construct
  misc_feature 1..25: note = Probe
  source 1..25: mol_type = other DNA
aaccgagcgtccaagctctttccat

SEQ ID NO: 2097 - DNA, 26 bp, synthetic construct
  misc_feature 1..26: note = Probe
  source 1..26: mol_type = other DNA
aaccgagcgtccaagctctttccatt

SEQ ID NO: 2098 - DNA, 27 bp, synthetic construct
  misc_feature 1..27: note = Probe
  source 1..27: mol_type = other DNA
aaccgagcgtccaagctctttccattt

SEQ ID NO: 2099 - DNA, 23 bp, synthetic construct
  misc_feature 1..23: note = Probe
  source 1..23: mol_type = other DNA
aaccggagatgaaaacctttttc

SEQ ID NO: 2100 - DNA, 25 bp, synthetic construct
  misc_feature 1..25: note = Probe
  source 1..25: mol_type = other DNA
aaccggagatgaaaacctttttcca

SEQ ID NO: 2101 - DNA, 27 bp, synthetic construct
  misc_feature 1..27: note = Probe
  source 1..27: mol_type = other DNA
aaccggagatgaaaacctttttccaag

SEQ ID NO: 2102 - DNA, 32 bp, synthetic construct
  misc_feature 1..32: note = Probe
  source 1..32: mol_type = other DNA
aaccggagatgaaaacctttttccaaggacaa

SEQ ID NO: 2103 - DNA, 33 bp, synthetic construct
  misc_feature 1..33: note = Probe
  source 1..33: mol_type = other DNA
aaccggagatgaaaacctttttccaaggacaaa

SEQ ID NO: 2104 - DNA, 34 bp, synthetic construct
  misc_feature 1..34: note = Probe
  source 1..34: mol_type = other DNA
aaccggagatgaaaacctttttccaaggacaaat

SEQ ID NO: 2105 - DNA, 35 bp, synthetic construct
  misc_feature 1..35: note = Probe
  source 1..35: mol_type = other DNA
aaccggagatgaaaacctttttccaaggacaaatc

SEQ ID NO: 2106 - DNA, 36 bp, synthetic construct
  misc_feature 1..36: note = Probe
  source 1..36: mol_type = other DNA
aaccggagatgaaaacctttttccaaggacaaatca

SEQ ID NO: 2107 - DNA, 19 bp, synthetic construct
  misc_feature 1..19: note = Probe
  source 1..19: mol_type = other DNA
aaccgggcggaaacacact

SEQ ID NO: 2108 - DNA, 18 bp, synthetic construct
  misc_feature 1..18: note = Probe
  source 1..18: mol_type = other DNA
aaccgggcggaaacacct

SEQ ID NO: 2109 - DNA, 19 bp, synthetic construct
  misc_feature 1..19: note = Probe
  source 1..19: mol_type = other DNA
aaccgggcggaaacacctc

SEQ ID NO: 2110 - DNA, 20 bp, synthetic construct
  misc_feature 1..20: note = Probe
  source 1..20: mol_type = other DNA
aaccgggcggaaacacctcc

SEQ ID NO: 2111 - DNA, 21 bp, synthetic construct
  misc_feature 1..21: note = Probe
  source 1..21: mol_type = other DNA
aaccgggcggaaacacctcct

SEQ ID NO: 2112 - DNA, 19 bp, synthetic construct
  misc_feature 1..19: note = Probe
  source 1..19: mol_type = other DNA
aaccgggcggaaacacgtt

SEQ ID NO: 2113 - DNA, 20 bp, synthetic construct
  misc_feature 1..20: note = Probe
  source 1..20: mol_type = other DNA
aaccgggcggaaacacgttt

SEQ ID NO: 2114 - DNA, 21 bp, synthetic construct
  misc_feature 1..21: note = Probe
  source 1..21: mol_type = other DNA
aaccgggcggaaacacgtttt

SEQ ID NO: 2115 - DNA, 22 bp, synthetic construct
  misc_feature 1..22: note = Probe
  source 1..22: mol_type = other DNA
aaccgggcggaaacacgttttt

SEQ ID NO: 2116 - DNA, 23 bp, synthetic construct
  misc_feature 1..23: note = Probe
  source 1..23: mol_type = other DNA
aaccgggcggaaacacgtttttt

SEQ ID NO: 2117 - DNA, 26 bp, synthetic construct
  misc_feature 1..26: note = Probe
  source 1..26: mol_type = other DNA
aacctagccccaaacccactccacct

SEQ ID NO: 2118 - DNA, 31 bp, synthetic construct
  misc_feature 1..31: note = Probe
  source 1..31: mol_type = other DNA
aacctcggttcgaatccgagtcacggcaggt

SEQ ID NO: 2119 - DNA, 31 bp, synthetic construct
  misc_feature 1..31: note = Probe
  source 1..31: mol_type = other DNA
aacctcggttcgaatccgagtcacggcattg

SEQ ID NO: 2120 - DNA, 29 bp, synthetic construct
  misc_feature 1..29: note = Probe
  source 1..29: mol_type = other DNA
aaccttttaagttaaagattaagagaacc

SEQ ID NO: 2121 - DNA, 50 bp, synthetic construct
  misc_feature 1..50: note = Probe
  source 1..50: mol_type = other DNA
aaccttttaagttaaagattaagagaaccaacacctctttacagtgaaat

SEQ ID NO: 2122 - DNA, 32 bp, synthetic construct
  misc_feature 1..32: note = Probe
  source 1..32: mol_type = other DNA
aacgaatgatttcgactcattaaattatgata

SEQ ID NO: 2123 - DNA, 48 bp, synthetic construct
  misc_feature 1..48: note = Probe
  source 1..48: mol_type = other DNA
aacgaatgatttcgactcattaaattatgataatcatatttaccaaat

SEQ ID NO: 2124 - DNA, 49 bp, synthetic construct
  misc_feature 1..49: note = Probe
  source 1..49: mol_type = other DNA
aacgaatgatttcgactcattaaattatgataatcatatttaccaaatg

SEQ ID NO: 2125 - DNA, 50 bp, synthetic construct
  misc_feature 1..50: note = Probe
  source 1..50: mol_type = other DNA
aacgaatgatttcgactcattaaattatgataatcatatttaccaaatgc

SEQ ID NO: 2126 - DNA, 20 bp, synthetic construct
  misc_feature 1..20: note = Probe
  source 1..20: mol_type = other DNA
aactaagtgtttgtgggttt

SEQ ID NO: 2127 - DNA, 31 bp, synthetic construct
  misc_feature 1..31: note = Probe
  source 1..31: mol_type = other DNA
aactaagtgtttgtgggtttaagtcccattg

SEQ ID NO: 2128 - DNA, 33 bp, synthetic construct
  misc_feature 1..33: note = Probe
  source 1..33: mol_type = other DNA
aactaagtgtttgtgggtttaagtcccattggt

SEQ ID NO: 2129 - DNA, 34 bp, synthetic construct
  misc_feature 1..34: note = Probe
  source 1..34: mol_type = other DNA
aactaagtgtttgtgggtttaagtcccattggtc

SEQ ID NO: 2130 - DNA, 39 bp, synthetic construct
  misc_feature 1..39: note = Probe
  source 1..39: mol_type = other DNA
aactaagtgtttgtgggtttaagtcccattggtctagta

SEQ ID NO: 2131 - DNA, 40 bp, synthetic construct
  misc_feature 1..40: note = Probe
  source 1..40: mol_type = other DNA
aactaagtgtttgtgggtttaagtcccattggtctagtaa

SEQ ID NO: 2132 - DNA, 32 bp, synthetic construct
  misc_feature 1..32: note = Probe
  source 1..32: mol_type = other DNA
aactagttttgacaacattcaaaaaagagtaa

SEQ ID NO: 2133 - DNA, 17 bp, synthetic construct
  misc_feature 1..17: note = Probe
  source 1..17: mol_type = other DNA
aactcatgcccccatgt

SEQ ID NO: 2134 - DNA, 18 bp, synthetic construct
  misc_feature 1..18: note = Probe
  source 1..18: mol_type = other DNA
aactcatgcccccatgtc

SEQ ID NO: 2135 - DNA, 19 bp, synthetic construct
  misc_feature 1..19: note = Probe
  source 1..19: mol_type = other DNA
aactcatgcccccatgtct

SEQ ID NO: 2136 - DNA, 20 bp, synthetic construct
  misc_feature 1..20: note = Probe
  source 1..20: mol_type = other DNA
aactcatgcccccatgtcta

SEQ ID NO: 2137 - DNA, 21 bp, synthetic construct
  misc_feature 1..21: note = Probe
  source 1..21: mol_type = other DNA
aactcatgcccccatgtctaa

SEQ ID NO: 2138 - DNA, 23 bp, synthetic construct
  misc_feature 1..23: note = Probe
  source 1..23: mol_type = other DNA
aactcatgcccccatgtctaaca

SEQ ID NO: 2139 - DNA, 30 bp, synthetic construct
  misc_feature 1..30: note = Probe
  source 1..30: mol_type = other DNA
aactcatgcccccatgtctaacaacatggc

SEQ ID NO: 2140 - DNA, 31 bp, synthetic construct
  misc_feature 1..31: note = Probe
  source 1..31: mol_type = other DNA
aactcatgcccccatgtctaacaacatggct

SEQ ID NO: 2141 - DNA, 32 bp, synthetic construct
  misc_feature 1..32: note = Probe
  source 1..32: mol_type = other DNA
aactcatgcccccatgtctaacaacatggctt

SEQ ID NO: 2142 - DNA, 33 bp, synthetic construct
  misc_feature 1..33: note = Probe
  source 1..33: mol_type = other DNA
aactcatgcccccatgtctaacaacatggcttt

SEQ ID NO: 2143 - DNA, 34 bp, synthetic construct
  misc_feature 1..34: note = Probe
  source 1..34: mol_type = other DNA
aactcatgcccccatgtctaacaacatggctttc

SEQ ID NO: 2144 - DNA, 35 bp, synthetic construct
  misc_feature 1..35: note = Probe
  source 1..35: mol_type = other DNA
aactcatgcccccatgtctaacaacatggctttct

SEQ ID NO: 2145 - DNA, 36 bp, synthetic construct
  misc_feature 1..36: note = Probe
  source 1..36: mol_type = other DNA
aactcatgcccccatgtctaacaacatggctttctc

SEQ ID NO: 2146 - DNA, 37 bp, synthetic construct
  misc_feature 1..37: note = Probe
  source 1..37: mol_type = other DNA
aactcatgcccccatgtctaacaacatggctttctca

SEQ ID NO: 2147 - DNA, 38 bp, synthetic construct
  misc_feature 1..38: note = Probe
  source 1..38: mol_type = other DNA
aactcatgcccccatgtctaacaacatggctttctcaa

SEQ ID NO: 2148 - DNA, 39 bp, synthetic construct
  misc_feature 1..39: note = Probe
  source 1..39: mol_type = other DNA
aactcatgcccccatgtctaacaacatggctttctcaac

SEQ ID NO: 2149 - DNA, 40 bp, synthetic construct
  misc_feature 1..40: note = Probe
  source 1..40: mol_type = other DNA
aactcatgcccccatgtctaacaacatggctttctcaact

SEQ ID NO: 2150 - DNA, 44 bp, synthetic construct
  misc_feature 1..44: note = Probe
  source 1..44: mol_type = other DNA
aactcatgcccccatgtctaacaacatggctttctcaactttta

SEQ ID NO: 2151 - DNA, 46 bp, synthetic construct
  misc_feature 1..46: note = Probe
  source 1..46: mol_type = other DNA
aactcatgcccccatgtctaacaacatggctttctcaacttttaaa

SEQ ID NO: 2152 - DNA, 37 bp, synthetic construct
  misc_feature 1..37: note = Probe
  source 1..37: mol_type = other DNA
aactgcccggctagctcagtcggtagagcatgggact

SEQ ID NO: 2153 - DNA, 15 bp, synthetic construct
  misc_feature 1..15: note = Probe
  source 1..15: mol_type = other DNA
aactgctaactcatg

SEQ ID NO: 2154 - DNA, 20 bp, synthetic construct
  misc_feature 1..20: note = Probe
  source 1..20: mol_type = other DNA
aactgctaactcatgccccc

SEQ ID NO: 2155 - DNA, 27 bp, synthetic construct
  misc_feature 1..27: note = Probe
  source 1..27: mol_type = other DNA
aactgctaactcatgcccccatgtcta

SEQ ID NO: 2156 - DNA, 37 bp, synthetic construct
  misc_feature 1..37: note = Probe
  source 1..37: mol_type = other DNA
aactgctaactcatgcccccatgtctaacaacatggc

SEQ ID NO: 2157 - DNA, 38 bp, synthetic construct
  misc_feature 1..38: note = Probe
  source 1..38: mol_type = other DNA
aactgctaactcatgcccccatgtctaacaacatggct

SEQ ID NO: 2158 - DNA, 39 bp, synthetic construct
  misc_feature 1..39: note = Probe
  source 1..39: mol_type = other DNA
aactgctaactcatgcccccatgtctaacaacatggctt

SEQ ID NO: 2159 - DNA, 40 bp, synthetic construct
  misc_feature 1..40: note = Probe
  source 1..40: mol_type = other DNA
aactgctaactcatgcccccatgtctaacaacatggcttt

SEQ ID NO: 2160 - DNA, 41 bp, synthetic construct
  misc_feature 1..41: note = Probe
  source 1..41: mol_type = other DNA
aactgctaactcatgcccccatgtctaacaacatggctttc

SEQ ID NO: 2161 - DNA, 42 bp, synthetic construct
  misc_feature 1..42: note = Probe
  source 1..42: mol_type = other DNA
aactgctaactcatgcccccatgtctaacaacatggctttct

SEQ ID NO: 2162 - DNA, 43 bp, synthetic construct
  misc_feature 1..43: note = Probe
  source 1..43: mol_type = other DNA
aactgctaactcatgcccccatgtctaacaacatggctttctc

SEQ ID NO: 2163 - DNA, 44 bp, synthetic construct
  misc_feature 1..44: note = Probe
  source 1..44: mol_type = other DNA
aactgctaactcatgcccccatgtctaacaacatggctttctca

SEQ ID NO: 2164 - DNA, 45 bp, synthetic construct
  misc_feature 1..45: note = Probe
  source 1..45: mol_type = other DNA
aactgctaactcatgcccccatgtctaacaacatggctttctcaa

SEQ ID NO: 2165 - DNA, 46 bp, synthetic construct
  misc_feature 1..46: note = Probe
  source 1..46: mol_type = other DNA
aactgctaactcatgcccccatgtctaacaacatggctttctcaac

SEQ ID NO: 2166 - DNA, 49 bp, synthetic construct
  misc_feature 1..49: note = Probe
  source 1..49: mol_type = other DNA
aactgctaactcatgcccccatgtctaacaacatggctttctcaacttt

SEQ ID NO: 2167 - DNA, 50 bp, synthetic construct
  misc_feature 1..50: note = Probe
  source 1..50: mol_type = other DNA
aactgctaactcatgcccccatgtctaacaacatggctttctcaactttt

SEQ ID NO: 2168 - DNA, 20 bp, synthetic construct
  misc_feature 1..20: note = Probe
  source 1..20: mol_type = other DNA
aacttaaaactttacagtca

SEQ ID NO: 2169 - DNA, 29 bp, synthetic construct
  misc_feature 1..29: note = Probe
  source 1..29: mol_type = other DNA
aacttaaaactttacagtcagaggttcaa

SEQ ID NO: 2170 - DNA, 30 bp, synthetic construct
  misc_feature 1..30: note = Probe
  source 1..30: mol_type = other DNA
aacttaaaactttacagtcagaggttcaat

SEQ ID NO: 2171 - DNA, 32 bp, synthetic construct
  misc_feature 1..32: note = Probe
  source 1..32: mol_type = other DNA
aacttaaaactttacagtcagaggttcaattc

SEQ ID NO: 2172 - DNA, 33 bp, synthetic construct
  misc_feature 1..33: note = Probe
  source 1..33: mol_type = other DNA
aacttaaaactttacagtcagaggttcaattcc

SEQ ID NO: 2173 - DNA, 40 bp, synthetic construct
  misc_feature 1..40: note = Probe
  source 1..40: mol_type = other DNA
aacttaaaactttacagtcagaggttcaattcctcttctt

SEQ ID NO: 2174 - DNA, 41 bp, synthetic construct
  misc_feature 1..41: note = Probe
  source 1..41: mol_type = other DNA
aacttaaaactttacagtcagaggttcaattcctcttctta

SEQ ID NO: 2175 - DNA, 42 bp, synthetic construct
  misc_feature 1..42: note = Probe
  source 1..42: mol_type = other DNA
aacttaaaactttacagtcagaggttcaattcctcttcttaa

SEQ ID NO: 2176 - DNA, 43 bp, synthetic construct
  misc_feature 1..43: note = Probe
  source 1..43: mol_type = other DNA
aacttaaaactttacagtcagaggttcaattcctcttcttaac

SEQ ID NO: 2177 - DNA, 44 bp, synthetic construct
  misc_feature 1..44: note = Probe
  source 1..44: mol_type = other DNA
aacttaaaactttacagtcagaggttcaattcctcttcttaaca

SEQ ID NO: 2178 - DNA, 45 bp, synthetic construct
  misc_feature 1..45: note = Probe
  source 1..45: mol_type = other DNA
aacttaaaactttacagtcagaggttcaattcctcttcttaacaa

SEQ ID NO: 2179 - DNA, 46 bp, synthetic construct
  misc_feature 1..46: note = Probe
  source 1..46: mol_type = other DNA
aacttaaaactttacagtcagaggttcaattcctcttcttaacaac

SEQ ID NO: 2180 - DNA, 50 bp, synthetic construct
  misc_feature 1..50: note = Probe
  source 1..50: mol_type = other DNA
aacttaaaactttacagtcagaggttcaattcctcttcttaacaacatac

SEQ ID NO: 2181 - DNA, 17 bp, synthetic construct
  misc_feature 1..17: note = Probe
  source 1..17: mol_type = other DNA
aacttaacttgaccgct

SEQ ID NO: 2182 - DNA, 20 bp, synthetic construct
  misc_feature 1..20: note = Probe
  source 1..20: mol_type = other DNA
aacttaacttgaccgctctg

SEQ ID NO: 2183 - DNA, 21 bp, synthetic construct
  misc_feature 1..21: note = Probe
  source 1..21: mol_type = other DNA
aacttaacttgaccgctctga

SEQ ID NO: 2184 - DNA, 22 bp, synthetic construct
  misc_feature 1..22: note = Probe
  source 1..22: mol_type = other DNA
aacttaacttgaccgctctgag

SEQ ID NO: 2185 - DNA, 23 bp, synthetic construct
  misc_feature 1..23: note = Probe
  source 1..23: mol_type = other DNA
aacttaacttgaccgctctgagc

SEQ ID NO: 2186 - DNA, 24 bp, synthetic construct
  misc_feature 1..24: note = Probe
  source 1..24: mol_type = other DNA
aacttaacttgaccgctctgagct

SEQ ID NO: 2187 - DNA, 29 bp, synthetic construct
  misc_feature 1..29: note = Probe
  source 1..29: mol_type = other DNA
aacttacacttaggagatttcaacttaac

SEQ ID NO: 2188 - DNA, 36 bp, synthetic construct
  misc_feature 1..36: note = Probe
  source 1..36: mol_type = other DNA
aacttacacttaggagatttcaacttaacttgaccg

SEQ ID NO: 2189 - DNA, 37 bp, synthetic construct
  misc_feature 1..37: note = Probe
  source 1..37: mol_type = other DNA
aacttacacttaggagatttcaacttaacttgaccgc

SEQ ID NO: 2190 - DNA, 38 bp, synthetic construct
  misc_feature 1..38: note = Probe
  source 1..38: mol_type = other DNA
aacttacacttaggagatttcaacttaacttgaccgct

SEQ ID NO: 2191 - DNA, 39 bp, synthetic construct
  misc_feature 1..39: note = Probe
  source 1..39: mol_type = other DNA
aacttacacttaggagatttcaacttaacttgaccgctc

SEQ ID NO: 2192 - DNA, 42 bp, synthetic construct
  misc_feature 1..42: note = Probe
  source 1..42: mol_type = other DNA
aacttacacttaggagatttcaacttaacttgaccgctctga

SEQ ID NO: 2193 - DNA, 43 bp, synthetic construct
  misc_feature 1..43: note = Probe
  source 1..43: mol_type = other DNA
aacttacacttaggagatttcaacttaacttgaccgctctgag

SEQ ID NO: 2194 - DNA, 44 bp, synthetic construct
  misc_feature 1..44: note = Probe
  source 1..44: mol_type = other DNA
aacttacacttaggagatttcaacttaacttgaccgctctgagc

SEQ ID NO: 2195 - DNA, 45 bp, synthetic construct
  misc_feature 1..45: note = Probe
  source 1..45: mol_type = other DNA
aacttacacttaggagatttcaacttaacttgaccgctctgagct

SEQ ID NO: 2196 - DNA, 46 bp, synthetic construct
  misc_feature 1..46: note = Probe
  source 1..46: mol_type = other DNA
aacttacacttaggagatttcaacttaacttgaccgctctgagcta

SEQ ID NO: 2197 - DNA, 50 bp, synthetic construct
  misc_feature 1..50: note = Probe
  source 1..50: mol_type = other DNA
aacttacacttaggagatttcaacttaacttgaccgctctgagctaaacc

SEQ ID NO: 2198 - DNA, 18 bp, synthetic construct
  misc_feature 1..18: note = Probe
  source 1..18: mol_type = other DNA
aacttagcattaaccttt

SEQ ID NO: 2199 - DNA, 19 bp, synthetic construct
  misc_feature 1..19: note = Probe
  source 1..19: mol_type = other DNA
aacttagcattaacctttt

SEQ ID NO: 2200 - DNA, 44 bp, synthetic construct
  misc_feature 1..44: note = Probe
  source 1..44: mol_type = other DNA
aacttagcattaaccttttaagttaaagattaagagaaccaaca

SEQ ID NO: 2201 - DNA, 50 bp, synthetic construct
  misc_feature 1..50: note = Probe
  source 1..50: mol_type = other DNA
aacttagcattaaccttttaagttaaagattaagagaaccaacacctctt

SEQ ID NO: 2202 - DNA, 44 bp, synthetic construct
  misc_feature 1..44: note = Probe
  source 1..44: mol_type = other DNA
aacttccaattaactagttttgacaacattcaaaaaagagtaat

SEQ ID NO: 2203 - DNA, 45 bp, synthetic construct
  misc_feature 1..45: note = Probe
  source 1..45: mol_type = other DNA
aacttccaattaactagttttgacaacattcaaaaaagagtaata

SEQ ID NO: 2204 - DNA, 17 bp, synthetic construct
  misc_feature 1..17: note = Probe
  source 1..17: mol_type = other DNA
aacttgaccgctctgag

SEQ ID NO: 2205 - DNA, 18 bp, synthetic construct
  misc_feature 1..18: note = Probe
  source 1..18: mol_type = other DNA
aacttgaccgctctgagc

SEQ ID NO: 2206 - DNA, 32 bp, synthetic construct
  misc_feature 1..32: note = Probe
  source 1..32: mol_type = other DNA
aactttacagtcagaggttcaattcctcttct

SEQ ID NO: 2207 - DNA, 33 bp, synthetic construct
  misc_feature 1..33: note = Probe
  source 1..33: mol_type = other DNA
aactttacagtcagaggttcaattcctcttctt

SEQ ID NO: 2208 - DNA, 34 bp, synthetic construct
  misc_feature 1..34: note = Probe
  source 1..34: mol_type = other DNA
aactttacagtcagaggttcaattcctcttctta

SEQ ID NO: 2209 - DNA, 35 bp, synthetic construct
  misc_feature 1..35: note = Probe
  source 1..35: mol_type = other DNA
aactttacagtcagaggttcaattcctcttcttaa

SEQ ID NO: 2210 - DNA, 36 bp, synthetic construct
  misc_feature 1..36: note = Probe
  source 1..36: mol_type = other DNA
aactttacagtcagaggttcaattcctcttcttaac

SEQ ID NO: 2211 - DNA, 37 bp, synthetic construct
  misc_feature 1..37: note = Probe
  source 1..37: mol_type = other DNA
aactttacagtcagaggttcaattcctcttcttaaca

SEQ ID NO: 2212 - DNA, 38 bp, synthetic construct
  misc_feature 1..38: note = Probe
  source 1..38: mol_type = other DNA
aactttacagtcagaggttcaattcctcttcttaacaa

SEQ ID NO: 2213 - DNA, 39 bp, synthetic construct
  misc_feature 1..39: note = Probe
  source 1..39: mol_type = other DNA
aactttacagtcagaggttcaattcctcttcttaacaac

SEQ ID NO: 2214 - DNA, 40 bp, synthetic construct
  misc_feature 1..40: note = Probe
  source 1..40: mol_type = other DNA
aactttacagtcagaggttcaattcctcttcttaacaaca

SEQ ID NO: 2215 - DNA, 31 bp, synthetic construct
  misc_feature 1..31: note = Probe
  source 1..31: mol_type = other DNA
aacttttaaaggataacagctatccattggt

SEQ ID NO: 2216 - DNA, 37 bp, synthetic construct
  misc_feature 1..37: note = Probe
  source 1..37: mol_type = other DNA
aagaacagggtttgttaagatggcagagcccggtaat

SEQ ID NO: 2217 - DNA, 38 bp, synthetic construct
  misc_feature 1..38: note = Probe
  source 1..38: mol_type = other DNA
aagaacagggtttgttaagatggcagagcccggtaatc

SEQ ID NO: 2218 - DNA, 18 bp, synthetic construct
  misc_feature 1..18: note = Probe
  source 1..18: mol_type = other DNA
aagaactgctaactcatg

SEQ ID NO: 2219 - DNA, 23 bp, synthetic construct
  misc_feature 1..23: note = Probe
  source 1..23: mol_type = other DNA
aagaactgctaactcatgccccc

SEQ ID NO: 2220 - DNA, 24 bp, synthetic construct
  misc_feature 1..24: note = Probe
  source 1..24: mol_type = other DNA
aagaactgctaactcatgccccca

SEQ ID NO: 2221 - DNA, 27 bp, synthetic construct
  misc_feature 1..27: note = Probe
  source 1..27: mol_type = other DNA
aagaactgctaactcatgcccccatgt

SEQ ID NO: 2222 - DNA, 29 bp, synthetic construct
  misc_feature 1..29: note = Probe
  source 1..29: mol_type = other DNA
aagaactgctaactcatgcccccatgtct

SEQ ID NO: 2223 - DNA, 30 bp, synthetic construct
  misc_feature 1..30: note = Probe
  source 1..30: mol_type = other DNA
aagaactgctaactcatgcccccatgtcta

SEQ ID NO: 2224 - DNA, 32 bp, synthetic construct
  misc_feature 1..32: note = Probe
  source 1..32: mol_type = other DNA
aagaactgctaactcatgcccccatgtctaac

SEQ ID NO: 2225 - DNA, 33 bp, synthetic construct
  misc_feature 1..33: note = Probe
  source 1..33: mol_type = other DNA
aagaactgctaactcatgcccccatgtctaaca

SEQ ID NO: 2226 - DNA, 40 bp, synthetic construct
  misc_feature 1..40: note = Probe
  source 1..40: mol_type = other DNA
aagaactgctaactcatgcccccatgtctaacaacatggc

SEQ ID NO: 2227 - DNA, 42 bp, synthetic construct
  misc_feature 1..42: note = Probe
  source 1..42: mol_type = other DNA
aagaactgctaactcatgcccccatgtctaacaacatggctt

SEQ ID NO: 2228 - DNA, 48 bp, synthetic construct
  misc_feature 1..48: note = Probe
  source 1..48: mol_type = other DNA
aagaactgctaactcatgcccccatgtctaacaacatggctttctcaa

SEQ ID NO: 2229 - DNA, 49 bp, synthetic construct
  misc_feature 1..49: note = Probe
  source 1..49: mol_type = other DNA
aagaactgctaactcatgcccccatgtctaacaacatggctttctcaac

SEQ ID NO: 2230 - DNA, 50 bp, synthetic construct
  misc_feature 1..50: note = Probe
  source 1..50: mol_type = other DNA
aagaactgctaactcatgcccccatgtctaacaacatggctttctcaact

SEQ ID NO: 2231 - DNA, 29 bp, synthetic construct
  misc_feature 1..29: note = Probe
  source 1..29: mol_type = other DNA
aagaagcagcttcaaacctgccggggctt

SEQ ID NO: 2232 - DNA, 31 bp, synthetic construct
  misc_feature 1..31: note = Probe
  source 1..31: mol_type = other DNA
aagaagcagcttcaaacctgccggggcttct

SEQ ID NO: 2233 - DNA, 32 bp, synthetic construct
  misc_feature 1..32: note = Probe
  source 1..32: mol_type = other DNA
aagaagcagcttcaaacctgccggggcttctc

SEQ ID NO: 2234 - DNA, 18 bp, synthetic construct
  misc_feature 1..18: note = Probe
  source 1..18: mol_type = other DNA
aagacaccccccacagtt

SEQ ID NO: 2235 - DNA, 27 bp, synthetic construct
  misc_feature 1..27: note = Probe
  source 1..27: mol_type = other DNA
aagacaccccccacagtttatgtagct

SEQ ID NO: 2236 - DNA, 31 bp, synthetic construct
  misc_feature 1..31: note = Probe
  source 1..31: mol_type = other DNA
aagacaccccccacagtttatgtagcttacc

SEQ ID NO: 2237 - DNA, 32 bp, synthetic construct
  misc_feature 1..32: note = Probe
  source 1..32: mol_type = other DNA
aagacaccccccacagtttatgtagcttacct

SEQ ID NO: 2238 - DNA, 33 bp, synthetic construct
  misc_feature 1..33: note = Probe
  source 1..33: mol_type = other DNA
aagacaccccccacagtttatgtagcttacctc

SEQ ID NO: 2239 - DNA, 34 bp, synthetic construct
  misc_feature 1..34: note = Probe
  source 1..34: mol_type = other DNA
aagacaccccccacagtttatgtagcttacctcc

SEQ ID NO: 2240 - DNA, 37 bp, synthetic construct
  misc_feature 1..37: note = Probe
  source 1..37: mol_type = other DNA
aagacaccccccacagtttatgtagcttacctcctca

SEQ ID NO: 2241 - DNA, 50 bp, synthetic construct
  misc_feature 1..50: note = Probe
  source 1..50: mol_type = other DNA
aagacaccccccacagtttatgtagcttacctcctcaaagcaatacactg

SEQ ID NO: 2242 - DNA, 23 bp, synthetic construct
  misc_feature 1..23: note = Probe
  source 1..23: mol_type = other DNA
aagacaggggttaggcctctttt

SEQ ID NO: 2243 - DNA, 24 bp, synthetic construct
  misc_feature 1..24: note = Probe
  source 1..24: mol_type = other DNA
aagacaggggttaggcctcttttt

SEQ ID NO: 2244 - DNA, 27 bp, synthetic construct
  misc_feature 1..27: note = Probe
  source 1..27: mol_type = other DNA
aagacaggggttaggcctctttttacc

SEQ ID NO: 2245 - DNA, 28 bp, synthetic construct
  misc_feature 1..28: note = Probe
  source 1..28: mol_type = other DNA
aagacaggggttaggcctctttttacca

SEQ ID NO: 2246 - DNA, 30 bp, synthetic construct
  misc_feature 1..30: note = Probe
  source 1..30: mol_type = other DNA
aagacaggggttaggcctctttttaccagc

SEQ ID NO: 2247 - DNA, 31 bp, synthetic construct
  misc_feature 1..31: note = Probe
  source 1..31: mol_type = other DNA
aagacaggggttaggcctctttttaccagct

SEQ ID NO: 2248 - DNA, 27 bp, synthetic construct
  misc_feature 1..27: note = Probe
  source 1..27: mol_type = other DNA
aagagaaccaacacctctttacagtga

SEQ ID NO: 2249 - DNA, 28 bp, synthetic construct
  misc_feature 1..28: note = Probe
  source 1..28: mol_type = other DNA
aagagaaccaacacctctttacagtgaa

SEQ ID NO: 2250 - DNA, 29 bp, synthetic construct
  misc_feature 1..29: note = Probe
  source 1..29: mol_type = other DNA
aagagaaccaacacctctttacagtgaaa

SEQ ID NO: 2251 - DNA, 30 bp, synthetic construct
  misc_feature 1..30: note = Probe
  source 1..30: mol_type = other DNA
aagagaaccaacacctctttacagtgaaat

SEQ ID NO: 2252 - DNA, 16 bp, synthetic construct
  misc_feature 1..16: note = Probe
  source 1..16: mol_type = other DNA
aagagccttcaaagcc

SEQ ID NO: 2253 - DNA, 17 bp, synthetic construct
  misc_feature 1..17: note = Probe
  source 1..17: mol_type = other DNA
aagagccttcaaagccc

SEQ ID NO: 2254 - DNA, 50 bp, synthetic construct
  misc_feature 1..50: note = Probe
  source 1..50: mol_type = other DNA
aagagccttcaaagccctcagtaagttgcaatacttaatttctgtaacag

SEQ ID NO: 2255 - DNA, 17 bp, synthetic construct
  misc_feature 1..17: note = Probe
  source 1..17: mol_type = other DNA
aagaggtccccggttca

SEQ ID NO: 2256 - DNA, 50 bp, synthetic construct
  misc_feature 1..50: note = Probe
  source 1..50: mol_type = other DNA
aagagttactttgatagagtaaataataggagcttaaacccccttatttc

SEQ ID NO: 2257 - DNA, 32 bp, synthetic construct
  misc_feature 1..32: note = Probe
  source 1..32: mol_type = other DNA
aagattaagagaaccaacacctctttacagtg

SEQ ID NO: 2258 - DNA, 33 bp, synthetic construct
  misc_feature 1..33: note = Probe
  source 1..33: mol_type = other DNA
aagattaagagaaccaacacctctttacagtga

SEQ ID NO: 2259 - DNA, 34 bp, synthetic construct
  misc_feature 1..34: note = Probe
  source 1..34: mol_type = other DNA
aagattaagagaaccaacacctctttacagtgaa

SEQ ID NO: 2260 - DNA, 36 bp, synthetic construct
  misc_feature 1..36: note = Probe
  source 1..36: mol_type = other DNA
aagattaagagaaccaacacctctttacagtgaaat

SEQ ID NO: 2261 - DNA, 34 bp, synthetic construct
  misc_feature 1..34: note = Probe
  source 1..34: mol_type = other DNA
aagattctaggttcgactcctggctggctcgcga

SEQ ID NO: 2262 - DNA, 34 bp, synthetic construct
  misc_feature 1..34: note = Probe
  source 1..34: mol_type = other DNA
aagattctaggttcgactcctggctggctcgggt

SEQ ID NO: 2263 - DNA, 26 bp, synthetic construct
  misc_feature 1..26: note = Probe
  source 1..26: mol_type = other DNA
aagattgagggttcgagtcccttcgt

SEQ ID NO: 2264 - DNA, 28 bp, synthetic construct
  misc_feature 1..28: note = Probe
  source 1..28: mol_type = other DNA
aagattgagggttcgagtcccttcgtgg

SEQ ID NO: 2265 - DNA, 31 bp, synthetic construct
  misc_feature 1..31: note = Probe
  source 1..31: mol_type = other DNA
aagattgagggttcgagtcccttcgtggtcg

SEQ ID NO: 2266 - DNA, 34 bp, synthetic construct
  misc_feature 1..34: note = Probe
  source 1..34: mol_type = other DNA
aagattgagggttcgagtcccttcgtggtcgttg

SEQ ID NO: 2267 - DNA, 34 bp, synthetic construct
  misc_feature 1..34: note = Probe
  source 1..34: mol_type = other DNA
aagcaatacactgaaaatgtttagacgggctcac

SEQ ID NO: 2268 - DNA, 44 bp, synthetic construct
  misc_feature 1..44: note = Probe
  source 1..44: mol_type = other DNA
aagcaatacactgaaaatgtttagacgggctcacatcaccccat

SEQ ID NO: 2269 - DNA, 48 bp, synthetic construct
  misc_feature 1..48: note = Probe
  source 1..48: mol_type = other DNA
aagcaatacactgaaaatgtttagacgggctcacatcaccccataaac

SEQ ID NO: 2270 - DNA, 49 bp, synthetic construct
  misc_feature 1..49: note = Probe
  source 1..49: mol_type = other DNA
aagcaatacactgaaaatgtttagacgggctcacatcaccccataaaca

SEQ ID NO: 2271 - DNA, 50 bp, synthetic construct
  misc_feature 1..50: note = Probe
  source 1..50: mol_type = other DNA
aagcaatacactgaaaatgtttagacgggctcacatcaccccataaacaa

SEQ ID NO: 2272 - DNA, 19 bp, synthetic construct
  misc_feature 1..19: note = Probe
  source 1..19: mol_type = other DNA
aagcacccaacttacactt

SEQ ID NO: 2273 - DNA, 20 bp, synthetic construct
  misc_feature 1..20: note = Probe
  source 1..20: mol_type = other DNA
aagcacccaacttacactta

SEQ ID NO: 2274 - DNA, 24 bp, synthetic construct
  misc_feature 1..24: note = Probe
  source 1..24: mol_type = other DNA
aagcacccaacttacacttaggag

SEQ ID NO: 2275 - DNA, 25 bp, synthetic construct
  misc_feature 1..25: note = Probe
  source 1..25: mol_type = other DNA
aagcacccaacttacacttaggaga

SEQ ID NO: 2276 - DNA, 29 bp, synthetic construct
  misc_feature 1..29: note = Probe
  source 1..29: mol_type = other DNA
aagcacccaacttacacttaggagatttc

SEQ ID NO: 2277 - DNA, 30 bp, synthetic construct
  misc_feature 1..30: note = Probe
  source 1..30: mol_type = other DNA
aagcacccaacttacacttaggagatttca

SEQ ID NO: 2278 - DNA, 32 bp, synthetic construct
  misc_feature 1..32: note = Probe
  source 1..32: mol_type = other DNA
aagcacccaacttacacttaggagatttcaac

SEQ ID NO: 2279 - DNA, 33 bp, synthetic construct
  misc_feature 1..33: note = Probe
  source 1..33: mol_type = other DNA
aagcacccaacttacacttaggagatttcaact

SEQ ID NO: 2280 - DNA, 44 bp, synthetic construct
  misc_feature 1..44: note = Probe
  source 1..44: mol_type = other DNA
aagcacccaacttacacttaggagatttcaacttaacttgaccg

SEQ ID NO: 2281 - DNA, 48 bp, synthetic construct
  misc_feature 1..48: note = Probe
  source 1..48: mol_type = other DNA
aagcacccaacttacacttaggagatttcaacttaacttgaccgctct

SEQ ID NO: 2282 - DNA, 49 bp, synthetic construct
  misc_feature 1..49: note = Probe
  source 1..49: mol_type = other DNA
aagcacccaacttacacttaggagatttcaacttaacttgaccgctctg

SEQ ID NO: 2283 - DNA, 50 bp, synthetic construct
  misc_feature 1..50: note = Probe
  source 1..50: mol_type = other DNA
aagcacccaacttacacttaggagatttcaacttaacttgaccgctctga

SEQ ID NO: 2284 - DNA, 26 bp, synthetic construct
  misc_feature 1..26: note = Probe
  source 1..26: mol_type = other DNA
aagcagcttcaaacctgccggggctt

SEQ ID NO: 2285 - DNA, 27 bp, synthetic construct
  misc_feature 1..27: note = Probe
  source 1..27: mol_type = other DNA
aagcagcttcaaacctgccggggcttc

SEQ ID NO: 2286 - DNA, 28 bp, synthetic construct
  misc_feature 1..28: note = Probe
  source 1..28: mol_type = other DNA
aagcagcttcaaacctgccggggcttct

SEQ ID NO: 2287 - DNA, 29 bp, synthetic construct
  misc_feature 1..29: note = Probe
  source 1..29: mol_type = other DNA
aagcagcttcaaacctgccggggcttctc

SEQ ID NO: 2288 - DNA, 39 bp, synthetic construct
  misc_feature 1..39: note = Probe
  source 1..39: mol_type = other DNA
aagcagttgacccgggttcgattcccggccaacgcaagt

SEQ ID NO: 2289 - DNA, 39 bp, synthetic construct
  misc_feature 1..39: note = Probe
  source 1..39: mol_type = other DNA
aagcagttgacccgggttcgattcccggccaacgcagtg

SEQ ID NO: 2290 - DNA, 43 bp, synthetic construct
  misc_feature 1..43: note = Probe
  source 1..43: mol_type = other DNA
aagcattggactgtaaatctaaagacaggggttaggcctcttt

SEQ ID NO: 2291 - DNA, 50 bp, synthetic construct
  misc_feature 1..50: note = Probe
  source 1..50: mol_type = other DNA
aagcattggactgtaaatctaaagacaggggttaggcctctttttaccag

SEQ ID NO: 2292 - DNA, 40 bp, synthetic construct
  misc_feature 1..40: note = Probe
  source 1..40: mol_type = other DNA
aagccagggattgtgggttcgagtcccacccggggtaaag

SEQ ID NO: 2293 - DNA, 40 bp, synthetic construct
  misc_feature 1..40: note = Probe
  source 1..40: mol_type = other DNA
aagccagggattgtgggttcgagtcccacctggggtgtcg

SEQ ID NO: 2294 - DNA, 39 bp, synthetic construct
  misc_feature 1..39: note = Probe
  source 1..39: mol_type = other DNA
aagccagggattgtgggttcgagtcccatctggggtggc

SEQ ID NO: 2295 - DNA, 40 bp, synthetic construct
  misc_feature 1..40: note = Probe
  source 1..40: mol_type = other DNA
aagccagggattgtgggttcgagtcccatctggggtggcc

SEQ ID NO: 2296 - DNA, 17 bp, synthetic construct
  misc_feature 1..17: note = Probe
  source 1..17: mol_type = other DNA
aagctatcgggcccata

SEQ ID NO: 2297 - DNA, 21 bp, synthetic construct
  misc_feature 1..21: note = Probe
  source 1..21: mol_type = other DNA
aagctatcgggcccatacccc

SEQ ID NO: 2298 - DNA, 22 bp, synthetic construct
  misc_feature 1..22: note = Probe
  source 1..22: mol_type = other DNA
aagctatcgggcccataccccg

SEQ ID NO: 2299 - DNA, 23 bp, synthetic construct
  misc_feature 1..23: note = Probe
  source 1..23: mol_type = other DNA
aagctatcgggcccataccccga

SEQ ID NO: 2300 - DNA, 24 bp, synthetic construct
  misc_feature 1..24: note = Probe
  source 1..24: mol_type = other DNA
aagctatcgggcccataccccgaa

SEQ ID NO: 2301 - DNA, 25 bp, synthetic construct
  misc_feature 1..25: note = Probe
  source 1..25: mol_type = other DNA
aagctatcgggcccataccccgaaa

SEQ ID NO: 2302 - DNA, 26 bp, synthetic construct
  misc_feature 1..26: note = Probe
  source 1..26: mol_type = other DNA
aagctatcgggcccataccccgaaaa

SEQ ID NO: 2303 - DNA, 27 bp, synthetic construct
  misc_feature 1..27: note = Probe
  source 1..27: mol_type = other DNA
aagctatcgggcccataccccgaaaat

SEQ ID NO: 2304 - DNA, 28 bp, synthetic construct
  misc_feature 1..28: note = Probe
  source 1..28: mol_type = other DNA
aagctatcgggcccataccccgaaaatg

SEQ ID NO: 2305 - DNA, 29 bp, synthetic construct
  misc_feature 1..29: note = Probe
  source 1..29: mol_type = other DNA
aagctatcgggcccataccccgaaaatgt

SEQ ID NO: 2306 - DNA, 30 bp, synthetic construct
  misc_feature 1..30: note = Probe
  source 1..30: mol_type = other DNA
aagctatcgggcccataccccgaaaatgtt

SEQ ID NO: 2307 - DNA, 31 bp, synthetic construct
  misc_feature 1..31: note = Probe
  source 1..31: mol_type = other DNA
aagctatcgggcccataccccgaaaatgttg

SEQ ID NO: 2308 - DNA, 32 bp, synthetic construct
  misc_feature 1..32: note = Probe
  source 1..32: mol_type = other DNA
aagctatcgggcccataccccgaaaatgttgg

SEQ ID NO: 2309 - DNA, 33 bp, synthetic construct
  misc_feature 1..33: note = Probe
  source 1..33: mol_type = other DNA
aagctatcgggcccataccccgaaaatgttggt

SEQ ID NO: 2310 - DNA, 34 bp, synthetic construct
  misc_feature 1..34: note = Probe
  source 1..34: mol_type = other DNA
aagctatcgggcccataccccgaaaatgttggtt

SEQ ID NO: 2311 - DNA, 35 bp, synthetic construct
  misc_feature 1..35: note = Probe
  source 1..35: mol_type = other DNA
aagctatcgggcccataccccgaaaatgttggtta

SEQ ID NO: 2312 - DNA, 39 bp, synthetic construct
  misc_feature 1..39: note = Probe
  source 1..39: mol_type = other DNA
aagctatcgggcccataccccgaaaatgttggttatacc

SEQ ID NO: 2313 - DNA, 44 bp, synthetic construct
  misc_feature 1..44: note = Probe
  source 1..44: mol_type = other DNA
aagctatcgggcccataccccgaaaatgttggttatacccttcc

SEQ ID NO: 2314 - DNA, 49 bp, synthetic construct
  misc_feature 1..49: note = Probe
  source 1..49: mol_type = other DNA
aagctatcgggcccataccccgaaaatgttggttatacccttcccgtac

SEQ ID NO: 2315 - DNA, 24 bp, synthetic construct
  misc_feature 1..24: note = Probe
  source 1..24: mol_type = other DNA
aagctcacaagaactgctaactca

SEQ ID NO: 2316 - DNA, 25 bp, synthetic construct
  misc_feature 1..25: note = Probe
  source 1..25: mol_type = other DNA
aagctcacaagaactgctaactcat

SEQ ID NO: 2317 - DNA, 26 bp, synthetic construct
  misc_feature 1..26: note = Probe
  source 1..26: mol_type = other DNA
aagctcacaagaactgctaactcatg

SEQ ID NO: 2318 - DNA, 27 bp, synthetic construct
  misc_feature 1..27: note = Probe
  source 1..27: mol_type = other DNA
aagctcacaagaactgctaactcatgc

SEQ ID NO: 2319 - DNA, 29 bp, synthetic construct
  misc_feature 1..29: note = Probe
  source 1..29: mol_type = other DNA
aagctcacaagaactgctaactcatgccc

SEQ ID NO: 2320 - DNA, 32 bp, synthetic construct
  misc_feature 1..32: note = Probe
  source 1..32: mol_type = other DNA
aagctcacaagaactgctaactcatgccccca

SEQ ID NO: 2321 - DNA, 49 bp, synthetic construct
  misc_feature 1..49: note = Probe
  source 1..49: mol_type = other DNA
aagctcacaagaactgctaactcatgcccccatgtctaacaacatggct

SEQ ID NO: 2322 - DNA, 26 bp, synthetic construct
  misc_feature 1..26: note = Probe
  source 1..26: mol_type = other DNA
aagggcttagcttaattaaagtggct

SEQ ID NO: 2323 - DNA, 28 bp, synthetic construct
  misc_feature 1..28: note = Probe
  source 1..28: mol_type = other DNA
aagggcttagcttaattaaagtggctga

SEQ ID NO: 2324 - DNA, 29 bp, synthetic construct
  misc_feature 1..29: note = Probe
  source 1..29: mol_type = other DNA
aagggcttagcttaattaaagtggctgat

SEQ ID NO: 2325 - DNA, 31 bp, synthetic construct
  misc_feature 1..31: note = Probe
  source 1..31: mol_type = other DNA
aagggcttagcttaattaaagtggctgattt

SEQ ID NO: 2326 - DNA, 32 bp, synthetic construct
  misc_feature 1..32: note = Probe
  source 1..32: mol_type = other DNA
aagggcttagcttaattaaagtggctgatttg

SEQ ID NO: 2327 - DNA, 33 bp, synthetic construct
  misc_feature 1..33: note = Probe
  source 1..33: mol_type = other DNA
aagggcttagcttaattaaagtggctgatttgc

SEQ ID NO: 2328 - DNA, 17 bp, synthetic construct
  misc_feature 1..17: note = Probe
  source 1..17: mol_type = other DNA
aaggtattagaaaaacc

SEQ ID NO: 2329 - DNA, 25 bp, synthetic construct
  misc_feature 1..25: note = Probe
  source 1..25: mol_type = other DNA
aaggtattagaaaaaccatttcata

SEQ ID NO: 2330 - DNA, 32 bp, synthetic construct
  misc_feature 1..32: note = Probe
  source 1..32: mol_type = other DNA
aaggtattagaaaaaccatttcataactttgt

SEQ ID NO: 2331 - DNA, 33 bp, synthetic construct
  misc_feature 1..33: note = Probe
  source 1..33: mol_type = other DNA
aaggtattagaaaaaccatttcataactttgtc

SEQ ID NO: 2332 - DNA, 34 bp, synthetic construct
  misc_feature 1..34: note = Probe
  source 1..34: mol_type = other DNA
aaggtattagaaaaaccatttcataactttgtca

SEQ ID NO: 2333 - DNA, 37 bp, synthetic construct
  misc_feature 1..37: note = Probe
  source 1..37: mol_type = other DNA
aaggtattagaaaaaccatttcataactttgtcaaag

SEQ ID NO: 2334 - DNA, 42 bp, synthetic construct
  misc_feature 1..42: note = Probe
  source 1..42: mol_type = other DNA
aaggtattagaaaaaccatttcataactttgtcaaagttaaa

SEQ ID NO: 2335 - DNA, 48 bp, synthetic construct
  misc_feature 1..48: note = Probe
  source 1..48: mol_type = other DNA
aaggtattagaaaaaccatttcataactttgtcaaagttaaattatag

SEQ ID NO: 2336 - DNA, 24 bp, synthetic construct
  misc_feature 1..24: note = Probe
  source 1..24: mol_type = other DNA
aaggtcagctaaataagctatcgg

SEQ ID NO: 2337 - DNA, 25 bp, synthetic construct
  misc_feature 1..25: note = Probe
  source 1..25: mol_type = other DNA
aaggtcagctaaataagctatcggg

SEQ ID NO: 2338 - DNA, 26 bp, synthetic construct
  misc_feature 1..26: note = Probe
  source 1..26: mol_type = other DNA
aaggtcagctaaataagctatcgggc

SEQ ID NO: 2339 - DNA, 27 bp, synthetic construct
  misc_feature 1..27: note = Probe
  source 1..27: mol_type = other DNA
aaggtcagctaaataagctatcgggcc

SEQ ID NO: 2340 - DNA, 28 bp, synthetic construct
  misc_feature 1..28: note = Probe
  source 1..28: mol_type = other DNA
aaggtcagctaaataagctatcgggccc

SEQ ID NO: 2341 - DNA, 29 bp, synthetic construct
  misc_feature 1..29: note = Probe
  source 1..29: mol_type = other DNA
aaggtcagctaaataagctatcgggccca

SEQ ID NO: 2342 - DNA, 30 bp, synthetic construct
  misc_feature 1..30: note = Probe
  source 1..30: mol_type = other DNA
aaggtcagctaaataagctatcgggcccat

SEQ ID NO: 2343 - DNA, 31 bp, synthetic construct
  misc_feature 1..31: note = Probe
  source 1..31: mol_type = other DNA
aaggtcagctaaataagctatcgggcccata

SEQ ID NO: 2344 - DNA, 32 bp, synthetic construct
  misc_feature 1..32: note = Probe
  source 1..32: mol_type = other DNA
aaggtcagctaaataagctatcgggcccatac

SEQ ID NO: 2345 - DNA, 33 bp, synthetic construct
  misc_feature 1..33: note = Probe
  source 1..33: mol_type = other DNA
aaggtcagctaaataagctatcgggcccatacc

SEQ ID NO: 2346 - DNA, 34 bp, synthetic construct
  misc_feature 1..34: note = Probe
  source 1..34: mol_type = other DNA
aaggtcagctaaataagctatcgggcccataccc

SEQ ID NO: 2347 - DNA, 37 bp, synthetic construct
  misc_feature 1..37: note = Probe
  source 1..37: mol_type = other DNA
aaggtcagctaaataagctatcgggcccataccccga

SEQ ID NO: 2348 - DNA, 39 bp, synthetic construct
  misc_feature 1..39: note = Probe
  source 1..39: mol_type = other DNA
aaggtcagctaaataagctatcgggcccataccccgaaa

SEQ ID NO: 2349 - DNA, 40 bp, synthetic construct
  misc_feature 1..40: note = Probe
  source 1..40: mol_type = other DNA
aaggtcagctaaataagctatcgggcccataccccgaaaa

SEQ ID NO: 2350 - DNA, 41 bp, synthetic construct
  misc_feature 1..41: note = Probe
  source 1..41: mol_type = other DNA
aaggtcagctaaataagctatcgggcccataccccgaaaat

SEQ ID NO: 2351 - DNA, 42 bp, synthetic construct
  misc_feature 1..42: note = Probe
  source 1..42: mol_type = other DNA
aaggtcagctaaataagctatcgggcccataccccgaaaatg

SEQ ID NO: 2352 - DNA, 43 bp, synthetic construct
  misc_feature 1..43: note = Probe
  source 1..43: mol_type = other DNA
aaggtcagctaaataagctatcgggcccataccccgaaaatgt

SEQ ID NO: 2353 - DNA, 44 bp, synthetic construct
  misc_feature 1..44: note = Probe
  source 1..44: mol_type = other DNA
aaggtcagctaaataagctatcgggcccataccccgaaaatgtt

SEQ ID NO: 2354 - DNA, 45 bp, synthetic construct
  misc_feature 1..45: note = Probe
  source 1..45: mol_type = other DNA
aaggtcagctaaataagctatcgggcccataccccgaaaatgttg

SEQ ID NO: 2355 - DNA, 46 bp, synthetic construct
  misc_feature 1..46: note = Probe
  source 1..46: mol_type = other DNA
aaggtcagctaaataagctatcgggcccataccccgaaaatgttgg

SEQ ID NO: 2356 - DNA, 48 bp, synthetic construct
  misc_feature 1..48: note = Probe
  source 1..48: mol_type = other DNA
aaggtcagctaaataagctatcgggcccataccccgaaaatgttggtt

SEQ ID NO: 2357 - DNA, 49 bp, synthetic construct
  misc_feature 1..49: note = Probe
  source 1..49: mol_type = other DNA
aaggtcagctaaataagctatcgggcccataccccgaaaatgttggtta

SEQ ID NO: 2358 - DNA, 50 bp, synthetic construct
  misc_feature 1..50: note = Probe
  source 1..50: mol_type = other DNA
aaggtcagctaaataagctatcgggcccataccccgaaaatgttggttat

SEQ ID NO: 2359 - DNA, 32 bp, synthetic construct
  misc_feature 1..32: note = Probe
  source 1..32: mol_type = other DNA
aaggtcctgggttcgagccccagtggaaccac

SEQ ID NO: 2360 - DNA, 34 bp, synthetic construct
  misc_feature 1..34: note = Probe
  source 1..34: mol_type = other DNA
aaggtcctgggttcgagccccagtggaaccacgg

SEQ ID NO: 2361 - DNA, 34 bp, synthetic construct
  misc_feature 1..34: note = Probe
  source 1..34: mol_type = other DNA
aaggtcgcgggttcgatccccgtacgggccacga

SEQ ID NO: 2362 - DNA, 34 bp, synthetic construct
  misc_feature 1..34: note = Probe
  source 1..34: mol_type = other DNA
aaggtcgcgggttcgatccccgtacgggccactg

SEQ ID NO: 2363 - DNA, 24 bp, synthetic construct
  misc_feature 1..24: note = Probe
  source 1..24: mol_type = other DNA
aaggttccgggttcgagtcccggc

SEQ ID NO: 2364 - DNA, 33 bp, synthetic construct
  misc_feature 1..33: note = Probe
  source 1..33: mol_type = other DNA
aagtaaggtcagctaaataagctatcgggccca

SEQ ID NO: 2365 - DNA, 35 bp, synthetic construct
  misc_feature 1..35: note = Probe
  source 1..35: mol_type = other DNA
aagtaaggtcagctaaataagctatcgggcccata

SEQ ID NO: 2366 - DNA, 36 bp, synthetic construct
  misc_feature 1..36: note = Probe
  source 1..36: mol_type = other DNA
aagtaaggtcagctaaataagctatcgggcccatac

SEQ ID NO: 2367 - DNA, 50 bp, synthetic construct
  misc_feature 1..50: note = Probe
  source 1..50: mol_type = other DNA
aagtaaggtcagctaaataagctatcgggcccataccccgaaaatgttgg

SEQ ID NO: 2368 - DNA, 15 bp, synthetic construct
  misc_feature 1..15: note = Probe
  source 1..15: mol_type = other DNA
aagtattgcaactta

SEQ ID NO: 2369 - DNA, 23 bp, synthetic construct
  misc_feature 1..23: note = Probe
  source 1..23: mol_type = other DNA
aagtcatggaggccatggggttg

SEQ ID NO: 2370 - DNA, 15 bp, synthetic construct
  misc_feature 1..15: note = Probe
  source 1..15: mol_type = other DNA
aagtgtactggaaag

SEQ ID NO: 2371 - DNA, 21 bp, synthetic construct
  misc_feature 1..21: note = Probe
  source 1..21: mol_type = other DNA
aagtgtactggaaagtgcact

SEQ ID NO: 2372 - DNA, 23 bp, synthetic construct
  misc_feature 1..23: note = Probe
  source 1..23: mol_type = other DNA
aagtgtactggaaagtgcacttg

SEQ ID NO: 2373 - DNA, 24 bp, synthetic construct
  misc_feature 1..24: note = Probe
  source 1..24: mol_type = other DNA
aagtgtactggaaagtgcacttgg

SEQ ID NO: 2374 - DNA, 25 bp, synthetic construct
  misc_feature 1..25: note = Probe
  source 1..25: mol_type = other DNA
aagtgtactggaaagtgcacttgga

SEQ ID NO: 2375 - DNA, 26 bp, synthetic construct
  misc_feature 1..26: note = Probe
  source 1..26: mol_type = other DNA
aagtgtactggaaagtgcacttggac

SEQ ID NO: 2376 - DNA, 27 bp, synthetic construct
  misc_feature 1..27: note = Probe
  source 1..27: mol_type = other DNA
aagtgtactggaaagtgcacttggacg

SEQ ID NO: 2377 - DNA, 28 bp, synthetic construct
  misc_feature 1..28: note = Probe
  source 1..28: mol_type = other DNA
aagtgtactggaaagtgcacttggacga

SEQ ID NO: 2378 - DNA, 29 bp, synthetic construct
  misc_feature 1..29: note = Probe
  source 1..29: mol_type = other DNA
aagtgtactggaaagtgcacttggacgaa

SEQ ID NO: 2379 - DNA, 30 bp, synthetic construct
  misc_feature 1..30: note = Probe
  source 1..30: mol_type = other DNA
aagtgtactggaaagtgcacttggacgaac

SEQ ID NO: 2380 - DNA, 31 bp, synthetic construct
  misc_feature 1..31: note = Probe
  source 1..31: mol_type = other DNA
aagtgtactggaaagtgcacttggacgaacc

SEQ ID NO: 2381 - DNA, 32 bp, synthetic construct
  misc_feature 1..32: note = Probe
  source 1..32: mol_type = other DNA
aagtgtactggaaagtgcacttggacgaacca

SEQ ID NO: 2382 - DNA, 33 bp, synthetic construct
  misc_feature 1..33: note = Probe
  source 1..33: mol_type = other DNA
aagtgtactggaaagtgcacttggacgaaccag

SEQ ID NO: 2383 - DNA, 34 bp, synthetic construct
  misc_feature 1..34: note = Probe
  source 1..34: mol_type = other DNA
aagtgtactggaaagtgcacttggacgaaccaga

SEQ ID NO: 2384 - DNA, 35 bp, synthetic construct
  misc_feature 1..35: note = Probe
  source 1..35: mol_type = other DNA
aagtgtactggaaagtgcacttggacgaaccagag

SEQ ID NO: 2385 - DNA, 36 bp, synthetic construct
  misc_feature 1..36: note = Probe
  source 1..36: mol_type = other DNA
aagtgtactggaaagtgcacttggacgaaccagagt

SEQ ID NO: 2386 - DNA, 37 bp, synthetic construct
  misc_feature 1..37: note = Probe
  source 1..37: mol_type = other DNA
aagtgtactggaaagtgcacttggacgaaccagagtg

SEQ ID NO: 2387 - DNA, 39 bp, synthetic construct
  misc_feature 1..39: note = Probe
  source 1..39: mol_type = other DNA
aagtgtactggaaagtgcacttggacgaaccagagtgta

SEQ ID NO: 2388 - DNA, 28 bp, synthetic construct
  misc_feature 1..28: note = Probe
  source 1..28: mol_type = other DNA
aagtgtttgtgggtttaagtcccattgg

SEQ ID NO: 2389 - DNA, 29 bp, synthetic construct
  misc_feature 1..29: note = Probe
  source 1..29: mol_type = other DNA
aagtgtttgtgggtttaagtcccattggt

SEQ ID NO: 2390 - DNA, 30 bp, synthetic construct
  misc_feature 1..30: note = Probe
  source 1..30: mol_type = other DNA
aagtgtttgtgggtttaagtcccattggtc

SEQ ID NO: 2391 - DNA, 32 bp, synthetic construct
  misc_feature 1..32: note = Probe
  source 1..32: mol_type = other DNA
aagtgtttgtgggtttaagtcccattggtcta

SEQ ID NO: 2392 - DNA, 33 bp, synthetic construct
  misc_feature 1..33: note = Probe
  source 1..33: mol_type = other DNA
aagtgtttgtgggtttaagtcccattggtctag

SEQ ID NO: 2393 - DNA, 34 bp, synthetic construct
  misc_feature 1..34: note = Probe
  source 1..34: mol_type = other DNA
aagtgtttgtgggtttaagtcccattggtctagt

SEQ ID NO: 2394 - DNA, 35 bp, synthetic construct
  misc_feature 1..35: note = Probe
  source 1..35: mol_type = other DNA
aagtgtttgtgggtttaagtcccattggtctagta

SEQ ID NO: 2395 - DNA, 38 bp, synthetic construct
  misc_feature 1..38: note = Probe
  source 1..38: mol_type = other DNA
aagttaaagattaagagaaccaacacctctttacagtg

SEQ ID NO: 2396 - DNA, 39 bp, synthetic construct
  misc_feature 1..39: note = Probe
  source 1..39: mol_type = other DNA
aagttaaagattaagagaaccaacacctctttacagtga

SEQ ID NO: 2397 - DNA, 40 bp, synthetic construct
  misc_feature 1..40: note = Probe
  source 1..40: mol_type = other DNA
aagttaaagattaagagaaccaacacctctttacagtgaa

SEQ ID NO: 2398 - DNA, 41 bp, synthetic construct
  misc_feature 1..41: note = Probe
  source 1..41: mol_type = other DNA
aagttaaagattaagagaaccaacacctctttacagtgaaa

SEQ ID NO: 2399 - DNA, 42 bp, synthetic construct
  misc_feature 1..42: note = Probe
  source 1..42: mol_type = other DNA
aagttaaagattaagagaaccaacacctctttacagtgaaat

SEQ ID NO: 2400 - DNA, 44 bp, synthetic construct
  misc_feature 1..44: note = Probe
  source 1..44: mol_type = other DNA
aagttaaagattaagagaaccaacacctctttacagtgaaatgc

SEQ ID NO: 2401 - DNA, 49 bp, synthetic construct
  misc_feature 1..49: note = Probe
  source 1..49: mol_type = other DNA
aagttaaagattaagagaaccaacacctctttacagtgaaatgccccaa

SEQ ID NO: 2402 - DNA, 50 bp, synthetic construct
  misc_feature 1..50: note = Probe
  source 1..50: mol_type = other DNA
aagttaaagattaagagaaccaacacctctttacagtgaaatgccccaac

SEQ ID NO: 2403 - DNA, 21 bp, synthetic construct
  misc_feature 1..21: note = Probe
  source 1..21: mol_type = other DNA
aataagctatcgggcccatac

SEQ ID NO: 2404 - DNA, 25 bp, synthetic construct
  misc_feature 1..25: note = Probe
  source 1..25: mol_type = other DNA
aataagctatcgggcccataccccg

SEQ ID NO: 2405 - DNA, 27 bp, synthetic construct
  misc_feature 1..27: note = Probe
  source 1..27: mol_type = other DNA
aataagctatcgggcccataccccgaa

SEQ ID NO: 2406 - DNA, 29 bp, synthetic construct
  misc_feature 1..29: note = Probe
  source 1..29: mol_type = other DNA
aataagctatcgggcccataccccgaaaa

SEQ ID NO: 2407 - DNA, 30 bp, synthetic construct
  misc_feature 1..30: note = Probe
  source 1..30: mol_type = other DNA
aataagctatcgggcccataccccgaaaat

SEQ ID NO: 2408 - DNA, 31 bp, synthetic construct
  misc_feature 1..31: note = Probe
  source 1..31: mol_type = other DNA
aataagctatcgggcccataccccgaaaatg

SEQ ID NO: 2409 - DNA, 35 bp, synthetic construct
  misc_feature 1..35: note = Probe
  source 1..35: mol_type = other DNA
aataagctatcgggcccataccccgaaaatgttgg

SEQ ID NO: 2410 - DNA, 48 bp, synthetic construct
  misc_feature 1..48: note = Probe
  source 1..48: mol_type = other DNA
aataagctatcgggcccataccccgaaaatgttggttatacccttccc

SEQ ID NO: 2411 - DNA, 50 bp, synthetic construct
  misc_feature 1..50: note = Probe
  source 1..50: mol_type = other DNA
aataagctatcgggcccataccccgaaaatgttggttatacccttcccgt

SEQ ID NO: 2412 - DNA, 33 bp, synthetic construct
  misc_feature 1..33: note = Probe
  source 1..33: mol_type = other DNA
aataataggagcttaaacccccttatttctagg

SEQ ID NO: 2413 - DNA, 49 bp, synthetic construct
  misc_feature 1..49: note = Probe
  source 1..49: mol_type = other DNA
aatacaccagtcttgtaaaccggagatgaaaacctttttccaaggacaa

SEQ ID NO: 2414 - DNA, 50 bp, synthetic construct
  misc_feature 1..50: note = Probe
  source 1..50: mol_type = other DNA
aatacaccagtcttgtaaaccggagatgaaaacctttttccaaggacaaa

SEQ ID NO: 2415 - DNA, 48 bp, synthetic construct
  misc_feature 1..48: note = Probe
  source 1..48: mol_type = other DNA
aatacactgaaaatgtttagacgggctcacatcaccccataaacaaat

SEQ ID NO: 2416 - DNA, 49 bp, synthetic construct
  misc_feature 1..49: note = Probe
  source 1..49: mol_type = other DNA
aatacactgaaaatgtttagacgggctcacatcaccccataaacaaata

SEQ ID NO: 2417 - DNA, 50 bp, synthetic construct
  misc_feature 1..50: note = Probe
  source 1..50: mol_type = other DNA
aatacactgaaaatgtttagacgggctcacatcaccccataaacaaatag

SEQ ID NO: 2418 - DNA, 20 bp, synthetic construct
  misc_feature 1..20: note = Probe
  source 1..20: mol_type = other DNA
aatacagaccaagagccttc

SEQ ID NO: 2419 - DNA, 31 bp, synthetic construct
  misc_feature 1..31: note = Probe
  source 1..31: mol_type = other DNA
aataggagcttaaacccccttatttctagga

SEQ ID NO: 2420 - DNA, 20 bp, synthetic construct
  misc_feature 1..20: note = Probe
  source 1..20: mol_type = other DNA
aataggtttggtcctagcct

SEQ ID NO: 2421 - DNA, 23 bp, synthetic construct
  misc_feature 1..23: note = Probe
  source 1..23: mol_type = other DNA
aataggtttggtcctagcctttc

SEQ ID NO: 2422 - DNA, 24 bp, synthetic construct
  misc_feature 1..24: note = Probe
  source 1..24: mol_type = other DNA
aataggtttggtcctagcctttct

SEQ ID NO: 2423 - DNA, 27 bp, synthetic construct
  misc_feature 1..27: note = Probe
  source 1..27: mol_type = other DNA
aataggtttggtcctagcctttctatt

SEQ ID NO: 2424 - DNA, 30 bp, synthetic construct
  misc_feature 1..30: note = Probe
  source 1..30: mol_type = other DNA
aataggtttggtcctagcctttctattagc

SEQ ID NO: 2425 - DNA, 50 bp, synthetic construct
  misc_feature 1..50: note = Probe
  source 1..50: mol_type = other DNA
aatagtaccgttaacttccaattaactagttttgacaacattcaaaaaag

SEQ ID NO: 2426 - DNA, 39 bp, synthetic construct
  misc_feature 1..39: note = Probe
  source 1..39: mol_type = other DNA
aatatagtttaaccaaaacatcagattgtgaatctgaca

SEQ ID NO: 2427 - DNA, 40 bp, synthetic construct
  misc_feature 1..40: note = Probe
  source 1..40: mol_type = other DNA
aatatagtttaaccaaaacatcagattgtgaatctgacaa

SEQ ID NO: 2428 - DNA, 24 bp, synthetic construct
  misc_feature 1..24: note = Probe
  source 1..24: mol_type = other DNA
aatccagcaatccgagttcgaatc

SEQ ID NO: 2429 - DNA, 25 bp, synthetic construct
  misc_feature 1..25: note = Probe
  source 1..25: mol_type = other DNA
aatccagcgatccgagttcaaatct

SEQ ID NO: 2430 - DNA, 37 bp, synthetic construct
  misc_feature 1..37: note = Probe
  source 1..37: mol_type = other DNA
aatccagcgatccgagttcaaatctcggtggaacctg

SEQ ID NO: 2431 - DNA, 38 bp, synthetic construct
  misc_feature 1..38: note = Probe
  source 1..38: mol_type = other DNA
aatccagcgatccgagttcaaatctcggtggaacctgc

SEQ ID NO: 2432 - DNA, 39 bp, synthetic construct
  misc_feature 1..39: note = Probe
  source 1..39: mol_type = other DNA
aatccagcgatccgagttcaaatctcggtggaacctgca

SEQ ID NO: 2433 - DNA, 40 bp, synthetic construct
  misc_feature 1..40: note = Probe
  source 1..40: mol_type = other DNA
aatccagcgatccgagttcaaatctcggtggaacctgcat

SEQ ID NO: 2434 - DNA, 41 bp, synthetic construct
  misc_feature 1..41: note = Probe
  source 1..41: mol_type = other DNA
aatccagcgatccgagttcaaatctcggtggaacctgcatt

SEQ ID NO: 2435 - DNA, 38 bp, synthetic construct
  misc_feature 1..38: note = Probe
  source 1..38: mol_type = other DNA
aatccagcgatccgagttcaaatctcggtggaacctgt

SEQ ID NO: 2436 - DNA, 37 bp, synthetic construct
  misc_feature 1..37: note = Probe
  source 1..37: mol_type = other DNA
aatccagcgatccgagttcaaatctcggtggaacctt

SEQ ID NO: 2437 - DNA, 38 bp, synthetic construct
  misc_feature 1..38: note = Probe
  source 1..38: mol_type = other DNA
aatccagcgatccgagttcaaatctcggtggaaccttt

SEQ ID NO: 2438 - DNA, 39 bp, synthetic construct
  misc_feature 1..39: note = Probe
  source 1..39: mol_type = other DNA
aatccagcgatccgagttcaaatctcggtggaacctttc

SEQ ID NO: 2439 - DNA, 33 bp, synthetic construct
  misc_feature 1..33: note = Probe
  source 1..33: mol_type = other DNA
aatccagcgatccgagttcaaatctcggtggga

SEQ ID NO: 2440 - DNA, 34 bp, synthetic construct
  misc_feature 1..34: note = Probe
  source 1..34: mol_type = other DNA
aatccagcgatccgagttcaaatctcggtgggac

SEQ ID NO: 2441 - DNA, 38 bp, synthetic construct
  misc_feature 1..38: note = Probe
  source 1..38: mol_type = other DNA
aatccagcgatccgagttcaaatctcggtgggacctca

SEQ ID NO: 2442 - DNA, 39 bp, synthetic construct
  misc_feature 1..39: note = Probe
  source 1..39: mol_type = other DNA
aatccagcgatccgagttcaaatctcggtgggacctcac

SEQ ID NO: 2443 - DNA, 37 bp, synthetic construct
  misc_feature 1..37: note = Probe
  source 1..37: mol_type = other DNA
aatccagcgatccgagttcaaatctcggtgggacctt

SEQ ID NO: 2444 - DNA, 40 bp, synthetic construct
  misc_feature 1..40: note = Probe
  source 1..40: mol_type = other DNA
aatccagcgatccgagttcaaatctcggtgggaccttctt

SEQ ID NO: 2445 - DNA, 22 bp, synthetic construct
  misc_feature 1..22: note = Probe
  source 1..22: mol_type = other DNA
aatccagcgatccgagttcgag

SEQ ID NO: 2446 - DNA, 37 bp, synthetic construct
  misc_feature 1..37: note = Probe
  source 1..37: mol_type = other DNA
aatccagcgatccgagttcgagtctcggtggaacctt

SEQ ID NO: 2447 - DNA, 39 bp, synthetic construct
  misc_feature 1..39: note = Probe
  source 1..39: mol_type = other DNA
aatccagcgatccgagttcgagtctcggtggaacctttg

SEQ ID NO: 2448 - DNA, 25 bp, synthetic construct
  misc_feature 1..25: note = Probe
  source 1..25: mol_type = other DNA
aatccattggggtctccccgcgcag

SEQ ID NO: 2449 - DNA, 20 bp, synthetic construct
  misc_feature 1..20: note = Probe
  source 1..20: mol_type = other DNA
aatccccggcacctccacca

SEQ ID NO: 2450 - DNA, 17 bp, synthetic construct
  misc_feature 1..17: note = Probe
  source 1..17: mol_type = other DNA
aatcccggacgagccca

SEQ ID NO: 2451 - DNA, 17 bp, synthetic construct
  misc_feature 1..17: note = Probe
  source 1..17: mol_type = other DNA
aatcccggacgagccct

SEQ ID NO: 2452 - DNA, 19 bp, synthetic construct
  misc_feature 1..19: note = Probe
  source 1..19: mol_type = other DNA
aatccgggtgccccctcaa

SEQ ID NO: 2453 - DNA, 19 bp, synthetic construct
  misc_feature 1..19: note = Probe
  source 1..19: mol_type = other DNA
aatcctatatatcttaatg

SEQ ID NO: 2454 - DNA, 19 bp, synthetic construct
  misc_feature 1..19: note = Probe
  source 1..19: mol_type = other DNA
aatcctgccgactacggca

SEQ ID NO: 2455 - DNA, 19 bp, synthetic construct
  misc_feature 1..19: note = Probe
  source 1..19: mol_type = other DNA
aatcctgccgactacgtca

SEQ ID NO: 2456 - DNA, 22 bp, synthetic construct
  misc_feature 1..22: note = Probe
  source 1..22: mol_type = other DNA
aatcgcataaaacttaaaactt

SEQ ID NO: 2457 - DNA, 25 bp, synthetic construct
  misc_feature 1..25: note = Probe
  source 1..25: mol_type = other DNA
aatcgcataaaacttaaaactttac

SEQ ID NO: 2458 - DNA, 29 bp, synthetic construct
  misc_feature 1..29: note = Probe
  source 1..29: mol_type = other DNA
aatcgcataaaacttaaaactttacagtc

SEQ ID NO: 2459 - DNA, 30 bp, synthetic construct
  misc_feature 1..30: note = Probe
  source 1..30: mol_type = other DNA
aatcgcataaaacttaaaactttacagtca

SEQ ID NO: 2460 - DNA, 37 bp, synthetic construct
  misc_feature 1..37: note = Probe
  source 1..37: mol_type = other DNA
aatcgcataaaacttaaaactttacagtcagaggttc

SEQ ID NO: 2461 - DNA, 39 bp, synthetic construct
  misc_feature 1..39: note = Probe
  source 1..39: mol_type = other DNA
aatcgcataaaacttaaaactttacagtcagaggttcaa

SEQ ID NO: 2462 - DNA, 49 bp, synthetic construct
  misc_feature 1..49: note = Probe
  source 1..49: mol_type = other DNA
aatcgcataaaacttaaaactttacagtcagaggttcaattcctcttct

SEQ ID NO: 2463 - DNA, 27 bp, synthetic construct
  misc_feature 1..27: note = Probe
  source 1..27: mol_type = other DNA
aatctaaagacaggggttaggcctctt

SEQ ID NO: 2464 - DNA, 29 bp, synthetic construct
  misc_feature 1..29: note = Probe
  source 1..29: mol_type = other DNA
aatctaaagacaggggttaggcctctttt

SEQ ID NO: 2465 - DNA, 30 bp, synthetic construct
  misc_feature 1..30: note = Probe
  source 1..30: mol_type = other DNA
aatctaaagacaggggttaggcctcttttt

SEQ ID NO: 2466 - DNA, 36 bp, synthetic construct
  misc_feature 1..36: note = Probe
  source 1..36: mol_type = other DNA
aatctaaagacaggggttaggcctctttttaccagc

SEQ ID NO: 2467 - DNA, 37 bp, synthetic construct
  misc_feature 1..37: note = Probe
  source 1..37: mol_type = other DNA
aatctaaagacaggggttaggcctctttttaccagct

SEQ ID NO: 2468 - DNA, 38 bp, synthetic construct
  misc_feature 1..38: note = Probe
  source 1..38: mol_type = other DNA
aatctaaagacaggggttaggcctctttttaccagctc

SEQ ID NO: 2469 - DNA, 39 bp, synthetic construct
  misc_feature 1..39: note = Probe
  source 1..39: mol_type = other DNA
aatctgaaggtcgtgagttcgagcctcacacggggcagt

SEQ ID NO: 2470 - DNA, 37 bp, synthetic construct
  misc_feature 1..37: note = Probe
  source 1..37: mol_type = other DNA
aatctgaaggtcgtgagttcgatcctcacacggggca

SEQ ID NO: 2471 - DNA, 39 bp, synthetic construct
  misc_feature 1..39: note = Probe
  source 1..39: mol_type = other DNA
aatctgaaggtcgtgagttcgatcctcacacggggcaca

SEQ ID NO: 2472 - DNA, 40 bp, synthetic construct
  misc_feature 1..40: note = Probe
  source 1..40: mol_type = other DNA
aatctgaaggtcgtgagttcgatcctcacacggggcacaa

SEQ ID NO: 2473 - DNA, 46 bp, synthetic construct
  misc_feature 1..46: note = Probe
  source 1..46: mol_type = other DNA
aatctgaaggtcgtgagttcgatcctcacacggggcacaataattt

SEQ ID NO: 2474 - DNA, 24 bp, synthetic construct
  misc_feature 1..24: note = Probe
  source 1..24: mol_type = other DNA
aatctgacaacagaggcttacgac

SEQ ID NO: 2475 - DNA, 25 bp, synthetic construct
  misc_feature 1..25: note = Probe
  source 1..25: mol_type = other DNA
aatctgacaacagaggcttacgacc

SEQ ID NO: 2476 - DNA, 28 bp, synthetic construct
  misc_feature 1..28: note = Probe
  source 1..28: mol_type = other DNA
aatctgacaacagaggcttacgacccct

SEQ ID NO: 2477 - DNA, 33 bp, synthetic construct
  misc_feature 1..33: note = Probe
  source 1..33: mol_type = other DNA
aatctgacaacagaggcttacgaccccttattt

SEQ ID NO: 2478 - DNA, 37 bp, synthetic construct
  misc_feature 1..37: note = Probe
  source 1..37: mol_type = other DNA
aatctgacaacagaggcttacgaccccttatttaccg

SEQ ID NO: 2479 - DNA, 38 bp, synthetic construct
  misc_feature 1..38: note = Probe
  source 1..38: mol_type = other DNA
aatctgacaacagaggcttacgaccccttatttaccga

SEQ ID NO: 2480 - DNA, 39 bp, synthetic construct
  misc_feature 1..39: note = Probe
  source 1..39: mol_type = other DNA
aatctgacaacagaggcttacgaccccttatttaccgag

SEQ ID NO: 2481 - DNA, 40 bp, synthetic construct
  misc_feature 1..40: note = Probe
  source 1..40: mol_type = other DNA
aatctgacaacagaggcttacgaccccttatttaccgaga

SEQ ID NO: 2482 - DNA, 32 bp, synthetic construct
  misc_feature 1..32: note = Probe
  source 1..32: mol_type = other DNA
aatcttagctttgggtgctaatggtggagtta

SEQ ID NO: 2483 - DNA, 50 bp, synthetic construct
  misc_feature 1..50: note = Probe
  source 1..50: mol_type = other DNA
aatcttagctttgggtgctaatggtggagttaaagactttttctctgatt

SEQ ID NO: 2484 - DNA, 45 bp, synthetic construct
  misc_feature 1..45: note = Probe
  source 1..45: mol_type = other DNA
aatgatttcgactcattaaattatgataatcatatttaccaaatg

SEQ ID NO: 2485 - DNA, 19 bp, synthetic construct
  misc_feature 1..19: note = Probe
  source 1..19: mol_type = other DNA
aatgccccaactaaatact

SEQ ID NO: 2486 - DNA, 20 bp, synthetic construct
  misc_feature 1..20: note = Probe
  source 1..20: mol_type = other DNA
aatgccccaactaaatacta

SEQ ID NO: 2487 - DNA, 21 bp, synthetic construct
  misc_feature 1..21: note = Probe
  source 1..21: mol_type = other DNA
aatgccccaactaaatactac

SEQ ID NO: 2488 - DNA, 22 bp, synthetic construct
  misc_feature 1..22: note = Probe
  source 1..22: mol_type = other DNA
aatgccccaactaaatactacc

SEQ ID NO: 2489 - DNA, 23 bp, synthetic construct
  misc_feature 1..23: note = Probe
  source 1..23: mol_type = other DNA
aatgccccaactaaatactaccg

SEQ ID NO: 2490 - DNA, 24 bp, synthetic construct
  misc_feature 1..24: note = Probe
  source 1..24: mol_type = other DNA
aatgccccaactaaatactaccgt

SEQ ID NO: 2491 - DNA, 25 bp, synthetic construct
  misc_feature 1..25: note = Probe
  source 1..25: mol_type = other DNA
aatgccccaactaaatactaccgta

SEQ ID NO: 2492 - DNA, 26 bp, synthetic construct
  misc_feature 1..26: note = Probe
  source 1..26: mol_type = other DNA
aatgccccaactaaatactaccgtat

SEQ ID NO: 2493 - DNA, 27 bp, synthetic construct
  misc_feature 1..27: note = Probe
  source 1..27: mol_type = other DNA
aatgccccaactaaatactaccgtatg

SEQ ID NO: 2494 - DNA, 29 bp, synthetic construct
  misc_feature 1..29: note = Probe
  source 1..29: mol_type = other DNA
aatgccccaactaaatactaccgtatggc

SEQ ID NO: 2495 - DNA, 25 bp, synthetic construct
  misc_feature 1..25: note = Probe
  source 1..25: mol_type = other DNA
aatggtggagttaaagactttttct

SEQ ID NO: 2496 - DNA, 29 bp, synthetic construct
  misc_feature 1..29: note = Probe
  source 1..29: mol_type = other DNA
aatggtggagttaaagactttttctctga

SEQ ID NO: 2497 - DNA, 31 bp, synthetic construct
  misc_feature 1..31: note = Probe
  source 1..31: mol_type = other DNA
aatggtggagttaaagactttttctctgatt

SEQ ID NO: 2498 - DNA, 32 bp, synthetic construct
  misc_feature 1..32: note = Probe
  source 1..32: mol_type = other DNA
aatggtggagttaaagactttttctctgattt

SEQ ID NO: 2499 - DNA, 34 bp, synthetic construct
  misc_feature 1..34: note = Probe
  source 1..34: mol_type = other DNA
aatggtggagttaaagactttttctctgatttgt

SEQ ID NO: 2500 - DNA, 36 bp, synthetic construct
  misc_feature 1..36: note = Probe
  source 1..36: mol_type = other DNA
aatggtggagttaaagactttttctctgatttgtcc

SEQ ID NO: 2501 - DNA, 37 bp, synthetic construct
  misc_feature 1..37: note = Probe
  source 1..37: mol_type = other DNA
aatgtttagacgggctcacatcaccccataaacaaat

SEQ ID NO: 2502 - DNA, 37 bp, synthetic construct
  misc_feature 1..37: note = Probe
  source 1..37: mol_type = other DNA
aattaactagttttgacaacattcaaaaaagagtaat

SEQ ID NO: 2503 - DNA, 38 bp, synthetic construct
  misc_feature 1..38: note = Probe
  source 1..38: mol_type = other DNA
aattaactagttttgacaacattcaaaaaagagtaata

SEQ ID NO: 2504 - DNA, 33 bp, synthetic construct
  misc_feature 1..33: note = Probe
  source 1..33: mol_type = other DNA
aattagaatcttagctttgggtgctaatggtgg

SEQ ID NO: 2505 - DNA, 49 bp, synthetic construct
  misc_feature 1..49: note = Probe
  source 1..49: mol_type = other DNA
aattagaatcttagctttgggtgctaatggtggagttaaagactttttc

SEQ ID NO: 2506 - DNA, 20 bp, synthetic construct
  misc_feature 1..20: note = Probe
  source 1..20: mol_type = other DNA
aattcccggtcagggaacca

SEQ ID NO: 2507 - DNA, 37 bp, synthetic construct
  misc_feature 1..37: note = Probe
  source 1..37: mol_type = other DNA
aattcgaagaagcagcttcaaacctgccggggcttct

SEQ ID NO: 2508 - DNA, 38 bp, synthetic construct
  misc_feature 1..38: note = Probe
  source 1..38: mol_type = other DNA
aattcgaagaagcagcttcaaacctgccggggcttctc

SEQ ID NO: 2509 - DNA, 39 bp, synthetic construct
  misc_feature 1..39: note = Probe
  source 1..39: mol_type = other DNA
aattcgaagaagcagcttcaaacctgccggggcttctcc

SEQ ID NO: 2510 - DNA, 31 bp, synthetic construct
  misc_feature 1..31: note = Probe
  source 1..31: mol_type = other DNA
aattgcaaattcgaagaagcagcttcaaacc

SEQ ID NO: 2511 - DNA, 32 bp, synthetic construct
  misc_feature 1..32: note = Probe
  source 1..32: mol_type = other DNA
aattgcaaattcgaagaagcagcttcaaacct

SEQ ID NO: 2512 - DNA, 36 bp, synthetic construct
  misc_feature 1..36: note = Probe
  source 1..36: mol_type = other DNA
aattgcaaattcgaagaagcagcttcaaacctgccg

SEQ ID NO: 2513 - DNA, 37 bp, synthetic construct
  misc_feature 1..37: note = Probe
  source 1..37: mol_type = other DNA
aattgcaaattcgaagaagcagcttcaaacctgccgg

SEQ ID NO: 2514 - DNA, 38 bp, synthetic construct
  misc_feature 1..38: note = Probe
  source 1..38: mol_type = other DNA
aattgcaaattcgaagaagcagcttcaaacctgccggg

SEQ ID NO: 2515 - DNA, 39 bp, synthetic construct
  misc_feature 1..39: note = Probe
  source 1..39: mol_type = other DNA
aattgcaaattcgaagaagcagcttcaaacctgccgggg

SEQ ID NO: 2516 - DNA, 40 bp, synthetic construct
  misc_feature 1..40: note = Probe
  source 1..40: mol_type = other DNA
aattgcaaattcgaagaagcagcttcaaacctgccggggc

SEQ ID NO: 2517 - DNA, 41 bp, synthetic construct
  misc_feature 1..41: note = Probe
  source 1..41: mol_type = other DNA
aattgcaaattcgaagaagcagcttcaaacctgccggggct

SEQ ID NO: 2518 - DNA, 42 bp, synthetic construct
  misc_feature 1..42: note = Probe
  source 1..42: mol_type = other DNA
aattgcaaattcgaagaagcagcttcaaacctgccggggctt

SEQ ID NO: 2519 - DNA, 43 bp, synthetic construct
  misc_feature 1..43: note = Probe
  source 1..43: mol_type = other DNA
aattgcaaattcgaagaagcagcttcaaacctgccggggcttc

SEQ ID NO: 2520 - DNA, 44 bp, synthetic construct
  misc_feature 1..44: note = Probe
  source 1..44: mol_type = other DNA
aattgcaaattcgaagaagcagcttcaaacctgccggggcttct

SEQ ID NO: 2521 - DNA, 45 bp, synthetic construct
  misc_feature 1..45: note = Probe
  source 1..45: mol_type = other DNA
aattgcaaattcgaagaagcagcttcaaacctgccggggcttctc

SEQ ID NO: 2522 - DNA, 46 bp, synthetic construct
  misc_feature 1..46: note = Probe
  source 1..46: mol_type = other DNA
aattgcaaattcgaagaagcagcttcaaacctgccggggcttctcc

SEQ ID NO: 2523 - DNA, 50 bp, synthetic construct
  misc_feature 1..50: note = Probe
  source 1..50: mol_type = other DNA
aattgcaaattcgaagaagcagcttcaaacctgccggggcttctcccgcc

SEQ ID NO: 2524 - DNA, 22 bp, synthetic construct
  misc_feature 1..22: note = Probe
  source 1..22: mol_type = other DNA
aattttggtgcaactccaaata

SEQ ID NO: 2525 - DNA, 50 bp, synthetic construct
  misc_feature 1..50: note = Probe
  source 1..50: mol_type = other DNA
acaaaacgaatgatttcgactcattaaattatgataatcatatttaccaa

SEQ ID NO: 2526 - DNA, 16 bp, synthetic construct
  misc_feature 1..16: note = Probe
  source 1..16: mol_type = other DNA
acaaagcacccaactt

SEQ ID NO: 2527 - DNA, 17 bp, synthetic construct
  misc_feature 1..17: note = Probe
  source 1..17: mol_type = other DNA
acaaagcacccaactta

SEQ ID NO: 2528 - DNA, 18 bp, synthetic construct
  misc_feature 1..18: note = Probe
  source 1..18: mol_type = other DNA
acaaagcacccaacttac

SEQ ID NO: 2529 - DNA, 19 bp, synthetic construct
  misc_feature 1..19: note = Probe
  source 1..19: mol_type = other DNA
acaaagcacccaacttaca

SEQ ID NO: 2530 - DNA, 21 bp, synthetic construct
  misc_feature 1..21: note = Probe
  source 1..21: mol_type = other DNA
acaaagcacccaacttacact

SEQ ID NO: 2531 - DNA, 22 bp, synthetic construct
  misc_feature 1..22: note = Probe
  source 1..22: mol_type = other DNA
acaaagcacccaacttacactt

SEQ ID NO: 2532 - DNA, 23 bp, synthetic construct
  misc_feature 1..23: note = Probe
  source 1..23: mol_type = other DNA
acaaagcacccaacttacactta

SEQ ID NO: 2533 - DNA, 24 bp, synthetic construct
  misc_feature 1..24: note = Probe
  source 1..24: mol_type = other DNA
acaaagcacccaacttacacttag

SEQ ID NO: 2534 - DNA, 26 bp, synthetic construct
  misc_feature 1..26: note = Probe
  source 1..26: mol_type = other DNA
acaaagcacccaacttacacttagga

SEQ ID NO: 2535 - DNA, 27 bp, synthetic construct
  misc_feature 1..27: note = Probe
  source 1..27: mol_type = other DNA
acaaagcacccaacttacacttaggag

SEQ ID NO: 2536 - DNA, 28 bp, synthetic construct
  misc_feature 1..28: note = Probe
  source 1..28: mol_type = other DNA
acaaagcacccaacttacacttaggaga

SEQ ID NO: 2537 - DNA, 30 bp, synthetic construct
  misc_feature 1..30: note = Probe
  source 1..30: mol_type = other DNA
acaaagcacccaacttacacttaggagatt

SEQ ID NO: 2538 - DNA, 33 bp, synthetic construct
  misc_feature 1..33: note = Probe
  source 1..33: mol_type = other DNA
acaaagcacccaacttacacttaggagatttca

SEQ ID NO: 2539 - DNA, 34 bp, synthetic construct
  misc_feature 1..34: note = Probe
  source 1..34: mol_type = other DNA
acaaagcacccaacttacacttaggagatttcaa

SEQ ID NO: 2540 - DNA, 35 bp, synthetic construct
  misc_feature 1..35: note = Probe
  source 1..35: mol_type = other DNA
acaaagcacccaacttacacttaggagatttcaac

SEQ ID NO: 2541 - DNA, 39 bp, synthetic construct
  misc_feature 1..39: note = Probe
  source 1..39: mol_type = other DNA
acaaagcacccaacttacacttaggagatttcaacttaa

SEQ ID NO: 2542 - DNA, 41 bp, synthetic construct
  misc_feature 1..41: note = Probe
  source 1..41: mol_type = other DNA
acaaagcacccaacttacacttaggagatttcaacttaact

SEQ ID NO: 2543 - DNA, 43 bp, synthetic construct
  misc_feature 1..43: note = Probe
  source 1..43: mol_type = other DNA
acaaagcacccaacttacacttaggagatttcaacttaacttg

SEQ ID NO: 2544 - DNA, 45 bp, synthetic construct
  misc_feature 1..45: note = Probe
  source 1..45: mol_type = other DNA
acaaagcacccaacttacacttaggagatttcaacttaacttgac

SEQ ID NO: 2545 - DNA, 46 bp, synthetic construct
  misc_feature 1..46: note = Probe
  source 1..46: mol_type = other DNA
acaaagcacccaacttacacttaggagatttcaacttaacttgacc

SEQ ID NO: 2546 - DNA, 49 bp, synthetic construct
  misc_feature 1..49: note = Probe
  source 1..49: mol_type = other DNA
acaaagcacccaacttacacttaggagatttcaacttaacttgaccgct

SEQ ID NO: 2547 - DNA, 15 bp, synthetic construct
  misc_feature 1..15: note = Probe
  source 1..15: mol_type = other DNA
acaacagaggcttac

SEQ ID NO: 2548 - DNA, 16 bp, synthetic construct
  misc_feature 1..16: note = Probe
  source 1..16: mol_type = other DNA
acaacagaggcttacg

SEQ ID NO: 2549 - DNA, 17 bp, synthetic construct
  misc_feature 1..17: note = Probe
  source 1..17: mol_type = other DNA
acaacagaggcttacga

SEQ ID NO: 2550 - DNA, 18 bp, synthetic construct
  misc_feature 1..18: note = Probe
  source 1..18: mol_type = other DNA
acaacagaggcttacgac

SEQ ID NO: 2551 - DNA, 19 bp, synthetic construct
  misc_feature 1..19: note = Probe
  source 1..19: mol_type = other DNA
acaacagaggcttacgacc

SEQ ID NO: 2552 - DNA, 20 bp, synthetic construct
  misc_feature 1..20: note = Probe
  source 1..20: mol_type = other DNA
acaacagaggcttacgaccc

SEQ ID NO: 2553 - DNA, 21 bp, synthetic construct
  misc_feature 1..21: note = Probe
  source 1..21: mol_type = other DNA
acaacagaggcttacgacccc

SEQ ID NO: 2554 - DNA, 22 bp, synthetic construct
  misc_feature 1..22: note = Probe
  source 1..22: mol_type = other DNA
acaacagaggcttacgacccct

SEQ ID NO: 2555 - DNA, 23 bp, synthetic construct
  misc_feature 1..23: note = Probe
  source 1..23: mol_type = other DNA
acaacagaggcttacgacccctt

SEQ ID NO: 2556 - DNA, 24 bp, synthetic construct
  misc_feature 1..24: note = Probe
  source 1..24: mol_type = other DNA
acaacagaggcttacgacccctta

SEQ ID NO: 2557 - DNA, 25 bp, synthetic construct
  misc_feature 1..25: note = Probe
  source 1..25: mol_type = other DNA
acaacagaggcttacgaccccttat

SEQ ID NO: 2558 - DNA, 26 bp, synthetic construct
  misc_feature 1..26: note = Probe
  source 1..26: mol_type = other DNA
acaacagaggcttacgaccccttatt

SEQ ID NO: 2559 - DNA, 27 bp, synthetic construct
  misc_feature 1..27: note = Probe
  source 1..27: mol_type = other DNA
acaacagaggcttacgaccccttattt

SEQ ID NO: 2560 - DNA, 28 bp, synthetic construct
  misc_feature 1..28: note = Probe
  source 1..28: mol_type = other DNA
acaacagaggcttacgaccccttattta

SEQ ID NO: 2561 - DNA, 29 bp, synthetic construct
  misc_feature 1..29: note = Probe
  source 1..29: mol_type = other DNA
acaacagaggcttacgaccccttatttac

SEQ ID NO: 2562 - DNA, 30 bp, synthetic construct
  misc_feature 1..30: note = Probe
  source 1..30: mol_type = other DNA
acaacagaggcttacgaccccttatttacc

SEQ ID NO: 2563 - DNA, 31 bp, synthetic construct
  misc_feature 1..31: note = Probe
  source 1..31: mol_type = other DNA
acaacagaggcttacgaccccttatttaccg

SEQ ID NO: 2564 - DNA, 32 bp, synthetic construct
  misc_feature 1..32: note = Probe
  source 1..32: mol_type = other DNA
acaacagaggcttacgaccccttatttaccga

SEQ ID NO: 2565 - DNA, 33 bp, synthetic construct
  misc_feature 1..33: note = Probe
  source 1..33: mol_type = other DNA
acaacagaggcttacgaccccttatttaccgag

SEQ ID NO: 2566 - DNA, 34 bp, synthetic construct
  misc_feature 1..34: note = Probe
  source 1..34: mol_type = other DNA
acaacagaggcttacgaccccttatttaccgaga

SEQ ID NO: 2567 - DNA, 35 bp, synthetic construct
  misc_feature 1..35: note = Probe
  source 1..35: mol_type = other DNA
acaacagaggcttacgaccccttatttaccgagaa

SEQ ID NO: 2568 - DNA, 36 bp, synthetic construct
  misc_feature 1..36: note = Probe
  source 1..36: mol_type = other DNA
acaacagaggcttacgaccccttatttaccgagaaa

SEQ ID NO: 2569 - DNA, 37 bp, synthetic construct
  misc_feature 1..37: note = Probe
  source 1..37: mol_type = other DNA
acaacagaggcttacgaccccttatttaccgagaaag

SEQ ID NO: 2570 - DNA, 38 bp, synthetic construct
  misc_feature 1..38: note = Probe
  source 1..38: mol_type = other DNA
acaacagaggcttacgaccccttatttaccgagaaagc

SEQ ID NO: 2571 - DNA, 39 bp, synthetic construct
  misc_feature 1..39: note = Probe
  source 1..39: mol_type = other DNA
acaacagaggcttacgaccccttatttaccgagaaagct

SEQ ID NO: 2572 - DNA, 40 bp, synthetic construct
  misc_feature 1..40: note = Probe
  source 1..40: mol_type = other DNA
acaacagaggcttacgaccccttatttaccgagaaagctc

SEQ ID NO: 2573 - DNA, 41 bp, synthetic construct
  misc_feature 1..41: note = Probe
  source 1..41: mol_type = other DNA
acaacagaggcttacgaccccttatttaccgagaaagctca

SEQ ID NO: 2574 - DNA, 42 bp, synthetic construct
  misc_feature 1..42: note = Probe
  source 1..42: mol_type = other DNA
acaacagaggcttacgaccccttatttaccgagaaagctcac

SEQ ID NO: 2575 - DNA, 17 bp, synthetic construct
  misc_feature 1..17: note = Probe
  source 1..17: mol_type = other DNA
acaacatggctttctca

SEQ ID NO: 2576 - DNA, 19 bp, synthetic construct
  misc_feature 1..19: note = Probe
  source 1..19: mol_type = other DNA
acaacatggctttctcaac

SEQ ID NO: 2577 - DNA, 17 bp, synthetic construct
  misc_feature 1..17: note = Probe
  source 1..17: mol_type = other DNA
acaagaactgctaactc

SEQ ID NO: 2578 - DNA, 20 bp, synthetic construct
  misc_feature 1..20: note = Probe
  source 1..20: mol_type = other DNA
acaagaactgctaactcatg

SEQ ID NO: 2579 - DNA, 23 bp, synthetic construct
  misc_feature 1..23: note = Probe
  source 1..23: mol_type = other DNA
acaagaactgctaactcatgccc

SEQ ID NO: 2580 - DNA, 24 bp, synthetic construct
  misc_feature 1..24: note = Probe
  source 1..24: mol_type = other DNA
acaagaactgctaactcatgcccc

SEQ ID NO: 2581 - DNA, 25 bp, synthetic construct
  misc_feature 1..25: note = Probe
  source 1..25: mol_type = other DNA
acaagaactgctaactcatgccccc

SEQ ID NO: 2582 - DNA, 26 bp, synthetic construct
  misc_feature 1..26: note = Probe
  source 1..26: mol_type = other DNA
acaagaactgctaactcatgccccca

SEQ ID NO: 2583 - DNA, 29 bp, synthetic construct
  misc_feature 1..29: note = Probe
  source 1..29: mol_type = other DNA
acaagaactgctaactcatgcccccatgt

SEQ ID NO: 2584 - DNA, 31 bp, synthetic construct
  misc_feature 1..31: note = Probe
  source 1..31: mol_type = other DNA
acaagaactgctaactcatgcccccatgtct

SEQ ID NO: 2585 - DNA, 32 bp, synthetic construct
  misc_feature 1..32: note = Probe
  source 1..32: mol_type = other DNA
acaagaactgctaactcatgcccccatgtcta

SEQ ID NO: 2586 - DNA, 48 bp, synthetic construct
  misc_feature 1..48: note = Probe
  source 1..48: mol_type = other DNA
acaagaactgctaactcatgcccccatgtctaacaacatggctttctc

SEQ ID NO: 2587 - DNA, 49 bp, synthetic construct
  misc_feature 1..49: note = Probe
  source 1..49: mol_type = other DNA
acaagaactgctaactcatgcccccatgtctaacaacatggctttctca

SEQ ID NO: 2588 - DNA, 50 bp, synthetic construct
  misc_feature 1..50: note = Probe
  source 1..50: mol_type = other DNA
acaagaactgctaactcatgcccccatgtctaacaacatggctttctcaa

SEQ ID NO: 2589 - DNA, 16 bp, synthetic construct
  misc_feature 1..16: note = Probe
  source 1..16: mol_type = other DNA
acacaaagcacccaac

SEQ ID NO: 2590 - DNA, 17 bp, synthetic construct
  misc_feature 1..17: note = Probe
  source 1..17: mol_type = other DNA
acacaaagcacccaact

SEQ ID NO: 2591 - DNA, 21 bp, synthetic construct
  misc_feature 1..21: note = Probe
  source 1..21: mol_type = other DNA
acacaaagcacccaacttaca

SEQ ID NO: 2592 - DNA, 23 bp, synthetic construct
  misc_feature 1..23: note = Probe
  source 1..23: mol_type = other DNA
acacaaagcacccaacttacact

SEQ ID NO: 2593 - DNA, 24 bp, synthetic construct
  misc_feature 1..24: note = Probe
  source 1..24: mol_type = other DNA
acacaaagcacccaacttacactt

SEQ ID NO: 2594 - DNA, 25 bp, synthetic construct
  misc_feature 1..25: note = Probe
  source 1..25: mol_type = other DNA
acacaaagcacccaacttacactta

SEQ ID NO: 2595 - DNA, 26 bp, synthetic construct
  misc_feature 1..26: note = Probe
  source 1..26: mol_type = other DNA
acacaaagcacccaacttacacttag

SEQ ID NO: 2596 - DNA, 29 bp, synthetic construct
  misc_feature 1..29: note = Probe
  source 1..29: mol_type = other DNA
acacaaagcacccaacttacacttaggag

SEQ ID NO: 2597 - DNA, 31 bp, synthetic construct
  misc_feature 1..31: note = Probe
  source 1..31: mol_type = other DNA
acacaaagcacccaacttacacttaggagat

SEQ ID NO: 2598 - DNA, 35 bp, synthetic construct
  misc_feature 1..35: note = Probe
  source 1..35: mol_type = other DNA
acacaaagcacccaacttacacttaggagatttca

SEQ ID NO: 2599 - DNA, 37 bp, synthetic construct
  misc_feature 1..37: note = Probe
  source 1..37: mol_type = other DNA
acacaaagcacccaacttacacttaggagatttcaac

SEQ ID NO: 2600 - DNA, 39 bp, synthetic construct
  misc_feature 1..39: note = Probe
  source 1..39: mol_type = other DNA
acacaaagcacccaacttacacttaggagatttcaactt

SEQ ID NO: 2601 - DNA, 43 bp, synthetic construct
  misc_feature 1..43: note = Probe
  source 1..43: mol_type = other DNA
acacaaagcacccaacttacacttaggagatttcaacttaact

SEQ ID NO: 2602 - DNA, 46 bp, synthetic construct
  misc_feature 1..46: note = Probe
  source 1..46: mol_type = other DNA
acaccagtcttgtaaaccggagatgaaaacctttttccaaggacaa

SEQ ID NO: 2603 - DNA, 50 bp, synthetic construct
  misc_feature 1..50: note = Probe
  source 1..50: mol_type = other DNA
acaccagtcttgtaaaccggagatgaaaacctttttccaaggacaaatca

SEQ ID NO: 2604 - DNA, 23 bp, synthetic construct
  misc_feature 1..23: note = Probe
  source 1..23: mol_type = other DNA
acacccacccaagaacagggttt

SEQ ID NO: 2605 - DNA, 24 bp, synthetic construct
  misc_feature 1..24: note = Probe
  source 1..24: mol_type = other DNA
acacccacccaagaacagggtttg

SEQ ID NO: 2606 - DNA, 25 bp, synthetic construct
  misc_feature 1..25: note = Probe
  source 1..25: mol_type = other DNA
acacccacccaagaacagggtttgt

SEQ ID NO: 2607 - DNA, 26 bp, synthetic construct
  misc_feature 1..26: note = Probe
  source 1..26: mol_type = other DNA
acacccacccaagaacagggtttgtt

SEQ ID NO: 2608 - DNA, 27 bp, synthetic construct
  misc_feature 1..27: note = Probe
  source 1..27: mol_type = other DNA
acacccacccaagaacagggtttgtta

SEQ ID NO: 2609 - DNA, 23 bp, synthetic construct
  misc_feature 1..23: note = Probe
  source 1..23: mol_type = other DNA
acacctcagaaggtctcactttt

SEQ ID NO: 2610 - DNA, 18 bp, synthetic construct
  misc_feature 1..18: note = Probe
  source 1..18: mol_type = other DNA
acacctctttacagtgaa

SEQ ID NO: 2611 - DNA, 19 bp, synthetic construct
  misc_feature 1..19: note = Probe
  source 1..19: mol_type = other DNA
acacctctttacagtgaaa

SEQ ID NO: 2612 - DNA, 20 bp, synthetic construct
  misc_feature 1..20: note = Probe
  source 1..20: mol_type = other DNA
acacctctttacagtgaaat

SEQ ID NO: 2613 - DNA, 42 bp, synthetic construct
  misc_feature 1..42: note = Probe
  source 1..42: mol_type = other DNA
acacgcagaaggtcctgggttcgagccccagtggaaccacgg

SEQ ID NO: 2614 - DNA, 24 bp, synthetic construct
  misc_feature 1..24: note = Probe
  source 1..24: mol_type = other DNA
acacgcgaaaggtccccggttcga

SEQ ID NO: 2615 - DNA, 19 bp, synthetic construct
  misc_feature 1..19: note = Probe
  source 1..19: mol_type = other DNA
acacggggcacaataattt

SEQ ID NO: 2616 - DNA, 28 bp, synthetic construct
  misc_feature 1..28: note = Probe
  source 1..28: mol_type = other DNA
acactgaaaatgtttagacgggctcaca

SEQ ID NO: 2617 - DNA, 29 bp, synthetic construct
  misc_feature 1..29: note = Probe
  source 1..29: mol_type = other DNA
acactgaaaatgtttagacgggctcacat

SEQ ID NO: 2618 - DNA, 44 bp, synthetic construct
  misc_feature 1..44: note = Probe
  source 1..44: mol_type = other DNA
acactgaaaatgtttagacgggctcacatcaccccataaacaaa

SEQ ID NO: 2619 - DNA, 45 bp, synthetic construct
  misc_feature 1..45: note = Probe
  source 1..45: mol_type = other DNA
acactgaaaatgtttagacgggctcacatcaccccataaacaaat

SEQ ID NO: 2620 - DNA, 46 bp, synthetic construct
  misc_feature 1..46: note = Probe
  source 1..46: mol_type = other DNA
acactgaaaatgtttagacgggctcacatcaccccataaacaaata

SEQ ID NO: 2621 - DNA, 50 bp, synthetic construct
  misc_feature 1..50: note = Probe
  source 1..50: mol_type = other DNA
acactgaaaatgtttagacgggctcacatcaccccataaacaaataggtt

SEQ ID NO: 2622 - DNA, 17 bp, synthetic construct
  misc_feature 1..17: note = Probe
  source 1..17: mol_type = other DNA
acacttaggagatttca

SEQ ID NO: 2623 - DNA, 19 bp, synthetic construct
  misc_feature 1..19: note = Probe
  source 1..19: mol_type = other DNA
acacttaggagatttcaac

SEQ ID NO: 2624 - DNA, 29 bp, synthetic construct
  misc_feature 1..29: note = Probe
  source 1..29: mol_type = other DNA
acacttaggagatttcaacttaacttgac

SEQ ID NO: 2625 - DNA, 31 bp, synthetic construct
  misc_feature 1..31: note = Probe
  source 1..31: mol_type = other DNA
acacttaggagatttcaacttaacttgaccg

SEQ ID NO: 2626 - DNA, 32 bp, synthetic construct
  misc_feature 1..32: note = Probe
  source 1..32: mol_type = other DNA
acacttaggagatttcaacttaacttgaccgc

SEQ ID NO: 2627 - DNA, 33 bp, synthetic construct
  misc_feature 1..33: note = Probe
  source 1..33: mol_type = other DNA
acacttaggagatttcaacttaacttgaccgct

SEQ ID NO: 2628 - DNA, 34 bp, synthetic construct
  misc_feature 1..34: note = Probe
  source 1..34: mol_type = other DNA
acacttaggagatttcaacttaacttgaccgctc

SEQ ID NO: 2629 - DNA, 37 bp, synthetic construct
  misc_feature 1..37: note = Probe
  source 1..37: mol_type = other DNA
acacttaggagatttcaacttaacttgaccgctctga

SEQ ID NO: 2630 - DNA, 38 bp, synthetic construct
  misc_feature 1..38: note = Probe
  source 1..38: mol_type = other DNA
acacttaggagatttcaacttaacttgaccgctctgag

SEQ ID NO: 2631 - DNA, 39 bp, synthetic construct
  misc_feature 1..39: note = Probe
  source 1..39: mol_type = other DNA
acacttaggagatttcaacttaacttgaccgctctgagc

SEQ ID NO: 2632 - DNA, 40 bp, synthetic construct
  misc_feature 1..40: note = Probe
  source 1..40: mol_type = other DNA
acacttaggagatttcaacttaacttgaccgctctgagct

SEQ ID NO: 2633 - DNA, 41 bp, synthetic construct
  misc_feature 1..41: note = Probe
  source 1..41: mol_type = other DNA
acacttaggagatttcaacttaacttgaccgctctgagcta

SEQ ID NO: 2634 - DNA, 42 bp, synthetic construct
  misc_feature 1..42: note = Probe
  source 1..42: mol_type = other DNA
acacttaggagatttcaacttaacttgaccgctctgagctaa

SEQ ID NO: 2635 - DNA, 43 bp, synthetic construct
  misc_feature 1..43: note = Probe
  source 1..43: mol_type = other DNA
acacttaggagatttcaacttaacttgaccgctctgagctaaa

SEQ ID NO: 2636 - DNA, 17 bp, synthetic construct
  misc_feature 1..17: note = Probe
  source 1..17: mol_type = other DNA
acagaccaagagccttc

SEQ ID NO: 2637 - DNA, 24 bp, synthetic construct
  misc_feature 1..24: note = Probe
  source 1..24: mol_type = other DNA
acagaccaagagccttcaaagccc

SEQ ID NO: 2638 - DNA, 28 bp, synthetic construct
  misc_feature 1..28: note = Probe
  source 1..28: mol_type = other DNA
acagaggcttacgaccccttatttaccg

SEQ ID NO: 2639 - DNA, 29 bp, synthetic construct
  misc_feature 1..29: note = Probe
  source 1..29: mol_type = other DNA
acagaggcttacgaccccttatttaccga

SEQ ID NO: 2640 - DNA, 30 bp, synthetic construct
  misc_feature 1..30: note = Probe
  source 1..30: mol_type = other DNA
acagaggcttacgaccccttatttaccgag

SEQ ID NO: 2641 - DNA, 16 bp, synthetic construct
  misc_feature 1..16: note = Probe
  source 1..16: mol_type = other DNA
acagctatccattggt

SEQ ID NO: 2642 - DNA, 18 bp, synthetic construct
  misc_feature 1..18: note = Probe
  source 1..18: mol_type = other DNA
acagctatccattggtct

SEQ ID NO: 2643 - DNA, 49 bp, synthetic construct
  misc_feature 1..49: note = Probe
  source 1..49: mol_type = other DNA
acagctatccattggtcttaggccccaaaaattttggtgcaactccaaa

SEQ ID NO: 2644 - DNA, 50 bp, synthetic construct
  misc_feature 1..50: note = Probe
  source 1..50: mol_type = other DNA
acagctatccattggtcttaggccccaaaaattttggtgcaactccaaat

SEQ ID NO: 2645 - DNA, 33 bp, synthetic construct
  misc_feature 1..33: note = Probe
  source 1..33: mol_type = other DNA
acaggagatcctgggttcgaatcccagcggtgc

SEQ ID NO: 2646 - DNA, 35 bp, synthetic construct
  misc_feature 1..35: note = Probe
  source 1..35: mol_type = other DNA
acaggagatcctgggttcgaatcccagcggtgcct

SEQ ID NO: 2647 - DNA, 37 bp, synthetic construct
  misc_feature 1..37: note = Probe
  source 1..37: mol_type = other DNA
acaggagatcctgggttcgaatcccagcggtgcctcc

SEQ ID NO: 2648 - DNA, 38 bp, synthetic construct
  misc_feature 1..38: note = Probe
  source 1..38: mol_type = other DNA
acaggagatcctgggttcgaatcccagcggtgcctccg

SEQ ID NO: 2649 - DNA, 23 bp, synthetic construct
  misc_feature 1..23: note = Probe
  source 1..23: mol_type = other DNA
acagtcagaggttcaattcctct

SEQ ID NO: 2650 - DNA, 24 bp, synthetic construct
  misc_feature 1..24: note = Probe
  source 1..24: mol_type = other DNA
acagtcagaggttcaattcctctt

SEQ ID NO: 2651 - DNA, 26 bp, synthetic construct
  misc_feature 1..26: note = Probe
  source 1..26: mol_type = other DNA
acagtcagaggttcaattcctcttct

SEQ ID NO: 2652 - DNA, 27 bp, synthetic construct
  misc_feature 1..27: note = Probe
  source 1..27: mol_type = other DNA
acagtcagaggttcaattcctcttctt

SEQ ID NO: 2653 - DNA, 28 bp, synthetic construct
  misc_feature 1..28: note = Probe
  source 1..28: mol_type = other DNA
acagtcagaggttcaattcctcttctta

SEQ ID NO: 2654 - DNA, 31 bp, synthetic construct
  misc_feature 1..31: note = Probe
  source 1..31: mol_type = other DNA
acagtcagaggttcaattcctcttcttaaca

SEQ ID NO: 2655 - DNA, 33 bp, synthetic construct
  misc_feature 1..33: note = Probe
  source 1..33: mol_type = other DNA
acagtcagaggttcaattcctcttcttaacaac

SEQ ID NO: 2656 - DNA, 34 bp, synthetic construct
  misc_feature 1..34: note = Probe
  source 1..34: mol_type = other DNA
acagtcagaggttcaattcctcttcttaacaaca

SEQ ID NO: 2657 - DNA, 19 bp, synthetic construct
  misc_feature 1..19: note = Probe
  source 1..19: mol_type = other DNA
acatacccatggccaacct

SEQ ID NO: 2658 - DNA, 20 bp, synthetic construct
  misc_feature 1..20: note = Probe
  source 1..20: mol_type = other DNA
acatacccatggccaacctc

SEQ ID NO: 2659 - DNA, 21 bp, synthetic construct
  misc_feature 1..21: note = Probe
  source 1..21: mol_type = other DNA
acatacccatggccaacctcc

SEQ ID NO: 2660 - DNA, 22 bp, synthetic construct
  misc_feature 1..22: note = Probe
  source 1..22: mol_type = other DNA
acatacccatggccaacctcct

SEQ ID NO: 2661 - DNA, 23 bp, synthetic construct
  misc_feature 1..23: note = Probe
  source 1..23: mol_type = other DNA
acatacccatggccaacctccta

SEQ ID NO: 2662 - DNA, 24 bp, synthetic construct
  misc_feature 1..24: note = Probe
  source 1..24: mol_type = other DNA
acatacccatggccaacctcctac

SEQ ID NO: 2663 - DNA, 25 bp, synthetic construct
  misc_feature 1..25: note = Probe
  source 1..25: mol_type = other DNA
acatacccatggccaacctcctact

SEQ ID NO: 2664 - DNA, 26 bp, synthetic construct
  misc_feature 1..26: note = Probe
  source 1..26: mol_type = other DNA
acatacccatggccaacctcctactc

SEQ ID NO: 2665 - DNA, 27 bp, synthetic construct
  misc_feature 1..27: note = Probe
  source 1..27: mol_type = other DNA
acatacccatggccaacctcctactcc

SEQ ID NO: 2666 - DNA, 28 bp, synthetic construct
  misc_feature 1..28: note = Probe
  source 1..28: mol_type = other DNA
acatacccatggccaacctcctactcct

SEQ ID NO: 2667 - DNA, 29 bp, synthetic construct
  misc_feature 1..29: note = Probe
  source 1..29: mol_type = other DNA
acatacccatggccaacctcctactcctc

SEQ ID NO: 2668 - DNA, 30 bp, synthetic construct
  misc_feature 1..30: note = Probe
  source 1..30: mol_type = other DNA
acatacccatggccaacctcctactcctca

SEQ ID NO: 2669 - DNA, 20 bp, synthetic construct
  misc_feature 1..20: note = Probe
  source 1..20: mol_type = other DNA
acatatgtccgcgtgggttc

SEQ ID NO: 2670 - DNA, 16 bp, synthetic construct
  misc_feature 1..16: note = Probe
  source 1..16: mol_type = other DNA
acatcaccccataaac

SEQ ID NO: 2671 - DNA, 17 bp, synthetic construct
  misc_feature 1..17: note = Probe
  source 1..17: mol_type = other DNA
acatcaccccataaaca

SEQ ID NO: 2672 - DNA, 18 bp, synthetic construct
  misc_feature 1..18: note = Probe
  source 1..18: mol_type = other DNA
acatcaccccataaacaa

SEQ ID NO: 2673 - DNA, 19 bp, synthetic construct
  misc_feature 1..19: note = Probe
  source 1..19: mol_type = other DNA
acatcaccccataaacaaa

SEQ ID NO: 2674 - DNA, 20 bp, synthetic construct
  misc_feature 1..20: note = Probe
  source 1..20: mol_type = other DNA
acatcaccccataaacaaat

SEQ ID NO: 2675 - DNA, 22 bp, synthetic construct
  misc_feature 1..22: note = Probe
  source 1..22: mol_type = other DNA
acatcagattgtgaatctgaca

SEQ ID NO: 2676 - DNA, 31 bp, synthetic construct
  misc_feature 1..31: note = Probe
  source 1..31: mol_type = other DNA
acatcagattgtgaatctgacaacagaggct

SEQ ID NO: 2677 - DNA, 32 bp, synthetic construct
  misc_feature 1..32: note = Probe
  source 1..32: mol_type = other DNA
acatcagattgtgaatctgacaacagaggctt

SEQ ID NO: 2678 - DNA, 33 bp, synthetic construct
  misc_feature 1..33: note = Probe
  source 1..33: mol_type = other DNA
acatcagattgtgaatctgacaacagaggctta

SEQ ID NO: 2679 - DNA, 39 bp, synthetic construct
  misc_feature 1..39: note = Probe
  source 1..39: mol_type = other DNA
acatcagattgtgaatctgacaacagaggcttacgaccc

SEQ ID NO: 2680 - DNA, 40 bp, synthetic construct
  misc_feature 1..40: note = Probe
  source 1..40: mol_type = other DNA
acatcagattgtgaatctgacaacagaggcttacgacccc

SEQ ID NO: 2681 - DNA, 41 bp, synthetic construct
  misc_feature 1..41: note = Probe
  source 1..41: mol_type = other DNA
acatcagattgtgaatctgacaacagaggcttacgacccct

SEQ ID NO: 2682 - DNA, 44 bp, synthetic construct
  misc_feature 1..44: note = Probe
  source 1..44: mol_type = other DNA
acatcagattgtgaatctgacaacagaggcttacgaccccttat

SEQ ID NO: 2683 - DNA, 45 bp, synthetic construct
  misc_feature 1..45: note = Probe
  source 1..45: mol_type = other DNA
acatcagattgtgaatctgacaacagaggcttacgaccccttatt

SEQ ID NO: 2684 - DNA, 46 bp, synthetic construct
  misc_feature 1..46: note = Probe
  source 1..46: mol_type = other DNA
acatcagattgtgaatctgacaacagaggcttacgaccccttattt

SEQ ID NO: 2685 - DNA, 50 bp, synthetic construct
  misc_feature 1..50: note = Probe
  source 1..50: mol_type = other DNA
acatcagattgtgaatctgacaacagaggcttacgaccccttatttaccg

SEQ ID NO: 2686 - DNA, 25 bp, synthetic construct
  misc_feature 1..25: note = Probe
  source 1..25: mol_type = other DNA
acatgcagcgcaagtaggtctacaa

SEQ ID NO: 2687 - DNA, 25 bp, synthetic construct
  misc_feature 1..25: note = Probe
  source 1..25: mol_type = other DNA
acatggtctagcggttaggattcct

SEQ ID NO: 2688 - DNA, 29 bp, synthetic construct
  misc_feature 1..29: note = Probe
  source 1..29: mol_type = other DNA
acatggtctagcggttaggattcctggtt

SEQ ID NO: 2689 - DNA, 30 bp, synthetic construct
  misc_feature 1..30: note = Probe
  source 1..30: mol_type = other DNA
acatggtctagcggttaggattcctggttt

SEQ ID NO: 2690 - DNA, 31 bp, synthetic construct
  misc_feature 1..31: note = Probe
  source 1..31: mol_type = other DNA
acatggtctagcggttaggattcctggtttt

SEQ ID NO: 2691 - DNA, 33 bp, synthetic construct
  misc_feature 1..33: note = Probe
  source 1..33: mol_type = other DNA
acatggtctagcggttaggattcctggttttca

SEQ ID NO: 2692 - DNA, 28 bp, synthetic construct
  misc_feature 1..28: note = Probe
  source 1..28: mol_type = other DNA
accaaaacatcagattgtgaatctgaca

SEQ ID NO: 2693 - DNA, 29 bp, synthetic construct
  misc_feature 1..29: note = Probe
  source 1..29: mol_type = other DNA
accaaaacatcagattgtgaatctgacaa

SEQ ID NO: 2694 - DNA, 30 bp, synthetic construct
  misc_feature 1..30: note = Probe
  source 1..30: mol_type = other DNA
accaaaacatcagattgtgaatctgacaac

SEQ ID NO: 2695 - DNA, 31 bp, synthetic construct
  misc_feature 1..31: note = Probe
  source 1..31: mol_type = other DNA
accaaaacatcagattgtgaatctgacaaca

SEQ ID NO: 2696 - DNA, 35 bp, synthetic construct
  misc_feature 1..35: note = Probe
  source 1..35: mol_type = other DNA
accaaaacatcagattgtgaatctgacaacagagg

SEQ ID NO: 2697 - DNA, 37 bp, synthetic construct
  misc_feature 1..37: note = Probe
  source 1..37: mol_type = other DNA
accaaaacatcagattgtgaatctgacaacagaggct

SEQ ID NO: 2698 - DNA, 38 bp, synthetic construct
  misc_feature 1..38: note = Probe
  source 1..38: mol_type = other DNA
accaaaacatcagattgtgaatctgacaacagaggctt

SEQ ID NO: 2699 - DNA, 40 bp, synthetic construct
  misc_feature 1..40: note = Probe
  source 1..40: mol_type = other DNA
accaaaacatcagattgtgaatctgacaacagaggcttac

SEQ ID NO: 2700 - DNA, 45 bp, synthetic construct
  misc_feature 1..45: note = Probe
  source 1..45: mol_type = other DNA
accaaaacatcagattgtgaatctgacaacagaggcttacgaccc

SEQ ID NO: 2701 - DNA, 48 bp, synthetic construct
  misc_feature 1..48: note = Probe
  source 1..48: mol_type = other DNA
accaaaacatcagattgtgaatctgacaacagaggcttacgacccctt

SEQ ID NO: 2702 - DNA, 21 bp, synthetic construct
  misc_feature 1..21: note = Probe
  source 1..21: mol_type = other DNA
accaacacctctttacagtga

SEQ ID NO: 2703 - DNA, 23 bp, synthetic construct
  misc_feature 1..23: note = Probe
  source 1..23: mol_type = other DNA
accaacacctctttacagtgaaa

SEQ ID NO: 2704 - DNA, 24 bp, synthetic construct
  misc_feature 1..24: note = Probe
  source 1..24: mol_type = other DNA
accaacacctctttacagtgaaat

SEQ ID NO: 2705 - DNA, 25 bp, synthetic construct
  misc_feature 1..25: note = Probe
  source 1..25: mol_type = other DNA
accaacacctctttacagtgaaatg

SEQ ID NO: 2706 - DNA, 17 bp, synthetic construct
  misc_feature 1..17: note = Probe
  source 1..17: mol_type = other DNA
accaagagccttcaaag

SEQ ID NO: 2707 - DNA, 23 bp, synthetic construct
  misc_feature 1..23: note = Probe
  source 1..23: mol_type = other DNA
accagaatggccgagtggttaag

SEQ ID NO: 2708 - DNA, 17 bp, synthetic construct
  misc_feature 1..17: note = Probe
  source 1..17: mol_type = other DNA
accagctttggggggtt

SEQ ID NO: 2709 - DNA, 18 bp, synthetic construct
  misc_feature 1..18: note = Probe
  source 1..18: mol_type = other DNA
accagctttggggggttc

SEQ ID NO: 2710 - DNA, 19 bp, synthetic construct
  misc_feature 1..19: note = Probe
  source 1..19: mol_type = other DNA
accagctttggggggttcg

SEQ ID NO: 2711 - DNA, 20 bp, synthetic construct
  misc_feature 1..20: note = Probe
  source 1..20: mol_type = other DNA
accagctttggggggttcga

SEQ ID NO: 2712 - DNA, 29 bp, synthetic construct
  misc_feature 1..29: note = Probe
  source 1..29: mol_type = other DNA
accagctttggggggttcgattccttcct

SEQ ID NO: 2713 - DNA, 31 bp, synthetic construct
  misc_feature 1..31: note = Probe
  source 1..31: mol_type = other DNA
accagctttggggggttcgattccttccttt

SEQ ID NO: 2714 - DNA, 32 bp, synthetic construct
  misc_feature 1..32: note = Probe
  source 1..32: mol_type = other DNA
accagctttggggggttcgattccttcctttt

SEQ ID NO: 2715 - DNA, 33 bp, synthetic construct
  misc_feature 1..33: note = Probe
  source 1..33: mol_type = other DNA
accagctttggggggttcgattccttccttttt

SEQ ID NO: 2716 - DNA, 34 bp, synthetic construct
  misc_feature 1..34: note = Probe
  source 1..34: mol_type = other DNA
accagctttggggggttcgattccttcctttttt

SEQ ID NO: 2717 - DNA, 35 bp, synthetic construct
  misc_feature 1..35: note = Probe
  source 1..35: mol_type = other DNA
accagctttggggggttcgattccttccttttttg

SEQ ID NO: 2718 - DNA, 36 bp, synthetic construct
  misc_feature 1..36: note = Probe
  source 1..36: mol_type = other DNA
accagctttggggggttcgattccttccttttttgt

SEQ ID NO: 2719 - DNA, 37 bp, synthetic construct
  misc_feature 1..37: note = Probe
  source 1..37: mol_type = other DNA
accagctttggggggttcgattccttccttttttgtc

SEQ ID NO: 2720 - DNA, 38 bp, synthetic construct
  misc_feature 1..38: note = Probe
  source 1..38: mol_type = other DNA
accagctttggggggttcgattccttccttttttgtct

SEQ ID NO: 2721 - DNA, 39 bp, synthetic construct
  misc_feature 1..39: note = Probe
  source 1..39: mol_type = other DNA
accagctttggggggttcgattccttccttttttgtcta

SEQ ID NO: 2722 - DNA, 21 bp, synthetic construct
  misc_feature 1..21: note = Probe
  source 1..21: mol_type = other DNA
accaggatggccgagtggtta

SEQ ID NO: 2723 - DNA, 22 bp, synthetic construct
  misc_feature 1..22: note = Probe
  source 1..22: mol_type = other DNA
accaggatggccgagtggttaa

SEQ ID NO: 2724 - DNA, 25 bp, synthetic construct
  misc_feature 1..25: note = Probe
  source 1..25: mol_type = other DNA
accaggatggccgagtggttaaggc

SEQ ID NO: 2725 - DNA, 19 bp, synthetic construct
  misc_feature 1..19: note = Probe
  source 1..19: mol_type = other DNA
accaggggtcgcgagttca

SEQ ID NO: 2726 - DNA, 37 bp, synthetic construct
  misc_feature 1..37: note = Probe
  source 1..37: mol_type = other DNA
accaggggtcgcgagttcaaatctcgctggggcctcg

SEQ ID NO: 2727 - DNA, 38 bp, synthetic construct
  misc_feature 1..38: note = Probe
  source 1..38: mol_type = other DNA
accaggggtcgcgagttcaaatctcgctggggcctcgg

SEQ ID NO: 2728 - DNA, 38 bp, synthetic construct
  misc_feature 1..38: note = Probe
  source 1..38: mol_type = other DNA
accaggggtcgcgagttcaattctcgctggggcctgtg

SEQ ID NO: 2729 - DNA, 46 bp, synthetic construct
  misc_feature 1..46: note = Probe
  source 1..46: mol_type = other DNA
accagtcttgtaaaccggagatgaaaacctttttccaaggacaaat

SEQ ID NO: 2730 - DNA, 24 bp, synthetic construct
  misc_feature 1..24: note = Probe
  source 1..24: mol_type = other DNA
accatttcataactttgtcaaagt

SEQ ID NO: 2731 - DNA, 20 bp, synthetic construct
  misc_feature 1..20: note = Probe
  source 1..20: mol_type = other DNA
acccaacttacacttaggag

SEQ ID NO: 2732 - DNA, 21 bp, synthetic construct
  misc_feature 1..21: note = Probe
  source 1..21: mol_type = other DNA
acccaacttacacttaggaga

SEQ ID NO: 2733 - DNA, 22 bp, synthetic construct
  misc_feature 1..22: note = Probe
  source 1..22: mol_type = other DNA
acccaacttacacttaggagat

SEQ ID NO: 2734 - DNA, 23 bp, synthetic construct
  misc_feature 1..23: note = Probe
  source 1..23: mol_type = other DNA
acccaacttacacttaggagatt

SEQ ID NO: 2735 - DNA, 25 bp, synthetic construct
  misc_feature 1..25: note = Probe
  source 1..25: mol_type = other DNA
acccaacttacacttaggagatttc

SEQ ID NO: 2736 - DNA, 26 bp, synthetic construct
  misc_feature 1..26: note = Probe
  source 1..26: mol_type = other DNA
acccaacttacacttaggagatttca

SEQ ID NO: 2737 - DNA, 28 bp, synthetic construct
  misc_feature 1..28: note = Probe
  source 1..28: mol_type = other DNA
acccaacttacacttaggagatttcaac

SEQ ID NO: 2738 - DNA, 29 bp, synthetic construct
  misc_feature 1..29: note = Probe
  source 1..29: mol_type = other DNA
acccaacttacacttaggagatttcaact

SEQ ID NO: 2739 - DNA, 30 bp, synthetic construct
  misc_feature 1..30: note = Probe
  source 1..30: mol_type = other DNA
acccaacttacacttaggagatttcaactt

SEQ ID NO: 2740 - DNA, 31 bp, synthetic construct
  misc_feature 1..31: note = Probe
  source 1..31: mol_type = other DNA
acccaacttacacttaggagatttcaactta

SEQ ID NO: 2741 - DNA, 33 bp, synthetic construct
  misc_feature 1..33: note = Probe
  source 1..33: mol_type = other DNA
acccaacttacacttaggagatttcaacttaac

SEQ ID NO: 2742 - DNA, 38 bp, synthetic construct
  misc_feature 1..38: note = Probe
  source 1..38: mol_type = other DNA
acccaacttacacttaggagatttcaacttaacttgac

SEQ ID NO: 2743 - DNA, 40 bp, synthetic construct
  misc_feature 1..40: note = Probe
  source 1..40: mol_type = other DNA
acccaacttacacttaggagatttcaacttaacttgaccg

SEQ ID NO: 2744 - DNA, 42 bp, synthetic construct
  misc_feature 1..42: note = Probe
  source 1..42: mol_type = other DNA
acccaacttacacttaggagatttcaacttaacttgaccgct

SEQ ID NO: 2745 - DNA, 43 bp, synthetic construct
  misc_feature 1..43: note = Probe
  source 1..43: mol_type = other DNA
acccaacttacacttaggagatttcaacttaacttgaccgctc

SEQ ID NO: 2746 - DNA, 45 bp, synthetic construct
  misc_feature 1..45: note = Probe
  source 1..45: mol_type = other DNA
acccaacttacacttaggagatttcaacttaacttgaccgctctg

SEQ ID NO: 2747 - DNA, 46 bp, synthetic construct
  misc_feature 1..46: note = Probe
  source 1..46: mol_type = other DNA
acccaacttacacttaggagatttcaacttaacttgaccgctctga

SEQ ID NO: 2748 - DNA, 49 bp, synthetic construct
  misc_feature 1..49: note = Probe
  source 1..49: mol_type = other DNA
acccaacttacacttaggagatttcaacttaacttgaccgctctgagct

SEQ ID NO: 2749 - DNA, 50 bp, synthetic construct
  misc_feature 1..50: note = Probe
  source 1..50: mol_type = other DNA
acccaacttacacttaggagatttcaacttaacttgaccgctctgagcta

SEQ ID NO: 2750 - DNA, 25 bp, synthetic construct
  misc_feature 1..25: note = Probe
  source 1..25: mol_type = other DNA
acccacacccacccaagaacagggt

SEQ ID NO: 2751 - DNA, 26 bp, synthetic construct
  misc_feature 1..26: note = Probe
  source 1..26: mol_type = other DNA
acccacacccacccaagaacagggtt

SEQ ID NO: 2752 - DNA, 27 bp, synthetic construct
  misc_feature 1..27: note = Probe
  source 1..27: mol_type = other DNA
acccacacccacccaagaacagggttt

SEQ ID NO: 2753 - DNA, 28 bp, synthetic construct
  misc_feature 1..28: note = Probe
  source 1..28: mol_type = other DNA
acccacacccacccaagaacagggtttg

SEQ ID NO: 2754 - DNA, 29 bp, synthetic construct
  misc_feature 1..29: note = Probe
  source 1..29: mol_type = other DNA
acccacacccacccaagaacagggtttgt

SEQ ID NO: 2755 - DNA, 31 bp, synthetic construct
  misc_feature 1..31: note = Probe
  source 1..31: mol_type = other DNA
acccacacccacccaagaacagggtttgtta

SEQ ID NO: 2756 - DNA, 22 bp, synthetic construct
  misc_feature 1..22: note = Probe
  source 1..22: mol_type = other DNA
acccacccaagaacagggtttg

SEQ ID NO: 2757 - DNA, 23 bp, synthetic construct
  misc_feature 1..23: note = Probe
  source 1..23: mol_type = other DNA
acccacccaagaacagggtttgt

SEQ ID NO: 2758 - DNA, 25 bp, synthetic construct
  misc_feature 1..25: note = Probe
  source 1..25: mol_type = other DNA
acccacccaagaacagggtttgtta

SEQ ID NO: 2759 - DNA, 19 bp, synthetic construct
  misc_feature 1..19: note = Probe
  source 1..19: mol_type = other DNA
acccagaggtcgatggatc

SEQ ID NO: 2760 - DNA, 39 bp, synthetic construct
  misc_feature 1..39: note = Probe
  source 1..39: mol_type = other DNA
acccagaggtcgatggatcgaaaccatcctctgctaggt

SEQ ID NO: 2761 - DNA, 38 bp, synthetic construct
  misc_feature 1..38: note = Probe
  source 1..38: mol_type = other DNA
acccagaggtcgatggatcgaaaccatcctctgctatc

SEQ ID NO: 2762 - DNA, 33 bp, synthetic construct
  misc_feature 1..33: note = Probe
  source 1..33: mol_type = other DNA
acccagatagctcagtcagtagagcatcagact

SEQ ID NO: 2763 - DNA, 33 bp, synthetic construct
  misc_feature 1..33: note = Probe
  source 1..33: mol_type = other DNA
acccaggcggcccgggttcgactcccggtgtgg

SEQ ID NO: 2764 - DNA, 39 bp, synthetic construct
  misc_feature 1..39: note = Probe
  source 1..39: mol_type = other DNA
acccaggcggcccgggttcgactcccggtgtgggaacgc

SEQ ID NO: 2765 - DNA, 36 bp, synthetic construct
  misc_feature 1..36: note = Probe
  source 1..36: mol_type = other DNA
acccaggtggcccgggttcgactcccggtatgggaa

SEQ ID NO: 2766 - DNA, 39 bp, synthetic construct
  misc_feature 1..39: note = Probe
  source 1..39: mol_type = other DNA
acccaggtggcccgggttcgactcccggtatgggaacaa

SEQ ID NO: 2767 - DNA, 27 bp, synthetic construct
  misc_feature 1..27: note = Probe
  source 1..27: mol_type = other DNA
accccgaaaatgttggttatacccttc

SEQ ID NO: 2768 - DNA, 29 bp, synthetic construct
  misc_feature 1..29: note = Probe
  source 1..29: mol_type = other DNA
accccgaaaatgttggttatacccttccc

SEQ ID NO: 2769 - DNA, 30 bp, synthetic construct
  misc_feature 1..30: note = Probe
  source 1..30: mol_type = other DNA
accccgaaaatgttggttatacccttcccg

SEQ ID NO: 2770 - DNA, 31 bp, synthetic construct
  misc_feature 1..31: note = Probe
  source 1..31: mol_type = other DNA
accccgaaaatgttggttatacccttcccgt

SEQ ID NO: 2771 - DNA, 36 bp, synthetic construct
  misc_feature 1..36: note = Probe
  source 1..36: mol_type = other DNA
accccgaaaatgttggttatacccttcccgtactaa

SEQ ID NO: 2772 - DNA, 37 bp, synthetic construct
  misc_feature 1..37: note = Probe
  source 1..37: mol_type = other DNA
accccgaaaatgttggttatacccttcccgtactaat

SEQ ID NO: 2773 - DNA, 38 bp, synthetic construct
  misc_feature 1..38: note = Probe
  source 1..38: mol_type = other DNA
accccgaaaatgttggttatacccttcccgtactaatt

SEQ ID NO: 2774 - DNA, 22 bp, synthetic construct
  misc_feature 1..22: note = Probe
  source 1..22: mol_type = other DNA
accccgacatcattaccgggtt

SEQ ID NO: 2775 - DNA, 23 bp, synthetic construct
  misc_feature 1..23: note = Probe
  source 1..23: mol_type = other DNA
accccgacatcattaccgggttt

SEQ ID NO: 2776 - DNA, 24 bp, synthetic construct
  misc_feature 1..24: note = Probe
  source 1..24: mol_type = other DNA
accccgacatcattaccgggtttt

SEQ ID NO: 2777 - DNA, 25 bp, synthetic construct
  misc_feature 1..25: note = Probe
  source 1..25: mol_type = other DNA
accccgacatcattaccgggttttc

SEQ ID NO: 2778 - DNA, 26 bp, synthetic construct
  misc_feature 1..26: note = Probe
  source 1..26: mol_type = other DNA
accccgacatcattaccgggttttcc

SEQ ID NO: 2779 - DNA, 27 bp, synthetic construct
  misc_feature 1..27: note = Probe
  source 1..27: mol_type = other DNA
accccgacatcattaccgggttttcct

SEQ ID NO: 2780 - DNA, 28 bp, synthetic construct
  misc_feature 1..28: note = Probe
  source 1..28: mol_type = other DNA
accccgacatcattaccgggttttcctc

SEQ ID NO: 2781 - DNA, 29 bp, synthetic construct
  misc_feature 1..29: note = Probe
  source 1..29: mol_type = other DNA
accccgacatcattaccgggttttcctct

SEQ ID NO: 2782 - DNA, 30 bp, synthetic construct
  misc_feature 1..30: note = Probe
  source 1..30: mol_type = other DNA
accccgacatcattaccgggttttcctctt

SEQ ID NO: 2783 - DNA, 18 bp, synthetic construct
  misc_feature 1..18: note = Probe
  source 1..18: mol_type = other DNA
accctgtggtctagtggt

SEQ ID NO: 2784 - DNA, 22 bp, synthetic construct
  misc_feature 1..22: note = Probe
  source 1..22: mol_type = other DNA
accctgtggtctagtggttagg

SEQ ID NO: 2785 - DNA, 23 bp, synthetic construct
  misc_feature 1..23: note = Probe
  source 1..23: mol_type = other DNA
accctgtggtctagtggttagga

SEQ ID NO: 2786 - DNA, 23 bp, synthetic construct
  misc_feature 1..23: note = Probe
  source 1..23: mol_type = other DNA
accgaaaggttggtggttcgagc

SEQ ID NO: 2787 - DNA, 39 bp, synthetic construct
  misc_feature 1..39: note = Probe
  source 1..39: mol_type = other DNA
accgaaaggttggtggttcgagcccacccagggacgcct

SEQ ID NO: 2788 - DNA, 19 bp, synthetic construct
  misc_feature 1..19: note = Probe
  source 1..19: mol_type = other DNA
accgaagatcacgggttcg

SEQ ID NO: 2789 - DNA, 17 bp, synthetic construct
  misc_feature 1..17: note = Probe
  source 1..17: mol_type = other DNA
accgaagatcgcgggtt

SEQ ID NO: 2790 - DNA, 18 bp, synthetic construct
  misc_feature 1..18: note = Probe
  source 1..18: mol_type = other DNA
accgaagatcgcgggttc

SEQ ID NO: 2791 - DNA, 39 bp, synthetic construct
  misc_feature 1..39: note = Probe
  source 1..39: mol_type = other DNA
accgccgcagcccgggttcgattcccggtcatggaacca

SEQ ID NO: 2792 - DNA, 37 bp, synthetic construct
  misc_feature 1..37: note = Probe
  source 1..37: mol_type = other DNA
accgccgcggcccgggttcgattcccggtcagggaaa

SEQ ID NO: 2793 - DNA, 37 bp, synthetic construct
  misc_feature 1..37: note = Probe
  source 1..37: mol_type = other DNA
accgccgcggcccgggttcgattcccggtcagggaag

SEQ ID NO: 2794 - DNA, 39 bp, synthetic construct
  misc_feature 1..39: note = Probe
  source 1..39: mol_type = other DNA
accgccgcggcccgggttcgattcccggtcagggaagcc

SEQ ID NO: 2795 - DNA, 39 bp, synthetic construct
  misc_feature 1..39: note = Probe
  source 1..39: mol_type = other DNA
accgccgcggcccgggttcgattcccggtcagggaagtt

SEQ ID NO: 2796 - DNA, 37 bp, synthetic construct
  misc_feature 1..37: note = Probe
  source 1..37: mol_type = other DNA
accgccgcggcccgggttcgattcccggtcagggaat

SEQ ID NO: 2797 - DNA, 39 bp, synthetic construct
  misc_feature 1..39: note = Probe
  source 1..39: mol_type = other DNA
accgccgcggcccgggttcgattcccggtcagggaattg

SEQ ID NO: 2798 - DNA, 19 bp, synthetic construct
  misc_feature 1..19: note = Probe
  source 1..19: mol_type = other DNA
accggagatgaaaaccttt

SEQ ID NO: 2799 - DNA, 24 bp, synthetic construct
  misc_feature 1..24: note = Probe
  source 1..24: mol_type = other DNA
accggagatgaaaacctttttcca

SEQ ID NO: 2800 - DNA, 25 bp, synthetic construct
  misc_feature 1..25: note = Probe
  source 1..25: mol_type = other DNA
accggagatgaaaacctttttccaa

SEQ ID NO: 2801 - DNA, 27 bp, synthetic construct
  misc_feature 1..27: note = Probe
  source 1..27: mol_type = other DNA
accggagatgaaaacctttttccaagg

SEQ ID NO: 2802 - DNA, 31 bp, synthetic construct
  misc_feature 1..31: note = Probe
  source 1..31: mol_type = other DNA
accggagatgaaaacctttttccaaggacaa

SEQ ID NO: 2803 - DNA, 32 bp, synthetic construct
  misc_feature 1..32: note = Probe
  source 1..32: mol_type = other DNA
accggagatgaaaacctttttccaaggacaaa

SEQ ID NO: 2804 - DNA, 33 bp, synthetic construct
  misc_feature 1..33: note = Probe
  source 1..33: mol_type = other DNA
accggagatgaaaacctttttccaaggacaaat

SEQ ID NO: 2805 - DNA, 34 bp, synthetic construct
  misc_feature 1..34: note = Probe
  source 1..34: mol_type = other DNA
accggagatgaaaacctttttccaaggacaaatc

SEQ ID NO: 2806 - DNA, 17 bp, synthetic construct
  misc_feature 1..17: note = Probe
  source 1..17: mol_type = other DNA
accgggcggaaacacct

SEQ ID NO: 2807 - DNA, 19 bp, synthetic construct
  misc_feature 1..19: note = Probe
  source 1..19: mol_type = other DNA
accgggcggaaacacctcc

SEQ ID NO: 2808 - DNA, 30 bp, synthetic construct
  misc_feature 1..30: note = Probe
  source 1..30: mol_type = other DNA
accggggttcaattccccgacggggaggtg

SEQ ID NO: 2809 - DNA, 29 bp, synthetic construct
  misc_feature 1..29: note = Probe
  source 1..29: mol_type = other DNA
accggggttcgattccccgacggggagac

SEQ ID NO: 2810 - DNA, 29 bp, synthetic construct
  misc_feature 1..29: note = Probe
  source 1..29: mol_type = other DNA
accggggttcgattccccgacggggaggc

SEQ ID NO: 2811 - DNA, 30 bp, synthetic construct
  misc_feature 1..30: note = Probe
  source 1..30: mol_type = other DNA
accggggttcgattccccgacggggaggca

SEQ ID NO: 2812 - DNA, 24 bp, synthetic construct
  misc_feature 1..24: note = Probe
  source 1..24: mol_type = other DNA
accgttaacttccaattaactagt

SEQ ID NO: 2813 - DNA, 25 bp, synthetic construct
  misc_feature 1..25: note = Probe
  source 1..25: mol_type = other DNA
accgttaacttccaattaactagtt

SEQ ID NO: 2814 - DNA, 31 bp, synthetic construct
  misc_feature 1..31: note = Probe
  source 1..31: mol_type = other DNA
accgttaacttccaattaactagttttgaca

SEQ ID NO: 2815 - DNA, 50 bp, synthetic construct
  misc_feature 1..50: note = Probe
  source 1..50: mol_type = other DNA
accgttaacttccaattaactagttttgacaacattcaaaaaagagtaat

SEQ ID NO: 2816 - DNA, 25 bp, synthetic construct
  misc_feature 1..25: note = Probe
  source 1..25: mol_type = other DNA
acctagccccaaacccactccacct

SEQ ID NO: 2817 - DNA, 15 bp, synthetic construct
  misc_feature 1..15: note = Probe
  source 1..15: mol_type = other DNA
acctattctcaaact

SEQ ID NO: 2818 - DNA, 16 bp, synthetic construct
  misc_feature 1..16: note = Probe
  source 1..16: mol_type = other DNA
acctattctcaaactt

SEQ ID NO: 2819 - DNA, 17 bp, synthetic construct
  misc_feature 1..17: note = Probe
  source 1..17: mol_type = other DNA
acctattctcaaacttt

SEQ ID NO: 2820 - DNA, 18 bp, synthetic construct
  misc_feature 1..18: note = Probe
  source 1..18: mol_type = other DNA
acctattctcaaacttta

SEQ ID NO: 2821 - DNA, 20 bp, synthetic construct
  misc_feature 1..20: note = Probe
  source 1..20: mol_type = other DNA
acctattctcaaactttaaa

SEQ ID NO: 2822 - DNA, 21 bp, synthetic construct
  misc_feature 1..21: note = Probe
  source 1..21: mol_type = other DNA
acctattctcaaactttaaat

SEQ ID NO: 2823 - DNA, 22 bp, synthetic construct
  misc_feature 1..22: note = Probe
  source 1..22: mol_type = other DNA
acctattctcaaactttaaatg

SEQ ID NO: 2824 - DNA, 23 bp, synthetic construct
  misc_feature 1..23: note = Probe
  source 1..23: mol_type = other DNA
acctattctcaaactttaaatgg

SEQ ID NO: 2825 - DNA, 26 bp, synthetic construct
  misc_feature 1..26: note = Probe
  source 1..26: mol_type = other DNA
acctattctcaaactttaaatgggca

SEQ ID NO: 2826 - DNA, 27 bp, synthetic construct
  misc_feature 1..27: note = Probe
  source 1..27: mol_type = other DNA
acctattctcaaactttaaatgggcaa

SEQ ID NO: 2827 - DNA, 32 bp, synthetic construct
  misc_feature 1..32: note = Probe
  source 1..32: mol_type = other DNA
acctattctcaaactttaaatgggcaagaagc

SEQ ID NO: 2828 - DNA, 33 bp, synthetic construct
  misc_feature 1..33: note = Probe
  source 1..33: mol_type = other DNA
acctattctcaaactttaaatgggcaagaagcc

SEQ ID NO: 2829 - DNA, 36 bp, synthetic construct
  misc_feature 1..36: note = Probe
  source 1..36: mol_type = other DNA
acctattctcaaactttaaatgggcaagaagcccag

SEQ ID NO: 2830 - DNA, 37 bp, synthetic construct
  misc_feature 1..37: note = Probe
  source 1..37: mol_type = other DNA
acctattctcaaactttaaatgggcaagaagcccagc

SEQ ID NO: 2831 - DNA, 39 bp, synthetic construct
  misc_feature 1..39: note = Probe
  source 1..39: mol_type = other DNA
acctattctcaaactttaaatgggcaagaagcccagcta

SEQ ID NO: 2832 - DNA, 20 bp, synthetic construct
  misc_feature 1..20: note = Probe
  source 1..20: mol_type = other DNA
acctcagaaggtctcacttt

SEQ ID NO: 2833 - DNA, 21 bp, synthetic construct
  misc_feature 1..21: note = Probe
  source 1..21: mol_type = other DNA
acctcagaaggtctcactttt

SEQ ID NO: 2834 - DNA, 25 bp, synthetic construct
  misc_feature 1..25: note = Probe
  source 1..25: mol_type = other DNA
acctcagagggggcagctgccattt

SEQ ID NO: 2835 - DNA, 22 bp, synthetic construct
  misc_feature 1..22: note = Probe
  source 1..22: mol_type = other DNA
acctcctcaaagcaatacactg

SEQ ID NO: 2836 - DNA, 23 bp, synthetic construct
  misc_feature 1..23: note = Probe
  source 1..23: mol_type = other DNA
acctcctcaaagcaatacactga

SEQ ID NO: 2837 - DNA, 24 bp, synthetic construct
  misc_feature 1..24: note = Probe
  source 1..24: mol_type = other DNA
acctcctcaaagcaatacactgaa

SEQ ID NO: 2838 - DNA, 40 bp, synthetic construct
  misc_feature 1..40: note = Probe
  source 1..40: mol_type = other DNA
acctcctcaaagcaatacactgaaaatgtttagacgggct

SEQ ID NO: 2839 - DNA, 46 bp, synthetic construct
  misc_feature 1..46: note = Probe
  source 1..46: mol_type = other DNA
accttttaagttaaagattaagagaaccaacacctctttacagtga

SEQ ID NO: 2840 - DNA, 50 bp, synthetic construct
  misc_feature 1..50: note = Probe
  source 1..50: mol_type = other DNA
accttttaagttaaagattaagagaaccaacacctctttacagtgaaatg

SEQ ID NO: 2841 - DNA, 50 bp, synthetic construct
  misc_feature 1..50: note = Probe
  source 1..50: mol_type = other DNA
acgaatgatttcgactcattaaattatgataatcatatttaccaaatgcc

SEQ ID NO: 2842 - DNA, 18 bp, synthetic construct
  misc_feature 1..18: note = Probe
  source 1..18: mol_type = other DNA
acgaccccttatttaccg

SEQ ID NO: 2843 - DNA, 50 bp, synthetic construct
  misc_feature 1..50: note = Probe
  source 1..50: mol_type = other DNA
acgatggtttttcatatcattggtcgtggttgtagtccgtgcgagaataa

SEQ ID NO: 2844 - DNA, 36 bp, synthetic construct
  misc_feature 1..36: note = Probe
  source 1..36: mol_type = other DNA
acgcagaaggtcctgggttcgagccccagtggaacc

SEQ ID NO: 2845 - DNA, 39 bp, synthetic construct
  misc_feature 1..39: note = Probe
  source 1..39: mol_type = other DNA
acgcagaaggtcctgggttcgagccccagtggaaccacg

SEQ ID NO: 2846 - DNA, 40 bp, synthetic construct
  misc_feature 1..40: note = Probe
  source 1..40: mol_type = other DNA
acgcagaaggtcctgggttcgagccccagtggaaccacgg

SEQ ID NO: 2847 - DNA, 40 bp, synthetic construct
  misc_feature 1..40: note = Probe
  source 1..40: mol_type = other DNA
acgcagaaggtcctgggttcgagccccagtggaaccatag

SEQ ID NO: 2848 - DNA, 18 bp, synthetic construct
  misc_feature 1..18: note = Probe
  source 1..18: mol_type = other DNA
acgccaaggtcgcgggtt

SEQ ID NO: 2849 - DNA, 39 bp, synthetic construct
  misc_feature 1..39: note = Probe
  source 1..39: mol_type = other DNA
acgccaaggtcgcgggttcgatccccgtacgggccacga

SEQ ID NO: 2850 - DNA, 39 bp, synthetic construct
  misc_feature 1..39: note = Probe
  source 1..39: mol_type = other DNA
acgccaaggtcgcgggttcgatccccgtacgggccactg

SEQ ID NO: 2851 - DNA, 39 bp, synthetic construct
  misc_feature 1..39: note = Probe
  source 1..39: mol_type = other DNA
acgccaaggtcgcgggttcgatccccgtacgggccagga

SEQ ID NO: 2852 - DNA, 39 bp, synthetic construct
  misc_feature 1..39: note = Probe
  source 1..39: mol_type = other DNA
acgccaaggtcgcgggttcgatccccgtacgggccaggc

SEQ ID NO: 2853 - DNA, 39 bp, synthetic construct
  misc_feature 1..39: note = Probe
  source 1..39: mol_type = other DNA
acgccaaggtcgcgggttcgatccccgtactggccacgt

SEQ ID NO: 2854 - DNA, 40 bp, synthetic construct
  misc_feature 1..40: note = Probe
  source 1..40: mol_type = other DNA
acgcgaaaggtccccggttcgaaaccgggcggaaacacct

SEQ ID NO: 2855 - DNA, 40 bp, synthetic construct
  misc_feature 1..40: note = Probe
  source 1..40: mol_type = other DNA
acgcgaaaggtccccggttcgatcccgggcggaaacaggt

SEQ ID NO: 2856 - DNA, 40 bp, synthetic construct
  misc_feature 1..40: note = Probe
  source 1..40: mol_type = other DNA
acgcgaaaggtccctggatcaaaaccaggcggaaacaagt

SEQ ID NO: 2857 - DNA, 19 bp, synthetic construct
  misc_feature 1..19: note = Probe
  source 1..19: mol_type = other DNA
acgcgggagaccggggttc

SEQ ID NO: 2858 - DNA, 29 bp, synthetic construct
  misc_feature 1..29: note = Probe
  source 1..29: mol_type = other DNA
acgcgggagaccggggttcaattccccga

SEQ ID NO: 2859 - DNA, 37 bp, synthetic construct
  misc_feature 1..37: note = Probe
  source 1..37: mol_type = other DNA
acgcgggagaccggggttcaattccccgacggggagg

SEQ ID NO: 2860 - DNA, 38 bp, synthetic construct
  misc_feature 1..38: note = Probe
  source 1..38: mol_type = other DNA
acgcgggagaccggggttcaattccccgacggggaggt

SEQ ID NO: 2861 - DNA, 39 bp, synthetic construct
  misc_feature 1..39: note = Probe
  source 1..39: mol_type = other DNA
acgcgggagaccggggttcaattccccgacggggaggtg

SEQ ID NO: 2862 - DNA, 40 bp, synthetic construct
  misc_feature 1..40: note = Probe
  source 1..40: mol_type = other DNA
acgcgggagaccggggttcaattccccgacggggaggtgt

SEQ ID NO: 2863 - DNA, 23 bp, synthetic construct
  misc_feature 1..23: note = Probe
  source 1..23: mol_type = other DNA
acgcgggagaccggggttcgatt

SEQ ID NO: 2864 - DNA, 39 bp, synthetic construct
  misc_feature 1..39: note = Probe
  source 1..39: mol_type = other DNA
acgcgggagaccggggttcgattccccaacggggaggct

SEQ ID NO: 2865 - DNA, 37 bp, synthetic construct
  misc_feature 1..37: note = Probe
  source 1..37: mol_type = other DNA
acgcgggagaccggggttcgattccccgacggggaga

SEQ ID NO: 2866 - DNA, 38 bp, synthetic construct
  misc_feature 1..38: note = Probe
  source 1..38: mol_type = other DNA
acgcgggagaccggggttcgattccccgacggggagaa

SEQ ID NO: 2867 - DNA, 39 bp, synthetic construct
  misc_feature 1..39: note = Probe
  source 1..39: mol_type = other DNA
acgcgggagaccggggttcgattccccgacggggagaaa

SEQ ID NO: 2868 - DNA, 49 bp, synthetic construct
  misc_feature 1..49: note = Probe
  source 1..49: mol_type = other DNA
acgcgggagaccggggttcgattccccgacggggagaaaagttgctttt

SEQ ID NO: 2869 - DNA, 38 bp, synthetic construct
  misc_feature 1..38: note = Probe
  source 1..38: mol_type = other DNA
acgcgggagaccggggttcgattccccgacggggagac

SEQ ID NO: 2870 - DNA, 39 bp, synthetic construct
  misc_feature 1..39: note = Probe
  source 1..39: mol_type = other DNA
acgcgggagaccggggttcgattccccgacggggagacg

SEQ ID NO: 2871 - DNA, 39 bp, synthetic construct
  misc_feature 1..39: note = Probe
  source 1..39: mol_type = other DNA
acgcgggagaccggggttcgattccccgacggggagagt

SEQ ID NO: 2872 - DNA, 37 bp, synthetic construct
  misc_feature 1..37: note = Probe
  source 1..37: mol_type = other DNA
acgcgggagaccggggttcgattccccgacggggagg

SEQ ID NO: 2873 - DNA, 38 bp, synthetic construct
  misc_feature 1..38: note = Probe
  source 1..38: mol_type = other DNA
acgcgggagaccggggttcgattccccgacggggaggc

SEQ ID NO: 2874 - DNA, 39 bp, synthetic construct
  misc_feature 1..39: note = Probe
  source 1..39: mol_type = other DNA
acgcgggagaccggggttcgattccccgacggggaggca

SEQ ID NO: 2875 - DNA, 47 bp, synthetic construct
  misc_feature 1..47: note = Probe
  source 1..47: mol_type = other DNA
acgcgggagaccggggttcgattccccgacggggaggcacagtaatt

SEQ ID NO: 2876 - DNA, 49 bp, synthetic construct
  misc_feature 1..49: note = Probe
  source 1..49: mol_type = other DNA
acgcgggagaccggggttcgattccccgacggggaggcacagtaattgt

SEQ ID NO: 2877 - DNA, 39 bp, synthetic construct
  misc_feature 1..39: note = Probe
  source 1..39: mol_type = other DNA
acgcgggagaccggggttcgattccccgacggggaggcc

SEQ ID NO: 2878 - DNA, 50 bp, synthetic construct
  misc_feature 1..50: note = Probe
  source 1..50: mol_type = other DNA
acgcgggagaccggggttcgattccccgacggggaggccgggtactttcg

SEQ ID NO: 2879 - DNA, 17 bp, synthetic construct
  misc_feature 1..17: note = Probe
  source 1..17: mol_type = other DNA
acgcgggaggcccgggt

SEQ ID NO: 2880 - DNA, 36 bp, synthetic construct
  misc_feature 1..36: note = Probe
  source 1..36: mol_type = other DNA
acgcgggaggcccgggttcgattcccggccaatgca

SEQ ID NO: 2881 - DNA, 39 bp, synthetic construct
  misc_feature 1..39: note = Probe
  source 1..39: mol_type = other DNA
acgcgggaggcccgggttcgattcccggccaatgcaagt

SEQ ID NO: 2882 - DNA, 39 bp, synthetic construct
  misc_feature 1..39: note = Probe
  source 1..39: mol_type = other DNA
acgcgggaggcccgggttcgattcccggccaatgcacga

SEQ ID NO: 2883 - DNA, 39 bp, synthetic construct
  misc_feature 1..39: note = Probe
  source 1..39: mol_type = other DNA
acgcgggaggcccgggttcgattcccggccaatgcagca

SEQ ID NO: 2884 - DNA, 34 bp, synthetic construct
  misc_feature 1..34: note = Probe
  source 1..34: mol_type = other DNA
acgcgggaggcccgggttcgattcccggcccatg

SEQ ID NO: 2885 - DNA, 38 bp, synthetic construct
  misc_feature 1..38: note = Probe
  source 1..38: mol_type = other DNA
acgcgggaggcccgggttcgattcccggcccatgcagc

SEQ ID NO: 2886 - DNA, 39 bp, synthetic construct
  misc_feature 1..39: note = Probe
  source 1..39: mol_type = other DNA
acgcgggaggcccgggttcgattcccggcccatgcagca

SEQ ID NO: 2887 - DNA, 23 bp, synthetic construct
  misc_feature 1..23: note = Probe
  source 1..23: mol_type = other DNA
acgcgtgggttcgaatcccatcc

SEQ ID NO: 2888 - DNA, 21 bp, synthetic construct
  misc_feature 1..21: note = Probe
  source 1..21: mol_type = other DNA
acgggctcacatcaccccata

SEQ ID NO: 2889 - DNA, 22 bp, synthetic construct
  misc_feature 1..22: note = Probe
  source 1..22: mol_type = other DNA
acgggctcacatcaccccataa

SEQ ID NO: 2890 - DNA, 25 bp, synthetic construct
  misc_feature 1..25: note = Probe
  source 1..25: mol_type = other DNA
acgggctcacatcaccccataaaca

SEQ ID NO: 2891 - DNA, 27 bp, synthetic construct
  misc_feature 1..27: note = Probe
  source 1..27: mol_type = other DNA
acgggctcacatcaccccataaacaaa

SEQ ID NO: 2892 - DNA, 28 bp, synthetic construct
  misc_feature 1..28: note = Probe
  source 1..28: mol_type = other DNA
acgggctcacatcaccccataaacaaat

SEQ ID NO: 2893 - DNA, 19 bp, synthetic construct
  misc_feature 1..19: note = Probe
  source 1..19: mol_type = other DNA
actaagtgtttgtgggttt

SEQ ID NO: 2894 - DNA, 36 bp, synthetic construct
  misc_feature 1..36: note = Probe
  source 1..36: mol_type = other DNA
actaagtgtttgtgggtttaagtcccattggtctag

SEQ ID NO: 2895 - DNA, 37 bp, synthetic construct
  misc_feature 1..37: note = Probe
  source 1..37: mol_type = other DNA
actaagtgtttgtgggtttaagtcccattggtctagt

SEQ ID NO: 2896 - DNA, 38 bp, synthetic construct
  misc_feature 1..38: note = Probe
  source 1..38: mol_type = other DNA
actaagtgtttgtgggtttaagtcccattggtctagta

SEQ ID NO: 2897 - DNA, 39 bp, synthetic construct
  misc_feature 1..39: note = Probe
  source 1..39: mol_type = other DNA
actaagtgtttgtgggtttaagtcccattggtctagtaa

SEQ ID NO: 2898 - DNA, 40 bp, synthetic construct
  misc_feature 1..40: note = Probe
  source 1..40: mol_type = other DNA
actaagtgtttgtgggtttaagtcccattggtctagtaag

SEQ ID NO: 2899 - DNA, 41 bp, synthetic construct
  misc_feature 1..41: note = Probe
  source 1..41: mol_type = other DNA
actaagtgtttgtgggtttaagtcccattggtctagtaagg

SEQ ID NO: 2900 - DNA, 42 bp, synthetic construct
  misc_feature 1..42: note = Probe
  source 1..42: mol_type = other DNA
actaagtgtttgtgggtttaagtcccattggtctagtaaggg

SEQ ID NO: 2901 - DNA, 50 bp, synthetic construct
  misc_feature 1..50: note = Probe
  source 1..50: mol_type = other DNA
actaatacaccagtcttgtaaaccggagatgaaaacctttttccaaggac

SEQ ID NO: 2902 - DNA, 32 bp, synthetic construct
  misc_feature 1..32: note = Probe
  source 1..32: mol_type = other DNA
actagttttgacaacattcaaaaaagagtaat

SEQ ID NO: 2903 - DNA, 18 bp, synthetic construct
  misc_feature 1..18: note = Probe
  source 1..18: mol_type = other DNA
actcatgcccccatgtct

SEQ ID NO: 2904 - DNA, 19 bp, synthetic construct
  misc_feature 1..19: note = Probe
  source 1..19: mol_type = other DNA
actcatgcccccatgtcta

SEQ ID NO: 2905 - DNA, 29 bp, synthetic construct
  misc_feature 1..29: note = Probe
  source 1..29: mol_type = other DNA
actcatgcccccatgtctaacaacatggc

SEQ ID NO: 2906 - DNA, 30 bp, synthetic construct
  misc_feature 1..30: note = Probe
  source 1..30: mol_type = other DNA
actcatgcccccatgtctaacaacatggct

SEQ ID NO: 2907 - DNA, 31 bp, synthetic construct
  misc_feature 1..31: note = Probe
  source 1..31: mol_type = other DNA
actcatgcccccatgtctaacaacatggctt

SEQ ID NO: 2908 - DNA, 32 bp, synthetic construct
  misc_feature 1..32: note = Probe
  source 1..32: mol_type = other DNA
actcatgcccccatgtctaacaacatggcttt

SEQ ID NO: 2909 - DNA, 33 bp, synthetic construct
  misc_feature 1..33: note = Probe
  source 1..33: mol_type = other DNA
actcatgcccccatgtctaacaacatggctttc

SEQ ID NO: 2910 - DNA, 34 bp, synthetic construct
  misc_feature 1..34: note = Probe
  source 1..34: mol_type = other DNA
actcatgcccccatgtctaacaacatggctttct

SEQ ID NO: 2911 - DNA, 35 bp, synthetic construct
  misc_feature 1..35: note = Probe
  source 1..35: mol_type = other DNA
actcatgcccccatgtctaacaacatggctttctc

SEQ ID NO: 2912 - DNA, 36 bp, synthetic construct
  misc_feature 1..36: note = Probe
  source 1..36: mol_type = other DNA
actcatgcccccatgtctaacaacatggctttctca

SEQ ID NO: 2913 - DNA, 37 bp, synthetic construct
  misc_feature 1..37: note = Probe
  source 1..37: mol_type = other DNA
actcatgcccccatgtctaacaacatggctttctcaa

SEQ ID NO: 2914 - DNA, 38 bp, synthetic construct
  misc_feature 1..38: note = Probe
  source 1..38: mol_type = other DNA
actcatgcccccatgtctaacaacatggctttctcaac

SEQ ID NO: 2915 - DNA, 39 bp, synthetic construct
  misc_feature 1..39: note = Probe
  source 1..39: mol_type = other DNA
actcatgcccccatgtctaacaacatggctttctcaact

SEQ ID NO: 2916 - DNA, 33 bp, synthetic construct
  misc_feature 1..33: note = Probe
  source 1..33: mol_type = other DNA
actcattaaattatgataatcatatttaccaaa

SEQ ID NO: 2917 - DNA, 35 bp, synthetic construct
  misc_feature 1..35: note = Probe
  source 1..35: mol_type = other DNA
actcattaaattatgataatcatatttaccaaatg

SEQ ID NO: 2918 - DNA, 19 bp, synthetic construct
  misc_feature 1..19: note = Probe
  source 1..19: mol_type = other DNA
actcccggtgtgggaacgc

SEQ ID NO: 2919 - DNA, 50 bp, synthetic construct
  misc_feature 1..50: note = Probe
  source 1..50: mol_type = other DNA
actctggactctgaatccagcgatccgagttcaaatctcggtggaacctg

SEQ ID NO: 2920 - DNA, 50 bp, synthetic construct
  misc_feature 1..50: note = Probe
  source 1..50: mol_type = other DNA
actctggactctgaatccagcgatccgagttcaaatctcggtggaacctt

SEQ ID NO: 2921 - DNA, 50 bp, synthetic construct
  misc_feature 1..50: note = Probe
  source 1..50: mol_type = other DNA
actctggactttgaatccagcgatccgagttcaaatctcggtgggacctc

SEQ ID NO: 2922 - DNA, 24 bp, synthetic construct
  misc_feature 1..24: note = Probe
  source 1..24: mol_type = other DNA
actcttttagtataaatagtaccg

SEQ ID NO: 2923 - DNA, 25 bp, synthetic construct
  misc_feature 1..25: note = Probe
  source 1..25: mol_type = other DNA
actcttttagtataaatagtaccgt

SEQ ID NO: 2924 - DNA, 26 bp, synthetic construct
  misc_feature 1..26: note = Probe
  source 1..26: mol_type = other DNA
actcttttagtataaatagtaccgtt

SEQ ID NO: 2925 - DNA, 27 bp, synthetic construct
  misc_feature 1..27: note = Probe
  source 1..27: mol_type = other DNA
actcttttagtataaatagtaccgtta

SEQ ID NO: 2926 - DNA, 29 bp, synthetic construct
  misc_feature 1..29: note = Probe
  source 1..29: mol_type = other DNA
actcttttagtataaatagtaccgttaac

SEQ ID NO: 2927 - DNA, 30 bp, synthetic construct
  misc_feature 1..30: note = Probe
  source 1..30: mol_type = other DNA
actcttttagtataaatagtaccgttaact

SEQ ID NO: 2928 - DNA, 31 bp, synthetic construct
  misc_feature 1..31: note = Probe
  source 1..31: mol_type = other DNA
actcttttagtataaatagtaccgttaactt

SEQ ID NO: 2929 - DNA, 43 bp, synthetic construct
  misc_feature 1..43: note = Probe
  source 1..43: mol_type = other DNA
actcttttagtataaatagtaccgttaacttccaattaactag

SEQ ID NO: 2930 - DNA, 44 bp, synthetic construct
  misc_feature 1..44: note = Probe
  source 1..44: mol_type = other DNA
actcttttagtataaatagtaccgttaacttccaattaactagt

SEQ ID NO: 2931 - DNA, 45 bp, synthetic construct
  misc_feature 1..45: note = Probe
  source 1..45: mol_type = other DNA
actcttttagtataaatagtaccgttaacttccaattaactagtt

SEQ ID NO: 2932 - DNA, 46 bp, synthetic construct
  misc_feature 1..46: note = Probe
  source 1..46: mol_type = other DNA
actcttttagtataaatagtaccgttaacttccaattaactagttt

SEQ ID NO: 2933 - DNA, 49 bp, synthetic construct
  misc_feature 1..49: note = Probe
  source 1..49: mol_type = other DNA
actcttttagtataaatagtaccgttaacttccaattaactagttttga

SEQ ID NO: 2934 - DNA, 26 bp, synthetic construct
  misc_feature 1..26: note = Probe
  source 1..26: mol_type = other DNA
actgaaaatgtttagacgggctcaca

SEQ ID NO: 2935 - DNA, 27 bp, synthetic construct
  misc_feature 1..27: note = Probe
  source 1..27: mol_type = other DNA
actgaaaatgtttagacgggctcacat

SEQ ID NO: 2936 - DNA, 33 bp, synthetic construct
  misc_feature 1..33: note = Probe
  source 1..33: mol_type = other DNA
actgaaaatgtttagacgggctcacatcacccc

SEQ ID NO: 2937 - DNA, 42 bp, synthetic construct
  misc_feature 1..42: note = Probe
  source 1..42: mol_type = other DNA
actgaaaatgtttagacgggctcacatcaccccataaacaaa

SEQ ID NO: 2938 - DNA, 43 bp, synthetic construct
  misc_feature 1..43: note = Probe
  source 1..43: mol_type = other DNA
actgaaaatgtttagacgggctcacatcaccccataaacaaat

SEQ ID NO: 2939 - DNA, 44 bp, synthetic construct
  misc_feature 1..44: note = Probe
  source 1..44: mol_type = other DNA
actgaaaatgtttagacgggctcacatcaccccataaacaaata

SEQ ID NO: 2940 - DNA, 45 bp, synthetic construct
  misc_feature 1..45: note = Probe
  source 1..45: mol_type = other DNA
actgaaaatgtttagacgggctcacatcaccccataaacaaatag

SEQ ID NO: 2941 - DNA, 50 bp, synthetic construct
  misc_feature 1..50: note = Probe
  source 1..50: mol_type = other DNA
actgaaaatgtttagacgggctcacatcaccccataaacaaataggtttg

SEQ ID NO: 2942 - DNA, 19 bp, synthetic construct
  misc_feature 1..19: note = Probe
  source 1..19: mol_type = other DNA
actgctaactcatgccccc

SEQ ID NO: 2943 - DNA, 23 bp, synthetic construct
  misc_feature 1..23: note = Probe
  source 1..23: mol_type = other DNA
actgctaactcatgcccccatgt

SEQ ID NO: 2944 - DNA, 24 bp, synthetic construct
  misc_feature 1..24: note = Probe
  source 1..24: mol_type = other DNA
actgctaactcatgcccccatgtc

SEQ ID NO: 2945 - DNA, 25 bp, synthetic construct
  misc_feature 1..25: note = Probe
  source 1..25: mol_type = other DNA
actgctaactcatgcccccatgtct

SEQ ID NO: 2946 - DNA, 26 bp, synthetic construct
  misc_feature 1..26: note = Probe
  source 1..26: mol_type = other DNA
actgctaactcatgcccccatgtcta

SEQ ID NO: 2947 - DNA, 37 bp, synthetic construct
  misc_feature 1..37: note = Probe
  source 1..37: mol_type = other DNA
actgctaactcatgcccccatgtctaacaacatggct

SEQ ID NO: 2948 - DNA, 38 bp, synthetic construct
  misc_feature 1..38: note = Probe
  source 1..38: mol_type = other DNA
actgctaactcatgcccccatgtctaacaacatggctt

SEQ ID NO: 2949 - DNA, 39 bp, synthetic construct
  misc_feature 1..39: note = Probe
  source 1..39: mol_type = other DNA
actgctaactcatgcccccatgtctaacaacatggcttt

SEQ ID NO: 2950 - DNA, 40 bp, synthetic construct
  misc_feature 1..40: note = Probe
  source 1..40: mol_type = other DNA
actgctaactcatgcccccatgtctaacaacatggctttc

SEQ ID NO: 2951 - DNA, 41 bp, synthetic construct
  misc_feature 1..41: note = Probe
  source 1..41: mol_type = other DNA
actgctaactcatgcccccatgtctaacaacatggctttct

SEQ ID NO: 2952 - DNA, 42 bp, synthetic construct
  misc_feature 1..42: note = Probe
  source 1..42: mol_type = other DNA
actgctaactcatgcccccatgtctaacaacatggctttctc

SEQ ID NO: 2953 - DNA, 43 bp, synthetic construct
  misc_feature 1..43: note = Probe
  source 1..43: mol_type = other DNA
actgctaactcatgcccccatgtctaacaacatggctttctca

SEQ ID NO: 2954 - DNA, 44 bp, synthetic construct
  misc_feature 1..44: note = Probe
  source 1..44: mol_type = other DNA
actgctaactcatgcccccatgtctaacaacatggctttctcaa

SEQ ID NO: 2955 - DNA, 45 bp, synthetic construct
  misc_feature 1..45: note = Probe
  source 1..45: mol_type = other DNA
actgctaactcatgcccccatgtctaacaacatggctttctcaac

SEQ ID NO: 2956 - DNA, 46 bp, synthetic construct
  misc_feature 1..46: note = Probe
  source 1..46: mol_type = other DNA
actgctaactcatgcccccatgtctaacaacatggctttctcaact

SEQ ID NO: 2957 - DNA, 49 bp, synthetic construct
  misc_feature 1..49: note = Probe
  source 1..49: mol_type = other DNA
actgctaactcatgcccccatgtctaacaacatggctttctcaactttt

SEQ ID NO: 2958 - DNA, 50 bp, synthetic construct
  misc_feature 1..50: note = Probe
  source 1..50: mol_type = other DNA
actgctaactcatgcccccatgtctaacaacatggctttctcaactttta

SEQ ID NO: 2959 - DNA, 29 bp, synthetic construct
  misc_feature 1..29: note = Probe
  source 1..29: mol_type = other DNA
actgtaaagctaacttagcattaaccttt

SEQ ID NO: 2960 - DNA, 43 bp, synthetic construct
  misc_feature 1..43: note = Probe
  source 1..43: mol_type = other DNA
actgtaaatctaaagacaggggttaggcctctttttaccagct

SEQ ID NO: 2961 - DNA, 25 bp, synthetic construct
  misc_feature 1..25: note = Probe
  source 1..25: mol_type = other DNA
acttaaaactttacagtcagaggtt

SEQ ID NO: 2962 - DNA, 38 bp, synthetic construct
  misc_feature 1..38: note = Probe
  source 1..38: mol_type = other DNA
acttaaaactttacagtcagaggttcaattcctcttct

SEQ ID NO: 2963 - DNA, 39 bp, synthetic construct
  misc_feature 1..39: note = Probe
  source 1..39: mol_type = other DNA
acttaaaactttacagtcagaggttcaattcctcttctt

SEQ ID NO: 2964 - DNA, 40 bp, synthetic construct
  misc_feature 1..40: note = Probe
  source 1..40: mol_type = other DNA
acttaaaactttacagtcagaggttcaattcctcttctta

SEQ ID NO: 2965 - DNA, 41 bp, synthetic construct
  misc_feature 1..41: note = Probe
  source 1..41: mol_type = other DNA
acttaaaactttacagtcagaggttcaattcctcttcttaa

SEQ ID NO: 2966 - DNA, 42 bp, synthetic construct
  misc_feature 1..42: note = Probe
  source 1..42: mol_type = other DNA
acttaaaactttacagtcagaggttcaattcctcttcttaac

SEQ ID NO: 2967 - DNA, 43 bp, synthetic construct
  misc_feature 1..43: note = Probe
  source 1..43: mol_type = other DNA
acttaaaactttacagtcagaggttcaattcctcttcttaaca

SEQ ID NO: 2968 - DNA, 44 bp, synthetic construct
  misc_feature 1..44: note = Probe
  source 1..44: mol_type = other DNA
acttaaaactttacagtcagaggttcaattcctcttcttaacaa

SEQ ID NO: 2969 - DNA, 45 bp, synthetic construct
  misc_feature 1..45: note = Probe
  source 1..45: mol_type = other DNA
acttaaaactttacagtcagaggttcaattcctcttcttaacaac

SEQ ID NO: 2970 - DNA, 46 bp, synthetic construct
  misc_feature 1..46: note = Probe
  source 1..46: mol_type = other DNA
acttaaaactttacagtcagaggttcaattcctcttcttaacaaca

SEQ ID NO: 2971 - DNA, 16 bp, synthetic construct
  misc_feature 1..16: note = Probe
  source 1..16: mol_type = other DNA
acttaacttgaccgct

SEQ ID NO: 2972 - DNA, 17 bp, synthetic construct
  misc_feature 1..17: note = Probe
  source 1..17: mol_type = other DNA
acttaacttgaccgctc

SEQ ID NO: 2973 - DNA, 18 bp, synthetic construct
  misc_feature 1..18: note = Probe
  source 1..18: mol_type = other DNA
acttaacttgaccgctct

SEQ ID NO: 2974 - DNA, 20 bp, synthetic construct
  misc_feature 1..20: note = Probe
  source 1..20: mol_type = other DNA
acttaacttgaccgctctga

SEQ ID NO: 2975 - DNA, 21 bp, synthetic construct
  misc_feature 1..21: note = Probe
  source 1..21: mol_type = other DNA
acttaacttgaccgctctgag

SEQ ID NO: 2976 - DNA, 22 bp, synthetic construct
  misc_feature 1..22: note = Probe
  source 1..22: mol_type = other DNA
acttaacttgaccgctctgagc

SEQ ID NO: 2977 - DNA, 23 bp, synthetic construct
  misc_feature 1..23: note = Probe
  source 1..23: mol_type = other DNA
acttaacttgaccgctctgagct

SEQ ID NO: 2978 - DNA, 21 bp, synthetic construct
  misc_feature 1..21: note = Probe
  source 1..21: mol_type = other DNA
acttacacttaggagatttca

SEQ ID NO: 2979 - DNA, 22 bp, synthetic construct
  misc_feature 1..22: note = Probe
  source 1..22: mol_type = other DNA
acttacacttaggagatttcaa

SEQ ID NO: 2980 - DNA, 23 bp, synthetic construct
  misc_feature 1..23: note = Probe
  source 1..23: mol_type = other DNA
acttacacttaggagatttcaac

SEQ ID NO: 2981 - DNA, 33 bp, synthetic construct
  misc_feature 1..33: note = Probe
  source 1..33: mol_type = other DNA
acttacacttaggagatttcaacttaacttgac

SEQ ID NO: 2982 - DNA, 35 bp, synthetic construct
  misc_feature 1..35: note = Probe
  source 1..35: mol_type = other DNA
acttacacttaggagatttcaacttaacttgaccg

SEQ ID NO: 2983 - DNA, 36 bp, synthetic construct
  misc_feature 1..36: note = Probe
  source 1..36: mol_type = other DNA
acttacacttaggagatttcaacttaacttgaccgc

SEQ ID NO: 2984 - DNA, 37 bp, synthetic construct
  misc_feature 1..37: note = Probe
  source 1..37: mol_type = other DNA
acttacacttaggagatttcaacttaacttgaccgct

SEQ ID NO: 2985 - DNA, 39 bp, synthetic construct
  misc_feature 1..39: note = Probe
  source 1..39: mol_type = other DNA
acttacacttaggagatttcaacttaacttgaccgctct

SEQ ID NO: 2986 - DNA, 40 bp, synthetic construct
  misc_feature 1..40: note = Probe
  source 1..40: mol_type = other DNA
acttacacttaggagatttcaacttaacttgaccgctctg

SEQ ID NO: 2987 - DNA, 41 bp, synthetic construct
  misc_feature 1..41: note = Probe
  source 1..41: mol_type = other DNA
acttacacttaggagatttcaacttaacttgaccgctctga

SEQ ID NO: 2988 - DNA, 42 bp, synthetic construct
  misc_feature 1..42: note = Probe
  source 1..42: mol_type = other DNA
acttacacttaggagatttcaacttaacttgaccgctctgag

SEQ ID NO: 2989 - DNA, 43 bp, synthetic construct
  misc_feature 1..43: note = Probe
  source 1..43: mol_type = other DNA
acttacacttaggagatttcaacttaacttgaccgctctgagc

SEQ ID NO: 2990 - DNA, 44 bp, synthetic construct
  misc_feature 1..44: note = Probe
  source 1..44: mol_type = other DNA
acttacacttaggagatttcaacttaacttgaccgctctgagct

SEQ ID NO: 2991 - DNA, 45 bp, synthetic construct
  misc_feature 1..45: note = Probe
  source 1..45: mol_type = other DNA
acttacacttaggagatttcaacttaacttgaccgctctgagcta

SEQ ID NO: 2992 - DNA, 50 bp, synthetic construct
  misc_feature 1..50: note = Probe
  source 1..50: mol_type = other DNA
acttacacttaggagatttcaacttaacttgaccgctctgagctaaacct

SEQ ID NO: 2993 - DNA, 43 bp, synthetic construct
  misc_feature 1..43: note = Probe
  source 1..43: mol_type = other DNA
acttagcattaaccttttaagttaaagattaagagaaccaaca

SEQ ID NO: 2994 - DNA, 45 bp, synthetic construct
  misc_feature 1..45: note = Probe
  source 1..45: mol_type = other DNA
acttagcattaaccttttaagttaaagattaagagaaccaacacc

SEQ ID NO: 2995 - DNA, 17 bp, synthetic construct
  misc_feature 1..17: note = Probe
  source 1..17: mol_type = other DNA
acttaggagatttcaac

SEQ ID NO: 2996 - DNA, 18 bp, synthetic construct
  misc_feature 1..18: note = Probe
  source 1..18: mol_type = other DNA
acttaggagatttcaact

SEQ ID NO: 2997 - DNA, 27 bp, synthetic construct
  misc_feature 1..27: note = Probe
  source 1..27: mol_type = other DNA
acttaggagatttcaacttaacttgac

SEQ ID NO: 2998 - DNA, 29 bp, synthetic construct
  misc_feature 1..29: note = Probe
  source 1..29: mol_type = other DNA
acttaggagatttcaacttaacttgaccg

SEQ ID NO: 2999 - DNA, 31 bp, synthetic construct
  misc_feature 1..31: note = Probe
  source 1..31: mol_type = other DNA
acttaggagatttcaacttaacttgaccgct

SEQ ID NO: 3000 - DNA, 32 bp, synthetic construct
  misc_feature 1..32: note = Probe
  source 1..32: mol_type = other DNA
acttaggagatttcaacttaacttgaccgctc

SEQ ID NO: 3001 - DNA, 33 bp, synthetic construct
  misc_feature 1..33: note = Probe
  source 1..33: mol_type = other DNA
acttaggagatttcaacttaacttgaccgctct

SEQ ID NO: 3002 - DNA, 35 bp, synthetic construct
  misc_feature 1..35: note = Probe
  source 1..35: mol_type = other DNA
acttaggagatttcaacttaacttgaccgctctga

SEQ ID NO: 3003 - DNA, 36 bp, synthetic construct
  misc_feature 1..36: note = Probe
  source 1..36: mol_type = other DNA
acttaggagatttcaacttaacttgaccgctctgag

SEQ ID NO: 3004 - DNA, 37 bp, synthetic construct
  misc_feature 1..37: note = Probe
  source 1..37: mol_type = other DNA
acttaggagatttcaacttaacttgaccgctctgagc

SEQ ID NO: 3005 - DNA, 38 bp, synthetic construct
  misc_feature 1..38: note = Probe
  source 1..38: mol_type = other DNA
acttaggagatttcaacttaacttgaccgctctgagct

SEQ ID NO: 3006 - DNA, 39 bp, synthetic construct
  misc_feature 1..39: note = Probe
  source 1..39: mol_type = other DNA
acttaggagatttcaacttaacttgaccgctctgagcta

SEQ ID NO: 3007 - DNA, 40 bp, synthetic construct
  misc_feature 1..40: note = Probe
  source 1..40: mol_type = other DNA
acttaggagatttcaacttaacttgaccgctctgagctaa

SEQ ID NO: 3008 - DNA, 41 bp, synthetic construct
  misc_feature 1..41: note = Probe
  source 1..41: mol_type = other DNA
acttaggagatttcaacttaacttgaccgctctgagctaaa

SEQ ID NO: 3009 - DNA, 43 bp, synthetic construct
  misc_feature 1..43: note = Probe
  source 1..43: mol_type = other DNA
acttccaattaactagttttgacaacattcaaaaaagagtaat

SEQ ID NO: 3010 - DNA, 44 bp, synthetic construct
  misc_feature 1..44: note = Probe
  source 1..44: mol_type = other DNA
acttccaattaactagttttgacaacattcaaaaaagagtaata

SEQ ID NO: 3011 - DNA, 19 bp, synthetic construct
  misc_feature 1..19: note = Probe
  source 1..19: mol_type = other DNA
actttacagtcagaggttc

SEQ ID NO: 3012 - DNA, 20 bp, synthetic construct
  misc_feature 1..20: note = Probe
  source 1..20: mol_type = other DNA
actttacagtcagaggttca

SEQ ID NO: 3013 - DNA, 31 bp, synthetic construct
  misc_feature 1..31: note = Probe
  source 1..31: mol_type = other DNA
actttacagtcagaggttcaattcctcttct

SEQ ID NO: 3014 - DNA, 32 bp, synthetic construct
  misc_feature 1..32: note = Probe
  source 1..32: mol_type = other DNA
actttacagtcagaggttcaattcctcttctt

SEQ ID NO: 3015 - DNA, 33 bp, synthetic construct
  misc_feature 1..33: note = Probe
  source 1..33: mol_type = other DNA
actttacagtcagaggttcaattcctcttctta

SEQ ID NO: 3016 - DNA, 35 bp, synthetic construct
  misc_feature 1..35: note = Probe
  source 1..35: mol_type = other DNA
actttacagtcagaggttcaattcctcttcttaac

SEQ ID NO: 3017 - DNA, 37 bp, synthetic construct
  misc_feature 1..37: note = Probe
  source 1..37: mol_type = other DNA
actttacagtcagaggttcaattcctcttcttaacaa

SEQ ID NO: 3018 - DNA, 38 bp, synthetic construct
  misc_feature 1..38: note = Probe
  source 1..38: mol_type = other DNA
actttacagtcagaggttcaattcctcttcttaacaac

SEQ ID NO: 3019 - DNA, 39 bp, synthetic construct
  misc_feature 1..39: note = Probe
  source 1..39: mol_type = other DNA
actttacagtcagaggttcaattcctcttcttaacaaca

SEQ ID NO: 3020 - DNA, 21 bp, synthetic construct
  misc_feature 1..21: note = Probe
  source 1..21: mol_type = other DNA
actttgaatccagcgatccga

SEQ ID NO: 3021 - DNA, 29 bp, synthetic construct
  misc_feature 1..29: note = Probe
  source 1..29: mol_type = other DNA
actttgatagagtaaataataggagctta

SEQ ID NO: 3022 - DNA, 33 bp, synthetic construct
  misc_feature 1..33: note = Probe
  source 1..33: mol_type = other DNA
actttgatagagtaaataataggagcttaaacc

SEQ ID NO: 3023 - DNA, 34 bp, synthetic construct
  misc_feature 1..34: note = Probe
  source 1..34: mol_type = other DNA
actttgatagagtaaataataggagcttaaaccc

SEQ ID NO: 3024 - DNA, 35 bp, synthetic construct
  misc_feature 1..35: note = Probe
  source 1..35: mol_type = other DNA
actttgatagagtaaataataggagcttaaacccc

SEQ ID NO: 3025 - DNA, 36 bp, synthetic construct
  misc_feature 1..36: note = Probe
  source 1..36: mol_type = other DNA
actttgatagagtaaataataggagcttaaaccccc

SEQ ID NO: 3026 - DNA, 40 bp, synthetic construct
  misc_feature 1..40: note = Probe
  source 1..40: mol_type = other DNA
actttgatagagtaaataataggagcttaaacccccttat

SEQ ID NO: 3027 - DNA, 41 bp, synthetic construct
  misc_feature 1..41: note = Probe
  source 1..41: mol_type = other DNA
actttgatagagtaaataataggagcttaaacccccttatt

SEQ ID NO: 3028 - DNA, 42 bp, synthetic construct
  misc_feature 1..42: note = Probe
  source 1..42: mol_type = other DNA
actttgatagagtaaataataggagcttaaacccccttattt

SEQ ID NO: 3029 - DNA, 43 bp, synthetic construct
  misc_feature 1..43: note = Probe
  source 1..43: mol_type = other DNA
actttgatagagtaaataataggagcttaaacccccttatttc

SEQ ID NO: 3030 - DNA, 44 bp, synthetic construct
  misc_feature 1..44: note = Probe
  source 1..44: mol_type = other DNA
actttgatagagtaaataataggagcttaaacccccttatttct

SEQ ID NO: 3031 - DNA, 46 bp, synthetic construct
  misc_feature 1..46: note = Probe
  source 1..46: mol_type = other DNA
actttgatagagtaaataataggagcttaaacccccttatttctag

SEQ ID NO: 3032 - DNA, 49 bp, synthetic construct
  misc_feature 1..49: note = Probe
  source 1..49: mol_type = other DNA
actttgatagagtaaataataggagcttaaacccccttatttctaggac

SEQ ID NO: 3033 - DNA, 50 bp, synthetic construct
  misc_feature 1..50: note = Probe
  source 1..50: mol_type = other DNA
actttgatagagtaaataataggagcttaaacccccttatttctaggact

SEQ ID NO: 3034 - DNA, 29 bp, synthetic construct
  misc_feature 1..29: note = Probe
  source 1..29: mol_type = other DNA
acttttaaaggataacagctatccattgg

SEQ ID NO: 3035 - DNA, 33 bp, synthetic construct
  misc_feature 1..33: note = Probe
  source 1..33: mol_type = other DNA
acttttaaaggataacagctatccattggtctt

SEQ ID NO: 3036 - DNA, 39 bp, synthetic construct
  misc_feature 1..39: note = Probe
  source 1..39: mol_type = other DNA
acttttaaaggataacagctatccattggtcttaggccc

SEQ ID NO: 3037 - DNA, 41 bp, synthetic construct
  misc_feature 1..41: note = Probe
  source 1..41: mol_type = other DNA
acttttaaaggataacagctatccattggtcttaggcccca

SEQ ID NO: 3038 - DNA, 43 bp, synthetic construct
  misc_feature 1..43: note = Probe
  source 1..43: mol_type = other DNA
acttttaaaggataacagctatccattggtcttaggccccaaa

SEQ ID NO: 3039 - DNA, 50 bp, synthetic construct
  misc_feature 1..50: note = Probe
  source 1..50: mol_type = other DNA
acttttaaaggataacagctatccattggtcttaggccccaaaaattttg

SEQ ID NO: 3040 - DNA, 32 bp, synthetic construct
  misc_feature 1..32: note = Probe
  source 1..32: mol_type = other DNA
agaaagctcacaagaactgctaactcatgccc

SEQ ID NO: 3041 - DNA, 33 bp, synthetic construct
  misc_feature 1..33: note = Probe
  source 1..33: mol_type = other DNA
agaaagctcacaagaactgctaactcatgcccc

SEQ ID NO: 3042 - DNA, 35 bp, synthetic construct
  misc_feature 1..35: note = Probe
  source 1..35: mol_type = other DNA
agaaagctcacaagaactgctaactcatgccccca

SEQ ID NO: 3043 - DNA, 44 bp, synthetic construct
  misc_feature 1..44: note = Probe
  source 1..44: mol_type = other DNA
agaaatatgtctgataaaagagttactttgatagagtaaataat

SEQ ID NO: 3044 - DNA, 31 bp, synthetic construct
  misc_feature 1..31: note = Probe
  source 1..31: mol_type = other DNA
agaaatttaggttaaatacagaccaagagcc

SEQ ID NO: 3045 - DNA, 32 bp, synthetic construct
  misc_feature 1..32: note = Probe
  source 1..32: mol_type = other DNA
agaaatttaggttaaatacagaccaagagcct

SEQ ID NO: 3046 - DNA, 33 bp, synthetic construct
  misc_feature 1..33: note = Probe
  source 1..33: mol_type = other DNA
agaaatttaggttaaatacagaccaagagcctt

SEQ ID NO: 3047 - DNA, 34 bp, synthetic construct
  misc_feature 1..34: note = Probe
  source 1..34: mol_type = other DNA
agaaatttaggttaaatacagaccaagagccttc

SEQ ID NO: 3048 - DNA, 35 bp, synthetic construct
  misc_feature 1..35: note = Probe
  source 1..35: mol_type = other DNA
agaaatttaggttaaatacagaccaagagccttca

SEQ ID NO: 3049 - DNA, 43 bp, synthetic construct
  misc_feature 1..43: note = Probe
  source 1..43: mol_type = other DNA
agaaatttaggttaaatacagaccaagagccttcaaagccctc

SEQ ID NO: 3050 - DNA, 44 bp, synthetic construct
  misc_feature 1..44: note = Probe
  source 1..44: mol_type = other DNA
agaaatttaggttaaatacagaccaagagccttcaaagccctca

SEQ ID NO: 3051 - DNA, 49 bp, synthetic construct
  misc_feature 1..49: note = Probe
  source 1..49: mol_type = other DNA
agaaatttaggttaaatacagaccaagagccttcaaagccctcagtaag

SEQ ID NO: 3052 - DNA, 50 bp, synthetic construct
  misc_feature 1..50: note = Probe
  source 1..50: mol_type = other DNA
agaaatttaggttaaatacagaccaagagccttcaaagccctcagtaagt

SEQ ID NO: 3053 - DNA, 37 bp, synthetic construct
  misc_feature 1..37: note = Probe
  source 1..37: mol_type = other DNA
agaacagggtttgttaagatggcagagcccggtaatc

SEQ ID NO: 3054 - DNA, 39 bp, synthetic construct
  misc_feature 1..39: note = Probe
  source 1..39: mol_type = other DNA
agaacagggtttgttaagatggcagagcccggtaatcgc

SEQ ID NO: 3055 - DNA, 24 bp, synthetic construct
  misc_feature 1..24: note = Probe
  source 1..24: mol_type = other DNA
agaaccaacacctctttacagtga

SEQ ID NO: 3056 - DNA, 25 bp, synthetic construct
  misc_feature 1..25: note = Probe
  source 1..25: mol_type = other DNA
agaaccaacacctctttacagtgaa

SEQ ID NO: 3057 - DNA, 26 bp, synthetic construct
  misc_feature 1..26: note = Probe
  source 1..26: mol_type = other DNA
agaaccaacacctctttacagtgaaa

SEQ ID NO: 3058 - DNA, 27 bp, synthetic construct
  misc_feature 1..27: note = Probe
  source 1..27: mol_type = other DNA
agaaccaacacctctttacagtgaaat

SEQ ID NO: 3059 - DNA, 17 bp, synthetic construct
  misc_feature 1..17: note = Probe
  source 1..17: mol_type = other DNA
agaactgctaactcatg

SEQ ID NO: 3060 - DNA, 23 bp, synthetic construct
  misc_feature 1..23: note = Probe
  source 1..23: mol_type = other DNA
agaactgctaactcatgccccca

SEQ ID NO: 3061 - DNA, 24 bp, synthetic construct
  misc_feature 1..24: note = Probe
  source 1..24: mol_type = other DNA
agaactgctaactcatgcccccat

SEQ ID NO: 3062 - DNA, 26 bp, synthetic construct
  misc_feature 1..26: note = Probe
  source 1..26: mol_type = other DNA
agaactgctaactcatgcccccatgt

SEQ ID NO: 3063 - DNA, 27 bp, synthetic construct
  misc_feature 1..27: note = Probe
  source 1..27: mol_type = other DNA
agaactgctaactcatgcccccatgtc

SEQ ID NO: 3064 - DNA, 28 bp, synthetic construct
  misc_feature 1..28: note = Probe
  source 1..28: mol_type = other DNA
agaactgctaactcatgcccccatgtct

SEQ ID NO: 3065 - DNA, 29 bp, synthetic construct
  misc_feature 1..29: note = Probe
  source 1..29: mol_type = other DNA
agaactgctaactcatgcccccatgtcta

SEQ ID NO: 3066 - DNA, 32 bp, synthetic construct
  misc_feature 1..32: note = Probe
  source 1..32: mol_type = other DNA
agaactgctaactcatgcccccatgtctaaca

SEQ ID NO: 3067 - DNA, 39 bp, synthetic construct
  misc_feature 1..39: note = Probe
  source 1..39: mol_type = other DNA
agaactgctaactcatgcccccatgtctaacaacatggc

SEQ ID NO: 3068 - DNA, 48 bp, synthetic construct
  misc_feature 1..48: note = Probe
  source 1..48: mol_type = other DNA
agaactgctaactcatgcccccatgtctaacaacatggctttctcaac

SEQ ID NO: 3069 - DNA, 49 bp, synthetic construct
  misc_feature 1..49: note = Probe
  source 1..49: mol_type = other DNA
agaactgctaactcatgcccccatgtctaacaacatggctttctcaact

SEQ ID NO: 3070 - DNA, 50 bp, synthetic construct
  misc_feature 1..50: note = Probe
  source 1..50: mol_type = other DNA
agaactgctaactcatgcccccatgtctaacaacatggctttctcaactt

SEQ ID NO: 3071 - DNA, 17 bp, synthetic construct
  misc_feature 1..17: note = Probe
  source 1..17: mol_type = other DNA
agaagattccaggttcg

SEQ ID NO: 3072 - DNA, 33 bp, synthetic construct
  misc_feature 1..33: note = Probe
  source 1..33: mol_type = other DNA
agaagattccaggttcgactcctggctggctcg

SEQ ID NO: 3073 - DNA, 36 bp, synthetic construct
  misc_feature 1..36: note = Probe
  source 1..36: mol_type = other DNA
agaagattccaggttcgactcctggctggctcgttc

SEQ ID NO: 3074 - DNA, 32 bp, synthetic construct
  misc_feature 1..32: note = Probe
  source 1..32: mol_type = other DNA
agaagattctaggttcgactcctggctggctc

SEQ ID NO: 3075 - DNA, 33 bp, synthetic construct
  misc_feature 1..33: note = Probe
  source 1..33: mol_type = other DNA
agaagattctaggttcgactcctggctggctcg

SEQ ID NO: 3076 - DNA, 36 bp, synthetic construct
  misc_feature 1..36: note = Probe
  source 1..36: mol_type = other DNA
agaagattctaggttcgactcctggctggctcgcga

SEQ ID NO: 3077 - DNA, 36 bp, synthetic construct
  misc_feature 1..36: note = Probe
  source 1..36: mol_type = other DNA
agaagattctaggttcgactcctggctggctcgctt

SEQ ID NO: 3078 - DNA, 16 bp, synthetic construct
  misc_feature 1..16: note = Probe
  source 1..16: mol_type = other DNA
agaagattgagggttc

SEQ ID NO: 3079 - DNA, 27 bp, synthetic construct
  misc_feature 1..27: note = Probe
  source 1..27: mol_type = other DNA
agaagattgagggttcgaatcccttcg

SEQ ID NO: 3080 - DNA, 25 bp, synthetic construct
  misc_feature 1..25: note = Probe
  source 1..25: mol_type = other DNA
agaagattgagggttcgagtccctt

SEQ ID NO: 3081 - DNA, 32 bp, synthetic construct
  misc_feature 1..32: note = Probe
  source 1..32: mol_type = other DNA
agaagattgagggttcgagtcccttcgtggtc

SEQ ID NO: 3082 - DNA, 36 bp, synthetic construct
  misc_feature 1..36: note = Probe
  source 1..36: mol_type = other DNA
agaagattgagggttcgagtcccttcgtggtcgttg

SEQ ID NO: 3083 - DNA, 17 bp, synthetic construct
  misc_feature 1..17: note = Probe
  source 1..17: mol_type = other DNA
agaagattgcaggttcg

SEQ ID NO: 3084 - DNA, 31 bp, synthetic construct
  misc_feature 1..31: note = Probe
  source 1..31: mol_type = other DNA
agaagattgcaggttcgagtcctgccgcggt

SEQ ID NO: 3085 - DNA, 32 bp, synthetic construct
  misc_feature 1..32: note = Probe
  source 1..32: mol_type = other DNA
agaagattgcaggttcgagtcctgccgcggtc

SEQ ID NO: 3086 - DNA, 33 bp, synthetic construct
  misc_feature 1..33: note = Probe
  source 1..33: mol_type = other DNA
agaagattgcaggttcgagtcctgccgcggtcg

SEQ ID NO: 3087 - DNA, 36 bp, synthetic construct
  misc_feature 1..36: note = Probe
  source 1..36: mol_type = other DNA
agaagattgcaggttcgagtcctgccgcggtcgaag

SEQ ID NO: 3088 - DNA, 28 bp, synthetic construct
  misc_feature 1..28: note = Probe
  source 1..28: mol_type = other DNA
agaagcagcttcaaacctgccggggctt

SEQ ID NO: 3089 - DNA, 29 bp, synthetic construct
  misc_feature 1..29: note = Probe
  source 1..29: mol_type = other DNA
agaagcagcttcaaacctgccggggcttc

SEQ ID NO: 3090 - DNA, 30 bp, synthetic construct
  misc_feature 1..30: note = Probe
  source 1..30: mol_type = other DNA
agaagcagcttcaaacctgccggggcttct

SEQ ID NO: 3091 - DNA, 31 bp, synthetic construct
  misc_feature 1..31: note = Probe
  source 1..31: mol_type = other DNA
agaagcagcttcaaacctgccggggcttctc

SEQ ID NO: 3092 - DNA, 32 bp, synthetic construct
  misc_feature 1..32: note = Probe
  source 1..32: mol_type = other DNA
agaagcagcttcaaacctgccggggcttctcc

SEQ ID NO: 3093 - DNA, 32 bp, synthetic construct
  misc_feature 1..32: note = Probe
  source 1..32: mol_type = other DNA
agaaggtcctgggttcgagccccagtggaacc

SEQ ID NO: 3094 - DNA, 33 bp, synthetic construct
  misc_feature 1..33: note = Probe
  source 1..33: mol_type = other DNA
agaaggtcctgggttcgagccccagtggaacca

SEQ ID NO: 3095 - DNA, 35 bp, synthetic construct
  misc_feature 1..35: note = Probe
  source 1..35: mol_type = other DNA
agaaggtcctgggttcgagccccagtggaaccacg

SEQ ID NO: 3096 - DNA, 36 bp, synthetic construct
  misc_feature 1..36: note = Probe
  source 1..36: mol_type = other DNA
agaaggtcctgggttcgagccccagtggaaccacgg

SEQ ID NO: 3097 - DNA, 31 bp, synthetic construct
  misc_feature 1..31: note = Probe
  source 1..31: mol_type = other DNA
agaatcttagctttgggtgctaatggtggag

SEQ ID NO: 3098 - DNA, 34 bp, synthetic construct
  misc_feature 1..34: note = Probe
  source 1..34: mol_type = other DNA
agaatcttagctttgggtgctaatggtggagtta

SEQ ID NO: 3099 - DNA, 48 bp, synthetic construct
  misc_feature 1..48: note = Probe
  source 1..48: mol_type = other DNA
agaatcttagctttgggtgctaatggtggagttaaagactttttctct

SEQ ID NO: 3100 - DNA, 22 bp, synthetic construct
  misc_feature 1..22: note = Probe
  source 1..22: mol_type = other DNA
agacaggggttaggcctctttt

SEQ ID NO: 3101 - DNA, 23 bp, synthetic construct
  misc_feature 1..23: note = Probe
  source 1..23: mol_type = other DNA
agacaggggttaggcctcttttt

SEQ ID NO: 3102 - DNA, 19 bp, synthetic construct
  misc_feature 1..19: note = Probe
  source 1..19: mol_type = other DNA
agaccaagagccttcaaag

SEQ ID NO: 3103 - DNA, 22 bp, synthetic construct
  misc_feature 1..22: note = Probe
  source 1..22: mol_type = other DNA
agaccaagagccttcaaagccc

SEQ ID NO: 3104 - DNA, 23 bp, synthetic construct
  misc_feature 1..23: note = Probe
  source 1..23: mol_type = other DNA
agaccaagagccttcaaagccct

SEQ ID NO: 3105 - DNA, 28 bp, synthetic construct
  misc_feature 1..28: note = Probe
  source 1..28: mol_type = other DNA
agaccaagagccttcaaagccctcagta

SEQ ID NO: 3106 - DNA, 31 bp, synthetic construct
  misc_feature 1..31: note = Probe
  source 1..31: mol_type = other DNA
agaccaagagccttcaaagccctcagtaagt

SEQ ID NO: 3107 - DNA, 46 bp, synthetic construct
  misc_feature 1..46: note = Probe
  source 1..46: mol_type = other DNA
agaccaagagccttcaaagccctcagtaagttgcaatacttaattt

SEQ ID NO: 3108 - DNA, 48 bp, synthetic construct
  misc_feature 1..48: note = Probe
  source 1..48: mol_type = other DNA
agaccaagagccttcaaagccctcagtaagttgcaatacttaatttct

SEQ ID NO: 3109 - DNA, 49 bp, synthetic construct
  misc_feature 1..49: note = Probe
  source 1..49: mol_type = other DNA
agaccaagagccttcaaagccctcagtaagttgcaatacttaatttctg

SEQ ID NO: 3110 - DNA, 50 bp, synthetic construct
  misc_feature 1..50: note = Probe
  source 1..50: mol_type = other DNA
agaccaagagccttcaaagccctcagtaagttgcaatacttaatttctgt

SEQ ID NO: 3111 - DNA, 30 bp, synthetic construct
  misc_feature 1..30: note = Probe
  source 1..30: mol_type = other DNA
agaccggggttcaattccccgacggggagg

SEQ ID NO: 3112 - DNA, 32 bp, synthetic construct
  misc_feature 1..32: note = Probe
  source 1..32: mol_type = other DNA
agaccggggttcaattccccgacggggaggtg

SEQ ID NO: 3113 - DNA, 25 bp, synthetic construct
  misc_feature 1..25: note = Probe
  source 1..25: mol_type = other DNA
agaccggggttcgattccccgacgg

SEQ ID NO: 3114 - DNA, 30 bp, synthetic construct
  misc_feature 1..30: note = Probe
  source 1..30: mol_type = other DNA
agaccggggttcgattccccgacggggaga

SEQ ID NO: 3115 - DNA, 31 bp, synthetic construct
  misc_feature 1..31: note = Probe
  source 1..31: mol_type = other DNA
agaccggggttcgattccccgacggggagaa

SEQ ID NO: 3116 - DNA, 32 bp, synthetic construct
  misc_feature 1..32: note = Probe
  source 1..32: mol_type = other DNA
agaccggggttcgattccccgacggggagaaa

SEQ ID NO: 3117 - DNA, 31 bp, synthetic construct
  misc_feature 1..31: note = Probe
  source 1..31: mol_type = other DNA
agaccggggttcgattccccgacggggagac

SEQ ID NO: 3118 - DNA, 32 bp, synthetic construct
  misc_feature 1..32: note = Probe
  source 1..32: mol_type = other DNA
agaccggggttcgattccccgacggggagacg

SEQ ID NO: 3119 - DNA, 32 bp, synthetic construct
  misc_feature 1..32: note = Probe
  source 1..32: mol_type = other DNA
agaccggggttcgattccccgacggggagagt

SEQ ID NO: 3120 - DNA, 30 bp, synthetic construct
  misc_feature 1..30: note = Probe
  source 1..30: mol_type = other DNA
agaccggggttcgattccccgacggggagg

SEQ ID NO: 3121 - DNA, 31 bp, synthetic construct
  misc_feature 1..31: note = Probe
  source 1..31: mol_type = other DNA
agaccggggttcgattccccgacggggaggc

SEQ ID NO: 3122 - DNA, 32 bp, synthetic construct
  misc_feature 1..32: note = Probe
  source 1..32: mol_type = other DNA
agaccggggttcgattccccgacggggaggca

SEQ ID NO: 3123 - DNA, 32 bp, synthetic construct
  misc_feature 1..32: note = Probe
  source 1..32: mol_type = other DNA
agaccggggttcgattccccgacggggaggcc

SEQ ID NO: 3124 - DNA, 19 bp, synthetic construct
  misc_feature 1..19: note = Probe
  source 1..19: mol_type = other DNA
agacgggctcacatcaccc

SEQ ID NO: 3125 - DNA, 20 bp, synthetic construct
  misc_feature 1..20: note = Probe
  source 1..20: mol_type = other DNA
agacgggctcacatcacccc

SEQ ID NO: 3126 - DNA, 21 bp, synthetic construct
  misc_feature 1..21: note = Probe
  source 1..21: mol_type = other DNA
agacgggctcacatcacccca

SEQ ID NO: 3127 - DNA, 22 bp, synthetic construct
  misc_feature 1..22: note = Probe
  source 1..22: mol_type = other DNA
agacgggctcacatcaccccat

SEQ ID NO: 3128 - DNA, 23 bp, synthetic construct
  misc_feature 1..23: note = Probe
  source 1..23: mol_type = other DNA
agacgggctcacatcaccccata

SEQ ID NO: 3129 - DNA, 24 bp, synthetic construct
  misc_feature 1..24: note = Probe
  source 1..24: mol_type = other DNA
agacgggctcacatcaccccataa

SEQ ID NO: 3130 - DNA, 25 bp, synthetic construct
  misc_feature 1..25: note = Probe
  source 1..25: mol_type = other DNA
agacgggctcacatcaccccataaa

SEQ ID NO: 3131 - DNA, 26 bp, synthetic construct
  misc_feature 1..26: note = Probe
  source 1..26: mol_type = other DNA
agacgggctcacatcaccccataaac

SEQ ID NO: 3132 - DNA, 27 bp, synthetic construct
  misc_feature 1..27: note = Probe
  source 1..27: mol_type = other DNA
agacgggctcacatcaccccataaaca

SEQ ID NO: 3133 - DNA, 28 bp, synthetic construct
  misc_feature 1..28: note = Probe
  source 1..28: mol_type = other DNA
agacgggctcacatcaccccataaacaa

SEQ ID NO: 3134 - DNA, 29 bp, synthetic construct
  misc_feature 1..29: note = Probe
  source 1..29: mol_type = other DNA
agacgggctcacatcaccccataaacaaa

SEQ ID NO: 3135 - DNA, 30 bp, synthetic construct
  misc_feature 1..30: note = Probe
  source 1..30: mol_type = other DNA
agacgggctcacatcaccccataaacaaat

SEQ ID NO: 3136 - DNA, 31 bp, synthetic construct
  misc_feature 1..31: note = Probe
  source 1..31: mol_type = other DNA
agacgggctcacatcaccccataaacaaata

SEQ ID NO: 3137 - DNA, 32 bp, synthetic construct
  misc_feature 1..32: note = Probe
  source 1..32: mol_type = other DNA
agacgggctcacatcaccccataaacaaatag

SEQ ID NO: 3138 - DNA, 27 bp, synthetic construct
  misc_feature 1..27: note = Probe
  source 1..27: mol_type = other DNA
agagaaccaacacctctttacagtgaa

SEQ ID NO: 3139 - DNA, 29 bp, synthetic construct
  misc_feature 1..29: note = Probe
  source 1..29: mol_type = other DNA
agagaaccaacacctctttacagtgaaat

SEQ ID NO: 3140 - DNA, 30 bp, synthetic construct
  misc_feature 1..30: note = Probe
  source 1..30: mol_type = other DNA
agagcatgagactcttaatctcagggtcgt

SEQ ID NO: 3141 - DNA, 29 bp, synthetic construct
  misc_feature 1..29: note = Probe
  source 1..29: mol_type = other DNA
agagcatgggactcttaatcccagggtcg

SEQ ID NO: 3142 - DNA, 31 bp, synthetic construct
  misc_feature 1..31: note = Probe
  source 1..31: mol_type = other DNA
agagcatgggactcttaatcccagggtcgtg

SEQ ID NO: 3143 - DNA, 19 bp, synthetic construct
  misc_feature 1..19: note = Probe
  source 1..19: mol_type = other DNA
agagcccggtaatcgcata

SEQ ID NO: 3144 - DNA, 32 bp, synthetic construct
  misc_feature 1..32: note = Probe
  source 1..32: mol_type = other DNA
agagcccggtaatcgcataaaacttaaaactt

SEQ ID NO: 3145 - DNA, 40 bp, synthetic construct
  misc_feature 1..40: note = Probe
  source 1..40: mol_type = other DNA
agagcccggtaatcgcataaaacttaaaactttacagtca

SEQ ID NO: 3146 - DNA, 50 bp, synthetic construct
  misc_feature 1..50: note = Probe
  source 1..50: mol_type = other DNA
agagcccggtaatcgcataaaacttaaaactttacagtcagaggttcaat

SEQ ID NO: 3147 - DNA, 16 bp, synthetic construct
  misc_feature 1..16: note = Probe
  source 1..16: mol_type = other DNA
agagccttcaaagccc

SEQ ID NO: 3148 - DNA, 29 bp, synthetic construct
  misc_feature 1..29: note = Probe
  source 1..29: mol_type = other DNA
agagccttcaaagccctcagtaagttgca

SEQ ID NO: 3149 - DNA, 16 bp, synthetic construct
  misc_feature 1..16: note = Probe
  source 1..16: mol_type = other DNA
agaggtccccggttca

SEQ ID NO: 3150 - DNA, 16 bp, synthetic construct
  misc_feature 1..16: note = Probe
  source 1..16: mol_type = other DNA
agaggtccctggttca

SEQ ID NO: 3151 - DNA, 25 bp, synthetic construct
  misc_feature 1..25: note = Probe
  source 1..25: mol_type = other DNA
agaggttccgggttcgagtcccggc

SEQ ID NO: 3152 - DNA, 18 bp, synthetic construct
  misc_feature 1..18: note = Probe
  source 1..18: mol_type = other DNA
agagtaaataataggagc

SEQ ID NO: 3153 - DNA, 23 bp, synthetic construct
  misc_feature 1..23: note = Probe
  source 1..23: mol_type = other DNA
agagtaaataataggagcttaaa

SEQ ID NO: 3154 - DNA, 27 bp, synthetic construct
  misc_feature 1..27: note = Probe
  source 1..27: mol_type = other DNA
agagtaaataataggagcttaaacccc

SEQ ID NO: 3155 - DNA, 29 bp, synthetic construct
  misc_feature 1..29: note = Probe
  source 1..29: mol_type = other DNA
agagtaaataataggagcttaaaccccct

SEQ ID NO: 3156 - DNA, 33 bp, synthetic construct
  misc_feature 1..33: note = Probe
  source 1..33: mol_type = other DNA
agagtaaataataggagcttaaacccccttatt

SEQ ID NO: 3157 - DNA, 38 bp, synthetic construct
  misc_feature 1..38: note = Probe
  source 1..38: mol_type = other DNA
agagtaaataataggagcttaaacccccttatttctag

SEQ ID NO: 3158 - DNA, 39 bp, synthetic construct
  misc_feature 1..39: note = Probe
  source 1..39: mol_type = other DNA
agagtaaataataggagcttaaacccccttatttctagg

SEQ ID NO: 3159 - DNA, 40 bp, synthetic construct
  misc_feature 1..40: note = Probe
  source 1..40: mol_type = other DNA
agagtaaataataggagcttaaacccccttatttctagga

SEQ ID NO: 3160 - DNA, 41 bp, synthetic construct
  misc_feature 1..41: note = Probe
  source 1..41: mol_type = other DNA
agagtaaataataggagcttaaacccccttatttctaggac

SEQ ID NO: 3161 - DNA, 31 bp, synthetic construct
  misc_feature 1..31: note = Probe
  source 1..31: mol_type = other DNA
agagtggcgcagcggaagcgtgctgggccca

SEQ ID NO: 3162 - DNA, 23 bp, synthetic construct
  misc_feature 1..23: note = Probe
  source 1..23: mol_type = other DNA
agagtggggttttgcagtcctta

SEQ ID NO: 3163 - DNA, 24 bp, synthetic construct
  misc_feature 1..24: note = Probe
  source 1..24: mol_type = other DNA
agagtggggttttgcagtccttag

SEQ ID NO: 3164 - DNA, 25 bp, synthetic construct
  misc_feature 1..25: note = Probe
  source 1..25: mol_type = other DNA
agagtggggttttgcagtccttagc

SEQ ID NO: 3165 - DNA, 26 bp, synthetic construct
  misc_feature 1..26: note = Probe
  source 1..26: mol_type = other DNA
agagtggggttttgcagtccttagct

SEQ ID NO: 3166 - DNA, 27 bp, synthetic construct
  misc_feature 1..27: note = Probe
  source 1..27: mol_type = other DNA
agagtgtagcttaacacaaagcaccca

SEQ ID NO: 3167 - DNA, 30 bp, synthetic construct
  misc_feature 1..30: note = Probe
  source 1..30: mol_type = other DNA
agagtgtagcttaacacaaagcacccaact

SEQ ID NO: 3168 - DNA, 32 bp, synthetic construct
  misc_feature 1..32: note = Probe
  source 1..32: mol_type = other DNA
agagtgtagcttaacacaaagcacccaactta

SEQ ID NO: 3169 - DNA, 38 bp, synthetic construct
  misc_feature 1..38: note = Probe
  source 1..38: mol_type = other DNA
agagtgtagcttaacacaaagcacccaacttacactta

SEQ ID NO: 3170 - DNA, 44 bp, synthetic construct
  misc_feature 1..44: note = Probe
  source 1..44: mol_type = other DNA
agagtgtagcttaacacaaagcacccaacttacacttaggagat

SEQ ID NO: 3171 - DNA, 50 bp, synthetic construct
  misc_feature 1..50: note = Probe
  source 1..50: mol_type = other DNA
agagttactttgatagagtaaataataggagcttaaacccccttatttct

SEQ ID NO: 3172 - DNA, 27 bp, synthetic construct
  misc_feature 1..27: note = Probe
  source 1..27: mol_type = other DNA
agatgaaaacctttttccaaggacaaa

SEQ ID NO: 3173 - DNA, 28 bp, synthetic construct
  misc_feature 1..28: note = Probe
  source 1..28: mol_type = other DNA
agatgaaaacctttttccaaggacaaat

SEQ ID NO: 3174 - DNA, 20 bp, synthetic construct
  misc_feature 1..20: note = Probe
  source 1..20: mol_type = other DNA
agattaagagaaccaacacc

SEQ ID NO: 3175 - DNA, 31 bp, synthetic construct
  misc_feature 1..31: note = Probe
  source 1..31: mol_type = other DNA
agattaagagaaccaacacctctttacagtg

SEQ ID NO: 3176 - DNA, 32 bp, synthetic construct
  misc_feature 1..32: note = Probe
  source 1..32: mol_type = other DNA
agattaagagaaccaacacctctttacagtga

SEQ ID NO: 3177 - DNA, 33 bp, synthetic construct
  misc_feature 1..33: note = Probe
  source 1..33: mol_type = other DNA
agattaagagaaccaacacctctttacagtgaa

SEQ ID NO: 3178 - DNA, 34 bp, synthetic construct
  misc_feature 1..34: note = Probe
  source 1..34: mol_type = other DNA
agattaagagaaccaacacctctttacagtgaaa

SEQ ID NO: 3179 - DNA, 35 bp, synthetic construct
  misc_feature 1..35: note = Probe
  source 1..35: mol_type = other DNA
agattaagagaaccaacacctctttacagtgaaat

SEQ ID NO: 3180 - DNA, 23 bp, synthetic construct
  misc_feature 1..23: note = Probe
  source 1..23: mol_type = other DNA
agattccaggttcgactcctggc

SEQ ID NO: 3181 - DNA, 28 bp, synthetic construct
  misc_feature 1..28: note = Probe
  source 1..28: mol_type = other DNA
agattccaggttcgactcctggctggct

SEQ ID NO: 3182 - DNA, 32 bp, synthetic construct
  misc_feature 1..32: note = Probe
  source 1..32: mol_type = other DNA
agattccaggttcgactcctggctggctcgtt

SEQ ID NO: 3183 - DNA, 32 bp, synthetic construct
  misc_feature 1..32: note = Probe
  source 1..32: mol_type = other DNA
agattctaggttcgactcctggctggctcgcg

SEQ ID NO: 3184 - DNA, 33 bp, synthetic construct
  misc_feature 1..33: note = Probe
  source 1..33: mol_type = other DNA
agattctaggttcgactcctggctggctcgcga

SEQ ID NO: 3185 - DNA, 32 bp, synthetic construct
  misc_feature 1..32: note = Probe
  source 1..32: mol_type = other DNA
agattctaggttcgactcctggctggctcgct

SEQ ID NO: 3186 - DNA, 18 bp, synthetic construct
  misc_feature 1..18: note = Probe
  source 1..18: mol_type = other DNA
agattgagggttcgagtc

SEQ ID NO: 3187 - DNA, 27 bp, synthetic construct
  misc_feature 1..27: note = Probe
  source 1..27: mol_type = other DNA
agattgagggttcgagtcccttcgtgg

SEQ ID NO: 3188 - DNA, 29 bp, synthetic construct
  misc_feature 1..29: note = Probe
  source 1..29: mol_type = other DNA
agattgagggttcgagtcccttcgtggtc

SEQ ID NO: 3189 - DNA, 31 bp, synthetic construct
  misc_feature 1..31: note = Probe
  source 1..31: mol_type = other DNA
agattgagggttcgagtcccttcgtggtcgg

SEQ ID NO: 3190 - DNA, 31 bp, synthetic construct
  misc_feature 1..31: note = Probe
  source 1..31: mol_type = other DNA
agattgagggttcgagtcccttcgtggtcgt

SEQ ID NO: 3191 - DNA, 33 bp, synthetic construct
  misc_feature 1..33: note = Probe
  source 1..33: mol_type = other DNA
agattgagggttcgagtcccttcgtggtcgttg

SEQ ID NO: 3192 - DNA, 23 bp, synthetic construct
  misc_feature 1..23: note = Probe
  source 1..23: mol_type = other DNA
agattgcaggttcgagtcctgcc

SEQ ID NO: 3193 - DNA, 32 bp, synthetic construct
  misc_feature 1..32: note = Probe
  source 1..32: mol_type = other DNA
agattgcaggttcgagtcctgccgcggtcgaa

SEQ ID NO: 3194 - DNA, 33 bp, synthetic construct
  misc_feature 1..33: note = Probe
  source 1..33: mol_type = other DNA
agattgcaggttcgagtcctgccgcggtcgaag

SEQ ID NO: 3195 - DNA, 17 bp, synthetic construct
  misc_feature 1..17: note = Probe
  source 1..17: mol_type = other DNA
agattgtgaatctgaca

SEQ ID NO: 3196 - DNA, 35 bp, synthetic construct
  misc_feature 1..35: note = Probe
  source 1..35: mol_type = other DNA
agattgtgaatctgacaacagaggcttacgacccc

SEQ ID NO: 3197 - DNA, 36 bp, synthetic construct
  misc_feature 1..36: note = Probe
  source 1..36: mol_type = other DNA
agattgtgaatctgacaacagaggcttacgacccct

SEQ ID NO: 3198 - DNA, 40 bp, synthetic construct
  misc_feature 1..40: note = Probe
  source 1..40: mol_type = other DNA
agattgtgaatctgacaacagaggcttacgaccccttatt

SEQ ID NO: 3199 - DNA, 41 bp, synthetic construct
  misc_feature 1..41: note = Probe
  source 1..41: mol_type = other DNA
agattgtgaatctgacaacagaggcttacgaccccttattt

SEQ ID NO: 3200 - DNA, 42 bp, synthetic construct
  misc_feature 1..42: note = Probe
  source 1..42: mol_type = other DNA
agattgtgaatctgacaacagaggcttacgaccccttattta

SEQ ID NO: 3201 - DNA, 43 bp, synthetic construct
  misc_feature 1..43: note = Probe
  source 1..43: mol_type = other DNA
agattgtgaatctgacaacagaggcttacgaccccttatttac

SEQ ID NO: 3202 - DNA, 44 bp, synthetic construct
  misc_feature 1..44: note = Probe
  source 1..44: mol_type = other DNA
agattgtgaatctgacaacagaggcttacgaccccttatttacc

SEQ ID NO: 3203 - DNA, 46 bp, synthetic construct
  misc_feature 1..46: note = Probe
  source 1..46: mol_type = other DNA
agattgtgaatctgacaacagaggcttacgaccccttatttaccga

SEQ ID NO: 3204 - DNA, 49 bp, synthetic construct
  misc_feature 1..49: note = Probe
  source 1..49: mol_type = other DNA
agattgtgaatctgacaacagaggcttacgaccccttatttaccgagaa

SEQ ID NO: 3205 - DNA, 50 bp, synthetic construct
  misc_feature 1..50: note = Probe
  source 1..50: mol_type = other DNA
agattgtgaatctgacaacagaggcttacgaccccttatttaccgagaaa

SEQ ID NO: 3206 - DNA, 21 bp, synthetic construct
  misc_feature 1..21: note = Probe
  source 1..21: mol_type = other DNA
agatttcaacttaacttgacc

SEQ ID NO: 3207 - DNA, 23 bp, synthetic construct
  misc_feature 1..23: note = Probe
  source 1..23: mol_type = other DNA
agatttcaacttaacttgaccgc

SEQ ID NO: 3208 - DNA, 24 bp, synthetic construct
  misc_feature 1..24: note = Probe
  source 1..24: mol_type = other DNA
agatttcaacttaacttgaccgct

SEQ ID NO: 3209 - DNA, 25 bp, synthetic construct
  misc_feature 1..25: note = Probe
  source 1..25: mol_type = other DNA
agatttcaacttaacttgaccgctc

SEQ ID NO: 3210 - DNA, 26 bp, synthetic construct
  misc_feature 1..26: note = Probe
  source 1..26: mol_type = other DNA
agatttcaacttaacttgaccgctct

SEQ ID NO: 3211 - DNA, 27 bp, synthetic construct
  misc_feature 1..27: note = Probe
  source 1..27: mol_type = other DNA
agatttcaacttaacttgaccgctctg

SEQ ID NO: 3212 - DNA, 28 bp, synthetic construct
  misc_feature 1..28: note = Probe
  source 1..28: mol_type = other DNA
agatttcaacttaacttgaccgctctga

SEQ ID NO: 3213 - DNA, 29 bp, synthetic construct
  misc_feature 1..29: note = Probe
  source 1..29: mol_type = other DNA
agatttcaacttaacttgaccgctctgag

SEQ ID NO: 3214 - DNA, 30 bp, synthetic construct
  misc_feature 1..30: note = Probe
  source 1..30: mol_type = other DNA
agatttcaacttaacttgaccgctctgagc

SEQ ID NO: 3215 - DNA, 31 bp, synthetic construct
  misc_feature 1..31: note = Probe
  source 1..31: mol_type = other DNA
agatttcaacttaacttgaccgctctgagct

SEQ ID NO: 3216 - DNA, 31 bp, synthetic construct
  misc_feature 1..31: note = Probe
  source 1..31: mol_type = other DNA
agcaacctcggttcgaatccgagtcacggca

SEQ ID NO: 3217 - DNA, 33 bp, synthetic construct
  misc_feature 1..33: note = Probe
  source 1..33: mol_type = other DNA
agcaacctcggttcgaatccgagtcacggcaaa

SEQ ID NO: 3218 - DNA, 33 bp, synthetic construct
  misc_feature 1..33: note = Probe
  source 1..33: mol_type = other DNA
agcaacctcggttcgaatccgagtcacggcagg

SEQ ID NO: 3219 - DNA, 34 bp, synthetic construct
  misc_feature 1..34: note = Probe
  source 1..34: mol_type = other DNA
agcaacctcggttcgaatccgagtcacggcaggt

SEQ ID NO: 3220 - DNA, 33 bp, synthetic construct
  misc_feature 1..33: note = Probe
  source 1..33: mol_type = other DNA
agcaacctcggttcgaatccgagtcacggcatt

SEQ ID NO: 3221 - DNA, 34 bp, synthetic construct
  misc_feature 1..34: note = Probe
  source 1..34: mol_type = other DNA
agcaacctcggttcgaatccgagtcacggcattg

SEQ ID NO: 3222 - DNA, 31 bp, synthetic construct
  misc_feature 1..31: note = Probe
  source 1..31: mol_type = other DNA
agcaatacactgaaaatgtttagacgggctc

SEQ ID NO: 3223 - DNA, 32 bp, synthetic construct
  misc_feature 1..32: note = Probe
  source 1..32: mol_type = other DNA
agcaatacactgaaaatgtttagacgggctca

SEQ ID NO: 3224 - DNA, 33 bp, synthetic construct
  misc_feature 1..33: note = Probe
  source 1..33: mol_type = other DNA
agcaatacactgaaaatgtttagacgggctcac

SEQ ID NO: 3225 - DNA, 34 bp, synthetic construct
  misc_feature 1..34: note = Probe
  source 1..34: mol_type = other DNA
agcaatacactgaaaatgtttagacgggctcaca

SEQ ID NO: 3226 - DNA, 42 bp, synthetic construct
  misc_feature 1..42: note = Probe
  source 1..42: mol_type = other DNA
agcaatacactgaaaatgtttagacgggctcacatcacccca

SEQ ID NO: 3227 - DNA, 43 bp, synthetic construct
  misc_feature 1..43: note = Probe
  source 1..43: mol_type = other DNA
agcaatacactgaaaatgtttagacgggctcacatcaccccat

SEQ ID NO: 3228 - DNA, 49 bp, synthetic construct
  misc_feature 1..49: note = Probe
  source 1..49: mol_type = other DNA
agcaatacactgaaaatgtttagacgggctcacatcaccccataaacaa

SEQ ID NO: 3229 - DNA, 50 bp, synthetic construct
  misc_feature 1..50: note = Probe
  source 1..50: mol_type = other DNA
agcaatacactgaaaatgtttagacgggctcacatcaccccataaacaaa

SEQ ID NO: 3230 - DNA, 17 bp, synthetic construct
  misc_feature 1..17: note = Probe
  source 1..17: mol_type = other DNA
agcacccaacttacact

SEQ ID NO: 3231 - DNA, 18 bp, synthetic construct
  misc_feature 1..18: note = Probe
  source 1..18: mol_type = other DNA
agcacccaacttacactt

SEQ ID NO: 3232 - DNA, 19 bp, synthetic construct
  misc_feature 1..19: note = Probe
  source 1..19: mol_type = other DNA
agcacccaacttacactta

SEQ ID NO: 3233 - DNA, 20 bp, synthetic construct
  misc_feature 1..20: note = Probe
  source 1..20: mol_type = other DNA
agcacccaacttacacttag

SEQ ID NO: 3234 - DNA, 21 bp, synthetic construct
  misc_feature 1..21: note = Probe
  source 1..21: mol_type = other DNA
agcacccaacttacacttagg

SEQ ID NO: 3235 - DNA, 22 bp, synthetic construct
  misc_feature 1..22: note = Probe
  source 1..22: mol_type = other DNA
agcacccaacttacacttagga

SEQ ID NO: 3236 - DNA, 23 bp, synthetic construct
  misc_feature 1..23: note = Probe
  source 1..23: mol_type = other DNA
agcacccaacttacacttaggag

SEQ ID NO: 3237 - DNA, 24 bp, synthetic construct
  misc_feature 1..24: note = Probe
  source 1..24: mol_type = other DNA
agcacccaacttacacttaggaga

SEQ ID NO: 3238 - DNA, 25 bp, synthetic construct
  misc_feature 1..25: note = Probe
  source 1..25: mol_type = other DNA
agcacccaacttacacttaggagat

SEQ ID NO: 3239 - DNA, 26 bp, synthetic construct
  misc_feature 1..26: note = Probe
  source 1..26: mol_type = other DNA
agcacccaacttacacttaggagatt

SEQ ID NO: 3240 - DNA, 29 bp, synthetic construct
  misc_feature 1..29: note = Probe
  source 1..29: mol_type = other DNA
agcacccaacttacacttaggagatttca

SEQ ID NO: 3241 - DNA, 31 bp, synthetic construct
  misc_feature 1..31: note = Probe
  source 1..31: mol_type = other DNA
agcacccaacttacacttaggagatttcaac

SEQ ID NO: 3242 - DNA, 32 bp, synthetic construct
  misc_feature 1..32: note = Probe
  source 1..32: mol_type = other DNA
agcacccaacttacacttaggagatttcaact

SEQ ID NO: 3243 - DNA, 33 bp, synthetic construct
  misc_feature 1..33: note = Probe
  source 1..33: mol_type = other DNA
agcacccaacttacacttaggagatttcaactt

SEQ ID NO: 3244 - DNA, 36 bp, synthetic construct
  misc_feature 1..36: note = Probe
  source 1..36: mol_type = other DNA
agcacccaacttacacttaggagatttcaacttaac

SEQ ID NO: 3245 - DNA, 39 bp, synthetic construct
  misc_feature 1..39: note = Probe
  source 1..39: mol_type = other DNA
agcacccaacttacacttaggagatttcaacttaacttg

SEQ ID NO: 3246 - DNA, 43 bp, synthetic construct
  misc_feature 1..43: note = Probe
  source 1..43: mol_type = other DNA
agcacccaacttacacttaggagatttcaacttaacttgaccg

SEQ ID NO: 3247 - DNA, 44 bp, synthetic construct
  misc_feature 1..44: note = Probe
  source 1..44: mol_type = other DNA
agcacccaacttacacttaggagatttcaacttaacttgaccgc

SEQ ID NO: 3248 - DNA, 45 bp, synthetic construct
  misc_feature 1..45: note = Probe
  source 1..45: mol_type = other DNA
agcacccaacttacacttaggagatttcaacttaacttgaccgct

SEQ ID NO: 3249 - DNA, 46 bp, synthetic construct
  misc_feature 1..46: note = Probe
  source 1..46: mol_type = other DNA
agcacccaacttacacttaggagatttcaacttaacttgaccgctc

SEQ ID NO: 3250 - DNA, 49 bp, synthetic construct
  misc_feature 1..49: note = Probe
  source 1..49: mol_type = other DNA
agcacccaacttacacttaggagatttcaacttaacttgaccgctctga

SEQ ID NO: 3251 - DNA, 50 bp, synthetic construct
  misc_feature 1..50: note = Probe
  source 1..50: mol_type = other DNA
agcacccaacttacacttaggagatttcaacttaacttgaccgctctgag

SEQ ID NO: 3252 - DNA, 24 bp, synthetic construct
  misc_feature 1..24: note = Probe
  source 1..24: mol_type = other DNA
agcactctggactctgaatccagc

SEQ ID NO: 3253 - DNA, 25 bp, synthetic construct
  misc_feature 1..25: note = Probe
  source 1..25: mol_type = other DNA
agcactctggactctgaatccagcg

SEQ ID NO: 3254 - DNA, 32 bp, synthetic construct
  misc_feature 1..32: note = Probe
  source 1..32: mol_type = other DNA
agcactctggactctgaatccagcgatccgag

SEQ ID NO: 3255 - DNA, 21 bp, synthetic construct
  misc_feature 1..21: note = Probe
  source 1..21: mol_type = other DNA
agcagagtggcgcagcggaag

SEQ ID NO: 3256 - DNA, 22 bp, synthetic construct
  misc_feature 1..22: note = Probe
  source 1..22: mol_type = other DNA
agcagagtggcgcagcggaagc

SEQ ID NO: 3257 - DNA, 29 bp, synthetic construct
  misc_feature 1..29: note = Probe
  source 1..29: mol_type = other DNA
agcagagtggcgcagcggaagcgtgctgg

SEQ ID NO: 3258 - DNA, 50 bp, synthetic construct
  misc_feature 1..50: note = Probe
  source 1..50: mol_type = other DNA
agcagagtggcgcagcggaagcgtgctgggcccataacccagaggtcgat

SEQ ID NO: 3259 - DNA, 25 bp, synthetic construct
  misc_feature 1..25: note = Probe
  source 1..25: mol_type = other DNA
agcagcttcaaacctgccggggctt

SEQ ID NO: 3260 - DNA, 26 bp, synthetic construct
  misc_feature 1..26: note = Probe
  source 1..26: mol_type = other DNA
agcagcttcaaacctgccggggcttc

SEQ ID NO: 3261 - DNA, 27 bp, synthetic construct
  misc_feature 1..27: note = Probe
  source 1..27: mol_type = other DNA
agcagcttcaaacctgccggggcttct

SEQ ID NO: 3262 - DNA, 29 bp, synthetic construct
  misc_feature 1..29: note = Probe
  source 1..29: mol_type = other DNA
agcatagctgccttccaagcagttgaccc

SEQ ID NO: 3263 - DNA, 30 bp, synthetic construct
  misc_feature 1..30: note = Probe
  source 1..30: mol_type = other DNA
agcatagctgccttccaagcagttgacccg

SEQ ID NO: 3264 - DNA, 50 bp, synthetic construct
  misc_feature 1..50: note = Probe
  source 1..50: mol_type = other DNA
agcatagctgccttccaagcagttgacccgggttcgattcccggccaacg

SEQ ID NO: 3265 - DNA, 27 bp, synthetic construct
  misc_feature 1..27: note = Probe
  source 1..27: mol_type = other DNA
agcatgagactcttaatctcagggtcg

SEQ ID NO: 3266 - DNA, 29 bp, synthetic construct
  misc_feature 1..29: note = Probe
  source 1..29: mol_type = other DNA
agcatgagactcttaatctcagggtcgtg

SEQ ID NO: 3267 - DNA, 25 bp, synthetic construct
  misc_feature 1..25: note = Probe
  source 1..25: mol_type = other DNA
agcatgggactcttaatcccagggt

SEQ ID NO: 3268 - DNA, 27 bp, synthetic construct
  misc_feature 1..27: note = Probe
  source 1..27: mol_type = other DNA
agcatgggactcttaatcccagggtcg

SEQ ID NO: 3269 - DNA, 29 bp, synthetic construct
  misc_feature 1..29: note = Probe
  source 1..29: mol_type = other DNA
agcatgggactcttaatcccagggtcgtg

SEQ ID NO: 3270 - DNA, 30 bp, synthetic construct
  misc_feature 1..30: note = Probe
  source 1..30: mol_type = other DNA
agcatgggactcttaatcccagggtcgtgg

SEQ ID NO: 3271 - DNA, 17 bp, synthetic construct
  misc_feature 1..17: note = Probe
  source 1..17: mol_type = other DNA
agcattaaccttttaag

SEQ ID NO: 3272 - DNA, 18 bp, synthetic construct
  misc_feature 1..18: note = Probe
  source 1..18: mol_type = other DNA
agcattaaccttttaagt

SEQ ID NO: 3273 - DNA, 38 bp, synthetic construct
  misc_feature 1..38: note = Probe
  source 1..38: mol_type = other DNA
agcattaaccttttaagttaaagattaagagaaccaac

SEQ ID NO: 3274 - DNA, 40 bp, synthetic construct
  misc_feature 1..40: note = Probe
  source 1..40: mol_type = other DNA
agcattaaccttttaagttaaagattaagagaaccaacac

SEQ ID NO: 3275 - DNA, 41 bp, synthetic construct
  misc_feature 1..41: note = Probe
  source 1..41: mol_type = other DNA
agcattaaccttttaagttaaagattaagagaaccaacacc

SEQ ID NO: 3276 - DNA, 43 bp, synthetic construct
  misc_feature 1..43: note = Probe
  source 1..43: mol_type = other DNA
agcattaaccttttaagttaaagattaagagaaccaacacctc

SEQ ID NO: 3277 - DNA, 46 bp, synthetic construct
  misc_feature 1..46: note = Probe
  source 1..46: mol_type = other DNA
agcattaaccttttaagttaaagattaagagaaccaacacctcttt

SEQ ID NO: 3278 - DNA, 47 bp, synthetic construct
  misc_feature 1..47: note = Probe
  source 1..47: mol_type = other DNA
agcattaaccttttaagttaaagattaagagaaccaacacctcttta

SEQ ID NO: 3279 - DNA, 48 bp, synthetic construct
  misc_feature 1..48: note = Probe
  source 1..48: mol_type = other DNA
agcattaaccttttaagttaaagattaagagaaccaacacctctttac

SEQ ID NO: 3280 - DNA, 49 bp, synthetic construct
  misc_feature 1..49: note = Probe
  source 1..49: mol_type = other DNA
agcattaaccttttaagttaaagattaagagaaccaacacctctttaca

SEQ ID NO: 3281 - DNA, 50 bp, synthetic construct
  misc_feature 1..50: note = Probe
  source 1..50: mol_type = other DNA
agcattggactgtaaatctaaagacaggggttaggcctctttttaccagc

SEQ ID NO: 3282 - DNA, 33 bp, synthetic construct
  misc_feature 1..33: note = Probe
  source 1..33: mol_type = other DNA
agcattggtggttcagtggtagaattctcgcct

SEQ ID NO: 3283 - DNA, 34 bp, synthetic construct
  misc_feature 1..34: note = Probe
  source 1..34: mol_type = other DNA
agcattggtggttcagtggtagaattctcgcctg

SEQ ID NO: 3284 - DNA, 39 bp, synthetic construct
  misc_feature 1..39: note = Probe
  source 1..39: mol_type = other DNA
agccagggattgtgggttcgagtcccacccggggtaaag

SEQ ID NO: 3285 - DNA, 39 bp, synthetic construct
  misc_feature 1..39: note = Probe
  source 1..39: mol_type = other DNA
agccagggattgtgggttcgagtcccacctggggtgtcg

SEQ ID NO: 3286 - DNA, 29 bp, synthetic construct
  misc_feature 1..29: note = Probe
  source 1..29: mol_type = other DNA
agccagggattgtgggttcgagtcccatc

SEQ ID NO: 3287 - DNA, 39 bp, synthetic construct
  misc_feature 1..39: note = Probe
  source 1..39: mol_type = other DNA
agccagggattgtgggttcgagtcccatctggggtggcc

SEQ ID NO: 3288 - DNA, 50 bp, synthetic construct
  misc_feature 1..50: note = Probe
  source 1..50: mol_type = other DNA
agccagttgattagggtgcttagctgttaactaagtgtttgtgggtttaa

SEQ ID NO: 3289 - DNA, 33 bp, synthetic construct
  misc_feature 1..33: note = Probe
  source 1..33: mol_type = other DNA
agcccggctagctcagtcggtagagcatgggac

SEQ ID NO: 3290 - DNA, 22 bp, synthetic construct
  misc_feature 1..22: note = Probe
  source 1..22: mol_type = other DNA
agcccggtaatcgcataaaact

SEQ ID NO: 3291 - DNA, 37 bp, synthetic construct
  misc_feature 1..37: note = Probe
  source 1..37: mol_type = other DNA
agcccggtaatcgcataaaacttaaaactttacagtc

SEQ ID NO: 3292 - DNA, 40 bp, synthetic construct
  misc_feature 1..40: note = Probe
  source 1..40: mol_type = other DNA
agcccggtaatcgcataaaacttaaaactttacagtcaga

SEQ ID NO: 3293 - DNA, 44 bp, synthetic construct
  misc_feature 1..44: note = Probe
  source 1..44: mol_type = other DNA
agcccggtaatcgcataaaacttaaaactttacagtcagaggtt

SEQ ID NO: 3294 - DNA, 45 bp, synthetic construct
  misc_feature 1..45: note = Probe
  source 1..45: mol_type = other DNA
agcccggtaatcgcataaaacttaaaactttacagtcagaggttc

SEQ ID NO: 3295 - DNA, 49 bp, synthetic construct
  misc_feature 1..49: note = Probe
  source 1..49: mol_type = other DNA
agcccggtaatcgcataaaacttaaaactttacagtcagaggttcaatt

SEQ ID NO: 3296 - DNA, 50 bp, synthetic construct
  misc_feature 1..50: note = Probe
  source 1..50: mol_type = other DNA
agcccggtaatcgcataaaacttaaaactttacagtcagaggttcaattc

SEQ ID NO: 3297 - DNA, 23 bp, synthetic construct
  misc_feature 1..23: note = Probe
  source 1..23: mol_type = other DNA
agccctcagtaagttgcaatact

SEQ ID NO: 3298 - DNA, 32 bp, synthetic construct
  misc_feature 1..32: note = Probe
  source 1..32: mol_type = other DNA
agccctcagtaagttgcaatacttaatttctg

SEQ ID NO: 3299 - DNA, 15 bp, synthetic construct
  misc_feature 1..15: note = Probe
  source 1..15: mol_type = other DNA
agcctttctattagc

SEQ ID NO: 3300 - DNA, 29 bp, synthetic construct
  misc_feature 1..29: note = Probe
  source 1..29: mol_type = other DNA
agcgatccgagttcaaatctcggtggaac

SEQ ID NO: 3301 - DNA, 32 bp, synthetic construct
  misc_feature 1..32: note = Probe
  source 1..32: mol_type = other DNA
agcgatccgagttcaaatctcggtggaacctg

SEQ ID NO: 3302 - DNA, 33 bp, synthetic construct
  misc_feature 1..33: note = Probe
  source 1..33: mol_type = other DNA
agcgatccgagttcaaatctcggtggaacctgc

SEQ ID NO: 3303 - DNA, 34 bp, synthetic construct
  misc_feature 1..34: note = Probe
  source 1..34: mol_type = other DNA
agcgatccgagttcaaatctcggtggaacctgca

SEQ ID NO: 3304 - DNA, 32 bp, synthetic construct
  misc_feature 1..32: note = Probe
  source 1..32: mol_type = other DNA
agcgatccgagttcaaatctcggtggaacctt

SEQ ID NO: 3305 - DNA, 33 bp, synthetic construct
  misc_feature 1..33: note = Probe
  source 1..33: mol_type = other DNA
agcgatccgagttcaaatctcggtgggacctca

SEQ ID NO: 3306 - DNA, 34 bp, synthetic construct
  misc_feature 1..34: note = Probe
  source 1..34: mol_type = other DNA
agcgatccgagttcaaatctcggtgggacctcac

SEQ ID NO: 3307 - DNA, 29 bp, synthetic construct
  misc_feature 1..29: note = Probe
  source 1..29: mol_type = other DNA
agcgatccgagttcgagtctcggtggaac

SEQ ID NO: 3308 - DNA, 31 bp, synthetic construct
  misc_feature 1..31: note = Probe
  source 1..31: mol_type = other DNA
agcgatccgagttcgagtctcggtggaacct

SEQ ID NO: 3309 - DNA, 33 bp, synthetic construct
  misc_feature 1..33: note = Probe
  source 1..33: mol_type = other DNA
agcgatccgagttcgagtctcggtggaaccttt

SEQ ID NO: 3310 - DNA, 33 bp, synthetic construct
  misc_feature 1..33: note = Probe
  source 1..33: mol_type = other DNA
agcgccgctggtgtagtggtatcatgcaagatt

SEQ ID NO: 3311 - DNA, 37 bp, synthetic construct
  misc_feature 1..37: note = Probe
  source 1..37: mol_type = other DNA
agcgccgctggtgtagtggtatcatgcaagattccca

SEQ ID NO: 3312 - DNA, 50 bp, synthetic construct
  misc_feature 1..50: note = Probe
  source 1..50: mol_type = other DNA
agcgcgttcggctgttaaccgaaaggttggtggttcgagcccacccaggg

SEQ ID NO: 3313 - DNA, 22 bp, synthetic construct
  misc_feature 1..22: note = Probe
  source 1..22: mol_type = other DNA
agcggaagcgtgctgggcccat

SEQ ID NO: 3314 - DNA, 44 bp, synthetic construct
  misc_feature 1..44: note = Probe
  source 1..44: mol_type = other DNA
agcggagccttcgatagctcagttggtagagcggaggactgtag

SEQ ID NO: 3315 - DNA, 31 bp, synthetic construct
  misc_feature 1..31: note = Probe
  source 1..31: mol_type = other DNA
agctaaacctagccccaaacccactccacct

SEQ ID NO: 3316 - DNA, 23 bp, synthetic construct
  misc_feature 1..23: note = Probe
  source 1..23: mol_type = other DNA
agctaaataagctatcgggccca

SEQ ID NO: 3317 - DNA, 24 bp, synthetic construct
  misc_feature 1..24: note = Probe
  source 1..24: mol_type = other DNA
agctaaataagctatcgggcccat

SEQ ID NO: 3318 - DNA, 25 bp, synthetic construct
  misc_feature 1..25: note = Probe
  source 1..25: mol_type = other DNA
agctaaataagctatcgggcccata

SEQ ID NO: 3319 - DNA, 26 bp, synthetic construct
  misc_feature 1..26: note = Probe
  source 1..26: mol_type = other DNA
agctaaataagctatcgggcccatac

SEQ ID NO: 3320 - DNA, 27 bp, synthetic construct
  misc_feature 1..27: note = Probe
  source 1..27: mol_type = other DNA
agctaaataagctatcgggcccatacc

SEQ ID NO: 3321 - DNA, 29 bp, synthetic construct
  misc_feature 1..29: note = Probe
  source 1..29: mol_type = other DNA
agctaaataagctatcgggcccatacccc

SEQ ID NO: 3322 - DNA, 35 bp, synthetic construct
  misc_feature 1..35: note = Probe
  source 1..35: mol_type = other DNA
agctaaataagctatcgggcccataccccgaaaat

SEQ ID NO: 3323 - DNA, 39 bp, synthetic construct
  misc_feature 1..39: note = Probe
  source 1..39: mol_type = other DNA
agctaaataagctatcgggcccataccccgaaaatgttg

SEQ ID NO: 3324 - DNA, 43 bp, synthetic construct
  misc_feature 1..43: note = Probe
  source 1..43: mol_type = other DNA
agctaaataagctatcgggcccataccccgaaaatgttggtta

SEQ ID NO: 3325 - DNA, 50 bp, synthetic construct
  misc_feature 1..50: note = Probe
  source 1..50: mol_type = other DNA
agctaaataagctatcgggcccataccccgaaaatgttggttataccctt

SEQ ID NO: 3326 - DNA, 50 bp, synthetic construct
  misc_feature 1..50: note = Probe
  source 1..50: mol_type = other DNA
agctatccattggtcttaggccccaaaaattttggtgcaactccaaataa

SEQ ID NO: 3327 - DNA, 20 bp, synthetic construct
  misc_feature 1..20: note = Probe
  source 1..20: mol_type = other DNA
agctatcgggcccatacccc

SEQ ID NO: 3328 - DNA, 21 bp, synthetic construct
  misc_feature 1..21: note = Probe
  source 1..21: mol_type = other DNA
agctatcgggcccataccccg

SEQ ID NO: 3329 - DNA, 22 bp, synthetic construct
  misc_feature 1..22: note = Probe
  source 1..22: mol_type = other DNA
agctatcgggcccataccccga

SEQ ID NO: 3330 - DNA, 23 bp, synthetic construct
  misc_feature 1..23: note = Probe
  source 1..23: mol_type = other DNA
agctatcgggcccataccccgaa

SEQ ID NO: 3331 - DNA, 24 bp, synthetic construct
  misc_feature 1..24: note = Probe
  source 1..24: mol_type = other DNA
agctatcgggcccataccccgaaa

SEQ ID NO: 3332 - DNA, 25 bp, synthetic construct
  misc_feature 1..25: note = Probe
  source 1..25: mol_type = other DNA
agctatcgggcccataccccgaaaa

SEQ ID NO: 3333 - DNA, 26 bp, synthetic construct
  misc_feature 1..26: note = Probe
  source 1..26: mol_type = other DNA
agctatcgggcccataccccgaaaat

SEQ ID NO: 3334 - DNA, 27 bp, synthetic construct
  misc_feature 1..27: note = Probe
  source 1..27: mol_type = other DNA
agctatcgggcccataccccgaaaatg

SEQ ID NO: 3335 - DNA, 28 bp, synthetic construct
  misc_feature 1..28: note = Probe
  source 1..28: mol_type = other DNA
agctatcgggcccataccccgaaaatgt

SEQ ID NO: 3336 - DNA, 29 bp, synthetic construct
  misc_feature 1..29: note = Probe
  source 1..29: mol_type = other DNA
agctatcgggcccataccccgaaaatgtt

SEQ ID NO: 3337 - DNA, 30 bp, synthetic construct
  misc_feature 1..30: note = Probe
  source 1..30: mol_type = other DNA
agctatcgggcccataccccgaaaatgttg

SEQ ID NO: 3338 - DNA, 31 bp, synthetic construct
  misc_feature 1..31: note = Probe
  source 1..31: mol_type = other DNA
agctatcgggcccataccccgaaaatgttgg

SEQ ID NO: 3339 - DNA, 32 bp, synthetic construct
  misc_feature 1..32: note = Probe
  source 1..32: mol_type = other DNA
agctatcgggcccataccccgaaaatgttggt

SEQ ID NO: 3340 - DNA, 33 bp, synthetic construct
  misc_feature 1..33: note = Probe
  source 1..33: mol_type = other DNA
agctatcgggcccataccccgaaaatgttggtt

SEQ ID NO: 3341 - DNA, 34 bp, synthetic construct
  misc_feature 1..34: note = Probe
  source 1..34: mol_type = other DNA
agctatcgggcccataccccgaaaatgttggtta

SEQ ID NO: 3342 - DNA, 40 bp, synthetic construct
  misc_feature 1..40: note = Probe
  source 1..40: mol_type = other DNA
agctatcgggcccataccccgaaaatgttggttataccct

SEQ ID NO: 3343 - DNA, 41 bp, synthetic construct
  misc_feature 1..41: note = Probe
  source 1..41: mol_type = other DNA
agctatcgggcccataccccgaaaatgttggttataccctt

SEQ ID NO: 3344 - DNA, 43 bp, synthetic construct
  misc_feature 1..43: note = Probe
  source 1..43: mol_type = other DNA
agctatcgggcccataccccgaaaatgttggttatacccttcc

SEQ ID NO: 3345 - DNA, 45 bp, synthetic construct
  misc_feature 1..45: note = Probe
  source 1..45: mol_type = other DNA
agctatcgggcccataccccgaaaatgttggttatacccttcccg

SEQ ID NO: 3346 - DNA, 46 bp, synthetic construct
  misc_feature 1..46: note = Probe
  source 1..46: mol_type = other DNA
agctatcgggcccataccccgaaaatgttggttatacccttcccgt

SEQ ID NO: 3347 - DNA, 48 bp, synthetic construct
  misc_feature 1..48: note = Probe
  source 1..48: mol_type = other DNA
agctatcgggcccataccccgaaaatgttggttatacccttcccgtac

SEQ ID NO: 3348 - DNA, 49 bp, synthetic construct
  misc_feature 1..49: note = Probe
  source 1..49: mol_type = other DNA
agctatcgggcccataccccgaaaatgttggttatacccttcccgtact

SEQ ID NO: 3349 - DNA, 26 bp, synthetic construct
  misc_feature 1..26: note = Probe
  source 1..26: mol_type = other DNA
agctcacaagaactgctaactcatgc

SEQ ID NO: 3350 - DNA, 28 bp, synthetic construct
  misc_feature 1..28: note = Probe
  source 1..28: mol_type = other DNA
agctcacaagaactgctaactcatgccc

SEQ ID NO: 3351 - DNA, 31 bp, synthetic construct
  misc_feature 1..31: note = Probe
  source 1..31: mol_type = other DNA
agctcacaagaactgctaactcatgccccca

SEQ ID NO: 3352 - DNA, 25 bp, synthetic construct
  misc_feature 1..25: note = Probe
  source 1..25: mol_type = other DNA
agctcagtcggtagagcatcagact

SEQ ID NO: 3353 - DNA, 25 bp, synthetic construct
  misc_feature 1..25: note = Probe
  source 1..25: mol_type = other DNA
agctcagtcggtagagcatgagact

SEQ ID NO: 3354 - DNA, 26 bp, synthetic construct
  misc_feature 1..26: note = Probe
  source 1..26: mol_type = other DNA
agctcagtcggtagagcatgagactc

SEQ ID NO: 3355 - DNA, 27 bp, synthetic construct
  misc_feature 1..27: note = Probe
  source 1..27: mol_type = other DNA
agctcagtcggtagagcatgagactct

SEQ ID NO: 3356 - DNA, 26 bp, synthetic construct
  misc_feature 1..26: note = Probe
  source 1..26: mol_type = other DNA
agctcagtcggtagagcatgggactc

SEQ ID NO: 3357 - DNA, 27 bp, synthetic construct
  misc_feature 1..27: note = Probe
  source 1..27: mol_type = other DNA
agctcagtcggtagagcatgggactct

SEQ ID NO: 3358 - DNA, 18 bp, synthetic construct
  misc_feature 1..18: note = Probe
  source 1..18: mol_type = other DNA
agctccgaggtgattttc

SEQ ID NO: 3359 - DNA, 19 bp, synthetic construct
  misc_feature 1..19: note = Probe
  source 1..19: mol_type = other DNA
agctccgaggtgattttca

SEQ ID NO: 3360 - DNA, 23 bp, synthetic construct
  misc_feature 1..23: note = Probe
  source 1..23: mol_type = other DNA
agctccgaggtgattttcatatt

SEQ ID NO: 3361 - DNA, 28 bp, synthetic construct
  misc_feature 1..28: note = Probe
  source 1..28: mol_type = other DNA
agctccgaggtgattttcatattgaatt

SEQ ID NO: 3362 - DNA, 29 bp, synthetic construct
  misc_feature 1..29: note = Probe
  source 1..29: mol_type = other DNA
agctccgaggtgattttcatattgaattg

SEQ ID NO: 3363 - DNA, 33 bp, synthetic construct
  misc_feature 1..33: note = Probe
  source 1..33: mol_type = other DNA
agctccgaggtgattttcatattgaattgcaaa

SEQ ID NO: 3364 - DNA, 35 bp, synthetic construct
  misc_feature 1..35: note = Probe
  source 1..35: mol_type = other DNA
agctccgaggtgattttcatattgaattgcaaatt

SEQ ID NO: 3365 - DNA, 37 bp, synthetic construct
  misc_feature 1..37: note = Probe
  source 1..37: mol_type = other DNA
agctccgaggtgattttcatattgaattgcaaattcg

SEQ ID NO: 3366 - DNA, 38 bp, synthetic construct
  misc_feature 1..38: note = Probe
  source 1..38: mol_type = other DNA
agctccgaggtgattttcatattgaattgcaaattcga

SEQ ID NO: 3367 - DNA, 39 bp, synthetic construct
  misc_feature 1..39: note = Probe
  source 1..39: mol_type = other DNA
agctccgaggtgattttcatattgaattgcaaattcgaa

SEQ ID NO: 3368 - DNA, 40 bp, synthetic construct
  misc_feature 1..40: note = Probe
  source 1..40: mol_type = other DNA
agctccgaggtgattttcatattgaattgcaaattcgaag

SEQ ID NO: 3369 - DNA, 44 bp, synthetic construct
  misc_feature 1..44: note = Probe
  source 1..44: mol_type = other DNA
agctccgaggtgattttcatattgaattgcaaattcgaagaagc

SEQ ID NO: 3370 - DNA, 45 bp, synthetic construct
  misc_feature 1..45: note = Probe
  source 1..45: mol_type = other DNA
agctccgaggtgattttcatattgaattgcaaattcgaagaagca

SEQ ID NO: 3371 - DNA, 46 bp, synthetic construct
  misc_feature 1..46: note = Probe
  source 1..46: mol_type = other DNA
agctccgaggtgattttcatattgaattgcaaattcgaagaagcag

SEQ ID NO: 3372 - DNA, 48 bp, synthetic construct
  misc_feature 1..48: note = Probe
  source 1..48: mol_type = other DNA
agctccgaggtgattttcatattgaattgcaaattcgaagaagcagct

SEQ ID NO: 3373 - DNA, 49 bp, synthetic construct
  misc_feature 1..49: note = Probe
  source 1..49: mol_type = other DNA
agctccgaggtgattttcatattgaattgcaaattcgaagaagcagctt

SEQ ID NO: 3374 - DNA, 50 bp, synthetic construct
  misc_feature 1..50: note = Probe
  source 1..50: mol_type = other DNA
agctccgaggtgattttcatattgaattgcaaattcgaagaagcagcttc

SEQ ID NO: 3375 - DNA, 39 bp, synthetic construct
  misc_feature 1..39: note = Probe
  source 1..39: mol_type = other DNA
agctggggattgtgggttcgagtcccatctgggtcgcgt

SEQ ID NO: 3376 - DNA, 27 bp, synthetic construct
  misc_feature 1..27: note = Probe
  source 1..27: mol_type = other DNA
agctgttaactaagtgtttgtgggttt

SEQ ID NO: 3377 - DNA, 43 bp, synthetic construct
  misc_feature 1..43: note = Probe
  source 1..43: mol_type = other DNA
agctgttaactaagtgtttgtgggtttaagtcccattggtcta

SEQ ID NO: 3378 - DNA, 23 bp, synthetic construct
  misc_feature 1..23: note = Probe
  source 1..23: mol_type = other DNA
agcttaaacccccttatttctag

SEQ ID NO: 3379 - DNA, 24 bp, synthetic construct
  misc_feature 1..24: note = Probe
  source 1..24: mol_type = other DNA
agcttaaacccccttatttctagg

SEQ ID NO: 3380 - DNA, 25 bp, synthetic construct
  misc_feature 1..25: note = Probe
  source 1..25: mol_type = other DNA
agcttaaacccccttatttctagga

SEQ ID NO: 3381 - DNA, 21 bp, synthetic construct
  misc_feature 1..21: note = Probe
  source 1..21: mol_type = other DNA
agcttcaaacctgccggggct

SEQ ID NO: 3382 - DNA, 23 bp, synthetic construct
  misc_feature 1..23: note = Probe
  source 1..23: mol_type = other DNA
agcttcaaacctgccggggcttc

SEQ ID NO: 3383 - DNA, 24 bp, synthetic construct
  misc_feature 1..24: note = Probe
  source 1..24: mol_type = other DNA
agcttcaaacctgccggggcttct

SEQ ID NO: 3384 - DNA, 25 bp, synthetic construct
  misc_feature 1..25: note = Probe
  source 1..25: mol_type = other DNA
agcttcaaacctgccggggcttctc

SEQ ID NO: 3385 - DNA, 28 bp, synthetic construct
  misc_feature 1..28: note = Probe
  source 1..28: mol_type = other DNA
agctttggggggttcgattccttccttt

SEQ ID NO: 3386 - DNA, 29 bp, synthetic construct
  misc_feature 1..29: note = Probe
  source 1..29: mol_type = other DNA
agctttggggggttcgattccttcctttt

SEQ ID NO: 3387 - DNA, 31 bp, synthetic construct
  misc_feature 1..31: note = Probe
  source 1..31: mol_type = other DNA
agctttggggggttcgattccttcctttttt

SEQ ID NO: 3388 - DNA, 32 bp, synthetic construct
  misc_feature 1..32: note = Probe
  source 1..32: mol_type = other DNA
agctttggggggttcgattccttccttttttg

SEQ ID NO: 3389 - DNA, 33 bp, synthetic construct
  misc_feature 1..33: note = Probe
  source 1..33: mol_type = other DNA
agctttggggggttcgattccttccttttttgt

SEQ ID NO: 3390 - DNA, 34 bp, synthetic construct
  misc_feature 1..34: note = Probe
  source 1..34: mol_type = other DNA
agctttggggggttcgattccttccttttttgtc

SEQ ID NO: 3391 - DNA, 35 bp, synthetic construct
  misc_feature 1..35: note = Probe
  source 1..35: mol_type = other DNA
agctttggggggttcgattccttccttttttgtct

SEQ ID NO: 3392 - DNA, 45 bp, synthetic construct
  misc_feature 1..45: note = Probe
  source 1..45: mol_type = other DNA
agctttgggtgctaatggtggagttaaagactttttctctgattt

SEQ ID NO: 3393 - DNA, 50 bp, synthetic construct
  misc_feature 1..50: note = Probe
  source 1..50: mol_type = other DNA
agctttgggtgctaatggtggagttaaagactttttctctgatttgtcct

SEQ ID NO: 3394 - DNA, 26 bp, synthetic construct
  misc_feature 1..26: note = Probe
  source 1..26: mol_type = other DNA
aggagatcctgggttcgaatcccagc

SEQ ID NO: 3395 - DNA, 27 bp, synthetic construct
  misc_feature 1..27: note = Probe
  source 1..27: mol_type = other DNA
aggagatcctgggttcgaatcccagcg

SEQ ID NO: 3396 - DNA, 33 bp, synthetic construct
  misc_feature 1..33: note = Probe
  source 1..33: mol_type = other DNA
aggagatcctgggttcgaatcccagcggggcct

SEQ ID NO: 3397 - DNA, 31 bp, synthetic construct
  misc_feature 1..31: note = Probe
  source 1..31: mol_type = other DNA
aggagatcctgggttcgaatcccagcggtgc

SEQ ID NO: 3398 - DNA, 32 bp, synthetic construct
  misc_feature 1..32: note = Probe
  source 1..32: mol_type = other DNA
aggagatcctgggttcgaatcccagcggtgcc

SEQ ID NO: 3399 - DNA, 35 bp, synthetic construct
  misc_feature 1..35: note = Probe
  source 1..35: mol_type = other DNA
aggagatcctgggttcgaatcccagcggtgcctcc

SEQ ID NO: 3400 - DNA, 36 bp, synthetic construct
  misc_feature 1..36: note = Probe
  source 1..36: mol_type = other DNA
aggagatcctgggttcgaatcccagcggtgcctccg

SEQ ID NO: 3401 - DNA, 33 bp, synthetic construct
  misc_feature 1..33: note = Probe
  source 1..33: mol_type = other DNA
aggagatcctgggttcgactcccagtggggcct

SEQ ID NO: 3402 - DNA, 17 bp, synthetic construct
  misc_feature 1..17: note = Probe
  source 1..17: mol_type = other DNA
aggagatttcaacttaa

SEQ ID NO: 3403 - DNA, 23 bp, synthetic construct
  misc_feature 1..23: note = Probe
  source 1..23: mol_type = other DNA
aggagatttcaacttaacttgac

SEQ ID NO: 3404 - DNA, 24 bp, synthetic construct
  misc_feature 1..24: note = Probe
  source 1..24: mol_type = other DNA
aggagatttcaacttaacttgacc

SEQ ID NO: 3405 - DNA, 25 bp, synthetic construct
  misc_feature 1..25: note = Probe
  source 1..25: mol_type = other DNA
aggagatttcaacttaacttgaccg

SEQ ID NO: 3406 - DNA, 26 bp, synthetic construct
  misc_feature 1..26: note = Probe
  source 1..26: mol_type = other DNA
aggagatttcaacttaacttgaccgc

SEQ ID NO: 3407 - DNA, 27 bp, synthetic construct
  misc_feature 1..27: note = Probe
  source 1..27: mol_type = other DNA
aggagatttcaacttaacttgaccgct

SEQ ID NO: 3408 - DNA, 28 bp, synthetic construct
  misc_feature 1..28: note = Probe
  source 1..28: mol_type = other DNA
aggagatttcaacttaacttgaccgctc

SEQ ID NO: 3409 - DNA, 29 bp, synthetic construct
  misc_feature 1..29: note = Probe
  source 1..29: mol_type = other DNA
aggagatttcaacttaacttgaccgctct

SEQ ID NO: 3410 - DNA, 30 bp, synthetic construct
  misc_feature 1..30: note = Probe
  source 1..30: mol_type = other DNA
aggagatttcaacttaacttgaccgctctg

SEQ ID NO: 3411 - DNA, 31 bp, synthetic construct
  misc_feature 1..31: note = Probe
  source 1..31: mol_type = other DNA
aggagatttcaacttaacttgaccgctctga

SEQ ID NO: 3412 - DNA, 32 bp, synthetic construct
  misc_feature 1..32: note = Probe
  source 1..32: mol_type = other DNA
aggagatttcaacttaacttgaccgctctgag

SEQ ID NO: 3413 - DNA, 33 bp, synthetic construct
  misc_feature 1..33: note = Probe
  source 1..33: mol_type = other DNA
aggagatttcaacttaacttgaccgctctgagc

SEQ ID NO: 3414 - DNA, 34 bp, synthetic construct
  misc_feature 1..34: note = Probe
  source 1..34: mol_type = other DNA
aggagatttcaacttaacttgaccgctctgagct

SEQ ID NO: 3415 - DNA, 27 bp, synthetic construct
  misc_feature 1..27: note = Probe
  source 1..27: mol_type = other DNA
aggagcttaaacccccttatttctagg

SEQ ID NO: 3416 - DNA, 21 bp, synthetic construct
  misc_feature 1..21: note = Probe
  source 1..21: mol_type = other DNA
aggatggccgagcggtctaag

SEQ ID NO: 3417 - DNA, 48 bp, synthetic construct
  misc_feature 1..48: note = Probe
  source 1..48: mol_type = other DNA
aggattcctggttttcacccaggcggcccgggttcgactcccggtgtg

SEQ ID NO: 3418 - DNA, 50 bp, synthetic construct
  misc_feature 1..50: note = Probe
  source 1..50: mol_type = other DNA
aggattcctggttttcacccaggcggcccgggttcgactcccggtgtggg

SEQ ID NO: 3419 - DNA, 50 bp, synthetic construct
  misc_feature 1..50: note = Probe
  source 1..50: mol_type = other DNA
aggattcggcgctctcaccgccgcggcccgggttcgattcccggtcaggg

SEQ ID NO: 3420 - DNA, 27 bp, synthetic construct
  misc_feature 1..27: note = Probe
  source 1..27: mol_type = other DNA
aggcatcagcctccggagctggggatt

SEQ ID NO: 3421 - DNA, 29 bp, synthetic construct
  misc_feature 1..29: note = Probe
  source 1..29: mol_type = other DNA
aggcatcagcctccggagctggggattgt

SEQ ID NO: 3422 - DNA, 16 bp, synthetic construct
  misc_feature 1..16: note = Probe
  source 1..16: mol_type = other DNA
aggcattggcctccta

SEQ ID NO: 3423 - DNA, 25 bp, synthetic construct
  misc_feature 1..25: note = Probe
  source 1..25: mol_type = other DNA
aggcattggcctcctaagccaggga

SEQ ID NO: 3424 - DNA, 31 bp, synthetic construct
  misc_feature 1..31: note = Probe
  source 1..31: mol_type = other DNA
aggcattggcctcctaagccagggattgtgg

SEQ ID NO: 3425 - DNA, 23 bp, synthetic construct
  misc_feature 1..23: note = Probe
  source 1..23: mol_type = other DNA
aggccccgggttcaatccccggc

SEQ ID NO: 3426 - DNA, 30 bp, synthetic construct
  misc_feature 1..30: note = Probe
  source 1..30: mol_type = other DNA
aggcggcccgggttcgactcccggtgtggg

SEQ ID NO: 3427 - DNA, 35 bp, synthetic construct
  misc_feature 1..35: note = Probe
  source 1..35: mol_type = other DNA
aggcggcccgggttcgactcccggtgtgggaacgc

SEQ ID NO: 3428 - DNA, 25 bp, synthetic construct
  misc_feature 1..25: note = Probe
  source 1..25: mol_type = other DNA
aggctaaatcctatatatcttaatg

SEQ ID NO: 3429 - DNA, 17 bp, synthetic construct
  misc_feature 1..17: note = Probe
  source 1..17: mol_type = other DNA
aggcttacgacccctta

SEQ ID NO: 3430 - DNA, 24 bp, synthetic construct
  misc_feature 1..24: note = Probe
  source 1..24: mol_type = other DNA
aggcttacgaccccttatttaccg

SEQ ID NO: 3431 - DNA, 25 bp, synthetic construct
  misc_feature 1..25: note = Probe
  source 1..25: mol_type = other DNA
aggcttacgaccccttatttaccga

SEQ ID NO: 3432 - DNA, 31 bp, synthetic construct
  misc_feature 1..31: note = Probe
  source 1..31: mol_type = other DNA
agggatgggttcgattctcatagtcctagaa

SEQ ID NO: 3433 - DNA, 32 bp, synthetic construct
  misc_feature 1..32: note = Probe
  source 1..32: mol_type = other DNA
agggatgggttcgattctcatagtcctagaaa

SEQ ID NO: 3434 - DNA, 25 bp, synthetic construct
  misc_feature 1..25: note = Probe
  source 1..25: mol_type = other DNA
agggattgtgggttcgagtcccacc

SEQ ID NO: 3435 - DNA, 26 bp, synthetic construct
  misc_feature 1..26: note = Probe
  source 1..26: mol_type = other DNA
agggattgtgggttcgagtcccacct

SEQ ID NO: 3436 - DNA, 32 bp, synthetic construct
  misc_feature 1..32: note = Probe
  source 1..32: mol_type = other DNA
agggattgtgggttcgagtcccatctggggtg

SEQ ID NO: 3437 - DNA, 33 bp, synthetic construct
  misc_feature 1..33: note = Probe
  source 1..33: mol_type = other DNA
agggattgtgggttcgagtcccatctggggtgg

SEQ ID NO: 3438 - DNA, 17 bp, synthetic construct
  misc_feature 1..17: note = Probe
  source 1..17: mol_type = other DNA
aggggtatgattctcgc

SEQ ID NO: 3439 - DNA, 18 bp, synthetic construct
  misc_feature 1..18: note = Probe
  source 1..18: mol_type = other DNA
aggggtatgattctcgct

SEQ ID NO: 3440 - DNA, 33 bp, synthetic construct
  misc_feature 1..33: note = Probe
  source 1..33: mol_type = other DNA
aggggtcgcgagttcaaatctcgctggggcctc

SEQ ID NO: 3441 - DNA, 25 bp, synthetic construct
  misc_feature 1..25: note = Probe
  source 1..25: mol_type = other DNA
aggggtcgcgagttcaattctcgct

SEQ ID NO: 3442 - DNA, 35 bp, synthetic construct
  misc_feature 1..35: note = Probe
  source 1..35: mol_type = other DNA
aggggtcgcgagttcaattctcgctggggcctgtg

SEQ ID NO: 3443 - DNA, 25 bp, synthetic construct
  misc_feature 1..25: note = Probe
  source 1..25: mol_type = other DNA
agggtcgtgggttcgagccccacgt

SEQ ID NO: 3444 - DNA, 29 bp, synthetic construct
  misc_feature 1..29: note = Probe
  source 1..29: mol_type = other DNA
agggtcgtgggttcgagccccacgttggg

SEQ ID NO: 3445 - DNA, 34 bp, synthetic construct
  misc_feature 1..34: note = Probe
  source 1..34: mol_type = other DNA
agggtcgtgggttcgagccccacgttgggcgggt

SEQ ID NO: 3446 - DNA, 18 bp, synthetic construct
  misc_feature 1..18: note = Probe
  source 1..18: mol_type = other DNA
agggtgcgagaggtcccg

SEQ ID NO: 3447 - DNA, 19 bp, synthetic construct
  misc_feature 1..19: note = Probe
  source 1..19: mol_type = other DNA
agggtgcgagaggtcccgg

SEQ ID NO: 3448 - DNA, 23 bp, synthetic construct
  misc_feature 1..23: note = Probe
  source 1..23: mol_type = other DNA
aggtcagctaaataagctatcgg

SEQ ID NO: 3449 - DNA, 24 bp, synthetic construct
  misc_feature 1..24: note = Probe
  source 1..24: mol_type = other DNA
aggtcagctaaataagctatcggg

SEQ ID NO: 3450 - DNA, 26 bp, synthetic construct
  misc_feature 1..26: note = Probe
  source 1..26: mol_type = other DNA
aggtcagctaaataagctatcgggcc

SEQ ID NO: 3451 - DNA, 27 bp, synthetic construct
  misc_feature 1..27: note = Probe
  source 1..27: mol_type = other DNA
aggtcagctaaataagctatcgggccc

SEQ ID NO: 3452 - DNA, 28 bp, synthetic construct
  misc_feature 1..28: note = Probe
  source 1..28: mol_type = other DNA
aggtcagctaaataagctatcgggccca

SEQ ID NO: 3453 - DNA, 29 bp, synthetic construct
  misc_feature 1..29: note = Probe
  source 1..29: mol_type = other DNA
aggtcagctaaataagctatcgggcccat

SEQ ID NO: 3454 - DNA, 30 bp, synthetic construct
  misc_feature 1..30: note = Probe
  source 1..30: mol_type = other DNA
aggtcagctaaataagctatcgggcccata

SEQ ID NO: 3455 - DNA, 31 bp, synthetic construct
  misc_feature 1..31: note = Probe
  source 1..31: mol_type = other DNA
aggtcagctaaataagctatcgggcccatac

SEQ ID NO: 3456 - DNA, 32 bp, synthetic construct
  misc_feature 1..32: note = Probe
  source 1..32: mol_type = other DNA
aggtcagctaaataagctatcgggcccatacc

SEQ ID NO: 3457 - DNA, 33 bp, synthetic construct
  misc_feature 1..33: note = Probe
  source 1..33: mol_type = other DNA
aggtcagctaaataagctatcgggcccataccc

SEQ ID NO: 3458 - DNA, 34 bp, synthetic construct
  misc_feature 1..34: note = Probe
  source 1..34: mol_type = other DNA
aggtcagctaaataagctatcgggcccatacccc

SEQ ID NO: 3459 - DNA, 35 bp, synthetic construct
  misc_feature 1..35: note = Probe
  source 1..35: mol_type = other DNA
aggtcagctaaataagctatcgggcccataccccg

SEQ ID NO: 3460 - DNA, 36 bp, synthetic construct
  misc_feature 1..36: note = Probe
  source 1..36: mol_type = other DNA
aggtcagctaaataagctatcgggcccataccccga

SEQ ID NO: 3461 - DNA, 37 bp, synthetic construct
  misc_feature 1..37: note = Probe
  source 1..37: mol_type = other DNA
aggtcagctaaataagctatcgggcccataccccgaa

SEQ ID NO: 3462 - DNA, 38 bp, synthetic construct
  misc_feature 1..38: note = Probe
  source 1..38: mol_type = other DNA
aggtcagctaaataagctatcgggcccataccccgaaa

SEQ ID NO: 3463 - DNA, 39 bp, synthetic construct
  misc_feature 1..39: note = Probe
  source 1..39: mol_type = other DNA
aggtcagctaaataagctatcgggcccataccccgaaaa

SEQ ID NO: 3464 - DNA, 40 bp, synthetic construct
  misc_feature 1..40: note = Probe
  source 1..40: mol_type = other DNA
aggtcagctaaataagctatcgggcccataccccgaaaat

SEQ ID NO: 3465 - DNA, 41 bp, synthetic construct
  misc_feature 1..41: note = Probe
  source 1..41: mol_type = other DNA
aggtcagctaaataagctatcgggcccataccccgaaaatg

SEQ ID NO: 3466 - DNA, 42 bp, synthetic construct
  misc_feature 1..42: note = Probe
  source 1..42: mol_type = other DNA
aggtcagctaaataagctatcgggcccataccccgaaaatgt

SEQ ID NO: 3467 - DNA, 43 bp, synthetic construct
  misc_feature 1..43: note = Probe
  source 1..43: mol_type = other DNA
aggtcagctaaataagctatcgggcccataccccgaaaatgtt

SEQ ID NO: 3468 - DNA, 44 bp, synthetic construct
  misc_feature 1..44: note = Probe
  source 1..44: mol_type = other DNA
aggtcagctaaataagctatcgggcccataccccgaaaatgttg

SEQ ID NO: 3469 - DNA, 45 bp, synthetic construct
  misc_feature 1..45: note = Probe
  source 1..45: mol_type = other DNA
aggtcagctaaataagctatcgggcccataccccgaaaatgttgg

SEQ ID NO: 3470 - DNA, 46 bp, synthetic construct
  misc_feature 1..46: note = Probe
  source 1..46: mol_type = other DNA
aggtcagctaaataagctatcgggcccataccccgaaaatgttggt

SEQ ID NO: 3471 - DNA, 47 bp, synthetic construct
  misc_feature 1..47: note = Probe
  source 1..47: mol_type = other DNA
aggtcagctaaataagctatcgggcccataccccgaaaatgttggtt

SEQ ID NO: 3472 - DNA, 48 bp, synthetic construct
  misc_feature 1..48: note = Probe
  source 1..48: mol_type = other DNA
aggtcagctaaataagctatcgggcccataccccgaaaatgttggtta

SEQ ID NO: 3473 - DNA, 49 bp, synthetic construct
  misc_feature 1..49: note = Probe
  source 1..49: mol_type = other DNA
aggtcagctaaataagctatcgggcccataccccgaaaatgttggttat

SEQ ID NO: 3474 - DNA, 50 bp, synthetic construct
  misc_feature 1..50: note = Probe
  source 1..50: mol_type = other DNA
aggtcagctaaataagctatcgggcccataccccgaaaatgttggttata

SEQ ID NO: 3475 - DNA, 27 bp, synthetic construct
  misc_feature 1..27: note = Probe
  source 1..27: mol_type = other DNA
aggtcccgggttcgatccccagcatct

SEQ ID NO: 3476 - DNA, 33 bp, synthetic construct
  misc_feature 1..33: note = Probe
  source 1..33: mol_type = other DNA
aggtcccgggttcgatccccagcatctccagtg

SEQ ID NO: 3477 - DNA, 32 bp, synthetic construct
  misc_feature 1..32: note = Probe
  source 1..32: mol_type = other DNA
aggtcctgggttcgagccccagtggaaccacg

SEQ ID NO: 3478 - DNA, 33 bp, synthetic construct
  misc_feature 1..33: note = Probe
  source 1..33: mol_type = other DNA
aggtcctgggttcgagccccagtggaaccacgg

SEQ ID NO: 3479 - DNA, 33 bp, synthetic construct
  misc_feature 1..33: note = Probe
  source 1..33: mol_type = other DNA
aggtcgatggatcgaaaccatcctctgctaggt

SEQ ID NO: 3480 - DNA, 23 bp, synthetic construct
  misc_feature 1..23: note = Probe
  source 1..23: mol_type = other DNA
aggtcgcgggttcgatccccgta

SEQ ID NO: 3481 - DNA, 32 bp, synthetic construct
  misc_feature 1..32: note = Probe
  source 1..32: mol_type = other DNA
aggtcgcgggttcgatccccgtacgggccaca

SEQ ID NO: 3482 - DNA, 32 bp, synthetic construct
  misc_feature 1..32: note = Probe
  source 1..32: mol_type = other DNA
aggtcgcgggttcgatccccgtacgggccacg

SEQ ID NO: 3483 - DNA, 33 bp, synthetic construct
  misc_feature 1..33: note = Probe
  source 1..33: mol_type = other DNA
aggtcgcgggttcgatccccgtacgggccacga

SEQ ID NO: 3484 - DNA, 32 bp, synthetic construct
  misc_feature 1..32: note = Probe
  source 1..32: mol_type = other DNA
aggtcgcgggttcgatccccgtacgggccact

SEQ ID NO: 3485 - DNA, 33 bp, synthetic construct
  misc_feature 1..33: note = Probe
  source 1..33: mol_type = other DNA
aggtcgcgggttcgatccccgtacgggccactg

SEQ ID NO: 3486 - DNA, 33 bp, synthetic construct
  misc_feature 1..33: note = Probe
  source 1..33: mol_type = other DNA
aggtcgtgagttcgatcctcacacggggcacaa

SEQ ID NO: 3487 - DNA, 29 bp, synthetic construct
  misc_feature 1..29: note = Probe
  source 1..29: mol_type = other DNA
aggtgcctcgttagcgcagtaggtagcgc

SEQ ID NO: 3488 - DNA, 32 bp, synthetic construct
  misc_feature 1..32: note = Probe
  source 1..32: mol_type = other DNA
aggtggcccgggttcgactcccggtatgggaa

SEQ ID NO: 3489 - DNA, 33 bp, synthetic construct
  misc_feature 1..33: note = Probe
  source 1..33: mol_type = other DNA
aggtggcccgggttcgactcccggtatgggaac

SEQ ID NO: 3490 - DNA, 35 bp, synthetic construct
  misc_feature 1..35: note = Probe
  source 1..35: mol_type = other DNA
aggtggcccgggttcgactcccggtatgggaacaa

SEQ ID NO: 3491 - DNA, 24 bp, synthetic construct
  misc_feature 1..24: note = Probe
  source 1..24: mol_type = other DNA
aggttccgggttcgagtcccggca

SEQ ID NO: 3492 - DNA, 27 bp, synthetic construct
  misc_feature 1..27: note = Probe
  source 1..27: mol_type = other DNA
aggttccgggttcgagtcccggcggag

SEQ ID NO: 3493 - DNA, 23 bp, synthetic construct
  misc_feature 1..23: note = Probe
  source 1..23: mol_type = other DNA
aggttcgactcctggctggctcg

SEQ ID NO: 3494 - DNA, 26 bp, synthetic construct
  misc_feature 1..26: note = Probe
  source 1..26: mol_type = other DNA
aggttcgactcctggctggctcgcga

SEQ ID NO: 3495 - DNA, 33 bp, synthetic construct
  misc_feature 1..33: note = Probe
  source 1..33: mol_type = other DNA
aggttgcgtgttcaaatcacgtcggggtcaaca

SEQ ID NO: 3496 - DNA, 33 bp, synthetic construct
  misc_feature 1..33: note = Probe
  source 1..33: mol_type = other DNA
aggttggtggttcgagcccacccagggacgcct

SEQ ID NO: 3497 - DNA, 23 bp, synthetic construct
  misc_feature 1..23: note = Probe
  source 1..23: mol_type = other DNA
aggttgtgggttcgagtcccacc

SEQ ID NO: 3498 - DNA, 27 bp, synthetic construct
  misc_feature 1..27: note = Probe
  source 1..27: mol_type = other DNA
aggtttggtcctagcctttctattagc

SEQ ID NO: 3499 - DNA, 37 bp, synthetic construct
  misc_feature 1..37: note = Probe
  source 1..37: mol_type = other DNA
agtaaataataggagcttaaacccccttatttctagg

SEQ ID NO: 3500 - DNA, 38 bp, synthetic construct
  misc_feature 1..38: note = Probe
  source 1..38: mol_type = other DNA
agtaaataataggagcttaaacccccttatttctagga

SEQ ID NO: 3501 - DNA, 16 bp, synthetic construct
  misc_feature 1..16: note = Probe
  source 1..16: mol_type = other DNA
agtaaggtcagctaaa

SEQ ID NO: 3502 - DNA, 17 bp, synthetic construct
  misc_feature 1..17: note = Probe
  source 1..17: mol_type = other DNA
agtaaggtcagctaaat

SEQ ID NO: 3503 - DNA, 18 bp, synthetic construct
  misc_feature 1..18: note = Probe
  source 1..18: mol_type = other DNA
agtaaggtcagctaaata

SEQ ID NO: 3504 - DNA, 20 bp, synthetic construct
  misc_feature 1..20: note = Probe
  source 1..20: mol_type = other DNA
agtaaggtcagctaaataag

SEQ ID NO: 3505 - DNA, 21 bp, synthetic construct
  misc_feature 1..21: note = Probe
  source 1..21: mol_type = other DNA
agtaaggtcagctaaataagc

SEQ ID NO: 3506 - DNA, 22 bp, synthetic construct
  misc_feature 1..22: note = Probe
  source 1..22: mol_type = other DNA
agtaaggtcagctaaataagct

SEQ ID NO: 3507 - DNA, 23 bp, synthetic construct
  misc_feature 1..23: note = Probe
  source 1..23: mol_type = other DNA
agtaaggtcagctaaataagcta

SEQ ID NO: 3508 - DNA, 24 bp, synthetic construct
  misc_feature 1..24: note = Probe
  source 1..24: mol_type = other DNA
agtaaggtcagctaaataagctat

SEQ ID NO: 3509 - DNA, 25 bp, synthetic construct
  misc_feature 1..25: note = Probe
  source 1..25: mol_type = other DNA
agtaaggtcagctaaataagctatc

SEQ ID NO: 3510 - DNA, 26 bp, synthetic construct
  misc_feature 1..26: note = Probe
  source 1..26: mol_type = other DNA
agtaaggtcagctaaataagctatcg

SEQ ID NO: 3511 - DNA, 27 bp, synthetic construct
  misc_feature 1..27: note = Probe
  source 1..27: mol_type = other DNA
agtaaggtcagctaaataagctatcgg

SEQ ID NO: 3512 - DNA, 28 bp, synthetic construct
  misc_feature 1..28: note = Probe
  source 1..28: mol_type = other DNA
agtaaggtcagctaaataagctatcggg

SEQ ID NO: 3513 - DNA, 29 bp, synthetic construct
  misc_feature 1..29: note = Probe
  source 1..29: mol_type = other DNA
agtaaggtcagctaaataagctatcgggc

SEQ ID NO: 3514 - DNA, 30 bp, synthetic construct
  misc_feature 1..30: note = Probe
  source 1..30: mol_type = other DNA
agtaaggtcagctaaataagctatcgggcc

SEQ ID NO: 3515 - DNA, 31 bp, synthetic construct
  misc_feature 1..31: note = Probe
  source 1..31: mol_type = other DNA
agtaaggtcagctaaataagctatcgggccc

SEQ ID NO: 3516 - DNA, 32 bp, synthetic construct
  misc_feature 1..32: note = Probe
  source 1..32: mol_type = other DNA
agtaaggtcagctaaataagctatcgggccca

SEQ ID NO: 3517 - DNA, 33 bp, synthetic construct
  misc_feature 1..33: note = Probe
  source 1..33: mol_type = other DNA
agtaaggtcagctaaataagctatcgggcccat

SEQ ID NO: 3518 - DNA, 34 bp, synthetic construct
  misc_feature 1..34: note = Probe
  source 1..34: mol_type = other DNA
agtaaggtcagctaaataagctatcgggcccata

SEQ ID NO: 3519 - DNA, 35 bp, synthetic construct
  misc_feature 1..35: note = Probe
  source 1..35: mol_type = other DNA
agtaaggtcagctaaataagctatcgggcccatac

SEQ ID NO: 3520 - DNA, 36 bp, synthetic construct
  misc_feature 1..36: note = Probe
  source 1..36: mol_type = other DNA
agtaaggtcagctaaataagctatcgggcccatacc

SEQ ID NO: 3521 - DNA, 37 bp, synthetic construct
  misc_feature 1..37: note = Probe
  source 1..37: mol_type = other DNA
agtaaggtcagctaaataagctatcgggcccataccc

SEQ ID NO: 3522 - DNA, 38 bp, synthetic construct
  misc_feature 1..38: note = Probe
  source 1..38: mol_type = other DNA
agtaaggtcagctaaataagctatcgggcccatacccc

SEQ ID NO: 3523 - DNA, 39 bp, synthetic construct
  misc_feature 1..39: note = Probe
  source 1..39: mol_type = other DNA
agtaaggtcagctaaataagctatcgggcccataccccg

SEQ ID NO: 3524 - DNA, 40 bp, synthetic construct
  misc_feature 1..40: note = Probe
  source 1..40: mol_type = other DNA
agtaaggtcagctaaataagctatcgggcccataccccga

SEQ ID NO: 3525 - DNA, 41 bp, synthetic construct
  misc_feature 1..41: note = Probe
  source 1..41: mol_type = other DNA
agtaaggtcagctaaataagctatcgggcccataccccgaa

SEQ ID NO: 3526 - DNA, 42 bp, synthetic construct
  misc_feature 1..42: note = Probe
  source 1..42: mol_type = other DNA
agtaaggtcagctaaataagctatcgggcccataccccgaaa

SEQ ID NO: 3527 - DNA, 43 bp, synthetic construct
  misc_feature 1..43: note = Probe
  source 1..43: mol_type = other DNA
agtaaggtcagctaaataagctatcgggcccataccccgaaaa

SEQ ID NO: 3528 - DNA, 44 bp, synthetic construct
  misc_feature 1..44: note = Probe
  source 1..44: mol_type = other DNA
agtaaggtcagctaaataagctatcgggcccataccccgaaaat

SEQ ID NO: 3529 - DNA, 45 bp, synthetic construct
  misc_feature 1..45: note = Probe
  source 1..45: mol_type = other DNA
agtaaggtcagctaaataagctatcgggcccataccccgaaaatg

SEQ ID NO: 3530 - DNA, 46 bp, synthetic construct
  misc_feature 1..46: note = Probe
  source 1..46: mol_type = other DNA
agtaaggtcagctaaataagctatcgggcccataccccgaaaatgt

SEQ ID NO: 3531 - DNA, 47 bp, synthetic construct
  misc_feature 1..47: note = Probe
  source 1..47: mol_type = other DNA
agtaaggtcagctaaataagctatcgggcccataccccgaaaatgtt

SEQ ID NO: 3532 - DNA, 48 bp, synthetic construct
  misc_feature 1..48: note = Probe
  source 1..48: mol_type = other DNA
agtaaggtcagctaaataagctatcgggcccataccccgaaaatgttg

SEQ ID NO: 3533 - DNA, 49 bp, synthetic construct
  misc_feature 1..49: note = Probe
  source 1..49: mol_type = other DNA
agtaaggtcagctaaataagctatcgggcccataccccgaaaatgttgg

SEQ ID NO: 3534 - DNA, 50 bp, synthetic construct
  misc_feature 1..50: note = Probe
  source 1..50: mol_type = other DNA
agtaaggtcagctaaataagctatcgggcccataccccgaaaatgttggt

SEQ ID NO: 3535 - DNA, 27 bp, synthetic construct
  misc_feature 1..27: note = Probe
  source 1..27: mol_type = other DNA
agtaccgttaacttccaattaactagt

SEQ ID NO: 3536 - DNA, 32 bp, synthetic construct
  misc_feature 1..32: note = Probe
  source 1..32: mol_type = other DNA
agtaccgttaacttccaattaactagttttga

SEQ ID NO: 3537 - DNA, 34 bp, synthetic construct
  misc_feature 1..34: note = Probe
  source 1..34: mol_type = other DNA
agtaccgttaacttccaattaactagttttgaca

SEQ ID NO: 3538 - DNA, 37 bp, synthetic construct
  misc_feature 1..37: note = Probe
  source 1..37: mol_type = other DNA
agtaccgttaacttccaattaactagttttgacaaca

SEQ ID NO: 3539 - DNA, 23 bp, synthetic construct
  misc_feature 1..23: note = Probe
  source 1..23: mol_type = other DNA
agtactagcagttttgaaacttc

SEQ ID NO: 3540 - DNA, 50 bp, synthetic construct
  misc_feature 1..50: note = Probe
  source 1..50: mol_type = other DNA
agtatccccgcctgtcacgcgggagaccggggttcaattccccgacgggg

SEQ ID NO: 3541 - DNA, 50 bp, synthetic construct
  misc_feature 1..50: note = Probe
  source 1..50: mol_type = other DNA
agtatccccgcctgtcacgcgggagaccggggttcgattccccgacgggg

SEQ ID NO: 3542 - DNA, 22 bp, synthetic construct
  misc_feature 1..22: note = Probe
  source 1..22: mol_type = other DNA
agtcagaggttcaattcctctt

SEQ ID NO: 3543 - DNA, 24 bp, synthetic construct
  misc_feature 1..24: note = Probe
  source 1..24: mol_type = other DNA
agtcagaggttcaattcctcttct

SEQ ID NO: 3544 - DNA, 25 bp, synthetic construct
  misc_feature 1..25: note = Probe
  source 1..25: mol_type = other DNA
agtcagaggttcaattcctcttctt

SEQ ID NO: 3545 - DNA, 29 bp, synthetic construct
  misc_feature 1..29: note = Probe
  source 1..29: mol_type = other DNA
agtcagaggttcaattcctcttcttaaca

SEQ ID NO: 3546 - DNA, 32 bp, synthetic construct
  misc_feature 1..32: note = Probe
  source 1..32: mol_type = other DNA
agtcagaggttcaattcctcttcttaacaaca

SEQ ID NO: 3547 - DNA, 19 bp, synthetic construct
  misc_feature 1..19: note = Probe
  source 1..19: mol_type = other DNA
agtccgtgcgagaataatg

SEQ ID NO: 3548 - DNA, 37 bp, synthetic construct
  misc_feature 1..37: note = Probe
  source 1..37: mol_type = other DNA
agtcgatagagcatgagactcttaatctcagggtcgt

SEQ ID NO: 3549 - DNA, 23 bp, synthetic construct
  misc_feature 1..23: note = Probe
  source 1..23: mol_type = other DNA
agtcggtagagcatcagactttt

SEQ ID NO: 3550 - DNA, 16 bp, synthetic construct
  misc_feature 1..16: note = Probe
  source 1..16: mol_type = other DNA
agtcggtagagcatga

SEQ ID NO: 3551 - DNA, 17 bp, synthetic construct
  misc_feature 1..17: note = Probe
  source 1..17: mol_type = other DNA
agtcggtagagcatgag

SEQ ID NO: 3552 - DNA, 18 bp, synthetic construct
  misc_feature 1..18: note = Probe
  source 1..18: mol_type = other DNA
agtcggtagagcatgaga

SEQ ID NO: 3553 - DNA, 19 bp, synthetic construct
  misc_feature 1..19: note = Probe
  source 1..19: mol_type = other DNA
agtcggtagagcatgagac

SEQ ID NO: 3554 - DNA, 21 bp, synthetic construct
  misc_feature 1..21: note = Probe
  source 1..21: mol_type = other DNA
agtcggtagagcatgagactc

SEQ ID NO: 3555 - DNA, 23 bp, synthetic construct
  misc_feature 1..23: note = Probe
  source 1..23: mol_type = other DNA
agtcggtagagcatgagactctt

SEQ ID NO: 3556 - DNA, 37 bp, synthetic construct
  misc_feature 1..37: note = Probe
  source 1..37: mol_type = other DNA
agtcggtagagcatgagactcttaatctcagggtcgt

SEQ ID NO: 3557 - DNA, 41 bp, synthetic construct
  misc_feature 1..41: note = Probe
  source 1..41: mol_type = other DNA
agtcggtagagcatgagactcttaatctcagggtcgtgggt

SEQ ID NO: 3558 - DNA, 37 bp, synthetic construct
  misc_feature 1..37: note = Probe
  source 1..37: mol_type = other DNA
agtcggtagagcatgggactcttaatcccagggtcgt

SEQ ID NO: 3559 - DNA, 39 bp, synthetic construct
  misc_feature 1..39: note = Probe
  source 1..39: mol_type = other DNA
agtcggtagagcatgggactcttaatcccagggtcgtgg

SEQ ID NO: 3560 - DNA, 22 bp, synthetic construct
  misc_feature 1..22: note = Probe
  source 1..22: mol_type = other DNA
agtctcataatctgaaggtcct

SEQ ID NO: 3561 - DNA, 23 bp, synthetic construct
  misc_feature 1..23: note = Probe
  source 1..23: mol_type = other DNA
agtctcataatctgaaggtcctg

SEQ ID NO: 3562 - DNA, 24 bp, synthetic construct
  misc_feature 1..24: note = Probe
  source 1..24: mol_type = other DNA
agtctcataatctgaaggtcctga

SEQ ID NO: 3563 - DNA, 25 bp, synthetic construct
  misc_feature 1..25: note = Probe
  source 1..25: mol_type = other DNA
agtctcataatctgaaggtcctgag

SEQ ID NO: 3564 - DNA, 21 bp, synthetic construct
  misc_feature 1..21: note = Probe
  source 1..21: mol_type = other DNA
agtctcataatctgaaggtcg

SEQ ID NO: 3565 - DNA, 22 bp, synthetic construct
  misc_feature 1..22: note = Probe
  source 1..22: mol_type = other DNA
agtctcttcgggggcgtgggtt

SEQ ID NO: 3566 - DNA, 24 bp, synthetic construct
  misc_feature 1..24: note = Probe
  source 1..24: mol_type = other DNA
agtctcttcgggggcgtgggttcg

SEQ ID NO: 3567 - DNA, 23 bp, synthetic construct
  misc_feature 1..23: note = Probe
  source 1..23: mol_type = other DNA
agtctcttcgggggcgtgggttt

SEQ ID NO: 3568 - DNA, 40 bp, synthetic construct
  misc_feature 1..40: note = Probe
  source 1..40: mol_type = other DNA
agtcttgtaaaccggagatgaaaacctttttccaaggaca

SEQ ID NO: 3569 - DNA, 43 bp, synthetic construct
  misc_feature 1..43: note = Probe
  source 1..43: mol_type = other DNA
agtcttgtaaaccggagatgaaaacctttttccaaggacaaat

SEQ ID NO: 3570 - DNA, 23 bp, synthetic construct
  misc_feature 1..23: note = Probe
  source 1..23: mol_type = other DNA
agtggggttttgcagtccttagc

SEQ ID NO: 3571 - DNA, 24 bp, synthetic construct
  misc_feature 1..24: note = Probe
  source 1..24: mol_type = other DNA
agtggggttttgcagtccttagct

SEQ ID NO: 3572 - DNA, 17 bp, synthetic construct
  misc_feature 1..17: note = Probe
  source 1..17: mol_type = other DNA
agtggtagaattctcgc

SEQ ID NO: 3573 - DNA, 18 bp, synthetic construct
  misc_feature 1..18: note = Probe
  source 1..18: mol_type = other DNA
agtggtagaattctcgcc

SEQ ID NO: 3574 - DNA, 19 bp, synthetic construct
  misc_feature 1..19: note = Probe
  source 1..19: mol_type = other DNA
agtggtagaattctcgcct

SEQ ID NO: 3575 - DNA, 20 bp, synthetic construct
  misc_feature 1..20: note = Probe
  source 1..20: mol_type = other DNA
agtggtagaattctcgcctg

SEQ ID NO: 3576 - DNA, 21 bp, synthetic construct
  misc_feature 1..21: note = Probe
  source 1..21: mol_type = other DNA
agtggtagaattctcgcctgc

SEQ ID NO: 3577 - DNA, 22 bp, synthetic construct
  misc_feature 1..22: note = Probe
  source 1..22: mol_type = other DNA
agtggtagaattctcgcctgcc

SEQ ID NO: 3578 - DNA, 17 bp, synthetic construct
  misc_feature 1..17: note = Probe
  source 1..17: mol_type = other DNA
agtggtagagcatttga

SEQ ID NO: 3579 - DNA, 20 bp, synthetic construct
  misc_feature 1..20: note = Probe
  source 1..20: mol_type = other DNA
agtggtagagcatttgactg

SEQ ID NO: 3580 - DNA, 21 bp, synthetic construct
  misc_feature 1..21: note = Probe
  source 1..21: mol_type = other DNA
agtggtagagcatttgactgc

SEQ ID NO: 3581 - DNA, 17 bp, synthetic construct
  misc_feature 1..17: note = Probe
  source 1..17: mol_type = other DNA
agtggtagagcgcatgc

SEQ ID NO: 3582 - DNA, 18 bp, synthetic construct
  misc_feature 1..18: note = Probe
  source 1..18: mol_type = other DNA
agtggtgagtatccccgc

SEQ ID NO: 3583 - DNA, 23 bp, synthetic construct
  misc_feature 1..23: note = Probe
  source 1..23: mol_type = other DNA
agtggtgagtatccccgcctgtc

SEQ ID NO: 3584 - DNA, 50 bp, synthetic construct
  misc_feature 1..50: note = Probe
  source 1..50: mol_type = other DNA
agtggtgagtatccccgcctgtcacgcgggagaccggggttcgattcccc

SEQ ID NO: 3585 - DNA, 22 bp, synthetic construct
  misc_feature 1..22: note = Probe
  source 1..22: mol_type = other DNA
agtggttaggattcggcgctct

SEQ ID NO: 3586 - DNA, 23 bp, synthetic construct
  misc_feature 1..23: note = Probe
  source 1..23: mol_type = other DNA
agtggttaggattcggcgctctc

SEQ ID NO: 3587 - DNA, 24 bp, synthetic construct
  misc_feature 1..24: note = Probe
  source 1..24: mol_type = other DNA
agtggttaggattcggcgctctca

SEQ ID NO: 3588 - DNA, 17 bp, synthetic construct
  misc_feature 1..17: note = Probe
  source 1..17: mol_type = other DNA
agtggttagtactctgc

SEQ ID NO: 3589 - DNA, 18 bp, synthetic construct
  misc_feature 1..18: note = Probe
  source 1..18: mol_type = other DNA
agtggttagtactctgcg

SEQ ID NO: 3590 - DNA, 22 bp, synthetic construct
  misc_feature 1..22: note = Probe
  source 1..22: mol_type = other DNA
agtggttagtactctgcgttgt

SEQ ID NO: 3591 - DNA, 17 bp, synthetic construct
  misc_feature 1..17: note = Probe
  source 1..17: mol_type = other DNA
agtggttatcacgttcg

SEQ ID NO: 3592 - DNA, 18 bp, synthetic construct
  misc_feature 1..18: note = Probe
  source 1..18: mol_type = other DNA
agtggttatcacgttcgc

SEQ ID NO: 3593 - DNA, 27 bp, synthetic construct
  misc_feature 1..27: note = Probe
  source 1..27: mol_type = other DNA
agtggttatcacgttcgcctcacacgc

SEQ ID NO: 3594 - DNA, 40 bp, synthetic construct
  misc_feature 1..40: note = Probe
  source 1..40: mol_type = other DNA
agtggttatcacgttcgcctcacacgcgaaaggtccccgg

SEQ ID NO: 3595 - DNA, 23 bp, synthetic construct
  misc_feature 1..23: note = Probe
  source 1..23: mol_type = other DNA
agtgtagtggttatcacgttcgc

SEQ ID NO: 3596 - DNA, 25 bp, synthetic construct
  misc_feature 1..25: note = Probe
  source 1..25: mol_type = other DNA
agtgtagtggttatcacgttcgcct

SEQ ID NO: 3597 - DNA, 27 bp, synthetic construct
  misc_feature 1..27: note = Probe
  source 1..27: mol_type = other DNA
agtgtttgtgggtttaagtcccattgg

SEQ ID NO: 3598 - DNA, 29 bp, synthetic construct
  misc_feature 1..29: note = Probe
  source 1..29: mol_type = other DNA
agtgtttgtgggtttaagtcccattggtc

SEQ ID NO: 3599 - DNA, 30 bp, synthetic construct
  misc_feature 1..30: note = Probe
  source 1..30: mol_type = other DNA
agtgtttgtgggtttaagtcccattggtct

SEQ ID NO: 3600 - DNA, 31 bp, synthetic construct
  misc_feature 1..31: note = Probe
  source 1..31: mol_type = other DNA
agtgtttgtgggtttaagtcccattggtcta

SEQ ID NO: 3601 - DNA, 34 bp, synthetic construct
  misc_feature 1..34: note = Probe
  source 1..34: mol_type = other DNA
agtgtttgtgggtttaagtcccattggtctagta

SEQ ID NO: 3602 - DNA, 23 bp, synthetic construct
  misc_feature 1..23: note = Probe
  source 1..23: mol_type = other DNA
agttaaagactttttctctgatt

SEQ ID NO: 3603 - DNA, 24 bp, synthetic construct
  misc_feature 1..24: note = Probe
  source 1..24: mol_type = other DNA
agttaaagactttttctctgattt

SEQ ID NO: 3604 - DNA, 37 bp, synthetic construct
  misc_feature 1..37: note = Probe
  source 1..37: mol_type = other DNA
agttaaagattaagagaaccaacacctctttacagtg

SEQ ID NO: 3605 - DNA, 38 bp, synthetic construct
  misc_feature 1..38: note = Probe
  source 1..38: mol_type = other DNA
agttaaagattaagagaaccaacacctctttacagtga

SEQ ID NO: 3606 - DNA, 39 bp, synthetic construct
  misc_feature 1..39: note = Probe
  source 1..39: mol_type = other DNA
agttaaagattaagagaaccaacacctctttacagtgaa

SEQ ID NO: 3607 - DNA, 40 bp, synthetic construct
  misc_feature 1..40: note = Probe
  source 1..40: mol_type = other DNA
agttaaagattaagagaaccaacacctctttacagtgaaa

SEQ ID NO: 3608 - DNA, 41 bp, synthetic construct
  misc_feature 1..41: note = Probe
  source 1..41: mol_type = other DNA
agttaaagattaagagaaccaacacctctttacagtgaaat

SEQ ID NO: 3609 - DNA, 43 bp, synthetic construct
  misc_feature 1..43: note = Probe
  source 1..43: mol_type = other DNA
agttaaagattaagagaaccaacacctctttacagtgaaatgc

SEQ ID NO: 3610 - DNA, 50 bp, synthetic construct
  misc_feature 1..50: note = Probe
  source 1..50: mol_type = other DNA
agttaaagattaagagaaccaacacctctttacagtgaaatgccccaact

SEQ ID NO: 3611 - DNA, 24 bp, synthetic construct
  misc_feature 1..24: note = Probe
  source 1..24: mol_type = other DNA
agttcaaatctcggtggaacctgc

SEQ ID NO: 3612 - DNA, 25 bp, synthetic construct
  misc_feature 1..25: note = Probe
  source 1..25: mol_type = other DNA
agttcaattctcgctggggcctgtg

SEQ ID NO: 3613 - DNA, 25 bp, synthetic construct
  misc_feature 1..25: note = Probe
  source 1..25: mol_type = other DNA
agttcgatcctcacacggggcacaa

SEQ ID NO: 3614 - DNA, 32 bp, synthetic construct
  misc_feature 1..32: note = Probe
  source 1..32: mol_type = other DNA
agttgatgcagagtggggttttgcagtcctta

SEQ ID NO: 3615 - DNA, 33 bp, synthetic construct
  misc_feature 1..33: note = Probe
  source 1..33: mol_type = other DNA
agttgatgcagagtggggttttgcagtccttag

SEQ ID NO: 3616 - DNA, 35 bp, synthetic construct
  misc_feature 1..35: note = Probe
  source 1..35: mol_type = other DNA
agttgatgcagagtggggttttgcagtccttagct

SEQ ID NO: 3617 - DNA, 44 bp, synthetic construct
  misc_feature 1..44: note = Probe
  source 1..44: mol_type = other DNA
agttgattagggtgcttagctgttaactaagtgtttgtgggttt

SEQ ID NO: 3618 - DNA, 50 bp, synthetic construct
  misc_feature 1..50: note = Probe
  source 1..50: mol_type = other DNA
agtttaaattagaatcttagctttgggtgctaatggtggagttaaagact

SEQ ID NO: 3619 - DNA, 34 bp, synthetic construct
  misc_feature 1..34: note = Probe
  source 1..34: mol_type = other DNA
agtttaaccaaaacatcagattgtgaatctgaca

SEQ ID NO: 3620 - DNA, 35 bp, synthetic construct
  misc_feature 1..35: note = Probe
  source 1..35: mol_type = other DNA
agtttaaccaaaacatcagattgtgaatctgacaa

SEQ ID NO: 3621 - DNA, 37 bp, synthetic construct
  misc_feature 1..37: note = Probe
  source 1..37: mol_type = other DNA
agtttaaccaaaacatcagattgtgaatctgacaaca

SEQ ID NO: 3622 - DNA, 42 bp, synthetic construct
  misc_feature 1..42: note = Probe
  source 1..42: mol_type = other DNA
ataaaacttaaaactttacagtcagaggttcaattcctcttc

SEQ ID NO: 3623 - DNA, 44 bp, synthetic construct
  misc_feature 1..44: note = Probe
  source 1..44: mol_type = other DNA
ataaaacttaaaactttacagtcagaggttcaattcctcttctt

SEQ ID NO: 3624 - DNA, 50 bp, synthetic construct
  misc_feature 1..50: note = Probe
  source 1..50: mol_type = other DNA
ataaaacttaaaactttacagtcagaggttcaattcctcttcttaacaac

SEQ ID NO: 3625 - DNA, 30 bp, synthetic construct
  misc_feature 1..30: note = Probe
  source 1..30: mol_type = other DNA
ataaacttcgccttaattttaataatcaac

SEQ ID NO: 3626 - DNA, 25 bp, synthetic construct
  misc_feature 1..25: note = Probe
  source 1..25: mol_type = other DNA
ataaccatgcacactactataacca

SEQ ID NO: 3627 - DNA, 26 bp, synthetic construct
  misc_feature 1..26: note = Probe
  source 1..26: mol_type = other DNA
ataaccatgcacactactataaccac

SEQ ID NO: 3628 - DNA, 27 bp, synthetic construct
  misc_feature 1..27: note = Probe
  source 1..27: mol_type = other DNA
ataaccatgcacactactataaccacc

SEQ ID NO: 3629 - DNA, 28 bp, synthetic construct
  misc_feature 1..28: note = Probe
  source 1..28: mol_type = other DNA
ataaccatgcacactactataaccaccc

SEQ ID NO: 3630 - DNA, 29 bp, synthetic construct
  misc_feature 1..29: note = Probe
  source 1..29: mol_type = other DNA
ataaccatgcacactactataaccaccct

SEQ ID NO: 3631 - DNA, 30 bp, synthetic construct
  misc_feature 1..30: note = Probe
  source 1..30: mol_type = other DNA
ataaccatgcacactactataaccacccta

SEQ ID NO: 3632 - DNA, 23 bp, synthetic construct
  misc_feature 1..23: note = Probe
  source 1..23: mol_type = other DNA
ataacccagaggtcgatggatcg

SEQ ID NO: 3633 - DNA, 24 bp, synthetic construct
  misc_feature 1..24: note = Probe
  source 1..24: mol_type = other DNA
ataacccagaggtcgatggatcga

SEQ ID NO: 3634 - DNA, 42 bp, synthetic construct
  misc_feature 1..42: note = Probe
  source 1..42: mol_type = other DNA
ataacccagaggtcgatggatcgaaaccatcctctgctaggt

SEQ ID NO: 3635 - DNA, 19 bp, synthetic construct
  misc_feature 1..19: note = Probe
  source 1..19: mol_type = other DNA
ataagctatcgggcccata

SEQ ID NO: 3636 - DNA, 20 bp, synthetic construct
  misc_feature 1..20: note = Probe
  source 1..20: mol_type = other DNA
ataagctatcgggcccatac

SEQ ID NO: 3637 - DNA, 24 bp, synthetic construct
  misc_feature 1..24: note = Probe
  source 1..24: mol_type = other DNA
ataagctatcgggcccataccccg

SEQ ID NO: 3638 - DNA, 25 bp, synthetic construct
  misc_feature 1..25: note = Probe
  source 1..25: mol_type = other DNA
ataagctatcgggcccataccccga

SEQ ID NO: 3639 - DNA, 26 bp, synthetic construct
  misc_feature 1..26: note = Probe
  source 1..26: mol_type = other DNA
ataagctatcgggcccataccccgaa

SEQ ID NO: 3640 - DNA, 27 bp, synthetic construct
  misc_feature 1..27: note = Probe
  source 1..27: mol_type = other DNA
ataagctatcgggcccataccccgaaa

SEQ ID NO: 3641 - DNA, 28 bp, synthetic construct
  misc_feature 1..28: note = Probe
  source 1..28: mol_type = other DNA
ataagctatcgggcccataccccgaaaa

SEQ ID NO: 3642 - DNA, 29 bp, synthetic construct
  misc_feature 1..29: note = Probe
  source 1..29: mol_type = other DNA
ataagctatcgggcccataccccgaaaat

SEQ ID NO: 3643 - DNA, 30 bp, synthetic construct
  misc_feature 1..30: note = Probe
  source 1..30: mol_type = other DNA
ataagctatcgggcccataccccgaaaatg

SEQ ID NO: 3644 - DNA, 31 bp, synthetic construct
  misc_feature 1..31: note = Probe
  source 1..31: mol_type = other DNA
ataagctatcgggcccataccccgaaaatgt

SEQ ID NO: 3645 - DNA, 32 bp, synthetic construct
  misc_feature 1..32: note = Probe
  source 1..32: mol_type = other DNA
ataagctatcgggcccataccccgaaaatgtt

SEQ ID NO: 3646 - DNA, 33 bp, synthetic construct
  misc_feature 1..33: note = Probe
  source 1..33: mol_type = other DNA
ataagctatcgggcccataccccgaaaatgttg

SEQ ID NO: 3647 - DNA, 34 bp, synthetic construct
  misc_feature 1..34: note = Probe
  source 1..34: mol_type = other DNA
ataagctatcgggcccataccccgaaaatgttgg

SEQ ID NO: 3648 - DNA, 36 bp, synthetic construct
  misc_feature 1..36: note = Probe
  source 1..36: mol_type = other DNA
ataagctatcgggcccataccccgaaaatgttggtt

SEQ ID NO: 3649 - DNA, 37 bp, synthetic construct
  misc_feature 1..37: note = Probe
  source 1..37: mol_type = other DNA
ataagctatcgggcccataccccgaaaatgttggtta

SEQ ID NO: 3650 - DNA, 39 bp, synthetic construct
  misc_feature 1..39: note = Probe
  source 1..39: mol_type = other DNA
ataagctatcgggcccataccccgaaaatgttggttata

SEQ ID NO: 3651 - DNA, 49 bp, synthetic construct
  misc_feature 1..49: note = Probe
  source 1..49: mol_type = other DNA
ataagctatcgggcccataccccgaaaatgttggttatacccttcccgt

SEQ ID NO: 3652 - DNA, 50 bp, synthetic construct
  misc_feature 1..50: note = Probe
  source 1..50: mol_type = other DNA
ataagctatcgggcccataccccgaaaatgttggttatacccttcccgta

SEQ ID NO: 3653 - DNA, 20 bp, synthetic construct
  misc_feature 1..20: note = Probe
  source 1..20: mol_type = other DNA
ataatcatatttaccaaatg

SEQ ID NO: 3654 - DNA, 50 bp, synthetic construct
  misc_feature 1..50: note = Probe
  source 1..50: mol_type = other DNA
atacaccagtcttgtaaaccggagatgaaaacctttttccaaggacaaat

SEQ ID NO: 3655 - DNA, 46 bp, synthetic construct
  misc_feature 1..46: note = Probe
  source 1..46: mol_type = other DNA
atacactgaaaatgtttagacgggctcacatcaccccataaacaaa

SEQ ID NO: 3656 - DNA, 49 bp, synthetic construct
  misc_feature 1..49: note = Probe
  source 1..49: mol_type = other DNA
atacactgaaaatgtttagacgggctcacatcaccccataaacaaatag

SEQ ID NO: 3657 - DNA, 50 bp, synthetic construct
  misc_feature 1..50: note = Probe
  source 1..50: mol_type = other DNA
atacactgaaaatgtttagacgggctcacatcaccccataaacaaatagg

SEQ ID NO: 3658 - DNA, 50 bp, synthetic construct
  misc_feature 1..50: note = Probe
  source 1..50: mol_type = other DNA
atacagaccaagagccttcaaagccctcagtaagttgcaatacttaattt

SEQ ID NO: 3659 - DNA, 29 bp, synthetic construct
  misc_feature 1..29: note = Probe
  source 1..29: mol_type = other DNA
atacccacacccacccaagaacagggttt

SEQ ID NO: 3660 - DNA, 30 bp, synthetic construct
  misc_feature 1..30: note = Probe
  source 1..30: mol_type = other DNA
atacccacacccacccaagaacagggtttg

SEQ ID NO: 3661 - DNA, 31 bp, synthetic construct
  misc_feature 1..31: note = Probe
  source 1..31: mol_type = other DNA
atacccacacccacccaagaacagggtttgt

SEQ ID NO: 3662 - DNA, 32 bp, synthetic construct
  misc_feature 1..32: note = Probe
  source 1..32: mol_type = other DNA
atacccacacccacccaagaacagggtttgtt

SEQ ID NO: 3663 - DNA, 33 bp, synthetic construct
  misc_feature 1..33: note = Probe
  source 1..33: mol_type = other DNA
atacccacacccacccaagaacagggtttgtta

SEQ ID NO: 3664 - DNA, 32 bp, synthetic construct
  misc_feature 1..32: note = Probe
  source 1..32: mol_type = other DNA
ataccccgaaaatgttggttatacccttcccg

SEQ ID NO: 3665 - DNA, 34 bp, synthetic construct
  misc_feature 1..34: note = Probe
  source 1..34: mol_type = other DNA
ataccccgaaaatgttggttatacccttcccgta

SEQ ID NO: 3666 - DNA, 39 bp, synthetic construct
  misc_feature 1..39: note = Probe
  source 1..39: mol_type = other DNA
ataccccgaaaatgttggttatacccttcccgtactaat

SEQ ID NO: 3667 - DNA, 40 bp, synthetic construct
  misc_feature 1..40: note = Probe
  source 1..40: mol_type = other DNA
ataccccgaaaatgttggttatacccttcccgtactaatt

SEQ ID NO: 3668 - DNA, 37 bp, synthetic construct
  misc_feature 1..37: note = Probe
  source 1..37: mol_type = other DNA
atagagtaaataataggagcttaaacccccttatttc

SEQ ID NO: 3669 - DNA, 40 bp, synthetic construct
  misc_feature 1..40: note = Probe
  source 1..40: mol_type = other DNA
atagagtaaataataggagcttaaacccccttatttctag

SEQ ID NO: 3670 - DNA, 41 bp, synthetic construct
  misc_feature 1..41: note = Probe
  source 1..41: mol_type = other DNA
atagagtaaataataggagcttaaacccccttatttctagg

SEQ ID NO: 3671 - DNA, 42 bp, synthetic construct
  misc_feature 1..42: note = Probe
  source 1..42: mol_type = other DNA
atagagtaaataataggagcttaaacccccttatttctagga

SEQ ID NO: 3672 - DNA, 43 bp, synthetic construct
  misc_feature 1..43: note = Probe
  source 1..43: mol_type = other DNA
atagagtaaataataggagcttaaacccccttatttctaggac

SEQ ID NO: 3673 - DNA, 27 bp, synthetic construct
  misc_feature 1..27: note = Probe
  source 1..27: mol_type = other DNA
atagctcagtcggtagagcatcagact

SEQ ID NO: 3674 - DNA, 49 bp, synthetic construct
  misc_feature 1..49: note = Probe
  source 1..49: mol_type = other DNA
atagctgccttccaagcagttgacccgggttcgattcccggccaacgca

SEQ ID NO: 3675 - DNA, 17 bp, synthetic construct
  misc_feature 1..17: note = Probe
  source 1..17: mol_type = other DNA
ataggtttggtcctagc

SEQ ID NO: 3676 - DNA, 18 bp, synthetic construct
  misc_feature 1..18: note = Probe
  source 1..18: mol_type = other DNA
ataggtttggtcctagcc

SEQ ID NO: 3677 - DNA, 19 bp, synthetic construct
  misc_feature 1..19: note = Probe
  source 1..19: mol_type = other DNA
ataggtttggtcctagcct

SEQ ID NO: 3678 - DNA, 20 bp, synthetic construct
  misc_feature 1..20: note = Probe
  source 1..20: mol_type = other DNA
ataggtttggtcctagcctt

SEQ ID NO: 3679 - DNA, 21 bp, synthetic construct
  misc_feature 1..21: note = Probe
  source 1..21: mol_type = other DNA
ataggtttggtcctagccttt

SEQ ID NO: 3680 - DNA, 22 bp, synthetic construct
  misc_feature 1..22: note = Probe
  source 1..22: mol_type = other DNA
ataggtttggtcctagcctttc

SEQ ID NO: 3681 - DNA, 23 bp, synthetic construct
  misc_feature 1..23: note = Probe
  source 1..23: mol_type = other DNA
ataggtttggtcctagcctttct

SEQ ID NO: 3682 - DNA, 24 bp, synthetic construct
  misc_feature 1..24: note = Probe
  source 1..24: mol_type = other DNA
ataggtttggtcctagcctttcta

SEQ ID NO: 3683 - DNA, 25 bp, synthetic construct
  misc_feature 1..25: note = Probe
  source 1..25: mol_type = other DNA
ataggtttggtcctagcctttctat

SEQ ID NO: 3684 - DNA, 26 bp, synthetic construct
  misc_feature 1..26: note = Probe
  source 1..26: mol_type = other DNA
ataggtttggtcctagcctttctatt

SEQ ID NO: 3685 - DNA, 27 bp, synthetic construct
  misc_feature 1..27: note = Probe
  source 1..27: mol_type = other DNA
ataggtttggtcctagcctttctatta

SEQ ID NO: 3686 - DNA, 29 bp, synthetic construct
  misc_feature 1..29: note = Probe
  source 1..29: mol_type = other DNA
ataggtttggtcctagcctttctattagc

SEQ ID NO: 3687 - DNA, 50 bp, synthetic construct
  misc_feature 1..50: note = Probe
  source 1..50: mol_type = other DNA
atagtaccgttaacttccaattaactagttttgacaacattcaaaaaaga

SEQ ID NO: 3688 - DNA, 36 bp, synthetic construct
  misc_feature 1..36: note = Probe
  source 1..36: mol_type = other DNA
atagtttaaccaaaacatcagattgtgaatctgaca

SEQ ID NO: 3689 - DNA, 39 bp, synthetic construct
  misc_feature 1..39: note = Probe
  source 1..39: mol_type = other DNA
atagtttaaccaaaacatcagattgtgaatctgacaaca

SEQ ID NO: 3690 - DNA, 50 bp, synthetic construct
  misc_feature 1..50: note = Probe
  source 1..50: mol_type = other DNA
atagtttaaccaaaacatcagattgtgaatctgacaacagaggcttacga

SEQ ID NO: 3691 - DNA, 39 bp, synthetic construct
  misc_feature 1..39: note = Probe
  source 1..39: mol_type = other DNA
atatagtttaaccaaaacatcagattgtgaatctgacaa

SEQ ID NO: 3692 - DNA, 24 bp, synthetic construct
  misc_feature 1..24: note = Probe
  source 1..24: mol_type = other DNA
atatcattggtcgtggttgtagtc

SEQ ID NO: 3693 - DNA, 28 bp, synthetic construct
  misc_feature 1..28: note = Probe
  source 1..28: mol_type = other DNA
atatcattggtcgtggttgtagtccgtg

SEQ ID NO: 3694 - DNA, 30 bp, synthetic construct
  misc_feature 1..30: note = Probe
  source 1..30: mol_type = other DNA
atatcattggtcgtggttgtagtccgtgcg

SEQ ID NO: 3695 - DNA, 39 bp, synthetic construct
  misc_feature 1..39: note = Probe
  source 1..39: mol_type = other DNA
atatcattggtcgtggttgtagtccgtgcgagaataatg

SEQ ID NO: 3696 - DNA, 32 bp, synthetic construct
  misc_feature 1..32: note = Probe
  source 1..32: mol_type = other DNA
atatggtctagcggttaggattcctggttttc

SEQ ID NO: 3697 - DNA, 18 bp, synthetic construct
  misc_feature 1..18: note = Probe
  source 1..18: mol_type = other DNA
atatgtccgcgtgggttc

SEQ ID NO: 3698 - DNA, 50 bp, synthetic construct
  misc_feature 1..50: note = Probe
  source 1..50: mol_type = other DNA
atattgaattgcaaattcgaagaagcagcttcaaacctgccggggcttct

SEQ ID NO: 3699 - DNA, 20 bp, synthetic construct
  misc_feature 1..20: note = Probe
  source 1..20: mol_type = other DNA
atcaagaggtccccggttca

SEQ ID NO: 3700 - DNA, 39 bp, synthetic construct
  misc_feature 1..39: note = Probe
  source 1..39: mol_type = other DNA
atcaagaggtccctggttcaaatccgggtgccccctcaa

SEQ ID NO: 3701 - DNA, 23 bp, synthetic construct
  misc_feature 1..23: note = Probe
  source 1..23: mol_type = other DNA
atcagaagattccaggttcgact

SEQ ID NO: 3702 - DNA, 37 bp, synthetic construct
  misc_feature 1..37: note = Probe
  source 1..37: mol_type = other DNA
atcagaagattccaggttcgactcctggctggctcgg

SEQ ID NO: 3703 - DNA, 39 bp, synthetic construct
  misc_feature 1..39: note = Probe
  source 1..39: mol_type = other DNA
atcagaagattccaggttcgactcctggctggctcggtg

SEQ ID NO: 3704 - DNA, 37 bp, synthetic construct
  misc_feature 1..37: note = Probe
  source 1..37: mol_type = other DNA
atcagaagattccaggttcgactcctggctggctcgt

SEQ ID NO: 3705 - DNA, 38 bp, synthetic construct
  misc_feature 1..38: note = Probe
  source 1..38: mol_type = other DNA
atcagaagattccaggttcgactcctggctggctcgtt

SEQ ID NO: 3706 - DNA, 39 bp, synthetic construct
  misc_feature 1..39: note = Probe
  source 1..39: mol_type = other DNA
atcagaagattccaggttcgactcctggctggctcgttc

SEQ ID NO: 3707 - DNA, 39 bp, synthetic construct
  misc_feature 1..39: note = Probe
  source 1..39: mol_type = other DNA
atcagaagattctaggttcgactcctggctggctcgcga

SEQ ID NO: 3708 - DNA, 39 bp, synthetic construct
  misc_feature 1..39: note = Probe
  source 1..39: mol_type = other DNA
atcagaagattctaggttcgactcctggctggctcgggt

SEQ ID NO: 3709 - DNA, 20 bp, synthetic construct
  misc_feature 1..20: note = Probe
  source 1..20: mol_type = other DNA
atcagaagattgagggttcg

SEQ ID NO: 3710 - DNA, 39 bp, synthetic construct
  misc_feature 1..39: note = Probe
  source 1..39: mol_type = other DNA
atcagaagattgagggttcgagtcccttcgtggtcgttg

SEQ ID NO: 3711 - DNA, 23 bp, synthetic construct
  misc_feature 1..23: note = Probe
  source 1..23: mol_type = other DNA
atcagaagattgcaggttcgagt

SEQ ID NO: 3712 - DNA, 39 bp, synthetic construct
  misc_feature 1..39: note = Probe
  source 1..39: mol_type = other DNA
atcagaaggttgcgtgttcaaatcacgtcggggtcaaac

SEQ ID NO: 3713 - DNA, 39 bp, synthetic construct
  misc_feature 1..39: note = Probe
  source 1..39: mol_type = other DNA
atcagaaggttgcgtgttcaaatcacgtcggggtcaaca

SEQ ID NO: 3714 - DNA, 50 bp, synthetic construct
  misc_feature 1..50: note = Probe
  source 1..50: mol_type = other DNA
atcagattgtgaatctgacaacagaggcttacgaccccttatttaccgag

SEQ ID NO: 3715 - DNA, 50 bp, synthetic construct
  misc_feature 1..50: note = Probe
  source 1..50: mol_type = other DNA
atcatgcaagattcccattcttgcgacccgggttcgattcccgggcggcg

SEQ ID NO: 3716 - DNA, 23 bp, synthetic construct
  misc_feature 1..23: note = Probe
  source 1..23: mol_type = other DNA
atcattggtcgtggttgtagtcc

SEQ ID NO: 3717 - DNA, 26 bp, synthetic construct
  misc_feature 1..26: note = Probe
  source 1..26: mol_type = other DNA
atcattggtcgtggttgtagtccgtg

SEQ ID NO: 3718 - DNA, 37 bp, synthetic construct
  misc_feature 1..37: note = Probe
  source 1..37: mol_type = other DNA
atcattggtcgtggttgtagtccgtgcgagaataatg

SEQ ID NO: 3719 - DNA, 23 bp, synthetic construct
  misc_feature 1..23: note = Probe
  source 1..23: mol_type = other DNA
atccaatggacatatgtccgcgt

SEQ ID NO: 3720 - DNA, 39 bp, synthetic construct
  misc_feature 1..39: note = Probe
  source 1..39: mol_type = other DNA
atccagaggttccgggttcgagtcccggcagagatggtc

SEQ ID NO: 3721 - DNA, 23 bp, synthetic construct
  misc_feature 1..23: note = Probe
  source 1..23: mol_type = other DNA
atccagcgatccgagttcaaatc

SEQ ID NO: 3722 - DNA, 37 bp, synthetic construct
  misc_feature 1..37: note = Probe
  source 1..37: mol_type = other DNA
atccagcgatccgagttcaaatctcggtggaacctgc

SEQ ID NO: 3723 - DNA, 38 bp, synthetic construct
  misc_feature 1..38: note = Probe
  source 1..38: mol_type = other DNA
atccagcgatccgagttcaaatctcggtggaacctgca

SEQ ID NO: 3724 - DNA, 38 bp, synthetic construct
  misc_feature 1..38: note = Probe
  source 1..38: mol_type = other DNA
atccagcgatccgagttcaaatctcggtgggacctcac

SEQ ID NO: 3725 - DNA, 22 bp, synthetic construct
  misc_feature 1..22: note = Probe
  source 1..22: mol_type = other DNA
atccattggggtttccccgcgc

SEQ ID NO: 3726 - DNA, 23 bp, synthetic construct
  misc_feature 1..23: note = Probe
  source 1..23: mol_type = other DNA
atccattggggtttccccgcgca

SEQ ID NO: 3727 - DNA, 45 bp, synthetic construct
  misc_feature 1..45: note = Probe
  source 1..45: mol_type = other DNA
atccattggtcttaggccccaaaaattttggtgcaactccaaata

SEQ ID NO: 3728 - DNA, 49 bp, synthetic construct
  misc_feature 1..49: note = Probe
  source 1..49: mol_type = other DNA
atccattggtcttaggccccaaaaattttggtgcaactccaaataaaag

SEQ ID NO: 3729 - DNA, 17 bp, synthetic construct
  misc_feature 1..17: note = Probe
  source 1..17: mol_type = other DNA
atcccaccgctgccaca

SEQ ID NO: 3730 - DNA, 18 bp, synthetic construct
  misc_feature 1..18: note = Probe
  source 1..18: mol_type = other DNA
atcccaccgctgccacac

SEQ ID NO: 3731 - DNA, 19 bp, synthetic construct
  misc_feature 1..19: note = Probe
  source 1..19: mol_type = other DNA
atcccaccgctgccacacc

SEQ ID NO: 3732 - DNA, 20 bp, synthetic construct
  misc_feature 1..20: note = Probe
  source 1..20: mol_type = other DNA
atcccaccgctgccacacct

SEQ ID NO: 3733 - DNA, 21 bp, synthetic construct
  misc_feature 1..21: note = Probe
  source 1..21: mol_type = other DNA
atcccaccgctgccacacctc

SEQ ID NO: 3734 - DNA, 20 bp, synthetic construct
  misc_feature 1..20: note = Probe
  source 1..20: mol_type = other DNA
atcccaccgctgccaggttt

SEQ ID NO: 3735 - DNA, 21 bp, synthetic construct
  misc_feature 1..21: note = Probe
  source 1..21: mol_type = other DNA
atcccaccgctgccaggttta

SEQ ID NO: 3736 - DNA, 22 bp, synthetic construct
  misc_feature 1..22: note = Probe
  source 1..22: mol_type = other DNA
atcccaccgctgccaggtttat

SEQ ID NO: 3737 - DNA, 23 bp, synthetic construct
  misc_feature 1..23: note = Probe
  source 1..23: mol_type = other DNA
atcccacttctgacacatacttt

SEQ ID NO: 3738 - DNA, 18 bp, synthetic construct
  misc_feature 1..18: note = Probe
  source 1..18: mol_type = other DNA
atcccagcggtgcctccg

SEQ ID NO: 3739 - DNA, 17 bp, synthetic construct
  misc_feature 1..17: note = Probe
  source 1..17: mol_type = other DNA
atcccatcctcgtcgct

SEQ ID NO: 3740 - DNA, 50 bp, synthetic construct
  misc_feature 1..50: note = Probe
  source 1..50: mol_type = other DNA
atccccgcctgtcacgcgggagaccggggttcgattccccgacggggaga

SEQ ID NO: 3741 - DNA, 20 bp, synthetic construct
  misc_feature 1..20: note = Probe
  source 1..20: mol_type = other DNA
atccccggcacctccaccag

SEQ ID NO: 3742 - DNA, 17 bp, synthetic construct
  misc_feature 1..17: note = Probe
  source 1..17: mol_type = other DNA
atcccggacgagccccc

SEQ ID NO: 3743 - DNA, 18 bp, synthetic construct
  misc_feature 1..18: note = Probe
  source 1..18: mol_type = other DNA
atccggctcgaaggacga

SEQ ID NO: 3744 - DNA, 17 bp, synthetic construct
  misc_feature 1..17: note = Probe
  source 1..17: mol_type = other DNA
atccgggtgccccctca

SEQ ID NO: 3745 - DNA, 18 bp, synthetic construct
  misc_feature 1..18: note = Probe
  source 1..18: mol_type = other DNA
atccgggtgccccctcaa

SEQ ID NO: 3746 - DNA, 19 bp, synthetic construct
  misc_feature 1..19: note = Probe
  source 1..19: mol_type = other DNA
atccgggtgccccctcaat

SEQ ID NO: 3747 - DNA, 20 bp, synthetic construct
  misc_feature 1..20: note = Probe
  source 1..20: mol_type = other DNA
atccgggtgccccctcaatg

SEQ ID NO: 3748 - DNA, 21 bp, synthetic construct
  misc_feature 1..21: note = Probe
  source 1..21: mol_type = other DNA
atccgggtgccccctcaatgg

SEQ ID NO: 3749 - DNA, 20 bp, synthetic construct
  misc_feature 1..20: note = Probe
  source 1..20: mol_type = other DNA
atccgggtgccccctcacag

SEQ ID NO: 3750 - DNA, 17 bp, synthetic construct
  misc_feature 1..17: note = Probe
  source 1..17: mol_type = other DNA
atccgggtgccccctcg

SEQ ID NO: 3751 - DNA, 17 bp, synthetic construct
  misc_feature 1..17: note = Probe
  source 1..17: mol_type = other DNA
atccgggtgccccctct

SEQ ID NO: 3752 - DNA, 23 bp, synthetic construct
  misc_feature 1..23: note = Probe
  source 1..23: mol_type = other DNA
atccttaggtcgctggttcgatt

SEQ ID NO: 3753 - DNA, 50 bp, synthetic construct
  misc_feature 1..50: note = Probe
  source 1..50: mol_type = other DNA
atccttaggtcgctggttcgattccggctcgaaggacttcgtctgtaatt

SEQ ID NO: 3754 - DNA, 23 bp, synthetic construct
  misc_feature 1..23: note = Probe
  source 1..23: mol_type = other DNA
atcgaaaccatcctctgctaggt

SEQ ID NO: 3755 - DNA, 23 bp, synthetic construct
  misc_feature 1..23: note = Probe
  source 1..23: mol_type = other DNA
atcgatgcccgcatcctccactc

SEQ ID NO: 3756 - DNA, 28 bp, synthetic construct
  misc_feature 1..28: note = Probe
  source 1..28: mol_type = other DNA
atcgcataaaacttaaaactttacagtc

SEQ ID NO: 3757 - DNA, 35 bp, synthetic construct
  misc_feature 1..35: note = Probe
  source 1..35: mol_type = other DNA
atcgcataaaacttaaaactttacagtcagaggtt

SEQ ID NO: 3758 - DNA, 49 bp, synthetic construct
  misc_feature 1..49: note = Probe
  source 1..49: mol_type = other DNA
atcgcataaaacttaaaactttacagtcagaggttcaattcctcttctt

SEQ ID NO: 3759 - DNA, 50 bp, synthetic construct
  misc_feature 1..50: note = Probe
  source 1..50: mol_type = other DNA
atcgcataaaacttaaaactttacagtcagaggttcaattcctcttctta

SEQ ID NO: 3760 - DNA, 50 bp, synthetic construct
  misc_feature 1..50: note = Probe
  source 1..50: mol_type = other DNA
atcgggcccataccccgaaaatgttggttatacccttcccgtactaatta

SEQ ID NO: 3761 - DNA, 28 bp, synthetic construct
  misc_feature 1..28: note = Probe
  source 1..28: mol_type = other DNA
atcgtatagtggttagtactctgcgttg

SEQ ID NO: 3762 - DNA, 29 bp, synthetic construct
  misc_feature 1..29: note = Probe
  source 1..29: mol_type = other DNA
atcgtatagtggttagtactctgcgttgt

SEQ ID NO: 3763 - DNA, 27 bp, synthetic construct
  misc_feature 1..27: note = Probe
  source 1..27: mol_type = other DNA
atctaaagacaggggttaggcctcttt

SEQ ID NO: 3764 - DNA, 29 bp, synthetic construct
  misc_feature 1..29: note = Probe
  source 1..29: mol_type = other DNA
atctaaagacaggggttaggcctcttttt

SEQ ID NO: 3765 - DNA, 35 bp, synthetic construct
  misc_feature 1..35: note = Probe
  source 1..35: mol_type = other DNA
atctaaagacaggggttaggcctctttttaccagc

SEQ ID NO: 3766 - DNA, 36 bp, synthetic construct
  misc_feature 1..36: note = Probe
  source 1..36: mol_type = other DNA
atctaaagacaggggttaggcctctttttaccagct

SEQ ID NO: 3767 - DNA, 19 bp, synthetic construct
  misc_feature 1..19: note = Probe
  source 1..19: mol_type = other DNA
atctaaaggtccctggttc

SEQ ID NO: 3768 - DNA, 20 bp, synthetic construct
  misc_feature 1..20: note = Probe
  source 1..20: mol_type = other DNA
atctaaaggtccctggttca

SEQ ID NO: 3769 - DNA, 23 bp, synthetic construct
  misc_feature 1..23: note = Probe
  source 1..23: mol_type = other DNA
atctaaaggtccctggttcaatc

SEQ ID NO: 3770 - DNA, 39 bp, synthetic construct
  misc_feature 1..39: note = Probe
  source 1..39: mol_type = other DNA
atctaaaggtccctggttcaatcccgggtttcggcagcg

SEQ ID NO: 3771 - DNA, 25 bp, synthetic construct
  misc_feature 1..25: note = Probe
  source 1..25: mol_type = other DNA
atctaaaggtccctggttcgatccc

SEQ ID NO: 3772 - DNA, 33 bp, synthetic construct
  misc_feature 1..33: note = Probe
  source 1..33: mol_type = other DNA
atctaaaggtccctggttcgatcccgggtttcg

SEQ ID NO: 3773 - DNA, 38 bp, synthetic construct
  misc_feature 1..38: note = Probe
  source 1..38: mol_type = other DNA
atctaaaggtccctggttcgatcccgggtttcggcact

SEQ ID NO: 3774 - DNA, 39 bp, synthetic construct
  misc_feature 1..39: note = Probe
  source 1..39: mol_type = other DNA
atctaaaggtccctggttcgatcccgggtttcggcactt

SEQ ID NO: 3775 - DNA, 39 bp, synthetic construct
  misc_feature 1..39: note = Probe
  source 1..39: mol_type = other DNA
atctaaaggtccctggttcgatcccgggtttcggcagac

SEQ ID NO: 3776 - DNA, 39 bp, synthetic construct
  misc_feature 1..39: note = Probe
  source 1..39: mol_type = other DNA
atctaaaggtccctggttcgatcccgggtttcggcagct

SEQ ID NO: 3777 - DNA, 39 bp, synthetic construct
  misc_feature 1..39: note = Probe
  source 1..39: mol_type = other DNA
atctaaaggtccctggttcgatcccgggtttcggcaggg

SEQ ID NO: 3778 - DNA, 37 bp, synthetic construct
  misc_feature 1..37: note = Probe
  source 1..37: mol_type = other DNA
atctgaaggtcctgagttcgaacctcagagggggcaa

SEQ ID NO: 3779 - DNA, 37 bp, synthetic construct
  misc_feature 1..37: note = Probe
  source 1..37: mol_type = other DNA
atctgaaggtcctgagttcgaacctcagagggggcag

SEQ ID NO: 3780 - DNA, 39 bp, synthetic construct
  misc_feature 1..39: note = Probe
  source 1..39: mol_type = other DNA
atctgaaggtcctgagttcgaacctcagagggggcagct

SEQ ID NO: 3781 - DNA, 39 bp, synthetic construct
  misc_feature 1..39: note = Probe
  source 1..39: mol_type = other DNA
atctgaaggtcctgagttcgagcctcagagagggcagct

SEQ ID NO: 3782 - DNA, 37 bp, synthetic construct
  misc_feature 1..37: note = Probe
  source 1..37: mol_type = other DNA
atctgaaggtcgtgagttcgagcctcacacggggcag

SEQ ID NO: 3783 - DNA, 39 bp, synthetic construct
  misc_feature 1..39: note = Probe
  source 1..39: mol_type = other DNA
atctgaaggtcgtgagttcgatcctcacacggggcacaa

SEQ ID NO: 3784 - DNA, 45 bp, synthetic construct
  misc_feature 1..45: note = Probe
  source 1..45: mol_type = other DNA
atctgaaggtcgtgagttcgatcctcacacggggcacaataattt

SEQ ID NO: 3785 - DNA, 25 bp, synthetic construct
  misc_feature 1..25: note = Probe
  source 1..25: mol_type = other DNA
atctgacaacagaggcttacgaccc

SEQ ID NO: 3786 - DNA, 26 bp, synthetic construct
  misc_feature 1..26: note = Probe
  source 1..26: mol_type = other DNA
atctgacaacagaggcttacgacccc

SEQ ID NO: 3787 - DNA, 27 bp, synthetic construct
  misc_feature 1..27: note = Probe
  source 1..27: mol_type = other DNA
atctgacaacagaggcttacgacccct

SEQ ID NO: 3788 - DNA, 32 bp, synthetic construct
  misc_feature 1..32: note = Probe
  source 1..32: mol_type = other DNA
atctgacaacagaggcttacgaccccttattt

SEQ ID NO: 3789 - DNA, 33 bp, synthetic construct
  misc_feature 1..33: note = Probe
  source 1..33: mol_type = other DNA
atctgacaacagaggcttacgaccccttattta

SEQ ID NO: 3790 - DNA, 36 bp, synthetic construct
  misc_feature 1..36: note = Probe
  source 1..36: mol_type = other DNA
atctgacaacagaggcttacgaccccttatttaccg

SEQ ID NO: 3791 - DNA, 37 bp, synthetic construct
  misc_feature 1..37: note = Probe
  source 1..37: mol_type = other DNA
atctgacaacagaggcttacgaccccttatttaccga

SEQ ID NO: 3792 - DNA, 38 bp, synthetic construct
  misc_feature 1..38: note = Probe
  source 1..38: mol_type = other DNA
atctgacaacagaggcttacgaccccttatttaccgag

SEQ ID NO: 3793 - DNA, 19 bp, synthetic construct
  misc_feature 1..19: note = Probe
  source 1..19: mol_type = other DNA
atctgagggtccagggttc

SEQ ID NO: 3794 - DNA, 39 bp, synthetic construct
  misc_feature 1..39: note = Probe
  source 1..39: mol_type = other DNA
atctgagggtccagggttcaagtccctgttcgggcggca

SEQ ID NO: 3795 - DNA, 31 bp, synthetic construct
  misc_feature 1..31: note = Probe
  source 1..31: mol_type = other DNA
atcttagctttgggtgctaatggtggagtta

SEQ ID NO: 3796 - DNA, 49 bp, synthetic construct
  misc_feature 1..49: note = Probe
  source 1..49: mol_type = other DNA
atcttagctttgggtgctaatggtggagttaaagactttttctctgatt

SEQ ID NO: 3797 - DNA, 50 bp, synthetic construct
  misc_feature 1..50: note = Probe
  source 1..50: mol_type = other DNA
atcttagctttgggtgctaatggtggagttaaagactttttctctgattt

SEQ ID NO: 3798 - DNA, 25 bp, synthetic construct
  misc_feature 1..25: note = Probe
  source 1..25: mol_type = other DNA
atgaaaacctttttccaaggacaaa

SEQ ID NO: 3799 - DNA, 26 bp, synthetic construct
  misc_feature 1..26: note = Probe
  source 1..26: mol_type = other DNA
atgaaaacctttttccaaggacaaat

SEQ ID NO: 3800 - DNA, 23 bp, synthetic construct
  misc_feature 1..23: note = Probe
  source 1..23: mol_type = other DNA
atgataatcatatttaccaaatg

SEQ ID NO: 3801 - DNA, 31 bp, synthetic construct
  misc_feature 1..31: note = Probe
  source 1..31: mol_type = other DNA
atgattctcgcttagggtgcgagaggtcccg

SEQ ID NO: 3802 - DNA, 31 bp, synthetic construct
  misc_feature 1..31: note = Probe
  source 1..31: mol_type = other DNA
atgattctcgcttcgggtgcgagaggtcccg

SEQ ID NO: 3803 - DNA, 32 bp, synthetic construct
  misc_feature 1..32: note = Probe
  source 1..32: mol_type = other DNA
atgattctcgcttcgggtgcgagaggtcccgg

SEQ ID NO: 3804 - DNA, 31 bp, synthetic construct
  misc_feature 1..31: note = Probe
  source 1..31: mol_type = other DNA
atgattctcgctttgggtgcgagaggtcccg

SEQ ID NO: 3805 - DNA, 44 bp, synthetic construct
  misc_feature 1..44: note = Probe
  source 1..44: mol_type = other DNA
atgatttcgactcattaaattatgataatcatatttaccaaatg

SEQ ID NO: 3806 - DNA, 28 bp, synthetic construct
  misc_feature 1..28: note = Probe
  source 1..28: mol_type = other DNA
atgcagagtggggttttgcagtccttag

SEQ ID NO: 3807 - DNA, 30 bp, synthetic construct
  misc_feature 1..30: note = Probe
  source 1..30: mol_type = other DNA
atgcagagtggggttttgcagtccttagct

SEQ ID NO: 3808 - DNA, 23 bp, synthetic construct
  misc_feature 1..23: note = Probe
  source 1..23: mol_type = other DNA
atgccccaactaaatactaccgt

SEQ ID NO: 3809 - DNA, 24 bp, synthetic construct
  misc_feature 1..24: note = Probe
  source 1..24: mol_type = other DNA
atgccccaactaaatactaccgta

SEQ ID NO: 3810 - DNA, 28 bp, synthetic construct
  misc_feature 1..28: note = Probe
  source 1..28: mol_type = other DNA
atgccccaactaaatactaccgtatggc

SEQ ID NO: 3811 - DNA, 16 bp, synthetic construct
  misc_feature 1..16: note = Probe
  source 1..16: mol_type = other DNA
atgcccccatgtctaa

SEQ ID NO: 3812 - DNA, 17 bp, synthetic construct
  misc_feature 1..17: note = Probe
  source 1..17: mol_type = other DNA
atgcccccatgtctaac

SEQ ID NO: 3813 - DNA, 25 bp, synthetic construct
  misc_feature 1..25: note = Probe
  source 1..25: mol_type = other DNA
atgcccccatgtctaacaacatggc

SEQ ID NO: 3814 - DNA, 26 bp, synthetic construct
  misc_feature 1..26: note = Probe
  source 1..26: mol_type = other DNA
atgcccccatgtctaacaacatggct

SEQ ID NO: 3815 - DNA, 27 bp, synthetic construct
  misc_feature 1..27: note = Probe
  source 1..27: mol_type = other DNA
atgcccccatgtctaacaacatggctt

SEQ ID NO: 3816 - DNA, 28 bp, synthetic construct
  misc_feature 1..28: note = Probe
  source 1..28: mol_type = other DNA
atgcccccatgtctaacaacatggcttt

SEQ ID NO: 3817 - DNA, 29 bp, synthetic construct
  misc_feature 1..29: note = Probe
  source 1..29: mol_type = other DNA
atgcccccatgtctaacaacatggctttc

SEQ ID NO: 3818 - DNA, 30 bp, synthetic construct
  misc_feature 1..30: note = Probe
  source 1..30: mol_type = other DNA
atgcccccatgtctaacaacatggctttct

SEQ ID NO: 3819 - DNA, 31 bp, synthetic construct
  misc_feature 1..31: note = Probe
  source 1..31: mol_type = other DNA
atgcccccatgtctaacaacatggctttctc

SEQ ID NO: 3820 - DNA, 32 bp, synthetic construct
  misc_feature 1..32: note = Probe
  source 1..32: mol_type = other DNA
atgcccccatgtctaacaacatggctttctca

SEQ ID NO: 3821 - DNA, 33 bp, synthetic construct
  misc_feature 1..33: note = Probe
  source 1..33: mol_type = other DNA
atgcccccatgtctaacaacatggctttctcaa

SEQ ID NO: 3822 - DNA, 34 bp, synthetic construct
  misc_feature 1..34: note = Probe
  source 1..34: mol_type = other DNA
atgcccccatgtctaacaacatggctttctcaac

SEQ ID NO: 3823 - DNA, 35 bp, synthetic construct
  misc_feature 1..35: note = Probe
  source 1..35: mol_type = other DNA
atgcccccatgtctaacaacatggctttctcaact

SEQ ID NO: 3824 - DNA, 27 bp, synthetic construct
  misc_feature 1..27: note = Probe
  source 1..27: mol_type = other DNA
atgcccctcatttacataaatattata

SEQ ID NO: 3825 - DNA, 30 bp, synthetic construct
  misc_feature 1..30: note = Probe
  source 1..30: mol_type = other DNA
atgcccctcatttacataaatattatacta

SEQ ID NO: 3826 - DNA, 19 bp, synthetic construct
  misc_feature 1..19: note = Probe
  source 1..19: mol_type = other DNA
atgccgaggttgtgagttc

SEQ ID NO: 3827 - DNA, 16 bp, synthetic construct
  misc_feature 1..16: note = Probe
  source 1..16: mol_type = other DNA
atggcacatgcagcgc

SEQ ID NO: 3828 - DNA, 17 bp, synthetic construct
  misc_feature 1..17: note = Probe
  source 1..17: mol_type = other DNA
atggcacatgcagcgca

SEQ ID NO: 3829 - DNA, 18 bp, synthetic construct
  misc_feature 1..18: note = Probe
  source 1..18: mol_type = other DNA
atggcacatgcagcgcaa

SEQ ID NO: 3830 - DNA, 19 bp, synthetic construct
  misc_feature 1..19: note = Probe
  source 1..19: mol_type = other DNA
atggcacatgcagcgcaag

SEQ ID NO: 3831 - DNA, 20 bp, synthetic construct
  misc_feature 1..20: note = Probe
  source 1..20: mol_type = other DNA
atggcacatgcagcgcaagt

SEQ ID NO: 3832 - DNA, 21 bp, synthetic construct
  misc_feature 1..21: note = Probe
  source 1..21: mol_type = other DNA
atggcacatgcagcgcaagta

SEQ ID NO: 3833 - DNA, 22 bp, synthetic construct
  misc_feature 1..22: note = Probe
  source 1..22: mol_type = other DNA
atggcacatgcagcgcaagtag

SEQ ID NO: 3834 - DNA, 23 bp, synthetic construct
  misc_feature 1..23: note = Probe
  source 1..23: mol_type = other DNA
atggcacatgcagcgcaagtagg

SEQ ID NO: 3835 - DNA, 24 bp, synthetic construct
  misc_feature 1..24: note = Probe
  source 1..24: mol_type = other DNA
atggcacatgcagcgcaagtaggt

SEQ ID NO: 3836 - DNA, 25 bp, synthetic construct
  misc_feature 1..25: note = Probe
  source 1..25: mol_type = other DNA
atggcacatgcagcgcaagtaggtc

SEQ ID NO: 3837 - DNA, 26 bp, synthetic construct
  misc_feature 1..26: note = Probe
  source 1..26: mol_type = other DNA
atggcacatgcagcgcaagtaggtct

SEQ ID NO: 3838 - DNA, 27 bp, synthetic construct
  misc_feature 1..27: note = Probe
  source 1..27: mol_type = other DNA
atggcacatgcagcgcaagtaggtcta

SEQ ID NO: 3839 - DNA, 28 bp, synthetic construct
  misc_feature 1..28: note = Probe
  source 1..28: mol_type = other DNA
atggcacatgcagcgcaagtaggtctac

SEQ ID NO: 3840 - DNA, 29 bp, synthetic construct
  misc_feature 1..29: note = Probe
  source 1..29: mol_type = other DNA
atggcacatgcagcgcaagtaggtctaca

SEQ ID NO: 3841 - DNA, 30 bp, synthetic construct
  misc_feature 1..30: note = Probe
  source 1..30: mol_type = other DNA
atggcacatgcagcgcaagtaggtctacaa

SEQ ID NO: 3842 - DNA, 25 bp, synthetic construct
  misc_feature 1..25: note = Probe
  source 1..25: mol_type = other DNA
atgggtggttcagtggtagaattct

SEQ ID NO: 3843 - DNA, 28 bp, synthetic construct
  misc_feature 1..28: note = Probe
  source 1..28: mol_type = other DNA
atgggtggttcagtggtagaattctcgc

SEQ ID NO: 3844 - DNA, 28 bp, synthetic construct
  misc_feature 1..28: note = Probe
  source 1..28: mol_type = other DNA
atggtggagttaaagactttttctctga

SEQ ID NO: 3845 - DNA, 29 bp, synthetic construct
  misc_feature 1..29: note = Probe
  source 1..29: mol_type = other DNA
atggtggagttaaagactttttctctgat

SEQ ID NO: 3846 - DNA, 30 bp, synthetic construct
  misc_feature 1..30: note = Probe
  source 1..30: mol_type = other DNA
atggtggagttaaagactttttctctgatt

SEQ ID NO: 3847 - DNA, 31 bp, synthetic construct
  misc_feature 1..31: note = Probe
  source 1..31: mol_type = other DNA
atggtggagttaaagactttttctctgattt

SEQ ID NO: 3848 - DNA, 33 bp, synthetic construct
  misc_feature 1..33: note = Probe
  source 1..33: mol_type = other DNA
atggtggagttaaagactttttctctgatttgt

SEQ ID NO: 3849 - DNA, 35 bp, synthetic construct
  misc_feature 1..35: note = Probe
  source 1..35: mol_type = other DNA
atggtggagttaaagactttttctctgatttgtcc

SEQ ID NO: 3850 - DNA, 29 bp, synthetic construct
  misc_feature 1..29: note = Probe
  source 1..29: mol_type = other DNA
atggtggttcagtggtagaattctcgcct

SEQ ID NO: 3851 - DNA, 19 bp, synthetic construct
  misc_feature 1..19: note = Probe
  source 1..19: mol_type = other DNA
atggttagcactctggact

SEQ ID NO: 3852 - DNA, 20 bp, synthetic construct
  misc_feature 1..20: note = Probe
  source 1..20: mol_type = other DNA
atggttagcactctggactc

SEQ ID NO: 3853 - DNA, 25 bp, synthetic construct
  misc_feature 1..25: note = Probe
  source 1..25: mol_type = other DNA
atgtcgttagtctaggctgtcagct

SEQ ID NO: 3854 - DNA, 17 bp, synthetic construct
  misc_feature 1..17: note = Probe
  source 1..17: mol_type = other DNA
atgtctaacaacatggc

SEQ ID NO: 3855 - DNA, 18 bp, synthetic construct
  misc_feature 1..18: note = Probe
  source 1..18: mol_type = other DNA
atgtctaacaacatggct

SEQ ID NO: 3856 - DNA, 19 bp, synthetic construct
  misc_feature 1..19: note = Probe
  source 1..19: mol_type = other DNA
atgtctaacaacatggctt

SEQ ID NO: 3857 - DNA, 23 bp, synthetic construct
  misc_feature 1..23: note = Probe
  source 1..23: mol_type = other DNA
atgtctaacaacatggctttctc

SEQ ID NO: 3858 - DNA, 24 bp, synthetic construct
  misc_feature 1..24: note = Probe
  source 1..24: mol_type = other DNA
atgtctaacaacatggctttctca

SEQ ID NO: 3859 - DNA, 26 bp, synthetic construct
  misc_feature 1..26: note = Probe
  source 1..26: mol_type = other DNA
atgtctaacaacatggctttctcaac

SEQ ID NO: 3860 - DNA, 27 bp, synthetic construct
  misc_feature 1..27: note = Probe
  source 1..27: mol_type = other DNA
atgtctaacaacatggctttctcaact

SEQ ID NO: 3861 - DNA, 29 bp, synthetic construct
  misc_feature 1..29: note = Probe
  source 1..29: mol_type = other DNA
atgttggttatacccttcccgtactaatt

SEQ ID NO: 3862 - DNA, 23 bp, synthetic construct
  misc_feature 1..23: note = Probe
  source 1..23: mol_type = other DNA
atgtttagacgggctcacatcac

SEQ ID NO: 3863 - DNA, 31 bp, synthetic construct
  misc_feature 1..31: note = Probe
  source 1..31: mol_type = other DNA
atgtttagacgggctcacatcaccccataaa

SEQ ID NO: 3864 - DNA, 32 bp, synthetic construct
  misc_feature 1..32: note = Probe
  source 1..32: mol_type = other DNA
atgtttagacgggctcacatcaccccataaac

SEQ ID NO: 3865 - DNA, 33 bp, synthetic construct
  misc_feature 1..33: note = Probe
  source 1..33: mol_type = other DNA
atgtttagacgggctcacatcaccccataaaca

SEQ ID NO: 3866 - DNA, 35 bp, synthetic construct
  misc_feature 1..35: note = Probe
  source 1..35: mol_type = other DNA
atgtttagacgggctcacatcaccccataaacaaa

SEQ ID NO: 3867 - DNA, 36 bp, synthetic construct
  misc_feature 1..36: note = Probe
  source 1..36: mol_type = other DNA
atgtttagacgggctcacatcaccccataaacaaat

SEQ ID NO: 3868 - DNA, 37 bp, synthetic construct
  misc_feature 1..37: note = Probe
  source 1..37: mol_type = other DNA
atgtttagacgggctcacatcaccccataaacaaata

SEQ ID NO: 3869 - DNA, 38 bp, synthetic construct
  misc_feature 1..38: note = Probe
  source 1..38: mol_type = other DNA
atgtttagacgggctcacatcaccccataaacaaatag

SEQ ID NO: 3870 - DNA, 50 bp, synthetic construct
  misc_feature 1..50: note = Probe
  source 1..50: mol_type = other DNA
attaaccttttaagttaaagattaagagaaccaacacctctttacagtga

SEQ ID NO: 3871 - DNA, 37 bp, synthetic construct
  misc_feature 1..37: note = Probe
  source 1..37: mol_type = other DNA
attaactagttttgacaacattcaaaaaagagtaata

SEQ ID NO: 3872 - DNA, 32 bp, synthetic construct
  misc_feature 1..32: note = Probe
  source 1..32: mol_type = other DNA
attaagagaaccaacacctctttacagtgaaa

SEQ ID NO: 3873 - DNA, 33 bp, synthetic construct
  misc_feature 1..33: note = Probe
  source 1..33: mol_type = other DNA
attaagagaaccaacacctctttacagtgaaat

SEQ ID NO: 3874 - DNA, 20 bp, synthetic construct
  misc_feature 1..20: note = Probe
  source 1..20: mol_type = other DNA
attaatcccctggcccaacc

SEQ ID NO: 3875 - DNA, 23 bp, synthetic construct
  misc_feature 1..23: note = Probe
  source 1..23: mol_type = other DNA
attaatcccctggcccaacccgt

SEQ ID NO: 3876 - DNA, 24 bp, synthetic construct
  misc_feature 1..24: note = Probe
  source 1..24: mol_type = other DNA
attaatcccctggcccaacccgtc

SEQ ID NO: 3877 - DNA, 30 bp, synthetic construct
  misc_feature 1..30: note = Probe
  source 1..30: mol_type = other DNA
attaatcccctggcccaacccgtcatctac

SEQ ID NO: 3878 - DNA, 23 bp, synthetic construct
  misc_feature 1..23: note = Probe
  source 1..23: mol_type = other DNA
attcaaaggttccgggttcgagt

SEQ ID NO: 3879 - DNA, 20 bp, synthetic construct
  misc_feature 1..20: note = Probe
  source 1..20: mol_type = other DNA
attcccgggcggcgcactta

SEQ ID NO: 3880 - DNA, 48 bp, synthetic construct
  misc_feature 1..48: note = Probe
  source 1..48: mol_type = other DNA
attcctggttttcacccaggcggcccgggttcgactcccggtgtggga

SEQ ID NO: 3881 - DNA, 49 bp, synthetic construct
  misc_feature 1..49: note = Probe
  source 1..49: mol_type = other DNA
attcctggttttcacccaggcggcccgggttcgactcccggtgtgggaa

SEQ ID NO: 3882 - DNA, 50 bp, synthetic construct
  misc_feature 1..50: note = Probe
  source 1..50: mol_type = other DNA
attcctggttttcacccaggcggcccgggttcgactcccggtgtgggaac

SEQ ID NO: 3883 - DNA, 50 bp, synthetic construct
  misc_feature 1..50: note = Probe
  source 1..50: mol_type = other DNA
attcctggttttcacccaggcggcccgggttcgactcccggtgtgggaat

SEQ ID NO: 3884 - DNA, 31 bp, synthetic construct
  misc_feature 1..31: note = Probe
  source 1..31: mol_type = other DNA
attcgaagaagcagcttcaaacctgccgggg

SEQ ID NO: 3885 - DNA, 33 bp, synthetic construct
  misc_feature 1..33: note = Probe
  source 1..33: mol_type = other DNA
attcgaagaagcagcttcaaacctgccggggct

SEQ ID NO: 3886 - DNA, 35 bp, synthetic construct
  misc_feature 1..35: note = Probe
  source 1..35: mol_type = other DNA
attcgaagaagcagcttcaaacctgccggggcttc

SEQ ID NO: 3887 - DNA, 36 bp, synthetic construct
  misc_feature 1..36: note = Probe
  source 1..36: mol_type = other DNA
attcgaagaagcagcttcaaacctgccggggcttct

SEQ ID NO: 3888 - DNA, 37 bp, synthetic construct
  misc_feature 1..37: note = Probe
  source 1..37: mol_type = other DNA
attcgaagaagcagcttcaaacctgccggggcttctc

SEQ ID NO: 3889 - DNA, 39 bp, synthetic construct
  misc_feature 1..39: note = Probe
  source 1..39: mol_type = other DNA
attcgaagaagcagcttcaaacctgccggggcttctccc

SEQ ID NO: 3890 - DNA, 31 bp, synthetic construct
  misc_feature 1..31: note = Probe
  source 1..31: mol_type = other DNA
attctaggttcgactcctggctggctcgcga

SEQ ID NO: 3891 - DNA, 23 bp, synthetic construct
  misc_feature 1..23: note = Probe
  source 1..23: mol_type = other DNA
attctcagggatgggttcgattc

SEQ ID NO: 3892 - DNA, 37 bp, synthetic construct
  misc_feature 1..37: note = Probe
  source 1..37: mol_type = other DNA
attctcagggatgggttcgattctcatagtcctagaa

SEQ ID NO: 3893 - DNA, 38 bp, synthetic construct
  misc_feature 1..38: note = Probe
  source 1..38: mol_type = other DNA
attctcagggatgggttcgattctcatagtcctagaaa

SEQ ID NO: 3894 - DNA, 37 bp, synthetic construct
  misc_feature 1..37: note = Probe
  source 1..37: mol_type = other DNA
attcttgcgacccgggttcgattcccgggcggcgcac

SEQ ID NO: 3895 - DNA, 38 bp, synthetic construct
  misc_feature 1..38: note = Probe
  source 1..38: mol_type = other DNA
attcttgcgacccgggttcgattcccgggcggcgcact

SEQ ID NO: 3896 - DNA, 39 bp, synthetic construct
  misc_feature 1..39: note = Probe
  source 1..39: mol_type = other DNA
attcttgcgacccgggttcgattcccgggcggcgcactt

SEQ ID NO: 3897 - DNA, 40 bp, synthetic construct
  misc_feature 1..40: note = Probe
  source 1..40: mol_type = other DNA
attcttgcgacccgggttcgattcccgggcggcgcactta

SEQ ID NO: 3898 - DNA, 39 bp, synthetic construct
  misc_feature 1..39: note = Probe
  source 1..39: mol_type = other DNA
attcttgcgacccgggttcgattcccgggcggcgcatag

SEQ ID NO: 3899 - DNA, 49 bp, synthetic construct
  misc_feature 1..49: note = Probe
  source 1..49: mol_type = other DNA
attgaattgcaaattcgaagaagcagcttcaaacctgccggggcttctc

SEQ ID NO: 3900 - DNA, 50 bp, synthetic construct
  misc_feature 1..50: note = Probe
  source 1..50: mol_type = other DNA
attgaattgcaaattcgaagaagcagcttcaaacctgccggggcttctcc

SEQ ID NO: 3901 - DNA, 35 bp, synthetic construct
  misc_feature 1..35: note = Probe
  source 1..35: mol_type = other DNA
attgcaaattcgaagaagcagcttcaaacctgccg

SEQ ID NO: 3902 - DNA, 37 bp, synthetic construct
  misc_feature 1..37: note = Probe
  source 1..37: mol_type = other DNA
attgcaaattcgaagaagcagcttcaaacctgccggg

SEQ ID NO: 3903 - DNA, 40 bp, synthetic construct
  misc_feature 1..40: note = Probe
  source 1..40: mol_type = other DNA
attgcaaattcgaagaagcagcttcaaacctgccggggct

SEQ ID NO: 3904 - DNA, 41 bp, synthetic construct
  misc_feature 1..41: note = Probe
  source 1..41: mol_type = other DNA
attgcaaattcgaagaagcagcttcaaacctgccggggctt

SEQ ID NO: 3905 - DNA, 43 bp, synthetic construct
  misc_feature 1..43: note = Probe
  source 1..43: mol_type = other DNA
attgcaaattcgaagaagcagcttcaaacctgccggggcttct

SEQ ID NO: 3906 - DNA, 44 bp, synthetic construct
  misc_feature 1..44: note = Probe
  source 1..44: mol_type = other DNA
attgcaaattcgaagaagcagcttcaaacctgccggggcttctc

SEQ ID NO: 3907 - DNA, 45 bp, synthetic construct
  misc_feature 1..45: note = Probe
  source 1..45: mol_type = other DNA
attgcaaattcgaagaagcagcttcaaacctgccggggcttctcc

SEQ ID NO: 3908 - DNA, 25 bp, synthetic construct
  misc_feature 1..25: note = Probe
  source 1..25: mol_type = other DNA
attggtcgtggttgtagtccgtgcg

SEQ ID NO: 3909 - DNA, 29 bp, synthetic construct
  misc_feature 1..29: note = Probe
  source 1..29: mol_type = other DNA
attggtcgtggttgtagtccgtgcgagaa

SEQ ID NO: 3910 - DNA, 33 bp, synthetic construct
  misc_feature 1..33: note = Probe
  source 1..33: mol_type = other DNA
attggtcgtggttgtagtccgtgcgagaataat

SEQ ID NO: 3911 - DNA, 34 bp, synthetic construct
  misc_feature 1..34: note = Probe
  source 1..34: mol_type = other DNA
attggtcgtggttgtagtccgtgcgagaataatg

SEQ ID NO: 3912 - DNA, 25 bp, synthetic construct
  misc_feature 1..25: note = Probe
  source 1..25: mol_type = other DNA
attggtggttcagtggtagaattct

SEQ ID NO: 3913 - DNA, 27 bp, synthetic construct
  misc_feature 1..27: note = Probe
  source 1..27: mol_type = other DNA
attggtggttcagtggtagaattctcg

SEQ ID NO: 3914 - DNA, 28 bp, synthetic construct
  misc_feature 1..28: note = Probe
  source 1..28: mol_type = other DNA
attggtggttcagtggtagaattctcgc

SEQ ID NO: 3915 - DNA, 29 bp, synthetic construct
  misc_feature 1..29: note = Probe
  source 1..29: mol_type = other DNA
attggtggttcagtggtagaattctcgcc

SEQ ID NO: 3916 - DNA, 30 bp, synthetic construct
  misc_feature 1..30: note = Probe
  source 1..30: mol_type = other DNA
attggtggttcagtggtagaattctcgcct

SEQ ID NO: 3917 - DNA, 31 bp, synthetic construct
  misc_feature 1..31: note = Probe
  source 1..31: mol_type = other DNA
attggtggttcagtggtagaattctcgcctc

SEQ ID NO: 3918 - DNA, 33 bp, synthetic construct
  misc_feature 1..33: note = Probe
  source 1..33: mol_type = other DNA
attggtggttcagtggtagaattctcgcctccc

SEQ ID NO: 3919 - DNA, 31 bp, synthetic construct
  misc_feature 1..31: note = Probe
  source 1..31: mol_type = other DNA
attggtggttcagtggtagaattctcgcctg

SEQ ID NO: 3920 - DNA, 32 bp, synthetic construct
  misc_feature 1..32: note = Probe
  source 1..32: mol_type = other DNA
attggtggttcagtggtagaattctcgcctgc

SEQ ID NO: 3921 - DNA, 33 bp, synthetic construct
  misc_feature 1..33: note = Probe
  source 1..33: mol_type = other DNA
attggtggttcagtggtagaattctcgcctgcc

SEQ ID NO: 3922 - DNA, 34 bp, synthetic construct
  misc_feature 1..34: note = Probe
  source 1..34: mol_type = other DNA
attggtggttcagtggtagaattctcgcctgcca

SEQ ID NO: 3923 - DNA, 31 bp, synthetic construct
  misc_feature 1..31: note = Probe
  source 1..31: mol_type = other DNA
attgtgaatctgacaacagaggcttacgacc

SEQ ID NO: 3924 - DNA, 32 bp, synthetic construct
  misc_feature 1..32: note = Probe
  source 1..32: mol_type = other DNA
attgtgaatctgacaacagaggcttacgaccc

SEQ ID NO: 3925 - DNA, 33 bp, synthetic construct
  misc_feature 1..33: note = Probe
  source 1..33: mol_type = other DNA
attgtgaatctgacaacagaggcttacgacccc

SEQ ID NO: 3926 - DNA, 34 bp, synthetic construct
  misc_feature 1..34: note = Probe
  source 1..34: mol_type = other DNA
attgtgaatctgacaacagaggcttacgacccct

SEQ ID NO: 3927 - DNA, 35 bp, synthetic construct
  misc_feature 1..35: note = Probe
  source 1..35: mol_type = other DNA
attgtgaatctgacaacagaggcttacgacccctt

SEQ ID NO: 3928 - DNA, 39 bp, synthetic construct
  misc_feature 1..39: note = Probe
  source 1..39: mol_type = other DNA
attgtgaatctgacaacagaggcttacgaccccttattt

SEQ ID NO: 3929 - DNA, 42 bp, synthetic construct
  misc_feature 1..42: note = Probe
  source 1..42: mol_type = other DNA
attgtgaatctgacaacagaggcttacgaccccttatttacc

SEQ ID NO: 3930 - DNA, 43 bp, synthetic construct
  misc_feature 1..43: note = Probe
  source 1..43: mol_type = other DNA
attgtgaatctgacaacagaggcttacgaccccttatttaccg

SEQ ID NO: 3931 - DNA, 44 bp, synthetic construct
  misc_feature 1..44: note = Probe
  source 1..44: mol_type = other DNA
attgtgaatctgacaacagaggcttacgaccccttatttaccga

SEQ ID NO: 3932 - DNA, 45 bp, synthetic construct
  misc_feature 1..45: note = Probe
  source 1..45: mol_type = other DNA
attgtgaatctgacaacagaggcttacgaccccttatttaccgag

SEQ ID NO: 3933 - DNA, 46 bp, synthetic construct
  misc_feature 1..46: note = Probe
  source 1..46: mol_type = other DNA
attgtgaatctgacaacagaggcttacgaccccttatttaccgaga

SEQ ID NO: 3934 - DNA, 50 bp, synthetic construct
  misc_feature 1..50: note = Probe
  source 1..50: mol_type = other DNA
attgtgaatctgacaacagaggcttacgaccccttatttaccgagaaagc

SEQ ID NO: 3935 - DNA, 25 bp, synthetic construct
  misc_feature 1..25: note = Probe
  source 1..25: mol_type = other DNA
atttcaacttaacttgaccgctctg

SEQ ID NO: 3936 - DNA, 26 bp, synthetic construct
  misc_feature 1..26: note = Probe
  source 1..26: mol_type = other DNA
atttcaacttaacttgaccgctctga

SEQ ID NO: 3937 - DNA, 27 bp, synthetic construct
  misc_feature 1..27: note = Probe
  source 1..27: mol_type = other DNA
atttcaacttaacttgaccgctctgag

SEQ ID NO: 3938 - DNA, 28 bp, synthetic construct
  misc_feature 1..28: note = Probe
  source 1..28: mol_type = other DNA
atttcaacttaacttgaccgctctgagc

SEQ ID NO: 3939 - DNA, 29 bp, synthetic construct
  misc_feature 1..29: note = Probe
  source 1..29: mol_type = other DNA
atttcaacttaacttgaccgctctgagct

SEQ ID NO: 3940 - DNA, 25 bp, synthetic construct
  misc_feature 1..25: note = Probe
  source 1..25: mol_type = other DNA
atttgtggtccagtggtagaattct

SEQ ID NO: 3941 - DNA, 26 bp, synthetic construct
  misc_feature 1..26: note = Probe
  source 1..26: mol_type = other DNA
caaaaattttggtgcaactccaaata

SEQ ID NO: 3942 - DNA, 23 bp, synthetic construct
  misc_feature 1..23: note = Probe
  source 1..23: mol_type = other DNA
caaaacatcagattgtgaatctg

SEQ ID NO: 3943 - DNA, 25 bp, synthetic construct
  misc_feature 1..25: note = Probe
  source 1..25: mol_type = other DNA
caaaacatcagattgtgaatctgac

SEQ ID NO: 3944 - DNA, 26 bp, synthetic construct
  misc_feature 1..26: note = Probe
  source 1..26: mol_type = other DNA
caaaacatcagattgtgaatctgaca

SEQ ID NO: 3945 - DNA, 27 bp, synthetic construct
  misc_feature 1..27: note = Probe
  source 1..27: mol_type = other DNA
caaaacatcagattgtgaatctgacaa

SEQ ID NO: 3946 - DNA, 28 bp, synthetic construct
  misc_feature 1..28: note = Probe
  source 1..28: mol_type = other DNA
caaaacatcagattgtgaatctgacaac

SEQ ID NO: 3947 - DNA, 29 bp, synthetic construct
  misc_feature 1..29: note = Probe
  source 1..29: mol_type = other DNA
caaaacatcagattgtgaatctgacaaca

SEQ ID NO: 3948 - DNA, 30 bp, synthetic construct
  misc_feature 1..30: note = Probe
  source 1..30: mol_type = other DNA
caaaacatcagattgtgaatctgacaacag

SEQ ID NO: 3949 - DNA, 32 bp, synthetic construct
  misc_feature 1..32: note = Probe
  source 1..32: mol_type = other DNA
caaaacatcagattgtgaatctgacaacagag

SEQ ID NO: 3950 - DNA, 33 bp, synthetic construct
  misc_feature 1..33: note = Probe
  source 1..33: mol_type = other DNA
caaaacatcagattgtgaatctgacaacagagg

SEQ ID NO: 3951 - DNA, 34 bp, synthetic construct
  misc_feature 1..34: note = Probe
  source 1..34: mol_type = other DNA
caaaacatcagattgtgaatctgacaacagaggc

SEQ ID NO: 3952 - DNA, 35 bp, synthetic construct
  misc_feature 1..35: note = Probe
  source 1..35: mol_type = other DNA
caaaacatcagattgtgaatctgacaacagaggct

SEQ ID NO: 3953 - DNA, 47 bp, synthetic construct
  misc_feature 1..47: note = Probe
  source 1..47: mol_type = other DNA
caaaacatcagattgtgaatctgacaacagaggcttacgacccctta

SEQ ID NO: 3954 - DNA, 48 bp, synthetic construct
  misc_feature 1..48: note = Probe
  source 1..48: mol_type = other DNA
caaaacatcagattgtgaatctgacaacagaggcttacgaccccttat

SEQ ID NO: 3955 - DNA, 49 bp, synthetic construct
  misc_feature 1..49: note = Probe
  source 1..49: mol_type = other DNA
caaaacatcagattgtgaatctgacaacagaggcttacgaccccttatt

SEQ ID NO: 3956 - DNA, 32 bp, synthetic construct
  misc_feature 1..32: note = Probe
  source 1..32: mol_type = other DNA
caaaacgaatgatttcgactcattaaattatg

SEQ ID NO: 3957 - DNA, 49 bp, synthetic construct
  misc_feature 1..49: note = Probe
  source 1..49: mol_type = other DNA
caaaacgaatgatttcgactcattaaattatgataatcatatttaccaa

SEQ ID NO: 3958 - DNA, 50 bp, synthetic construct
  misc_feature 1..50: note = Probe
  source 1..50: mol_type = other DNA
caaaacgaatgatttcgactcattaaattatgataatcatatttaccaaa

SEQ ID NO: 3959 - DNA, 18 bp, synthetic construct
  misc_feature 1..18: note = Probe
  source 1..18: mol_type = other DNA
caaacctgccggggcttc

SEQ ID NO: 3960 - DNA, 31 bp, synthetic construct
  misc_feature 1..31: note = Probe
  source 1..31: mol_type = other DNA
caaagacaccccccacagtttatgtagctta

SEQ ID NO: 3961 - DNA, 33 bp, synthetic construct
  misc_feature 1..33: note = Probe
  source 1..33: mol_type = other DNA
caaagacaccccccacagtttatgtagcttacc

SEQ ID NO: 3962 - DNA, 36 bp, synthetic construct
  misc_feature 1..36: note = Probe
  source 1..36: mol_type = other DNA
caaagacaccccccacagtttatgtagcttacctcc

SEQ ID NO: 3963 - DNA, 37 bp, synthetic construct
  misc_feature 1..37: note = Probe
  source 1..37: mol_type = other DNA
caaagacaccccccacagtttatgtagcttacctcct

SEQ ID NO: 3964 - DNA, 49 bp, synthetic construct
  misc_feature 1..49: note = Probe
  source 1..49: mol_type = other DNA
caaagacaccccccacagtttatgtagcttacctcctcaaagcaataca

SEQ ID NO: 3965 - DNA, 50 bp, synthetic construct
  misc_feature 1..50: note = Probe
  source 1..50: mol_type = other DNA
caaagacaccccccacagtttatgtagcttacctcctcaaagcaatacac

SEQ ID NO: 3966 - DNA, 17 bp, synthetic construct
  misc_feature 1..17: note = Probe
  source 1..17: mol_type = other DNA
caaagcaatacactgaa

SEQ ID NO: 3967 - DNA, 40 bp, synthetic construct
  misc_feature 1..40: note = Probe
  source 1..40: mol_type = other DNA
caaagcaatacactgaaaatgtttagacgggctcacatca

SEQ ID NO: 3968 - DNA, 44 bp, synthetic construct
  misc_feature 1..44: note = Probe
  source 1..44: mol_type = other DNA
caaagcaatacactgaaaatgtttagacgggctcacatcacccc

SEQ ID NO: 3969 - DNA, 46 bp, synthetic construct
  misc_feature 1..46: note = Probe
  source 1..46: mol_type = other DNA
caaagcaatacactgaaaatgtttagacgggctcacatcaccccat

SEQ ID NO: 3970 - DNA, 49 bp, synthetic construct
  misc_feature 1..49: note = Probe
  source 1..49: mol_type = other DNA
caaagcaatacactgaaaatgtttagacgggctcacatcaccccataaa

SEQ ID NO: 3971 - DNA, 17 bp, synthetic construct
  misc_feature 1..17: note = Probe
  source 1..17: mol_type = other DNA
caaagcacccaacttac

SEQ ID NO: 3972 - DNA, 18 bp, synthetic construct
  misc_feature 1..18: note = Probe
  source 1..18: mol_type = other DNA
caaagcacccaacttaca

SEQ ID NO: 3973 - DNA, 20 bp, synthetic construct
  misc_feature 1..20: note = Probe
  source 1..20: mol_type = other DNA
caaagcacccaacttacact

SEQ ID NO: 3974 - DNA, 21 bp, synthetic construct
  misc_feature 1..21: note = Probe
  source 1..21: mol_type = other DNA
caaagcacccaacttacactt

SEQ ID NO: 3975 - DNA, 22 bp, synthetic construct
  misc_feature 1..22: note = Probe
  source 1..22: mol_type = other DNA
caaagcacccaacttacactta

SEQ ID NO: 3976 - DNA, 23 bp, synthetic construct
  misc_feature 1..23: note = Probe
  source 1..23: mol_type = other DNA
caaagcacccaacttacacttag

SEQ ID NO: 3977 - DNA, 25 bp, synthetic construct
  misc_feature 1..25: note = Probe
  source 1..25: mol_type = other DNA
caaagcacccaacttacacttagga

SEQ ID NO: 3978 - DNA, 27 bp, synthetic construct
  misc_feature 1..27: note = Probe
  source 1..27: mol_type = other DNA
caaagcacccaacttacacttaggaga

SEQ ID NO: 3979 - DNA, 28 bp, synthetic construct
  misc_feature 1..28: note = Probe
  source 1..28: mol_type = other DNA
caaagcacccaacttacacttaggagat

SEQ ID NO: 3980 - DNA, 29 bp, synthetic construct
  misc_feature 1..29: note = Probe
  source 1..29: mol_type = other DNA
caaagcacccaacttacacttaggagatt

SEQ ID NO: 3981 - DNA, 32 bp, synthetic construct
  misc_feature 1..32: note = Probe
  source 1..32: mol_type = other DNA
caaagcacccaacttacacttaggagatttca

SEQ ID NO: 3982 - DNA, 33 bp, synthetic construct
  misc_feature 1..33: note = Probe
  source 1..33: mol_type = other DNA
caaagcacccaacttacacttaggagatttcaa

SEQ ID NO: 3983 - DNA, 34 bp, synthetic construct
  misc_feature 1..34: note = Probe
  source 1..34: mol_type = other DNA
caaagcacccaacttacacttaggagatttcaac

SEQ ID NO: 3984 - DNA, 35 bp, synthetic construct
  misc_feature 1..35: note = Probe
  source 1..35: mol_type = other DNA
caaagcacccaacttacacttaggagatttcaact

SEQ ID NO: 3985 - DNA, 36 bp, synthetic construct
  misc_feature 1..36: note = Probe
  source 1..36: mol_type = other DNA
caaagcacccaacttacacttaggagatttcaactt

SEQ ID NO: 3986 - DNA, 43 bp, synthetic construct
  misc_feature 1..43: note = Probe
  source 1..43: mol_type = other DNA
caaagcacccaacttacacttaggagatttcaacttaacttga

SEQ ID NO: 3987 - DNA, 49 bp, synthetic construct
  misc_feature 1..49: note = Probe
  source 1..49: mol_type = other DNA
caaagcacccaacttacacttaggagatttcaacttaacttgaccgctc

SEQ ID NO: 3988 - DNA, 31 bp, synthetic construct
  misc_feature 1..31: note = Probe
  source 1..31: mol_type = other DNA
caaagttaaattataggctaaatcctatata

SEQ ID NO: 3989 - DNA, 31 bp, synthetic construct
  misc_feature 1..31: note = Probe
  source 1..31: mol_type = other DNA
caaattcgaagaagcagcttcaaacctgccg

SEQ ID NO: 3990 - DNA, 32 bp, synthetic construct
  misc_feature 1..32: note = Probe
  source 1..32: mol_type = other DNA
caaattcgaagaagcagcttcaaacctgccgg

SEQ ID NO: 3991 - DNA, 35 bp, synthetic construct
  misc_feature 1..35: note = Probe
  source 1..35: mol_type = other DNA
caaattcgaagaagcagcttcaaacctgccggggc

SEQ ID NO: 3992 - DNA, 36 bp, synthetic construct
  misc_feature 1..36: note = Probe
  source 1..36: mol_type = other DNA
caaattcgaagaagcagcttcaaacctgccggggct

SEQ ID NO: 3993 - DNA, 37 bp, synthetic construct
  misc_feature 1..37: note = Probe
  source 1..37: mol_type = other DNA
caaattcgaagaagcagcttcaaacctgccggggctt

SEQ ID NO: 3994 - DNA, 39 bp, synthetic construct
  misc_feature 1..39: note = Probe
  source 1..39: mol_type = other DNA
caaattcgaagaagcagcttcaaacctgccggggcttct

SEQ ID NO: 3995 - DNA, 40 bp, synthetic construct
  misc_feature 1..40: note = Probe
  source 1..40: mol_type = other DNA
caaattcgaagaagcagcttcaaacctgccggggcttctc

SEQ ID NO: 3996 - DNA, 20 bp, synthetic construct
  misc_feature 1..20: note = Probe
  source 1..20: mol_type = other DNA
caacacctctttacagtgaa

SEQ ID NO: 3997 - DNA, 21 bp, synthetic construct
  misc_feature 1..21: note = Probe
  source 1..21: mol_type = other DNA
caacacctctttacagtgaaa

SEQ ID NO: 3998 - DNA, 22 bp, synthetic construct
  misc_feature 1..22: note = Probe
  source 1..22: mol_type = other DNA
caacacctctttacagtgaaat

SEQ ID NO: 3999 - DNA, 23 bp, synthetic construct
  misc_feature 1..23: note = Probe
  source 1..23: mol_type = other DNA
caacagaggcttacgacccctta

SEQ ID NO: 4000 - DNA, 25 bp, synthetic construct
  misc_feature 1..25: note = Probe
  source 1..25: mol_type = other DNA
caacagaggcttacgaccccttatt

SEQ ID NO: 4001 - DNA, 30 bp, synthetic construct
  misc_feature 1..30: note = Probe
  source 1..30: mol_type = other DNA
caacagaggcttacgaccccttatttaccg

SEQ ID NO: 4002 - DNA, 31 bp, synthetic construct
  misc_feature 1..31: note = Probe
  source 1..31: mol_type = other DNA
caacagaggcttacgaccccttatttaccga

SEQ ID NO: 4003 - DNA, 32 bp, synthetic construct
  misc_feature 1..32: note = Probe
  source 1..32: mol_type = other DNA
caacagaggcttacgaccccttatttaccgag

SEQ ID NO: 4004 - DNA, 15 bp, synthetic construct
  misc_feature 1..15: note = Probe
  source 1..15: mol_type = other DNA
caaccccatggcctc

SEQ ID NO: 4005 - DNA, 15 bp, synthetic construct
  misc_feature 1..15: note = Probe
  source 1..15: mol_type = other DNA
caacccgtcatctac

SEQ ID NO: 4006 - DNA, 31 bp, synthetic construct
  misc_feature 1..31: note = Probe
  source 1..31: mol_type = other DNA
caacctcggttcgaatccgagtcacggcaaa

SEQ ID NO: 4007 - DNA, 31 bp, synthetic construct
  misc_feature 1..31: note = Probe
  source 1..31: mol_type = other DNA
caacctcggttcgaatccgagtcacggcagg

SEQ ID NO: 4008 - DNA, 32 bp, synthetic construct
  misc_feature 1..32: note = Probe
  source 1..32: mol_type = other DNA
caacctcggttcgaatccgagtcacggcaggt

SEQ ID NO: 4009 - DNA, 31 bp, synthetic construct
  misc_feature 1..31: note = Probe
  source 1..31: mol_type = other DNA
caacctcggttcgaatccgagtcacggcatt

SEQ ID NO: 4010 - DNA, 32 bp, synthetic construct
  misc_feature 1..32: note = Probe
  source 1..32: mol_type = other DNA
caacctcggttcgaatccgagtcacggcattg

SEQ ID NO: 4011 - DNA, 50 bp, synthetic construct
  misc_feature 1..50: note = Probe
  source 1..50: mol_type = other DNA
caacgatggtttttcatatcattggtcgtggttgtagtccgtgcgagaat

SEQ ID NO: 4012 - DNA, 17 bp, synthetic construct
  misc_feature 1..17: note = Probe
  source 1..17: mol_type = other DNA
caacttaacttgaccgc

SEQ ID NO: 4013 - DNA, 18 bp, synthetic construct
  misc_feature 1..18: note = Probe
  source 1..18: mol_type = other DNA
caacttaacttgaccgct

SEQ ID NO: 4014 - DNA, 19 bp, synthetic construct
  misc_feature 1..19: note = Probe
  source 1..19: mol_type = other DNA
caacttaacttgaccgctc

SEQ ID NO: 4015 - DNA, 22 bp, synthetic construct
  misc_feature 1..22: note = Probe
  source 1..22: mol_type = other DNA
caacttaacttgaccgctctga

SEQ ID NO: 4016 - DNA, 23 bp, synthetic construct
  misc_feature 1..23: note = Probe
  source 1..23: mol_type = other DNA
caacttaacttgaccgctctgag

SEQ ID NO: 4017 - DNA, 24 bp, synthetic construct
  misc_feature 1..24: note = Probe
  source 1..24: mol_type = other DNA
caacttaacttgaccgctctgagc

SEQ ID NO: 4018 - DNA, 25 bp, synthetic construct
  misc_feature 1..25: note = Probe
  source 1..25: mol_type = other DNA
caacttaacttgaccgctctgagct

SEQ ID NO: 4019 - DNA, 17 bp, synthetic construct
  misc_feature 1..17: note = Probe
  source 1..17: mol_type = other DNA
caacttacacttaggag

SEQ ID NO: 4020 - DNA, 20 bp, synthetic construct
  misc_feature 1..20: note = Probe
  source 1..20: mol_type = other DNA
caacttacacttaggagatt

SEQ ID NO: 4021 - DNA, 22 bp, synthetic construct
  misc_feature 1..22: note = Probe
  source 1..22: mol_type = other DNA
caacttacacttaggagatttc

SEQ ID NO: 4022 - DNA, 23 bp, synthetic construct
  misc_feature 1..23: note = Probe
  source 1..23: mol_type = other DNA
caacttacacttaggagatttca

SEQ ID NO: 4023 - DNA, 25 bp, synthetic construct
  misc_feature 1..25: note = Probe
  source 1..25: mol_type = other DNA
caacttacacttaggagatttcaac

SEQ ID NO: 4024 - DNA, 33 bp, synthetic construct
  misc_feature 1..33: note = Probe
  source 1..33: mol_type = other DNA
caacttacacttaggagatttcaacttaacttg

SEQ ID NO: 4025 - DNA, 35 bp, synthetic construct
  misc_feature 1..35: note = Probe
  source 1..35: mol_type = other DNA
caacttacacttaggagatttcaacttaacttgac

SEQ ID NO: 4026 - DNA, 37 bp, synthetic construct
  misc_feature 1..37: note = Probe
  source 1..37: mol_type = other DNA
caacttacacttaggagatttcaacttaacttgaccg

SEQ ID NO: 4027 - DNA, 39 bp, synthetic construct
  misc_feature 1..39: note = Probe
  source 1..39: mol_type = other DNA
caacttacacttaggagatttcaacttaacttgaccgct

SEQ ID NO: 4028 - DNA, 41 bp, synthetic construct
  misc_feature 1..41: note = Probe
  source 1..41: mol_type = other DNA
caacttacacttaggagatttcaacttaacttgaccgctct

SEQ ID NO: 4029 - DNA, 43 bp, synthetic construct
  misc_feature 1..43: note = Probe
  source 1..43: mol_type = other DNA
caacttacacttaggagatttcaacttaacttgaccgctctga

SEQ ID NO: 4030 - DNA, 44 bp, synthetic construct
  misc_feature 1..44: note = Probe
  source 1..44: mol_type = other DNA
caacttacacttaggagatttcaacttaacttgaccgctctgag

SEQ ID NO: 4031 - DNA, 45 bp, synthetic construct
  misc_feature 1..45: note = Probe
  source 1..45: mol_type = other DNA
caacttacacttaggagatttcaacttaacttgaccgctctgagc

SEQ ID NO: 4032 - DNA, 46 bp, synthetic construct
  misc_feature 1..46: note = Probe
  source 1..46: mol_type = other DNA
caacttacacttaggagatttcaacttaacttgaccgctctgagct

SEQ ID NO: 4033 - DNA, 49 bp, synthetic construct
  misc_feature 1..49: note = Probe
  source 1..49: mol_type = other DNA
caacttacacttaggagatttcaacttaacttgaccgctctgagctaaa

SEQ ID NO: 4034 - DNA, 50 bp, synthetic construct
  misc_feature 1..50: note = Probe
  source 1..50: mol_type = other DNA
caacttacacttaggagatttcaacttaacttgaccgctctgagctaaac

SEQ ID NO: 4035 - DNA, 39 bp, synthetic construct
  misc_feature 1..39: note = Probe
  source 1..39: mol_type = other DNA
caagaacagggtttgttaagatggcagagcccggtaatc

SEQ ID NO: 4036 - DNA, 19 bp, synthetic construct
  misc_feature 1..19: note = Probe
  source 1..19: mol_type = other DNA
caagaactgctaactcatg

SEQ ID NO: 4037 - DNA, 20 bp, synthetic construct
  misc_feature 1..20: note = Probe
  source 1..20: mol_type = other DNA
caagaactgctaactcatgc

SEQ ID NO: 4038 - DNA, 29 bp, synthetic construct
  misc_feature 1..29: note = Probe
  source 1..29: mol_type = other DNA
caagaactgctaactcatgcccccatgtc

SEQ ID NO: 4039 - DNA, 31 bp, synthetic construct
  misc_feature 1..31: note = Probe
  source 1..31: mol_type = other DNA
caagaactgctaactcatgcccccatgtcta

SEQ ID NO: 4040 - DNA, 41 bp, synthetic construct
  misc_feature 1..41: note = Probe
  source 1..41: mol_type = other DNA
caagaactgctaactcatgcccccatgtctaacaacatggc

SEQ ID NO: 4041 - DNA, 43 bp, synthetic construct
  misc_feature 1..43: note = Probe
  source 1..43: mol_type = other DNA
caagaactgctaactcatgcccccatgtctaacaacatggctt

SEQ ID NO: 4042 - DNA, 48 bp, synthetic construct
  misc_feature 1..48: note = Probe
  source 1..48: mol_type = other DNA
caagaactgctaactcatgcccccatgtctaacaacatggctttctca

SEQ ID NO: 4043 - DNA, 49 bp, synthetic construct
  misc_feature 1..49: note = Probe
  source 1..49: mol_type = other DNA
caagaactgctaactcatgcccccatgtctaacaacatggctttctcaa

SEQ ID NO: 4044 - DNA, 50 bp, synthetic construct
  misc_feature 1..50: note = Probe
  source 1..50: mol_type = other DNA
caagaactgctaactcatgcccccatgtctaacaacatggctttctcaac

SEQ ID NO: 4045 - DNA, 16 bp, synthetic construct
  misc_feature 1..16: note = Probe
  source 1..16: mol_type = other DNA
caagagccttcaaagc

SEQ ID NO: 4046 - DNA, 17 bp, synthetic construct
  misc_feature 1..17: note = Probe
  source 1..17: mol_type = other DNA
caagagccttcaaagcc

SEQ ID NO: 4047 - DNA, 18 bp, synthetic construct
  misc_feature 1..18: note = Probe
  source 1..18: mol_type = other DNA
caagagccttcaaagccc

SEQ ID NO: 4048 - DNA, 20 bp, synthetic construct
  misc_feature 1..20: note = Probe
  source 1..20: mol_type = other DNA
caagagccttcaaagccctc

SEQ ID NO: 4049 - DNA, 30 bp, synthetic construct
  misc_feature 1..30: note = Probe
  source 1..30: mol_type = other DNA
caagagccttcaaagccctcagtaagttgc

SEQ ID NO: 4050 - DNA, 50 bp, synthetic construct
  misc_feature 1..50: note = Probe
  source 1..50: mol_type = other DNA
caagagccttcaaagccctcagtaagttgcaatacttaatttctgtaaca

SEQ ID NO: 4051 - DNA, 17 bp, synthetic construct
  misc_feature 1..17: note = Probe
  source 1..17: mol_type = other DNA
caagaggtccccggttc

SEQ ID NO: 4052 - DNA, 24 bp, synthetic construct
  misc_feature 1..24: note = Probe
  source 1..24: mol_type = other DNA
caagcagttgacccgggttcgatt

SEQ ID NO: 4053 - DNA, 40 bp, synthetic construct
  misc_feature 1..40: note = Probe
  source 1..40: mol_type = other DNA
caatacactgaaaatgtttagacgggctcacatcacccca

SEQ ID NO: 4054 - DNA, 49 bp, synthetic construct
  misc_feature 1..49: note = Probe
  source 1..49: mol_type = other DNA
caatacactgaaaatgtttagacgggctcacatcaccccataaacaaat

SEQ ID NO: 4055 - DNA, 50 bp, synthetic construct
  misc_feature 1..50: note = Probe
  source 1..50: mol_type = other DNA
caatacactgaaaatgtttagacgggctcacatcaccccataaacaaata

SEQ ID NO: 4056 - DNA, 17 bp, synthetic construct
  misc_feature 1..17: note = Probe
  source 1..17: mol_type = other DNA
caatggacatatgtccg

SEQ ID NO: 4057 - DNA, 45 bp, synthetic construct
  misc_feature 1..45: note = Probe
  source 1..45: mol_type = other DNA
caatggggtttccccgcacaggttcgaatcctgttcgtgacgggt

SEQ ID NO: 4058 - DNA, 33 bp, synthetic construct
  misc_feature 1..33: note = Probe
  source 1..33: mol_type = other DNA
caattaactagttttgacaacattcaaaaaaga

SEQ ID NO: 4059 - DNA, 37 bp, synthetic construct
  misc_feature 1..37: note = Probe
  source 1..37: mol_type = other DNA
caattaactagttttgacaacattcaaaaaagagtaa

SEQ ID NO: 4060 - DNA, 38 bp, synthetic construct
  misc_feature 1..38: note = Probe
  source 1..38: mol_type = other DNA
caattaactagttttgacaacattcaaaaaagagtaat

SEQ ID NO: 4061 - DNA, 39 bp, synthetic construct
  misc_feature 1..39: note = Probe
  source 1..39: mol_type = other DNA
caattaactagttttgacaacattcaaaaaagagtaata

SEQ ID NO: 4062 - DNA, 21 bp, synthetic construct
  misc_feature 1..21: note = Probe
  source 1..21: mol_type = other DNA
caattccccgacggggaggtg

SEQ ID NO: 4063 - DNA, 21 bp, synthetic construct
  misc_feature 1..21: note = Probe
  source 1..21: mol_type = other DNA
caattcccggtcagggaacca

SEQ ID NO: 4064 - DNA, 16 bp, synthetic construct
  misc_feature 1..16: note = Probe
  source 1..16: mol_type = other DNA
cacaaagcacccaact

SEQ ID NO: 4065 - DNA, 17 bp, synthetic construct
  misc_feature 1..17: note = Probe
  source 1..17: mol_type = other DNA
cacaaagcacccaactt

SEQ ID NO: 4066 - DNA, 19 bp, synthetic construct
  misc_feature 1..19: note = Probe
  source 1..19: mol_type = other DNA
cacaaagcacccaacttac

SEQ ID NO: 4067 - DNA, 20 bp, synthetic construct
  misc_feature 1..20: note = Probe
  source 1..20: mol_type = other DNA
cacaaagcacccaacttaca

SEQ ID NO: 4068 - DNA, 22 bp, synthetic construct
  misc_feature 1..22: note = Probe
  source 1..22: mol_type = other DNA
cacaaagcacccaacttacact

SEQ ID NO: 4069 - DNA, 23 bp, synthetic construct
  misc_feature 1..23: note = Probe
  source 1..23: mol_type = other DNA
cacaaagcacccaacttacactt

SEQ ID NO: 4070 - DNA, 24 bp, synthetic construct
  misc_feature 1..24: note = Probe
  source 1..24: mol_type = other DNA
cacaaagcacccaacttacactta

SEQ ID NO: 4071 - DNA, 25 bp, synthetic construct
  misc_feature 1..25: note = Probe
  source 1..25: mol_type = other DNA
cacaaagcacccaacttacacttag

SEQ ID NO: 4072 - DNA, 27 bp, synthetic construct
  misc_feature 1..27: note = Probe
  source 1..27: mol_type = other DNA
cacaaagcacccaacttacacttagga

SEQ ID NO: 4073 - DNA, 29 bp, synthetic construct
  misc_feature 1..29: note = Probe
  source 1..29: mol_type = other DNA
cacaaagcacccaacttacacttaggaga

SEQ ID NO: 4074 - DNA, 31 bp, synthetic construct
  misc_feature 1..31: note = Probe
  source 1..31: mol_type = other DNA
cacaaagcacccaacttacacttaggagatt

SEQ ID NO: 4075 - DNA, 33 bp, synthetic construct
  misc_feature 1..33: note = Probe
  source 1..33: mol_type = other DNA
cacaaagcacccaacttacacttaggagatttc

SEQ ID NO: 4076 - DNA, 34 bp, synthetic construct
  misc_feature 1..34: note = Probe
  source 1..34: mol_type = other DNA
cacaaagcacccaacttacacttaggagatttca

SEQ ID NO: 4077 - DNA, 35 bp, synthetic construct
  misc_feature 1..35: note = Probe
  source 1..35: mol_type = other DNA
cacaaagcacccaacttacacttaggagatttcaa

SEQ ID NO: 4078 - DNA, 36 bp, synthetic construct
  misc_feature 1..36: note = Probe
  source 1..36: mol_type = other DNA
cacaaagcacccaacttacacttaggagatttcaac

SEQ ID NO: 4079 - DNA, 38 bp, synthetic construct
  misc_feature 1..38: note = Probe
  source 1..38: mol_type = other DNA
cacaaagcacccaacttacacttaggagatttcaactt

SEQ ID NO: 4080 - DNA, 39 bp, synthetic construct
  misc_feature 1..39: note = Probe
  source 1..39: mol_type = other DNA
cacaaagcacccaacttacacttaggagatttcaactta

SEQ ID NO: 4081 - DNA, 45 bp, synthetic construct
  misc_feature 1..45: note = Probe
  source 1..45: mol_type = other DNA
cacaaagcacccaacttacacttaggagatttcaacttaacttga

SEQ ID NO: 4082 - DNA, 46 bp, synthetic construct
  misc_feature 1..46: note = Probe
  source 1..46: mol_type = other DNA
cacaaagcacccaacttacacttaggagatttcaacttaacttgac

SEQ ID NO: 4083 - DNA, 47 bp, synthetic construct
  misc_feature 1..47: note = Probe
  source 1..47: mol_type = other DNA
cacaaagcacccaacttacacttaggagatttcaacttaacttgacc

SEQ ID NO: 4084 - DNA, 48 bp, synthetic construct
  misc_feature 1..48: note = Probe
  source 1..48: mol_type = other DNA
cacaaagcacccaacttacacttaggagatttcaacttaacttgaccg

SEQ ID NO: 4085 - DNA, 49 bp, synthetic construct
  misc_feature 1..49: note = Probe
  source 1..49: mol_type = other DNA
cacaaagcacccaacttacacttaggagatttcaacttaacttgaccgc

SEQ ID NO: 4086 - DNA, 20 bp, synthetic construct
  misc_feature 1..20: note = Probe
  source 1..20: mol_type = other DNA
cacaagaactgctaactcat

SEQ ID NO: 4087 - DNA, 21 bp, synthetic construct
  misc_feature 1..21: note = Probe
  source 1..21: mol_type = other DNA
cacaagaactgctaactcatg

SEQ ID NO: 4088 - DNA, 27 bp, synthetic construct
  misc_feature 1..27: note = Probe
  source 1..27: mol_type = other DNA
cacaagaactgctaactcatgccccca

SEQ ID NO: 4089 - DNA, 31 bp, synthetic construct
  misc_feature 1..31: note = Probe
  source 1..31: mol_type = other DNA
cacaagaactgctaactcatgcccccatgtc

SEQ ID NO: 4090 - DNA, 32 bp, synthetic construct
  misc_feature 1..32: note = Probe
  source 1..32: mol_type = other DNA
cacaagaactgctaactcatgcccccatgtct

SEQ ID NO: 4091 - DNA, 47 bp, synthetic construct
  misc_feature 1..47: note = Probe
  source 1..47: mol_type = other DNA
cacaagaactgctaactcatgcccccatgtctaacaacatggctttc

SEQ ID NO: 4092 - DNA, 48 bp, synthetic construct
  misc_feature 1..48: note = Probe
  source 1..48: mol_type = other DNA
cacaagaactgctaactcatgcccccatgtctaacaacatggctttct

SEQ ID NO: 4093 - DNA, 49 bp, synthetic construct
  misc_feature 1..49: note = Probe
  source 1..49: mol_type = other DNA
cacaagaactgctaactcatgcccccatgtctaacaacatggctttctc

SEQ ID NO: 4094 - DNA, 24 bp, synthetic construct
  misc_feature 1..24: note = Probe
  source 1..24: mol_type = other DNA
cacacccacccaagaacagggttt

SEQ ID NO: 4095 - DNA, 25 bp, synthetic construct
  misc_feature 1..25: note = Probe
  source 1..25: mol_type = other DNA
cacacccacccaagaacagggtttg

SEQ ID NO: 4096 - DNA, 27 bp, synthetic construct
  misc_feature 1..27: note = Probe
  source 1..27: mol_type = other DNA
cacacccacccaagaacagggtttgtt

SEQ ID NO: 4097 - DNA, 28 bp, synthetic construct
  misc_feature 1..28: note = Probe
  source 1..28: mol_type = other DNA
cacacccacccaagaacagggtttgtta

SEQ ID NO: 4098 - DNA, 20 bp, synthetic construct
  misc_feature 1..20: note = Probe
  source 1..20: mol_type = other DNA
cacacggggcacaataattt

SEQ ID NO: 4099 - DNA, 18 bp, synthetic construct
  misc_feature 1..18: note = Probe
  source 1..18: mol_type = other DNA
cacatcaccccataaaca

SEQ ID NO: 4100 - DNA, 19 bp, synthetic construct
  misc_feature 1..19: note = Probe
  source 1..19: mol_type = other DNA
cacatcaccccataaacaa

SEQ ID NO: 4101 - DNA, 20 bp, synthetic construct
  misc_feature 1..20: note = Probe
  source 1..20: mol_type = other DNA
cacatcaccccataaacaaa

SEQ ID NO: 4102 - DNA, 21 bp, synthetic construct
  misc_feature 1..21: note = Probe
  source 1..21: mol_type = other DNA
cacatcaccccataaacaaat

SEQ ID NO: 4103 - DNA, 26 bp, synthetic construct
  misc_feature 1..26: note = Probe
  source 1..26: mol_type = other DNA
cacatggtctagcggttaggattcct

SEQ ID NO: 4104 - DNA, 29 bp, synthetic construct
  misc_feature 1..29: note = Probe
  source 1..29: mol_type = other DNA
cacatggtctagcggttaggattcctggt

SEQ ID NO: 4105 - DNA, 34 bp, synthetic construct
  misc_feature 1..34: note = Probe
  source 1..34: mol_type = other DNA
cacatggtctagcggttaggattcctggttttca

SEQ ID NO: 4106 - DNA, 17 bp, synthetic construct
  misc_feature 1..17: note = Probe
  source 1..17: mol_type = other DNA
cacccaacttacactta

SEQ ID NO: 4107 - DNA, 23 bp, synthetic construct
  misc_feature 1..23: note = Probe
  source 1..23: mol_type = other DNA
cacccaacttacacttaggagat

SEQ ID NO: 4108 - DNA, 27 bp, synthetic construct
  misc_feature 1..27: note = Probe
  source 1..27: mol_type = other DNA
cacccaacttacacttaggagatttca

SEQ ID NO: 4109 - DNA, 32 bp, synthetic construct
  misc_feature 1..32: note = Probe
  source 1..32: mol_type = other DNA
cacccaacttacacttaggagatttcaactta

SEQ ID NO: 4110 - DNA, 39 bp, synthetic construct
  misc_feature 1..39: note = Probe
  source 1..39: mol_type = other DNA
cacccaacttacacttaggagatttcaacttaacttgac

SEQ ID NO: 4111 - DNA, 41 bp, synthetic construct
  misc_feature 1..41: note = Probe
  source 1..41: mol_type = other DNA
cacccaacttacacttaggagatttcaacttaacttgaccg

SEQ ID NO: 4112 - DNA, 48 bp, synthetic construct
  misc_feature 1..48: note = Probe
  source 1..48: mol_type = other DNA
cacccaacttacacttaggagatttcaacttaacttgaccgctctgag

SEQ ID NO: 4113 - DNA, 49 bp, synthetic construct
  misc_feature 1..49: note = Probe
  source 1..49: mol_type = other DNA
cacccaacttacacttaggagatttcaacttaacttgaccgctctgagc

SEQ ID NO: 4114 - DNA, 50 bp, synthetic construct
  misc_feature 1..50: note = Probe
  source 1..50: mol_type = other DNA
cacccaacttacacttaggagatttcaacttaacttgaccgctctgagct

SEQ ID NO: 4115 - DNA, 23 bp, synthetic construct
  misc_feature 1..23: note = Probe
  source 1..23: mol_type = other DNA
cacccacccaagaacagggtttg

SEQ ID NO: 4116 - DNA, 26 bp, synthetic construct
  misc_feature 1..26: note = Probe
  source 1..26: mol_type = other DNA
cacccacccaagaacagggtttgtta

SEQ ID NO: 4117 - DNA, 22 bp, synthetic construct
  misc_feature 1..22: note = Probe
  source 1..22: mol_type = other DNA
cacctcagaaggtctcactttt

SEQ ID NO: 4118 - DNA, 17 bp, synthetic construct
  misc_feature 1..17: note = Probe
  source 1..17: mol_type = other DNA
cacctctttacagtgaa

SEQ ID NO: 4119 - DNA, 23 bp, synthetic construct
  misc_feature 1..23: note = Probe
  source 1..23: mol_type = other DNA
cacgcagaaggtcctgggttcga

SEQ ID NO: 4120 - DNA, 24 bp, synthetic construct
  misc_feature 1..24: note = Probe
  source 1..24: mol_type = other DNA
cacgcagaaggtcctgggttcgag

SEQ ID NO: 4121 - DNA, 40 bp, synthetic construct
  misc_feature 1..40: note = Probe
  source 1..40: mol_type = other DNA
cacgcagaaggtcctgggttcgagccccagtggaaccacg

SEQ ID NO: 4122 - DNA, 41 bp, synthetic construct
  misc_feature 1..41: note = Probe
  source 1..41: mol_type = other DNA
cacgcagaaggtcctgggttcgagccccagtggaaccacgg

SEQ ID NO: 4123 - DNA, 24 bp, synthetic construct
  misc_feature 1..24: note = Probe
  source 1..24: mol_type = other DNA
cacgcgaaaggtccccggttcgaa

SEQ ID NO: 4124 - DNA, 24 bp, synthetic construct
  misc_feature 1..24: note = Probe
  source 1..24: mol_type = other DNA
cacgcgaaaggtccccggttcgat

SEQ ID NO: 4125 - DNA, 20 bp, synthetic construct
  misc_feature 1..20: note = Probe
  source 1..20: mol_type = other DNA
cacgcgggagaccggggttc

SEQ ID NO: 4126 - DNA, 30 bp, synthetic construct
  misc_feature 1..30: note = Probe
  source 1..30: mol_type = other DNA
cacgcgggagaccggggttcaattccccga

SEQ ID NO: 4127 - DNA, 31 bp, synthetic construct
  misc_feature 1..31: note = Probe
  source 1..31: mol_type = other DNA
cacgcgggagaccggggttcaattccccgac

SEQ ID NO: 4128 - DNA, 34 bp, synthetic construct
  misc_feature 1..34: note = Probe
  source 1..34: mol_type = other DNA
cacgcgggagaccggggttcaattccccgacggg

SEQ ID NO: 4129 - DNA, 38 bp, synthetic construct
  misc_feature 1..38: note = Probe
  source 1..38: mol_type = other DNA
cacgcgggagaccggggttcaattccccgacggggagg

SEQ ID NO: 4130 - DNA, 39 bp, synthetic construct
  misc_feature 1..39: note = Probe
  source 1..39: mol_type = other DNA
cacgcgggagaccggggttcaattccccgacggggaggt

SEQ ID NO: 4131 - DNA, 40 bp, synthetic construct
  misc_feature 1..40: note = Probe
  source 1..40: mol_type = other DNA
cacgcgggagaccggggttcaattccccgacggggaggtg

SEQ ID NO: 4132 - DNA, 41 bp, synthetic construct
  misc_feature 1..41: note = Probe
  source 1..41: mol_type = other DNA
cacgcgggagaccggggttcaattccccgacggggaggtgt

SEQ ID NO: 4133 - DNA, 22 bp, synthetic construct
  misc_feature 1..22: note = Probe
  source 1..22: mol_type = other DNA
cacgcgggagaccggggttcga

SEQ ID NO: 4134 - DNA, 23 bp, synthetic construct
  misc_feature 1..23: note = Probe
  source 1..23: mol_type = other DNA
cacgcgggagaccggggttcgat

SEQ ID NO: 4135 - DNA, 24 bp, synthetic construct
  misc_feature 1..24: note = Probe
  source 1..24: mol_type = other DNA
cacgcgggagaccggggttcgatt

SEQ ID NO: 4136 - DNA, 49 bp, synthetic construct
  misc_feature 1..49: note = Probe
  source 1..49: mol_type = other DNA
cacgcgggagaccggggttcgattccccaacggggaggctaataatgtt

SEQ ID NO: 4137 - DNA, 38 bp, synthetic construct
  misc_feature 1..38: note = Probe
  source 1..38: mol_type = other DNA
cacgcgggagaccggggttcgattccccgacggggaga

SEQ ID NO: 4138 - DNA, 39 bp, synthetic construct
  misc_feature 1..39: note = Probe
  source 1..39: mol_type = other DNA
cacgcgggagaccggggttcgattccccgacggggagaa

SEQ ID NO: 4139 - DNA, 40 bp, synthetic construct
  misc_feature 1..40: note = Probe
  source 1..40: mol_type = other DNA
cacgcgggagaccggggttcgattccccgacggggagaaa

SEQ ID NO: 4140 - DNA, 41 bp, synthetic construct
  misc_feature 1..41: note = Probe
  source 1..41: mol_type = other DNA
cacgcgggagaccggggttcgattccccgacggggagaaaa

SEQ ID NO: 4141 - DNA, 46 bp, synthetic construct
  misc_feature 1..46: note = Probe
  source 1..46: mol_type = other DNA
cacgcgggagaccggggttcgattccccgacggggagaaaagttgc

SEQ ID NO: 4142 - DNA, 48 bp, synthetic construct
  misc_feature 1..48: note = Probe
  source 1..48: mol_type = other DNA
cacgcgggagaccggggttcgattccccgacggggagaaaagttgctt

SEQ ID NO: 4143 - DNA, 50 bp, synthetic construct
  misc_feature 1..50: note = Probe
  source 1..50: mol_type = other DNA
cacgcgggagaccggggttcgattccccgacggggagaaaagttgctttt

SEQ ID NO: 4144 - DNA, 39 bp, synthetic construct
  misc_feature 1..39: note = Probe
  source 1..39: mol_type = other DNA
cacgcgggagaccggggttcgattccccgacggggagac

SEQ ID NO: 4145 - DNA, 40 bp, synthetic construct
  misc_feature 1..40: note = Probe
  source 1..40: mol_type = other DNA
cacgcgggagaccggggttcgattccccgacggggagacg

SEQ ID NO: 4146 - DNA, 39 bp, synthetic construct
  misc_feature 1..39: note = Probe
  source 1..39: mol_type = other DNA
cacgcgggagaccggggttcgattccccgacggggagag

SEQ ID NO: 4147 - DNA, 40 bp, synthetic construct
  misc_feature 1..40: note = Probe
  source 1..40: mol_type = other DNA
cacgcgggagaccggggttcgattccccgacggggagagt

SEQ ID NO: 4148 - DNA, 41 bp, synthetic construct
  misc_feature 1..41: note = Probe
  source 1..41: mol_type = other DNA
cacgcgggagaccggggttcgattccccgacggggagagta

SEQ ID NO: 4149 - DNA, 38 bp, synthetic construct
  misc_feature 1..38: note = Probe
  source 1..38: mol_type = other DNA
cacgcgggagaccggggttcgattccccgacggggagg

SEQ ID NO: 4150 - DNA, 39 bp, synthetic construct
  misc_feature 1..39: note = Probe
  source 1..39: mol_type = other DNA
cacgcgggagaccggggttcgattccccgacggggagga

SEQ ID NO: 4151 - DNA, 40 bp, synthetic construct
  misc_feature 1..40: note = Probe
  source 1..40: mol_type = other DNA
cacgcgggagaccggggttcgattccccgacggggaggag

SEQ ID NO: 4152 - DNA, 41 bp, synthetic construct
  misc_feature 1..41: note = Probe
  source 1..41: mol_type = other DNA
cacgcgggagaccggggttcgattccccgacggggaggagg

SEQ ID NO: 4153 - DNA, 50 bp, synthetic construct
  misc_feature 1..50: note = Probe
  source 1..50: mol_type = other DNA
cacgcgggagaccggggttcgattccccgacggggaggaggcttaaactt

SEQ ID NO: 4154 - DNA, 39 bp, synthetic construct
  misc_feature 1..39: note = Probe
  source 1..39: mol_type = other DNA
cacgcgggagaccggggttcgattccccgacggggaggc

SEQ ID NO: 4155 - DNA, 40 bp, synthetic construct
  misc_feature 1..40: note = Probe
  source 1..40: mol_type = other DNA
cacgcgggagaccggggttcgattccccgacggggaggca

SEQ ID NO: 4156 - DNA, 41 bp, synthetic construct
  misc_feature 1..41: note = Probe
  source 1..41: mol_type = other DNA
cacgcgggagaccggggttcgattccccgacggggaggcac

SEQ ID NO: 4157 - DNA, 43 bp, synthetic construct
  misc_feature 1..43: note = Probe
  source 1..43: mol_type = other DNA
cacgcgggagaccggggttcgattccccgacggggaggcacag

SEQ ID NO: 4158 - DNA, 46 bp, synthetic construct
  misc_feature 1..46: note = Probe
  source 1..46: mol_type = other DNA
cacgcgggagaccggggttcgattccccgacggggaggcacagtaa

SEQ ID NO: 4159 - DNA, 47 bp, synthetic construct
  misc_feature 1..47: note = Probe
  source 1..47: mol_type = other DNA
cacgcgggagaccggggttcgattccccgacggggaggcacagtaat

SEQ ID NO: 4160 - DNA, 48 bp, synthetic construct
  misc_feature 1..48: note = Probe
  source 1..48: mol_type = other DNA
cacgcgggagaccggggttcgattccccgacggggaggcacagtaatt

SEQ ID NO: 4161 - DNA, 49 bp, synthetic construct
  misc_feature 1..49: note = Probe
  source 1..49: mol_type = other DNA
cacgcgggagaccggggttcgattccccgacggggaggcacagtaattg

SEQ ID NO: 4162 - DNA, 50 bp, synthetic construct
  misc_feature 1..50: note = Probe
  source 1..50: mol_type = other DNA
cacgcgggagaccggggttcgattccccgacggggaggcacagtaattgt

SEQ ID NO: 4163 - DNA, 41 bp, synthetic construct
  misc_feature 1..41: note = Probe
  source 1..41: mol_type = other DNA
cacgcgggagaccggggttcgattccccgacggggaggcag

SEQ ID NO: 4164 - DNA, 43 bp, synthetic construct
  misc_feature 1..43: note = Probe
  source 1..43: mol_type = other DNA
cacgcgggagaccggggttcgattccccgacggggaggcagcc

SEQ ID NO: 4165 - DNA, 40 bp, synthetic construct
  misc_feature 1..40: note = Probe
  source 1..40: mol_type = other DNA
cacgcgggagaccggggttcgattccccgacggggaggcc

SEQ ID NO: 4166 - DNA, 41 bp, synthetic construct
  misc_feature 1..41: note = Probe
  source 1..41: mol_type = other DNA
cacgcgggagaccggggttcgattccccgacggggaggccg

SEQ ID NO: 4167 - DNA, 42 bp, synthetic construct
  misc_feature 1..42: note = Probe
  source 1..42: mol_type = other DNA
cacgcgggagaccggggttcgattccccgacggggaggccgg

SEQ ID NO: 4168 - DNA, 43 bp, synthetic construct
  misc_feature 1..43: note = Probe
  source 1..43: mol_type = other DNA
cacgcgggagaccggggttcgattccccgacggggaggccggg

SEQ ID NO: 4169 - DNA, 44 bp, synthetic construct
  misc_feature 1..44: note = Probe
  source 1..44: mol_type = other DNA
cacgcgggagaccggggttcgattccccgacggggaggccgggt

SEQ ID NO: 4170 - DNA, 50 bp, synthetic construct
  misc_feature 1..50: note = Probe
  source 1..50: mol_type = other DNA
cacgcgggagaccggggttcgattccccgacggggaggccgggtactttc

SEQ ID NO: 4171 - DNA, 18 bp, synthetic construct
  misc_feature 1..18: note = Probe
  source 1..18: mol_type = other DNA
cacggggcacaataattt

SEQ ID NO: 4172 - DNA, 22 bp, synthetic construct
  misc_feature 1..22: note = Probe
  source 1..22: mol_type = other DNA
cactctggactctgaatccagc

SEQ ID NO: 4173 - DNA, 29 bp, synthetic construct
  misc_feature 1..29: note = Probe
  source 1..29: mol_type = other DNA
cactctggactctgaatccagcgatccga

SEQ ID NO: 4174 - DNA, 30 bp, synthetic construct
  misc_feature 1..30: note = Probe
  source 1..30: mol_type = other DNA
cactctggactctgaatccagcgatccgag

SEQ ID NO: 4175 - DNA, 49 bp, synthetic construct
  misc_feature 1..49: note = Probe
  source 1..49: mol_type = other DNA
cactctggactctgaatccagcgatccgagttcaaatctcggtggaacc

SEQ ID NO: 4176 - DNA, 50 bp, synthetic construct
  misc_feature 1..50: note = Probe
  source 1..50: mol_type = other DNA
cactctggactctgaatccagcgatccgagttcaaatctcggtggaacct

SEQ ID NO: 4177 - DNA, 27 bp, synthetic construct
  misc_feature 1..27: note = Probe
  source 1..27: mol_type = other DNA
cactgaaaatgtttagacgggctcaca

SEQ ID NO: 4178 - DNA, 20 bp, synthetic construct
  misc_feature 1..20: note = Probe
  source 1..20: mol_type = other DNA
cactgtaaagctaacttagc

SEQ ID NO: 4179 - DNA, 21 bp, synthetic construct
  misc_feature 1..21: note = Probe
  source 1..21: mol_type = other DNA
cactgtaaagctaacttagca

SEQ ID NO: 4180 - DNA, 33 bp, synthetic construct
  misc_feature 1..33: note = Probe
  source 1..33: mol_type = other DNA
cactgtaaagctaacttagcattaaccttttaa

SEQ ID NO: 4181 - DNA, 37 bp, synthetic construct
  misc_feature 1..37: note = Probe
  source 1..37: mol_type = other DNA
cactgtaaagctaacttagcattaaccttttaagtta

SEQ ID NO: 4182 - DNA, 40 bp, synthetic construct
  misc_feature 1..40: note = Probe
  source 1..40: mol_type = other DNA
cactgtaaagctaacttagcattaaccttttaagttaaag

SEQ ID NO: 4183 - DNA, 42 bp, synthetic construct
  misc_feature 1..42: note = Probe
  source 1..42: mol_type = other DNA
cactgtaaagctaacttagcattaaccttttaagttaaagat

SEQ ID NO: 4184 - DNA, 44 bp, synthetic construct
  misc_feature 1..44: note = Probe
  source 1..44: mol_type = other DNA
cactgtaaagctaacttagcattaaccttttaagttaaagatta

SEQ ID NO: 4185 - DNA, 45 bp, synthetic construct
  misc_feature 1..45: note = Probe
  source 1..45: mol_type = other DNA
cactgtaaagctaacttagcattaaccttttaagttaaagattaa

SEQ ID NO: 4186 - DNA, 48 bp, synthetic construct
  misc_feature 1..48: note = Probe
  source 1..48: mol_type = other DNA
cactgtaaagctaacttagcattaaccttttaagttaaagattaagag

SEQ ID NO: 4187 - DNA, 49 bp, synthetic construct
  misc_feature 1..49: note = Probe
  source 1..49: mol_type = other DNA
cactgtaaagctaacttagcattaaccttttaagttaaagattaagaga

SEQ ID NO: 4188 - DNA, 21 bp, synthetic construct
  misc_feature 1..21: note = Probe
  source 1..21: mol_type = other DNA
cacttaggagatttcaactta

SEQ ID NO: 4189 - DNA, 23 bp, synthetic construct
  misc_feature 1..23: note = Probe
  source 1..23: mol_type = other DNA
cacttaggagatttcaacttaac

SEQ ID NO: 4190 - DNA, 24 bp, synthetic construct
  misc_feature 1..24: note = Probe
  source 1..24: mol_type = other DNA
cacttaggagatttcaacttaact

SEQ ID NO: 4191 - DNA, 26 bp, synthetic construct
  misc_feature 1..26: note = Probe
  source 1..26: mol_type = other DNA
cacttaggagatttcaacttaacttg

SEQ ID NO: 4192 - DNA, 27 bp, synthetic construct
  misc_feature 1..27: note = Probe
  source 1..27: mol_type = other DNA
cacttaggagatttcaacttaacttga

SEQ ID NO: 4193 - DNA, 28 bp, synthetic construct
  misc_feature 1..28: note = Probe
  source 1..28: mol_type = other DNA
cacttaggagatttcaacttaacttgac

SEQ ID NO: 4194 - DNA, 29 bp, synthetic construct
  misc_feature 1..29: note = Probe
  source 1..29: mol_type = other DNA
cacttaggagatttcaacttaacttgacc

SEQ ID NO: 4195 - DNA, 30 bp, synthetic construct
  misc_feature 1..30: note = Probe
  source 1..30: mol_type = other DNA
cacttaggagatttcaacttaacttgaccg

SEQ ID NO: 4196 - DNA, 31 bp, synthetic construct
  misc_feature 1..31: note = Probe
  source 1..31: mol_type = other DNA
cacttaggagatttcaacttaacttgaccgc

SEQ ID NO: 4197 - DNA, 32 bp, synthetic construct
  misc_feature 1..32: note = Probe
  source 1..32: mol_type = other DNA
cacttaggagatttcaacttaacttgaccgct

SEQ ID NO: 4198 - DNA, 33 bp, synthetic construct
  misc_feature 1..33: note = Probe
  source 1..33: mol_type = other DNA
cacttaggagatttcaacttaacttgaccgctc

SEQ ID NO: 4199 - DNA, 34 bp, synthetic construct
  misc_feature 1..34: note = Probe
  source 1..34: mol_type = other DNA
cacttaggagatttcaacttaacttgaccgctct

SEQ ID NO: 4200 - DNA, 35 bp, synthetic construct
  misc_feature 1..35: note = Probe
  source 1..35: mol_type = other DNA
cacttaggagatttcaacttaacttgaccgctctg

SEQ ID NO: 4201 - DNA, 36 bp, synthetic construct
  misc_feature 1..36: note = Probe
  source 1..36: mol_type = other DNA
cacttaggagatttcaacttaacttgaccgctctga

SEQ ID NO: 4202 - DNA, 37 bp, synthetic construct
  misc_feature 1..37: note = Probe
  source 1..37: mol_type = other DNA
cacttaggagatttcaacttaacttgaccgctctgag

SEQ ID NO: 4203 - DNA, 38 bp, synthetic construct
  misc_feature 1..38: note = Probe
  source 1..38: mol_type = other DNA
cacttaggagatttcaacttaacttgaccgctctgagc

SEQ ID NO: 4204 - DNA, 39 bp, synthetic construct
  misc_feature 1..39: note = Probe
  source 1..39: mol_type = other DNA
cacttaggagatttcaacttaacttgaccgctctgagct

SEQ ID NO: 4205 - DNA, 40 bp, synthetic construct
  misc_feature 1..40: note = Probe
  source 1..40: mol_type = other DNA
cacttaggagatttcaacttaacttgaccgctctgagcta

SEQ ID NO: 4206 - DNA, 41 bp, synthetic construct
  misc_feature 1..41: note = Probe
  source 1..41: mol_type = other DNA
cacttaggagatttcaacttaacttgaccgctctgagctaa

SEQ ID NO: 4207 - DNA, 42 bp, synthetic construct
  misc_feature 1..42: note = Probe
  source 1..42: mol_type = other DNA
cacttaggagatttcaacttaacttgaccgctctgagctaaa

SEQ ID NO: 4208 - DNA, 44 bp, synthetic construct
  misc_feature 1..44: note = Probe
  source 1..44: mol_type = other DNA
cacttaggagatttcaacttaacttgaccgctctgagctaaacc

SEQ ID NO: 4209 - DNA, 37 bp, synthetic construct
  misc_feature 1..37: note = Probe
  source 1..37: mol_type = other DNA
cagaagattccaggttcgactcctggctggctcgttc

SEQ ID NO: 4210 - DNA, 17 bp, synthetic construct
  misc_feature 1..17: note = Probe
  source 1..17: mol_type = other DNA
cagaagattctaggttc

SEQ ID NO: 4211 - DNA, 33 bp, synthetic construct
  misc_feature 1..33: note = Probe
  source 1..33: mol_type = other DNA
cagaagattctaggttcgactcctggctggctc

SEQ ID NO: 4212 - DNA, 34 bp, synthetic construct
  misc_feature 1..34: note = Probe
  source 1..34: mol_type = other DNA
cagaagattctaggttcgactcctggctggctcg

SEQ ID NO: 4213 - DNA, 37 bp, synthetic construct
  misc_feature 1..37: note = Probe
  source 1..37: mol_type = other DNA
cagaagattctaggttcgactcctggctggctcgcga

SEQ ID NO: 4214 - DNA, 16 bp, synthetic construct
  misc_feature 1..16: note = Probe
  source 1..16: mol_type = other DNA
cagaagattgagggtt

SEQ ID NO: 4215 - DNA, 31 bp, synthetic construct
  misc_feature 1..31: note = Probe
  source 1..31: mol_type = other DNA
cagaagattgagggttcgagtcccttcgtgg

SEQ ID NO: 4216 - DNA, 33 bp, synthetic construct
  misc_feature 1..33: note = Probe
  source 1..33: mol_type = other DNA
cagaagattgagggttcgagtcccttcgtggtc

SEQ ID NO: 4217 - DNA, 34 bp, synthetic construct
  misc_feature 1..34: note = Probe
  source 1..34: mol_type = other DNA
cagaagattgagggttcgagtcccttcgtggtcg

SEQ ID NO: 4218 - DNA, 37 bp, synthetic construct
  misc_feature 1..37: note = Probe
  source 1..37: mol_type = other DNA
cagaagattgagggttcgagtcccttcgtggtcgttg

SEQ ID NO: 4219 - DNA, 17 bp, synthetic construct
  misc_feature 1..17: note = Probe
  source 1..17: mol_type = other DNA
cagaagattgcaggttc

SEQ ID NO: 4220 - DNA, 32 bp, synthetic construct
  misc_feature 1..32: note = Probe
  source 1..32: mol_type = other DNA
cagaagattgcaggttcgagtcctgccgcggt

SEQ ID NO: 4221 - DNA, 36 bp, synthetic construct
  misc_feature 1..36: note = Probe
  source 1..36: mol_type = other DNA
cagaaggtcctgggttcgagccccagtggaaccacg

SEQ ID NO: 4222 - DNA, 37 bp, synthetic construct
  misc_feature 1..37: note = Probe
  source 1..37: mol_type = other DNA
cagaaggtcctgggttcgagccccagtggaaccacgg

SEQ ID NO: 4223 - DNA, 16 bp, synthetic construct
  misc_feature 1..16: note = Probe
  source 1..16: mol_type = other DNA
cagaccaagagccttc

SEQ ID NO: 4224 - DNA, 29 bp, synthetic construct
  misc_feature 1..29: note = Probe
  source 1..29: mol_type = other DNA
cagaccaagagccttcaaagccctcagta

SEQ ID NO: 4225 - DNA, 32 bp, synthetic construct
  misc_feature 1..32: note = Probe
  source 1..32: mol_type = other DNA
cagaccaagagccttcaaagccctcagtaagt

SEQ ID NO: 4226 - DNA, 35 bp, synthetic construct
  misc_feature 1..35: note = Probe
  source 1..35: mol_type = other DNA
cagaccaagagccttcaaagccctcagtaagttgc

SEQ ID NO: 4227 - DNA, 49 bp, synthetic construct
  misc_feature 1..49: note = Probe
  source 1..49: mol_type = other DNA
cagaccaagagccttcaaagccctcagtaagttgcaatacttaatttct

SEQ ID NO: 4228 - DNA, 18 bp, synthetic construct
  misc_feature 1..18: note = Probe
  source 1..18: mol_type = other DNA
cagagaatagtttaaatt

SEQ ID NO: 4229 - DNA, 21 bp, synthetic construct
  misc_feature 1..21: note = Probe
  source 1..21: mol_type = other DNA
cagagaatagtttaaattaga

SEQ ID NO: 4230 - DNA, 23 bp, synthetic construct
  misc_feature 1..23: note = Probe
  source 1..23: mol_type = other DNA
cagagaatagtttaaattagaat

SEQ ID NO: 4231 - DNA, 25 bp, synthetic construct
  misc_feature 1..25: note = Probe
  source 1..25: mol_type = other DNA
cagagaatagtttaaattagaatct

SEQ ID NO: 4232 - DNA, 35 bp, synthetic construct
  misc_feature 1..35: note = Probe
  source 1..35: mol_type = other DNA
cagagaatagtttaaattagaatcttagctttggg

SEQ ID NO: 4233 - DNA, 36 bp, synthetic construct
  misc_feature 1..36: note = Probe
  source 1..36: mol_type = other DNA
cagagaatagtttaaattagaatcttagctttgggt

SEQ ID NO: 4234 - DNA, 37 bp, synthetic construct
  misc_feature 1..37: note = Probe
  source 1..37: mol_type = other DNA
cagagaatagtttaaattagaatcttagctttgggtg

SEQ ID NO: 4235 - DNA, 38 bp, synthetic construct
  misc_feature 1..38: note = Probe
  source 1..38: mol_type = other DNA
cagagaatagtttaaattagaatcttagctttgggtgc

SEQ ID NO: 4236 - DNA, 39 bp, synthetic construct
  misc_feature 1..39: note = Probe
  source 1..39: mol_type = other DNA
cagagaatagtttaaattagaatcttagctttgggtgct

SEQ ID NO: 4237 - DNA, 44 bp, synthetic construct
  misc_feature 1..44: note = Probe
  source 1..44: mol_type = other DNA
cagagaatagtttaaattagaatcttagctttgggtgctaatgg

SEQ ID NO: 4238 - DNA, 45 bp, synthetic construct
  misc_feature 1..45: note = Probe
  source 1..45: mol_type = other DNA
cagagaatagtttaaattagaatcttagctttgggtgctaatggt

SEQ ID NO: 4239 - DNA, 46 bp, synthetic construct
  misc_feature 1..46: note = Probe
  source 1..46: mol_type = other DNA
cagagaatagtttaaattagaatcttagctttgggtgctaatggtg

SEQ ID NO: 4240 - DNA, 49 bp, synthetic construct
  misc_feature 1..49: note = Probe
  source 1..49: mol_type = other DNA
cagagaatagtttaaattagaatcttagctttgggtgctaatggtggag

SEQ ID NO: 4241 - DNA, 27 bp, synthetic construct
  misc_feature 1..27: note = Probe
  source 1..27: mol_type = other DNA
cagagcccggtaatcgcataaaactta

SEQ ID NO: 4242 - DNA, 50 bp, synthetic construct
  misc_feature 1..50: note = Probe
  source 1..50: mol_type = other DNA
cagagcccggtaatcgcataaaacttaaaactttacagtcagaggttcaa

SEQ ID NO: 4243 - DNA, 17 bp, synthetic construct
  misc_feature 1..17: note = Probe
  source 1..17: mol_type = other DNA
cagaggtcgatggatcg

SEQ ID NO: 4244 - DNA, 16 bp, synthetic construct
  misc_feature 1..16: note = Probe
  source 1..16: mol_type = other DNA
cagaggttccgggttc

SEQ ID NO: 4245 - DNA, 17 bp, synthetic construct
  misc_feature 1..17: note = Probe
  source 1..17: mol_type = other DNA
cagaggttccgggttcg

SEQ ID NO: 4246 - DNA, 27 bp, synthetic construct
  misc_feature 1..27: note = Probe
  source 1..27: mol_type = other DNA
cagaggttccgggttcgagtcccggca

SEQ ID NO: 4247 - DNA, 31 bp, synthetic construct
  misc_feature 1..31: note = Probe
  source 1..31: mol_type = other DNA
cagagtggcgcagcggaagcgtgctgggccc

SEQ ID NO: 4248 - DNA, 37 bp, synthetic construct
  misc_feature 1..37: note = Probe
  source 1..37: mol_type = other DNA
cagagtggcgcagcggaagcgtgctgggcccataacc

SEQ ID NO: 4249 - DNA, 24 bp, synthetic construct
  misc_feature 1..24: note = Probe
  source 1..24: mol_type = other DNA
cagagtggggttttgcagtcctta

SEQ ID NO: 4250 - DNA, 25 bp, synthetic construct
  misc_feature 1..25: note = Probe
  source 1..25: mol_type = other DNA
cagagtggggttttgcagtccttag

SEQ ID NO: 4251 - DNA, 26 bp, synthetic construct
  misc_feature 1..26: note = Probe
  source 1..26: mol_type = other DNA
cagagtggggttttgcagtccttagc

SEQ ID NO: 4252 - DNA, 27 bp, synthetic construct
  misc_feature 1..27: note = Probe
  source 1..27: mol_type = other DNA
cagagtggggttttgcagtccttagct

SEQ ID NO: 4253 - DNA, 19 bp, synthetic construct
  misc_feature 1..19: note = Probe
  source 1..19: mol_type = other DNA
cagagtgtagcttaacaca

SEQ ID NO: 4254 - DNA, 20 bp, synthetic construct
  misc_feature 1..20: note = Probe
  source 1..20: mol_type = other DNA
cagagtgtagcttaacacaa

SEQ ID NO: 4255 - DNA, 23 bp, synthetic construct
  misc_feature 1..23: note = Probe
  source 1..23: mol_type = other DNA
cagagtgtagcttaacacaaagc

SEQ ID NO: 4256 - DNA, 24 bp, synthetic construct
  misc_feature 1..24: note = Probe
  source 1..24: mol_type = other DNA
cagagtgtagcttaacacaaagca

SEQ ID NO: 4257 - DNA, 25 bp, synthetic construct
  misc_feature 1..25: note = Probe
  source 1..25: mol_type = other DNA
cagagtgtagcttaacacaaagcac

SEQ ID NO: 4258 - DNA, 26 bp, synthetic construct
  misc_feature 1..26: note = Probe
  source 1..26: mol_type = other DNA
cagagtgtagcttaacacaaagcacc

SEQ ID NO: 4259 - DNA, 27 bp, synthetic construct
  misc_feature 1..27: note = Probe
  source 1..27: mol_type = other DNA
cagagtgtagcttaacacaaagcaccc

SEQ ID NO: 4260 - DNA, 28 bp, synthetic construct
  misc_feature 1..28: note = Probe
  source 1..28: mol_type = other DNA
cagagtgtagcttaacacaaagcaccca

SEQ ID NO: 4261 - DNA, 29 bp, synthetic construct
  misc_feature 1..29: note = Probe
  source 1..29: mol_type = other DNA
cagagtgtagcttaacacaaagcacccaa

SEQ ID NO: 4262 - DNA, 30 bp, synthetic construct
  misc_feature 1..30: note = Probe
  source 1..30: mol_type = other DNA
cagagtgtagcttaacacaaagcacccaac

SEQ ID NO: 4263 - DNA, 31 bp, synthetic construct
  misc_feature 1..31: note = Probe
  source 1..31: mol_type = other DNA
cagagtgtagcttaacacaaagcacccaact

SEQ ID NO: 4264 - DNA, 32 bp, synthetic construct
  misc_feature 1..32: note = Probe
  source 1..32: mol_type = other DNA
cagagtgtagcttaacacaaagcacccaactt

SEQ ID NO: 4265 - DNA, 33 bp, synthetic construct
  misc_feature 1..33: note = Probe
  source 1..33: mol_type = other DNA
cagagtgtagcttaacacaaagcacccaactta

SEQ ID NO: 4266 - DNA, 34 bp, synthetic construct
  misc_feature 1..34: note = Probe
  source 1..34: mol_type = other DNA
cagagtgtagcttaacacaaagcacccaacttac

SEQ ID NO: 4267 - DNA, 35 bp, synthetic construct
  misc_feature 1..35: note = Probe
  source 1..35: mol_type = other DNA
cagagtgtagcttaacacaaagcacccaacttaca

SEQ ID NO: 4268 - DNA, 36 bp, synthetic construct
  misc_feature 1..36: note = Probe
  source 1..36: mol_type = other DNA
cagagtgtagcttaacacaaagcacccaacttacac

SEQ ID NO: 4269 - DNA, 37 bp, synthetic construct
  misc_feature 1..37: note = Probe
  source 1..37: mol_type = other DNA
cagagtgtagcttaacacaaagcacccaacttacact

SEQ ID NO: 4270 - DNA, 38 bp, synthetic construct
  misc_feature 1..38: note = Probe
  source 1..38: mol_type = other DNA
cagagtgtagcttaacacaaagcacccaacttacactt

SEQ ID NO: 4271 - DNA, 39 bp, synthetic construct
  misc_feature 1..39: note = Probe
  source 1..39: mol_type = other DNA
cagagtgtagcttaacacaaagcacccaacttacactta

SEQ ID NO: 4272 - DNA, 40 bp, synthetic construct
  misc_feature 1..40: note = Probe
  source 1..40: mol_type = other DNA
cagagtgtagcttaacacaaagcacccaacttacacttag

SEQ ID NO: 4273 - DNA, 41 bp, synthetic construct
  misc_feature 1..41: note = Probe
  source 1..41: mol_type = other DNA
cagagtgtagcttaacacaaagcacccaacttacacttagg

SEQ ID NO: 4274 - DNA, 42 bp, synthetic construct
  misc_feature 1..42: note = Probe
  source 1..42: mol_type = other DNA
cagagtgtagcttaacacaaagcacccaacttacacttagga

SEQ ID NO: 4275 - DNA, 43 bp, synthetic construct
  misc_feature 1..43: note = Probe
  source 1..43: mol_type = other DNA
cagagtgtagcttaacacaaagcacccaacttacacttaggag

SEQ ID NO: 4276 - DNA, 44 bp, synthetic construct
  misc_feature 1..44: note = Probe
  source 1..44: mol_type = other DNA
cagagtgtagcttaacacaaagcacccaacttacacttaggaga

SEQ ID NO: 4277 - DNA, 45 bp, synthetic construct
  misc_feature 1..45: note = Probe
  source 1..45: mol_type = other DNA
cagagtgtagcttaacacaaagcacccaacttacacttaggagat

SEQ ID NO: 4278 - DNA, 46 bp, synthetic construct
  misc_feature 1..46: note = Probe
  source 1..46: mol_type = other DNA
cagagtgtagcttaacacaaagcacccaacttacacttaggagatt

SEQ ID NO: 4279 - DNA, 48 bp, synthetic construct
  misc_feature 1..48: note = Probe
  source 1..48: mol_type = other DNA
cagagtgtagcttaacacaaagcacccaacttacacttaggagatttc

SEQ ID NO: 4280 - DNA, 49 bp, synthetic construct
  misc_feature 1..49: note = Probe
  source 1..49: mol_type = other DNA
cagagtgtagcttaacacaaagcacccaacttacacttaggagatttca

SEQ ID NO: 4281 - DNA, 50 bp, synthetic construct
  misc_feature 1..50: note = Probe
  source 1..50: mol_type = other DNA
cagagtgtagcttaacacaaagcacccaacttacacttaggagatttcaa

SEQ ID NO: 4282 - DNA, 38 bp, synthetic construct
  misc_feature 1..38: note = Probe
  source 1..38: mol_type = other DNA
cagattgtgaatctgacaacagaggcttacgacccctt

SEQ ID NO: 4283 - DNA, 49 bp, synthetic construct
  misc_feature 1..49: note = Probe
  source 1..49: mol_type = other DNA
cagattgtgaatctgacaacagaggcttacgaccccttatttaccgaga

SEQ ID NO: 4284 - DNA, 50 bp, synthetic construct
  misc_feature 1..50: note = Probe
  source 1..50: mol_type = other DNA
cagattgtgaatctgacaacagaggcttacgaccccttatttaccgagaa

SEQ ID NO: 4285 - DNA, 32 bp, synthetic construct
  misc_feature 1..32: note = Probe
  source 1..32: mol_type = other DNA
cagcaacctcggttcgaatccgagtcacggca

SEQ ID NO: 4286 - DNA, 34 bp, synthetic construct
  misc_feature 1..34: note = Probe
  source 1..34: mol_type = other DNA
cagcaacctcggttcgaatccgagtcacggcaaa

SEQ ID NO: 4287 - DNA, 34 bp, synthetic construct
  misc_feature 1..34: note = Probe
  source 1..34: mol_type = other DNA
cagcaacctcggttcgaatccgagtcacggcagg

SEQ ID NO: 4288 - DNA, 35 bp, synthetic construct
  misc_feature 1..35: note = Probe
  source 1..35: mol_type = other DNA
cagcaacctcggttcgaatccgagtcacggcaggt

SEQ ID NO: 4289 - DNA, 34 bp, synthetic construct
  misc_feature 1..34: note = Probe
  source 1..34: mol_type = other DNA
cagcaacctcggttcgaatccgagtcacggcatt

SEQ ID NO: 4290 - DNA, 35 bp, synthetic construct
  misc_feature 1..35: note = Probe
  source 1..35: mol_type = other DNA
cagcaacctcggttcgaatccgagtcacggcattg

SEQ ID NO: 4291 - DNA, 33 bp, synthetic construct
  misc_feature 1..33: note = Probe
  source 1..33: mol_type = other DNA
cagcgatccgagttcaaatctcggtggaacctg

SEQ ID NO: 4292 - DNA, 34 bp, synthetic construct
  misc_feature 1..34: note = Probe
  source 1..34: mol_type = other DNA
cagcgatccgagttcaaatctcggtggaacctgc

SEQ ID NO: 4293 - DNA, 35 bp, synthetic construct
  misc_feature 1..35: note = Probe
  source 1..35: mol_type = other DNA
cagcgatccgagttcaaatctcggtggaacctgca

SEQ ID NO: 4294 - DNA, 33 bp, synthetic construct
  misc_feature 1..33: note = Probe
  source 1..33: mol_type = other DNA
cagcgatccgagttcaaatctcggtggaacctt

SEQ ID NO: 4295 - DNA, 29 bp, synthetic construct
  misc_feature 1..29: note = Probe
  source 1..29: mol_type = other DNA
cagcgatccgagttcaaatctcggtggga

SEQ ID NO: 4296 - DNA, 31 bp, synthetic construct
  misc_feature 1..31: note = Probe
  source 1..31: mol_type = other DNA
cagcgatccgagttcaaatctcggtgggacc

SEQ ID NO: 4297 - DNA, 33 bp, synthetic construct
  misc_feature 1..33: note = Probe
  source 1..33: mol_type = other DNA
cagcgatccgagttcaaatctcggtgggacctc

SEQ ID NO: 4298 - DNA, 35 bp, synthetic construct
  misc_feature 1..35: note = Probe
  source 1..35: mol_type = other DNA
cagcgatccgagttcaaatctcggtgggacctcac

SEQ ID NO: 4299 - DNA, 32 bp, synthetic construct
  misc_feature 1..32: note = Probe
  source 1..32: mol_type = other DNA
cagcgatccgagttcgagtctcggtggaacct

SEQ ID NO: 4300 - DNA, 33 bp, synthetic construct
  misc_feature 1..33: note = Probe
  source 1..33: mol_type = other DNA
cagcgatccgagttcgagtctcggtggaacctt

SEQ ID NO: 4301 - DNA, 23 bp, synthetic construct
  misc_feature 1..23: note = Probe
  source 1..23: mol_type = other DNA
cagcggaagcgtgctgggcccat

SEQ ID NO: 4302 - DNA, 24 bp, synthetic construct
  misc_feature 1..24: note = Probe
  source 1..24: mol_type = other DNA
cagctaaataagctatcgggccca

SEQ ID NO: 4303 - DNA, 25 bp, synthetic construct
  misc_feature 1..25: note = Probe
  source 1..25: mol_type = other DNA
cagctaaataagctatcgggcccat

SEQ ID NO: 4304 - DNA, 26 bp, synthetic construct
  misc_feature 1..26: note = Probe
  source 1..26: mol_type = other DNA
cagctaaataagctatcgggcccata

SEQ ID NO: 4305 - DNA, 27 bp, synthetic construct
  misc_feature 1..27: note = Probe
  source 1..27: mol_type = other DNA
cagctaaataagctatcgggcccatac

SEQ ID NO: 4306 - DNA, 29 bp, synthetic construct
  misc_feature 1..29: note = Probe
  source 1..29: mol_type = other DNA
cagctaaataagctatcgggcccataccc

SEQ ID NO: 4307 - DNA, 31 bp, synthetic construct
  misc_feature 1..31: note = Probe
  source 1..31: mol_type = other DNA
cagctaaataagctatcgggcccataccccg

SEQ ID NO: 4308 - DNA, 32 bp, synthetic construct
  misc_feature 1..32: note = Probe
  source 1..32: mol_type = other DNA
cagctaaataagctatcgggcccataccccga

SEQ ID NO: 4309 - DNA, 33 bp, synthetic construct
  misc_feature 1..33: note = Probe
  source 1..33: mol_type = other DNA
cagctaaataagctatcgggcccataccccgaa

SEQ ID NO: 4310 - DNA, 34 bp, synthetic construct
  misc_feature 1..34: note = Probe
  source 1..34: mol_type = other DNA
cagctaaataagctatcgggcccataccccgaaa

SEQ ID NO: 4311 - DNA, 35 bp, synthetic construct
  misc_feature 1..35: note = Probe
  source 1..35: mol_type = other DNA
cagctaaataagctatcgggcccataccccgaaaa

SEQ ID NO: 4312 - DNA, 36 bp, synthetic construct
  misc_feature 1..36: note = Probe
  source 1..36: mol_type = other DNA
cagctaaataagctatcgggcccataccccgaaaat

SEQ ID NO: 4313 - DNA, 37 bp, synthetic construct
  misc_feature 1..37: note = Probe
  source 1..37: mol_type = other DNA
cagctaaataagctatcgggcccataccccgaaaatg

SEQ ID NO: 4314 - DNA, 39 bp, synthetic construct
  misc_feature 1..39: note = Probe
  source 1..39: mol_type = other DNA
cagctaaataagctatcgggcccataccccgaaaatgtt

SEQ ID NO: 4315 - DNA, 40 bp, synthetic construct
  misc_feature 1..40: note = Probe
  source 1..40: mol_type = other DNA
cagctaaataagctatcgggcccataccccgaaaatgttg

SEQ ID NO: 4316 - DNA, 41 bp, synthetic construct
  misc_feature 1..41: note = Probe
  source 1..41: mol_type = other DNA
cagctaaataagctatcgggcccataccccgaaaatgttgg

SEQ ID NO: 4317 - DNA, 43 bp, synthetic construct
  misc_feature 1..43: note = Probe
  source 1..43: mol_type = other DNA
cagctaaataagctatcgggcccataccccgaaaatgttggtt

SEQ ID NO: 4318 - DNA, 44 bp, synthetic construct
  misc_feature 1..44: note = Probe
  source 1..44: mol_type = other DNA
cagctaaataagctatcgggcccataccccgaaaatgttggtta

SEQ ID NO: 4319 - DNA, 49 bp, synthetic construct
  misc_feature 1..49: note = Probe
  source 1..49: mol_type = other DNA
cagctaaataagctatcgggcccataccccgaaaatgttggttataccc

SEQ ID NO: 4320 - DNA, 15 bp, synthetic construct
  misc_feature 1..15: note = Probe
  source 1..15: mol_type = other DNA
cagctatccattggt

SEQ ID NO: 4321 - DNA, 17 bp, synthetic construct
  misc_feature 1..17: note = Probe
  source 1..17: mol_type = other DNA
cagctatccattggtct

SEQ ID NO: 4322 - DNA, 26 bp, synthetic construct
  misc_feature 1..26: note = Probe
  source 1..26: mol_type = other DNA
cagctatccattggtcttaggcccca

SEQ ID NO: 4323 - DNA, 27 bp, synthetic construct
  misc_feature 1..27: note = Probe
  source 1..27: mol_type = other DNA
cagctatccattggtcttaggccccaa

SEQ ID NO: 4324 - DNA, 29 bp, synthetic construct
  misc_feature 1..29: note = Probe
  source 1..29: mol_type = other DNA
cagctatccattggtcttaggccccaaaa

SEQ ID NO: 4325 - DNA, 23 bp, synthetic construct
  misc_feature 1..23: note = Probe
  source 1..23: mol_type = other DNA
cagcttcaaacctgccggggctt

SEQ ID NO: 4326 - DNA, 24 bp, synthetic construct
  misc_feature 1..24: note = Probe
  source 1..24: mol_type = other DNA
cagcttcaaacctgccggggcttc

SEQ ID NO: 4327 - DNA, 25 bp, synthetic construct
  misc_feature 1..25: note = Probe
  source 1..25: mol_type = other DNA
cagcttcaaacctgccggggcttct

SEQ ID NO: 4328 - DNA, 26 bp, synthetic construct
  misc_feature 1..26: note = Probe
  source 1..26: mol_type = other DNA
cagcttcaaacctgccggggcttctc

SEQ ID NO: 4329 - DNA, 17 bp, synthetic construct
  misc_feature 1..17: note = Probe
  source 1..17: mol_type = other DNA
cagctttggggggttcg

SEQ ID NO: 4330 - DNA, 18 bp, synthetic construct
  misc_feature 1..18: note = Probe
  source 1..18: mol_type = other DNA
cagctttggggggttcga

SEQ ID NO: 4331 - DNA, 29 bp, synthetic construct
  misc_feature 1..29: note = Probe
  source 1..29: mol_type = other DNA
cagctttggggggttcgattccttccttt

SEQ ID NO: 4332 - DNA, 30 bp, synthetic construct
  misc_feature 1..30: note = Probe
  source 1..30: mol_type = other DNA
cagctttggggggttcgattccttcctttt

SEQ ID NO: 4333 - DNA, 32 bp, synthetic construct
  misc_feature 1..32: note = Probe
  source 1..32: mol_type = other DNA
cagctttggggggttcgattccttcctttttt

SEQ ID NO: 4334 - DNA, 33 bp, synthetic construct
  misc_feature 1..33: note = Probe
  source 1..33: mol_type = other DNA
cagctttggggggttcgattccttccttttttg

SEQ ID NO: 4335 - DNA, 34 bp, synthetic construct
  misc_feature 1..34: note = Probe
  source 1..34: mol_type = other DNA
cagctttggggggttcgattccttccttttttgt

SEQ ID NO: 4336 - DNA, 35 bp, synthetic construct
  misc_feature 1..35: note = Probe
  source 1..35: mol_type = other DNA
cagctttggggggttcgattccttccttttttgtc

SEQ ID NO: 4337 - DNA, 36 bp, synthetic construct
  misc_feature 1..36: note = Probe
  source 1..36: mol_type = other DNA
cagctttggggggttcgattccttccttttttgtct

SEQ ID NO: 4338 - DNA, 37 bp, synthetic construct
  misc_feature 1..37: note = Probe
  source 1..37: mol_type = other DNA
caggagatcctgggttcgaatcccagcggtgcctccg

SEQ ID NO: 4339 - DNA, 33 bp, synthetic construct
  misc_feature 1..33: note = Probe
  source 1..33: mol_type = other DNA
caggcggcccgggttcgactcccggtgtgggaa

SEQ ID NO: 4340 - DNA, 36 bp, synthetic construct
  misc_feature 1..36: note = Probe
  source 1..36: mol_type = other DNA
caggcggcccgggttcgactcccggtgtgggaacgc

SEQ ID NO: 4341 - DNA, 28 bp, synthetic construct
  misc_feature 1..28: note = Probe
  source 1..28: mol_type = other DNA
cagggatgggttcgattctcatagtcct

SEQ ID NO: 4342 - DNA, 29 bp, synthetic construct
  misc_feature 1..29: note = Probe
  source 1..29: mol_type = other DNA
cagggatgggttcgattctcatagtccta

SEQ ID NO: 4343 - DNA, 31 bp, synthetic construct
  misc_feature 1..31: note = Probe
  source 1..31: mol_type = other DNA
cagggatgggttcgattctcatagtcctaga

SEQ ID NO: 4344 - DNA, 32 bp, synthetic construct
  misc_feature 1..32: note = Probe
  source 1..32: mol_type = other DNA
cagggatgggttcgattctcatagtcctagaa

SEQ ID NO: 4345 - DNA, 33 bp, synthetic construct
  misc_feature 1..33: note = Probe
  source 1..33: mol_type = other DNA
cagggatgggttcgattctcatagtcctagaaa

SEQ ID NO: 4346 - DNA, 26 bp, synthetic construct
  misc_feature 1..26: note = Probe
  source 1..26: mol_type = other DNA
cagggattgtgggttcgagtcccatc

SEQ ID NO: 4347 - DNA, 31 bp, synthetic construct
  misc_feature 1..31: note = Probe
  source 1..31: mol_type = other DNA
cagggattgtgggttcgagtcccatctgggg

SEQ ID NO: 4348 - DNA, 17 bp, synthetic construct
  misc_feature 1..17: note = Probe
  source 1..17: mol_type = other DNA
caggggtcgcgagttca

SEQ ID NO: 4349 - DNA, 33 bp, synthetic construct
  misc_feature 1..33: note = Probe
  source 1..33: mol_type = other DNA
caggggtcgcgagttcaattctcgctggggcct

SEQ ID NO: 4350 - DNA, 27 bp, synthetic construct
  misc_feature 1..27: note = Probe
  source 1..27: mol_type = other DNA
caggggttaggcctctttttaccagct

SEQ ID NO: 4351 - DNA, 16 bp, synthetic construct
  misc_feature 1..16: note = Probe
  source 1..16: mol_type = other DNA
cagggtcgtgggttcg

SEQ ID NO: 4352 - DNA, 31 bp, synthetic construct
  misc_feature 1..31: note = Probe
  source 1..31: mol_type = other DNA
cagggtcgtgggttcgagccccacgttgggc

SEQ ID NO: 4353 - DNA, 32 bp, synthetic construct
  misc_feature 1..32: note = Probe
  source 1..32: mol_type = other DNA
cagggtcgtgggttcgagccccacgttgggcg

SEQ ID NO: 4354 - DNA, 36 bp, synthetic construct
  misc_feature 1..36: note = Probe
  source 1..36: mol_type = other DNA
caggtggcccgggttcgactcccggtatgggaacaa

SEQ ID NO: 4355 - DNA, 23 bp, synthetic construct
  misc_feature 1..23: note = Probe
  source 1..23: mol_type = other DNA
cagtcagaggttcaattcctctt

SEQ ID NO: 4356 - DNA, 25 bp, synthetic construct
  misc_feature 1..25: note = Probe
  source 1..25: mol_type = other DNA
cagtcagaggttcaattcctcttct

SEQ ID NO: 4357 - DNA, 27 bp, synthetic construct
  misc_feature 1..27: note = Probe
  source 1..27: mol_type = other DNA
cagtcagaggttcaattcctcttctta

SEQ ID NO: 4358 - DNA, 30 bp, synthetic construct
  misc_feature 1..30: note = Probe
  source 1..30: mol_type = other DNA
cagtcagaggttcaattcctcttcttaaca

SEQ ID NO: 4359 - DNA, 32 bp, synthetic construct
  misc_feature 1..32: note = Probe
  source 1..32: mol_type = other DNA
cagtcagaggttcaattcctcttcttaacaac

SEQ ID NO: 4360 - DNA, 33 bp, synthetic construct
  misc_feature 1..33: note = Probe
  source 1..33: mol_type = other DNA
cagtcagaggttcaattcctcttcttaacaaca

SEQ ID NO: 4361 - DNA, 44 bp, synthetic construct
  misc_feature 1..44: note = Probe
  source 1..44: mol_type = other DNA
cagtcatttcgatggcgtgggttcgaatcccaccgctgccacac

SEQ ID NO: 4362 - DNA, 16 bp, synthetic construct
  misc_feature 1..16: note = Probe
  source 1..16: mol_type = other DNA
cagtcggtagagcatc

SEQ ID NO: 4363 - DNA, 17 bp, synthetic construct
  misc_feature 1..17: note = Probe
  source 1..17: mol_type = other DNA
cagtcggtagagcatga

SEQ ID NO: 4364 - DNA, 20 bp, synthetic construct
  misc_feature 1..20: note = Probe
  source 1..20: mol_type = other DNA
cagtcggtagagcatgagac

SEQ ID NO: 4365 - DNA, 22 bp, synthetic construct
  misc_feature 1..22: note = Probe
  source 1..22: mol_type = other DNA
cagtcggtagagcatgagactc

SEQ ID NO: 4366 - DNA, 23 bp, synthetic construct
  misc_feature 1..23: note = Probe
  source 1..23: mol_type = other DNA
cagtcggtagagcatgagactct

SEQ ID NO: 4367 - DNA, 24 bp, synthetic construct
  misc_feature 1..24: note = Probe
  source 1..24: mol_type = other DNA
cagtcggtagagcatgagactctt

SEQ ID NO: 4368 - DNA, 37 bp, synthetic construct
  misc_feature 1..37: note = Probe
  source 1..37: mol_type = other DNA
cagtcggtagagcatgagactcttaatctcagggtcg

SEQ ID NO: 4369 - DNA, 21 bp, synthetic construct
  misc_feature 1..21: note = Probe
  source 1..21: mol_type = other DNA
cagtcggtagagcatgggact

SEQ ID NO: 4370 - DNA, 37 bp, synthetic construct
  misc_feature 1..37: note = Probe
  source 1..37: mol_type = other DNA
cagtcggtagagcatgggactcttaatcccagggtcg

SEQ ID NO: 4371 - DNA, 50 bp, synthetic construct
  misc_feature 1..50: note = Probe
  source 1..50: mol_type = other DNA
cagtctcataatctgaaggtcgtgagttcgatcctcacacggggcacaat

SEQ ID NO: 4372 - DNA, 24 bp, synthetic construct
  misc_feature 1..24: note = Probe
  source 1..24: mol_type = other DNA
cagtctcttcgggggcgtgggttc

SEQ ID NO: 4373 - DNA, 25 bp, synthetic construct
  misc_feature 1..25: note = Probe
  source 1..25: mol_type = other DNA
cagtcttgtaaaccggagatgaaaa

SEQ ID NO: 4374 - DNA, 44 bp, synthetic construct
  misc_feature 1..44: note = Probe
  source 1..44: mol_type = other DNA
cagtcttgtaaaccggagatgaaaacctttttccaaggacaaat

SEQ ID NO: 4375 - DNA, 17 bp, synthetic construct
  misc_feature 1..17: note = Probe
  source 1..17: mol_type = other DNA
cagtggtagaattctcg

SEQ ID NO: 4376 - DNA, 20 bp, synthetic construct
  misc_feature 1..20: note = Probe
  source 1..20: mol_type = other DNA
cagtggtagaattctcgcct

SEQ ID NO: 4377 - DNA, 23 bp, synthetic construct
  misc_feature 1..23: note = Probe
  source 1..23: mol_type = other DNA
cagtggtagaattctcgcctgcc

SEQ ID NO: 4378 - DNA, 23 bp, synthetic construct
  misc_feature 1..23: note = Probe
  source 1..23: mol_type = other DNA
cagtggtagagcatttgactgca

SEQ ID NO: 4379 - DNA, 33 bp, synthetic construct
  misc_feature 1..33: note = Probe
  source 1..33: mol_type = other DNA
cagttgatgcagagtggggttttgcagtcctta

SEQ ID NO: 4380 - DNA, 34 bp, synthetic construct
  misc_feature 1..34: note = Probe
  source 1..34: mol_type = other DNA
cagttgatgcagagtggggttttgcagtccttag

SEQ ID NO: 4381 - DNA, 36 bp, synthetic construct
  misc_feature 1..36: note = Probe
  source 1..36: mol_type = other DNA
cagttgatgcagagtggggttttgcagtccttagct

SEQ ID NO: 4382 - DNA, 41 bp, synthetic construct
  misc_feature 1..41: note = Probe
  source 1..41: mol_type = other DNA
cagtttatgtagcttacctcctcaaagcaatacactgaaaa

SEQ ID NO: 4383 - DNA, 43 bp, synthetic construct
  misc_feature 1..43: note = Probe
  source 1..43: mol_type = other DNA
cataaaacttaaaactttacagtcagaggttcaattcctcttc

SEQ ID NO: 4384 - DNA, 44 bp, synthetic construct
  misc_feature 1..44: note = Probe
  source 1..44: mol_type = other DNA
cataaaacttaaaactttacagtcagaggttcaattcctcttct

SEQ ID NO: 4385 - DNA, 45 bp, synthetic construct
  misc_feature 1..45: note = Probe
  source 1..45: mol_type = other DNA
cataaaacttaaaactttacagtcagaggttcaattcctcttctt

SEQ ID NO: 4386 - DNA, 46 bp, synthetic construct
  misc_feature 1..46: note = Probe
  source 1..46: mol_type = other DNA
cataaaacttaaaactttacagtcagaggttcaattcctcttctta

SEQ ID NO: 4387 - DNA, 50 bp, synthetic construct
  misc_feature 1..50: note = Probe
  source 1..50: mol_type = other DNA
cataaaacttaaaactttacagtcagaggttcaattcctcttcttaacaa

SEQ ID NO: 4388 - DNA, 17 bp, synthetic construct
  misc_feature 1..17: note = Probe
  source 1..17: mol_type = other DNA
cataacccagaggtcga

SEQ ID NO: 4389 - DNA, 23 bp, synthetic construct
  misc_feature 1..23: note = Probe
  source 1..23: mol_type = other DNA
cataacccagaggtcgatggatc

SEQ ID NO: 4390 - DNA, 24 bp, synthetic construct
  misc_feature 1..24: note = Probe
  source 1..24: mol_type = other DNA
cataacccagaggtcgatggatcg

SEQ ID NO: 4391 - DNA, 43 bp, synthetic construct
  misc_feature 1..43: note = Probe
  source 1..43: mol_type = other DNA
cataacccagaggtcgatggatcgaaaccatcctctgctaggt

SEQ ID NO: 4392 - DNA, 43 bp, synthetic construct
  misc_feature 1..43: note = Probe
  source 1..43: mol_type = other DNA
cataatctgaaggtcgtgagttcgatcctcacacggggcacaa

SEQ ID NO: 4393 - DNA, 32 bp, synthetic construct
  misc_feature 1..32: note = Probe
  source 1..32: mol_type = other DNA
cataccccgaaaatgttggttatacccttccc

SEQ ID NO: 4394 - DNA, 33 bp, synthetic construct
  misc_feature 1..33: note = Probe
  source 1..33: mol_type = other DNA
cataccccgaaaatgttggttatacccttcccg

SEQ ID NO: 4395 - DNA, 35 bp, synthetic construct
  misc_feature 1..35: note = Probe
  source 1..35: mol_type = other DNA
cataccccgaaaatgttggttatacccttcccgta

SEQ ID NO: 4396 - DNA, 40 bp, synthetic construct
  misc_feature 1..40: note = Probe
  source 1..40: mol_type = other DNA
cataccccgaaaatgttggttatacccttcccgtactaat

SEQ ID NO: 4397 - DNA, 41 bp, synthetic construct
  misc_feature 1..41: note = Probe
  source 1..41: mol_type = other DNA
cataccccgaaaatgttggttatacccttcccgtactaatt

SEQ ID NO: 4398 - DNA, 24 bp, synthetic construct
  misc_feature 1..24: note = Probe
  source 1..24: mol_type = other DNA
catatcattggtcgtggttgtagt

SEQ ID NO: 4399 - DNA, 25 bp, synthetic construct
  misc_feature 1..25: note = Probe
  source 1..25: mol_type = other DNA
catatcattggtcgtggttgtagtc

SEQ ID NO: 4400 - DNA, 27 bp, synthetic construct
  misc_feature 1..27: note = Probe
  source 1..27: mol_type = other DNA
catatcattggtcgtggttgtagtccg

SEQ ID NO: 4401 - DNA, 39 bp, synthetic construct
  misc_feature 1..39: note = Probe
  source 1..39: mol_type = other DNA
catatcattggtcgtggttgtagtccgtgcgagaataat

SEQ ID NO: 4402 - DNA, 31 bp, synthetic construct
  misc_feature 1..31: note = Probe
  source 1..31: mol_type = other DNA
catatggtctagcggttaggattcctggttt

SEQ ID NO: 4403 - DNA, 32 bp, synthetic construct
  misc_feature 1..32: note = Probe
  source 1..32: mol_type = other DNA
catatggtctagcggttaggattcctggtttt

SEQ ID NO: 4404 - DNA, 18 bp, synthetic construct
  misc_feature 1..18: note = Probe
  source 1..18: mol_type = other DNA
catatgtccgcgtgggtt

SEQ ID NO: 4405 - DNA, 19 bp, synthetic construct
  misc_feature 1..19: note = Probe
  source 1..19: mol_type = other DNA
catatgtccgcgtgggttc

SEQ ID NO: 4406 - DNA, 50 bp, synthetic construct
  misc_feature 1..50: note = Probe
  source 1..50: mol_type = other DNA
catattgaattgcaaattcgaagaagcagcttcaaacctgccggggcttc

SEQ ID NO: 4407 - DNA, 16 bp, synthetic construct
  misc_feature 1..16: note = Probe
  source 1..16: mol_type = other DNA
catcaccccataaaca

SEQ ID NO: 4408 - DNA, 17 bp, synthetic construct
  misc_feature 1..17: note = Probe
  source 1..17: mol_type = other DNA
catcaccccataaacaa

SEQ ID NO: 4409 - DNA, 18 bp, synthetic construct
  misc_feature 1..18: note = Probe
  source 1..18: mol_type = other DNA
catcaccccataaacaaa

SEQ ID NO: 4410 - DNA, 19 bp, synthetic construct
  misc_feature 1..19: note = Probe
  source 1..19: mol_type = other DNA
catcaccccataaacaaat

SEQ ID NO: 4411 - DNA, 33 bp, synthetic construct
  misc_feature 1..33: note = Probe
  source 1..33: mol_type = other DNA
catcagattgtgaatctgacaacagaggcttac

SEQ ID NO: 4412 - DNA, 39 bp, synthetic construct
  misc_feature 1..39: note = Probe
  source 1..39: mol_type = other DNA
catcagattgtgaatctgacaacagaggcttacgacccc

SEQ ID NO: 4413 - DNA, 40 bp, synthetic construct
  misc_feature 1..40: note = Probe
  source 1..40: mol_type = other DNA
catcagattgtgaatctgacaacagaggcttacgacccct

SEQ ID NO: 4414 - DNA, 41 bp, synthetic construct
  misc_feature 1..41: note = Probe
  source 1..41: mol_type = other DNA
catcagattgtgaatctgacaacagaggcttacgacccctt

SEQ ID NO: 4415 - DNA, 43 bp, synthetic construct
  misc_feature 1..43: note = Probe
  source 1..43: mol_type = other DNA
catcagattgtgaatctgacaacagaggcttacgaccccttat

SEQ ID NO: 4416 - DNA, 44 bp, synthetic construct
  misc_feature 1..44: note = Probe
  source 1..44: mol_type = other DNA
catcagattgtgaatctgacaacagaggcttacgaccccttatt

SEQ ID NO: 4417 - DNA, 45 bp, synthetic construct
  misc_feature 1..45: note = Probe
  source 1..45: mol_type = other DNA
catcagattgtgaatctgacaacagaggcttacgaccccttattt

SEQ ID NO: 4418 - DNA, 49 bp, synthetic construct
  misc_feature 1..49: note = Probe
  source 1..49: mol_type = other DNA
catcagattgtgaatctgacaacagaggcttacgaccccttatttaccg

SEQ ID NO: 4419 - DNA, 50 bp, synthetic construct
  misc_feature 1..50: note = Probe
  source 1..50: mol_type = other DNA
catcagattgtgaatctgacaacagaggcttacgaccccttatttaccga

SEQ ID NO: 4420 - DNA, 40 bp, synthetic construct
  misc_feature 1..40: note = Probe
  source 1..40: mol_type = other DNA
catcctaaagtaaggtcagctaaataagctatcgggccca

SEQ ID NO: 4421 - DNA, 37 bp, synthetic construct
  misc_feature 1..37: note = Probe
  source 1..37: mol_type = other DNA
catgaggtcccgggttcgatccccagcatctccagtg

SEQ ID NO: 4422 - DNA, 50 bp, synthetic construct
  misc_feature 1..50: note = Probe
  source 1..50: mol_type = other DNA
catgcaagattcccattcttgcgacccgggttcgattcccgggcggcgca

SEQ ID NO: 4423 - DNA, 16 bp, synthetic construct
  misc_feature 1..16: note = Probe
  source 1..16: mol_type = other DNA
catgcccccatgtcta

SEQ ID NO: 4424 - DNA, 17 bp, synthetic construct
  misc_feature 1..17: note = Probe
  source 1..17: mol_type = other DNA
catgcccccatgtctaa

SEQ ID NO: 4425 - DNA, 18 bp, synthetic construct
  misc_feature 1..18: note = Probe
  source 1..18: mol_type = other DNA
catgcccccatgtctaac

SEQ ID NO: 4426 - DNA, 22 bp, synthetic construct
  misc_feature 1..22: note = Probe
  source 1..22: mol_type = other DNA
catgcccccatgtctaacaaca

SEQ ID NO: 4427 - DNA, 23 bp, synthetic construct
  misc_feature 1..23: note = Probe
  source 1..23: mol_type = other DNA
catgcccccatgtctaacaacat

SEQ ID NO: 4428 - DNA, 25 bp, synthetic construct
  misc_feature 1..25: note = Probe
  source 1..25: mol_type = other DNA
catgcccccatgtctaacaacatgg

SEQ ID NO: 4429 - DNA, 26 bp, synthetic construct
  misc_feature 1..26: note = Probe
  source 1..26: mol_type = other DNA
catgcccccatgtctaacaacatggc

SEQ ID NO: 4430 - DNA, 27 bp, synthetic construct
  misc_feature 1..27: note = Probe
  source 1..27: mol_type = other DNA
catgcccccatgtctaacaacatggct

SEQ ID NO: 4431 - DNA, 28 bp, synthetic construct
  misc_feature 1..28: note = Probe
  source 1..28: mol_type = other DNA
catgcccccatgtctaacaacatggctt

SEQ ID NO: 4432 - DNA, 29 bp, synthetic construct
  misc_feature 1..29: note = Probe
  source 1..29: mol_type = other DNA
catgcccccatgtctaacaacatggcttt

SEQ ID NO: 4433 - DNA, 30 bp, synthetic construct
  misc_feature 1..30: note = Probe
  source 1..30: mol_type = other DNA
catgcccccatgtctaacaacatggctttc

SEQ ID NO: 4434 - DNA, 31 bp, synthetic construct
  misc_feature 1..31: note = Probe
  source 1..31: mol_type = other DNA
catgcccccatgtctaacaacatggctttct

SEQ ID NO: 4435 - DNA, 32 bp, synthetic construct
  misc_feature 1..32: note = Probe
  source 1..32: mol_type = other DNA
catgcccccatgtctaacaacatggctttctc

SEQ ID NO: 4436 - DNA, 33 bp, synthetic construct
  misc_feature 1..33: note = Probe
  source 1..33: mol_type = other DNA
catgcccccatgtctaacaacatggctttctca

SEQ ID NO: 4437 - DNA, 34 bp, synthetic construct
  misc_feature 1..34: note = Probe
  source 1..34: mol_type = other DNA
catgcccccatgtctaacaacatggctttctcaa

SEQ ID NO: 4438 - DNA, 35 bp, synthetic construct
  misc_feature 1..35: note = Probe
  source 1..35: mol_type = other DNA
catgcccccatgtctaacaacatggctttctcaac

SEQ ID NO: 4439 - DNA, 36 bp, synthetic construct
  misc_feature 1..36: note = Probe
  source 1..36: mol_type = other DNA
catgcccccatgtctaacaacatggctttctcaact

SEQ ID NO: 4440 - DNA, 33 bp, synthetic construct
  misc_feature 1..33: note = Probe
  source 1..33: mol_type = other DNA
catggggttggcttgaaaccagctttggggggt

SEQ ID NO: 4441 - DNA, 50 bp, synthetic construct
  misc_feature 1..50: note = Probe
  source 1..50: mol_type = other DNA
catggggttggcttgaaaccagctttggggggttcgattccttccttttt

SEQ ID NO: 4442 - DNA, 31 bp, synthetic construct
  misc_feature 1..31: note = Probe
  source 1..31: mol_type = other DNA
catgggtggttcagtggtagaattctcgcct

SEQ ID NO: 4443 - DNA, 32 bp, synthetic construct
  misc_feature 1..32: note = Probe
  source 1..32: mol_type = other DNA
catgggtggttcagtggtagaattctcgcctg

SEQ ID NO: 4444 - DNA, 34 bp, synthetic construct
  misc_feature 1..34: note = Probe
  source 1..34: mol_type = other DNA
catgggtggttcagtggtagaattctcgcctgcc

SEQ ID NO: 4445 - DNA, 27 bp, synthetic construct
  misc_feature 1..27: note = Probe
  source 1..27: mol_type = other DNA
catgtctaacaacatggctttctcaac

SEQ ID NO: 4446 - DNA, 28 bp, synthetic construct
  misc_feature 1..28: note = Probe
  source 1..28: mol_type = other DNA
catgtctaacaacatggctttctcaact

SEQ ID NO: 4447 - DNA, 32 bp, synthetic construct
  misc_feature 1..32: note = Probe
  source 1..32: mol_type = other DNA
cattaaattatgataatcatatttaccaaatg

SEQ ID NO: 4448 - DNA, 50 bp, synthetic construct
  misc_feature 1..50: note = Probe
  source 1..50: mol_type = other DNA
cattaaccttttaagttaaagattaagagaaccaacacctctttacagtg

SEQ ID NO: 4449 - DNA, 37 bp, synthetic construct
  misc_feature 1..37: note = Probe
  source 1..37: mol_type = other DNA
cattcttgcgacccgggttcgattcccgggcggcgca

SEQ ID NO: 4450 - DNA, 39 bp, synthetic construct
  misc_feature 1..39: note = Probe
  source 1..39: mol_type = other DNA
cattcttgcgacccgggttcgattcccgggcggcgcact

SEQ ID NO: 4451 - DNA, 40 bp, synthetic construct
  misc_feature 1..40: note = Probe
  source 1..40: mol_type = other DNA
cattcttgcgacccgggttcgattcccgggcggcgcactt

SEQ ID NO: 4452 - DNA, 41 bp, synthetic construct
  misc_feature 1..41: note = Probe
  source 1..41: mol_type = other DNA
cattcttgcgacccgggttcgattcccgggcggcgcactta

SEQ ID NO: 4453 - DNA, 50 bp, synthetic construct
  misc_feature 1..50: note = Probe
  source 1..50: mol_type = other DNA
cattcttgcgacccgggttcgattcccgggcggcgcacttagtttttttt

SEQ ID NO: 4454 - DNA, 39 bp, synthetic construct
  misc_feature 1..39: note = Probe
  source 1..39: mol_type = other DNA
cattcttgcgacccgggttcgattcccgggcggcgcata

SEQ ID NO: 4455 - DNA, 40 bp, synthetic construct
  misc_feature 1..40: note = Probe
  source 1..40: mol_type = other DNA
cattcttgcgacccgggttcgattcccgggcggcgcatag

SEQ ID NO: 4456 - DNA, 50 bp, synthetic construct
  misc_feature 1..50: note = Probe
  source 1..50: mol_type = other DNA
cattggactgtaaatctaaagacaggggttaggcctctttttaccagctc

SEQ ID NO: 4457 - DNA, 23 bp, synthetic construct
  misc_feature 1..23: note = Probe
  source 1..23: mol_type = other DNA
cattggtcgtggttgtagtccgt

SEQ ID NO: 4458 - DNA, 24 bp, synthetic construct
  misc_feature 1..24: note = Probe
  source 1..24: mol_type = other DNA
cattggtcgtggttgtagtccgtg

SEQ ID NO: 4459 - DNA, 26 bp, synthetic construct
  misc_feature 1..26: note = Probe
  source 1..26: mol_type = other DNA
cattggtcgtggttgtagtccgtgcg

SEQ ID NO: 4460 - DNA, 33 bp, synthetic construct
  misc_feature 1..33: note = Probe
  source 1..33: mol_type = other DNA
cattggtcgtggttgtagtccgtgcgagaataa

SEQ ID NO: 4461 - DNA, 35 bp, synthetic construct
  misc_feature 1..35: note = Probe
  source 1..35: mol_type = other DNA
cattggtcgtggttgtagtccgtgcgagaataatg

SEQ ID NO: 4462 - DNA, 30 bp, synthetic construct
  misc_feature 1..30: note = Probe
  source 1..30: mol_type = other DNA
cattggtggttcagtggtagaattctcgcc

SEQ ID NO: 4463 - DNA, 31 bp, synthetic construct
  misc_feature 1..31: note = Probe
  source 1..31: mol_type = other DNA
cattggtggttcagtggtagaattctcgcct

SEQ ID NO: 4464 - DNA, 32 bp, synthetic construct
  misc_feature 1..32: note = Probe
  source 1..32: mol_type = other DNA
cattggtggttcagtggtagaattctcgcctg

SEQ ID NO: 4465 - DNA, 33 bp, synthetic construct
  misc_feature 1..33: note = Probe
  source 1..33: mol_type = other DNA
cattggtggttcagtggtagaattctcgcctgc

SEQ ID NO: 4466 - DNA, 34 bp, synthetic construct
  misc_feature 1..34: note = Probe
  source 1..34: mol_type = other DNA
cattggtggttcagtggtagaattctcgcctgcc

SEQ ID NO: 4467 - DNA, 17 bp, synthetic construct
  misc_feature 1..17: note = Probe
  source 1..17: mol_type = other DNA
catttcataactttgtc

SEQ ID NO: 4468 - DNA, 27 bp, synthetic construct
  misc_feature 1..27: note = Probe
  source 1..27: mol_type = other DNA
ccaaaaattttggtgcaactccaaata

SEQ ID NO: 4469 - DNA, 23 bp, synthetic construct
  misc_feature 1..23: note = Probe
  source 1..23: mol_type = other DNA
ccaaaacatcagattgtgaatct

SEQ ID NO: 4470 - DNA, 27 bp, synthetic construct
  misc_feature 1..27: note = Probe
  source 1..27: mol_type = other DNA
ccaaaacatcagattgtgaatctgaca

SEQ ID NO: 4471 - DNA, 28 bp, synthetic construct
  misc_feature 1..28: note = Probe
  source 1..28: mol_type = other DNA
ccaaaacatcagattgtgaatctgacaa

SEQ ID NO: 4472 - DNA, 29 bp, synthetic construct
  misc_feature 1..29: note = Probe
  source 1..29: mol_type = other DNA
ccaaaacatcagattgtgaatctgacaac

SEQ ID NO: 4473 - DNA, 30 bp, synthetic construct
  misc_feature 1..30: note = Probe
  source 1..30: mol_type = other DNA
ccaaaacatcagattgtgaatctgacaaca

SEQ ID NO: 4474 - DNA, 31 bp, synthetic construct
  misc_feature 1..31: note = Probe
  source 1..31: mol_type = other DNA
ccaaaacatcagattgtgaatctgacaacag

SEQ ID NO: 4475 - DNA, 32 bp, synthetic construct
  misc_feature 1..32: note = Probe
  source 1..32: mol_type = other DNA
ccaaaacatcagattgtgaatctgacaacaga

SEQ ID NO: 4476 - DNA, 33 bp, synthetic construct
  misc_feature 1..33: note = Probe
  source 1..33: mol_type = other DNA
ccaaaacatcagattgtgaatctgacaacagag

SEQ ID NO: 4477 - DNA, 34 bp, synthetic construct
  misc_feature 1..34: note = Probe
  source 1..34: mol_type = other DNA
ccaaaacatcagattgtgaatctgacaacagagg

SEQ ID NO: 4478 - DNA, 35 bp, synthetic construct
  misc_feature 1..35: note = Probe
  source 1..35: mol_type = other DNA
ccaaaacatcagattgtgaatctgacaacagaggc

SEQ ID NO: 4479 - DNA, 36 bp, synthetic construct
  misc_feature 1..36: note = Probe
  source 1..36: mol_type = other DNA
ccaaaacatcagattgtgaatctgacaacagaggct

SEQ ID NO: 4480 - DNA, 48 bp, synthetic construct
  misc_feature 1..48: note = Probe
  source 1..48: mol_type = other DNA
ccaaaacatcagattgtgaatctgacaacagaggcttacgacccctta

SEQ ID NO: 4481 - DNA, 49 bp, synthetic construct
  misc_feature 1..49: note = Probe
  source 1..49: mol_type = other DNA
ccaaaacatcagattgtgaatctgacaacagaggcttacgaccccttat

SEQ ID NO: 4482 - DNA, 50 bp, synthetic construct
  misc_feature 1..50: note = Probe
  source 1..50: mol_type = other DNA
ccaaaacatcagattgtgaatctgacaacagaggcttacgaccccttatt

SEQ ID NO: 4483 - DNA, 17 bp, synthetic construct
  misc_feature 1..17: note = Probe
  source 1..17: mol_type = other DNA
ccaaacccactccacct

SEQ ID NO: 4484 - DNA, 40 bp, synthetic construct
  misc_feature 1..40: note = Probe
  source 1..40: mol_type = other DNA
ccaaagacaccccccacagtttatgtagcttacctcctca

SEQ ID NO: 4485 - DNA, 50 bp, synthetic construct
  misc_feature 1..50: note = Probe
  source 1..50: mol_type = other DNA
ccaaagacaccccccacagtttatgtagcttacctcctcaaagcaataca

SEQ ID NO: 4486 - DNA, 19 bp, synthetic construct
  misc_feature 1..19: note = Probe
  source 1..19: mol_type = other DNA
ccaacacctctttacagtg

SEQ ID NO: 4487 - DNA, 20 bp, synthetic construct
  misc_feature 1..20: note = Probe
  source 1..20: mol_type = other DNA
ccaacacctctttacagtga

SEQ ID NO: 4488 - DNA, 21 bp, synthetic construct
  misc_feature 1..21: note = Probe
  source 1..21: mol_type = other DNA
ccaacacctctttacagtgaa

SEQ ID NO: 4489 - DNA, 22 bp, synthetic construct
  misc_feature 1..22: note = Probe
  source 1..22: mol_type = other DNA
ccaacacctctttacagtgaaa

SEQ ID NO: 4490 - DNA, 23 bp, synthetic construct
  misc_feature 1..23: note = Probe
  source 1..23: mol_type = other DNA
ccaacacctctttacagtgaaat

SEQ ID NO: 4491 - DNA, 17 bp, synthetic construct
  misc_feature 1..17: note = Probe
  source 1..17: mol_type = other DNA
ccaacttacacttagga

SEQ ID NO: 4492 - DNA, 18 bp, synthetic construct
  misc_feature 1..18: note = Probe
  source 1..18: mol_type = other DNA
ccaacttacacttaggag

SEQ ID NO: 4493 - DNA, 19 bp, synthetic construct
  misc_feature 1..19: note = Probe
  source 1..19: mol_type = other DNA
ccaacttacacttaggaga

SEQ ID NO: 4494 - DNA, 21 bp, synthetic construct
  misc_feature 1..21: note = Probe
  source 1..21: mol_type = other DNA
ccaacttacacttaggagatt

SEQ ID NO: 4495 - DNA, 24 bp, synthetic construct
  misc_feature 1..24: note = Probe
  source 1..24: mol_type = other DNA
ccaacttacacttaggagatttca

SEQ ID NO: 4496 - DNA, 25 bp, synthetic construct
  misc_feature 1..25: note = Probe
  source 1..25: mol_type = other DNA
ccaacttacacttaggagatttcaa

SEQ ID NO: 4497 - DNA, 26 bp, synthetic construct
  misc_feature 1..26: note = Probe
  source 1..26: mol_type = other DNA
ccaacttacacttaggagatttcaac

SEQ ID NO: 4498 - DNA, 29 bp, synthetic construct
  misc_feature 1..29: note = Probe
  source 1..29: mol_type = other DNA
ccaacttacacttaggagatttcaactta

SEQ ID NO: 4499 - DNA, 31 bp, synthetic construct
  misc_feature 1..31: note = Probe
  source 1..31: mol_type = other DNA
ccaacttacacttaggagatttcaacttaac

SEQ ID NO: 4500 - DNA, 35 bp, synthetic construct
  misc_feature 1..35: note = Probe
  source 1..35: mol_type = other DNA
ccaacttacacttaggagatttcaacttaacttga

SEQ ID NO: 4501 - DNA, 36 bp, synthetic construct
  misc_feature 1..36: note = Probe
  source 1..36: mol_type = other DNA
ccaacttacacttaggagatttcaacttaacttgac

SEQ ID NO: 4502 - DNA, 38 bp, synthetic construct
  misc_feature 1..38: note = Probe
  source 1..38: mol_type = other DNA
ccaacttacacttaggagatttcaacttaacttgaccg

SEQ ID NO: 4503 - DNA, 39 bp, synthetic construct
  misc_feature 1..39: note = Probe
  source 1..39: mol_type = other DNA
ccaacttacacttaggagatttcaacttaacttgaccgc

SEQ ID NO: 4504 - DNA, 43 bp, synthetic construct
  misc_feature 1..43: note = Probe
  source 1..43: mol_type = other DNA
ccaacttacacttaggagatttcaacttaacttgaccgctctg

SEQ ID NO: 4505 - DNA, 44 bp, synthetic construct
  misc_feature 1..44: note = Probe
  source 1..44: mol_type = other DNA
ccaacttacacttaggagatttcaacttaacttgaccgctctga

SEQ ID NO: 4506 - DNA, 45 bp, synthetic construct
  misc_feature 1..45: note = Probe
  source 1..45: mol_type = other DNA
ccaacttacacttaggagatttcaacttaacttgaccgctctgag

SEQ ID NO: 4507 - DNA, 46 bp, synthetic construct
  misc_feature 1..46: note = Probe
  source 1..46: mol_type = other DNA
ccaacttacacttaggagatttcaacttaacttgaccgctctgagc

SEQ ID NO: 4508 - DNA, 48 bp, synthetic construct
  misc_feature 1..48: note = Probe
  source 1..48: mol_type = other DNA
ccaacttacacttaggagatttcaacttaacttgaccgctctgagcta

SEQ ID NO: 4509 - DNA, 49 bp, synthetic construct
  misc_feature 1..49: note = Probe
  source 1..49: mol_type = other DNA
ccaacttacacttaggagatttcaacttaacttgaccgctctgagctaa

SEQ ID NO: 4510 - DNA, 50 bp, synthetic construct
  misc_feature 1..50: note = Probe
  source 1..50: mol_type = other DNA
ccaacttacacttaggagatttcaacttaacttgaccgctctgagctaaa

SEQ ID NO: 4511 - DNA, 19 bp, synthetic construct
  misc_feature 1..19: note = Probe
  source 1..19: mol_type = other DNA
ccaagaacagggtttgtta

SEQ ID NO: 4512 - DNA, 16 bp, synthetic construct
  misc_feature 1..16: note = Probe
  source 1..16: mol_type = other DNA
ccaagagccttcaaag

SEQ ID NO: 4513 - DNA, 32 bp, synthetic construct
  misc_feature 1..32: note = Probe
  source 1..32: mol_type = other DNA
ccaagagccttcaaagccctcagtaagttgca

SEQ ID NO: 4514 - DNA, 50 bp, synthetic construct
  misc_feature 1..50: note = Probe
  source 1..50: mol_type = other DNA
ccaagagccttcaaagccctcagtaagttgcaatacttaatttctgtaac

SEQ ID NO: 4515 - DNA, 36 bp, synthetic construct
  misc_feature 1..36: note = Probe
  source 1..36: mol_type = other DNA
ccaaggtcgcgggttcgatccccgtacgggccacga

SEQ ID NO: 4516 - DNA, 36 bp, synthetic construct
  misc_feature 1..36: note = Probe
  source 1..36: mol_type = other DNA
ccaaggtcgcgggttcgatccccgtacgggccactg

SEQ ID NO: 4517 - DNA, 25 bp, synthetic construct
  misc_feature 1..25: note = Probe
  source 1..25: mol_type = other DNA
ccaattaactagttttgacaacatt

SEQ ID NO: 4518 - DNA, 27 bp, synthetic construct
  misc_feature 1..27: note = Probe
  source 1..27: mol_type = other DNA
ccaattaactagttttgacaacattca

SEQ ID NO: 4519 - DNA, 37 bp, synthetic construct
  misc_feature 1..37: note = Probe
  source 1..37: mol_type = other DNA
ccaattaactagttttgacaacattcaaaaaagagta

SEQ ID NO: 4520 - DNA, 38 bp, synthetic construct
  misc_feature 1..38: note = Probe
  source 1..38: mol_type = other DNA
ccaattaactagttttgacaacattcaaaaaagagtaa

SEQ ID NO: 4521 - DNA, 39 bp, synthetic construct
  misc_feature 1..39: note = Probe
  source 1..39: mol_type = other DNA
ccaattaactagttttgacaacattcaaaaaagagtaat

SEQ ID NO: 4522 - DNA, 40 bp, synthetic construct
  misc_feature 1..40: note = Probe
  source 1..40: mol_type = other DNA
ccaattaactagttttgacaacattcaaaaaagagtaata

SEQ ID NO: 4523 - DNA, 24 bp, synthetic construct
  misc_feature 1..24: note = Probe
  source 1..24: mol_type = other DNA
ccacacccacccaagaacagggtt

SEQ ID NO: 4524 - DNA, 25 bp, synthetic construct
  misc_feature 1..25: note = Probe
  source 1..25: mol_type = other DNA
ccacacccacccaagaacagggttt

SEQ ID NO: 4525 - DNA, 26 bp, synthetic construct
  misc_feature 1..26: note = Probe
  source 1..26: mol_type = other DNA
ccacacccacccaagaacagggtttg

SEQ ID NO: 4526 - DNA, 27 bp, synthetic construct
  misc_feature 1..27: note = Probe
  source 1..27: mol_type = other DNA
ccacacccacccaagaacagggtttgt

SEQ ID NO: 4527 - DNA, 29 bp, synthetic construct
  misc_feature 1..29: note = Probe
  source 1..29: mol_type = other DNA
ccacacccacccaagaacagggtttgtta

SEQ ID NO: 4528 - DNA, 26 bp, synthetic construct
  misc_feature 1..26: note = Probe
  source 1..26: mol_type = other DNA
ccacatggtctagcggttaggattcc

SEQ ID NO: 4529 - DNA, 23 bp, synthetic construct
  misc_feature 1..23: note = Probe
  source 1..23: mol_type = other DNA
ccacccaagaacagggtttgtta

SEQ ID NO: 4530 - DNA, 17 bp, synthetic construct
  misc_feature 1..17: note = Probe
  source 1..17: mol_type = other DNA
ccacgcgggaggcccgg

SEQ ID NO: 4531 - DNA, 41 bp, synthetic construct
  misc_feature 1..41: note = Probe
  source 1..41: mol_type = other DNA
ccacgcgggaggcccgggttcgattcccggccaatgcacga

SEQ ID NO: 4532 - DNA, 41 bp, synthetic construct
  misc_feature 1..41: note = Probe
  source 1..41: mol_type = other DNA
ccacgcgggaggcccgggttcgattcccggccaatgcagca

SEQ ID NO: 4533 - DNA, 40 bp, synthetic construct
  misc_feature 1..40: note = Probe
  source 1..40: mol_type = other DNA
ccacgcgggaggcccgggttcgattcccggcccatgcagc

SEQ ID NO: 4534 - DNA, 41 bp, synthetic construct
  misc_feature 1..41: note = Probe
  source 1..41: mol_type = other DNA
ccacgcgggaggcccgggttcgattcccggcccatgcagca

SEQ ID NO: 4535 - DNA, 29 bp, synthetic construct
  misc_feature 1..29: note = Probe
  source 1..29: mol_type = other DNA
ccactgtaaagctaacttagcattaacct

SEQ ID NO: 4536 - DNA, 31 bp, synthetic construct
  misc_feature 1..31: note = Probe
  source 1..31: mol_type = other DNA
ccactgtaaagctaacttagcattaaccttt

SEQ ID NO: 4537 - DNA, 33 bp, synthetic construct
  misc_feature 1..33: note = Probe
  source 1..33: mol_type = other DNA
ccactgtaaagctaacttagcattaacctttta

SEQ ID NO: 4538 - DNA, 17 bp, synthetic construct
  misc_feature 1..17: note = Probe
  source 1..17: mol_type = other DNA
ccagaggtcgatggatc

SEQ ID NO: 4539 - DNA, 18 bp, synthetic construct
  misc_feature 1..18: note = Probe
  source 1..18: mol_type = other DNA
ccagaggtcgatggatcg

SEQ ID NO: 4540 - DNA, 16 bp, synthetic construct
  misc_feature 1..16: note = Probe
  source 1..16: mol_type = other DNA
ccagaggttccgggtt

SEQ ID NO: 4541 - DNA, 17 bp, synthetic construct
  misc_feature 1..17: note = Probe
  source 1..17: mol_type = other DNA
ccagaggttccgggttc

SEQ ID NO: 4542 - DNA, 18 bp, synthetic construct
  misc_feature 1..18: note = Probe
  source 1..18: mol_type = other DNA
ccagaggttccgggttcg

SEQ ID NO: 4543 - DNA, 29 bp, synthetic construct
  misc_feature 1..29: note = Probe
  source 1..29: mol_type = other DNA
ccagagtgtagcttaacacaaagcaccca

SEQ ID NO: 4544 - DNA, 33 bp, synthetic construct
  misc_feature 1..33: note = Probe
  source 1..33: mol_type = other DNA
ccagagtgtagcttaacacaaagcacccaactt

SEQ ID NO: 4545 - DNA, 39 bp, synthetic construct
  misc_feature 1..39: note = Probe
  source 1..39: mol_type = other DNA
ccagagtgtagcttaacacaaagcacccaacttacactt

SEQ ID NO: 4546 - DNA, 44 bp, synthetic construct
  misc_feature 1..44: note = Probe
  source 1..44: mol_type = other DNA
ccagagtgtagcttaacacaaagcacccaacttacacttaggag

SEQ ID NO: 4547 - DNA, 45 bp, synthetic construct
  misc_feature 1..45: note = Probe
  source 1..45: mol_type = other DNA
ccagagtgtagcttaacacaaagcacccaacttacacttaggaga

SEQ ID NO: 4548 - DNA, 46 bp, synthetic construct
  misc_feature 1..46: note = Probe
  source 1..46: mol_type = other DNA
ccagagtgtagcttaacacaaagcacccaacttacacttaggagat

SEQ ID NO: 4549 - DNA, 50 bp, synthetic construct
  misc_feature 1..50: note = Probe
  source 1..50: mol_type = other DNA
ccagagtgtagcttaacacaaagcacccaacttacacttaggagatttca

SEQ ID NO: 4550 - DNA, 32 bp, synthetic construct
  misc_feature 1..32: note = Probe
  source 1..32: mol_type = other DNA
ccagcgatccgagttcaaatctcggtggaacc

SEQ ID NO: 4551 - DNA, 33 bp, synthetic construct
  misc_feature 1..33: note = Probe
  source 1..33: mol_type = other DNA
ccagcgatccgagttcaaatctcggtggaacct

SEQ ID NO: 4552 - DNA, 36 bp, synthetic construct
  misc_feature 1..36: note = Probe
  source 1..36: mol_type = other DNA
ccagcgatccgagttcaaatctcggtggaacctgca

SEQ ID NO: 4553 - DNA, 32 bp, synthetic construct
  misc_feature 1..32: note = Probe
  source 1..32: mol_type = other DNA
ccagcgatccgagttcaaatctcggtgggacc

SEQ ID NO: 4554 - DNA, 36 bp, synthetic construct
  misc_feature 1..36: note = Probe
  source 1..36: mol_type = other DNA
ccagcgatccgagttcaaatctcggtgggacctcac

SEQ ID NO: 4555 - DNA, 33 bp, synthetic construct
  misc_feature 1..33: note = Probe
  source 1..33: mol_type = other DNA
ccagcgatccgagttcgagtctcggtggaacct

SEQ ID NO: 4556 - DNA, 17 bp, synthetic construct
  misc_feature 1..17: note = Probe
  source 1..17: mol_type = other DNA
ccagctttggggggttc

SEQ ID NO: 4557 - DNA, 32 bp, synthetic construct
  misc_feature 1..32: note = Probe
  source 1..32: mol_type = other DNA
ccagctttggggggttcgattccttccttttt

SEQ ID NO: 4558 - DNA, 35 bp, synthetic construct
  misc_feature 1..35: note = Probe
  source 1..35: mol_type = other DNA
ccagctttggggggttcgattccttccttttttgt

SEQ ID NO: 4559 - DNA, 36 bp, synthetic construct
  misc_feature 1..36: note = Probe
  source 1..36: mol_type = other DNA
ccagctttggggggttcgattccttccttttttgtc

SEQ ID NO: 4560 - DNA, 37 bp, synthetic construct
  misc_feature 1..37: note = Probe
  source 1..37: mol_type = other DNA
ccagctttggggggttcgattccttccttttttgtct

SEQ ID NO: 4561 - DNA, 31 bp, synthetic construct
  misc_feature 1..31: note = Probe
  source 1..31: mol_type = other DNA
ccaggcggcccgggttcgactcccggtgtgg

SEQ ID NO: 4562 - DNA, 34 bp, synthetic construct
  misc_feature 1..34: note = Probe
  source 1..34: mol_type = other DNA
ccaggcggcccgggttcgactcccggtgtgggaa

SEQ ID NO: 4563 - DNA, 37 bp, synthetic construct
  misc_feature 1..37: note = Probe
  source 1..37: mol_type = other DNA
ccaggcggcccgggttcgactcccggtgtgggaacgc

SEQ ID NO: 4564 - DNA, 18 bp, synthetic construct
  misc_feature 1..18: note = Probe
  source 1..18: mol_type = other DNA
ccagggattgtgggttcg

SEQ ID NO: 4565 - DNA, 37 bp, synthetic construct
  misc_feature 1..37: note = Probe
  source 1..37: mol_type = other DNA
ccagggattgtgggttcgagtcccatctggggtggcc

SEQ ID NO: 4566 - DNA, 37 bp, synthetic construct
  misc_feature 1..37: note = Probe
  source 1..37: mol_type = other DNA
ccaggggtcgcgagttcaaatctcgctggggcctcgg

SEQ ID NO: 4567 - DNA, 37 bp, synthetic construct
  misc_feature 1..37: note = Probe
  source 1..37: mol_type = other DNA
ccaggggtcgcgagttcaattctcgctggggcctgtg

SEQ ID NO: 4568 - DNA, 16 bp, synthetic construct
  misc_feature 1..16: note = Probe
  source 1..16: mol_type = other DNA
ccagggtcgtgggttc

SEQ ID NO: 4569 - DNA, 31 bp, synthetic construct
  misc_feature 1..31: note = Probe
  source 1..31: mol_type = other DNA
ccagggtcgtgggttcgagccccacgttggg

SEQ ID NO: 4570 - DNA, 33 bp, synthetic construct
  misc_feature 1..33: note = Probe
  source 1..33: mol_type = other DNA
ccagggtcgtgggttcgagccccacgttgggcg

SEQ ID NO: 4571 - DNA, 37 bp, synthetic construct
  misc_feature 1..37: note = Probe
  source 1..37: mol_type = other DNA
ccaggtggcccgggttcgactcccggtatgggaacaa

SEQ ID NO: 4572 - DNA, 45 bp, synthetic construct
  misc_feature 1..45: note = Probe
  source 1..45: mol_type = other DNA
ccagtcatttcgatggcgtgggttcgaatcccaccgctgccacac

SEQ ID NO: 4573 - DNA, 45 bp, synthetic construct
  misc_feature 1..45: note = Probe
  source 1..45: mol_type = other DNA
ccagtcttgtaaaccggagatgaaaacctttttccaaggacaaat

SEQ ID NO: 4574 - DNA, 50 bp, synthetic construct
  misc_feature 1..50: note = Probe
  source 1..50: mol_type = other DNA
ccagttgattagggtgcttagctgttaactaagtgtttgtgggtttaagt

SEQ ID NO: 4575 - DNA, 44 bp, synthetic construct
  misc_feature 1..44: note = Probe
  source 1..44: mol_type = other DNA
ccataacccagaggtcgatggatcgaaaccatcctctgctaggt

SEQ ID NO: 4576 - DNA, 32 bp, synthetic construct
  misc_feature 1..32: note = Probe
  source 1..32: mol_type = other DNA
ccataccccgaaaatgttggttatacccttcc

SEQ ID NO: 4577 - DNA, 41 bp, synthetic construct
  misc_feature 1..41: note = Probe
  source 1..41: mol_type = other DNA
ccataccccgaaaatgttggttatacccttcccgtactaat

SEQ ID NO: 4578 - DNA, 42 bp, synthetic construct
  misc_feature 1..42: note = Probe
  source 1..42: mol_type = other DNA
ccataccccgaaaatgttggttatacccttcccgtactaatt

SEQ ID NO: 4579 - DNA, 27 bp, synthetic construct
  misc_feature 1..27: note = Probe
  source 1..27: mol_type = other DNA
ccatagtgtagtggttatcacgtctgc

SEQ ID NO: 4580 - DNA, 29 bp, synthetic construct
  misc_feature 1..29: note = Probe
  source 1..29: mol_type = other DNA
ccatagtgtagtggttatcacgtctgctt

SEQ ID NO: 4581 - DNA, 32 bp, synthetic construct
  misc_feature 1..32: note = Probe
  source 1..32: mol_type = other DNA
ccatagtgtagtggttatcacgtctgctttac

SEQ ID NO: 4582 - DNA, 31 bp, synthetic construct
  misc_feature 1..31: note = Probe
  source 1..31: mol_type = other DNA
ccatatggtctagcggttaggattcctggtt

SEQ ID NO: 4583 - DNA, 50 bp, synthetic construct
  misc_feature 1..50: note = Probe
  source 1..50: mol_type = other DNA
ccatggggttggcttgaaaccagctttggggggttcgattccttcctttt

SEQ ID NO: 4584 - DNA, 29 bp, synthetic construct
  misc_feature 1..29: note = Probe
  source 1..29: mol_type = other DNA
ccatgtctaacaacatggctttctcaact

SEQ ID NO: 4585 - DNA, 39 bp, synthetic construct
  misc_feature 1..39: note = Probe
  source 1..39: mol_type = other DNA
ccattcttgcgacccgggttcgattcccgggcggcgcac

SEQ ID NO: 4586 - DNA, 40 bp, synthetic construct
  misc_feature 1..40: note = Probe
  source 1..40: mol_type = other DNA
ccattcttgcgacccgggttcgattcccgggcggcgcact

SEQ ID NO: 4587 - DNA, 41 bp, synthetic construct
  misc_feature 1..41: note = Probe
  source 1..41: mol_type = other DNA
ccattcttgcgacccgggttcgattcccgggcggcgcactt

SEQ ID NO: 4588 - DNA, 43 bp, synthetic construct
  misc_feature 1..43: note = Probe
  source 1..43: mol_type = other DNA
ccattcttgcgacccgggttcgattcccgggcggcgcacttag

SEQ ID NO: 4589 - DNA, 24 bp, synthetic construct
  misc_feature 1..24: note = Probe
  source 1..24: mol_type = other DNA
ccattgtgctttgcacgcgtgggt

SEQ ID NO: 4590 - DNA, 19 bp, synthetic construct
  misc_feature 1..19: note = Probe
  source 1..19: mol_type = other DNA
ccatttcataactttgtca

SEQ ID NO: 4591 - DNA, 24 bp, synthetic construct
  misc_feature 1..24: note = Probe
  source 1..24: mol_type = other DNA
cccaaaaattttggtgcaactcca

SEQ ID NO: 4592 - DNA, 27 bp, synthetic construct
  misc_feature 1..27: note = Probe
  source 1..27: mol_type = other DNA
cccaaaaattttggtgcaactccaaat

SEQ ID NO: 4593 - DNA, 28 bp, synthetic construct
  misc_feature 1..28: note = Probe
  source 1..28: mol_type = other DNA
cccaaaaattttggtgcaactccaaata

SEQ ID NO: 4594 - DNA, 37 bp, synthetic construct
  misc_feature 1..37: note = Probe
  source 1..37: mol_type = other DNA
cccaaaaattttggtgcaactccaaataaaagtaata

SEQ ID NO: 4595 - DNA, 18 bp, synthetic construct
  misc_feature 1..18: note = Probe
  source 1..18: mol_type = other DNA
cccaaacccactccacct

SEQ ID NO: 4596 - DNA, 31 bp, synthetic construct
  misc_feature 1..31: note = Probe
  source 1..31: mol_type = other DNA
cccaaagacaccccccacagtttatgtagct

SEQ ID NO: 4597 - DNA, 50 bp, synthetic construct
  misc_feature 1..50: note = Probe
  source 1..50: mol_type = other DNA
cccaaagacaccccccacagtttatgtagcttacctcctcaaagcaatac

SEQ ID NO: 4598 - DNA, 24 bp, synthetic construct
  misc_feature 1..24: note = Probe
  source 1..24: mol_type = other DNA
cccaactaaatactaccgtatggc

SEQ ID NO: 4599 - DNA, 17 bp, synthetic construct
  misc_feature 1..17: note = Probe
  source 1..17: mol_type = other DNA
cccaacttacacttagg

SEQ ID NO: 4600 - DNA, 20 bp, synthetic construct
  misc_feature 1..20: note = Probe
  source 1..20: mol_type = other DNA
cccaacttacacttaggaga

SEQ ID NO: 4601 - DNA, 22 bp, synthetic construct
  misc_feature 1..22: note = Probe
  source 1..22: mol_type = other DNA
cccaacttacacttaggagatt

SEQ ID NO: 4602 - DNA, 25 bp, synthetic construct
  misc_feature 1..25: note = Probe
  source 1..25: mol_type = other DNA
cccaacttacacttaggagatttca

SEQ ID NO: 4603 - DNA, 26 bp, synthetic construct
  misc_feature 1..26: note = Probe
  source 1..26: mol_type = other DNA
cccaacttacacttaggagatttcaa

SEQ ID NO: 4604 - DNA, 27 bp, synthetic construct
  misc_feature 1..27: note = Probe
  source 1..27: mol_type = other DNA
cccaacttacacttaggagatttcaac

SEQ ID NO: 4605 - DNA, 32 bp, synthetic construct
  misc_feature 1..32: note = Probe
  source 1..32: mol_type = other DNA
cccaacttacacttaggagatttcaacttaac

SEQ ID NO: 4606 - DNA, 39 bp, synthetic construct
  misc_feature 1..39: note = Probe
  source 1..39: mol_type = other DNA
cccaacttacacttaggagatttcaacttaacttgaccg

SEQ ID NO: 4607 - DNA, 40 bp, synthetic construct
  misc_feature 1..40: note = Probe
  source 1..40: mol_type = other DNA
cccaacttacacttaggagatttcaacttaacttgaccgc

SEQ ID NO: 4608 - DNA, 44 bp, synthetic construct
  misc_feature 1..44: note = Probe
  source 1..44: mol_type = other DNA
cccaacttacacttaggagatttcaacttaacttgaccgctctg

SEQ ID NO: 4609 - DNA, 45 bp, synthetic construct
  misc_feature 1..45: note = Probe
  source 1..45: mol_type = other DNA
cccaacttacacttaggagatttcaacttaacttgaccgctctga

SEQ ID NO: 4610 - DNA, 46 bp, synthetic construct
  misc_feature 1..46: note = Probe
  source 1..46: mol_type = other DNA
cccaacttacacttaggagatttcaacttaacttgaccgctctgag

SEQ ID NO: 4611 - DNA, 48 bp, synthetic construct
  misc_feature 1..48: note = Probe
  source 1..48: mol_type = other DNA
cccaacttacacttaggagatttcaacttaacttgaccgctctgagct

SEQ ID NO: 4612 - DNA, 49 bp, synthetic construct
  misc_feature 1..49: note = Probe
  source 1..49: mol_type = other DNA
cccaacttacacttaggagatttcaacttaacttgaccgctctgagcta

SEQ ID NO: 4613 - DNA, 50 bp, synthetic construct
  misc_feature 1..50: note = Probe
  source 1..50: mol_type = other DNA
cccaacttacacttaggagatttcaacttaacttgaccgctctgagctaa

SEQ ID NO: 4614 - DNA, 24 bp, synthetic construct
  misc_feature 1..24: note = Probe
  source 1..24: mol_type = other DNA
cccacacccacccaagaacagggt

SEQ ID NO: 4615 - DNA, 25 bp, synthetic construct
  misc_feature 1..25: note = Probe
  source 1..25: mol_type = other DNA
cccacacccacccaagaacagggtt

SEQ ID NO: 4616 - DNA, 26 bp, synthetic construct
  misc_feature 1..26: note = Probe
  source 1..26: mol_type = other DNA
cccacacccacccaagaacagggttt

SEQ ID NO: 4617 - DNA, 27 bp, synthetic construct
  misc_feature 1..27: note = Probe
  source 1..27: mol_type = other DNA
cccacacccacccaagaacagggtttg

SEQ ID NO: 4618 - DNA, 29 bp, synthetic construct
  misc_feature 1..29: note = Probe
  source 1..29: mol_type = other DNA
cccacacccacccaagaacagggtttgtt

SEQ ID NO: 4619 - DNA, 30 bp, synthetic construct
  misc_feature 1..30: note = Probe
  source 1..30: mol_type = other DNA
cccacacccacccaagaacagggtttgtta

SEQ ID NO: 4620 - DNA, 31 bp, synthetic construct
  misc_feature 1..31: note = Probe
  source 1..31: mol_type = other DNA
cccacacccacccaagaacagggtttgttaa

SEQ ID NO: 4621 - DNA, 19 bp, synthetic construct
  misc_feature 1..19: note = Probe
  source 1..19: mol_type = other DNA
cccacccaagaacagggtt

SEQ ID NO: 4622 - DNA, 20 bp, synthetic construct
  misc_feature 1..20: note = Probe
  source 1..20: mol_type = other DNA
cccacccaagaacagggttt

SEQ ID NO: 4623 - DNA, 21 bp, synthetic construct
  misc_feature 1..21: note = Probe
  source 1..21: mol_type = other DNA
cccacccaagaacagggtttg

SEQ ID NO: 4624 - DNA, 23 bp, synthetic construct
  misc_feature 1..23: note = Probe
  source 1..23: mol_type = other DNA
cccacccaagaacagggtttgtt

SEQ ID NO: 4625 - DNA, 24 bp, synthetic construct
  misc_feature 1..24: note = Probe
  source 1..24: mol_type = other DNA
cccacccaagaacagggtttgtta

SEQ ID NO: 4626 - DNA, 16 bp, synthetic construct
  misc_feature 1..16: note = Probe
  source 1..16: mol_type = other DNA
cccacccagggacgcc

SEQ ID NO: 4627 - DNA, 34 bp, synthetic construct
  misc_feature 1..34: note = Probe
  source 1..34: mol_type = other DNA
cccaccgctgccacacctcagaaggtctcacttt

SEQ ID NO: 4628 - DNA, 17 bp, synthetic construct
  misc_feature 1..17: note = Probe
  source 1..17: mol_type = other DNA
cccagaggtcgatggat

SEQ ID NO: 4629 - DNA, 18 bp, synthetic construct
  misc_feature 1..18: note = Probe
  source 1..18: mol_type = other DNA
cccagaggtcgatggatc

SEQ ID NO: 4630 - DNA, 37 bp, synthetic construct
  misc_feature 1..37: note = Probe
  source 1..37: mol_type = other DNA
cccagaggtcgatggatcgaaaccatcctctgctatc

SEQ ID NO: 4631 - DNA, 37 bp, synthetic construct
  misc_feature 1..37: note = Probe
  source 1..37: mol_type = other DNA
cccaggcggcccgggttcgactcccggtgtgggaacg

SEQ ID NO: 4632 - DNA, 38 bp, synthetic construct
  misc_feature 1..38: note = Probe
  source 1..38: mol_type = other DNA
cccaggcggcccgggttcgactcccggtgtgggaacgc

SEQ ID NO: 4633 - DNA, 37 bp, synthetic construct
  misc_feature 1..37: note = Probe
  source 1..37: mol_type = other DNA
cccaggtggcccgggttcgactcccggtatgggaaca

SEQ ID NO: 4634 - DNA, 37 bp, synthetic construct
  misc_feature 1..37: note = Probe
  source 1..37: mol_type = other DNA
cccaggtggcccgggttcgactcccggtatgggaacg

SEQ ID NO: 4635 - DNA, 20 bp, synthetic construct
  misc_feature 1..20: note = Probe
  source 1..20: mol_type = other DNA
cccataccccgaaaatgttg

SEQ ID NO: 4636 - DNA, 21 bp, synthetic construct
  misc_feature 1..21: note = Probe
  source 1..21: mol_type = other DNA
cccataccccgaaaatgttgg

SEQ ID NO: 4637 - DNA, 23 bp, synthetic construct
  misc_feature 1..23: note = Probe
  source 1..23: mol_type = other DNA
cccataccccgaaaatgttggtt

SEQ ID NO: 4638 - DNA, 24 bp, synthetic construct
  misc_feature 1..24: note = Probe
  source 1..24: mol_type = other DNA
cccataccccgaaaatgttggtta

SEQ ID NO: 4639 - DNA, 29 bp, synthetic construct
  misc_feature 1..29: note = Probe
  source 1..29: mol_type = other DNA
cccataccccgaaaatgttggttataccc

SEQ ID NO: 4640 - DNA, 32 bp, synthetic construct
  misc_feature 1..32: note = Probe
  source 1..32: mol_type = other DNA
cccataccccgaaaatgttggttatacccttc

SEQ ID NO: 4641 - DNA, 33 bp, synthetic construct
  misc_feature 1..33: note = Probe
  source 1..33: mol_type = other DNA
cccataccccgaaaatgttggttatacccttcc

SEQ ID NO: 4642 - DNA, 41 bp, synthetic construct
  misc_feature 1..41: note = Probe
  source 1..41: mol_type = other DNA
cccataccccgaaaatgttggttatacccttcccgtactaa

SEQ ID NO: 4643 - DNA, 42 bp, synthetic construct
  misc_feature 1..42: note = Probe
  source 1..42: mol_type = other DNA
cccataccccgaaaatgttggttatacccttcccgtactaat

SEQ ID NO: 4644 - DNA, 43 bp, synthetic construct
  misc_feature 1..43: note = Probe
  source 1..43: mol_type = other DNA
cccataccccgaaaatgttggttatacccttcccgtactaatt

SEQ ID NO: 4645 - DNA, 33 bp, synthetic construct
  misc_feature 1..33: note = Probe
  source 1..33: mol_type = other DNA
cccatatggtctagcggttaggattcctggttt

SEQ ID NO: 4646 - DNA, 25 bp, synthetic construct
  misc_feature 1..25: note = Probe
  source 1..25: mol_type = other DNA
cccatctggggtggcctgtgacttt

SEQ ID NO: 4647 - DNA, 33 bp, synthetic construct
  misc_feature 1..33: note = Probe
  source 1..33: mol_type = other DNA
cccatggtgtaatggttagcactctggactttg

SEQ ID NO: 4648 - DNA, 21 bp, synthetic construct
  misc_feature 1..21: note = Probe
  source 1..21: mol_type = other DNA
cccatgtctaacaacatggct

SEQ ID NO: 4649 - DNA, 29 bp, synthetic construct
  misc_feature 1..29: note = Probe
  source 1..29: mol_type = other DNA
cccatgtctaacaacatggctttctcaac

SEQ ID NO: 4650 - DNA, 30 bp, synthetic construct
  misc_feature 1..30: note = Probe
  source 1..30: mol_type = other DNA
cccatgtctaacaacatggctttctcaact

SEQ ID NO: 4651 - DNA, 25 bp, synthetic construct
  misc_feature 1..25: note = Probe
  source 1..25: mol_type = other DNA
cccattcttgcgacccgggttcgat

SEQ ID NO: 4652 - DNA, 36 bp, synthetic construct
  misc_feature 1..36: note = Probe
  source 1..36: mol_type = other DNA
cccattcttgcgacccgggttcgattcccgggcggc

SEQ ID NO: 4653 - DNA, 38 bp, synthetic construct
  misc_feature 1..38: note = Probe
  source 1..38: mol_type = other DNA
cccattcttgcgacccgggttcgattcccgggcggcgc

SEQ ID NO: 4654 - DNA, 40 bp, synthetic construct
  misc_feature 1..40: note = Probe
  source 1..40: mol_type = other DNA
cccattcttgcgacccgggttcgattcccgggcggcgcac

SEQ ID NO: 4655 - DNA, 41 bp, synthetic construct
  misc_feature 1..41: note = Probe
  source 1..41: mol_type = other DNA
cccattcttgcgacccgggttcgattcccgggcggcgcact

SEQ ID NO: 4656 - DNA, 42 bp, synthetic construct
  misc_feature 1..42: note = Probe
  source 1..42: mol_type = other DNA
cccattcttgcgacccgggttcgattcccgggcggcgcactt

SEQ ID NO: 4657 - DNA, 43 bp, synthetic construct
  misc_feature 1..43: note = Probe
  source 1..43: mol_type = other DNA
cccattcttgcgacccgggttcgattcccgggcggcgcactta

SEQ ID NO: 4658 - DNA, 44 bp, synthetic construct
  misc_feature 1..44: note = Probe
  source 1..44: mol_type = other DNA
cccattcttgcgacccgggttcgattcccgggcggcgcacttag

SEQ ID NO: 4659 - DNA, 45 bp, synthetic construct
  misc_feature 1..45: note = Probe
  source 1..45: mol_type = other DNA
cccattcttgcgacccgggttcgattcccgggcggcgcacttagt

SEQ ID NO: 4660 - DNA, 49 bp, synthetic construct
  misc_feature 1..49: note = Probe
  source 1..49: mol_type = other DNA
cccattcttgcgacccgggttcgattcccgggcggcgcacttagttttt

SEQ ID NO: 4661 - DNA, 50 bp, synthetic construct
  misc_feature 1..50: note = Probe
  source 1..50: mol_type = other DNA
cccattcttgcgacccgggttcgattcccgggcggcgcacttagtttttt

SEQ ID NO: 4662 - DNA, 40 bp, synthetic construct
  misc_feature 1..40: note = Probe
  source 1..40: mol_type = other DNA
cccattcttgcgacccgggttcgattcccgggcggcgcat

SEQ ID NO: 4663 - DNA, 43 bp, synthetic construct
  misc_feature 1..43: note = Probe
  source 1..43: mol_type = other DNA
cccattcttgcgacccgggttcgattcccgggcggcgcatagg

SEQ ID NO: 4664 - DNA, 44 bp, synthetic construct
  misc_feature 1..44: note = Probe
  source 1..44: mol_type = other DNA
cccattcttgcgacccgggttcgattcccgggcggcgcataggc

SEQ ID NO: 4665 - DNA, 45 bp, synthetic construct
  misc_feature 1..45: note = Probe
  source 1..45: mol_type = other DNA
cccattcttgcgacccgggttcgattcccgggcggcgcataggcg

SEQ ID NO: 4666 - DNA, 50 bp, synthetic construct
  misc_feature 1..50: note = Probe
  source 1..50: mol_type = other DNA
cccattcttgcgacccgggttcgattcccgggcggcgcataggcgttttg

SEQ ID NO: 4667 - DNA, 24 bp, synthetic construct
  misc_feature 1..24: note = Probe
  source 1..24: mol_type = other DNA
ccccaaaaattttggtgcaactcc

SEQ ID NO: 4668 - DNA, 25 bp, synthetic construct
  misc_feature 1..25: note = Probe
  source 1..25: mol_type = other DNA
ccccaaaaattttggtgcaactcca

SEQ ID NO: 4669 - DNA, 26 bp, synthetic construct
  misc_feature 1..26: note = Probe
  source 1..26: mol_type = other DNA
ccccaaaaattttggtgcaactccaa

SEQ ID NO: 4670 - DNA, 27 bp, synthetic construct
  misc_feature 1..27: note = Probe
  source 1..27: mol_type = other DNA
ccccaaaaattttggtgcaactccaaa

SEQ ID NO: 4671 - DNA, 29 bp, synthetic construct
  misc_feature 1..29: note = Probe
  source 1..29: mol_type = other DNA
ccccaaaaattttggtgcaactccaaata

SEQ ID NO: 4672 - DNA, 37 bp, synthetic construct
  misc_feature 1..37: note = Probe
  source 1..37: mol_type = other DNA
ccccaaaaattttggtgcaactccaaataaaagtaat

SEQ ID NO: 4673 - DNA, 38 bp, synthetic construct
  misc_feature 1..38: note = Probe
  source 1..38: mol_type = other DNA
ccccaaaaattttggtgcaactccaaataaaagtaata

SEQ ID NO: 4674 - DNA, 25 bp, synthetic construct
  misc_feature 1..25: note = Probe
  source 1..25: mol_type = other DNA
ccccaactaaatactaccgtatggc

SEQ ID NO: 4675 - DNA, 17 bp, synthetic construct
  misc_feature 1..17: note = Probe
  source 1..17: mol_type = other DNA
ccccatgtctaacaaca

SEQ ID NO: 4676 - DNA, 21 bp, synthetic construct
  misc_feature 1..21: note = Probe
  source 1..21: mol_type = other DNA
ccccatgtctaacaacatggc

SEQ ID NO: 4677 - DNA, 22 bp, synthetic construct
  misc_feature 1..22: note = Probe
  source 1..22: mol_type = other DNA
ccccatgtctaacaacatggct

SEQ ID NO: 4678 - DNA, 23 bp, synthetic construct
  misc_feature 1..23: note = Probe
  source 1..23: mol_type = other DNA
ccccatgtctaacaacatggctt

SEQ ID NO: 4679 - DNA, 24 bp, synthetic construct
  misc_feature 1..24: note = Probe
  source 1..24: mol_type = other DNA
ccccatgtctaacaacatggcttt

SEQ ID NO: 4680 - DNA, 25 bp, synthetic construct
  misc_feature 1..25: note = Probe
  source 1..25: mol_type = other DNA
ccccatgtctaacaacatggctttc

SEQ ID NO: 4681 - DNA, 27 bp, synthetic construct
  misc_feature 1..27: note = Probe
  source 1..27: mol_type = other DNA
ccccatgtctaacaacatggctttctc

SEQ ID NO: 4682 - DNA, 28 bp, synthetic construct
  misc_feature 1..28: note = Probe
  source 1..28: mol_type = other DNA
ccccatgtctaacaacatggctttctca

SEQ ID NO: 4683 - DNA, 30 bp, synthetic construct
  misc_feature 1..30: note = Probe
  source 1..30: mol_type = other DNA
ccccatgtctaacaacatggctttctcaac

SEQ ID NO: 4684 - DNA, 31 bp, synthetic construct
  misc_feature 1..31: note = Probe
  source 1..31: mol_type = other DNA
ccccatgtctaacaacatggctttctcaact

SEQ ID NO: 4685 - DNA, 18 bp, synthetic construct
  misc_feature 1..18: note = Probe
  source 1..18: mol_type = other DNA
cccccatgtctaacaaca

SEQ ID NO: 4686 - DNA, 22 bp, synthetic construct
  misc_feature 1..22: note = Probe
  source 1..22: mol_type = other DNA
cccccatgtctaacaacatggc

SEQ ID NO: 4687 - DNA, 23 bp, synthetic construct
  misc_feature 1..23: note = Probe
  source 1..23: mol_type = other DNA
cccccatgtctaacaacatggct

SEQ ID NO: 4688 - DNA, 24 bp, synthetic construct
  misc_feature 1..24: note = Probe
  source 1..24: mol_type = other DNA
cccccatgtctaacaacatggctt

SEQ ID NO: 4689 - DNA, 25 bp, synthetic construct
  misc_feature 1..25: note = Probe
  source 1..25: mol_type = other DNA
cccccatgtctaacaacatggcttt

SEQ ID NO: 4690 - DNA, 26 bp, synthetic construct
  misc_feature 1..26: note = Probe
  source 1..26: mol_type = other DNA
cccccatgtctaacaacatggctttc

SEQ ID NO: 4691 - DNA, 27 bp, synthetic construct
  misc_feature 1..27: note = Probe
  source 1..27: mol_type = other DNA
cccccatgtctaacaacatggctttct

SEQ ID NO: 4692 - DNA, 28 bp, synthetic construct
  misc_feature 1..28: note = Probe
  source 1..28: mol_type = other DNA
cccccatgtctaacaacatggctttctc

SEQ ID NO: 4693 - DNA, 29 bp, synthetic construct
  misc_feature 1..29: note = Probe
  source 1..29: mol_type = other DNA
cccccatgtctaacaacatggctttctca

SEQ ID NO: 4694 - DNA, 30 bp, synthetic construct
  misc_feature 1..30: note = Probe
  source 1..30: mol_type = other DNA
cccccatgtctaacaacatggctttctcaa

SEQ ID NO: 4695 - DNA, 31 bp, synthetic construct
  misc_feature 1..31: note = Probe
  source 1..31: mol_type = other DNA
cccccatgtctaacaacatggctttctcaac

SEQ ID NO: 4696 - DNA, 32 bp, synthetic construct
  misc_feature 1..32: note = Probe
  source 1..32: mol_type = other DNA
cccccatgtctaacaacatggctttctcaact

SEQ ID NO: 4697 - DNA, 23 bp, synthetic construct
  misc_feature 1..23: note = Probe
  source 1..23: mol_type = other DNA
ccccgaaaatgttggttataccc

SEQ ID NO: 4698 - DNA, 28 bp, synthetic construct
  misc_feature 1..28: note = Probe
  source 1..28: mol_type = other DNA
ccccgaaaatgttggttatacccttccc

SEQ ID NO: 4699 - DNA, 29 bp, synthetic construct
  misc_feature 1..29: note = Probe
  source 1..29: mol_type = other DNA
ccccgaaaatgttggttatacccttcccg

SEQ ID NO: 4700 - DNA, 30 bp, synthetic construct
  misc_feature 1..30: note = Probe
  source 1..30: mol_type = other DNA
ccccgaaaatgttggttatacccttcccgt

SEQ ID NO: 4701 - DNA, 32 bp, synthetic construct
  misc_feature 1..32: note = Probe
  source 1..32: mol_type = other DNA
ccccgaaaatgttggttatacccttcccgtac

SEQ ID NO: 4702 - DNA, 35 bp, synthetic construct
  misc_feature 1..35: note = Probe
  source 1..35: mol_type = other DNA
ccccgaaaatgttggttatacccttcccgtactaa

SEQ ID NO: 4703 - DNA, 37 bp, synthetic construct
  misc_feature 1..37: note = Probe
  source 1..37: mol_type = other DNA
ccccgaaaatgttggttatacccttcccgtactaatt

SEQ ID NO: 4704 - DNA, 50 bp, synthetic construct
  misc_feature 1..50: note = Probe
  source 1..50: mol_type = other DNA
ccccgcctgtcacgcgggagaccggggttcgattccccgacggggaggca

SEQ ID NO: 4705 - DNA, 29 bp, synthetic construct
  misc_feature 1..29: note = Probe
  source 1..29: mol_type = other DNA
ccccgcgcaggttcgaatcctgccgacta

SEQ ID NO: 4706 - DNA, 15 bp, synthetic construct
  misc_feature 1..15: note = Probe
  source 1..15: mol_type = other DNA
ccccgctgttgctct

SEQ ID NO: 4707 - DNA, 20 bp, synthetic construct
  misc_feature 1..20: note = Probe
  source 1..20: mol_type = other DNA
ccccgggttcaatccccggc

SEQ ID NO: 4708 - DNA, 21 bp, synthetic construct
  misc_feature 1..21: note = Probe
  source 1..21: mol_type = other DNA
ccccgggttcaatccccggca

SEQ ID NO: 4709 - DNA, 23 bp, synthetic construct
  misc_feature 1..23: note = Probe
  source 1..23: mol_type = other DNA
ccccgggttcaatccccggcacc

SEQ ID NO: 4710 - DNA, 28 bp, synthetic construct
  misc_feature 1..28: note = Probe
  source 1..28: mol_type = other DNA
ccccgggttcaatccccggcacctccag

SEQ ID NO: 4711 - DNA, 29 bp, synthetic construct
  misc_feature 1..29: note = Probe
  source 1..29: mol_type = other DNA
ccccgggttcaatccccggcacctccagc

SEQ ID NO: 4712 - DNA, 28 bp, synthetic construct
  misc_feature 1..28: note = Probe
  source 1..28: mol_type = other DNA
ccccgggttcaatccccggcacctccat

SEQ ID NO: 4713 - DNA, 24 bp, synthetic construct
  misc_feature 1..24: note = Probe
  source 1..24: mol_type = other DNA
ccccgggttcaatccccggcatct

SEQ ID NO: 4714 - DNA, 20 bp, synthetic construct
  misc_feature 1..20: note = Probe
  source 1..20: mol_type = other DNA
ccccgggttcgatccccggc

SEQ ID NO: 4715 - DNA, 21 bp, synthetic construct
  misc_feature 1..21: note = Probe
  source 1..21: mol_type = other DNA
ccccgggttcgatccccggca

SEQ ID NO: 4716 - DNA, 24 bp, synthetic construct
  misc_feature 1..24: note = Probe
  source 1..24: mol_type = other DNA
ccccgggttcgatccccggcatct

SEQ ID NO: 4717 - DNA, 28 bp, synthetic construct
  misc_feature 1..28: note = Probe
  source 1..28: mol_type = other DNA
ccccgggttcgatccccggcatctccaa

SEQ ID NO: 4718 - DNA, 28 bp, synthetic construct
  misc_feature 1..28: note = Probe
  source 1..28: mol_type = other DNA
ccccgggttcgatccccggcatctccag

SEQ ID NO: 4719 - DNA, 28 bp, synthetic construct
  misc_feature 1..28: note = Probe
  source 1..28: mol_type = other DNA
ccccgggttcgatccccggcatctccat

SEQ ID NO: 4720 - DNA, 29 bp, synthetic construct
  misc_feature 1..29: note = Probe
  source 1..29: mol_type = other DNA
ccccgggttcgatccccggcatctccatt

SEQ ID NO: 4721 - DNA, 30 bp, synthetic construct
  misc_feature 1..30: note = Probe
  source 1..30: mol_type = other DNA
ccccgggttcgatccccggcatctccattg

SEQ ID NO: 4722 - DNA, 32 bp, synthetic construct
  misc_feature 1..32: note = Probe
  source 1..32: mol_type = other DNA
cccctggcggtctagtggttaggattcggcgc

SEQ ID NO: 4723 - DNA, 33 bp, synthetic construct
  misc_feature 1..33: note = Probe
  source 1..33: mol_type = other DNA
cccctggcggtctagtggttaggattcggcgct

SEQ ID NO: 4724 - DNA, 34 bp, synthetic construct
  misc_feature 1..34: note = Probe
  source 1..34: mol_type = other DNA
cccctggcggtctagtggttaggattcggcgctc

SEQ ID NO: 4725 - DNA, 35 bp, synthetic construct
  misc_feature 1..35: note = Probe
  source 1..35: mol_type = other DNA
cccctggcggtctagtggttaggattcggcgctct

SEQ ID NO: 4726 - DNA, 36 bp, synthetic construct
  misc_feature 1..36: note = Probe
  source 1..36: mol_type = other DNA
cccctggcggtctagtggttaggattcggcgctctc

SEQ ID NO: 4727 - DNA, 37 bp, synthetic construct
  misc_feature 1..37: note = Probe
  source 1..37: mol_type = other DNA
cccctggcggtctagtggttaggattcggcgctctca

SEQ ID NO: 4728 - DNA, 17 bp, synthetic construct
  misc_feature 1..17: note = Probe
  source 1..17: mol_type = other DNA
cccgaaaatgttggtta

SEQ ID NO: 4729 - DNA, 25 bp, synthetic construct
  misc_feature 1..25: note = Probe
  source 1..25: mol_type = other DNA
cccgaaaatgttggttatacccttc

SEQ ID NO: 4730 - DNA, 26 bp, synthetic construct
  misc_feature 1..26: note = Probe
  source 1..26: mol_type = other DNA
cccgaaaatgttggttatacccttcc

SEQ ID NO: 4731 - DNA, 27 bp, synthetic construct
  misc_feature 1..27: note = Probe
  source 1..27: mol_type = other DNA
cccgaaaatgttggttatacccttccc

SEQ ID NO: 4732 - DNA, 28 bp, synthetic construct
  misc_feature 1..28: note = Probe
  source 1..28: mol_type = other DNA
cccgaaaatgttggttatacccttcccg

SEQ ID NO: 4733 - DNA, 29 bp, synthetic construct
  misc_feature 1..29: note = Probe
  source 1..29: mol_type = other DNA
cccgaaaatgttggttatacccttcccgt

SEQ ID NO: 4734 - DNA, 34 bp, synthetic construct
  misc_feature 1..34: note = Probe
  source 1..34: mol_type = other DNA
cccgaaaatgttggttatacccttcccgtactaa

SEQ ID NO: 4735 - DNA, 35 bp, synthetic construct
  misc_feature 1..35: note = Probe
  source 1..35: mol_type = other DNA
cccgaaaatgttggttatacccttcccgtactaat

SEQ ID NO: 4736 - DNA, 50 bp, synthetic construct
  misc_feature 1..50: note = Probe
  source 1..50: mol_type = other DNA
cccgcctgtcacgcgggagaccggggttcaattccccgacggggaggtgt

SEQ ID NO: 4737 - DNA, 50 bp, synthetic construct
  misc_feature 1..50: note = Probe
  source 1..50: mol_type = other DNA
cccgcctgtcacgcgggagaccggggttcgattccccgacggggaggcac

SEQ ID NO: 4738 - DNA, 22 bp, synthetic construct
  misc_feature 1..22: note = Probe
  source 1..22: mol_type = other DNA
cccgccttttttcccggcggcg

SEQ ID NO: 4739 - DNA, 27 bp, synthetic construct
  misc_feature 1..27: note = Probe
  source 1..27: mol_type = other DNA
cccgccttttttcccggcggcgggaga

SEQ ID NO: 4740 - DNA, 28 bp, synthetic construct
  misc_feature 1..28: note = Probe
  source 1..28: mol_type = other DNA
cccgccttttttcccggcggcgggagaa

SEQ ID NO: 4741 - DNA, 29 bp, synthetic construct
  misc_feature 1..29: note = Probe
  source 1..29: mol_type = other DNA
cccgccttttttcccggcggcgggagaag

SEQ ID NO: 4742 - DNA, 30 bp, synthetic construct
  misc_feature 1..30: note = Probe
  source 1..30: mol_type = other DNA
cccgccttttttcccggcggcgggagaagt

SEQ ID NO: 4743 - DNA, 31 bp, synthetic construct
  misc_feature 1..31: note = Probe
  source 1..31: mol_type = other DNA
cccgccttttttcccggcggcgggagaagta

SEQ ID NO: 4744 - DNA, 32 bp, synthetic construct
  misc_feature 1..32: note = Probe
  source 1..32: mol_type = other DNA
cccgccttttttcccggcggcgggagaagtag

SEQ ID NO: 4745 - DNA, 16 bp, synthetic construct
  misc_feature 1..16: note = Probe
  source 1..16: mol_type = other DNA
cccggcacctccacca

SEQ ID NO: 4746 - DNA, 16 bp, synthetic construct
  misc_feature 1..16: note = Probe
  source 1..16: mol_type = other DNA
cccggcggcgggagaa

SEQ ID NO: 4747 - DNA, 24 bp, synthetic construct
  misc_feature 1..24: note = Probe
  source 1..24: mol_type = other DNA
cccggctagctcagtcggtagagc

SEQ ID NO: 4748 - DNA, 30 bp, synthetic construct
  misc_feature 1..30: note = Probe
  source 1..30: mol_type = other DNA
cccggctagctcagtcggtagagcatgaga

SEQ ID NO: 4749 - DNA, 28 bp, synthetic construct
  misc_feature 1..28: note = Probe
  source 1..28: mol_type = other DNA
cccggctagctcagtcggtagagcatgg

SEQ ID NO: 4750 - DNA, 30 bp, synthetic construct
  misc_feature 1..30: note = Probe
  source 1..30: mol_type = other DNA
cccggctagctcagtcggtagagcatggga

SEQ ID NO: 4751 - DNA, 29 bp, synthetic construct
  misc_feature 1..29: note = Probe
  source 1..29: mol_type = other DNA
cccgggttcaaatcccggacgagccccct

SEQ ID NO: 4752 - DNA, 29 bp, synthetic construct
  misc_feature 1..29: note = Probe
  source 1..29: mol_type = other DNA
cccgggttcaatccccggcacctccacca

SEQ ID NO: 4753 - DNA, 29 bp, synthetic construct
  misc_feature 1..29: note = Probe
  source 1..29: mol_type = other DNA
cccgggttcaattcccggtcagggaacca

SEQ ID NO: 4754 - DNA, 27 bp, synthetic construct
  misc_feature 1..27: note = Probe
  source 1..27: mol_type = other DNA
cccgggttcgatccccagcatctccag

SEQ ID NO: 4755 - DNA, 29 bp, synthetic construct
  misc_feature 1..29: note = Probe
  source 1..29: mol_type = other DNA
cccgggttcgatccccagcatctccagtg

SEQ ID NO: 4756 - DNA, 29 bp, synthetic construct
  misc_feature 1..29: note = Probe
  source 1..29: mol_type = other DNA
cccgggttcgatccccggcatctccattg

SEQ ID NO: 4757 - DNA, 29 bp, synthetic construct
  misc_feature 1..29: note = Probe
  source 1..29: mol_type = other DNA
cccgggttcgattcccggtcatggaacca

SEQ ID NO: 4758 - DNA, 36 bp, synthetic construct
  misc_feature 1..36: note = Probe
  source 1..36: mol_type = other DNA
cccggtaatcgcataaaacttaaaactttacagtca

SEQ ID NO: 4759 - DNA, 43 bp, synthetic construct
  misc_feature 1..43: note = Probe
  source 1..43: mol_type = other DNA
cccggtaatcgcataaaacttaaaactttacagtcagaggttc

SEQ ID NO: 4760 - DNA, 16 bp, synthetic construct
  misc_feature 1..16: note = Probe
  source 1..16: mol_type = other DNA
cccggtcagggaacca

SEQ ID NO: 4761 - DNA, 31 bp, synthetic construct
  misc_feature 1..31: note = Probe
  source 1..31: mol_type = other DNA
ccctcagtaagttgcaatacttaatttctgt

SEQ ID NO: 4762 - DNA, 32 bp, synthetic construct
  misc_feature 1..32: note = Probe
  source 1..32: mol_type = other DNA
ccctcagtaagttgcaatacttaatttctgta

SEQ ID NO: 4763 - DNA, 33 bp, synthetic construct
  misc_feature 1..33: note = Probe
  source 1..33: mol_type = other DNA
ccctcagtaagttgcaatacttaatttctgtaa

SEQ ID NO: 4764 - DNA, 33 bp, synthetic construct
  misc_feature 1..33: note = Probe
  source 1..33: mol_type = other DNA
ccctggtggtctagtggctaggattcggcgctt

SEQ ID NO: 4765 - DNA, 22 bp, synthetic construct
  misc_feature 1..22: note = Probe
  source 1..22: mol_type = other DNA
ccctggtggtctagtggttagg

SEQ ID NO: 4766 - DNA, 23 bp, synthetic construct
  misc_feature 1..23: note = Probe
  source 1..23: mol_type = other DNA
ccctggtggtctagtggttagga

SEQ ID NO: 4767 - DNA, 25 bp, synthetic construct
  misc_feature 1..25: note = Probe
  source 1..25: mol_type = other DNA
ccctggtggtctagtggttaggatt

SEQ ID NO: 4768 - DNA, 26 bp, synthetic construct
  misc_feature 1..26: note = Probe
  source 1..26: mol_type = other DNA
ccctggtggtctagtggttaggattc

SEQ ID NO: 4769 - DNA, 27 bp, synthetic construct
  misc_feature 1..27: note = Probe
  source 1..27: mol_type = other DNA
ccctggtggtctagtggttaggattcg

SEQ ID NO: 4770 - DNA, 28 bp, synthetic construct
  misc_feature 1..28: note = Probe
  source 1..28: mol_type = other DNA
ccctggtggtctagtggttaggattcgg

SEQ ID NO: 4771 - DNA, 29 bp, synthetic construct
  misc_feature 1..29: note = Probe
  source 1..29: mol_type = other DNA
ccctggtggtctagtggttaggattcggc

SEQ ID NO: 4772 - DNA, 50 bp, synthetic construct
  misc_feature 1..50: note = Probe
  source 1..50: mol_type = other DNA
ccctggtggtctagtggttaggattcggcgctctcaccgccgcggcccgg

SEQ ID NO: 4773 - DNA, 27 bp, synthetic construct
  misc_feature 1..27: note = Probe
  source 1..27: mol_type = other DNA
ccctggttcaaatccgggtgccccctc

SEQ ID NO: 4774 - DNA, 29 bp, synthetic construct
  misc_feature 1..29: note = Probe
  source 1..29: mol_type = other DNA
ccctggttcaaatccgggtgccccctcaa

SEQ ID NO: 4775 - DNA, 26 bp, synthetic construct
  misc_feature 1..26: note = Probe
  source 1..26: mol_type = other DNA
ccctggttcgatcccgggtttcggca

SEQ ID NO: 4776 - DNA, 24 bp, synthetic construct
  misc_feature 1..24: note = Probe
  source 1..24: mol_type = other DNA
ccgaaaatgttggttatacccttc

SEQ ID NO: 4777 - DNA, 25 bp, synthetic construct
  misc_feature 1..25: note = Probe
  source 1..25: mol_type = other DNA
ccgaaaatgttggttatacccttcc

SEQ ID NO: 4778 - DNA, 26 bp, synthetic construct
  misc_feature 1..26: note = Probe
  source 1..26: mol_type = other DNA
ccgaaaatgttggttatacccttccc

SEQ ID NO: 4779 - DNA, 27 bp, synthetic construct
  misc_feature 1..27: note = Probe
  source 1..27: mol_type = other DNA
ccgaaaatgttggttatacccttcccg

SEQ ID NO: 4780 - DNA, 28 bp, synthetic construct
  misc_feature 1..28: note = Probe
  source 1..28: mol_type = other DNA
ccgaaaatgttggttatacccttcccgt

SEQ ID NO: 4781 - DNA, 29 bp, synthetic construct
  misc_feature 1..29: note = Probe
  source 1..29: mol_type = other DNA
ccgaaaatgttggttatacccttcccgta

SEQ ID NO: 4782 - DNA, 31 bp, synthetic construct
  misc_feature 1..31: note = Probe
  source 1..31: mol_type = other DNA
ccgaaaatgttggttatacccttcccgtact

SEQ ID NO: 4783 - DNA, 33 bp, synthetic construct
  misc_feature 1..33: note = Probe
  source 1..33: mol_type = other DNA
ccgaaaatgttggttatacccttcccgtactaa

SEQ ID NO: 4784 - DNA, 34 bp, synthetic construct
  misc_feature 1..34: note = Probe
  source 1..34: mol_type = other DNA
ccgaaaggttggtggttcgagcccacccagggac

SEQ ID NO: 4785 - DNA, 37 bp, synthetic construct
  misc_feature 1..37: note = Probe
  source 1..37: mol_type = other DNA
ccgaaaggttggtggttcgagcccacccagggacgcc

SEQ ID NO: 4786 - DNA, 18 bp, synthetic construct
  misc_feature 1..18: note = Probe
  source 1..18: mol_type = other DNA
ccgaagatcacgggttcg

SEQ ID NO: 4787 - DNA, 36 bp, synthetic construct
  misc_feature 1..36: note = Probe
  source 1..36: mol_type = other DNA
ccgaggttgtgagttcgagcctcacctggagcattg

SEQ ID NO: 4788 - DNA, 17 bp, synthetic construct
  misc_feature 1..17: note = Probe
  source 1..17: mol_type = other DNA
ccgcagcaacctcggtt

SEQ ID NO: 4789 - DNA, 19 bp, synthetic construct
  misc_feature 1..19: note = Probe
  source 1..19: mol_type = other DNA
ccgcagcaacctcggttcg

SEQ ID NO: 4790 - DNA, 32 bp, synthetic construct
  misc_feature 1..32: note = Probe
  source 1..32: mol_type = other DNA
ccgcagcaacctcggttcgaatccgagtcacg

SEQ ID NO: 4791 - DNA, 33 bp, synthetic construct
  misc_feature 1..33: note = Probe
  source 1..33: mol_type = other DNA
ccgcagcaacctcggttcgaatccgagtcacgg

SEQ ID NO: 4792 - DNA, 37 bp, synthetic construct
  misc_feature 1..37: note = Probe
  source 1..37: mol_type = other DNA
ccgcagcaacctcggttcgaatccgagtcacggcaaa

SEQ ID NO: 4793 - DNA, 37 bp, synthetic construct
  misc_feature 1..37: note = Probe
  source 1..37: mol_type = other DNA
ccgcagcaacctcggttcgaatccgagtcacggcagg

SEQ ID NO: 4794 - DNA, 38 bp, synthetic construct
  misc_feature 1..38: note = Probe
  source 1..38: mol_type = other DNA
ccgcagcaacctcggttcgaatccgagtcacggcaggt

SEQ ID NO: 4795 - DNA, 37 bp, synthetic construct
  misc_feature 1..37: note = Probe
  source 1..37: mol_type = other DNA
ccgcagcaacctcggttcgaatccgagtcacggcatt

SEQ ID NO: 4796 - DNA, 38 bp, synthetic construct
  misc_feature 1..38: note = Probe
  source 1..38: mol_type = other DNA
ccgcagcaacctcggttcgaatccgagtcacggcattg

SEQ ID NO: 4797 - DNA, 36 bp, synthetic construct
  misc_feature 1..36: note = Probe
  source 1..36: mol_type = other DNA
ccgccgcggcccgggttcgattcccggtcagggaaa

SEQ ID NO: 4798 - DNA, 36 bp, synthetic construct
  misc_feature 1..36: note = Probe
  source 1..36: mol_type = other DNA
ccgccgcggcccgggttcgattcccggtcagggaag

SEQ ID NO: 4799 - DNA, 37 bp, synthetic construct
  misc_feature 1..37: note = Probe
  source 1..37: mol_type = other DNA
ccgccgcggcccgggttcgattcccggtcagggaagc

SEQ ID NO: 4800 - DNA, 36 bp, synthetic construct
  misc_feature 1..36: note = Probe
  source 1..36: mol_type = other DNA
ccgccgcggcccgggttcgattcccggtcagggaat

SEQ ID NO: 4801 - DNA, 37 bp, synthetic construct
  misc_feature 1..37: note = Probe
  source 1..37: mol_type = other DNA
ccgccgcggcccgggttcgattcccggtcagggaatt

SEQ ID NO: 4802 - DNA, 38 bp, synthetic construct
  misc_feature 1..38: note = Probe
  source 1..38: mol_type = other DNA
ccgccgcggcccgggttcgattcccggtcagggaattg

SEQ ID NO: 4803 - DNA, 49 bp, synthetic construct
  misc_feature 1..49: note = Probe
  source 1..49: mol_type = other DNA
ccgcctgtcacgcgggagaccggggttcgattccccgacggggaggcac

SEQ ID NO: 4804 - DNA, 50 bp, synthetic construct
  misc_feature 1..50: note = Probe
  source 1..50: mol_type = other DNA
ccgcctgtcacgcgggagaccggggttcgattccccgacggggaggcaca

SEQ ID NO: 4805 - DNA, 27 bp, synthetic construct
  misc_feature 1..27: note = Probe
  source 1..27: mol_type = other DNA
ccgccttttttcccggcggcgggagaa

SEQ ID NO: 4806 - DNA, 29 bp, synthetic construct
  misc_feature 1..29: note = Probe
  source 1..29: mol_type = other DNA
ccgccttttttcccggcggcgggagaagt

SEQ ID NO: 4807 - DNA, 31 bp, synthetic construct
  misc_feature 1..31: note = Probe
  source 1..31: mol_type = other DNA
ccgcggcccgggttcgattcccggtcaggga

SEQ ID NO: 4808 - DNA, 32 bp, synthetic construct
  misc_feature 1..32: note = Probe
  source 1..32: mol_type = other DNA
ccgcggcccgggttcgattcccggtcagggaa

SEQ ID NO: 4809 - DNA, 33 bp, synthetic construct
  misc_feature 1..33: note = Probe
  source 1..33: mol_type = other DNA
ccgcggcccgggttcgattcccggtcagggaaa

SEQ ID NO: 4810 - DNA, 33 bp, synthetic construct
  misc_feature 1..33: note = Probe
  source 1..33: mol_type = other DNA
ccgcggcccgggttcgattcccggtcagggaag

SEQ ID NO: 4811 - DNA, 33 bp, synthetic construct
  misc_feature 1..33: note = Probe
  source 1..33: mol_type = other DNA
ccgcggcccgggttcgattcccggtcagggaat

SEQ ID NO: 4812 - DNA, 35 bp, synthetic construct
  misc_feature 1..35: note = Probe
  source 1..35: mol_type = other DNA
ccgcggcccgggttcgattcccggtcagggaattg

SEQ ID NO: 4813 - DNA, 19 bp, synthetic construct
  misc_feature 1..19: note = Probe
  source 1..19: mol_type = other DNA
ccgctggtgtagtggtatc

SEQ ID NO: 4814 - DNA, 28 bp, synthetic construct
  misc_feature 1..28: note = Probe
  source 1..28: mol_type = other DNA
ccgctggtgtagtggtatcatgcaagat

SEQ ID NO: 4815 - DNA, 25 bp, synthetic construct
  misc_feature 1..25: note = Probe
  source 1..25: mol_type = other DNA
ccggagatgaaaacctttttccaag

SEQ ID NO: 4816 - DNA, 30 bp, synthetic construct
  misc_feature 1..30: note = Probe
  source 1..30: mol_type = other DNA
ccggagatgaaaacctttttccaaggacaa

SEQ ID NO: 4817 - DNA, 31 bp, synthetic construct
  misc_feature 1..31: note = Probe
  source 1..31: mol_type = other DNA
ccggagatgaaaacctttttccaaggacaaa

SEQ ID NO: 4818 - DNA, 32 bp, synthetic construct
  misc_feature 1..32: note = Probe
  source 1..32: mol_type = other DNA
ccggagatgaaaacctttttccaaggacaaat

SEQ ID NO: 4819 - DNA, 33 bp, synthetic construct
  misc_feature 1..33: note = Probe
  source 1..33: mol_type = other DNA
ccggagatgaaaacctttttccaaggacaaatc

SEQ ID NO: 4820 - DNA, 26 bp, synthetic construct
  misc_feature 1..26: note = Probe
  source 1..26: mol_type = other DNA
ccggatagctcagtcggtagagcatc

SEQ ID NO: 4821 - DNA, 15 bp, synthetic construct
  misc_feature 1..15: note = Probe
  source 1..15: mol_type = other DNA
ccggcggcgggagaa

SEQ ID NO: 4822 - DNA, 17 bp, synthetic construct
  misc_feature 1..17: note = Probe
  source 1..17: mol_type = other DNA
ccggcggcgggagaagt

SEQ ID NO: 4823 - DNA, 25 bp, synthetic construct
  misc_feature 1..25: note = Probe
  source 1..25: mol_type = other DNA
ccggctagctcagtcggtagagcat

SEQ ID NO: 4824 - DNA, 26 bp, synthetic construct
  misc_feature 1..26: note = Probe
  source 1..26: mol_type = other DNA
ccggctagctcagtcggtagagcatg

SEQ ID NO: 4825 - DNA, 33 bp, synthetic construct
  misc_feature 1..33: note = Probe
  source 1..33: mol_type = other DNA
ccggctagctcagtcggtagagcatgagactct

SEQ ID NO: 4826 - DNA, 50 bp, synthetic construct
  misc_feature 1..50: note = Probe
  source 1..50: mol_type = other DNA
ccggctagctcagtcggtagagcatgagactcttaatctcagggtcgtgg

SEQ ID NO: 4827 - DNA, 28 bp, synthetic construct
  misc_feature 1..28: note = Probe
  source 1..28: mol_type = other DNA
ccggctagctcagtcggtagagcatggg

SEQ ID NO: 4828 - DNA, 50 bp, synthetic construct
  misc_feature 1..50: note = Probe
  source 1..50: mol_type = other DNA
ccggctagctcagtcggtagagcatgggactcttaatcccagggtcgtgg

SEQ ID NO: 4829 - DNA, 29 bp, synthetic construct
  misc_feature 1..29: note = Probe
  source 1..29: mol_type = other DNA
ccggggttcaattccccgacggggaggtg

SEQ ID NO: 4830 - DNA, 29 bp, synthetic construct
  misc_feature 1..29: note = Probe
  source 1..29: mol_type = other DNA
ccggggttcgattccccgacggggaggca

SEQ ID NO: 4831 - DNA, 27 bp, synthetic construct
  misc_feature 1..27: note = Probe
  source 1..27: mol_type = other DNA
ccggtaatcgcataaaacttaaaactt

SEQ ID NO: 4832 - DNA, 35 bp, synthetic construct
  misc_feature 1..35: note = Probe
  source 1..35: mol_type = other DNA
ccggtaatcgcataaaacttaaaactttacagtca

SEQ ID NO: 4833 - DNA, 24 bp, synthetic construct
  misc_feature 1..24: note = Probe
  source 1..24: mol_type = other DNA
ccgtagtgtagtggtcatcacgtt

SEQ ID NO: 4834 - DNA, 27 bp, synthetic construct
  misc_feature 1..27: note = Probe
  source 1..27: mol_type = other DNA
ccgtagtgtagtggtcatcacgttcgc

SEQ ID NO: 4835 - DNA, 31 bp, synthetic construct
  misc_feature 1..31: note = Probe
  source 1..31: mol_type = other DNA
ccgtagtgtagtggtcatcacgttcgcctaa

SEQ ID NO: 4836 - DNA, 32 bp, synthetic construct
  misc_feature 1..32: note = Probe
  source 1..32: mol_type = other DNA
ccgtagtgtagtggtcatcacgttcgcctaac

SEQ ID NO: 4837 - DNA, 23 bp, synthetic construct
  misc_feature 1..23: note = Probe
  source 1..23: mol_type = other DNA
ccgtagtgtagtggttatcacgt

SEQ ID NO: 4838 - DNA, 24 bp, synthetic construct
  misc_feature 1..24: note = Probe
  source 1..24: mol_type = other DNA
ccgtagtgtagtggttatcacgtt

SEQ ID NO: 4839 - DNA, 27 bp, synthetic construct
  misc_feature 1..27: note = Probe
  source 1..27: mol_type = other DNA
ccgtagtgtagtggttatcacgttcgc

SEQ ID NO: 4840 - DNA, 28 bp, synthetic construct
  misc_feature 1..28: note = Probe
  source 1..28: mol_type = other DNA
ccgtagtgtagtggttatcacgttcgcc

SEQ ID NO: 4841 - DNA, 29 bp, synthetic construct
  misc_feature 1..29: note = Probe
  source 1..29: mol_type = other DNA
ccgtagtgtagtggttatcacgttcgcct

SEQ ID NO: 4842 - DNA, 50 bp, synthetic construct
  misc_feature 1..50: note = Probe
  source 1..50: mol_type = other DNA
ccgtagtgtagtggttatcacgttcgcctaacacgcgaaaggtccccggt

SEQ ID NO: 4843 - DNA, 30 bp, synthetic construct
  misc_feature 1..30: note = Probe
  source 1..30: mol_type = other DNA
ccgtagtgtagtggttatcacgttcgcctc

SEQ ID NO: 4844 - DNA, 31 bp, synthetic construct
  misc_feature 1..31: note = Probe
  source 1..31: mol_type = other DNA
ccgtagtgtagtggttatcacgttcgcctca

SEQ ID NO: 4845 - DNA, 32 bp, synthetic construct
  misc_feature 1..32: note = Probe
  source 1..32: mol_type = other DNA
ccgtagtgtagtggttatcacgttcgcctcac

SEQ ID NO: 4846 - DNA, 33 bp, synthetic construct
  misc_feature 1..33: note = Probe
  source 1..33: mol_type = other DNA
ccgtagtgtagtggttatcacgttcgcctcaca

SEQ ID NO: 4847 - DNA, 50 bp, synthetic construct
  misc_feature 1..50: note = Probe
  source 1..50: mol_type = other DNA
ccgtagtgtagtggttatcacgttcgcctcacacgcgaaaggtccccggt

SEQ ID NO: 4848 - DNA, 25 bp, synthetic construct
  misc_feature 1..25: note = Probe
  source 1..25: mol_type = other DNA
ccgtgatcgtatagtggttagtact

SEQ ID NO: 4849 - DNA, 26 bp, synthetic construct
  misc_feature 1..26: note = Probe
  source 1..26: mol_type = other DNA
ccgtgatcgtatagtggttagtactc

SEQ ID NO: 4850 - DNA, 27 bp, synthetic construct
  misc_feature 1..27: note = Probe
  source 1..27: mol_type = other DNA
ccgtgatcgtatagtggttagtactct

SEQ ID NO: 4851 - DNA, 28 bp, synthetic construct
  misc_feature 1..28: note = Probe
  source 1..28: mol_type = other DNA
ccgtgatcgtatagtggttagtactctg

SEQ ID NO: 4852 - DNA, 23 bp, synthetic construct
  misc_feature 1..23: note = Probe
  source 1..23: mol_type = other DNA
ccgttaacttccaattaactagt

SEQ ID NO: 4853 - DNA, 29 bp, synthetic construct
  misc_feature 1..29: note = Probe
  source 1..29: mol_type = other DNA
ccgttaacttccaattaactagttttgac

SEQ ID NO: 4854 - DNA, 30 bp, synthetic construct
  misc_feature 1..30: note = Probe
  source 1..30: mol_type = other DNA
ccgttaacttccaattaactagttttgaca

SEQ ID NO: 4855 - DNA, 50 bp, synthetic construct
  misc_feature 1..50: note = Probe
  source 1..50: mol_type = other DNA
ccgttaacttccaattaactagttttgacaacattcaaaaaagagtaata

SEQ ID NO: 4856 - DNA, 43 bp, synthetic construct
  misc_feature 1..43: note = Probe
  source 1..43: mol_type = other DNA
cctaagccagggattgtgggttcgagtcccatctggggtggcc

SEQ ID NO: 4857 - DNA, 24 bp, synthetic construct
  misc_feature 1..24: note = Probe
  source 1..24: mol_type = other DNA
cctagccccaaacccactccacct

SEQ ID NO: 4858 - DNA, 18 bp, synthetic construct
  misc_feature 1..18: note = Probe
  source 1..18: mol_type = other DNA
cctagcctttctattagc

SEQ ID NO: 4859 - DNA, 17 bp, synthetic construct
  misc_feature 1..17: note = Probe
  source 1..17: mol_type = other DNA
cctcaaagcaatacact

SEQ ID NO: 4860 - DNA, 19 bp, synthetic construct
  misc_feature 1..19: note = Probe
  source 1..19: mol_type = other DNA
cctcaaagcaatacactga

SEQ ID NO: 4861 - DNA, 32 bp, synthetic construct
  misc_feature 1..32: note = Probe
  source 1..32: mol_type = other DNA
cctcaaagcaatacactgaaaatgtttagacg

SEQ ID NO: 4862 - DNA, 37 bp, synthetic construct
  misc_feature 1..37: note = Probe
  source 1..37: mol_type = other DNA
cctcaaagcaatacactgaaaatgtttagacgggctc

SEQ ID NO: 4863 - DNA, 48 bp, synthetic construct
  misc_feature 1..48: note = Probe
  source 1..48: mol_type = other DNA
cctcaaagcaatacactgaaaatgtttagacgggctcacatcacccca

SEQ ID NO: 4864 - DNA, 49 bp, synthetic construct
  misc_feature 1..49: note = Probe
  source 1..49: mol_type = other DNA
cctcaaagcaatacactgaaaatgtttagacgggctcacatcaccccat

SEQ ID NO: 4865 - DNA, 25 bp, synthetic construct
  misc_feature 1..25: note = Probe
  source 1..25: mol_type = other DNA
cctcagtaagttgcaatacttaatt

SEQ ID NO: 4866 - DNA, 29 bp, synthetic construct
  misc_feature 1..29: note = Probe
  source 1..29: mol_type = other DNA
cctcagtaagttgcaatacttaatttctg

SEQ ID NO: 4867 - DNA, 32 bp, synthetic construct
  misc_feature 1..32: note = Probe
  source 1..32: mol_type = other DNA
cctcagtaagttgcaatacttaatttctgtaa

SEQ ID NO: 4868 - DNA, 39 bp, synthetic construct
  misc_feature 1..39: note = Probe
  source 1..39: mol_type = other DNA
cctcctcaaagcaatacactgaaaatgtttagacgggct

SEQ ID NO: 4869 - DNA, 22 bp, synthetic construct
  misc_feature 1..22: note = Probe
  source 1..22: mol_type = other DNA
cctcgttagtatagtggtgagt

SEQ ID NO: 4870 - DNA, 32 bp, synthetic construct
  misc_feature 1..32: note = Probe
  source 1..32: mol_type = other DNA
cctcgttagtatagtggtgagtatccccgcct

SEQ ID NO: 4871 - DNA, 35 bp, synthetic construct
  misc_feature 1..35: note = Probe
  source 1..35: mol_type = other DNA
cctcgttagtatagtggttagtatccccgcctgtc

SEQ ID NO: 4872 - DNA, 29 bp, synthetic construct
  misc_feature 1..29: note = Probe
  source 1..29: mol_type = other DNA
cctggtggtctagtggctaggattcggcg

SEQ ID NO: 4873 - DNA, 31 bp, synthetic construct
  misc_feature 1..31: note = Probe
  source 1..31: mol_type = other DNA
cctggtggtctagtggctaggattcggcgct

SEQ ID NO: 4874 - DNA, 25 bp, synthetic construct
  misc_feature 1..25: note = Probe
  source 1..25: mol_type = other DNA
cctggtggtctagtggttaggattc

SEQ ID NO: 4875 - DNA, 26 bp, synthetic construct
  misc_feature 1..26: note = Probe
  source 1..26: mol_type = other DNA
cctggtggtctagtggttaggattcg

SEQ ID NO: 4876 - DNA, 27 bp, synthetic construct
  misc_feature 1..27: note = Probe
  source 1..27: mol_type = other DNA
cctggtggtctagtggttaggattcgg

SEQ ID NO: 4877 - DNA, 36 bp, synthetic construct
  misc_feature 1..36: note = Probe
  source 1..36: mol_type = other DNA
cctggtggtctagtggttaggattcggcgctctcac

SEQ ID NO: 4878 - DNA, 16 bp, synthetic construct
  misc_feature 1..16: note = Probe
  source 1..16: mol_type = other DNA
cctgtcacgcgggaga

SEQ ID NO: 4879 - DNA, 23 bp, synthetic construct
  misc_feature 1..23: note = Probe
  source 1..23: mol_type = other DNA
cctgtcacgcgggagaccggggt

SEQ ID NO: 4880 - DNA, 45 bp, synthetic construct
  misc_feature 1..45: note = Probe
  source 1..45: mol_type = other DNA
cctgtcacgcgggagaccggggttcaattccccgacggggaggtg

SEQ ID NO: 4881 - DNA, 50 bp, synthetic construct
  misc_feature 1..50: note = Probe
  source 1..50: mol_type = other DNA
cctgtcacgcgggagaccggggttcaattccccgacggggaggtgtgtag

SEQ ID NO: 4882 - DNA, 44 bp, synthetic construct
  misc_feature 1..44: note = Probe
  source 1..44: mol_type = other DNA
cctgtcacgcgggagaccggggttcgattccccgacggggagaa

SEQ ID NO: 4883 - DNA, 45 bp, synthetic construct
  misc_feature 1..45: note = Probe
  source 1..45: mol_type = other DNA
cctgtcacgcgggagaccggggttcgattccccgacggggagaaa

SEQ ID NO: 4884 - DNA, 49 bp, synthetic construct
  misc_feature 1..49: note = Probe
  source 1..49: mol_type = other DNA
cctgtcacgcgggagaccggggttcgattccccgacggggagaaaagtt

SEQ ID NO: 4885 - DNA, 45 bp, synthetic construct
  misc_feature 1..45: note = Probe
  source 1..45: mol_type = other DNA
cctgtcacgcgggagaccggggttcgattccccgacggggagagt

SEQ ID NO: 4886 - DNA, 45 bp, synthetic construct
  misc_feature 1..45: note = Probe
  source 1..45: mol_type = other DNA
cctgtcacgcgggagaccggggttcgattccccgacggggaggca

SEQ ID NO: 4887 - DNA, 48 bp, synthetic construct
  misc_feature 1..48: note = Probe
  source 1..48: mol_type = other DNA
cctgtcacgcgggagaccggggttcgattccccgacggggaggcacag

SEQ ID NO: 4888 - DNA, 49 bp, synthetic construct
  misc_feature 1..49: note = Probe
  source 1..49: mol_type = other DNA
cctgtcacgcgggagaccggggttcgattccccgacggggaggcacagt

SEQ ID NO: 4889 - DNA, 50 bp, synthetic construct
  misc_feature 1..50: note = Probe
  source 1..50: mol_type = other DNA
cctgtcacgcgggagaccggggttcgattccccgacggggaggcacagta

SEQ ID NO: 4890 - DNA, 45 bp, synthetic construct
  misc_feature 1..45: note = Probe
  source 1..45: mol_type = other DNA
cctgtcacgcgggagaccggggttcgattccccgacggggaggcc

SEQ ID NO: 4891 - DNA, 50 bp, synthetic construct
  misc_feature 1..50: note = Probe
  source 1..50: mol_type = other DNA
cctgtcacgcgggagaccggggttcgattccccgacggggaggccgggta

SEQ ID NO: 4892 - DNA, 19 bp, synthetic construct
  misc_feature 1..19: note = Probe
  source 1..19: mol_type = other DNA
ccttccaagcagttgaccc

SEQ ID NO: 4893 - DNA, 23 bp, synthetic construct
  misc_feature 1..23: note = Probe
  source 1..23: mol_type = other DNA
ccttccaagcagttgacccgggt

SEQ ID NO: 4894 - DNA, 24 bp, synthetic construct
  misc_feature 1..24: note = Probe
  source 1..24: mol_type = other DNA
ccttccaagcagttgacccgggtt

SEQ ID NO: 4895 - DNA, 25 bp, synthetic construct
  misc_feature 1..25: note = Probe
  source 1..25: mol_type = other DNA
ccttccaagcagttgacccgggttc

SEQ ID NO: 4896 - DNA, 16 bp, synthetic construct
  misc_feature 1..16: note = Probe
  source 1..16: mol_type = other DNA
ccttcgatagctcagc

SEQ ID NO: 4897 - DNA, 19 bp, synthetic construct
  misc_feature 1..19: note = Probe
  source 1..19: mol_type = other DNA
ccttcgatagctcagctgg

SEQ ID NO: 4898 - DNA, 19 bp, synthetic construct
  misc_feature 1..19: note = Probe
  source 1..19: mol_type = other DNA
ccttcgatagctcagttgg

SEQ ID NO: 4899 - DNA, 25 bp, synthetic construct
  misc_feature 1..25: note = Probe
  source 1..25: mol_type = other DNA
ccttcgatagctcagttggtagagc

SEQ ID NO: 4900 - DNA, 27 bp, synthetic construct
  misc_feature 1..27: note = Probe
  source 1..27: mol_type = other DNA
ccttgtagtataaactaatacaccagt

SEQ ID NO: 4901 - DNA, 32 bp, synthetic construct
  misc_feature 1..32: note = Probe
  source 1..32: mol_type = other DNA
ccttgtagtataaactaatacaccagtcttgt

SEQ ID NO: 4902 - DNA, 31 bp, synthetic construct
  misc_feature 1..31: note = Probe
  source 1..31: mol_type = other DNA
ccttttaagttaaagattaagagaaccaaca

SEQ ID NO: 4903 - DNA, 46 bp, synthetic construct
  misc_feature 1..46: note = Probe
  source 1..46: mol_type = other DNA
ccttttaagttaaagattaagagaaccaacacctctttacagtgaa

SEQ ID NO: 4904 - DNA, 49 bp, synthetic construct
  misc_feature 1..49: note = Probe
  source 1..49: mol_type = other DNA
ccttttaagttaaagattaagagaaccaacacctctttacagtgaaatg

SEQ ID NO: 4905 - DNA, 50 bp, synthetic construct
  misc_feature 1..50: note = Probe
  source 1..50: mol_type = other DNA
ccttttaagttaaagattaagagaaccaacacctctttacagtgaaatgc

SEQ ID NO: 4906 - DNA, 23 bp, synthetic construct
  misc_feature 1..23: note = Probe
  source 1..23: mol_type = other DNA
ccttttttcccggcggcgggaga

SEQ ID NO: 4907 - DNA, 24 bp, synthetic construct
  misc_feature 1..24: note = Probe
  source 1..24: mol_type = other DNA
ccttttttcccggcggcgggagaa

SEQ ID NO: 4908 - DNA, 25 bp, synthetic construct
  misc_feature 1..25: note = Probe
  source 1..25: mol_type = other DNA
ccttttttcccggcggcgggagaag

SEQ ID NO: 4909 - DNA, 26 bp, synthetic construct
  misc_feature 1..26: note = Probe
  source 1..26: mol_type = other DNA
ccttttttcccggcggcgggagaagt

SEQ ID NO: 4910 - DNA, 27 bp, synthetic construct
  misc_feature 1..27: note = Probe
  source 1..27: mol_type = other DNA
ccttttttcccggcggcgggagaagta

SEQ ID NO: 4911 - DNA, 29 bp, synthetic construct
  misc_feature 1..29: note = Probe
  source 1..29: mol_type = other DNA
ccttttttcccggcggcgggagaagtaga

SEQ ID NO: 4912 - DNA, 23 bp, synthetic construct
  misc_feature 1..23: note = Probe
  source 1..23: mol_type = other DNA
cgaaaatgttggttatacccttc

SEQ ID NO: 4913 - DNA, 25 bp, synthetic construct
  misc_feature 1..25: note = Probe
  source 1..25: mol_type = other DNA
cgaaaatgttggttatacccttccc

SEQ ID NO: 4914 - DNA, 27 bp, synthetic construct
  misc_feature 1..27: note = Probe
  source 1..27: mol_type = other DNA
cgaaaatgttggttatacccttcccgt

SEQ ID NO: 4915 - DNA, 32 bp, synthetic construct
  misc_feature 1..32: note = Probe
  source 1..32: mol_type = other DNA
cgaaaatgttggttatacccttcccgtactaa

SEQ ID NO: 4916 - DNA, 33 bp, synthetic construct
  misc_feature 1..33: note = Probe
  source 1..33: mol_type = other DNA
cgaaaatgttggttatacccttcccgtactaat

SEQ ID NO: 4917 - DNA, 34 bp, synthetic construct
  misc_feature 1..34: note = Probe
  source 1..34: mol_type = other DNA
cgaaaatgttggttatacccttcccgtactaatt

SEQ ID NO: 4918 - DNA, 21 bp, synthetic construct
  misc_feature 1..21: note = Probe
  source 1..21: mol_type = other DNA
cgaaaccatcctctgctaggt

SEQ ID NO: 4919 - DNA, 21 bp, synthetic construct
  misc_feature 1..21: note = Probe
  source 1..21: mol_type = other DNA
cgaaaccgggcggaaacacct

SEQ ID NO: 4920 - DNA, 17 bp, synthetic construct
  misc_feature 1..17: note = Probe
  source 1..17: mol_type = other DNA
cgaaaggtccccggttc

SEQ ID NO: 4921 - DNA, 18 bp, synthetic construct
  misc_feature 1..18: note = Probe
  source 1..18: mol_type = other DNA
cgaaaggtccccggttcg

SEQ ID NO: 4922 - DNA, 37 bp, synthetic construct
  misc_feature 1..37: note = Probe
  source 1..37: mol_type = other DNA
cgaaaggtccccggttcgaaaccgggcggaaacacct

SEQ ID NO: 4923 - DNA, 37 bp, synthetic construct
  misc_feature 1..37: note = Probe
  source 1..37: mol_type = other DNA
cgaaaggttggtggttcgagcccacccagggacgcct

SEQ ID NO: 4924 - DNA, 17 bp, synthetic construct
  misc_feature 1..17: note = Probe
  source 1..17: mol_type = other DNA
cgaacccatccctgaga

SEQ ID NO: 4925 - DNA, 25 bp, synthetic construct
  misc_feature 1..25: note = Probe
  source 1..25: mol_type = other DNA
cgaagaagcagcttcaaacctgccg

SEQ ID NO: 4926 - DNA, 26 bp, synthetic construct
  misc_feature 1..26: note = Probe
  source 1..26: mol_type = other DNA
cgaagaagcagcttcaaacctgccgg

SEQ ID NO: 4927 - DNA, 27 bp, synthetic construct
  misc_feature 1..27: note = Probe
  source 1..27: mol_type = other DNA
cgaagaagcagcttcaaacctgccggg

SEQ ID NO: 4928 - DNA, 28 bp, synthetic construct
  misc_feature 1..28: note = Probe
  source 1..28: mol_type = other DNA
cgaagaagcagcttcaaacctgccgggg

SEQ ID NO: 4929 - DNA, 29 bp, synthetic construct
  misc_feature 1..29: note = Probe
  source 1..29: mol_type = other DNA
cgaagaagcagcttcaaacctgccggggc

SEQ ID NO: 4930 - DNA, 30 bp, synthetic construct
  misc_feature 1..30: note = Probe
  source 1..30: mol_type = other DNA
cgaagaagcagcttcaaacctgccggggct

SEQ ID NO: 4931 - DNA, 31 bp, synthetic construct
  misc_feature 1..31: note = Probe
  source 1..31: mol_type = other DNA
cgaagaagcagcttcaaacctgccggggctt

SEQ ID NO: 4932 - DNA, 32 bp, synthetic construct
  misc_feature 1..32: note = Probe
  source 1..32: mol_type = other DNA
cgaagaagcagcttcaaacctgccggggcttc

SEQ ID NO: 4933 - DNA, 33 bp, synthetic construct
  misc_feature 1..33: note = Probe
  source 1..33: mol_type = other DNA
cgaagaagcagcttcaaacctgccggggcttct

SEQ ID NO: 4934 - DNA, 34 bp, synthetic construct
  misc_feature 1..34: note = Probe
  source 1..34: mol_type = other DNA
cgaagaagcagcttcaaacctgccggggcttctc

SEQ ID NO: 4935 - DNA, 35 bp, synthetic construct
  misc_feature 1..35: note = Probe
  source 1..35: mol_type = other DNA
cgaagaagcagcttcaaacctgccggggcttctcc

SEQ ID NO: 4936 - DNA, 36 bp, synthetic construct
  misc_feature 1..36: note = Probe
  source 1..36: mol_type = other DNA
cgaagaagcagcttcaaacctgccggggcttctccc

SEQ ID NO: 4937 - DNA, 17 bp, synthetic construct
  misc_feature 1..17: note = Probe
  source 1..17: mol_type = other DNA
cgaagatcacgggttcg

SEQ ID NO: 4938 - DNA, 21 bp, synthetic construct
  misc_feature 1..21: note = Probe
  source 1..21: mol_type = other DNA
cgaatcacgtcggggtcaaac

SEQ ID NO: 4939 - DNA, 21 bp, synthetic construct
  misc_feature 1..21: note = Probe
  source 1..21: mol_type = other DNA
cgaatcccaccgctgccacac

SEQ ID NO: 4940 - DNA, 21 bp, synthetic construct
  misc_feature 1..21: note = Probe
  source 1..21: mol_type = other DNA
cgaatcccaccgctgccaggt

SEQ ID NO: 4941 - DNA, 21 bp, synthetic construct
  misc_feature 1..21: note = Probe
  source 1..21: mol_type = other DNA
cgaatcccagcggtgcctccg

SEQ ID NO: 4942 - DNA, 32 bp, synthetic construct
  misc_feature 1..32: note = Probe
  source 1..32: mol_type = other DNA
cgactcattaaattatgataatcatatttacc

SEQ ID NO: 4943 - DNA, 35 bp, synthetic construct
  misc_feature 1..35: note = Probe
  source 1..35: mol_type = other DNA
cgactcattaaattatgataatcatatttaccaaa

SEQ ID NO: 4944 - DNA, 37 bp, synthetic construct
  misc_feature 1..37: note = Probe
  source 1..37: mol_type = other DNA
cgactcattaaattatgataatcatatttaccaaatg

SEQ ID NO: 4945 - DNA, 21 bp, synthetic construct
  misc_feature 1..21: note = Probe
  source 1..21: mol_type = other DNA
cgactcccggtatgggaacaa

SEQ ID NO: 4946 - DNA, 20 bp, synthetic construct
  misc_feature 1..20: note = Probe
  source 1..20: mol_type = other DNA
cgactcccggtgtgggaacg

SEQ ID NO: 4947 - DNA, 21 bp, synthetic construct
  misc_feature 1..21: note = Probe
  source 1..21: mol_type = other DNA
cgactcccggtgtgggaacgc

SEQ ID NO: 4948 - DNA, 31 bp, synthetic construct
  misc_feature 1..31: note = Probe
  source 1..31: mol_type = other DNA
cgagaaagctcacaagaactgctaactcatg

SEQ ID NO: 4949 - DNA, 27 bp, synthetic construct
  misc_feature 1..27: note = Probe
  source 1..27: mol_type = other DNA
cgagccccacgttgggcgctgtgtttt

SEQ ID NO: 4950 - DNA, 29 bp, synthetic construct
  misc_feature 1..29: note = Probe
  source 1..29: mol_type = other DNA
cgagcctcacacggggcagtctaacgttt

SEQ ID NO: 4951 - DNA, 26 bp, synthetic construct
  misc_feature 1..26: note = Probe
  source 1..26: mol_type = other DNA
cgaggccccgggttcaatccccggca

SEQ ID NO: 4952 - DNA, 21 bp, synthetic construct
  misc_feature 1..21: note = Probe
  source 1..21: mol_type = other DNA
cgatccccggcatctccattg

SEQ ID NO: 4953 - DNA, 31 bp, synthetic construct
  misc_feature 1..31: note = Probe
  source 1..31: mol_type = other DNA
cgatccgagttcaaatctcggtggaacctgc

SEQ ID NO: 4954 - DNA, 32 bp, synthetic construct
  misc_feature 1..32: note = Probe
  source 1..32: mol_type = other DNA
cgatccgagttcaaatctcggtggaacctgca

SEQ ID NO: 4955 - DNA, 20 bp, synthetic construct
  misc_feature 1..20: note = Probe
  source 1..20: mol_type = other DNA
cgatgcccgcatcctccact

SEQ ID NO: 4956 - DNA, 29 bp, synthetic construct
  misc_feature 1..29: note = Probe
  source 1..29: mol_type = other DNA
cgatggatcgaaaccatcctctgctaggt

SEQ ID NO: 4957 - DNA, 19 bp, synthetic construct
  misc_feature 1..19: note = Probe
  source 1..19: mol_type = other DNA
cgattccccgacggggaga

SEQ ID NO: 4958 - DNA, 20 bp, synthetic construct
  misc_feature 1..20: note = Probe
  source 1..20: mol_type = other DNA
cgattccccgacggggagac

SEQ ID NO: 4959 - DNA, 19 bp, synthetic construct
  misc_feature 1..19: note = Probe
  source 1..19: mol_type = other DNA
cgattccccgacggggagg

SEQ ID NO: 4960 - DNA, 20 bp, synthetic construct
  misc_feature 1..20: note = Probe
  source 1..20: mol_type = other DNA
cgattccccgacggggaggc

SEQ ID NO: 4961 - DNA, 21 bp, synthetic construct
  misc_feature 1..21: note = Probe
  source 1..21: mol_type = other DNA
cgattccccgacggggaggca

SEQ ID NO: 4962 - DNA, 20 bp, synthetic construct
  misc_feature 1..20: note = Probe
  source 1..20: mol_type = other DNA
cgattcccggtcagggaaca

SEQ ID NO: 4963 - DNA, 21 bp, synthetic construct
  misc_feature 1..21: note = Probe
  source 1..21: mol_type = other DNA
cgattcccggtcagggaacaa

SEQ ID NO: 4964 - DNA, 21 bp, synthetic construct
  misc_feature 1..21: note = Probe
  source 1..21: mol_type = other DNA
cgattcccggtcatggaacca

SEQ ID NO: 4965 - DNA, 21 bp, synthetic construct
  misc_feature 1..21: note = Probe
  source 1..21: mol_type = other DNA
cgattcctggtcagggaacca

SEQ ID NO: 4966 - DNA, 38 bp, synthetic construct
  misc_feature 1..38: note = Probe
  source 1..38: mol_type = other DNA
cgcagaaggtcctgggttcgagccccagtggaaccacg

SEQ ID NO: 4967 - DNA, 39 bp, synthetic construct
  misc_feature 1..39: note = Probe
  source 1..39: mol_type = other DNA
cgcagaaggtcctgggttcgagccccagtggaaccacgg

SEQ ID NO: 4968 - DNA, 39 bp, synthetic construct
  misc_feature 1..39: note = Probe
  source 1..39: mol_type = other DNA
cgcagaaggtcctgggttcgagccccagtggaaccatag

SEQ ID NO: 4969 - DNA, 32 bp, synthetic construct
  misc_feature 1..32: note = Probe
  source 1..32: mol_type = other DNA
cgcagcaacctcggttcgaatccgagtcacgg

SEQ ID NO: 4970 - DNA, 37 bp, synthetic construct
  misc_feature 1..37: note = Probe
  source 1..37: mol_type = other DNA
cgcagcaacctcggttcgaatccgagtcacggcaaag

SEQ ID NO: 4971 - DNA, 37 bp, synthetic construct
  misc_feature 1..37: note = Probe
  source 1..37: mol_type = other DNA
cgcagcaacctcggttcgaatccgagtcacggcagga

SEQ ID NO: 4972 - DNA, 37 bp, synthetic construct
  misc_feature 1..37: note = Probe
  source 1..37: mol_type = other DNA
cgcagcaacctcggttcgaatccgagtcacggcaggt

SEQ ID NO: 4973 - DNA, 37 bp, synthetic construct
  misc_feature 1..37: note = Probe
  source 1..37: mol_type = other DNA
cgcagcaacctcggttcgaatccgagtcacggcattg

SEQ ID NO: 4974 - DNA, 25 bp, synthetic construct
  misc_feature 1..25: note = Probe
  source 1..25: mol_type = other DNA
cgcagcggaagcgtgctgggcccat

SEQ ID NO: 4975 - DNA, 18 bp, synthetic construct
  misc_feature 1..18: note = Probe
  source 1..18: mol_type = other DNA
cgcataaaacttaaaact

SEQ ID NO: 4976 - DNA, 22 bp, synthetic construct
  misc_feature 1..22: note = Probe
  source 1..22: mol_type = other DNA
cgcataaaacttaaaactttac

SEQ ID NO: 4977 - DNA, 23 bp, synthetic construct
  misc_feature 1..23: note = Probe
  source 1..23: mol_type = other DNA
cgcataaaacttaaaactttaca

SEQ ID NO: 4978 - DNA, 34 bp, synthetic construct
  misc_feature 1..34: note = Probe
  source 1..34: mol_type = other DNA
cgcataaaacttaaaactttacagtcagaggttc

SEQ ID NO: 4979 - DNA, 46 bp, synthetic construct
  misc_feature 1..46: note = Probe
  source 1..46: mol_type = other DNA
cgcataaaacttaaaactttacagtcagaggttcaattcctcttct

SEQ ID NO: 4980 - DNA, 49 bp, synthetic construct
  misc_feature 1..49: note = Probe
  source 1..49: mol_type = other DNA
cgcataaaacttaaaactttacagtcagaggttcaattcctcttcttaa

SEQ ID NO: 4981 - DNA, 50 bp, synthetic construct
  misc_feature 1..50: note = Probe
  source 1..50: mol_type = other DNA
cgcataaaacttaaaactttacagtcagaggttcaattcctcttcttaac

SEQ ID NO: 4982 - DNA, 33 bp, synthetic construct
  misc_feature 1..33: note = Probe
  source 1..33: mol_type = other DNA
cgcattggtggttcagtggtagaattctcgcct

SEQ ID NO: 4983 - DNA, 19 bp, synthetic construct
  misc_feature 1..19: note = Probe
  source 1..19: mol_type = other DNA
cgcccggatagctcagtcg

SEQ ID NO: 4984 - DNA, 37 bp, synthetic construct
  misc_feature 1..37: note = Probe
  source 1..37: mol_type = other DNA
cgcccggctagctcagtcggtagagcatgggactctt

SEQ ID NO: 4985 - DNA, 35 bp, synthetic construct
  misc_feature 1..35: note = Probe
  source 1..35: mol_type = other DNA
cgccgcggcccgggttcgattcccggtcagggaaa

SEQ ID NO: 4986 - DNA, 35 bp, synthetic construct
  misc_feature 1..35: note = Probe
  source 1..35: mol_type = other DNA
cgccgcggcccgggttcgattcccggtcagggaag

SEQ ID NO: 4987 - DNA, 37 bp, synthetic construct
  misc_feature 1..37: note = Probe
  source 1..37: mol_type = other DNA
cgccgcggcccgggttcgattcccggtcagggaagcc

SEQ ID NO: 4988 - DNA, 37 bp, synthetic construct
  misc_feature 1..37: note = Probe
  source 1..37: mol_type = other DNA
cgccgcggcccgggttcgattcccggtcagggaagtt

SEQ ID NO: 4989 - DNA, 35 bp, synthetic construct
  misc_feature 1..35: note = Probe
  source 1..35: mol_type = other DNA
cgccgcggcccgggttcgattcccggtcagggaat

SEQ ID NO: 4990 - DNA, 37 bp, synthetic construct
  misc_feature 1..37: note = Probe
  source 1..37: mol_type = other DNA
cgccgcggcccgggttcgattcccggtcagggaattg

SEQ ID NO: 4991 - DNA, 27 bp, synthetic construct
  misc_feature 1..27: note = Probe
  source 1..27: mol_type = other DNA
cgccgctggtgtagtggtatcatgcaa

SEQ ID NO: 4992 - DNA, 29 bp, synthetic construct
  misc_feature 1..29: note = Probe
  source 1..29: mol_type = other DNA
cgccgctggtgtagtggtatcatgcaaga

SEQ ID NO: 4993 - DNA, 33 bp, synthetic construct
  misc_feature 1..33: note = Probe
  source 1..33: mol_type = other DNA
cgccgctggtgtagtggtatcatgcaagattcc

SEQ ID NO: 4994 - DNA, 21 bp, synthetic construct
  misc_feature 1..21: note = Probe
  source 1..21: mol_type = other DNA
cgccgtgatcgtatagtggtt

SEQ ID NO: 4995 - DNA, 22 bp, synthetic construct
  misc_feature 1..22: note = Probe
  source 1..22: mol_type = other DNA
cgccgtgatcgtatagtggtta

SEQ ID NO: 4996 - DNA, 23 bp, synthetic construct
  misc_feature 1..23: note = Probe
  source 1..23: mol_type = other DNA
cgccgtgatcgtatagtggttag

SEQ ID NO: 4997 - DNA, 24 bp, synthetic construct
  misc_feature 1..24: note = Probe
  source 1..24: mol_type = other DNA
cgccgtgatcgtatagtggttagt

SEQ ID NO: 4998 - DNA, 32 bp, synthetic construct
  misc_feature 1..32: note = Probe
  source 1..32: mol_type = other DNA
cgccgtgatcgtatagtggttagtactctgcg

SEQ ID NO: 4999 - DNA, 33 bp, synthetic construct
  misc_feature 1..33: note = Probe
  source 1..33: mol_type = other DNA
cgccgtgatcgtatagtggttagtactctgcgt

SEQ ID NO: 5000 - DNA, 34 bp, synthetic construct
  misc_feature 1..34: note = Probe
  source 1..34: mol_type = other DNA
cgccgtgatcgtatagtggttagtactctgcgtt

SEQ ID NO: 5001 - DNA, 35 bp, synthetic construct
  misc_feature 1..35: note = Probe
  source 1..35: mol_type = other DNA
cgccgtgatcgtatagtggttagtactctgcgttg

SEQ ID NO: 5002 - DNA, 36 bp, synthetic construct
  misc_feature 1..36: note = Probe
  source 1..36: mol_type = other DNA
cgccgtgatcgtatagtggttagtactctgcgttgt

SEQ ID NO: 5003 - DNA, 37 bp, synthetic construct
  misc_feature 1..37: note = Probe
  source 1..37: mol_type = other DNA
cgccgtgatcgtatagtggttagtactctgcgttgtg

SEQ ID NO: 5004 - DNA, 38 bp, synthetic construct
  misc_feature 1..38: note = Probe
  source 1..38: mol_type = other DNA
cgccgtgatcgtatagtggttagtactctgcgttgtgg

SEQ ID NO: 5005 - DNA, 50 bp, synthetic construct
  misc_feature 1..50: note = Probe
  source 1..50: mol_type = other DNA
cgcctgtcacgcgggagaccggggttcaattccccgacggggaggtgtgt

SEQ ID NO: 5006 - DNA, 44 bp, synthetic construct
  misc_feature 1..44: note = Probe
  source 1..44: mol_type = other DNA
cgcctgtcacgcgggagaccggggttcgattccccgacggggag

SEQ ID NO: 5007 - DNA, 50 bp, synthetic construct
  misc_feature 1..50: note = Probe
  source 1..50: mol_type = other DNA
cgcctgtcacgcgggagaccggggttcgattccccgacggggaggcacag

SEQ ID NO: 5008 - DNA, 50 bp, synthetic construct
  misc_feature 1..50: note = Probe
  source 1..50: mol_type = other DNA
cgcctgtcacgcgggagaccggggttcgattccccgacggggaggcagcc

SEQ ID NO: 5009 - DNA, 50 bp, synthetic construct
  misc_feature 1..50: note = Probe
  source 1..50: mol_type = other DNA
cgcctgtcacgcgggagaccggggttcgattccccgacggggaggccaag

SEQ ID NO: 5010 - DNA, 24 bp, synthetic construct
  misc_feature 1..24: note = Probe
  source 1..24: mol_type = other DNA
cgccttttttcccggcggcgggag

SEQ ID NO: 5011 - DNA, 25 bp, synthetic construct
  misc_feature 1..25: note = Probe
  source 1..25: mol_type = other DNA
cgccttttttcccggcggcgggaga

SEQ ID NO: 5012 - DNA, 26 bp, synthetic construct
  misc_feature 1..26: note = Probe
  source 1..26: mol_type = other DNA
cgccttttttcccggcggcgggagaa

SEQ ID NO: 5013 - DNA, 27 bp, synthetic construct
  misc_feature 1..27: note = Probe
  source 1..27: mol_type = other DNA
cgccttttttcccggcggcgggagaag

SEQ ID NO: 5014 - DNA, 28 bp, synthetic construct
  misc_feature 1..28: note = Probe
  source 1..28: mol_type = other DNA
cgccttttttcccggcggcgggagaagt

SEQ ID NO: 5015 - DNA, 29 bp, synthetic construct
  misc_feature 1..29: note = Probe
  source 1..29: mol_type = other DNA
cgccttttttcccggcggcgggagaagta

SEQ ID NO: 5016 - DNA, 20 bp, synthetic construct
  misc_feature 1..20: note = Probe
  source 1..20: mol_type = other DNA
cgcgaaaggtccccggttcg

SEQ ID NO: 5017 - DNA, 39 bp, synthetic construct
  misc_feature 1..39: note = Probe
  source 1..39: mol_type = other DNA
cgcgaaaggtccccggttcgaaaccgggcggaaacacct

SEQ ID NO: 5018 - DNA, 27 bp, synthetic construct
  misc_feature 1..27: note = Probe
  source 1..27: mol_type = other DNA
cgcgagttcaaatctcgctggggcctc

SEQ ID NO: 5019 - DNA, 32 bp, synthetic construct
  misc_feature 1..32: note = Probe
  source 1..32: mol_type = other DNA
cgcggcccgggttcgattcccggtcagggaaa

SEQ ID NO: 5020 - DNA, 32 bp, synthetic construct
  misc_feature 1..32: note = Probe
  source 1..32: mol_type = other DNA
cgcggcccgggttcgattcccggtcagggaag

SEQ ID NO: 5021 - DNA, 32 bp, synthetic construct
  misc_feature 1..32: note = Probe
  source 1..32: mol_type = other DNA
cgcggcccgggttcgattcccggtcagggaat

SEQ ID NO: 5022 - DNA, 34 bp, synthetic construct
  misc_feature 1..34: note = Probe
  source 1..34: mol_type = other DNA
cgcggcccgggttcgattcccggtcagggaattg

SEQ ID NO: 5023 - DNA, 17 bp, synthetic construct
  misc_feature 1..17: note = Probe
  source 1..17: mol_type = other DNA
cgcgggagaccggggtt

SEQ ID NO: 5024 - DNA, 31 bp, synthetic construct
  misc_feature 1..31: note = Probe
  source 1..31: mol_type = other DNA
cgcgggagaccggggttcaattccccgacgg

SEQ ID NO: 5025 - DNA, 36 bp, synthetic construct
  misc_feature 1..36: note = Probe
  source 1..36: mol_type = other DNA
cgcgggagaccggggttcaattccccgacggggagg

SEQ ID NO: 5026 - DNA, 38 bp, synthetic construct
  misc_feature 1..38: note = Probe
  source 1..38: mol_type = other DNA
cgcgggagaccggggttcaattccccgacggggaggtg

SEQ ID NO: 5027 - DNA, 29 bp, synthetic construct
  misc_feature 1..29: note = Probe
  source 1..29: mol_type = other DNA
cgcgggagaccggggttcgattccccgac

SEQ ID NO: 5028 - DNA, 36 bp, synthetic construct
  misc_feature 1..36: note = Probe
  source 1..36: mol_type = other DNA
cgcgggagaccggggttcgattccccgacggggaga

SEQ ID NO: 5029 - DNA, 37 bp, synthetic construct
  misc_feature 1..37: note = Probe
  source 1..37: mol_type = other DNA
cgcgggagaccggggttcgattccccgacggggagaa

SEQ ID NO: 5030 - DNA, 38 bp, synthetic construct
  misc_feature 1..38: note = Probe
  source 1..38: mol_type = other DNA
cgcgggagaccggggttcgattccccgacggggagaaa

SEQ ID NO: 5031 - DNA, 37 bp, synthetic construct
  misc_feature 1..37: note = Probe
  source 1..37: mol_type = other DNA
cgcgggagaccggggttcgattccccgacggggagac

SEQ ID NO: 5032 - DNA, 38 bp, synthetic construct
  misc_feature 1..38: note = Probe
  source 1..38: mol_type = other DNA
cgcgggagaccggggttcgattccccgacggggagacg

SEQ ID NO: 5033 - DNA, 38 bp, synthetic construct
  misc_feature 1..38: note = Probe
  source 1..38: mol_type = other DNA
cgcgggagaccggggttcgattccccgacggggagagt

SEQ ID NO: 5034 - DNA, 36 bp, synthetic construct
  misc_feature 1..36: note = Probe
  source 1..36: mol_type = other DNA
cgcgggagaccggggttcgattccccgacggggagg

SEQ ID NO: 5035 - DNA, 37 bp, synthetic construct
  misc_feature 1..37: note = Probe
  source 1..37: mol_type = other DNA
cgcgggagaccggggttcgattccccgacggggagga

SEQ ID NO: 5036 - DNA, 37 bp, synthetic construct
  misc_feature 1..37: note = Probe
  source 1..37: mol_type = other DNA
cgcgggagaccggggttcgattccccgacggggaggc

SEQ ID NO: 5037 - DNA, 38 bp, synthetic construct
  misc_feature 1..38: note = Probe
  source 1..38: mol_type = other DNA
cgcgggagaccggggttcgattccccgacggggaggca

SEQ ID NO: 5038 - DNA, 39 bp, synthetic construct
  misc_feature 1..39: note = Probe
  source 1..39: mol_type = other DNA
cgcgggagaccggggttcgattccccgacggggaggcac

SEQ ID NO: 5039 - DNA, 38 bp, synthetic construct
  misc_feature 1..38: note = Probe
  source 1..38: mol_type = other DNA
cgcgggagaccggggttcgattccccgacggggaggcc

SEQ ID NO: 5040 - DNA, 17 bp, synthetic construct
  misc_feature 1..17: note = Probe
  source 1..17: mol_type = other DNA
cgcgggaggcccgggtt

SEQ ID NO: 5041 - DNA, 37 bp, synthetic construct
  misc_feature 1..37: note = Probe
  source 1..37: mol_type = other DNA
cgcgggaggcccgggttcgattcccggccaatgcacg

SEQ ID NO: 5042 - DNA, 37 bp, synthetic construct
  misc_feature 1..37: note = Probe
  source 1..37: mol_type = other DNA
cgcgggaggcccgggttcgattcccggccaatgcact

SEQ ID NO: 5043 - DNA, 38 bp, synthetic construct
  misc_feature 1..38: note = Probe
  source 1..38: mol_type = other DNA
cgcgggaggcccgggttcgattcccggccaatgcagca

SEQ ID NO: 5044 - DNA, 37 bp, synthetic construct
  misc_feature 1..37: note = Probe
  source 1..37: mol_type = other DNA
cgcgggaggcccgggttcgattcccggcccatgcagc

SEQ ID NO: 5045 - DNA, 29 bp, synthetic construct
  misc_feature 1..29: note = Probe
  source 1..29: mol_type = other DNA
cgcgggttcgatccccgtacgggccacga

SEQ ID NO: 5046 - DNA, 29 bp, synthetic construct
  misc_feature 1..29: note = Probe
  source 1..29: mol_type = other DNA
cgcgggttcgatccccgtacgggccactg

SEQ ID NO: 5047 - DNA, 25 bp, synthetic construct
  misc_feature 1..25: note = Probe
  source 1..25: mol_type = other DNA
cgctggtgtagtggtatcatgcaag

SEQ ID NO: 5048 - DNA, 29 bp, synthetic construct
  misc_feature 1..29: note = Probe
  source 1..29: mol_type = other DNA
cgctggttcgaatccggctcgaaggacga

SEQ ID NO: 5049 - DNA, 29 bp, synthetic construct
  misc_feature 1..29: note = Probe
  source 1..29: mol_type = other DNA
cgctggttcgattccggctcgaaggaagt

SEQ ID NO: 5050 - DNA, 27 bp, synthetic construct
  misc_feature 1..27: note = Probe
  source 1..27: mol_type = other DNA
cgctggttcgattccggctcgaaggac

SEQ ID NO: 5051 - DNA, 28 bp, synthetic construct
  misc_feature 1..28: note = Probe
  source 1..28: mol_type = other DNA
cgctggttcgattccggctcgaaggact

SEQ ID NO: 5052 - DNA, 29 bp, synthetic construct
  misc_feature 1..29: note = Probe
  source 1..29: mol_type = other DNA
cgctggttcgattccggctcgaaggactt

SEQ ID NO: 5053 - DNA, 29 bp, synthetic construct
  misc_feature 1..29: note = Probe
  source 1..29: mol_type = other DNA
cgctggttcgattccggctcgaaggagac

SEQ ID NO: 5054 - DNA, 29 bp, synthetic construct
  misc_feature 1..29: note = Probe
  source 1..29: mol_type = other DNA
cgctggttcgattccggctcgaaggagct

SEQ ID NO: 5055 - DNA, 40 bp, synthetic construct
  misc_feature 1..40: note = Probe
  source 1..40: mol_type = other DNA
cggaagcgtgctgggcccataacccagaggtcgatggatc

SEQ ID NO: 5056 - DNA, 22 bp, synthetic construct
  misc_feature 1..22: note = Probe
  source 1..22: mol_type = other DNA
cggagatgaaaacctttttcca

SEQ ID NO: 5057 - DNA, 24 bp, synthetic construct
  misc_feature 1..24: note = Probe
  source 1..24: mol_type = other DNA
cggagatgaaaacctttttccaag

SEQ ID NO: 5058 - DNA, 25 bp, synthetic construct
  misc_feature 1..25: note = Probe
  source 1..25: mol_type = other DNA
cggagatgaaaacctttttccaagg

SEQ ID NO: 5059 - DNA, 29 bp, synthetic construct
  misc_feature 1..29: note = Probe
  source 1..29: mol_type = other DNA
cggagatgaaaacctttttccaaggacaa

SEQ ID NO: 5060 - DNA, 30 bp, synthetic construct
  misc_feature 1..30: note = Probe
  source 1..30: mol_type = other DNA
cggagatgaaaacctttttccaaggacaaa

SEQ ID NO: 5061 - DNA, 31 bp, synthetic construct
  misc_feature 1..31: note = Probe
  source 1..31: mol_type = other DNA
cggagatgaaaacctttttccaaggacaaat

SEQ ID NO: 5062 - DNA, 32 bp, synthetic construct
  misc_feature 1..32: note = Probe
  source 1..32: mol_type = other DNA
cggagatgaaaacctttttccaaggacaaatc

SEQ ID NO: 5063 - DNA, 23 bp, synthetic construct
  misc_feature 1..23: note = Probe
  source 1..23: mol_type = other DNA
cggatcagaagattgagggttcg

SEQ ID NO: 5064 - DNA, 23 bp, synthetic construct
  misc_feature 1..23: note = Probe
  source 1..23: mol_type = other DNA
cggcccgggttcgactcccggtg

SEQ ID NO: 5065 - DNA, 29 bp, synthetic construct
  misc_feature 1..29: note = Probe
  source 1..29: mol_type = other DNA
cggcccgggttcgactcccggtgtgggaa

SEQ ID NO: 5066 - DNA, 31 bp, synthetic construct
  misc_feature 1..31: note = Probe
  source 1..31: mol_type = other DNA
cggcccgggttcgactcccggtgtgggaacg

SEQ ID NO: 5067 - DNA, 32 bp, synthetic construct
  misc_feature 1..32: note = Probe
  source 1..32: mol_type = other DNA
cggcccgggttcgactcccggtgtgggaacgc

SEQ ID NO: 5068 - DNA, 23 bp, synthetic construct
  misc_feature 1..23: note = Probe
  source 1..23: mol_type = other DNA
cggcccgggttcgattcccggtc

SEQ ID NO: 5069 - DNA, 29 bp, synthetic construct
  misc_feature 1..29: note = Probe
  source 1..29: mol_type = other DNA
cggcccgggttcgattcccggtcagggaa

SEQ ID NO: 5070 - DNA, 30 bp, synthetic construct
  misc_feature 1..30: note = Probe
  source 1..30: mol_type = other DNA
cggcccgggttcgattcccggtcagggaaa

SEQ ID NO: 5071 - DNA, 30 bp, synthetic construct
  misc_feature 1..30: note = Probe
  source 1..30: mol_type = other DNA
cggcccgggttcgattcccggtcagggaag

SEQ ID NO: 5072 - DNA, 31 bp, synthetic construct
  misc_feature 1..31: note = Probe
  source 1..31: mol_type = other DNA
cggcccgggttcgattcccggtcagggaagc

SEQ ID NO: 5073 - DNA, 30 bp, synthetic construct
  misc_feature 1..30: note = Probe
  source 1..30: mol_type = other DNA
cggcccgggttcgattcccggtcagggaat

SEQ ID NO: 5074 - DNA, 32 bp, synthetic construct
  misc_feature 1..32: note = Probe
  source 1..32: mol_type = other DNA
cggcccgggttcgattcccggtcagggaattg

SEQ ID NO: 5075 - DNA, 27 bp, synthetic construct
  misc_feature 1..27: note = Probe
  source 1..27: mol_type = other DNA
cggctagctcagtcggtagagcatgag

SEQ ID NO: 5076 - DNA, 29 bp, synthetic construct
  misc_feature 1..29: note = Probe
  source 1..29: mol_type = other DNA
cgggagaccggggttcaattccccgacgg

SEQ ID NO: 5077 - DNA, 36 bp, synthetic construct
  misc_feature 1..36: note = Probe
  source 1..36: mol_type = other DNA
cgggagaccggggttcaattccccgacggggaggtg

SEQ ID NO: 5078 - DNA, 27 bp, synthetic construct
  misc_feature 1..27: note = Probe
  source 1..27: mol_type = other DNA
cgggagaccggggttcgattccccgac

SEQ ID NO: 5079 - DNA, 34 bp, synthetic construct
  misc_feature 1..34: note = Probe
  source 1..34: mol_type = other DNA
cgggagaccggggttcgattccccgacggggaga

SEQ ID NO: 5080 - DNA, 36 bp, synthetic construct
  misc_feature 1..36: note = Probe
  source 1..36: mol_type = other DNA
cgggagaccggggttcgattccccgacggggagaaa

SEQ ID NO: 5081 - DNA, 35 bp, synthetic construct
  misc_feature 1..35: note = Probe
  source 1..35: mol_type = other DNA
cgggagaccggggttcgattccccgacggggagac

SEQ ID NO: 5082 - DNA, 34 bp, synthetic construct
  misc_feature 1..34: note = Probe
  source 1..34: mol_type = other DNA
cgggagaccggggttcgattccccgacggggagg

SEQ ID NO: 5083 - DNA, 35 bp, synthetic construct
  misc_feature 1..35: note = Probe
  source 1..35: mol_type = other DNA
cgggagaccggggttcgattccccgacggggaggc

SEQ ID NO: 5084 - DNA, 36 bp, synthetic construct
  misc_feature 1..36: note = Probe
  source 1..36: mol_type = other DNA
cgggagaccggggttcgattccccgacggggaggca

SEQ ID NO: 5085 - DNA, 36 bp, synthetic construct
  misc_feature 1..36: note = Probe
  source 1..36: mol_type = other DNA
cgggagaccggggttcgattccccgacggggaggcc

SEQ ID NO: 5086 - DNA, 33 bp, synthetic construct
  misc_feature 1..33: note = Probe
  source 1..33: mol_type = other DNA
cgggaggcccgggttcgattcccggccaatgca

SEQ ID NO: 5087 - DNA, 33 bp, synthetic construct
  misc_feature 1..33: note = Probe
  source 1..33: mol_type = other DNA
cgggaggcccgggttcgattcccggcccatgca

SEQ ID NO: 5088 - DNA, 45 bp, synthetic construct
  misc_feature 1..45: note = Probe
  source 1..45: mol_type = other DNA
cgggcccataccccgaaaatgttggttatacccttcccgtactaa

SEQ ID NO: 5089 - DNA, 20 bp, synthetic construct
  misc_feature 1..20: note = Probe
  source 1..20: mol_type = other DNA
cgggctcacatcaccccata

SEQ ID NO: 5090 - DNA, 24 bp, synthetic construct
  misc_feature 1..24: note = Probe
  source 1..24: mol_type = other DNA
cgggctcacatcaccccataaaca

SEQ ID NO: 5091 - DNA, 26 bp, synthetic construct
  misc_feature 1..26: note = Probe
  source 1..26: mol_type = other DNA
cgggctcacatcaccccataaacaaa

SEQ ID NO: 5092 - DNA, 27 bp, synthetic construct
  misc_feature 1..27: note = Probe
  source 1..27: mol_type = other DNA
cgggctcacatcaccccataaacaaat

SEQ ID NO: 5093 - DNA, 16 bp, synthetic construct
  misc_feature 1..16: note = Probe
  source 1..16: mol_type = other DNA
cggggcacaataattt

SEQ ID NO: 5094 - DNA, 28 bp, synthetic construct
  misc_feature 1..28: note = Probe
  source 1..28: mol_type = other DNA
cggggttcgattccccgacggggaggca

SEQ ID NO: 5095 - DNA, 18 bp, synthetic construct
  misc_feature 1..18: note = Probe
  source 1..18: mol_type = other DNA
cgggtgcgagaggtcccg

SEQ ID NO: 5096 - DNA, 19 bp, synthetic construct
  misc_feature 1..19: note = Probe
  source 1..19: mol_type = other DNA
cgggtgcgagaggtcccgg

SEQ ID NO: 5097 - DNA, 27 bp, synthetic construct
  misc_feature 1..27: note = Probe
  source 1..27: mol_type = other DNA
cgggttcaatccccggcacctccacca

SEQ ID NO: 5098 - DNA, 27 bp, synthetic construct
  misc_feature 1..27: note = Probe
  source 1..27: mol_type = other DNA
cgggttcaattcccggtcagggaacca

SEQ ID NO: 5099 - DNA, 27 bp, synthetic construct
  misc_feature 1..27: note = Probe
  source 1..27: mol_type = other DNA
cgggttcgactcccggtgtgggaacgc

SEQ ID NO: 5100 - DNA, 27 bp, synthetic construct
  misc_feature 1..27: note = Probe
  source 1..27: mol_type = other DNA
cgggttcgatccccagcatctccagtg

SEQ ID NO: 5101 - DNA, 27 bp, synthetic construct
  misc_feature 1..27: note = Probe
  source 1..27: mol_type = other DNA
cgggttcgatccccggcatctccattg

SEQ ID NO: 5102 - DNA, 27 bp, synthetic construct
  misc_feature 1..27: note = Probe
  source 1..27: mol_type = other DNA
cgggttcgattcccggtcagggaattg

SEQ ID NO: 5103 - DNA, 27 bp, synthetic construct
  misc_feature 1..27: note = Probe
  source 1..27: mol_type = other DNA
cgggttcgattcccggtcatggaacca

SEQ ID NO: 5104 - DNA, 49 bp, synthetic construct
  misc_feature 1..49: note = Probe
  source 1..49: mol_type = other DNA
cggtaatcgcataaaacttaaaactttacagtcagaggttcaattcctc

SEQ ID NO: 5105 - DNA, 20 bp, synthetic construct
  misc_feature 1..20: note = Probe
  source 1..20: mol_type = other DNA
cggtagagcatcagactttt

SEQ ID NO: 5106 - DNA, 26 bp, synthetic construct
  misc_feature 1..26: note = Probe
  source 1..26: mol_type = other DNA
cggtagagcatgggactcttaatccc

SEQ ID NO: 5107 - DNA, 33 bp, synthetic construct
  misc_feature 1..33: note = Probe
  source 1..33: mol_type = other DNA
cggtagagcatgggactcttaatcccagggtcg

SEQ ID NO: 5108 - DNA, 22 bp, synthetic construct
  misc_feature 1..22: note = Probe
  source 1..22: mol_type = other DNA
cgtagtgtagtggttatcacgt

SEQ ID NO: 5109 - DNA, 24 bp, synthetic construct
  misc_feature 1..24: note = Probe
  source 1..24: mol_type = other DNA
cgtagtgtagtggttatcacgttc

SEQ ID NO: 5110 - DNA, 26 bp, synthetic construct
  misc_feature 1..26: note = Probe
  source 1..26: mol_type = other DNA
cgtagtgtagtggttatcacgttcgc

SEQ ID NO: 5111 - DNA, 28 bp, synthetic construct
  misc_feature 1..28: note = Probe
  source 1..28: mol_type = other DNA
cgtagtgtagtggttatcacgttcgcct

SEQ ID NO: 5112 - DNA, 50 bp, synthetic construct
  misc_feature 1..50: note = Probe
  source 1..50: mol_type = other DNA
cgtagtgtagtggttatcacgttcgcctaacacgcgaaaggtccccggtt

SEQ ID NO: 5113 - DNA, 50 bp, synthetic construct
  misc_feature 1..50: note = Probe
  source 1..50: mol_type = other DNA
cgtagtgtagtggttatcacgttcgcctcacacgcgaaaggtccccggtt

SEQ ID NO: 5114 - DNA, 24 bp, synthetic construct
  misc_feature 1..24: note = Probe
  source 1..24: mol_type = other DNA
cgtatagtggttagtactctgcgt

SEQ ID NO: 5115 - DNA, 27 bp, synthetic construct
  misc_feature 1..27: note = Probe
  source 1..27: mol_type = other DNA
cgtatagtggttagtactctgcgttgt

SEQ ID NO: 5116 - DNA, 27 bp, synthetic construct
  misc_feature 1..27: note = Probe
  source 1..27: mol_type = other DNA
cgtgagttcgagcctcacacggggcag

SEQ ID NO: 5117 - DNA, 29 bp, synthetic construct
  misc_feature 1..29: note = Probe
  source 1..29: mol_type = other DNA
cgtgagttcgatcctcacacggggcacaa

SEQ ID NO: 5118 - DNA, 26 bp, synthetic construct
  misc_feature 1..26: note = Probe
  source 1..26: mol_type = other DNA
cgtgatcgtatagtggttagtactct

SEQ ID NO: 5119 - DNA, 27 bp, synthetic construct
  misc_feature 1..27: note = Probe
  source 1..27: mol_type = other DNA
cgtgatcgtatagtggttagtactctg

SEQ ID NO: 5120 - DNA, 29 bp, synthetic construct
  misc_feature 1..29: note = Probe
  source 1..29: mol_type = other DNA
cgtgatcgtatagtggttagtactctgcg

SEQ ID NO: 5121 - DNA, 37 bp, synthetic construct
  misc_feature 1..37: note = Probe
  source 1..37: mol_type = other DNA
cgtgatcgtatagtggttagtactctgcgttgtggcc

SEQ ID NO: 5122 - DNA, 25 bp, synthetic construct
  misc_feature 1..25: note = Probe
  source 1..25: mol_type = other DNA
cgtggttgtagtccgtgcgagaata

SEQ ID NO: 5123 - DNA, 27 bp, synthetic construct
  misc_feature 1..27: note = Probe
  source 1..27: mol_type = other DNA
cgtggttgtagtccgtgcgagaataat

SEQ ID NO: 5124 - DNA, 28 bp, synthetic construct
  misc_feature 1..28: note = Probe
  source 1..28: mol_type = other DNA
cgtggttgtagtccgtgcgagaataatg

SEQ ID NO: 5125 - DNA, 50 bp, synthetic construct
  misc_feature 1..50: note = Probe
  source 1..50: mol_type = other DNA
cgttaacttccaattaactagttttgacaacattcaaaaaagagtaataa

SEQ ID NO: 5126 - DNA, 25 bp, synthetic construct
  misc_feature 1..25: note = Probe
  source 1..25: mol_type = other DNA
cgttagtatagtggtgagtatcccc

SEQ ID NO: 5127 - DNA, 33 bp, synthetic construct
  misc_feature 1..33: note = Probe
  source 1..33: mol_type = other DNA
cgttagtatagtggtgagtatccccgcctgtca

SEQ ID NO: 5128 - DNA, 32 bp, synthetic construct
  misc_feature 1..32: note = Probe
  source 1..32: mol_type = other DNA
cgttggtggtatagtggtgagcatagctgcct

SEQ ID NO: 5129 - DNA, 35 bp, synthetic construct
  misc_feature 1..35: note = Probe
  source 1..35: mol_type = other DNA
cgttggtggtatagtggtgagcatagctgccttcc

SEQ ID NO: 5130 - DNA, 35 bp, synthetic construct
  misc_feature 1..35: note = Probe
  source 1..35: mol_type = other DNA
cgttggtggtatagtggttagcatagctgccttcc

SEQ ID NO: 5131 - DNA, 29 bp, synthetic construct
  misc_feature 1..29: note = Probe
  source 1..29: mol_type = other DNA
ctaaacctagccccaaacccactccacct

SEQ ID NO: 5132 - DNA, 15 bp, synthetic construct
  misc_feature 1..15: note = Probe
  source 1..15: mol_type = other DNA
ctaaagacaggggtt

SEQ ID NO: 5133 - DNA, 22 bp, synthetic construct
  misc_feature 1..22: note = Probe
  source 1..22: mol_type = other DNA
ctaaagacaggggttaggcctc

SEQ ID NO: 5134 - DNA, 23 bp, synthetic construct
  misc_feature 1..23: note = Probe
  source 1..23: mol_type = other DNA
ctaaagacaggggttaggcctct

SEQ ID NO: 5135 - DNA, 24 bp, synthetic construct
  misc_feature 1..24: note = Probe
  source 1..24: mol_type = other DNA
ctaaagacaggggttaggcctctt

SEQ ID NO: 5136 - DNA, 25 bp, synthetic construct
  misc_feature 1..25: note = Probe
  source 1..25: mol_type = other DNA
ctaaagacaggggttaggcctcttt

SEQ ID NO: 5137 - DNA, 26 bp, synthetic construct
  misc_feature 1..26: note = Probe
  source 1..26: mol_type = other DNA
ctaaagacaggggttaggcctctttt

SEQ ID NO: 5138 - DNA, 27 bp, synthetic construct
  misc_feature 1..27: note = Probe
  source 1..27: mol_type = other DNA
ctaaagacaggggttaggcctcttttt

SEQ ID NO: 5139 - DNA, 28 bp, synthetic construct
  misc_feature 1..28: note = Probe
  source 1..28: mol_type = other DNA
ctaaagacaggggttaggcctcttttta

SEQ ID NO: 5140 - DNA, 29 bp, synthetic construct
  misc_feature 1..29: note = Probe
  source 1..29: mol_type = other DNA
ctaaagacaggggttaggcctctttttac

SEQ ID NO: 5141 - DNA, 30 bp, synthetic construct
  misc_feature 1..30: note = Probe
  source 1..30: mol_type = other DNA
ctaaagacaggggttaggcctctttttacc

SEQ ID NO: 5142 - DNA, 31 bp, synthetic construct
  misc_feature 1..31: note = Probe
  source 1..31: mol_type = other DNA
ctaaagacaggggttaggcctctttttacca

SEQ ID NO: 5143 - DNA, 32 bp, synthetic construct
  misc_feature 1..32: note = Probe
  source 1..32: mol_type = other DNA
ctaaagacaggggttaggcctctttttaccag

SEQ ID NO: 5144 - DNA, 33 bp, synthetic construct
  misc_feature 1..33: note = Probe
  source 1..33: mol_type = other DNA
ctaaagacaggggttaggcctctttttaccagc

SEQ ID NO: 5145 - DNA, 34 bp, synthetic construct
  misc_feature 1..34: note = Probe
  source 1..34: mol_type = other DNA
ctaaagacaggggttaggcctctttttaccagct

SEQ ID NO: 5146 - DNA, 35 bp, synthetic construct
  misc_feature 1..35: note = Probe
  source 1..35: mol_type = other DNA
ctaaagacaggggttaggcctctttttaccagctc

SEQ ID NO: 5147 - DNA, 36 bp, synthetic construct
  misc_feature 1..36: note = Probe
  source 1..36: mol_type = other DNA
ctaaagacaggggttaggcctctttttaccagctcc

SEQ ID NO: 5148 - DNA, 37 bp, synthetic construct
  misc_feature 1..37: note = Probe
  source 1..37: mol_type = other DNA
ctaaagacaggggttaggcctctttttaccagctccg

SEQ ID NO: 5149 - DNA, 23 bp, synthetic construct
  misc_feature 1..23: note = Probe
  source 1..23: mol_type = other DNA
ctaaataagctatcgggcccata

SEQ ID NO: 5150 - DNA, 24 bp, synthetic construct
  misc_feature 1..24: note = Probe
  source 1..24: mol_type = other DNA
ctaaataagctatcgggcccatac

SEQ ID NO: 5151 - DNA, 32 bp, synthetic construct
  misc_feature 1..32: note = Probe
  source 1..32: mol_type = other DNA
ctaaataagctatcgggcccataccccgaaaa

SEQ ID NO: 5152 - DNA, 33 bp, synthetic construct
  misc_feature 1..33: note = Probe
  source 1..33: mol_type = other DNA
ctaaataagctatcgggcccataccccgaaaat

SEQ ID NO: 5153 - DNA, 22 bp, synthetic construct
  misc_feature 1..22: note = Probe
  source 1..22: mol_type = other DNA
ctaaatcctatatatcttaatg

SEQ ID NO: 5154 - DNA, 20 bp, synthetic construct
  misc_feature 1..20: note = Probe
  source 1..20: mol_type = other DNA
ctaacaacatggctttctca

SEQ ID NO: 5155 - DNA, 22 bp, synthetic construct
  misc_feature 1..22: note = Probe
  source 1..22: mol_type = other DNA
ctaacaacatggctttctcaac

SEQ ID NO: 5156 - DNA, 23 bp, synthetic construct
  misc_feature 1..23: note = Probe
  source 1..23: mol_type = other DNA
ctaacaacatggctttctcaact

SEQ ID NO: 5157 - DNA, 19 bp, synthetic construct
  misc_feature 1..19: note = Probe
  source 1..19: mol_type = other DNA
ctaacacgcgaaaggtccc

SEQ ID NO: 5158 - DNA, 33 bp, synthetic construct
  misc_feature 1..33: note = Probe
  source 1..33: mol_type = other DNA
ctaactcatgcccccatgtctaacaacatggct

SEQ ID NO: 5159 - DNA, 34 bp, synthetic construct
  misc_feature 1..34: note = Probe
  source 1..34: mol_type = other DNA
ctaactcatgcccccatgtctaacaacatggctt

SEQ ID NO: 5160 - DNA, 35 bp, synthetic construct
  misc_feature 1..35: note = Probe
  source 1..35: mol_type = other DNA
ctaactcatgcccccatgtctaacaacatggcttt

SEQ ID NO: 5161 - DNA, 36 bp, synthetic construct
  misc_feature 1..36: note = Probe
  source 1..36: mol_type = other DNA
ctaactcatgcccccatgtctaacaacatggctttc

SEQ ID NO: 5162 - DNA, 37 bp, synthetic construct
  misc_feature 1..37: note = Probe
  source 1..37: mol_type = other DNA
ctaactcatgcccccatgtctaacaacatggctttct

SEQ ID NO: 5163 - DNA, 38 bp, synthetic construct
  misc_feature 1..38: note = Probe
  source 1..38: mol_type = other DNA
ctaactcatgcccccatgtctaacaacatggctttctc

SEQ ID NO: 5164 - DNA, 39 bp, synthetic construct
  misc_feature 1..39: note = Probe
  source 1..39: mol_type = other DNA
ctaactcatgcccccatgtctaacaacatggctttctca

SEQ ID NO: 5165 - DNA, 40 bp, synthetic construct
  misc_feature 1..40: note = Probe
  source 1..40: mol_type = other DNA
ctaactcatgcccccatgtctaacaacatggctttctcaa

SEQ ID NO: 5166 - DNA, 41 bp, synthetic construct
  misc_feature 1..41: note = Probe
  source 1..41: mol_type = other DNA
ctaactcatgcccccatgtctaacaacatggctttctcaac

SEQ ID NO: 5167 - DNA, 42 bp, synthetic construct
  misc_feature 1..42: note = Probe
  source 1..42: mol_type = other DNA
ctaactcatgcccccatgtctaacaacatggctttctcaact

SEQ ID NO: 5168 - DNA, 50 bp, synthetic construct
  misc_feature 1..50: note = Probe
  source 1..50: mol_type = other DNA
ctaacttagcattaaccttttaagttaaagattaagagaaccaacacctc

SEQ ID NO: 5169 - DNA, 24 bp, synthetic construct
  misc_feature 1..24: note = Probe
  source 1..24: mol_type = other DNA
ctaagccagggattgtgggttcga

SEQ ID NO: 5170 - DNA, 32 bp, synthetic construct
  misc_feature 1..32: note = Probe
  source 1..32: mol_type = other DNA
ctaagtgtttgtgggtttaagtcccattggtc

SEQ ID NO: 5171 - DNA, 33 bp, synthetic construct
  misc_feature 1..33: note = Probe
  source 1..33: mol_type = other DNA
ctaagtgtttgtgggtttaagtcccattggtct

SEQ ID NO: 5172 - DNA, 37 bp, synthetic construct
  misc_feature 1..37: note = Probe
  source 1..37: mol_type = other DNA
ctaagtgtttgtgggtttaagtcccattggtctagta

SEQ ID NO: 5173 - DNA, 38 bp, synthetic construct
  misc_feature 1..38: note = Probe
  source 1..38: mol_type = other DNA
ctaagtgtttgtgggtttaagtcccattggtctagtaa

SEQ ID NO: 5174 - DNA, 18 bp, synthetic construct
  misc_feature 1..18: note = Probe
  source 1..18: mol_type = other DNA
ctaatggataaggcattg

SEQ ID NO: 5175 - DNA, 38 bp, synthetic construct
  misc_feature 1..38: note = Probe
  source 1..38: mol_type = other DNA
ctaatggtggagttaaagactttttctctgatttgtcc

SEQ ID NO: 5176 - DNA, 39 bp, synthetic construct
  misc_feature 1..39: note = Probe
  source 1..39: mol_type = other DNA
ctaatggtggagttaaagactttttctctgatttgtcct

SEQ ID NO: 5177 - DNA, 41 bp, synthetic construct
  misc_feature 1..41: note = Probe
  source 1..41: mol_type = other DNA
ctaatggtggagttaaagactttttctctgatttgtccttg

SEQ ID NO: 5178 - DNA, 23 bp, synthetic construct
  misc_feature 1..23: note = Probe
  source 1..23: mol_type = other DNA
ctagccccaaacccactccacct

SEQ ID NO: 5179 - DNA, 24 bp, synthetic construct
  misc_feature 1..24: note = Probe
  source 1..24: mol_type = other DNA
ctagcggttaggattcctggtttt

SEQ ID NO: 5180 - DNA, 27 bp, synthetic construct
  misc_feature 1..27: note = Probe
  source 1..27: mol_type = other DNA
ctagctcagtcggtagagcatgagact

SEQ ID NO: 5181 - DNA, 29 bp, synthetic construct
  misc_feature 1..29: note = Probe
  source 1..29: mol_type = other DNA
ctagctcagtcggtagagcatgagactct

SEQ ID NO: 5182 - DNA, 27 bp, synthetic construct
  misc_feature 1..27: note = Probe
  source 1..27: mol_type = other DNA
ctagctcagtcggtagagcatgggact

SEQ ID NO: 5183 - DNA, 29 bp, synthetic construct
  misc_feature 1..29: note = Probe
  source 1..29: mol_type = other DNA
ctagctcagtcggtagagcatgggactct

SEQ ID NO: 5184 - DNA, 31 bp, synthetic construct
  misc_feature 1..31: note = Probe
  source 1..31: mol_type = other DNA
ctagctcagtcggtagagcatgggactctta

SEQ ID NO: 5185 - DNA, 23 bp, synthetic construct
  misc_feature 1..23: note = Probe
  source 1..23: mol_type = other DNA
ctagtggttaggattcggcgctc

SEQ ID NO: 5186 - DNA, 24 bp, synthetic construct
  misc_feature 1..24: note = Probe
  source 1..24: mol_type = other DNA
ctagtggttaggattcggcgctct

SEQ ID NO: 5187 - DNA, 23 bp, synthetic construct
  misc_feature 1..23: note = Probe
  source 1..23: mol_type = other DNA
ctatccattggtcttaggcccca

SEQ ID NO: 5188 - DNA, 24 bp, synthetic construct
  misc_feature 1..24: note = Probe
  source 1..24: mol_type = other DNA
ctatccattggtcttaggccccaa

SEQ ID NO: 5189 - DNA, 25 bp, synthetic construct
  misc_feature 1..25: note = Probe
  source 1..25: mol_type = other DNA
ctatccattggtcttaggccccaaa

SEQ ID NO: 5190 - DNA, 27 bp, synthetic construct
  misc_feature 1..27: note = Probe
  source 1..27: mol_type = other DNA
ctatccattggtcttaggccccaaaaa

SEQ ID NO: 5191 - DNA, 50 bp, synthetic construct
  misc_feature 1..50: note = Probe
  source 1..50: mol_type = other DNA
ctatccattggtcttaggccccaaaaattttggtgcaactccaaataaaa

SEQ ID NO: 5192 - DNA, 22 bp, synthetic construct
  misc_feature 1..22: note = Probe
  source 1..22: mol_type = other DNA
ctatcgggcccataccccgaaa

SEQ ID NO: 5193 - DNA, 23 bp, synthetic construct
  misc_feature 1..23: note = Probe
  source 1..23: mol_type = other DNA
ctatcgggcccataccccgaaaa

SEQ ID NO: 5194 - DNA, 24 bp, synthetic construct
  misc_feature 1..24: note = Probe
  source 1..24: mol_type = other DNA
ctatcgggcccataccccgaaaat

SEQ ID NO: 5195 - DNA, 25 bp, synthetic construct
  misc_feature 1..25: note = Probe
  source 1..25: mol_type = other DNA
ctatcgggcccataccccgaaaatg

SEQ ID NO: 5196 - DNA, 28 bp, synthetic construct
  misc_feature 1..28: note = Probe
  source 1..28: mol_type = other DNA
ctatcgggcccataccccgaaaatgttg

SEQ ID NO: 5197 - DNA, 29 bp, synthetic construct
  misc_feature 1..29: note = Probe
  source 1..29: mol_type = other DNA
ctatcgggcccataccccgaaaatgttgg

SEQ ID NO: 5198 - DNA, 32 bp, synthetic construct
  misc_feature 1..32: note = Probe
  source 1..32: mol_type = other DNA
ctatcgggcccataccccgaaaatgttggtta

SEQ ID NO: 5199 - DNA, 43 bp, synthetic construct
  misc_feature 1..43: note = Probe
  source 1..43: mol_type = other DNA
ctatcgggcccataccccgaaaatgttggttatacccttcccg

SEQ ID NO: 5200 - DNA, 50 bp, synthetic construct
  misc_feature 1..50: note = Probe
  source 1..50: mol_type = other DNA
ctatcgggcccataccccgaaaatgttggttatacccttcccgtactaat

SEQ ID NO: 5201 - DNA, 49 bp, synthetic construct
  misc_feature 1..49: note = Probe
  source 1..49: mol_type = other DNA
ctcaaagcaatacactgaaaatgtttagacgggctcacatcaccccata

SEQ ID NO: 5202 - DNA, 50 bp, synthetic construct
  misc_feature 1..50: note = Probe
  source 1..50: mol_type = other DNA
ctcaaagcaatacactgaaaatgtttagacgggctcacatcaccccataa

SEQ ID NO: 5203 - DNA, 23 bp, synthetic construct
  misc_feature 1..23: note = Probe
  source 1..23: mol_type = other DNA
ctcacaagaactgctaactcatg

SEQ ID NO: 5204 - DNA, 24 bp, synthetic construct
  misc_feature 1..24: note = Probe
  source 1..24: mol_type = other DNA
ctcacaagaactgctaactcatgc

SEQ ID NO: 5205 - DNA, 25 bp, synthetic construct
  misc_feature 1..25: note = Probe
  source 1..25: mol_type = other DNA
ctcacaagaactgctaactcatgcc

SEQ ID NO: 5206 - DNA, 26 bp, synthetic construct
  misc_feature 1..26: note = Probe
  source 1..26: mol_type = other DNA
ctcacaagaactgctaactcatgccc

SEQ ID NO: 5207 - DNA, 29 bp, synthetic construct
  misc_feature 1..29: note = Probe
  source 1..29: mol_type = other DNA
ctcacaagaactgctaactcatgccccca

SEQ ID NO: 5208 - DNA, 48 bp, synthetic construct
  misc_feature 1..48: note = Probe
  source 1..48: mol_type = other DNA
ctcacaagaactgctaactcatgcccccatgtctaacaacatggcttt

SEQ ID NO: 5209 - DNA, 22 bp, synthetic construct
  misc_feature 1..22: note = Probe
  source 1..22: mol_type = other DNA
ctcacacggggcacaataattt

SEQ ID NO: 5210 - DNA, 17 bp, synthetic construct
  misc_feature 1..17: note = Probe
  source 1..17: mol_type = other DNA
ctcacatcaccccataa

SEQ ID NO: 5211 - DNA, 20 bp, synthetic construct
  misc_feature 1..20: note = Probe
  source 1..20: mol_type = other DNA
ctcacatcaccccataaaca

SEQ ID NO: 5212 - DNA, 22 bp, synthetic construct
  misc_feature 1..22: note = Probe
  source 1..22: mol_type = other DNA
ctcacatcaccccataaacaaa

SEQ ID NO: 5213 - DNA, 23 bp, synthetic construct
  misc_feature 1..23: note = Probe
  source 1..23: mol_type = other DNA
ctcacatcaccccataaacaaat

SEQ ID NO: 5214 - DNA, 22 bp, synthetic construct
  misc_feature 1..22: note = Probe
  source 1..22: mol_type = other DNA
ctcaccgccgcggcccgggttc

SEQ ID NO: 5215 - DNA, 20 bp, synthetic construct
  misc_feature 1..20: note = Probe
  source 1..20: mol_type = other DNA
ctcacctggagcatgttttc

SEQ ID NO: 5216 - DNA, 21 bp, synthetic construct
  misc_feature 1..21: note = Probe
  source 1..21: mol_type = other DNA
ctcacctggagcatgttttct

SEQ ID NO: 5217 - DNA, 22 bp, synthetic construct
  misc_feature 1..22: note = Probe
  source 1..22: mol_type = other DNA
ctcacctggagcatgttttctt

SEQ ID NO: 5218 - DNA, 33 bp, synthetic construct
  misc_feature 1..33: note = Probe
  source 1..33: mol_type = other DNA
ctcagggatgggttcgattctcatagtcctaga

SEQ ID NO: 5219 - DNA, 34 bp, synthetic construct
  misc_feature 1..34: note = Probe
  source 1..34: mol_type = other DNA
ctcagggatgggttcgattctcatagtcctagaa

SEQ ID NO: 5220 - DNA, 35 bp, synthetic construct
  misc_feature 1..35: note = Probe
  source 1..35: mol_type = other DNA
ctcagggatgggttcgattctcatagtcctagaaa

SEQ ID NO: 5221 - DNA, 17 bp, synthetic construct
  misc_feature 1..17: note = Probe
  source 1..17: mol_type = other DNA
ctcagggtcgtgggttc

SEQ ID NO: 5222 - DNA, 32 bp, synthetic construct
  misc_feature 1..32: note = Probe
  source 1..32: mol_type = other DNA
ctcagggtcgtgggttcgagccccacgttggg

SEQ ID NO: 5223 - DNA, 19 bp, synthetic construct
  misc_feature 1..19: note = Probe
  source 1..19: mol_type = other DNA
ctcagtcggtagagcatca

SEQ ID NO: 5224 - DNA, 22 bp, synthetic construct
  misc_feature 1..22: note = Probe
  source 1..22: mol_type = other DNA
ctcagtcggtagagcatcagac

SEQ ID NO: 5225 - DNA, 26 bp, synthetic construct
  misc_feature 1..26: note = Probe
  source 1..26: mol_type = other DNA
ctcagtcggtagagcatcagactttt

SEQ ID NO: 5226 - DNA, 19 bp, synthetic construct
  misc_feature 1..19: note = Probe
  source 1..19: mol_type = other DNA
ctcagtcggtagagcatga

SEQ ID NO: 5227 - DNA, 25 bp, synthetic construct
  misc_feature 1..25: note = Probe
  source 1..25: mol_type = other DNA
ctcagtcggtagagcatgagactct

SEQ ID NO: 5228 - DNA, 24 bp, synthetic construct
  misc_feature 1..24: note = Probe
  source 1..24: mol_type = other DNA
ctcagtcggtagagcatgggactc

SEQ ID NO: 5229 - DNA, 25 bp, synthetic construct
  misc_feature 1..25: note = Probe
  source 1..25: mol_type = other DNA
ctcagtcggtagagcatgggactct

SEQ ID NO: 5230 - DNA, 26 bp, synthetic construct
  misc_feature 1..26: note = Probe
  source 1..26: mol_type = other DNA
ctcagtcggtagagcatgggactctt

SEQ ID NO: 5231 - DNA, 34 bp, synthetic construct
  misc_feature 1..34: note = Probe
  source 1..34: mol_type = other DNA
ctcatcagtatagtggtgagtatccccgcctgtc

SEQ ID NO: 5232 - DNA, 18 bp, synthetic construct
  misc_feature 1..18: note = Probe
  source 1..18: mol_type = other DNA
ctcatgcccccatgtcta

SEQ ID NO: 5233 - DNA, 19 bp, synthetic construct
  misc_feature 1..19: note = Probe
  source 1..19: mol_type = other DNA
ctcatgcccccatgtctaa

SEQ ID NO: 5234 - DNA, 28 bp, synthetic construct
  misc_feature 1..28: note = Probe
  source 1..28: mol_type = other DNA
ctcatgcccccatgtctaacaacatggc

SEQ ID NO: 5235 - DNA, 29 bp, synthetic construct
  misc_feature 1..29: note = Probe
  source 1..29: mol_type = other DNA
ctcatgcccccatgtctaacaacatggct

SEQ ID NO: 5236 - DNA, 30 bp, synthetic construct
  misc_feature 1..30: note = Probe
  source 1..30: mol_type = other DNA
ctcatgcccccatgtctaacaacatggctt

SEQ ID NO: 5237 - DNA, 31 bp, synthetic construct
  misc_feature 1..31: note = Probe
  source 1..31: mol_type = other DNA
ctcatgcccccatgtctaacaacatggcttt

SEQ ID NO: 5238 - DNA, 32 bp, synthetic construct
  misc_feature 1..32: note = Probe
  source 1..32: mol_type = other DNA
ctcatgcccccatgtctaacaacatggctttc

SEQ ID NO: 5239 - DNA, 33 bp, synthetic construct
  misc_feature 1..33: note = Probe
  source 1..33: mol_type = other DNA
ctcatgcccccatgtctaacaacatggctttct

SEQ ID NO: 5240 - DNA, 34 bp, synthetic construct
  misc_feature 1..34: note = Probe
  source 1..34: mol_type = other DNA
ctcatgcccccatgtctaacaacatggctttctc

SEQ ID NO: 5241 - DNA, 35 bp, synthetic construct
  misc_feature 1..35: note = Probe
  source 1..35: mol_type = other DNA
ctcatgcccccatgtctaacaacatggctttctca

SEQ ID NO: 5242 - DNA, 36 bp, synthetic construct
  misc_feature 1..36: note = Probe
  source 1..36: mol_type = other DNA
ctcatgcccccatgtctaacaacatggctttctcaa

SEQ ID NO: 5243 - DNA, 37 bp, synthetic construct
  misc_feature 1..37: note = Probe
  source 1..37: mol_type = other DNA
ctcatgcccccatgtctaacaacatggctttctcaac

SEQ ID NO: 5244 - DNA, 38 bp, synthetic construct
  misc_feature 1..38: note = Probe
  source 1..38: mol_type = other DNA
ctcatgcccccatgtctaacaacatggctttctcaact

SEQ ID NO: 5245 - DNA, 32 bp, synthetic construct
  misc_feature 1..32: note = Probe
  source 1..32: mol_type = other DNA
ctcattaaattatgataatcatatttaccaaa

SEQ ID NO: 5246 - DNA, 33 bp, synthetic construct
  misc_feature 1..33: note = Probe
  source 1..33: mol_type = other DNA
ctcattaaattatgataatcatatttaccaaat

SEQ ID NO: 5247 - DNA, 34 bp, synthetic construct
  misc_feature 1..34: note = Probe
  source 1..34: mol_type = other DNA
ctcattaaattatgataatcatatttaccaaatg

SEQ ID NO: 5248 - DNA, 50 bp, synthetic construct
  misc_feature 1..50: note = Probe
  source 1..50: mol_type = other DNA
ctccagtcatttcgatggcgtgggttcgaatcccaccgctgccacacctc

SEQ ID NO: 5249 - DNA, 50 bp, synthetic construct
  misc_feature 1..50: note = Probe
  source 1..50: mol_type = other DNA
ctccagtctcttcgggggcgtgggttcgaatcccaccgctgccaggtgct

SEQ ID NO: 5250 - DNA, 34 bp, synthetic construct
  misc_feature 1..34: note = Probe
  source 1..34: mol_type = other DNA
ctcccacatggtctagcggttaggattcctggtt

SEQ ID NO: 5251 - DNA, 16 bp, synthetic construct
  misc_feature 1..16: note = Probe
  source 1..16: mol_type = other DNA
ctcccgccttttttcc

SEQ ID NO: 5252 - DNA, 17 bp, synthetic construct
  misc_feature 1..17: note = Probe
  source 1..17: mol_type = other DNA
ctcccgccttttttccc

SEQ ID NO: 5253 - DNA, 18 bp, synthetic construct
  misc_feature 1..18: note = Probe
  source 1..18: mol_type = other DNA
ctcccgccttttttcccg

SEQ ID NO: 5254 - DNA, 19 bp, synthetic construct
  misc_feature 1..19: note = Probe
  source 1..19: mol_type = other DNA
ctcccgccttttttcccgg

SEQ ID NO: 5255 - DNA, 20 bp, synthetic construct
  misc_feature 1..20: note = Probe
  source 1..20: mol_type = other DNA
ctcccgccttttttcccggc

SEQ ID NO: 5256 - DNA, 21 bp, synthetic construct
  misc_feature 1..21: note = Probe
  source 1..21: mol_type = other DNA
ctcccgccttttttcccggcg

SEQ ID NO: 5257 - DNA, 22 bp, synthetic construct
  misc_feature 1..22: note = Probe
  source 1..22: mol_type = other DNA
ctcccgccttttttcccggcgg

SEQ ID NO: 5258 - DNA, 23 bp, synthetic construct
  misc_feature 1..23: note = Probe
  source 1..23: mol_type = other DNA
ctcccgccttttttcccggcggc

SEQ ID NO: 5259 - DNA, 24 bp, synthetic construct
  misc_feature 1..24: note = Probe
  source 1..24: mol_type = other DNA
ctcccgccttttttcccggcggcg

SEQ ID NO: 5260 - DNA, 25 bp, synthetic construct
  misc_feature 1..25: note = Probe
  source 1..25: mol_type = other DNA
ctcccgccttttttcccggcggcgg

SEQ ID NO: 5261 - DNA, 26 bp, synthetic construct
  misc_feature 1..26: note = Probe
  source 1..26: mol_type = other DNA
ctcccgccttttttcccggcggcggg

SEQ ID NO: 5262 - DNA, 27 bp, synthetic construct
  misc_feature 1..27: note = Probe
  source 1..27: mol_type = other DNA
ctcccgccttttttcccggcggcggga

SEQ ID NO: 5263 - DNA, 28 bp, synthetic construct
  misc_feature 1..28: note = Probe
  source 1..28: mol_type = other DNA
ctcccgccttttttcccggcggcgggag

SEQ ID NO: 5264 - DNA, 29 bp, synthetic construct
  misc_feature 1..29: note = Probe
  source 1..29: mol_type = other DNA
ctcccgccttttttcccggcggcgggaga

SEQ ID NO: 5265 - DNA, 30 bp, synthetic construct
  misc_feature 1..30: note = Probe
  source 1..30: mol_type = other DNA
ctcccgccttttttcccggcggcgggagaa

SEQ ID NO: 5266 - DNA, 17 bp, synthetic construct
  misc_feature 1..17: note = Probe
  source 1..17: mol_type = other DNA
ctcccggtgtgggaacg

SEQ ID NO: 5267 - DNA, 34 bp, synthetic construct
  misc_feature 1..34: note = Probe
  source 1..34: mol_type = other DNA
ctccctggtggtctagtggttaggattcggcgct

SEQ ID NO: 5268 - DNA, 50 bp, synthetic construct
  misc_feature 1..50: note = Probe
  source 1..50: mol_type = other DNA
ctccgaggtgattttcatattgaattgcaaattcgaagaagcagcttcaa

SEQ ID NO: 5269 - DNA, 15 bp, synthetic construct
  misc_feature 1..15: note = Probe
  source 1..15: mol_type = other DNA
ctccgtgccacctat

SEQ ID NO: 5270 - DNA, 37 bp, synthetic construct
  misc_feature 1..37: note = Probe
  source 1..37: mol_type = other DNA
ctcctcgttagtatagtggtgagtatccccgcctgtc

SEQ ID NO: 5271 - DNA, 36 bp, synthetic construct
  misc_feature 1..36: note = Probe
  source 1..36: mol_type = other DNA
ctcctcgttagtatagtggttagtatccccgcctgt

SEQ ID NO: 5272 - DNA, 27 bp, synthetic construct
  misc_feature 1..27: note = Probe
  source 1..27: mol_type = other DNA
ctcgttagtatagtggtgagtatcccc

SEQ ID NO: 5273 - DNA, 37 bp, synthetic construct
  misc_feature 1..37: note = Probe
  source 1..37: mol_type = other DNA
ctcgttagtatagtggtgagtatccccgcctgtcacg

SEQ ID NO: 5274 - DNA, 33 bp, synthetic construct
  misc_feature 1..33: note = Probe
  source 1..33: mol_type = other DNA
ctcgttagtatagtggttagtatccccgcctgt

SEQ ID NO: 5275 - DNA, 44 bp, synthetic construct
  misc_feature 1..44: note = Probe
  source 1..44: mol_type = other DNA
ctctgaatccagcgatccgagttcaaatctcggtggaacctgca

SEQ ID NO: 5276 - DNA, 50 bp, synthetic construct
  misc_feature 1..50: note = Probe
  source 1..50: mol_type = other DNA
ctctggactctgaatccagcgatccgagttcaaatctcggtggaacctgc

SEQ ID NO: 5277 - DNA, 20 bp, synthetic construct
  misc_feature 1..20: note = Probe
  source 1..20: mol_type = other DNA
ctcttaatcccagggtcgtg

SEQ ID NO: 5278 - DNA, 50 bp, synthetic construct
  misc_feature 1..50: note = Probe
  source 1..50: mol_type = other DNA
ctcttttagtataaatagtaccgttaacttccaattaactagttttgaca

SEQ ID NO: 5279 - DNA, 24 bp, synthetic construct
  misc_feature 1..24: note = Probe
  source 1..24: mol_type = other DNA
ctgaaaatgtttagacgggctcac

SEQ ID NO: 5280 - DNA, 42 bp, synthetic construct
  misc_feature 1..42: note = Probe
  source 1..42: mol_type = other DNA
ctgaaaatgtttagacgggctcacatcaccccataaacaaat

SEQ ID NO: 5281 - DNA, 43 bp, synthetic construct
  misc_feature 1..43: note = Probe
  source 1..43: mol_type = other DNA
ctgaaaatgtttagacgggctcacatcaccccataaacaaata

SEQ ID NO: 5282 - DNA, 44 bp, synthetic construct
  misc_feature 1..44: note = Probe
  source 1..44: mol_type = other DNA
ctgaaaatgtttagacgggctcacatcaccccataaacaaatag

SEQ ID NO: 5283 - DNA, 18 bp, synthetic construct
  misc_feature 1..18: note = Probe
  source 1..18: mol_type = other DNA
ctgaaggtcctgagttcg

SEQ ID NO: 5284 - DNA, 37 bp, synthetic construct
  misc_feature 1..37: note = Probe
  source 1..37: mol_type = other DNA
ctgaaggtcctgagttcgaacctcagagggggcagct

SEQ ID NO: 5285 - DNA, 17 bp, synthetic construct
  misc_feature 1..17: note = Probe
  source 1..17: mol_type = other DNA
ctgaaggtcgtgagttc

SEQ ID NO: 5286 - DNA, 34 bp, synthetic construct
  misc_feature 1..34: note = Probe
  source 1..34: mol_type = other DNA
ctgaaggtcgtgagttcgatcctcacacggggca

SEQ ID NO: 5287 - DNA, 37 bp, synthetic construct
  misc_feature 1..37: note = Probe
  source 1..37: mol_type = other DNA
ctgaaggtcgtgagttcgatcctcacacggggcacaa

SEQ ID NO: 5288 - DNA, 16 bp, synthetic construct
  misc_feature 1..16: note = Probe
  source 1..16: mol_type = other DNA
ctgaatccagcgatcc

SEQ ID NO: 5289 - DNA, 17 bp, synthetic construct
  misc_feature 1..17: note = Probe
  source 1..17: mol_type = other DNA
ctgaatccagcgatccg

SEQ ID NO: 5290 - DNA, 41 bp, synthetic construct
  misc_feature 1..41: note = Probe
  source 1..41: mol_type = other DNA
ctgaatccagcgatccgagttcaaatctcggtggaacctgc

SEQ ID NO: 5291 - DNA, 42 bp, synthetic construct
  misc_feature 1..42: note = Probe
  source 1..42: mol_type = other DNA
ctgaatccagcgatccgagttcaaatctcggtggaacctgca

SEQ ID NO: 5292 - DNA, 41 bp, synthetic construct
  misc_feature 1..41: note = Probe
  source 1..41: mol_type = other DNA
ctgaatccagcgatccgagttcaaatctcggtggaacctgt

SEQ ID NO: 5293 - DNA, 41 bp, synthetic construct
  misc_feature 1..41: note = Probe
  source 1..41: mol_type = other DNA
ctgaatccagcgatccgagttcaaatctcggtggaaccttt

SEQ ID NO: 5294 - DNA, 22 bp, synthetic construct
  misc_feature 1..22: note = Probe
  source 1..22: mol_type = other DNA
ctgacaacagaggcttacgacc

SEQ ID NO: 5295 - DNA, 24 bp, synthetic construct
  misc_feature 1..24: note = Probe
  source 1..24: mol_type = other DNA
ctgacaacagaggcttacgacccc

SEQ ID NO: 5296 - DNA, 26 bp, synthetic construct
  misc_feature 1..26: note = Probe
  source 1..26: mol_type = other DNA
ctgacaacagaggcttacgacccctt

SEQ ID NO: 5297 - DNA, 29 bp, synthetic construct
  misc_feature 1..29: note = Probe
  source 1..29: mol_type = other DNA
ctgacaacagaggcttacgaccccttatt

SEQ ID NO: 5298 - DNA, 34 bp, synthetic construct
  misc_feature 1..34: note = Probe
  source 1..34: mol_type = other DNA
ctgacaacagaggcttacgaccccttatttaccg

SEQ ID NO: 5299 - DNA, 35 bp, synthetic construct
  misc_feature 1..35: note = Probe
  source 1..35: mol_type = other DNA
ctgacaacagaggcttacgaccccttatttaccga

SEQ ID NO: 5300 - DNA, 36 bp, synthetic construct
  misc_feature 1..36: note = Probe
  source 1..36: mol_type = other DNA
ctgacaacagaggcttacgaccccttatttaccgag

SEQ ID NO: 5301 - DNA, 17 bp, synthetic construct
  misc_feature 1..17: note = Probe
  source 1..17: mol_type = other DNA
ctgagggtccagggttc

SEQ ID NO: 5302 - DNA, 18 bp, synthetic construct
  misc_feature 1..18: note = Probe
  source 1..18: mol_type = other DNA
ctgagggtccagggttca

SEQ ID NO: 5303 - DNA, 32 bp, synthetic construct
  misc_feature 1..32: note = Probe
  source 1..32: mol_type = other DNA
ctgagggtccagggttcaagtccctgttcggg

SEQ ID NO: 5304 - DNA, 37 bp, synthetic construct
  misc_feature 1..37: note = Probe
  source 1..37: mol_type = other DNA
ctgagggtccagggttcaagtccctgttcgggcggca

SEQ ID NO: 5305 - DNA, 21 bp, synthetic construct
  misc_feature 1..21: note = Probe
  source 1..21: mol_type = other DNA
ctgagtgaagcattggactgt

SEQ ID NO: 5306 - DNA, 50 bp, synthetic construct
  misc_feature 1..50: note = Probe
  source 1..50: mol_type = other DNA
ctgataaaagagttactttgatagagtaaataataggagcttaaaccccc

SEQ ID NO: 5307 - DNA, 33 bp, synthetic construct
  misc_feature 1..33: note = Probe
  source 1..33: mol_type = other DNA
ctgcagctagctcagtcggtagagcatgagact

SEQ ID NO: 5308 - DNA, 30 bp, synthetic construct
  misc_feature 1..30: note = Probe
  source 1..30: mol_type = other DNA
ctgcgtgttcgaatcacgtcggggtcaaac

SEQ ID NO: 5309 - DNA, 19 bp, synthetic construct
  misc_feature 1..19: note = Probe
  source 1..19: mol_type = other DNA
ctgctaactcatgccccca

SEQ ID NO: 5310 - DNA, 22 bp, synthetic construct
  misc_feature 1..22: note = Probe
  source 1..22: mol_type = other DNA
ctgctaactcatgcccccatgt

SEQ ID NO: 5311 - DNA, 23 bp, synthetic construct
  misc_feature 1..23: note = Probe
  source 1..23: mol_type = other DNA
ctgctaactcatgcccccatgtc

SEQ ID NO: 5312 - DNA, 25 bp, synthetic construct
  misc_feature 1..25: note = Probe
  source 1..25: mol_type = other DNA
ctgctaactcatgcccccatgtcta

SEQ ID NO: 5313 - DNA, 31 bp, synthetic construct
  misc_feature 1..31: note = Probe
  source 1..31: mol_type = other DNA
ctgctaactcatgcccccatgtctaacaaca

SEQ ID NO: 5314 - DNA, 36 bp, synthetic construct
  misc_feature 1..36: note = Probe
  source 1..36: mol_type = other DNA
ctgctaactcatgcccccatgtctaacaacatggct

SEQ ID NO: 5315 - DNA, 37 bp, synthetic construct
  misc_feature 1..37: note = Probe
  source 1..37: mol_type = other DNA
ctgctaactcatgcccccatgtctaacaacatggctt

SEQ ID NO: 5316 - DNA, 38 bp, synthetic construct
  misc_feature 1..38: note = Probe
  source 1..38: mol_type = other DNA
ctgctaactcatgcccccatgtctaacaacatggcttt

SEQ ID NO: 5317 - DNA, 39 bp, synthetic construct
  misc_feature 1..39: note = Probe
  source 1..39: mol_type = other DNA
ctgctaactcatgcccccatgtctaacaacatggctttc

SEQ ID NO: 5318 - DNA, 40 bp, synthetic construct
  misc_feature 1..40: note = Probe
  source 1..40: mol_type = other DNA
ctgctaactcatgcccccatgtctaacaacatggctttct

SEQ ID NO: 5319 - DNA, 41 bp, synthetic construct
  misc_feature 1..41: note = Probe
  source 1..41: mol_type = other DNA
ctgctaactcatgcccccatgtctaacaacatggctttctc

SEQ ID NO: 5320 - DNA, 42 bp, synthetic construct
  misc_feature 1..42: note = Probe
  source 1..42: mol_type = other DNA
ctgctaactcatgcccccatgtctaacaacatggctttctca

SEQ ID NO: 5321 - DNA, 43 bp, synthetic construct
  misc_feature 1..43: note = Probe
  source 1..43: mol_type = other DNA
ctgctaactcatgcccccatgtctaacaacatggctttctcaa

SEQ ID NO: 5322 - DNA, 44 bp, synthetic construct
  misc_feature 1..44: note = Probe
  source 1..44: mol_type = other DNA
ctgctaactcatgcccccatgtctaacaacatggctttctcaac

SEQ ID NO: 5323 - DNA, 45 bp, synthetic construct
  misc_feature 1..45: note = Probe
  source 1..45: mol_type = other DNA
ctgctaactcatgcccccatgtctaacaacatggctttctcaact

SEQ ID NO: 5324 - DNA, 50 bp, synthetic construct
  misc_feature 1..50: note = Probe
  source 1..50: mol_type = other DNA
ctgctaactcatgcccccatgtctaacaacatggctttctcaacttttaa

SEQ ID NO: 5325 - DNA, 24 bp, synthetic construct
  misc_feature 1..24: note = Probe
  source 1..24: mol_type = other DNA
ctggggattgtgggttcgagtccc

SEQ ID NO: 5326 - DNA, 27 bp, synthetic construct
  misc_feature 1..27: note = Probe
  source 1..27: mol_type = other DNA
ctggggattgtgggttcgagtcccatc

SEQ ID NO: 5327 - DNA, 32 bp, synthetic construct
  misc_feature 1..32: note = Probe
  source 1..32: mol_type = other DNA
ctggggattgtgggttcgagtcccatctgggt

SEQ ID NO: 5328 - DNA, 33 bp, synthetic construct
  misc_feature 1..33: note = Probe
  source 1..33: mol_type = other DNA
ctggtggtctagtggctaggattcggcgctttc

SEQ ID NO: 5329 - DNA, 26 bp, synthetic construct
  misc_feature 1..26: note = Probe
  source 1..26: mol_type = other DNA
ctggtggtctagtggttaggattcgg

SEQ ID NO: 5330 - DNA, 34 bp, synthetic construct
  misc_feature 1..34: note = Probe
  source 1..34: mol_type = other DNA
ctggtggtctagtggttaggattcggcgctctca

SEQ ID NO: 5331 - DNA, 23 bp, synthetic construct
  misc_feature 1..23: note = Probe
  source 1..23: mol_type = other DNA
ctggtgtagtggtatcatgcaag

SEQ ID NO: 5332 - DNA, 24 bp, synthetic construct
  misc_feature 1..24: note = Probe
  source 1..24: mol_type = other DNA
ctggtgtagtggtatcatgcaaga

SEQ ID NO: 5333 - DNA, 27 bp, synthetic construct
  misc_feature 1..27: note = Probe
  source 1..27: mol_type = other DNA
ctggtgtagtggtatcatgcaagattc

SEQ ID NO: 5334 - DNA, 23 bp, synthetic construct
  misc_feature 1..23: note = Probe
  source 1..23: mol_type = other DNA
ctggttcaaatccgggtgccccc

SEQ ID NO: 5335 - DNA, 29 bp, synthetic construct
  misc_feature 1..29: note = Probe
  source 1..29: mol_type = other DNA
ctgtaaagctaacttagcattaacctttt

SEQ ID NO: 5336 - DNA, 17 bp, synthetic construct
  misc_feature 1..17: note = Probe
  source 1..17: mol_type = other DNA
ctgtcacgcgggagacc

SEQ ID NO: 5337 - DNA, 23 bp, synthetic construct
  misc_feature 1..23: note = Probe
  source 1..23: mol_type = other DNA
ctgtcacgcgggagaccggggtt

SEQ ID NO: 5338 - DNA, 44 bp, synthetic construct
  misc_feature 1..44: note = Probe
  source 1..44: mol_type = other DNA
ctgtcacgcgggagaccggggttcaattccccgacggggaggtg

SEQ ID NO: 5339 - DNA, 44 bp, synthetic construct
  misc_feature 1..44: note = Probe
  source 1..44: mol_type = other DNA
ctgtcacgcgggagaccggggttcgattccccgacggggagagt

SEQ ID NO: 5340 - DNA, 44 bp, synthetic construct
  misc_feature 1..44: note = Probe
  source 1..44: mol_type = other DNA
ctgtcacgcgggagaccggggttcgattccccgacggggaggca

SEQ ID NO: 5341 - DNA, 50 bp, synthetic construct
  misc_feature 1..50: note = Probe
  source 1..50: mol_type = other DNA
ctgtcacgcgggagaccggggttcgattccccgacggggaggcacagtaa

SEQ ID NO: 5342 - DNA, 22 bp, synthetic construct
  misc_feature 1..22: note = Probe
  source 1..22: mol_type = other DNA
ctgtgctccggagttacctcgt

SEQ ID NO: 5343 - DNA, 23 bp, synthetic construct
  misc_feature 1..23: note = Probe
  source 1..23: mol_type = other DNA
ctgtgctccggagttacctcgtt

SEQ ID NO: 5344 - DNA, 24 bp, synthetic construct
  misc_feature 1..24: note = Probe
  source 1..24: mol_type = other DNA
ctgtgctccggagttacctcgttt

SEQ ID NO: 5345 - DNA, 44 bp, synthetic construct
  misc_feature 1..44: note = Probe
  source 1..44: mol_type = other DNA
ctgttaactaagtgtttgtgggtttaagtcccattggtctagta

SEQ ID NO: 5346 - DNA, 45 bp, synthetic construct
  misc_feature 1..45: note = Probe
  source 1..45: mol_type = other DNA
ctgttaactaagtgtttgtgggtttaagtcccattggtctagtaa

SEQ ID NO: 5347 - DNA, 25 bp, synthetic construct
  misc_feature 1..25: note = Probe
  source 1..25: mol_type = other DNA
cttaaaactttacagtcagaggttc

SEQ ID NO: 5348 - DNA, 37 bp, synthetic construct
  misc_feature 1..37: note = Probe
  source 1..37: mol_type = other DNA
cttaaaactttacagtcagaggttcaattcctcttct

SEQ ID NO: 5349 - DNA, 38 bp, synthetic construct
  misc_feature 1..38: note = Probe
  source 1..38: mol_type = other DNA
cttaaaactttacagtcagaggttcaattcctcttctt

SEQ ID NO: 5350 - DNA, 39 bp, synthetic construct
  misc_feature 1..39: note = Probe
  source 1..39: mol_type = other DNA
cttaaaactttacagtcagaggttcaattcctcttctta

SEQ ID NO: 5351 - DNA, 40 bp, synthetic construct
  misc_feature 1..40: note = Probe
  source 1..40: mol_type = other DNA
cttaaaactttacagtcagaggttcaattcctcttcttaa

SEQ ID NO: 5352 - DNA, 41 bp, synthetic construct
  misc_feature 1..41: note = Probe
  source 1..41: mol_type = other DNA
cttaaaactttacagtcagaggttcaattcctcttcttaac

SEQ ID NO: 5353 - DNA, 42 bp, synthetic construct
  misc_feature 1..42: note = Probe
  source 1..42: mol_type = other DNA
cttaaaactttacagtcagaggttcaattcctcttcttaaca

SEQ ID NO: 5354 - DNA, 44 bp, synthetic construct
  misc_feature 1..44: note = Probe
  source 1..44: mol_type = other DNA
cttaaaactttacagtcagaggttcaattcctcttcttaacaac

SEQ ID NO: 5355 - DNA, 45 bp, synthetic construct
  misc_feature 1..45: note = Probe
  source 1..45: mol_type = other DNA
cttaaaactttacagtcagaggttcaattcctcttcttaacaaca

SEQ ID NO: 5356 - DNA, 22 bp, synthetic construct
  misc_feature 1..22: note = Probe
  source 1..22: mol_type = other DNA
cttaaacccccttatttctagg

SEQ ID NO: 5357 - DNA, 23 bp, synthetic construct
  misc_feature 1..23: note = Probe
  source 1..23: mol_type = other DNA
cttaaacccccttatttctagga

SEQ ID NO: 5358 - DNA, 18 bp, synthetic construct
  misc_feature 1..18: note = Probe
  source 1..18: mol_type = other DNA
cttaacacaaagcaccca

SEQ ID NO: 5359 - DNA, 29 bp, synthetic construct
  misc_feature 1..29: note = Probe
  source 1..29: mol_type = other DNA
cttaacacaaagcacccaacttacactta

SEQ ID NO: 5360 - DNA, 19 bp, synthetic construct
  misc_feature 1..19: note = Probe
  source 1..19: mol_type = other DNA
cttaacttgaccgctctga

SEQ ID NO: 5361 - DNA, 20 bp, synthetic construct
  misc_feature 1..20: note = Probe
  source 1..20: mol_type = other DNA
cttaacttgaccgctctgag

SEQ ID NO: 5362 - DNA, 21 bp, synthetic construct
  misc_feature 1..21: note = Probe
  source 1..21: mol_type = other DNA
cttaacttgaccgctctgagc

SEQ ID NO: 5363 - DNA, 22 bp, synthetic construct
  misc_feature 1..22: note = Probe
  source 1..22: mol_type = other DNA
cttaacttgaccgctctgagct

SEQ ID NO: 5364 - DNA, 17 bp, synthetic construct
  misc_feature 1..17: note = Probe
  source 1..17: mol_type = other DNA
cttacacttaggagatt

SEQ ID NO: 5365 - DNA, 20 bp, synthetic construct
  misc_feature 1..20: note = Probe
  source 1..20: mol_type = other DNA
cttacacttaggagatttca

SEQ ID NO: 5366 - DNA, 32 bp, synthetic construct
  misc_feature 1..32: note = Probe
  source 1..32: mol_type = other DNA
cttacacttaggagatttcaacttaacttgac

SEQ ID NO: 5367 - DNA, 34 bp, synthetic construct
  misc_feature 1..34: note = Probe
  source 1..34: mol_type = other DNA
cttacacttaggagatttcaacttaacttgaccg

SEQ ID NO: 5368 - DNA, 36 bp, synthetic construct
  misc_feature 1..36: note = Probe
  source 1..36: mol_type = other DNA
cttacacttaggagatttcaacttaacttgaccgct

SEQ ID NO: 5369 - DNA, 37 bp, synthetic construct
  misc_feature 1..37: note = Probe
  source 1..37: mol_type = other DNA
cttacacttaggagatttcaacttaacttgaccgctc

SEQ ID NO: 5370 - DNA, 41 bp, synthetic construct
  misc_feature 1..41: note = Probe
  source 1..41: mol_type = other DNA
cttacacttaggagatttcaacttaacttgaccgctctgag

SEQ ID NO: 5371 - DNA, 42 bp, synthetic construct
  misc_feature 1..42: note = Probe
  source 1..42: mol_type = other DNA
cttacacttaggagatttcaacttaacttgaccgctctgagc

SEQ ID NO: 5372 - DNA, 43 bp, synthetic construct
  misc_feature 1..43: note = Probe
  source 1..43: mol_type = other DNA
cttacacttaggagatttcaacttaacttgaccgctctgagct

SEQ ID NO: 5373 - DNA, 44 bp, synthetic construct
  misc_feature 1..44: note = Probe
  source 1..44: mol_type = other DNA
cttacacttaggagatttcaacttaacttgaccgctctgagcta

SEQ ID NO: 5374 - DNA, 50 bp, synthetic construct
  misc_feature 1..50: note = Probe
  source 1..50: mol_type = other DNA
cttacacttaggagatttcaacttaacttgaccgctctgagctaaaccta

SEQ ID NO: 5375 - DNA, 33 bp, synthetic construct
  misc_feature 1..33: note = Probe
  source 1..33: mol_type = other DNA
cttagcattaaccttttaagttaaagattaaga

SEQ ID NO: 5376 - DNA, 36 bp, synthetic construct
  misc_feature 1..36: note = Probe
  source 1..36: mol_type = other DNA
cttagcattaaccttttaagttaaagattaagagaa

SEQ ID NO: 5377 - DNA, 39 bp, synthetic construct
  misc_feature 1..39: note = Probe
  source 1..39: mol_type = other DNA
cttagcattaaccttttaagttaaagattaagagaacca

SEQ ID NO: 5378 - DNA, 41 bp, synthetic construct
  misc_feature 1..41: note = Probe
  source 1..41: mol_type = other DNA
cttagcattaaccttttaagttaaagattaagagaaccaac

SEQ ID NO: 5379 - DNA, 42 bp, synthetic construct
  misc_feature 1..42: note = Probe
  source 1..42: mol_type = other DNA
cttagcattaaccttttaagttaaagattaagagaaccaaca

SEQ ID NO: 5380 - DNA, 50 bp, synthetic construct
  misc_feature 1..50: note = Probe
  source 1..50: mol_type = other DNA
cttagctgttaactaagtgtttgtgggtttaagtcccattggtctagtaa

SEQ ID NO: 5381 - DNA, 50 bp, synthetic construct
  misc_feature 1..50: note = Probe
  source 1..50: mol_type = other DNA
cttagctttgggtgctaatggtggagttaaagactttttctctgatttgt

SEQ ID NO: 5382 - DNA, 28 bp, synthetic construct
  misc_feature 1..28: note = Probe
  source 1..28: mol_type = other DNA
cttaggagatttcaacttaacttgaccg

SEQ ID NO: 5383 - DNA, 29 bp, synthetic construct
  misc_feature 1..29: note = Probe
  source 1..29: mol_type = other DNA
cttaggagatttcaacttaacttgaccgc

SEQ ID NO: 5384 - DNA, 30 bp, synthetic construct
  misc_feature 1..30: note = Probe
  source 1..30: mol_type = other DNA
cttaggagatttcaacttaacttgaccgct

SEQ ID NO: 5385 - DNA, 31 bp, synthetic construct
  misc_feature 1..31: note = Probe
  source 1..31: mol_type = other DNA
cttaggagatttcaacttaacttgaccgctc

SEQ ID NO: 5386 - DNA, 32 bp, synthetic construct
  misc_feature 1..32: note = Probe
  source 1..32: mol_type = other DNA
cttaggagatttcaacttaacttgaccgctct

SEQ ID NO: 5387 - DNA, 33 bp, synthetic construct
  misc_feature 1..33: note = Probe
  source 1..33: mol_type = other DNA
cttaggagatttcaacttaacttgaccgctctg

SEQ ID NO: 5388 - DNA, 34 bp, synthetic construct
  misc_feature 1..34: note = Probe
  source 1..34: mol_type = other DNA
cttaggagatttcaacttaacttgaccgctctga

SEQ ID NO: 5389 - DNA, 35 bp, synthetic construct
  misc_feature 1..35: note = Probe
  source 1..35: mol_type = other DNA
cttaggagatttcaacttaacttgaccgctctgag

SEQ ID NO: 5390 - DNA, 36 bp, synthetic construct
  misc_feature 1..36: note = Probe
  source 1..36: mol_type = other DNA
cttaggagatttcaacttaacttgaccgctctgagc

SEQ ID NO: 5391 - DNA, 37 bp, synthetic construct
  misc_feature 1..37: note = Probe
  source 1..37: mol_type = other DNA
cttaggagatttcaacttaacttgaccgctctgagct

SEQ ID NO: 5392 - DNA, 38 bp, synthetic construct
  misc_feature 1..38: note = Probe
  source 1..38: mol_type = other DNA
cttaggagatttcaacttaacttgaccgctctgagcta

SEQ ID NO: 5393 - DNA, 24 bp, synthetic construct
  misc_feature 1..24: note = Probe
  source 1..24: mol_type = other DNA
cttcaaagccctcagtaagttgca

SEQ ID NO: 5394 - DNA, 23 bp, synthetic construct
  misc_feature 1..23: note = Probe
  source 1..23: mol_type = other DNA
cttccaattaactagttttgaca

SEQ ID NO: 5395 - DNA, 43 bp, synthetic construct
  misc_feature 1..43: note = Probe
  source 1..43: mol_type = other DNA
cttccaattaactagttttgacaacattcaaaaaagagtaata

SEQ ID NO: 5396 - DNA, 40 bp, synthetic construct
  misc_feature 1..40: note = Probe
  source 1..40: mol_type = other DNA
cttgtaaaccggagatgaaaacctttttccaaggacaaat

SEQ ID NO: 5397 - DNA, 46 bp, synthetic construct
  misc_feature 1..46: note = Probe
  source 1..46: mol_type = other DNA
ctttacacgcagaaggtcctgggttcgagccccagtggaaccacgg

SEQ ID NO: 5398 - DNA, 18 bp, synthetic construct
  misc_feature 1..18: note = Probe
  source 1..18: mol_type = other DNA
ctttacagtcagaggttc

SEQ ID NO: 5399 - DNA, 37 bp, synthetic construct
  misc_feature 1..37: note = Probe
  source 1..37: mol_type = other DNA
ctttacagtcagaggttcaattcctcttcttaacaac

SEQ ID NO: 5400 - DNA, 38 bp, synthetic construct
  misc_feature 1..38: note = Probe
  source 1..38: mol_type = other DNA
ctttacagtcagaggttcaattcctcttcttaacaaca

SEQ ID NO: 5401 - DNA, 24 bp, synthetic construct
  misc_feature 1..24: note = Probe
  source 1..24: mol_type = other DNA
ctttgaatccagcgatccgagttc

SEQ ID NO: 5402 - DNA, 37 bp, synthetic construct
  misc_feature 1..37: note = Probe
  source 1..37: mol_type = other DNA
ctttgatagagtaaataataggagcttaaaccccctt

SEQ ID NO: 5403 - DNA, 46 bp, synthetic construct
  misc_feature 1..46: note = Probe
  source 1..46: mol_type = other DNA
ctttgatagagtaaataataggagcttaaacccccttatttctagg

SEQ ID NO: 5404 - DNA, 50 bp, synthetic construct
  misc_feature 1..50: note = Probe
  source 1..50: mol_type = other DNA
ctttgatagagtaaataataggagcttaaacccccttatttctaggacta

SEQ ID NO: 5405 - DNA, 31 bp, synthetic construct
  misc_feature 1..31: note = Probe
  source 1..31: mol_type = other DNA
ctttggggggttcgattccttccttttttgt

SEQ ID NO: 5406 - DNA, 43 bp, synthetic construct
  misc_feature 1..43: note = Probe
  source 1..43: mol_type = other DNA
ctttgggtgctaatggtggagttaaagactttttctctgattt

SEQ ID NO: 5407 - DNA, 49 bp, synthetic construct
  misc_feature 1..49: note = Probe
  source 1..49: mol_type = other DNA
cttttaagttaaagattaagagaaccaacacctctttacagtgaaatgc

SEQ ID NO: 5408 - DNA, 50 bp, synthetic construct
  misc_feature 1..50: note = Probe
  source 1..50: mol_type = other DNA
cttttaagttaaagattaagagaaccaacacctctttacagtgaaatgcc

SEQ ID NO: 5409 - DNA, 23 bp, synthetic construct
  misc_feature 1..23: note = Probe
  source 1..23: mol_type = other DNA
cttttttcccggcggcgggagaa

SEQ ID NO: 5410 - DNA, 25 bp, synthetic construct
  misc_feature 1..25: note = Probe
  source 1..25: mol_type = other DNA
cttttttcccggcggcgggagaagt

SEQ ID NO: 5411 - DNA, 17 bp, synthetic construct
  misc_feature 1..17: note = Probe
  source 1..17: mol_type = other DNA
gaaaaagtcatggaggc

SEQ ID NO: 5412 - DNA, 23 bp, synthetic construct
  misc_feature 1..23: note = Probe
  source 1..23: mol_type = other DNA
gaaaaagtcatggaggccatggg

SEQ ID NO: 5413 - DNA, 24 bp, synthetic construct
  misc_feature 1..24: note = Probe
  source 1..24: mol_type = other DNA
gaaaaagtcatggaggccatgggg

SEQ ID NO: 5414 - DNA, 25 bp, synthetic construct
  misc_feature 1..25: note = Probe
  source 1..25: mol_type = other DNA
gaaaaagtcatggaggccatggggt

SEQ ID NO: 5415 - DNA, 29 bp, synthetic construct
  misc_feature 1..29: note = Probe
  source 1..29: mol_type = other DNA
gaaaaagtcatggaggccatggggttggc

SEQ ID NO: 5416 - DNA, 31 bp, synthetic construct
  misc_feature 1..31: note = Probe
  source 1..31: mol_type = other DNA
gaaaaagtcatggaggccatggggttggctt

SEQ ID NO: 5417 - DNA, 32 bp, synthetic construct
  misc_feature 1..32: note = Probe
  source 1..32: mol_type = other DNA
gaaaaagtcatggaggccatggggttggcttg

SEQ ID NO: 5418 - DNA, 33 bp, synthetic construct
  misc_feature 1..33: note = Probe
  source 1..33: mol_type = other DNA
gaaaaagtcatggaggccatggggttggcttga

SEQ ID NO: 5419 - DNA, 50 bp, synthetic construct
  misc_feature 1..50: note = Probe
  source 1..50: mol_type = other DNA
gaaaaagtcatggaggccatggggttggcttgaaaccagctttggggggt

SEQ ID NO: 5420 - DNA, 23 bp, synthetic construct
  misc_feature 1..23: note = Probe
  source 1..23: mol_type = other DNA
gaaaacctttttccaaggacaaa

SEQ ID NO: 5421 - DNA, 24 bp, synthetic construct
  misc_feature 1..24: note = Probe
  source 1..24: mol_type = other DNA
gaaaacctttttccaaggacaaat

SEQ ID NO: 5422 - DNA, 25 bp, synthetic construct
  misc_feature 1..25: note = Probe
  source 1..25: mol_type = other DNA
gaaaatgttggttatacccttcccg

SEQ ID NO: 5423 - DNA, 27 bp, synthetic construct
  misc_feature 1..27: note = Probe
  source 1..27: mol_type = other DNA
gaaaatgttggttatacccttcccgta

SEQ ID NO: 5424 - DNA, 25 bp, synthetic construct
  misc_feature 1..25: note = Probe
  source 1..25: mol_type = other DNA
gaaaatgtttagacgggctcacatc

SEQ ID NO: 5425 - DNA, 29 bp, synthetic construct
  misc_feature 1..29: note = Probe
  source 1..29: mol_type = other DNA
gaaaatgtttagacgggctcacatcaccc

SEQ ID NO: 5426 - DNA, 39 bp, synthetic construct
  misc_feature 1..39: note = Probe
  source 1..39: mol_type = other DNA
gaaaatgtttagacgggctcacatcaccccataaacaaa

SEQ ID NO: 5427 - DNA, 40 bp, synthetic construct
  misc_feature 1..40: note = Probe
  source 1..40: mol_type = other DNA
gaaaatgtttagacgggctcacatcaccccataaacaaat

SEQ ID NO: 5428 - DNA, 41 bp, synthetic construct
  misc_feature 1..41: note = Probe
  source 1..41: mol_type = other DNA
gaaaatgtttagacgggctcacatcaccccataaacaaata

SEQ ID NO: 5429 - DNA, 42 bp, synthetic construct
  misc_feature 1..42: note = Probe
  source 1..42: mol_type = other DNA
gaaaatgtttagacgggctcacatcaccccataaacaaatag

SEQ ID NO: 5430 - DNA, 21 bp, synthetic construct
  misc_feature 1..21: note = Probe
  source 1..21: mol_type = other DNA
gaaaccagctttggggggttc

SEQ ID NO: 5431 - DNA, 20 bp, synthetic construct
  misc_feature 1..20: note = Probe
  source 1..20: mol_type = other DNA
gaaaccgggcggaaacacct

SEQ ID NO: 5432 - DNA, 21 bp, synthetic construct
  misc_feature 1..21: note = Probe
  source 1..21: mol_type = other DNA
gaaagcatgctccagtggcgc

SEQ ID NO: 5433 - DNA, 22 bp, synthetic construct
  misc_feature 1..22: note = Probe
  source 1..22: mol_type = other DNA
gaaagcatgctccagtggcgca

SEQ ID NO: 5434 - DNA, 32 bp, synthetic construct
  misc_feature 1..32: note = Probe
  source 1..32: mol_type = other DNA
gaaagctcacaagaactgctaactcatgcccc

SEQ ID NO: 5435 - DNA, 33 bp, synthetic construct
  misc_feature 1..33: note = Probe
  source 1..33: mol_type = other DNA
gaaagctcacaagaactgctaactcatgccccc

SEQ ID NO: 5436 - DNA, 36 bp, synthetic construct
  misc_feature 1..36: note = Probe
  source 1..36: mol_type = other DNA
gaaaggtccccggttcgaaaccgggcggaaacacct

SEQ ID NO: 5437 - DNA, 17 bp, synthetic construct
  misc_feature 1..17: note = Probe
  source 1..17: mol_type = other DNA
gaaaggttggtggttcg

SEQ ID NO: 5438 - DNA, 35 bp, synthetic construct
  misc_feature 1..35: note = Probe
  source 1..35: mol_type = other DNA
gaaaggttggtggttcgagcccacccagggacgcc

SEQ ID NO: 5439 - DNA, 36 bp, synthetic construct
  misc_feature 1..36: note = Probe
  source 1..36: mol_type = other DNA
gaaaggttggtggttcgagcccacccagggacgcct

SEQ ID NO: 5440 - DNA, 50 bp, synthetic construct
  misc_feature 1..50: note = Probe
  source 1..50: mol_type = other DNA
gaaatacaacgatggtttttcatatcattggtcgtggttgtagtccgtgc

SEQ ID NO: 5441 - DNA, 31 bp, synthetic construct
  misc_feature 1..31: note = Probe
  source 1..31: mol_type = other DNA
gaacagggtttgttaagatggcagagcccgg

SEQ ID NO: 5442 - DNA, 33 bp, synthetic construct
  misc_feature 1..33: note = Probe
  source 1..33: mol_type = other DNA
gaacagggtttgttaagatggcagagcccggca

SEQ ID NO: 5443 - DNA, 32 bp, synthetic construct
  misc_feature 1..32: note = Probe
  source 1..32: mol_type = other DNA
gaacagggtttgttaagatggcagagcccggt

SEQ ID NO: 5444 - DNA, 35 bp, synthetic construct
  misc_feature 1..35: note = Probe
  source 1..35: mol_type = other DNA
gaacagggtttgttaagatggcagagcccggtaat

SEQ ID NO: 5445 - DNA, 36 bp, synthetic construct
  misc_feature 1..36: note = Probe
  source 1..36: mol_type = other DNA
gaacagggtttgttaagatggcagagcccggtaatc

SEQ ID NO: 5446 - DNA, 37 bp, synthetic construct
  misc_feature 1..37: note = Probe
  source 1..37: mol_type = other DNA
gaacagggtttgttaagatggcagagcccggtaatcg

SEQ ID NO: 5447 - DNA, 38 bp, synthetic construct
  misc_feature 1..38: note = Probe
  source 1..38: mol_type = other DNA
gaacagggtttgttaagatggcagagcccggtaatcgc

SEQ ID NO: 5448 - DNA, 39 bp, synthetic construct
  misc_feature 1..39: note = Probe
  source 1..39: mol_type = other DNA
gaacagggtttgttaagatggcagagcccggtaatcgca

SEQ ID NO: 5449 - DNA, 40 bp, synthetic construct
  misc_feature 1..40: note = Probe
  source 1..40: mol_type = other DNA
gaacagggtttgttaagatggcagagcccggtaatcgcat

SEQ ID NO: 5450 - DNA, 17 bp, synthetic construct
  misc_feature 1..17: note = Probe
  source 1..17: mol_type = other DNA
gaaccaacacctcttta

SEQ ID NO: 5451 - DNA, 18 bp, synthetic construct
  misc_feature 1..18: note = Probe
  source 1..18: mol_type = other DNA
gaaccaacacctctttac

SEQ ID NO: 5452 - DNA, 23 bp, synthetic construct
  misc_feature 1..23: note = Probe
  source 1..23: mol_type = other DNA
gaaccaacacctctttacagtga

SEQ ID NO: 5453 - DNA, 24 bp, synthetic construct
  misc_feature 1..24: note = Probe
  source 1..24: mol_type = other DNA
gaaccaacacctctttacagtgaa

SEQ ID NO: 5454 - DNA, 25 bp, synthetic construct
  misc_feature 1..25: note = Probe
  source 1..25: mol_type = other DNA
gaaccaacacctctttacagtgaaa

SEQ ID NO: 5455 - DNA, 26 bp, synthetic construct
  misc_feature 1..26: note = Probe
  source 1..26: mol_type = other DNA
gaaccaacacctctttacagtgaaat

SEQ ID NO: 5456 - DNA, 16 bp, synthetic construct
  misc_feature 1..16: note = Probe
  source 1..16: mol_type = other DNA
gaactgctaactcatg

SEQ ID NO: 5457 - DNA, 18 bp, synthetic construct
  misc_feature 1..18: note = Probe
  source 1..18: mol_type = other DNA
gaactgctaactcatgcc

SEQ ID NO: 5458 - DNA, 20 bp, synthetic construct
  misc_feature 1..20: note = Probe
  source 1..20: mol_type = other DNA
gaactgctaactcatgcccc

SEQ ID NO: 5459 - DNA, 25 bp, synthetic construct
  misc_feature 1..25: note = Probe
  source 1..25: mol_type = other DNA
gaactgctaactcatgcccccatgt

SEQ ID NO: 5460 - DNA, 27 bp, synthetic construct
  misc_feature 1..27: note = Probe
  source 1..27: mol_type = other DNA
gaactgctaactcatgcccccatgtct

SEQ ID NO: 5461 - DNA, 28 bp, synthetic construct
  misc_feature 1..28: note = Probe
  source 1..28: mol_type = other DNA
gaactgctaactcatgcccccatgtcta

SEQ ID NO: 5462 - DNA, 29 bp, synthetic construct
  misc_feature 1..29: note = Probe
  source 1..29: mol_type = other DNA
gaactgctaactcatgcccccatgtctaa

SEQ ID NO: 5463 - DNA, 39 bp, synthetic construct
  misc_feature 1..39: note = Probe
  source 1..39: mol_type = other DNA
gaactgctaactcatgcccccatgtctaacaacatggct

SEQ ID NO: 5464 - DNA, 40 bp, synthetic construct
  misc_feature 1..40: note = Probe
  source 1..40: mol_type = other DNA
gaactgctaactcatgcccccatgtctaacaacatggctt

SEQ ID NO: 5465 - DNA, 41 bp, synthetic construct
  misc_feature 1..41: note = Probe
  source 1..41: mol_type = other DNA
gaactgctaactcatgcccccatgtctaacaacatggcttt

SEQ ID NO: 5466 - DNA, 42 bp, synthetic construct
  misc_feature 1..42: note = Probe
  source 1..42: mol_type = other DNA
gaactgctaactcatgcccccatgtctaacaacatggctttc

SEQ ID NO: 5467 - DNA, 43 bp, synthetic construct
  misc_feature 1..43: note = Probe
  source 1..43: mol_type = other DNA
gaactgctaactcatgcccccatgtctaacaacatggctttct

SEQ ID NO: 5468 - DNA, 44 bp, synthetic construct
  misc_feature 1..44: note = Probe
  source 1..44: mol_type = other DNA
gaactgctaactcatgcccccatgtctaacaacatggctttctc

SEQ ID NO: 5469 - DNA, 45 bp, synthetic construct
  misc_feature 1..45: note = Probe
  source 1..45: mol_type = other DNA
gaactgctaactcatgcccccatgtctaacaacatggctttctca

SEQ ID NO: 5470 - DNA, 46 bp, synthetic construct
  misc_feature 1..46: note = Probe
  source 1..46: mol_type = other DNA
gaactgctaactcatgcccccatgtctaacaacatggctttctcaa

SEQ ID NO: 5471 - DNA, 49 bp, synthetic construct
  misc_feature 1..49: note = Probe
  source 1..49: mol_type = other DNA
gaactgctaactcatgcccccatgtctaacaacatggctttctcaactt

SEQ ID NO: 5472 - DNA, 50 bp, synthetic construct
  misc_feature 1..50: note = Probe
  source 1..50: mol_type = other DNA
gaactgctaactcatgcccccatgtctaacaacatggctttctcaacttt

SEQ ID NO: 5473 - DNA, 24 bp, synthetic construct
  misc_feature 1..24: note = Probe
  source 1..24: mol_type = other DNA
gaagaagcagcttcaaacctgccg

SEQ ID NO: 5474 - DNA, 25 bp, synthetic construct
  misc_feature 1..25: note = Probe
  source 1..25: mol_type = other DNA
gaagaagcagcttcaaacctgccgg

SEQ ID NO: 5475 - DNA, 26 bp, synthetic construct
  misc_feature 1..26: note = Probe
  source 1..26: mol_type = other DNA
gaagaagcagcttcaaacctgccggg

SEQ ID NO: 5476 - DNA, 27 bp, synthetic construct
  misc_feature 1..27: note = Probe
  source 1..27: mol_type = other DNA
gaagaagcagcttcaaacctgccgggg

SEQ ID NO: 5477 - DNA, 29 bp, synthetic construct
  misc_feature 1..29: note = Probe
  source 1..29: mol_type = other DNA
gaagaagcagcttcaaacctgccggggct

SEQ ID NO: 5478 - DNA, 30 bp, synthetic construct
  misc_feature 1..30: note = Probe
  source 1..30: mol_type = other DNA
gaagaagcagcttcaaacctgccggggctt

SEQ ID NO: 5479 - DNA, 31 bp, synthetic construct
  misc_feature 1..31: note = Probe
  source 1..31: mol_type = other DNA
gaagaagcagcttcaaacctgccggggcttc

SEQ ID NO: 5480 - DNA, 32 bp, synthetic construct
  misc_feature 1..32: note = Probe
  source 1..32: mol_type = other DNA
gaagaagcagcttcaaacctgccggggcttct

SEQ ID NO: 5481 - DNA, 33 bp, synthetic construct
  misc_feature 1..33: note = Probe
  source 1..33: mol_type = other DNA
gaagaagcagcttcaaacctgccggggcttctc

SEQ ID NO: 5482 - DNA, 34 bp, synthetic construct
  misc_feature 1..34: note = Probe
  source 1..34: mol_type = other DNA
gaagaagcagcttcaaacctgccggggcttctcc

SEQ ID NO: 5483 - DNA, 35 bp, synthetic construct
  misc_feature 1..35: note = Probe
  source 1..35: mol_type = other DNA
gaagaagcagcttcaaacctgccggggcttctccc

SEQ ID NO: 5484 - DNA, 31 bp, synthetic construct
  misc_feature 1..31: note = Probe
  source 1..31: mol_type = other DNA
gaagattccaggttcgactcctggctggctc

SEQ ID NO: 5485 - DNA, 32 bp, synthetic construct
  misc_feature 1..32: note = Probe
  source 1..32: mol_type = other DNA
gaagattccaggttcgactcctggctggctcg

SEQ ID NO: 5486 - DNA, 33 bp, synthetic construct
  misc_feature 1..33: note = Probe
  source 1..33: mol_type = other DNA
gaagattccaggttcgactcctggctggctcgg

SEQ ID NO: 5487 - DNA, 33 bp, synthetic construct
  misc_feature 1..33: note = Probe
  source 1..33: mol_type = other DNA
gaagattccaggttcgactcctggctggctcgt

SEQ ID NO: 5488 - DNA, 35 bp, synthetic construct
  misc_feature 1..35: note = Probe
  source 1..35: mol_type = other DNA
gaagattctaggttcgactcctggctggctcgcga

SEQ ID NO: 5489 - DNA, 32 bp, synthetic construct
  misc_feature 1..32: note = Probe
  source 1..32: mol_type = other DNA
gaagattgagggttcgagtcccttcgtggtcg

SEQ ID NO: 5490 - DNA, 35 bp, synthetic construct
  misc_feature 1..35: note = Probe
  source 1..35: mol_type = other DNA
gaagattgagggttcgagtcccttcgtggtcgttg

SEQ ID NO: 5491 - DNA, 30 bp, synthetic construct
  misc_feature 1..30: note = Probe
  source 1..30: mol_type = other DNA
gaagattgcaggttcgagtcctgccgcggt

SEQ ID NO: 5492 - DNA, 35 bp, synthetic construct
  misc_feature 1..35: note = Probe
  source 1..35: mol_type = other DNA
gaagattgcaggttcgagtcctgccgcggtcgaag

SEQ ID NO: 5493 - DNA, 26 bp, synthetic construct
  misc_feature 1..26: note = Probe
  source 1..26: mol_type = other DNA
gaagcagcttcaaacctgccggggct

SEQ ID NO: 5494 - DNA, 27 bp, synthetic construct
  misc_feature 1..27: note = Probe
  source 1..27: mol_type = other DNA
gaagcagcttcaaacctgccggggctt

SEQ ID NO: 5495 - DNA, 28 bp, synthetic construct
  misc_feature 1..28: note = Probe
  source 1..28: mol_type = other DNA
gaagcagcttcaaacctgccggggcttc

SEQ ID NO: 5496 - DNA, 29 bp, synthetic construct
  misc_feature 1..29: note = Probe
  source 1..29: mol_type = other DNA
gaagcagcttcaaacctgccggggcttct

SEQ ID NO: 5497 - DNA, 30 bp, synthetic construct
  misc_feature 1..30: note = Probe
  source 1..30: mol_type = other DNA
gaagcagcttcaaacctgccggggcttctc

SEQ ID NO: 5498 - DNA, 31 bp, synthetic construct
  misc_feature 1..31: note = Probe
  source 1..31: mol_type = other DNA
gaagcagcttcaaacctgccggggcttctcc

SEQ ID NO: 5499 - DNA, 32 bp, synthetic construct
  misc_feature 1..32: note = Probe
  source 1..32: mol_type = other DNA
gaagcagcttcaaacctgccggggcttctccc

SEQ ID NO: 5500 - DNA, 36 bp, synthetic construct
  misc_feature 1..36: note = Probe
  source 1..36: mol_type = other DNA
gaagcagcttcaaacctgccggggcttctcccgcct

SEQ ID NO: 5501 - DNA, 40 bp, synthetic construct
  misc_feature 1..40: note = Probe
  source 1..40: mol_type = other DNA
gaagcagcttcaaacctgccggggcttctcccgccttttt

SEQ ID NO: 5502 - DNA, 43 bp, synthetic construct
  misc_feature 1..43: note = Probe
  source 1..43: mol_type = other DNA
gaagcattggactgtaaatctaaagacaggggttaggcctctt

SEQ ID NO: 5503 - DNA, 44 bp, synthetic construct
  misc_feature 1..44: note = Probe
  source 1..44: mol_type = other DNA
gaagcattggactgtaaatctaaagacaggggttaggcctcttt

SEQ ID NO: 5504 - DNA, 50 bp, synthetic construct
  misc_feature 1..50: note = Probe
  source 1..50: mol_type = other DNA
gaagcattggactgtaaatctaaagacaggggttaggcctctttttacca

SEQ ID NO: 5505 - DNA, 50 bp, synthetic construct
  misc_feature 1..50: note = Probe
  source 1..50: mol_type = other DNA
gaagccagttgattagggtgcttagctgttaactaagtgtttgtgggttt

SEQ ID NO: 5506 - DNA, 18 bp, synthetic construct
  misc_feature 1..18: note = Probe
  source 1..18: mol_type = other DNA
gaagcgggtgctcttatt

SEQ ID NO: 5507 - DNA, 19 bp, synthetic construct
  misc_feature 1..19: note = Probe
  source 1..19: mol_type = other DNA
gaagcgggtgctcttattt

SEQ ID NO: 5508 - DNA, 20 bp, synthetic construct
  misc_feature 1..20: note = Probe
  source 1..20: mol_type = other DNA
gaagcgggtgctcttatttt

SEQ ID NO: 5509 - DNA, 32 bp, synthetic construct
  misc_feature 1..32: note = Probe
  source 1..32: mol_type = other DNA
gaagcgtgctgggcccataacccagaggtcga

SEQ ID NO: 5510 - DNA, 30 bp, synthetic construct
  misc_feature 1..30: note = Probe
  source 1..30: mol_type = other DNA
gaaggtcctgggttcgagccccagtggaac

SEQ ID NO: 5511 - DNA, 32 bp, synthetic construct
  misc_feature 1..32: note = Probe
  source 1..32: mol_type = other DNA
gaaggtcctgggttcgagccccagtggaacca

SEQ ID NO: 5512 - DNA, 34 bp, synthetic construct
  misc_feature 1..34: note = Probe
  source 1..34: mol_type = other DNA
gaaggtcctgggttcgagccccagtggaaccacg

SEQ ID NO: 5513 - DNA, 35 bp, synthetic construct
  misc_feature 1..35: note = Probe
  source 1..35: mol_type = other DNA
gaaggtcctgggttcgagccccagtggaaccacgg

SEQ ID NO: 5514 - DNA, 33 bp, synthetic construct
  misc_feature 1..33: note = Probe
  source 1..33: mol_type = other DNA
gaaggtcgtgagttcgatcctcacacggggcac

SEQ ID NO: 5515 - DNA, 35 bp, synthetic construct
  misc_feature 1..35: note = Probe
  source 1..35: mol_type = other DNA
gaaggtcgtgagttcgatcctcacacggggcacaa

SEQ ID NO: 5516 - DNA, 35 bp, synthetic construct
  misc_feature 1..35: note = Probe
  source 1..35: mol_type = other DNA
gaaggttgcgtgttcaaatcacgtcggggtcaaca

SEQ ID NO: 5517 - DNA, 17 bp, synthetic construct
  misc_feature 1..17: note = Probe
  source 1..17: mol_type = other DNA
gaatccagcgatccgag

SEQ ID NO: 5518 - DNA, 18 bp, synthetic construct
  misc_feature 1..18: note = Probe
  source 1..18: mol_type = other DNA
gaatccagcgatccgagt

SEQ ID NO: 5519 - DNA, 19 bp, synthetic construct
  misc_feature 1..19: note = Probe
  source 1..19: mol_type = other DNA
gaatccagcgatccgagtt

SEQ ID NO: 5520 - DNA, 23 bp, synthetic construct
  misc_feature 1..23: note = Probe
  source 1..23: mol_type = other DNA
gaatccagcgatccgagttcaaa

SEQ ID NO: 5521 - DNA, 24 bp, synthetic construct
  misc_feature 1..24: note = Probe
  source 1..24: mol_type = other DNA
gaatccagcgatccgagttcaaat

SEQ ID NO: 5522 - DNA, 39 bp, synthetic construct
  misc_feature 1..39: note = Probe
  source 1..39: mol_type = other DNA
gaatccagcgatccgagttcaaatctcggtggaacctgc

SEQ ID NO: 5523 - DNA, 40 bp, synthetic construct
  misc_feature 1..40: note = Probe
  source 1..40: mol_type = other DNA
gaatccagcgatccgagttcaaatctcggtggaacctgca

SEQ ID NO: 5524 - DNA, 40 bp, synthetic construct
  misc_feature 1..40: note = Probe
  source 1..40: mol_type = other DNA
gaatccagcgatccgagttcaaatctcggtggaacctttc

SEQ ID NO: 5525 - DNA, 39 bp, synthetic construct
  misc_feature 1..39: note = Probe
  source 1..39: mol_type = other DNA
gaatccagcgatccgagttcaaatctcggtgggacctca

SEQ ID NO: 5526 - DNA, 40 bp, synthetic construct
  misc_feature 1..40: note = Probe
  source 1..40: mol_type = other DNA
gaatccagcgatccgagttcaaatctcggtgggacctcac

SEQ ID NO: 5527 - DNA, 41 bp, synthetic construct
  misc_feature 1..41: note = Probe
  source 1..41: mol_type = other DNA
gaatccagcgatccgagttcaaatctcggtgggacctcacg

SEQ ID NO: 5528 - DNA, 40 bp, synthetic construct
  misc_feature 1..40: note = Probe
  source 1..40: mol_type = other DNA
gaatccagcgatccgagttcgagtctcggtggaacctttg

SEQ ID NO: 5529 - DNA, 20 bp, synthetic construct
  misc_feature 1..20: note = Probe
  source 1..20: mol_type = other DNA
gaatcccagcggtgcctccg

SEQ ID NO: 5530 - DNA, 24 bp, synthetic construct
  misc_feature 1..24: note = Probe
  source 1..24: mol_type = other DNA
gaatctgacaacagaggcttacga

SEQ ID NO: 5531 - DNA, 25 bp, synthetic construct
  misc_feature 1..25: note = Probe
  source 1..25: mol_type = other DNA
gaatctgacaacagaggcttacgac

SEQ ID NO: 5532 - DNA, 27 bp, synthetic construct
  misc_feature 1..27: note = Probe
  source 1..27: mol_type = other DNA
gaatctgacaacagaggcttacgaccc

SEQ ID NO: 5533 - DNA, 28 bp, synthetic construct
  misc_feature 1..28: note = Probe
  source 1..28: mol_type = other DNA
gaatctgacaacagaggcttacgacccc

SEQ ID NO: 5534 - DNA, 29 bp, synthetic construct
  misc_feature 1..29: note = Probe
  source 1..29: mol_type = other DNA
gaatctgacaacagaggcttacgacccct

SEQ ID NO: 5535 - DNA, 33 bp, synthetic construct
  misc_feature 1..33: note = Probe
  source 1..33: mol_type = other DNA
gaatctgacaacagaggcttacgaccccttatt

SEQ ID NO: 5536 - DNA, 34 bp, synthetic construct
  misc_feature 1..34: note = Probe
  source 1..34: mol_type = other DNA
gaatctgacaacagaggcttacgaccccttattt

SEQ ID NO: 5537 - DNA, 38 bp, synthetic construct
  misc_feature 1..38: note = Probe
  source 1..38: mol_type = other DNA
gaatctgacaacagaggcttacgaccccttatttaccg

SEQ ID NO: 5538 - DNA, 39 bp, synthetic construct
  misc_feature 1..39: note = Probe
  source 1..39: mol_type = other DNA
gaatctgacaacagaggcttacgaccccttatttaccga

SEQ ID NO: 5539 - DNA, 40 bp, synthetic construct
  misc_feature 1..40: note = Probe
  source 1..40: mol_type = other DNA
gaatctgacaacagaggcttacgaccccttatttaccgag

SEQ ID NO: 5540 - DNA, 33 bp, synthetic construct
  misc_feature 1..33: note = Probe
  source 1..33: mol_type = other DNA
gaatcttagctttgggtgctaatggtggagtta

SEQ ID NO: 5541 - DNA, 50 bp, synthetic construct
  misc_feature 1..50: note = Probe
  source 1..50: mol_type = other DNA
gaatcttagctttgggtgctaatggtggagttaaagactttttctctgat

SEQ ID NO: 5542 - DNA, 17 bp, synthetic construct
  misc_feature 1..17: note = Probe
  source 1..17: mol_type = other DNA
gaattctcgcctgccac

SEQ ID NO: 5543 - DNA, 27 bp, synthetic construct
  misc_feature 1..27: note = Probe
  source 1..27: mol_type = other DNA
gaattctcgcctgccacgcgggaggcc

SEQ ID NO: 5544 - DNA, 45 bp, synthetic construct
  misc_feature 1..45: note = Probe
  source 1..45: mol_type = other DNA
gaattgcaaattcgaagaagcagcttcaaacctgccggggcttct

SEQ ID NO: 5545 - DNA, 46 bp, synthetic construct
  misc_feature 1..46: note = Probe
  source 1..46: mol_type = other DNA
gaattgcaaattcgaagaagcagcttcaaacctgccggggcttctc

SEQ ID NO: 5546 - DNA, 21 bp, synthetic construct
  misc_feature 1..21: note = Probe
  source 1..21: mol_type = other DNA
gacaacagaggcttacgaccc

SEQ ID NO: 5547 - DNA, 22 bp, synthetic construct
  misc_feature 1..22: note = Probe
  source 1..22: mol_type = other DNA
gacaacagaggcttacgacccc

SEQ ID NO: 5548 - DNA, 24 bp, synthetic construct
  misc_feature 1..24: note = Probe
  source 1..24: mol_type = other DNA
gacaacagaggcttacgacccctt

SEQ ID NO: 5549 - DNA, 27 bp, synthetic construct
  misc_feature 1..27: note = Probe
  source 1..27: mol_type = other DNA
gacaacagaggcttacgaccccttatt

SEQ ID NO: 5550 - DNA, 30 bp, synthetic construct
  misc_feature 1..30: note = Probe
  source 1..30: mol_type = other DNA
gacaacagaggcttacgaccccttatttac

SEQ ID NO: 5551 - DNA, 32 bp, synthetic construct
  misc_feature 1..32: note = Probe
  source 1..32: mol_type = other DNA
gacaacagaggcttacgaccccttatttaccg

SEQ ID NO: 5552 - DNA, 33 bp, synthetic construct
  misc_feature 1..33: note = Probe
  source 1..33: mol_type = other DNA
gacaacagaggcttacgaccccttatttaccga

SEQ ID NO: 5553 - DNA, 34 bp, synthetic construct
  misc_feature 1..34: note = Probe
  source 1..34: mol_type = other DNA
gacaacagaggcttacgaccccttatttaccgag

SEQ ID NO: 5554 - DNA, 50 bp, synthetic construct
  misc_feature 1..50: note = Probe
  source 1..50: mol_type = other DNA
gacaccccccacagtttatgtagcttacctcctcaaagcaatacactgaa

SEQ ID NO: 5555 - DNA, 25 bp, synthetic construct
  misc_feature 1..25: note = Probe
  source 1..25: mol_type = other DNA
gacaggggttaggcctctttttacc

SEQ ID NO: 5556 - DNA, 29 bp, synthetic construct
  misc_feature 1..29: note = Probe
  source 1..29: mol_type = other DNA
gacaggggttaggcctctttttaccagct

SEQ ID NO: 5557 - DNA, 20 bp, synthetic construct
  misc_feature 1..20: note = Probe
  source 1..20: mol_type = other DNA
gacatatgtccgcgtgggtt

SEQ ID NO: 5558 - DNA, 21 bp, synthetic construct
  misc_feature 1..21: note = Probe
  source 1..21: mol_type = other DNA
gacatatgtccgcgtgggttc

SEQ ID NO: 5559 - DNA, 27 bp, synthetic construct
  misc_feature 1..27: note = Probe
  source 1..27: mol_type = other DNA
gaccaagagccttcaaagccctcagta

SEQ ID NO: 5560 - DNA, 34 bp, synthetic construct
  misc_feature 1..34: note = Probe
  source 1..34: mol_type = other DNA
gaccaagagccttcaaagccctcagtaagttgca

SEQ ID NO: 5561 - DNA, 45 bp, synthetic construct
  misc_feature 1..45: note = Probe
  source 1..45: mol_type = other DNA
gaccaagagccttcaaagccctcagtaagttgcaatacttaattt

SEQ ID NO: 5562 - DNA, 19 bp, synthetic construct
  misc_feature 1..19: note = Probe
  source 1..19: mol_type = other DNA
gacccagtggcctaatgga

SEQ ID NO: 5563 - DNA, 21 bp, synthetic construct
  misc_feature 1..21: note = Probe
  source 1..21: mol_type = other DNA
gacccgggttcgattcccggc

SEQ ID NO: 5564 - DNA, 23 bp, synthetic construct
  misc_feature 1..23: note = Probe
  source 1..23: mol_type = other DNA
gacccgggttcgattcccggcca

SEQ ID NO: 5565 - DNA, 26 bp, synthetic construct
  misc_feature 1..26: note = Probe
  source 1..26: mol_type = other DNA
gacccgggttcgattcccggccaacg

SEQ ID NO: 5566 - DNA, 28 bp, synthetic construct
  misc_feature 1..28: note = Probe
  source 1..28: mol_type = other DNA
gacccgggttcgattcccggccaacgca

SEQ ID NO: 5567 - DNA, 31 bp, synthetic construct
  misc_feature 1..31: note = Probe
  source 1..31: mol_type = other DNA
gacccgggttcgattcccggccaacgcaagt

SEQ ID NO: 5568 - DNA, 31 bp, synthetic construct
  misc_feature 1..31: note = Probe
  source 1..31: mol_type = other DNA
gacccgggttcgattcccggccaacgcagtg

SEQ ID NO: 5569 - DNA, 22 bp, synthetic construct
  misc_feature 1..22: note = Probe
  source 1..22: mol_type = other DNA
gaccggggttcaattccccgac

SEQ ID NO: 5570 - DNA, 29 bp, synthetic construct
  misc_feature 1..29: note = Probe
  source 1..29: mol_type = other DNA
gaccggggttcaattccccgacggggagg

SEQ ID NO: 5571 - DNA, 31 bp, synthetic construct
  misc_feature 1..31: note = Probe
  source 1..31: mol_type = other DNA
gaccggggttcaattccccgacggggaggtg

SEQ ID NO: 5572 - DNA, 22 bp, synthetic construct
  misc_feature 1..22: note = Probe
  source 1..22: mol_type = other DNA
gaccggggttcgattccccgac

SEQ ID NO: 5573 - DNA, 23 bp, synthetic construct
  misc_feature 1..23: note = Probe
  source 1..23: mol_type = other DNA
gaccggggttcgattccccgacg

SEQ ID NO: 5574 - DNA, 24 bp, synthetic construct
  misc_feature 1..24: note = Probe
  source 1..24: mol_type = other DNA
gaccggggttcgattccccgacgg

SEQ ID NO: 5575 - DNA, 29 bp, synthetic construct
  misc_feature 1..29: note = Probe
  source 1..29: mol_type = other DNA
gaccggggttcgattccccgacggggaga

SEQ ID NO: 5576 - DNA, 30 bp, synthetic construct
  misc_feature 1..30: note = Probe
  source 1..30: mol_type = other DNA
gaccggggttcgattccccgacggggagac

SEQ ID NO: 5577 - DNA, 31 bp, synthetic construct
  misc_feature 1..31: note = Probe
  source 1..31: mol_type = other DNA
gaccggggttcgattccccgacggggagagt

SEQ ID NO: 5578 - DNA, 29 bp, synthetic construct
  misc_feature 1..29: note = Probe
  source 1..29: mol_type = other DNA
gaccggggttcgattccccgacggggagg

SEQ ID NO: 5579 - DNA, 30 bp, synthetic construct
  misc_feature 1..30: note = Probe
  source 1..30: mol_type = other DNA
gaccggggttcgattccccgacggggaggc

SEQ ID NO: 5580 - DNA, 31 bp, synthetic construct
  misc_feature 1..31: note = Probe
  source 1..31: mol_type = other DNA
gaccggggttcgattccccgacggggaggca

SEQ ID NO: 5581 - DNA, 31 bp, synthetic construct
  misc_feature 1..31: note = Probe
  source 1..31: mol_type = other DNA
gaccggggttcgattccccgacggggaggcc

SEQ ID NO: 5582 - DNA, 19 bp, synthetic construct
  misc_feature 1..19: note = Probe
  source 1..19: mol_type = other DNA
gacctcgtggcgcaatggt

SEQ ID NO: 5583 - DNA, 33 bp, synthetic construct
  misc_feature 1..33: note = Probe
  source 1..33: mol_type = other DNA
gacgagctagctcagtcggtagagcatgggact

SEQ ID NO: 5584 - DNA, 16 bp, synthetic construct
  misc_feature 1..16: note = Probe
  source 1..16: mol_type = other DNA
gacgaggtggccgagt

SEQ ID NO: 5585 - DNA, 17 bp, synthetic construct
  misc_feature 1..17: note = Probe
  source 1..17: mol_type = other DNA
gacgaggtggccgagtg

SEQ ID NO: 5586 - DNA, 18 bp, synthetic construct
  misc_feature 1..18: note = Probe
  source 1..18: mol_type = other DNA
gacgaggtggccgagtgg

SEQ ID NO: 5587 - DNA, 19 bp, synthetic construct
  misc_feature 1..19: note = Probe
  source 1..19: mol_type = other DNA
gacgaggtggccgagtggt

SEQ ID NO: 5588 - DNA, 23 bp, synthetic construct
  misc_feature 1..23: note = Probe
  source 1..23: mol_type = other DNA
gacgaggtggccgagtggttaag

SEQ ID NO: 5589 - DNA, 20 bp, synthetic construct
  misc_feature 1..20: note = Probe
  source 1..20: mol_type = other DNA
gacgggctcacatcacccca

SEQ ID NO: 5590 - DNA, 22 bp, synthetic construct
  misc_feature 1..22: note = Probe
  source 1..22: mol_type = other DNA
gacgggctcacatcaccccata

SEQ ID NO: 5591 - DNA, 23 bp, synthetic construct
  misc_feature 1..23: note = Probe
  source 1..23: mol_type = other DNA
gacgggctcacatcaccccataa

SEQ ID NO: 5592 - DNA, 24 bp, synthetic construct
  misc_feature 1..24: note = Probe
  source 1..24: mol_type = other DNA
gacgggctcacatcaccccataaa

SEQ ID NO: 5593 - DNA, 25 bp, synthetic construct
  misc_feature 1..25: note = Probe
  source 1..25: mol_type = other DNA
gacgggctcacatcaccccataaac

SEQ ID NO: 5594 - DNA, 26 bp, synthetic construct
  misc_feature 1..26: note = Probe
  source 1..26: mol_type = other DNA
gacgggctcacatcaccccataaaca

SEQ ID NO: 5595 - DNA, 27 bp, synthetic construct
  misc_feature 1..27: note = Probe
  source 1..27: mol_type = other DNA
gacgggctcacatcaccccataaacaa

SEQ ID NO: 5596 - DNA, 28 bp, synthetic construct
  misc_feature 1..28: note = Probe
  source 1..28: mol_type = other DNA
gacgggctcacatcaccccataaacaaa

SEQ ID NO: 5597 - DNA, 29 bp, synthetic construct
  misc_feature 1..29: note = Probe
  source 1..29: mol_type = other DNA
gacgggctcacatcaccccataaacaaat

SEQ ID NO: 5598 - DNA, 30 bp, synthetic construct
  misc_feature 1..30: note = Probe
  source 1..30: mol_type = other DNA
gacgggctcacatcaccccataaacaaata

SEQ ID NO: 5599 - DNA, 15 bp, synthetic construct
  misc_feature 1..15: note = Probe
  source 1..15: mol_type = other DNA
gactacaaaaaggat

SEQ ID NO: 5600 - DNA, 23 bp, synthetic construct
  misc_feature 1..23: note = Probe
  source 1..23: mol_type = other DNA
gactacaaaaaggattagactga

SEQ ID NO: 5601 - DNA, 24 bp, synthetic construct
  misc_feature 1..24: note = Probe
  source 1..24: mol_type = other DNA
gactacaaaaaggattagactgaa

SEQ ID NO: 5602 - DNA, 25 bp, synthetic construct
  misc_feature 1..25: note = Probe
  source 1..25: mol_type = other DNA
gactacaaaaaggattagactgaac

SEQ ID NO: 5603 - DNA, 26 bp, synthetic construct
  misc_feature 1..26: note = Probe
  source 1..26: mol_type = other DNA
gactacaaaaaggattagactgaacc

SEQ ID NO: 5604 - DNA, 27 bp, synthetic construct
  misc_feature 1..27: note = Probe
  source 1..27: mol_type = other DNA
gactacaaaaaggattagactgaaccg

SEQ ID NO: 5605 - DNA, 29 bp, synthetic construct
  misc_feature 1..29: note = Probe
  source 1..29: mol_type = other DNA
gactacaaaaaggattagactgaaccgaa

SEQ ID NO: 5606 - DNA, 31 bp, synthetic construct
  misc_feature 1..31: note = Probe
  source 1..31: mol_type = other DNA
gactcattaaattatgataatcatatttacc

SEQ ID NO: 5607 - DNA, 36 bp, synthetic construct
  misc_feature 1..36: note = Probe
  source 1..36: mol_type = other DNA
gactcattaaattatgataatcatatttaccaaatg

SEQ ID NO: 5608 - DNA, 20 bp, synthetic construct
  misc_feature 1..20: note = Probe
  source 1..20: mol_type = other DNA
gactcccggtgtgggaacgc

SEQ ID NO: 5609 - DNA, 17 bp, synthetic construct
  misc_feature 1..17: note = Probe
  source 1..17: mol_type = other DNA
gactctgaatccagcga

SEQ ID NO: 5610 - DNA, 44 bp, synthetic construct
  misc_feature 1..44: note = Probe
  source 1..44: mol_type = other DNA
gactgtaaatctaaagacaggggttaggcctctttttaccagct

SEQ ID NO: 5611 - DNA, 16 bp, synthetic construct
  misc_feature 1..16: note = Probe
  source 1..16: mol_type = other DNA
gagaaagctcacaaga

SEQ ID NO: 5612 - DNA, 17 bp, synthetic construct
  misc_feature 1..17: note = Probe
  source 1..17: mol_type = other DNA
gagaaagctcacaagaa

SEQ ID NO: 5613 - DNA, 48 bp, synthetic construct
  misc_feature 1..48: note = Probe
  source 1..48: mol_type = other DNA
gagaaagctcacaagaactgctaactcatgcccccatgtctaacaaca

SEQ ID NO: 5614 - DNA, 26 bp, synthetic construct
  misc_feature 1..26: note = Probe
  source 1..26: mol_type = other DNA
gagaaccaacacctctttacagtgaa

SEQ ID NO: 5615 - DNA, 27 bp, synthetic construct
  misc_feature 1..27: note = Probe
  source 1..27: mol_type = other DNA
gagaaccaacacctctttacagtgaaa

SEQ ID NO: 5616 - DNA, 28 bp, synthetic construct
  misc_feature 1..28: note = Probe
  source 1..28: mol_type = other DNA
gagaaccaacacctctttacagtgaaat

SEQ ID NO: 5617 - DNA, 31 bp, synthetic construct
  misc_feature 1..31: note = Probe
  source 1..31: mol_type = other DNA
gagaccggggttcaattccccgacggggagg

SEQ ID NO: 5618 - DNA, 33 bp, synthetic construct
  misc_feature 1..33: note = Probe
  source 1..33: mol_type = other DNA
gagaccggggttcaattccccgacggggaggtg

SEQ ID NO: 5619 - DNA, 27 bp, synthetic construct
  misc_feature 1..27: note = Probe
  source 1..27: mol_type = other DNA
gagaccggggttcgattccccgacggg

SEQ ID NO: 5620 - DNA, 31 bp, synthetic construct
  misc_feature 1..31: note = Probe
  source 1..31: mol_type = other DNA
gagaccggggttcgattccccgacggggaga

SEQ ID NO: 5621 - DNA, 32 bp, synthetic construct
  misc_feature 1..32: note = Probe
  source 1..32: mol_type = other DNA
gagaccggggttcgattccccgacggggagaa

SEQ ID NO: 5622 - DNA, 32 bp, synthetic construct
  misc_feature 1..32: note = Probe
  source 1..32: mol_type = other DNA
gagaccggggttcgattccccgacggggagac

SEQ ID NO: 5623 - DNA, 33 bp, synthetic construct
  misc_feature 1..33: note = Probe
  source 1..33: mol_type = other DNA
gagaccggggttcgattccccgacggggagagt

SEQ ID NO: 5624 - DNA, 31 bp, synthetic construct
  misc_feature 1..31: note = Probe
  source 1..31: mol_type = other DNA
gagaccggggttcgattccccgacggggagg

SEQ ID NO: 5625 - DNA, 32 bp, synthetic construct
  misc_feature 1..32: note = Probe
  source 1..32: mol_type = other DNA
gagaccggggttcgattccccgacggggaggc

SEQ ID NO: 5626 - DNA, 33 bp, synthetic construct
  misc_feature 1..33: note = Probe
  source 1..33: mol_type = other DNA
gagaccggggttcgattccccgacggggaggca

SEQ ID NO: 5627 - DNA, 17 bp, synthetic construct
  misc_feature 1..17: note = Probe
  source 1..17: mol_type = other DNA
gagaggtcccgggttca

SEQ ID NO: 5628 - DNA, 36 bp, synthetic construct
  misc_feature 1..36: note = Probe
  source 1..36: mol_type = other DNA
gagaggtcccgggttcaaatcccggacgagccccct

SEQ ID NO: 5629 - DNA, 32 bp, synthetic construct
  misc_feature 1..32: note = Probe
  source 1..32: mol_type = other DNA
gagatcctgggttcgaatcccagcggtgcctc

SEQ ID NO: 5630 - DNA, 26 bp, synthetic construct
  misc_feature 1..26: note = Probe
  source 1..26: mol_type = other DNA
gagatgaaaacctttttccaaggaca

SEQ ID NO: 5631 - DNA, 27 bp, synthetic construct
  misc_feature 1..27: note = Probe
  source 1..27: mol_type = other DNA
gagatgaaaacctttttccaaggacaa

SEQ ID NO: 5632 - DNA, 28 bp, synthetic construct
  misc_feature 1..28: note = Probe
  source 1..28: mol_type = other DNA
gagatgaaaacctttttccaaggacaaa

SEQ ID NO: 5633 - DNA, 29 bp, synthetic construct
  misc_feature 1..29: note = Probe
  source 1..29: mol_type = other DNA
gagatgaaaacctttttccaaggacaaat

SEQ ID NO: 5634 - DNA, 23 bp, synthetic construct
  misc_feature 1..23: note = Probe
  source 1..23: mol_type = other DNA
gagatttcaacttaacttgaccg

SEQ ID NO: 5635 - DNA, 24 bp, synthetic construct
  misc_feature 1..24: note = Probe
  source 1..24: mol_type = other DNA
gagatttcaacttaacttgaccgc

SEQ ID NO: 5636 - DNA, 25 bp, synthetic construct
  misc_feature 1..25: note = Probe
  source 1..25: mol_type = other DNA
gagatttcaacttaacttgaccgct

SEQ ID NO: 5637 - DNA, 26 bp, synthetic construct
  misc_feature 1..26: note = Probe
  source 1..26: mol_type = other DNA
gagatttcaacttaacttgaccgctc

SEQ ID NO: 5638 - DNA, 27 bp, synthetic construct
  misc_feature 1..27: note = Probe
  source 1..27: mol_type = other DNA
gagatttcaacttaacttgaccgctct

SEQ ID NO: 5639 - DNA, 28 bp, synthetic construct
  misc_feature 1..28: note = Probe
  source 1..28: mol_type = other DNA
gagatttcaacttaacttgaccgctctg

SEQ ID NO: 5640 - DNA, 29 bp, synthetic construct
  misc_feature 1..29: note = Probe
  source 1..29: mol_type = other DNA
gagatttcaacttaacttgaccgctctga

SEQ ID NO: 5641 - DNA, 30 bp, synthetic construct
  misc_feature 1..30: note = Probe
  source 1..30: mol_type = other DNA
gagatttcaacttaacttgaccgctctgag

SEQ ID NO: 5642 - DNA, 31 bp, synthetic construct
  misc_feature 1..31: note = Probe
  source 1..31: mol_type = other DNA
gagatttcaacttaacttgaccgctctgagc

SEQ ID NO: 5643 - DNA, 32 bp, synthetic construct
  misc_feature 1..32: note = Probe
  source 1..32: mol_type = other DNA
gagatttcaacttaacttgaccgctctgagct

SEQ ID NO: 5644 - DNA, 31 bp, synthetic construct
  misc_feature 1..31: note = Probe
  source 1..31: mol_type = other DNA
gagcagcctcgttagcgcagtaggcagcgcg

SEQ ID NO: 5645 - DNA, 37 bp, synthetic construct
  misc_feature 1..37: note = Probe
  source 1..37: mol_type = other DNA
gagcagcctcgttagcgcagtaggcagcgcgtcagtc

SEQ ID NO: 5646 - DNA, 40 bp, synthetic construct
  misc_feature 1..40: note = Probe
  source 1..40: mol_type = other DNA
gagcagcctcgttagcgcagtaggcagcgcgtcagtctca

SEQ ID NO: 5647 - DNA, 41 bp, synthetic construct
  misc_feature 1..41: note = Probe
  source 1..41: mol_type = other DNA
gagcagcctcgttagcgcagtaggcagcgcgtcagtctcat

SEQ ID NO: 5648 - DNA, 31 bp, synthetic construct
  misc_feature 1..31: note = Probe
  source 1..31: mol_type = other DNA
gagcatagctgccttccaagcagttgacccg

SEQ ID NO: 5649 - DNA, 27 bp, synthetic construct
  misc_feature 1..27: note = Probe
  source 1..27: mol_type = other DNA
gagcatgagactcttaatctcagggtc

SEQ ID NO: 5650 - DNA, 28 bp, synthetic construct
  misc_feature 1..28: note = Probe
  source 1..28: mol_type = other DNA
gagcatgagactcttaatctcagggtcg

SEQ ID NO: 5651 - DNA, 31 bp, synthetic construct
  misc_feature 1..31: note = Probe
  source 1..31: mol_type = other DNA
gagcatgagactcttaatctcagggtcgtgg

SEQ ID NO: 5652 - DNA, 28 bp, synthetic construct
  misc_feature 1..28: note = Probe
  source 1..28: mol_type = other DNA
gagcatgggactcttaatcccagggtcg

SEQ ID NO: 5653 - DNA, 29 bp, synthetic construct
  misc_feature 1..29: note = Probe
  source 1..29: mol_type = other DNA
gagcatgggactcttaatcccagggtcgt

SEQ ID NO: 5654 - DNA, 30 bp, synthetic construct
  misc_feature 1..30: note = Probe
  source 1..30: mol_type = other DNA
gagcatgggactcttaatcccagggtcgtg

SEQ ID NO: 5655 - DNA, 31 bp, synthetic construct
  misc_feature 1..31: note = Probe
  source 1..31: mol_type = other DNA
gagcatgggactcttaatcccagggtcgtgg

SEQ ID NO: 5656 - DNA, 23 bp, synthetic construct
  misc_feature 1..23: note = Probe
  source 1..23: mol_type = other DNA
gagcccggtaatcgcataaaact

SEQ ID NO: 5657 - DNA, 32 bp, synthetic construct
  misc_feature 1..32: note = Probe
  source 1..32: mol_type = other DNA
gagcccggtaatcgcataaaacttaaaacttt

SEQ ID NO: 5658 - DNA, 33 bp, synthetic construct
  misc_feature 1..33: note = Probe
  source 1..33: mol_type = other DNA
gagcccggtaatcgcataaaacttaaaacttta

SEQ ID NO: 5659 - DNA, 35 bp, synthetic construct
  misc_feature 1..35: note = Probe
  source 1..35: mol_type = other DNA
gagcccggtaatcgcataaaacttaaaactttaca

SEQ ID NO: 5660 - DNA, 44 bp, synthetic construct
  misc_feature 1..44: note = Probe
  source 1..44: mol_type = other DNA
gagcccggtaatcgcataaaacttaaaactttacagtcagaggt

SEQ ID NO: 5661 - DNA, 46 bp, synthetic construct
  misc_feature 1..46: note = Probe
  source 1..46: mol_type = other DNA
gagcccggtaatcgcataaaacttaaaactttacagtcagaggttc

SEQ ID NO: 5662 - DNA, 49 bp, synthetic construct
  misc_feature 1..49: note = Probe
  source 1..49: mol_type = other DNA
gagcccggtaatcgcataaaacttaaaactttacagtcagaggttcaat

SEQ ID NO: 5663 - DNA, 24 bp, synthetic construct
  misc_feature 1..24: note = Probe
  source 1..24: mol_type = other DNA
gagcttaaacccccttatttctag

SEQ ID NO: 5664 - DNA, 25 bp, synthetic construct
  misc_feature 1..25: note = Probe
  source 1..25: mol_type = other DNA
gagcttaaacccccttatttctagg

SEQ ID NO: 5665 - DNA, 26 bp, synthetic construct
  misc_feature 1..26: note = Probe
  source 1..26: mol_type = other DNA
gagcttaaacccccttatttctagga

SEQ ID NO: 5666 - DNA, 31 bp, synthetic construct
  misc_feature 1..31: note = Probe
  source 1..31: mol_type = other DNA
gaggcgtgggttcgaatcccacttctgacac

SEQ ID NO: 5667 - DNA, 24 bp, synthetic construct
  misc_feature 1..24: note = Probe
  source 1..24: mol_type = other DNA
gaggcttacgaccccttatttacc

SEQ ID NO: 5668 - DNA, 25 bp, synthetic construct
  misc_feature 1..25: note = Probe
  source 1..25: mol_type = other DNA
gaggcttacgaccccttatttaccg

SEQ ID NO: 5669 - DNA, 26 bp, synthetic construct
  misc_feature 1..26: note = Probe
  source 1..26: mol_type = other DNA
gaggcttacgaccccttatttaccga

SEQ ID NO: 5670 - DNA, 33 bp, synthetic construct
  misc_feature 1..33: note = Probe
  source 1..33: mol_type = other DNA
gagggtccagggttcaagtccctgttcgggcgg

SEQ ID NO: 5671 - DNA, 33 bp, synthetic construct
  misc_feature 1..33: note = Probe
  source 1..33: mol_type = other DNA
gagggtccagggttcaagtccctgttcgggcgt

SEQ ID NO: 5672 - DNA, 24 bp, synthetic construct
  misc_feature 1..24: note = Probe
  source 1..24: mol_type = other DNA
gaggttccgggttcgagtcccggc

SEQ ID NO: 5673 - DNA, 31 bp, synthetic construct
  misc_feature 1..31: note = Probe
  source 1..31: mol_type = other DNA
gaggttgtgagttcgagcctcacctggagca

SEQ ID NO: 5674 - DNA, 34 bp, synthetic construct
  misc_feature 1..34: note = Probe
  source 1..34: mol_type = other DNA
gaggttgtgagttcgagcctcacctggagcattg

SEQ ID NO: 5675 - DNA, 23 bp, synthetic construct
  misc_feature 1..23: note = Probe
  source 1..23: mol_type = other DNA
gagtaaataataggagcttaaac

SEQ ID NO: 5676 - DNA, 25 bp, synthetic construct
  misc_feature 1..25: note = Probe
  source 1..25: mol_type = other DNA
gagtaaataataggagcttaaaccc

SEQ ID NO: 5677 - DNA, 27 bp, synthetic construct
  misc_feature 1..27: note = Probe
  source 1..27: mol_type = other DNA
gagtaaataataggagcttaaaccccc

SEQ ID NO: 5678 - DNA, 28 bp, synthetic construct
  misc_feature 1..28: note = Probe
  source 1..28: mol_type = other DNA
gagtaaataataggagcttaaaccccct

SEQ ID NO: 5679 - DNA, 32 bp, synthetic construct
  misc_feature 1..32: note = Probe
  source 1..32: mol_type = other DNA
gagtaaataataggagcttaaacccccttatt

SEQ ID NO: 5680 - DNA, 37 bp, synthetic construct
  misc_feature 1..37: note = Probe
  source 1..37: mol_type = other DNA
gagtaaataataggagcttaaacccccttatttctag

SEQ ID NO: 5681 - DNA, 38 bp, synthetic construct
  misc_feature 1..38: note = Probe
  source 1..38: mol_type = other DNA
gagtaaataataggagcttaaacccccttatttctagg

SEQ ID NO: 5682 - DNA, 39 bp, synthetic construct
  misc_feature 1..39: note = Probe
  source 1..39: mol_type = other DNA
gagtaaataataggagcttaaacccccttatttctagga

SEQ ID NO: 5683 - DNA, 40 bp, synthetic construct
  misc_feature 1..40: note = Probe
  source 1..40: mol_type = other DNA
gagtaaataataggagcttaaacccccttatttctaggac

SEQ ID NO: 5684 - DNA, 43 bp, synthetic construct
  misc_feature 1..43: note = Probe
  source 1..43: mol_type = other DNA
gagtaaataataggagcttaaacccccttatttctaggactat

SEQ ID NO: 5685 - DNA, 19 bp, synthetic construct
  misc_feature 1..19: note = Probe
  source 1..19: mol_type = other DNA
gagtatccccgcctgtcac

SEQ ID NO: 5686 - DNA, 50 bp, synthetic construct
  misc_feature 1..50: note = Probe
  source 1..50: mol_type = other DNA
gagtatccccgcctgtcacgcgggagaccggggttcgattccccgacggg

SEQ ID NO: 5687 - DNA, 19 bp, synthetic construct
  misc_feature 1..19: note = Probe
  source 1..19: mol_type = other DNA
gagtgaagcattggactgt

SEQ ID NO: 5688 - DNA, 20 bp, synthetic construct
  misc_feature 1..20: note = Probe
  source 1..20: mol_type = other DNA
gagtgaagcattggactgta

SEQ ID NO: 5689 - DNA, 23 bp, synthetic construct
  misc_feature 1..23: note = Probe
  source 1..23: mol_type = other DNA
gagtggggttttgcagtccttag

SEQ ID NO: 5690 - DNA, 24 bp, synthetic construct
  misc_feature 1..24: note = Probe
  source 1..24: mol_type = other DNA
gagtggggttttgcagtccttagc

SEQ ID NO: 5691 - DNA, 25 bp, synthetic construct
  misc_feature 1..25: note = Probe
  source 1..25: mol_type = other DNA
gagtggggttttgcagtccttagct

SEQ ID NO: 5692 - DNA, 25 bp, synthetic construct
  misc_feature 1..25: note = Probe
  source 1..25: mol_type = other DNA
gagtgtagcttaacacaaagcaccc

SEQ ID NO: 5693 - DNA, 26 bp, synthetic construct
  misc_feature 1..26: note = Probe
  source 1..26: mol_type = other DNA
gagtgtagcttaacacaaagcaccca

SEQ ID NO: 5694 - DNA, 27 bp, synthetic construct
  misc_feature 1..27: note = Probe
  source 1..27: mol_type = other DNA
gagtgtagcttaacacaaagcacccaa

SEQ ID NO: 5695 - DNA, 28 bp, synthetic construct
  misc_feature 1..28: note = Probe
  source 1..28: mol_type = other DNA
gagtgtagcttaacacaaagcacccaac

SEQ ID NO: 5696 - DNA, 29 bp, synthetic construct
  misc_feature 1..29: note = Probe
  source 1..29: mol_type = other DNA
gagtgtagcttaacacaaagcacccaact

SEQ ID NO: 5697 - DNA, 30 bp, synthetic construct
  misc_feature 1..30: note = Probe
  source 1..30: mol_type = other DNA
gagtgtagcttaacacaaagcacccaactt

SEQ ID NO: 5698 - DNA, 31 bp, synthetic construct
  misc_feature 1..31: note = Probe
  source 1..31: mol_type = other DNA
gagtgtagcttaacacaaagcacccaactta

SEQ ID NO: 5699 - DNA, 32 bp, synthetic construct
  misc_feature 1..32: note = Probe
  source 1..32: mol_type = other DNA
gagtgtagcttaacacaaagcacccaacttac

SEQ ID NO: 5700 - DNA, 33 bp, synthetic construct
  misc_feature 1..33: note = Probe
  source 1..33: mol_type = other DNA
gagtgtagcttaacacaaagcacccaacttaca

SEQ ID NO: 5701 - DNA, 36 bp, synthetic construct
  misc_feature 1..36: note = Probe
  source 1..36: mol_type = other DNA
gagtgtagcttaacacaaagcacccaacttacactt

SEQ ID NO: 5702 - DNA, 37 bp, synthetic construct
  misc_feature 1..37: note = Probe
  source 1..37: mol_type = other DNA
gagtgtagcttaacacaaagcacccaacttacactta

SEQ ID NO: 5703 - DNA, 39 bp, synthetic construct
  misc_feature 1..39: note = Probe
  source 1..39: mol_type = other DNA
gagtgtagcttaacacaaagcacccaacttacacttagg

SEQ ID NO: 5704 - DNA, 40 bp, synthetic construct
  misc_feature 1..40: note = Probe
  source 1..40: mol_type = other DNA
gagtgtagcttaacacaaagcacccaacttacacttagga

SEQ ID NO: 5705 - DNA, 24 bp, synthetic construct
  misc_feature 1..24: note = Probe
  source 1..24: mol_type = other DNA
gagttaaagactttttctctgatt

SEQ ID NO: 5706 - DNA, 25 bp, synthetic construct
  misc_feature 1..25: note = Probe
  source 1..25: mol_type = other DNA
gagttaaagactttttctctgattt

SEQ ID NO: 5707 - DNA, 50 bp, synthetic construct
  misc_feature 1..50: note = Probe
  source 1..50: mol_type = other DNA
gagttactttgatagagtaaataataggagcttaaacccccttatttcta

SEQ ID NO: 5708 - DNA, 21 bp, synthetic construct
  misc_feature 1..21: note = Probe
  source 1..21: mol_type = other DNA
gataatcatatttaccaaatg

SEQ ID NO: 5709 - DNA, 32 bp, synthetic construct
  misc_feature 1..32: note = Probe
  source 1..32: mol_type = other DNA
gatagagtaaataataggagcttaaaccccct

SEQ ID NO: 5710 - DNA, 39 bp, synthetic construct
  misc_feature 1..39: note = Probe
  source 1..39: mol_type = other DNA
gatagagtaaataataggagcttaaacccccttatttct

SEQ ID NO: 5711 - DNA, 41 bp, synthetic construct
  misc_feature 1..41: note = Probe
  source 1..41: mol_type = other DNA
gatagagtaaataataggagcttaaacccccttatttctag

SEQ ID NO: 5712 - DNA, 42 bp, synthetic construct
  misc_feature 1..42: note = Probe
  source 1..42: mol_type = other DNA
gatagagtaaataataggagcttaaacccccttatttctagg

SEQ ID NO: 5713 - DNA, 43 bp, synthetic construct
  misc_feature 1..43: note = Probe
  source 1..43: mol_type = other DNA
gatagagtaaataataggagcttaaacccccttatttctagga

SEQ ID NO: 5714 - DNA, 44 bp, synthetic construct
  misc_feature 1..44: note = Probe
  source 1..44: mol_type = other DNA
gatagagtaaataataggagcttaaacccccttatttctaggac

SEQ ID NO: 5715 - DNA, 45 bp, synthetic construct
  misc_feature 1..45: note = Probe
  source 1..45: mol_type = other DNA
gatagagtaaataataggagcttaaacccccttatttctaggact

SEQ ID NO: 5716 - DNA, 46 bp, synthetic construct
  misc_feature 1..46: note = Probe
  source 1..46: mol_type = other DNA
gatagagtaaataataggagcttaaacccccttatttctaggacta

SEQ ID NO: 5717 - DNA, 25 bp, synthetic construct
  misc_feature 1..25: note = Probe
  source 1..25: mol_type = other DNA
gatatccaaccttcagctatagggt

SEQ ID NO: 5718 - DNA, 20 bp, synthetic construct
  misc_feature 1..20: note = Probe
  source 1..20: mol_type = other DNA
gatccccggcatctccattg

SEQ ID NO: 5719 - DNA, 31 bp, synthetic construct
  misc_feature 1..31: note = Probe
  source 1..31: mol_type = other DNA
gatccgagttcaaatctcggtggaacctgca

SEQ ID NO: 5720 - DNA, 31 bp, synthetic construct
  misc_feature 1..31: note = Probe
  source 1..31: mol_type = other DNA
gatccgagttcaaatctcggtgggacctcac

SEQ ID NO: 5721 - DNA, 32 bp, synthetic construct
  misc_feature 1..32: note = Probe
  source 1..32: mol_type = other DNA
gatcctgggttcgaatcccagcggtgcctccg

SEQ ID NO: 5722 - DNA, 24 bp, synthetic construct
  misc_feature 1..24: note = Probe
  source 1..24: mol_type = other DNA
gatcgaaaccatcctctgctaggt

SEQ ID NO: 5723 - DNA, 24 bp, synthetic construct
  misc_feature 1..24: note = Probe
  source 1..24: mol_type = other DNA
gatgaaaacctttttccaaggaca

SEQ ID NO: 5724 - DNA, 25 bp, synthetic construct
  misc_feature 1..25: note = Probe
  source 1..25: mol_type = other DNA
gatgaaaacctttttccaaggacaa

SEQ ID NO: 5725 - DNA, 26 bp, synthetic construct
  misc_feature 1..26: note = Probe
  source 1..26: mol_type = other DNA
gatgaaaacctttttccaaggacaaa

SEQ ID NO: 5726 - DNA, 27 bp, synthetic construct
  misc_feature 1..27: note = Probe
  source 1..27: mol_type = other DNA
gatgaaaacctttttccaaggacaaat

SEQ ID NO: 5727 - DNA, 27 bp, synthetic construct
  misc_feature 1..27: note = Probe
  source 1..27: mol_type = other DNA
gatgcagagtggggttttgcagtcctt

SEQ ID NO: 5728 - DNA, 28 bp, synthetic construct
  misc_feature 1..28: note = Probe
  source 1..28: mol_type = other DNA
gatgcagagtggggttttgcagtcctta

SEQ ID NO: 5729 - DNA, 29 bp, synthetic construct
  misc_feature 1..29: note = Probe
  source 1..29: mol_type = other DNA
gatgcagagtggggttttgcagtccttag

SEQ ID NO: 5730 - DNA, 30 bp, synthetic construct
  misc_feature 1..30: note = Probe
  source 1..30: mol_type = other DNA
gatgcagagtggggttttgcagtccttagc

SEQ ID NO: 5731 - DNA, 31 bp, synthetic construct
  misc_feature 1..31: note = Probe
  source 1..31: mol_type = other DNA
gatgcagagtggggttttgcagtccttagct

SEQ ID NO: 5732 - DNA, 32 bp, synthetic construct
  misc_feature 1..32: note = Probe
  source 1..32: mol_type = other DNA
gatgcagagtggggttttgcagtccttagctg

SEQ ID NO: 5733 - DNA, 33 bp, synthetic construct
  misc_feature 1..33: note = Probe
  source 1..33: mol_type = other DNA
gatgcagagtggggttttgcagtccttagctgt

SEQ ID NO: 5734 - DNA, 33 bp, synthetic construct
  misc_feature 1..33: note = Probe
  source 1..33: mol_type = other DNA
gatggggtgtgataggtggcacggagaattttg

SEQ ID NO: 5735 - DNA, 27 bp, synthetic construct
  misc_feature 1..27: note = Probe
  source 1..27: mol_type = other DNA
gatgggttcgattctcatagtcctaga

SEQ ID NO: 5736 - DNA, 31 bp, synthetic construct
  misc_feature 1..31: note = Probe
  source 1..31: mol_type = other DNA
gattaagagaaccaacacctctttacagtga

SEQ ID NO: 5737 - DNA, 32 bp, synthetic construct
  misc_feature 1..32: note = Probe
  source 1..32: mol_type = other DNA
gattaagagaaccaacacctctttacagtgaa

SEQ ID NO: 5738 - DNA, 33 bp, synthetic construct
  misc_feature 1..33: note = Probe
  source 1..33: mol_type = other DNA
gattaagagaaccaacacctctttacagtgaaa

SEQ ID NO: 5739 - DNA, 34 bp, synthetic construct
  misc_feature 1..34: note = Probe
  source 1..34: mol_type = other DNA
gattaagagaaccaacacctctttacagtgaaat

SEQ ID NO: 5740 - DNA, 20 bp, synthetic construct
  misc_feature 1..20: note = Probe
  source 1..20: mol_type = other DNA
gattccccgacggggaggca

SEQ ID NO: 5741 - DNA, 27 bp, synthetic construct
  misc_feature 1..27: note = Probe
  source 1..27: mol_type = other DNA
gattctaggttcgactcctggctggct

SEQ ID NO: 5742 - DNA, 31 bp, synthetic construct
  misc_feature 1..31: note = Probe
  source 1..31: mol_type = other DNA
gattctaggttcgactcctggctggctcgcg

SEQ ID NO: 5743 - DNA, 31 bp, synthetic construct
  misc_feature 1..31: note = Probe
  source 1..31: mol_type = other DNA
gattctaggttcgactcctggctggctcgct

SEQ ID NO: 5744 - DNA, 24 bp, synthetic construct
  misc_feature 1..24: note = Probe
  source 1..24: mol_type = other DNA
gattgagggttcgagtcccttcgt

SEQ ID NO: 5745 - DNA, 29 bp, synthetic construct
  misc_feature 1..29: note = Probe
  source 1..29: mol_type = other DNA
gattgagggttcgagtcccttcgtggtcg

SEQ ID NO: 5746 - DNA, 32 bp, synthetic construct
  misc_feature 1..32: note = Probe
  source 1..32: mol_type = other DNA
gattgagggttcgagtcccttcgtggtcgttg

SEQ ID NO: 5747 - DNA, 27 bp, synthetic construct
  misc_feature 1..27: note = Probe
  source 1..27: mol_type = other DNA
gattgcaggttcgagtcctgccgcggt

SEQ ID NO: 5748 - DNA, 32 bp, synthetic construct
  misc_feature 1..32: note = Probe
  source 1..32: mol_type = other DNA
gattgcaggttcgagtcctgccgcggtcgaag

SEQ ID NO: 5749 - DNA, 16 bp, synthetic construct
  misc_feature 1..16: note = Probe
  source 1..16: mol_type = other DNA
gattgtgaatctgaca

SEQ ID NO: 5750 - DNA, 28 bp, synthetic construct
  misc_feature 1..28: note = Probe
  source 1..28: mol_type = other DNA
gattgtgaatctgacaacagaggcttac

SEQ ID NO: 5751 - DNA, 32 bp, synthetic construct
  misc_feature 1..32: note = Probe
  source 1..32: mol_type = other DNA
gattgtgaatctgacaacagaggcttacgacc

SEQ ID NO: 5752 - DNA, 35 bp, synthetic construct
  misc_feature 1..35: note = Probe
  source 1..35: mol_type = other DNA
gattgtgaatctgacaacagaggcttacgacccct

SEQ ID NO: 5753 - DNA, 36 bp, synthetic construct
  misc_feature 1..36: note = Probe
  source 1..36: mol_type = other DNA
gattgtgaatctgacaacagaggcttacgacccctt

SEQ ID NO: 5754 - DNA, 41 bp, synthetic construct
  misc_feature 1..41: note = Probe
  source 1..41: mol_type = other DNA
gattgtgaatctgacaacagaggcttacgaccccttattta

SEQ ID NO: 5755 - DNA, 44 bp, synthetic construct
  misc_feature 1..44: note = Probe
  source 1..44: mol_type = other DNA
gattgtgaatctgacaacagaggcttacgaccccttatttaccg

SEQ ID NO: 5756 - DNA, 45 bp, synthetic construct
  misc_feature 1..45: note = Probe
  source 1..45: mol_type = other DNA
gattgtgaatctgacaacagaggcttacgaccccttatttaccga

SEQ ID NO: 5757 - DNA, 46 bp, synthetic construct
  misc_feature 1..46: note = Probe
  source 1..46: mol_type = other DNA
gattgtgaatctgacaacagaggcttacgaccccttatttaccgag

SEQ ID NO: 5758 - DNA, 50 bp, synthetic construct
  misc_feature 1..50: note = Probe
  source 1..50: mol_type = other DNA
gattgtgaatctgacaacagaggcttacgaccccttatttaccgagaaag

SEQ ID NO: 5759 - DNA, 22 bp, synthetic construct
  misc_feature 1..22: note = Probe
  source 1..22: mol_type = other DNA
gattgtgggttcgagtcccatc

SEQ ID NO: 5760 - DNA, 32 bp, synthetic construct
  misc_feature 1..32: note = Probe
  source 1..32: mol_type = other DNA
gattgtgggttcgagtcccatctgggtcgcgt

SEQ ID NO: 5761 - DNA, 20 bp, synthetic construct
  misc_feature 1..20: note = Probe
  source 1..20: mol_type = other DNA
gatttcaacttaacttgacc

SEQ ID NO: 5762 - DNA, 23 bp, synthetic construct
  misc_feature 1..23: note = Probe
  source 1..23: mol_type = other DNA
gatttcaacttaacttgaccgct

SEQ ID NO: 5763 - DNA, 24 bp, synthetic construct
  misc_feature 1..24: note = Probe
  source 1..24: mol_type = other DNA
gatttcaacttaacttgaccgctc

SEQ ID NO: 5764 - DNA, 25 bp, synthetic construct
  misc_feature 1..25: note = Probe
  source 1..25: mol_type = other DNA
gatttcaacttaacttgaccgctct

SEQ ID NO: 5765 - DNA, 26 bp, synthetic construct
  misc_feature 1..26: note = Probe
  source 1..26: mol_type = other DNA
gatttcaacttaacttgaccgctctg

SEQ ID NO: 5766 - DNA, 27 bp, synthetic construct
  misc_feature 1..27: note = Probe
  source 1..27: mol_type = other DNA
gatttcaacttaacttgaccgctctga

SEQ ID NO: 5767 - DNA, 28 bp, synthetic construct
  misc_feature 1..28: note = Probe
  source 1..28: mol_type = other DNA
gatttcaacttaacttgaccgctctgag

SEQ ID NO: 5768 - DNA, 29 bp, synthetic construct
  misc_feature 1..29: note = Probe
  source 1..29: mol_type = other DNA
gatttcaacttaacttgaccgctctgagc

SEQ ID NO: 5769 - DNA, 30 bp, synthetic construct
  misc_feature 1..30: note = Probe
  source 1..30: mol_type = other DNA
gatttcaacttaacttgaccgctctgagct

SEQ ID NO: 5770 - DNA, 25 bp, synthetic construct
  misc_feature 1..25: note = Probe
  source 1..25: mol_type = other DNA
gatttcgactcattaaattatgata

SEQ ID NO: 5771 - DNA, 31 bp, synthetic construct
  misc_feature 1..31: note = Probe
  source 1..31: mol_type = other DNA
gatttcgactcattaaattatgataatcata

SEQ ID NO: 5772 - DNA, 32 bp, synthetic construct
  misc_feature 1..32: note = Probe
  source 1..32: mol_type = other DNA
gatttcgactcattaaattatgataatcatat

SEQ ID NO: 5773 - DNA, 40 bp, synthetic construct
  misc_feature 1..40: note = Probe
  source 1..40: mol_type = other DNA
gatttcgactcattaaattatgataatcatatttaccaaa

SEQ ID NO: 5774 - DNA, 42 bp, synthetic construct
  misc_feature 1..42: note = Probe
  source 1..42: mol_type = other DNA
gatttcgactcattaaattatgataatcatatttaccaaatg

SEQ ID NO: 5775 - DNA, 49 bp, synthetic construct
  misc_feature 1..49: note = Probe
  source 1..49: mol_type = other DNA
gatttcgactcattaaattatgataatcatatttaccaaatgcccctca

SEQ ID NO: 5776 - DNA, 31 bp, synthetic construct
  misc_feature 1..31: note = Probe
  source 1..31: mol_type = other DNA
gcaaattcgaagaagcagcttcaaacctgcc

SEQ ID NO: 5777 - DNA, 32 bp, synthetic construct
  misc_feature 1..32: note = Probe
  source 1..32: mol_type = other DNA
gcaaattcgaagaagcagcttcaaacctgccg

SEQ ID NO: 5778 - DNA, 33 bp, synthetic construct
  misc_feature 1..33: note = Probe
  source 1..33: mol_type = other DNA
gcaaattcgaagaagcagcttcaaacctgccgg

SEQ ID NO: 5779 - DNA, 34 bp, synthetic construct
  misc_feature 1..34: note = Probe
  source 1..34: mol_type = other DNA
gcaaattcgaagaagcagcttcaaacctgccggg

SEQ ID NO: 5780 - DNA, 37 bp, synthetic construct
  misc_feature 1..37: note = Probe
  source 1..37: mol_type = other DNA
gcaaattcgaagaagcagcttcaaacctgccggggct

SEQ ID NO: 5781 - DNA, 39 bp, synthetic construct
  misc_feature 1..39: note = Probe
  source 1..39: mol_type = other DNA
gcaaattcgaagaagcagcttcaaacctgccggggcttc

SEQ ID NO: 5782 - DNA, 40 bp, synthetic construct
  misc_feature 1..40: note = Probe
  source 1..40: mol_type = other DNA
gcaaattcgaagaagcagcttcaaacctgccggggcttct

SEQ ID NO: 5783 - DNA, 41 bp, synthetic construct
  misc_feature 1..41: note = Probe
  source 1..41: mol_type = other DNA
gcaaattcgaagaagcagcttcaaacctgccggggcttctc

SEQ ID NO: 5784 - DNA, 32 bp, synthetic construct
  misc_feature 1..32: note = Probe
  source 1..32: mol_type = other DNA
gcaacctcggttcgaatccgagtcacggcaaa

SEQ ID NO: 5785 - DNA, 32 bp, synthetic construct
  misc_feature 1..32: note = Probe
  source 1..32: mol_type = other DNA
gcaacctcggttcgaatccgagtcacggcagg

SEQ ID NO: 5786 - DNA, 33 bp, synthetic construct
  misc_feature 1..33: note = Probe
  source 1..33: mol_type = other DNA
gcaacctcggttcgaatccgagtcacggcaggt

SEQ ID NO: 5787 - DNA, 32 bp, synthetic construct
  misc_feature 1..32: note = Probe
  source 1..32: mol_type = other DNA
gcaacctcggttcgaatccgagtcacggcatt

SEQ ID NO: 5788 - DNA, 33 bp, synthetic construct
  misc_feature 1..33: note = Probe
  source 1..33: mol_type = other DNA
gcaacctcggttcgaatccgagtcacggcattg

SEQ ID NO: 5789 - DNA, 31 bp, synthetic construct
  misc_feature 1..31: note = Probe
  source 1..31: mol_type = other DNA
gcaatacactgaaaatgtttagacgggctca

SEQ ID NO: 5790 - DNA, 41 bp, synthetic construct
  misc_feature 1..41: note = Probe
  source 1..41: mol_type = other DNA
gcaatacactgaaaatgtttagacgggctcacatcacccca

SEQ ID NO: 5791 - DNA, 46 bp, synthetic construct
  misc_feature 1..46: note = Probe
  source 1..46: mol_type = other DNA
gcaatacactgaaaatgtttagacgggctcacatcaccccataaac

SEQ ID NO: 5792 - DNA, 49 bp, synthetic construct
  misc_feature 1..49: note = Probe
  source 1..49: mol_type = other DNA
gcaatacactgaaaatgtttagacgggctcacatcaccccataaacaaa

SEQ ID NO: 5793 - DNA, 50 bp, synthetic construct
  misc_feature 1..50: note = Probe
  source 1..50: mol_type = other DNA
gcaatacactgaaaatgtttagacgggctcacatcaccccataaacaaat

SEQ ID NO: 5794 - DNA, 31 bp, synthetic construct
  misc_feature 1..31: note = Probe
  source 1..31: mol_type = other DNA
gcaatggtggttcagtggtagaattctcgcc

SEQ ID NO: 5795 - DNA, 32 bp, synthetic construct
  misc_feature 1..32: note = Probe
  source 1..32: mol_type = other DNA
gcaatggtggttcagtggtagaattctcgcct

SEQ ID NO: 5796 - DNA, 17 bp, synthetic construct
  misc_feature 1..17: note = Probe
  source 1..17: mol_type = other DNA
gcacccaacttacactt

SEQ ID NO: 5797 - DNA, 18 bp, synthetic construct
  misc_feature 1..18: note = Probe
  source 1..18: mol_type = other DNA
gcacccaacttacactta

SEQ ID NO: 5798 - DNA, 20 bp, synthetic construct
  misc_feature 1..20: note = Probe
  source 1..20: mol_type = other DNA
gcacccaacttacacttagg

SEQ ID NO: 5799 - DNA, 21 bp, synthetic construct
  misc_feature 1..21: note = Probe
  source 1..21: mol_type = other DNA
gcacccaacttacacttagga

SEQ ID NO: 5800 - DNA, 22 bp, synthetic construct
  misc_feature 1..22: note = Probe
  source 1..22: mol_type = other DNA
gcacccaacttacacttaggag

SEQ ID NO: 5801 - DNA, 23 bp, synthetic construct
  misc_feature 1..23: note = Probe
  source 1..23: mol_type = other DNA
gcacccaacttacacttaggaga

SEQ ID NO: 5802 - DNA, 24 bp, synthetic construct
  misc_feature 1..24: note = Probe
  source 1..24: mol_type = other DNA
gcacccaacttacacttaggagat

SEQ ID NO: 5803 - DNA, 25 bp, synthetic construct
  misc_feature 1..25: note = Probe
  source 1..25: mol_type = other DNA
gcacccaacttacacttaggagatt

SEQ ID NO: 5804 - DNA, 27 bp, synthetic construct
  misc_feature 1..27: note = Probe
  source 1..27: mol_type = other DNA
gcacccaacttacacttaggagatttc

SEQ ID NO: 5805 - DNA, 28 bp, synthetic construct
  misc_feature 1..28: note = Probe
  source 1..28: mol_type = other DNA
gcacccaacttacacttaggagatttca

SEQ ID NO: 5806 - DNA, 29 bp, synthetic construct
  misc_feature 1..29: note = Probe
  source 1..29: mol_type = other DNA
gcacccaacttacacttaggagatttcaa

SEQ ID NO: 5807 - DNA, 30 bp, synthetic construct
  misc_feature 1..30: note = Probe
  source 1..30: mol_type = other DNA
gcacccaacttacacttaggagatttcaac

SEQ ID NO: 5808 - DNA, 31 bp, synthetic construct
  misc_feature 1..31: note = Probe
  source 1..31: mol_type = other DNA
gcacccaacttacacttaggagatttcaact

SEQ ID NO: 5809 - DNA, 32 bp, synthetic construct
  misc_feature 1..32: note = Probe
  source 1..32: mol_type = other DNA
gcacccaacttacacttaggagatttcaactt

SEQ ID NO: 5810 - DNA, 33 bp, synthetic construct
  misc_feature 1..33: note = Probe
  source 1..33: mol_type = other DNA
gcacccaacttacacttaggagatttcaactta

SEQ ID NO: 5811 - DNA, 35 bp, synthetic construct
  misc_feature 1..35: note = Probe
  source 1..35: mol_type = other DNA
gcacccaacttacacttaggagatttcaacttaac

SEQ ID NO: 5812 - DNA, 37 bp, synthetic construct
  misc_feature 1..37: note = Probe
  source 1..37: mol_type = other DNA
gcacccaacttacacttaggagatttcaacttaactt

SEQ ID NO: 5813 - DNA, 42 bp, synthetic construct
  misc_feature 1..42: note = Probe
  source 1..42: mol_type = other DNA
gcacccaacttacacttaggagatttcaacttaacttgaccg

SEQ ID NO: 5814 - DNA, 43 bp, synthetic construct
  misc_feature 1..43: note = Probe
  source 1..43: mol_type = other DNA
gcacccaacttacacttaggagatttcaacttaacttgaccgc

SEQ ID NO: 5815 - DNA, 44 bp, synthetic construct
  misc_feature 1..44: note = Probe
  source 1..44: mol_type = other DNA
gcacccaacttacacttaggagatttcaacttaacttgaccgct

SEQ ID NO: 5816 - DNA, 45 bp, synthetic construct
  misc_feature 1..45: note = Probe
  source 1..45: mol_type = other DNA
gcacccaacttacacttaggagatttcaacttaacttgaccgctc

SEQ ID NO: 5817 - DNA, 46 bp, synthetic construct
  misc_feature 1..46: note = Probe
  source 1..46: mol_type = other DNA
gcacccaacttacacttaggagatttcaacttaacttgaccgctct

SEQ ID NO: 5818 - DNA, 48 bp, synthetic construct
  misc_feature 1..48: note = Probe
  source 1..48: mol_type = other DNA
gcacccaacttacacttaggagatttcaacttaacttgaccgctctga

SEQ ID NO: 5819 - DNA, 49 bp, synthetic construct
  misc_feature 1..49: note = Probe
  source 1..49: mol_type = other DNA
gcacccaacttacacttaggagatttcaacttaacttgaccgctctgag

SEQ ID NO: 5820 - DNA, 50 bp, synthetic construct
  misc_feature 1..50: note = Probe
  source 1..50: mol_type = other DNA
gcacccaacttacacttaggagatttcaacttaacttgaccgctctgagc

SEQ ID NO: 5821 - DNA, 38 bp, synthetic construct
  misc_feature 1..38: note = Probe
  source 1..38: mol_type = other DNA
gcacgaggccccgggttcaatccccggcacctccagct

SEQ ID NO: 5822 - DNA, 29 bp, synthetic construct
  misc_feature 1..29: note = Probe
  source 1..29: mol_type = other DNA
gcacgcgtgggttcgaatcccatcctcgt

SEQ ID NO: 5823 - DNA, 23 bp, synthetic construct
  misc_feature 1..23: note = Probe
  source 1..23: mol_type = other DNA
gcactctggactctgaatccagc

SEQ ID NO: 5824 - DNA, 31 bp, synthetic construct
  misc_feature 1..31: note = Probe
  source 1..31: mol_type = other DNA
gcactctggactctgaatccagcgatccgag

SEQ ID NO: 5825 - DNA, 50 bp, synthetic construct
  misc_feature 1..50: note = Probe
  source 1..50: mol_type = other DNA
gcactctggactttgaatccagcgatccgagttcaaatctcggtgggacc

SEQ ID NO: 5826 - DNA, 27 bp, synthetic construct
  misc_feature 1..27: note = Probe
  source 1..27: mol_type = other DNA
gcactggtggttcagtggtagaattct

SEQ ID NO: 5827 - DNA, 31 bp, synthetic construct
  misc_feature 1..31: note = Probe
  source 1..31: mol_type = other DNA
gcactggtggttcagtggtagaattctcgcc

SEQ ID NO: 5828 - DNA, 33 bp, synthetic construct
  misc_feature 1..33: note = Probe
  source 1..33: mol_type = other DNA
gcactggtggttcagtggtagaattctcgcctc

SEQ ID NO: 5829 - DNA, 34 bp, synthetic construct
  misc_feature 1..34: note = Probe
  source 1..34: mol_type = other DNA
gcactggtggttcagtggtagaattctcgcctcc

SEQ ID NO: 5830 - DNA, 37 bp, synthetic construct
  misc_feature 1..37: note = Probe
  source 1..37: mol_type = other DNA
gcagaaggtcctgggttcgagccccagtggaaccacg

SEQ ID NO: 5831 - DNA, 38 bp, synthetic construct
  misc_feature 1..38: note = Probe
  source 1..38: mol_type = other DNA
gcagaaggtcctgggttcgagccccagtggaaccacgg

SEQ ID NO: 5832 - DNA, 38 bp, synthetic construct
  misc_feature 1..38: note = Probe
  source 1..38: mol_type = other DNA
gcagaaggtcctgggttcgagccccagtggaaccatag

SEQ ID NO: 5833 - DNA, 33 bp, synthetic construct
  misc_feature 1..33: note = Probe
  source 1..33: mol_type = other DNA
gcagagtggcgcagcggaagcgtgctgggccca

SEQ ID NO: 5834 - DNA, 25 bp, synthetic construct
  misc_feature 1..25: note = Probe
  source 1..25: mol_type = other DNA
gcagagtggggttttgcagtcctta

SEQ ID NO: 5835 - DNA, 26 bp, synthetic construct
  misc_feature 1..26: note = Probe
  source 1..26: mol_type = other DNA
gcagagtggggttttgcagtccttag

SEQ ID NO: 5836 - DNA, 27 bp, synthetic construct
  misc_feature 1..27: note = Probe
  source 1..27: mol_type = other DNA
gcagagtggggttttgcagtccttagc

SEQ ID NO: 5837 - DNA, 28 bp, synthetic construct
  misc_feature 1..28: note = Probe
  source 1..28: mol_type = other DNA
gcagagtggggttttgcagtccttagct

SEQ ID NO: 5838 - DNA, 31 bp, synthetic construct
  misc_feature 1..31: note = Probe
  source 1..31: mol_type = other DNA
gcagcaacctcggttcgaatccgagtcacgg

SEQ ID NO: 5839 - DNA, 36 bp, synthetic construct
  misc_feature 1..36: note = Probe
  source 1..36: mol_type = other DNA
gcagcaacctcggttcgaatccgagtcacggcaggt

SEQ ID NO: 5840 - DNA, 36 bp, synthetic construct
  misc_feature 1..36: note = Probe
  source 1..36: mol_type = other DNA
gcagcaacctcggttcgaatccgagtcacggcattg

SEQ ID NO: 5841 - DNA, 23 bp, synthetic construct
  misc_feature 1..23: note = Probe
  source 1..23: mol_type = other DNA
gcagcgatggccgagtggttaag

SEQ ID NO: 5842 - DNA, 40 bp, synthetic construct
  misc_feature 1..40: note = Probe
  source 1..40: mol_type = other DNA
gcagcggaagcgtgctgggcccataacccagaggtcgatg

SEQ ID NO: 5843 - DNA, 24 bp, synthetic construct
  misc_feature 1..24: note = Probe
  source 1..24: mol_type = other DNA
gcagcttcaaacctgccggggctt

SEQ ID NO: 5844 - DNA, 26 bp, synthetic construct
  misc_feature 1..26: note = Probe
  source 1..26: mol_type = other DNA
gcagcttcaaacctgccggggcttct

SEQ ID NO: 5845 - DNA, 18 bp, synthetic construct
  misc_feature 1..18: note = Probe
  source 1..18: mol_type = other DNA
gcataaaacttaaaactt

SEQ ID NO: 5846 - DNA, 21 bp, synthetic construct
  misc_feature 1..21: note = Probe
  source 1..21: mol_type = other DNA
gcataaaacttaaaactttac

SEQ ID NO: 5847 - DNA, 33 bp, synthetic construct
  misc_feature 1..33: note = Probe
  source 1..33: mol_type = other DNA
gcataaaacttaaaactttacagtcagaggttc

SEQ ID NO: 5848 - DNA, 43 bp, synthetic construct
  misc_feature 1..43: note = Probe
  source 1..43: mol_type = other DNA
gcataaaacttaaaactttacagtcagaggttcaattcctctt

SEQ ID NO: 5849 - DNA, 45 bp, synthetic construct
  misc_feature 1..45: note = Probe
  source 1..45: mol_type = other DNA
gcataaaacttaaaactttacagtcagaggttcaattcctcttct

SEQ ID NO: 5850 - DNA, 46 bp, synthetic construct
  misc_feature 1..46: note = Probe
  source 1..46: mol_type = other DNA
gcataaaacttaaaactttacagtcagaggttcaattcctcttctt

SEQ ID NO: 5851 - DNA, 50 bp, synthetic construct
  misc_feature 1..50: note = Probe
  source 1..50: mol_type = other DNA
gcataaaacttaaaactttacagtcagaggttcaattcctcttcttaaca

SEQ ID NO: 5852 - DNA, 27 bp, synthetic construct
  misc_feature 1..27: note = Probe
  source 1..27: mol_type = other DNA
gcatagctgccttccaagcagttgacc

SEQ ID NO: 5853 - DNA, 29 bp, synthetic construct
  misc_feature 1..29: note = Probe
  source 1..29: mol_type = other DNA
gcatagctgccttccaagcagttgacccg

SEQ ID NO: 5854 - DNA, 33 bp, synthetic construct
  misc_feature 1..33: note = Probe
  source 1..33: mol_type = other DNA
gcatagctgccttccaagcagttgacccgggtt

SEQ ID NO: 5855 - DNA, 25 bp, synthetic construct
  misc_feature 1..25: note = Probe
  source 1..25: mol_type = other DNA
gcataggtggttcagtggtagaatt

SEQ ID NO: 5856 - DNA, 27 bp, synthetic construct
  misc_feature 1..27: note = Probe
  source 1..27: mol_type = other DNA
gcataggtggttcagtggtagaattct

SEQ ID NO: 5857 - DNA, 31 bp, synthetic construct
  misc_feature 1..31: note = Probe
  source 1..31: mol_type = other DNA
gcataggtggttcagtggtagaattcttgcc

SEQ ID NO: 5858 - DNA, 32 bp, synthetic construct
  misc_feature 1..32: note = Probe
  source 1..32: mol_type = other DNA
gcataggtggttcagtggtagaattcttgcct

SEQ ID NO: 5859 - DNA, 33 bp, synthetic construct
  misc_feature 1..33: note = Probe
  source 1..33: mol_type = other DNA
gcataggtggttcagtggtagaattcttgcctg

SEQ ID NO: 5860 - DNA, 17 bp, synthetic construct
  misc_feature 1..17: note = Probe
  source 1..17: mol_type = other DNA
gcatgagactcttaatc

SEQ ID NO: 5861 - DNA, 38 bp, synthetic construct
  misc_feature 1..38: note = Probe
  source 1..38: mol_type = other DNA
gcatgaggtcccgggttcgatccccagcatctccagtg

SEQ ID NO: 5862 - DNA, 17 bp, synthetic construct
  misc_feature 1..17: note = Probe
  source 1..17: mol_type = other DNA
gcatgggactcttaatc

SEQ ID NO: 5863 - DNA, 16 bp, synthetic construct
  misc_feature 1..16: note = Probe
  source 1..16: mol_type = other DNA
gcatgggtggttcagt

SEQ ID NO: 5864 - DNA, 20 bp, synthetic construct
  misc_feature 1..20: note = Probe
  source 1..20: mol_type = other DNA
gcatgggtggttcagtggta

SEQ ID NO: 5865 - DNA, 22 bp, synthetic construct
  misc_feature 1..22: note = Probe
  source 1..22: mol_type = other DNA
gcatgggtggttcagtggtaga

SEQ ID NO: 5866 - DNA, 24 bp, synthetic construct
  misc_feature 1..24: note = Probe
  source 1..24: mol_type = other DNA
gcatgggtggttcagtggtagaat

SEQ ID NO: 5867 - DNA, 25 bp, synthetic construct
  misc_feature 1..25: note = Probe
  source 1..25: mol_type = other DNA
gcatgggtggttcagtggtagaatt

SEQ ID NO: 5868 - DNA, 26 bp, synthetic construct
  misc_feature 1..26: note = Probe
  source 1..26: mol_type = other DNA
gcatgggtggttcagtggtagaattc

SEQ ID NO: 5869 - DNA, 27 bp, synthetic construct
  misc_feature 1..27: note = Probe
  source 1..27: mol_type = other DNA
gcatgggtggttcagtggtagaattct

SEQ ID NO: 5870 - DNA, 37 bp, synthetic construct
  misc_feature 1..37: note = Probe
  source 1..37: mol_type = other DNA
gcatgggtggttcagtggtagaattctcgcctgccac

SEQ ID NO: 5871 - DNA, 39 bp, synthetic construct
  misc_feature 1..39: note = Probe
  source 1..39: mol_type = other DNA
gcatgggtggttcagtggtagaattctcgcctgccacgc

SEQ ID NO: 5872 - DNA, 40 bp, synthetic construct
  misc_feature 1..40: note = Probe
  source 1..40: mol_type = other DNA
gcatgggtggttcagtggtagaattctcgcctgccacgcg

SEQ ID NO: 5873 - DNA, 43 bp, synthetic construct
  misc_feature 1..43: note = Probe
  source 1..43: mol_type = other DNA
gcatgggtggttcagtggtagaattctcgcctgccacgcggga

SEQ ID NO: 5874 - DNA, 47 bp, synthetic construct
  misc_feature 1..47: note = Probe
  source 1..47: mol_type = other DNA
gcatgggtggttcagtggtagaattctcgcctgccacgcgggaggcc

SEQ ID NO: 5875 - DNA, 48 bp, synthetic construct
  misc_feature 1..48: note = Probe
  source 1..48: mol_type = other DNA
gcatgggtggttcagtggtagaattctcgcctgccacgcgggaggccc

SEQ ID NO: 5876 - DNA, 49 bp, synthetic construct
  misc_feature 1..49: note = Probe
  source 1..49: mol_type = other DNA
gcatgggtggttcagtggtagaattctcgcctgccacgcgggaggcccg

SEQ ID NO: 5877 - DNA, 17 bp, synthetic construct
  misc_feature 1..17: note = Probe
  source 1..17: mol_type = other DNA
gcattaaccttttaagt

SEQ ID NO: 5878 - DNA, 23 bp, synthetic construct
  misc_feature 1..23: note = Probe
  source 1..23: mol_type = other DNA
gcattaaccttttaagttaaaga

SEQ ID NO: 5879 - DNA, 33 bp, synthetic construct
  misc_feature 1..33: note = Probe
  source 1..33: mol_type = other DNA
gcattaaccttttaagttaaagattaagagaac

SEQ ID NO: 5880 - DNA, 40 bp, synthetic construct
  misc_feature 1..40: note = Probe
  source 1..40: mol_type = other DNA
gcattaaccttttaagttaaagattaagagaaccaacacc

SEQ ID NO: 5881 - DNA, 49 bp, synthetic construct
  misc_feature 1..49: note = Probe
  source 1..49: mol_type = other DNA
gcattaaccttttaagttaaagattaagagaaccaacacctctttacag

SEQ ID NO: 5882 - DNA, 50 bp, synthetic construct
  misc_feature 1..50: note = Probe
  source 1..50: mol_type = other DNA
gcattggactgtaaatctaaagacaggggttaggcctctttttaccagct

SEQ ID NO: 5883 - DNA, 27 bp, synthetic construct
  misc_feature 1..27: note = Probe
  source 1..27: mol_type = other DNA
gcattggtggttcaatggtagaattct

SEQ ID NO: 5884 - DNA, 31 bp, synthetic construct
  misc_feature 1..31: note = Probe
  source 1..31: mol_type = other DNA
gcattggtggttcaatggtagaattctcgcc

SEQ ID NO: 5885 - DNA, 33 bp, synthetic construct
  misc_feature 1..33: note = Probe
  source 1..33: mol_type = other DNA
gcattggtggttcaatggtagaattctcgcctc

SEQ ID NO: 5886 - DNA, 16 bp, synthetic construct
  misc_feature 1..16: note = Probe
  source 1..16: mol_type = other DNA
gcattggtggttcagt

SEQ ID NO: 5887 - DNA, 17 bp, synthetic construct
  misc_feature 1..17: note = Probe
  source 1..17: mol_type = other DNA
gcattggtggttcagtg

SEQ ID NO: 5888 - DNA, 18 bp, synthetic construct
  misc_feature 1..18: note = Probe
  source 1..18: mol_type = other DNA
gcattggtggttcagtgg

SEQ ID NO: 5889 - DNA, 19 bp, synthetic construct
  misc_feature 1..19: note = Probe
  source 1..19: mol_type = other DNA
gcattggtggttcagtggt

SEQ ID NO: 5890 - DNA, 20 bp, synthetic construct
  misc_feature 1..20: note = Probe
  source 1..20: mol_type = other DNA
gcattggtggttcagtggta

SEQ ID NO: 5891 - DNA, 21 bp, synthetic construct
  misc_feature 1..21: note = Probe
  source 1..21: mol_type = other DNA
gcattggtggttcagtggtag

SEQ ID NO: 5892 - DNA, 22 bp, synthetic construct
  misc_feature 1..22: note = Probe
  source 1..22: mol_type = other DNA
gcattggtggttcagtggtaga

SEQ ID NO: 5893 - DNA, 23 bp, synthetic construct
  misc_feature 1..23: note = Probe
  source 1..23: mol_type = other DNA
gcattggtggttcagtggtagaa

SEQ ID NO: 5894 - DNA, 24 bp, synthetic construct
  misc_feature 1..24: note = Probe
  source 1..24: mol_type = other DNA
gcattggtggttcagtggtagaat

SEQ ID NO: 5895 - DNA, 25 bp, synthetic construct
  misc_feature 1..25: note = Probe
  source 1..25: mol_type = other DNA
gcattggtggttcagtggtagaatt

SEQ ID NO: 5896 - DNA, 26 bp, synthetic construct
  misc_feature 1..26: note = Probe
  source 1..26: mol_type = other DNA
gcattggtggttcagtggtagaattc

SEQ ID NO: 5897 - DNA, 27 bp, synthetic construct
  misc_feature 1..27: note = Probe
  source 1..27: mol_type = other DNA
gcattggtggttcagtggtagaattct

SEQ ID NO: 5898 - DNA, 28 bp, synthetic construct
  misc_feature 1..28: note = Probe
  source 1..28: mol_type = other DNA
gcattggtggttcagtggtagaattctc

SEQ ID NO: 5899 - DNA, 29 bp, synthetic construct
  misc_feature 1..29: note = Probe
  source 1..29: mol_type = other DNA
gcattggtggttcagtggtagaattctcg

SEQ ID NO: 5900 - DNA, 30 bp, synthetic construct
  misc_feature 1..30: note = Probe
  source 1..30: mol_type = other DNA
gcattggtggttcagtggtagaattctcgc

SEQ ID NO: 5901 - DNA, 31 bp, synthetic construct
  misc_feature 1..31: note = Probe
  source 1..31: mol_type = other DNA
gcattggtggttcagtggtagaattctcgcc

SEQ ID NO: 5902 - DNA, 32 bp, synthetic construct
  misc_feature 1..32: note = Probe
  source 1..32: mol_type = other DNA
gcattggtggttcagtggtagaattctcgcct

SEQ ID NO: 5903 - DNA, 33 bp, synthetic construct
  misc_feature 1..33: note = Probe
  source 1..33: mol_type = other DNA
gcattggtggttcagtggtagaattctcgcctc

SEQ ID NO: 5904 - DNA, 34 bp, synthetic construct
  misc_feature 1..34: note = Probe
  source 1..34: mol_type = other DNA
gcattggtggttcagtggtagaattctcgcctcc

SEQ ID NO: 5905 - DNA, 35 bp, synthetic construct
  misc_feature 1..35: note = Probe
  source 1..35: mol_type = other DNA
gcattggtggttcagtggtagaattctcgcctccc

SEQ ID NO: 5906 - DNA, 36 bp, synthetic construct
  misc_feature 1..36: note = Probe
  source 1..36: mol_type = other DNA
gcattggtggttcagtggtagaattctcgcctccca

SEQ ID NO: 5907 - DNA, 39 bp, synthetic construct
  misc_feature 1..39: note = Probe
  source 1..39: mol_type = other DNA
gcattggtggttcagtggtagaattctcgcctcccacgc

SEQ ID NO: 5908 - DNA, 33 bp, synthetic construct
  misc_feature 1..33: note = Probe
  source 1..33: mol_type = other DNA
gcattggtggttcagtggtagaattctcgcctg

SEQ ID NO: 5909 - DNA, 34 bp, synthetic construct
  misc_feature 1..34: note = Probe
  source 1..34: mol_type = other DNA
gcattggtggttcagtggtagaattctcgcctgc

SEQ ID NO: 5910 - DNA, 35 bp, synthetic construct
  misc_feature 1..35: note = Probe
  source 1..35: mol_type = other DNA
gcattggtggttcagtggtagaattctcgcctgcc

SEQ ID NO: 5911 - DNA, 36 bp, synthetic construct
  misc_feature 1..36: note = Probe
  source 1..36: mol_type = other DNA
gcattggtggttcagtggtagaattctcgcctgcca

SEQ ID NO: 5912 - DNA, 37 bp, synthetic construct
  misc_feature 1..37: note = Probe
  source 1..37: mol_type = other DNA
gcattggtggttcagtggtagaattctcgcctgccac

SEQ ID NO: 5913 - DNA, 42 bp, synthetic construct
  misc_feature 1..42: note = Probe
  source 1..42: mol_type = other DNA
gcattggtggttcagtggtagaattctcgcctgccacgcggg

SEQ ID NO: 5914 - DNA, 43 bp, synthetic construct
  misc_feature 1..43: note = Probe
  source 1..43: mol_type = other DNA
gcattggtggttcagtggtagaattctcgcctgccacgcggga

SEQ ID NO: 5915 - DNA, 45 bp, synthetic construct
  misc_feature 1..45: note = Probe
  source 1..45: mol_type = other DNA
gcattggtggttcagtggtagaattctcgcctgccacgcgggagg

SEQ ID NO: 5916 - DNA, 46 bp, synthetic construct
  misc_feature 1..46: note = Probe
  source 1..46: mol_type = other DNA
gcattggtggttcagtggtagaattctcgcctgccacgcgggaggc

SEQ ID NO: 5917 - DNA, 47 bp, synthetic construct
  misc_feature 1..47: note = Probe
  source 1..47: mol_type = other DNA
gcattggtggttcagtggtagaattctcgcctgccacgcgggaggcc

SEQ ID NO: 5918 - DNA, 48 bp, synthetic construct
  misc_feature 1..48: note = Probe
  source 1..48: mol_type = other DNA
gcattggtggttcagtggtagaattctcgcctgccacgcgggaggccc

SEQ ID NO: 5919 - DNA, 37 bp, synthetic construct
  misc_feature 1..37: note = Probe
  source 1..37: mol_type = other DNA
gcattggtggttcagtggtagaattctcgcctgccat

SEQ ID NO: 5920 - DNA, 40 bp, synthetic construct
  misc_feature 1..40: note = Probe
  source 1..40: mol_type = other DNA
gcattggtggttcagtggtagaattctcgcctgccatgcg

SEQ ID NO: 5921 - DNA, 50 bp, synthetic construct
  misc_feature 1..50: note = Probe
  source 1..50: mol_type = other DNA
gcattggtggttcagtggtagaattctcgcctgccatgcgggcggccggg

SEQ ID NO: 5922 - DNA, 37 bp, synthetic construct
  misc_feature 1..37: note = Probe
  source 1..37: mol_type = other DNA
gccaaggtcgcgggttcgatccccgtacgggccacga

SEQ ID NO: 5923 - DNA, 37 bp, synthetic construct
  misc_feature 1..37: note = Probe
  source 1..37: mol_type = other DNA
gccaaggtcgcgggttcgatccccgtacgggccactg

SEQ ID NO: 5924 - DNA, 37 bp, synthetic construct
  misc_feature 1..37: note = Probe
  source 1..37: mol_type = other DNA
gccaaggtcgcgggttcgatccccgtacgggccactt

SEQ ID NO: 5925 - DNA, 39 bp, synthetic construct
  misc_feature 1..39: note = Probe
  source 1..39: mol_type = other DNA
gccacgcgggaggcccgggttcgattcccggccaatgca

SEQ ID NO: 5926 - DNA, 42 bp, synthetic construct
  misc_feature 1..42: note = Probe
  source 1..42: mol_type = other DNA
gccacgcgggaggcccgggttcgattcccggccaatgcacga

SEQ ID NO: 5927 - DNA, 43 bp, synthetic construct
  misc_feature 1..43: note = Probe
  source 1..43: mol_type = other DNA
gccacgcgggaggcccgggttcgattcccggccaatgcacttt

SEQ ID NO: 5928 - DNA, 39 bp, synthetic construct
  misc_feature 1..39: note = Probe
  source 1..39: mol_type = other DNA
gccacgcgggaggcccgggttcgattcccggcccatgca

SEQ ID NO: 5929 - DNA, 42 bp, synthetic construct
  misc_feature 1..42: note = Probe
  source 1..42: mol_type = other DNA
gccacgcgggaggcccgggttcgattcccggcccatgcagca

SEQ ID NO: 5930 - DNA, 50 bp, synthetic construct
  misc_feature 1..50: note = Probe
  source 1..50: mol_type = other DNA
gccacgcgggaggcccgggttcgattcccggcccatgcagcacgccctcc

SEQ ID NO: 5931 - DNA, 28 bp, synthetic construct
  misc_feature 1..28: note = Probe
  source 1..28: mol_type = other DNA
gccagggattgtgggttcgagtcccatc

SEQ ID NO: 5932 - DNA, 38 bp, synthetic construct
  misc_feature 1..38: note = Probe
  source 1..38: mol_type = other DNA
gccagggattgtgggttcgagtcccatctggggtggcc

SEQ ID NO: 5933 - DNA, 17 bp, synthetic construct
  misc_feature 1..17: note = Probe
  source 1..17: mol_type = other DNA
gcccacccagggacgcc

SEQ ID NO: 5934 - DNA, 32 bp, synthetic construct
  misc_feature 1..32: note = Probe
  source 1..32: mol_type = other DNA
gcccagctagctcagtcggtagagcataagac

SEQ ID NO: 5935 - DNA, 33 bp, synthetic construct
  misc_feature 1..33: note = Probe
  source 1..33: mol_type = other DNA
gcccagctagctcagtcggtagagcataagact

SEQ ID NO: 5936 - DNA, 31 bp, synthetic construct
  misc_feature 1..31: note = Probe
  source 1..31: mol_type = other DNA
gcccagctagctcagtcggtagagcatgaga

SEQ ID NO: 5937 - DNA, 32 bp, synthetic construct
  misc_feature 1..32: note = Probe
  source 1..32: mol_type = other DNA
gcccagctagctcagtcggtagagcatgagac

SEQ ID NO: 5938 - DNA, 33 bp, synthetic construct
  misc_feature 1..33: note = Probe
  source 1..33: mol_type = other DNA
gcccagctagctcagtcggtagagcatgagact

SEQ ID NO: 5939 - DNA, 34 bp, synthetic construct
  misc_feature 1..34: note = Probe
  source 1..34: mol_type = other DNA
gcccagctagctcagtcggtagagcatgagactc

SEQ ID NO: 5940 - DNA, 36 bp, synthetic construct
  misc_feature 1..36: note = Probe
  source 1..36: mol_type = other DNA
gcccagctagctcagtcggtagagcatgagactctt

SEQ ID NO: 5941 - DNA, 25 bp, synthetic construct
  misc_feature 1..25: note = Probe
  source 1..25: mol_type = other DNA
gcccataacccagaggtcgatggat

SEQ ID NO: 5942 - DNA, 46 bp, synthetic construct
  misc_feature 1..46: note = Probe
  source 1..46: mol_type = other DNA
gcccataacccagaggtcgatggatcgaaaccatcctctgctaggt

SEQ ID NO: 5943 - DNA, 21 bp, synthetic construct
  misc_feature 1..21: note = Probe
  source 1..21: mol_type = other DNA
gcccataccccgaaaatgttg

SEQ ID NO: 5944 - DNA, 22 bp, synthetic construct
  misc_feature 1..22: note = Probe
  source 1..22: mol_type = other DNA
gcccataccccgaaaatgttgg

SEQ ID NO: 5945 - DNA, 24 bp, synthetic construct
  misc_feature 1..24: note = Probe
  source 1..24: mol_type = other DNA
gcccataccccgaaaatgttggtt

SEQ ID NO: 5946 - DNA, 25 bp, synthetic construct
  misc_feature 1..25: note = Probe
  source 1..25: mol_type = other DNA
gcccataccccgaaaatgttggtta

SEQ ID NO: 5947 - DNA, 33 bp, synthetic construct
  misc_feature 1..33: note = Probe
  source 1..33: mol_type = other DNA
gcccataccccgaaaatgttggttatacccttc

SEQ ID NO: 5948 - DNA, 43 bp, synthetic construct
  misc_feature 1..43: note = Probe
  source 1..43: mol_type = other DNA
gcccataccccgaaaatgttggttatacccttcccgtactaat

SEQ ID NO: 5949 - DNA, 44 bp, synthetic construct
  misc_feature 1..44: note = Probe
  source 1..44: mol_type = other DNA
gcccataccccgaaaatgttggttatacccttcccgtactaatt

SEQ ID NO: 5950 - DNA, 36 bp, synthetic construct
  misc_feature 1..36: note = Probe
  source 1..36: mol_type = other DNA
gccccagtggcctaatggataaggcactggcctcct

SEQ ID NO: 5951 - DNA, 15 bp, synthetic construct
  misc_feature 1..15: note = Probe
  source 1..15: mol_type = other DNA
gcccccatgtctaac

SEQ ID NO: 5952 - DNA, 16 bp, synthetic construct
  misc_feature 1..16: note = Probe
  source 1..16: mol_type = other DNA
gcccccatgtctaaca

SEQ ID NO: 5953 - DNA, 17 bp, synthetic construct
  misc_feature 1..17: note = Probe
  source 1..17: mol_type = other DNA
gcccccatgtctaacaa

SEQ ID NO: 5954 - DNA, 18 bp, synthetic construct
  misc_feature 1..18: note = Probe
  source 1..18: mol_type = other DNA
gcccccatgtctaacaac

SEQ ID NO: 5955 - DNA, 19 bp, synthetic construct
  misc_feature 1..19: note = Probe
  source 1..19: mol_type = other DNA
gcccccatgtctaacaaca

SEQ ID NO: 5956 - DNA, 20 bp, synthetic construct
  misc_feature 1..20: note = Probe
  source 1..20: mol_type = other DNA
gcccccatgtctaacaacat

SEQ ID NO: 5957 - DNA, 21 bp, synthetic construct
  misc_feature 1..21: note = Probe
  source 1..21: mol_type = other DNA
gcccccatgtctaacaacatg

SEQ ID NO: 5958 - DNA, 22 bp, synthetic construct
  misc_feature 1..22: note = Probe
  source 1..22: mol_type = other DNA
gcccccatgtctaacaacatgg

SEQ ID NO: 5959 - DNA, 23 bp, synthetic construct
  misc_feature 1..23: note = Probe
  source 1..23: mol_type = other DNA
gcccccatgtctaacaacatggc

SEQ ID NO: 5960 - DNA, 24 bp, synthetic construct
  misc_feature 1..24: note = Probe
  source 1..24: mol_type = other DNA
gcccccatgtctaacaacatggct

SEQ ID NO: 5961 - DNA, 25 bp, synthetic construct
  misc_feature 1..25: note = Probe
  source 1..25: mol_type = other DNA
gcccccatgtctaacaacatggctt

SEQ ID NO: 5962 - DNA, 26 bp, synthetic construct
  misc_feature 1..26: note = Probe
  source 1..26: mol_type = other DNA
gcccccatgtctaacaacatggcttt

SEQ ID NO: 5963 - DNA, 27 bp, synthetic construct
  misc_feature 1..27: note = Probe
  source 1..27: mol_type = other DNA
gcccccatgtctaacaacatggctttc

SEQ ID NO: 5964 - DNA, 28 bp, synthetic construct
  misc_feature 1..28: note = Probe
  source 1..28: mol_type = other DNA
gcccccatgtctaacaacatggctttct

SEQ ID NO: 5965 - DNA, 29 bp, synthetic construct
  misc_feature 1..29: note = Probe
  source 1..29: mol_type = other DNA
gcccccatgtctaacaacatggctttctc

SEQ ID NO: 5966 - DNA, 30 bp, synthetic construct
  misc_feature 1..30: note = Probe
  source 1..30: mol_type = other DNA
gcccccatgtctaacaacatggctttctca

SEQ ID NO: 5967 - DNA, 31 bp, synthetic construct
  misc_feature 1..31: note = Probe
  source 1..31: mol_type = other DNA
gcccccatgtctaacaacatggctttctcaa

SEQ ID NO: 5968 - DNA, 32 bp, synthetic construct
  misc_feature 1..32: note = Probe
  source 1..32: mol_type = other DNA
gcccccatgtctaacaacatggctttctcaac

SEQ ID NO: 5969 - DNA, 33 bp, synthetic construct
  misc_feature 1..33: note = Probe
  source 1..33: mol_type = other DNA
gcccccatgtctaacaacatggctttctcaact

SEQ ID NO: 5970 - DNA, 34 bp, synthetic construct
  misc_feature 1..34: note = Probe
  source 1..34: mol_type = other DNA
gcccccatgtctaacaacatggctttctcaactt

SEQ ID NO: 5971 - DNA, 35 bp, synthetic construct
  misc_feature 1..35: note = Probe
  source 1..35: mol_type = other DNA
gcccccatgtctaacaacatggctttctcaacttt

SEQ ID NO: 5972 - DNA, 36 bp, synthetic construct
  misc_feature 1..36: note = Probe
  source 1..36: mol_type = other DNA
gcccccatgtctaacaacatggctttctcaactttt

SEQ ID NO: 5973 - DNA, 37 bp, synthetic construct
  misc_feature 1..37: note = Probe
  source 1..37: mol_type = other DNA
gcccccatgtctaacaacatggctttctcaactttta

SEQ ID NO: 5974 - DNA, 38 bp, synthetic construct
  misc_feature 1..38: note = Probe
  source 1..38: mol_type = other DNA
gcccccatgtctaacaacatggctttctcaacttttaa

SEQ ID NO: 5975 - DNA, 39 bp, synthetic construct
  misc_feature 1..39: note = Probe
  source 1..39: mol_type = other DNA
gcccccatgtctaacaacatggctttctcaacttttaaa

SEQ ID NO: 5976 - DNA, 40 bp, synthetic construct
  misc_feature 1..40: note = Probe
  source 1..40: mol_type = other DNA
gcccccatgtctaacaacatggctttctcaacttttaaag

SEQ ID NO: 5977 - DNA, 41 bp, synthetic construct
  misc_feature 1..41: note = Probe
  source 1..41: mol_type = other DNA
gcccccatgtctaacaacatggctttctcaacttttaaagg

SEQ ID NO: 5978 - DNA, 21 bp, synthetic construct
  misc_feature 1..21: note = Probe
  source 1..21: mol_type = other DNA
gccccgggttcaatccccggc

SEQ ID NO: 5979 - DNA, 31 bp, synthetic construct
  misc_feature 1..31: note = Probe
  source 1..31: mol_type = other DNA
gccccgggttcgatccccggcatctccattg

SEQ ID NO: 5980 - DNA, 20 bp, synthetic construct
  misc_feature 1..20: note = Probe
  source 1..20: mol_type = other DNA
gccccggtggcctaatggat

SEQ ID NO: 5981 - DNA, 28 bp, synthetic construct
  misc_feature 1..28: note = Probe
  source 1..28: mol_type = other DNA
gcccctcatttacataaatattatacta

SEQ ID NO: 5982 - DNA, 33 bp, synthetic construct
  misc_feature 1..33: note = Probe
  source 1..33: mol_type = other DNA
gcccgactacctcagtcggtggagcatgggact

SEQ ID NO: 5983 - DNA, 33 bp, synthetic construct
  misc_feature 1..33: note = Probe
  source 1..33: mol_type = other DNA
gcccggagagctcagtgggtagagcatcagact

SEQ ID NO: 5984 - DNA, 16 bp, synthetic construct
  misc_feature 1..16: note = Probe
  source 1..16: mol_type = other DNA
gcccggatagctcagt

SEQ ID NO: 5985 - DNA, 17 bp, synthetic construct
  misc_feature 1..17: note = Probe
  source 1..17: mol_type = other DNA
gcccggatagctcagtc

SEQ ID NO: 5986 - DNA, 27 bp, synthetic construct
  misc_feature 1..27: note = Probe
  source 1..27: mol_type = other DNA
gcccggatagctcagtcggtagagcat

SEQ ID NO: 5987 - DNA, 38 bp, synthetic construct
  misc_feature 1..38: note = Probe
  source 1..38: mol_type = other DNA
gcccggatagctcagtcggtagagcatcagacttttaa

SEQ ID NO: 5988 - DNA, 39 bp, synthetic construct
  misc_feature 1..39: note = Probe
  source 1..39: mol_type = other DNA
gcccggatagctcagtcggtagagcatcagacttttaat

SEQ ID NO: 5989 - DNA, 41 bp, synthetic construct
  misc_feature 1..41: note = Probe
  source 1..41: mol_type = other DNA
gcccggatagctcagtcggtagagcatcagacttttaatct

SEQ ID NO: 5990 - DNA, 32 bp, synthetic construct
  misc_feature 1..32: note = Probe
  source 1..32: mol_type = other DNA
gcccggatagttcagttggtagagcatcagac

SEQ ID NO: 5991 - DNA, 33 bp, synthetic construct
  misc_feature 1..33: note = Probe
  source 1..33: mol_type = other DNA
gcccggatagttcagttggtagagcatcagact

SEQ ID NO: 5992 - DNA, 34 bp, synthetic construct
  misc_feature 1..34: note = Probe
  source 1..34: mol_type = other DNA
gcccggatagttcagttggtagagcatcagactt

SEQ ID NO: 5993 - DNA, 19 bp, synthetic construct
  misc_feature 1..19: note = Probe
  source 1..19: mol_type = other DNA
gcccggctagctcagtcga

SEQ ID NO: 5994 - DNA, 32 bp, synthetic construct
  misc_feature 1..32: note = Probe
  source 1..32: mol_type = other DNA
gcccggctagctcagtcgatagagcatgagac

SEQ ID NO: 5995 - DNA, 34 bp, synthetic construct
  misc_feature 1..34: note = Probe
  source 1..34: mol_type = other DNA
gcccggctagctcagtcgatagagcatgagactc

SEQ ID NO: 5996 - DNA, 36 bp, synthetic construct
  misc_feature 1..36: note = Probe
  source 1..36: mol_type = other DNA
gcccggctagctcagtcgatagagcatgagactctt

SEQ ID NO: 5997 - DNA, 41 bp, synthetic construct
  misc_feature 1..41: note = Probe
  source 1..41: mol_type = other DNA
gcccggctagctcagtcggtagagcatgagactcttaatct

SEQ ID NO: 5998 - DNA, 45 bp, synthetic construct
  misc_feature 1..45: note = Probe
  source 1..45: mol_type = other DNA
gcccggctagctcagtcggtagagcatgagactcttaatctcagg

SEQ ID NO: 5999 - DNA, 49 bp, synthetic construct
  misc_feature 1..49: note = Probe
  source 1..49: mol_type = other DNA
gcccggctagctcagtcggtagagcatgagactcttaatctcagggtcg

SEQ ID NO: 6000 - DNA, 38 bp, synthetic construct
  misc_feature 1..38: note = Probe
  source 1..38: mol_type = other DNA
gcccggctagctcagtcggtagagcatgggactcttaa

SEQ ID NO: 6001 - DNA, 39 bp, synthetic construct
  misc_feature 1..39: note = Probe
  source 1..39: mol_type = other DNA
gcccggctagctcagtcggtagagcatgggactcttaat

SEQ ID NO: 6002 - DNA, 41 bp, synthetic construct
  misc_feature 1..41: note = Probe
  source 1..41: mol_type = other DNA
gcccggctagctcagtcggtagagcatgggactcttaatcc

SEQ ID NO: 6003 - DNA, 43 bp, synthetic construct
  misc_feature 1..43: note = Probe
  source 1..43: mol_type = other DNA
gcccggctagctcagtcggtagagcatgggactcttaatccca

SEQ ID NO: 6004 - DNA, 46 bp, synthetic construct
  misc_feature 1..46: note = Probe
  source 1..46: mol_type = other DNA
gcccggctagctcagtcggtagagcatgggactcttaatcccaggg

SEQ ID NO: 6005 - DNA, 48 bp, synthetic construct
  misc_feature 1..48: note = Probe
  source 1..48: mol_type = other DNA
gcccggctagctcagtcggtagagcatgggactcttaatcccagggtc

SEQ ID NO: 6006 - DNA, 49 bp, synthetic construct
  misc_feature 1..49: note = Probe
  source 1..49: mol_type = other DNA
gcccggctagctcagtcggtagagcatgggactcttaatcccagggtcg

SEQ ID NO: 6007 - DNA, 50 bp, synthetic construct
  misc_feature 1..50: note = Probe
  source 1..50: mol_type = other DNA
gcccggctagctcagtcggtagagcatgggactcttaatctcagggtcgt

SEQ ID NO: 6008 - DNA, 30 bp, synthetic construct
  misc_feature 1..30: note = Probe
  source 1..30: mol_type = other DNA
gcccgggttcgactcccggtgtgggaacgc

SEQ ID NO: 6009 - DNA, 27 bp, synthetic construct
  misc_feature 1..27: note = Probe
  source 1..27: mol_type = other DNA
gcccggtaatcgcataaaacttaaaac

SEQ ID NO: 6010 - DNA, 29 bp, synthetic construct
  misc_feature 1..29: note = Probe
  source 1..29: mol_type = other DNA
gcccggtaatcgcataaaacttaaaactt

SEQ ID NO: 6011 - DNA, 45 bp, synthetic construct
  misc_feature 1..45: note = Probe
  source 1..45: mol_type = other DNA
gcccggtaatcgcataaaacttaaaactttacagtcagaggttca

SEQ ID NO: 6012 - DNA, 50 bp, synthetic construct
  misc_feature 1..50: note = Probe
  source 1..50: mol_type = other DNA
gcccggtaatcgcataaaacttaaaactttacagtcagaggttcaattcc

SEQ ID NO: 6013 - DNA, 27 bp, synthetic construct
  misc_feature 1..27: note = Probe
  source 1..27: mol_type = other DNA
gccctcagtaagttgcaatacttaatt

SEQ ID NO: 6014 - DNA, 31 bp, synthetic construct
  misc_feature 1..31: note = Probe
  source 1..31: mol_type = other DNA
gccctcagtaagttgcaatacttaatttctg

SEQ ID NO: 6015 - DNA, 32 bp, synthetic construct
  misc_feature 1..32: note = Probe
  source 1..32: mol_type = other DNA
gccctcagtaagttgcaatacttaatttctgt

SEQ ID NO: 6016 - DNA, 21 bp, synthetic construct
  misc_feature 1..21: note = Probe
  source 1..21: mol_type = other DNA
gccgaaatagctcagttggga

SEQ ID NO: 6017 - DNA, 23 bp, synthetic construct
  misc_feature 1..23: note = Probe
  source 1..23: mol_type = other DNA
gccgaaatagctcagttgggaga

SEQ ID NO: 6018 - DNA, 25 bp, synthetic construct
  misc_feature 1..25: note = Probe
  source 1..25: mol_type = other DNA
gccgaaatagctcagttgggagagc

SEQ ID NO: 6019 - DNA, 18 bp, synthetic construct
  misc_feature 1..18: note = Probe
  source 1..18: mol_type = other DNA
gccgaggttgtgagttcg

SEQ ID NO: 6020 - DNA, 23 bp, synthetic construct
  misc_feature 1..23: note = Probe
  source 1..23: mol_type = other DNA
gccgcggcccgggttcgattccc

SEQ ID NO: 6021 - DNA, 32 bp, synthetic construct
  misc_feature 1..32: note = Probe
  source 1..32: mol_type = other DNA
gccgcggcccgggttcgattcccggtcaggga

SEQ ID NO: 6022 - DNA, 33 bp, synthetic construct
  misc_feature 1..33: note = Probe
  source 1..33: mol_type = other DNA
gccgcggcccgggttcgattcccggtcagggaa

SEQ ID NO: 6023 - DNA, 34 bp, synthetic construct
  misc_feature 1..34: note = Probe
  source 1..34: mol_type = other DNA
gccgcggcccgggttcgattcccggtcagggaaa

SEQ ID NO: 6024 - DNA, 34 bp, synthetic construct
  misc_feature 1..34: note = Probe
  source 1..34: mol_type = other DNA
gccgcggcccgggttcgattcccggtcagggaag

SEQ ID NO: 6025 - DNA, 36 bp, synthetic construct
  misc_feature 1..36: note = Probe
  source 1..36: mol_type = other DNA
gccgcggcccgggttcgattcccggtcagggaagcc

SEQ ID NO: 6026 - DNA, 36 bp, synthetic construct
  misc_feature 1..36: note = Probe
  source 1..36: mol_type = other DNA
gccgcggcccgggttcgattcccggtcagggaagtt

SEQ ID NO: 6027 - DNA, 34 bp, synthetic construct
  misc_feature 1..34: note = Probe
  source 1..34: mol_type = other DNA
gccgcggcccgggttcgattcccggtcagggaat

SEQ ID NO: 6028 - DNA, 36 bp, synthetic construct
  misc_feature 1..36: note = Probe
  source 1..36: mol_type = other DNA
gccgcggcccgggttcgattcccggtcagggaattg

SEQ ID NO: 6029 - DNA, 23 bp, synthetic construct
  misc_feature 1..23: note = Probe
  source 1..23: mol_type = other DNA
gccgctggtgtagtggtatcatg

SEQ ID NO: 6030 - DNA, 29 bp, synthetic construct
  misc_feature 1..29: note = Probe
  source 1..29: mol_type = other DNA
gccgctggtgtagtggtatcatgcaagat

SEQ ID NO: 6031 - DNA, 18 bp, synthetic construct
  misc_feature 1..18: note = Probe
  source 1..18: mol_type = other DNA
gccgtgatcgtatagtgg

SEQ ID NO: 6032 - DNA, 20 bp, synthetic construct
  misc_feature 1..20: note = Probe
  source 1..20: mol_type = other DNA
gccgtgatcgtatagtggtt

SEQ ID NO: 6033 - DNA, 23 bp, synthetic construct
  misc_feature 1..23: note = Probe
  source 1..23: mol_type = other DNA
gccgtgatcgtatagtggttagt

SEQ ID NO: 6034 - DNA, 24 bp, synthetic construct
  misc_feature 1..24: note = Probe
  source 1..24: mol_type = other DNA
gccgtgatcgtatagtggttagta

SEQ ID NO: 6035 - DNA, 26 bp, synthetic construct
  misc_feature 1..26: note = Probe
  source 1..26: mol_type = other DNA
gccgtgatcgtatagtggttagtact

SEQ ID NO: 6036 - DNA, 27 bp, synthetic construct
  misc_feature 1..27: note = Probe
  source 1..27: mol_type = other DNA
gccgtgatcgtatagtggttagtactc

SEQ ID NO: 6037 - DNA, 28 bp, synthetic construct
  misc_feature 1..28: note = Probe
  source 1..28: mol_type = other DNA
gccgtgatcgtatagtggttagtactct

SEQ ID NO: 6038 - DNA, 29 bp, synthetic construct
  misc_feature 1..29: note = Probe
  source 1..29: mol_type = other DNA
gccgtgatcgtatagtggttagtactctg

SEQ ID NO: 6039 - DNA, 37 bp, synthetic construct
  misc_feature 1..37: note = Probe
  source 1..37: mol_type = other DNA
gccgtgatcgtatagtggttagtactctgcgttgtgg

SEQ ID NO: 6040 - DNA, 50 bp, synthetic construct
  misc_feature 1..50: note = Probe
  source 1..50: mol_type = other DNA
gccgtgatcgtatagtggttagtactctgcgttgtggccgcagcaacctc

SEQ ID NO: 6041 - DNA, 16 bp, synthetic construct
  misc_feature 1..16: note = Probe
  source 1..16: mol_type = other DNA
gcctccttagcgcagt

SEQ ID NO: 6042 - DNA, 25 bp, synthetic construct
  misc_feature 1..25: note = Probe
  source 1..25: mol_type = other DNA
gcctccttagcgcagtaggcagcgc

SEQ ID NO: 6043 - DNA, 33 bp, synthetic construct
  misc_feature 1..33: note = Probe
  source 1..33: mol_type = other DNA
gcctccttagcgcagtaggcagcgcgtcagtct

SEQ ID NO: 6044 - DNA, 16 bp, synthetic construct
  misc_feature 1..16: note = Probe
  source 1..16: mol_type = other DNA
gcctcgttagcgcagt

SEQ ID NO: 6045 - DNA, 19 bp, synthetic construct
  misc_feature 1..19: note = Probe
  source 1..19: mol_type = other DNA
gcctcgttagcgcagtagg

SEQ ID NO: 6046 - DNA, 35 bp, synthetic construct
  misc_feature 1..35: note = Probe
  source 1..35: mol_type = other DNA
gcctcgttagcgcagtaggcagcgcgtcagtctca

SEQ ID NO: 6047 - DNA, 21 bp, synthetic construct
  misc_feature 1..21: note = Probe
  source 1..21: mol_type = other DNA
gcctcgttagcgcagtaggta

SEQ ID NO: 6048 - DNA, 22 bp, synthetic construct
  misc_feature 1..22: note = Probe
  source 1..22: mol_type = other DNA
gcctcgttagcgcagtaggtag

SEQ ID NO: 6049 - DNA, 23 bp, synthetic construct
  misc_feature 1..23: note = Probe
  source 1..23: mol_type = other DNA
gcctcgttagcgcagtaggtagc

SEQ ID NO: 6050 - DNA, 24 bp, synthetic construct
  misc_feature 1..24: note = Probe
  source 1..24: mol_type = other DNA
gcctcgttagcgcagtaggtagcg

SEQ ID NO: 6051 - DNA, 25 bp, synthetic construct
  misc_feature 1..25: note = Probe
  source 1..25: mol_type = other DNA
gcctcgttagcgcagtaggtagcgc

SEQ ID NO: 6052 - DNA, 31 bp, synthetic construct
  misc_feature 1..31: note = Probe
  source 1..31: mol_type = other DNA
gcctcgttagcgcagtaggtagcgcgtcagt

SEQ ID NO: 6053 - DNA, 16 bp, synthetic construct
  misc_feature 1..16: note = Probe
  source 1..16: mol_type = other DNA
gcctggatagctcagt

SEQ ID NO: 6054 - DNA, 34 bp, synthetic construct
  misc_feature 1..34: note = Probe
  source 1..34: mol_type = other DNA
gcctggatagctcagtcggtagagcatcagactt

SEQ ID NO: 6055 - DNA, 50 bp, synthetic construct
  misc_feature 1..50: note = Probe
  source 1..50: mol_type = other DNA
gcctggatagctcagttggtagagcatcagacttttaatctgagggtcca

SEQ ID NO: 6056 - DNA, 25 bp, synthetic construct
  misc_feature 1..25: note = Probe
  source 1..25: mol_type = other DNA
gcctgggtagctcagtcggtagagc

SEQ ID NO: 6057 - DNA, 29 bp, synthetic construct
  misc_feature 1..29: note = Probe
  source 1..29: mol_type = other DNA
gcctgggtagctcagtcggtagagcatca

SEQ ID NO: 6058 - DNA, 24 bp, synthetic construct
  misc_feature 1..24: note = Probe
  source 1..24: mol_type = other DNA
gcctgtcacgcgggagaccggggt

SEQ ID NO: 6059 - DNA, 44 bp, synthetic construct
  misc_feature 1..44: note = Probe
  source 1..44: mol_type = other DNA
gcctgtcacgcgggagaccggggttcaattccccgacggggagg

SEQ ID NO: 6060 - DNA, 46 bp, synthetic construct
  misc_feature 1..46: note = Probe
  source 1..46: mol_type = other DNA
gcctgtcacgcgggagaccggggttcaattccccgacggggaggtg

SEQ ID NO: 6061 - DNA, 49 bp, synthetic construct
  misc_feature 1..49: note = Probe
  source 1..49: mol_type = other DNA
gcctgtcacgcgggagaccggggttcaattccccgacggggaggtgtgt

SEQ ID NO: 6062 - DNA, 44 bp, synthetic construct
  misc_feature 1..44: note = Probe
  source 1..44: mol_type = other DNA
gcctgtcacgcgggagaccggggttcgattccccgacggggaga

SEQ ID NO: 6063 - DNA, 50 bp, synthetic construct
  misc_feature 1..50: note = Probe
  source 1..50: mol_type = other DNA
gcctgtcacgcgggagaccggggttcgattccccgacggggagaaaagtt

SEQ ID NO: 6064 - DNA, 46 bp, synthetic construct
  misc_feature 1..46: note = Probe
  source 1..46: mol_type = other DNA
gcctgtcacgcgggagaccggggttcgattccccgacggggagagt

SEQ ID NO: 6065 - DNA, 44 bp, synthetic construct
  misc_feature 1..44: note = Probe
  source 1..44: mol_type = other DNA
gcctgtcacgcgggagaccggggttcgattccccgacggggagg

SEQ ID NO: 6066 - DNA, 46 bp, synthetic construct
  misc_feature 1..46: note = Probe
  source 1..46: mol_type = other DNA
gcctgtcacgcgggagaccggggttcgattccccgacggggaggca

SEQ ID NO: 6067 - DNA, 49 bp, synthetic construct
  misc_feature 1..49: note = Probe
  source 1..49: mol_type = other DNA
gcctgtcacgcgggagaccggggttcgattccccgacggggaggcacag

SEQ ID NO: 6068 - DNA, 50 bp, synthetic construct
  misc_feature 1..50: note = Probe
  source 1..50: mol_type = other DNA
gcctgtcacgcgggagaccggggttcgattccccgacggggaggcacagt

SEQ ID NO: 6069 - DNA, 49 bp, synthetic construct
  misc_feature 1..49: note = Probe
  source 1..49: mol_type = other DNA
gcctgtcacgcgggagaccggggttcgattccccgacggggaggcagcc

SEQ ID NO: 6070 - DNA, 46 bp, synthetic construct
  misc_feature 1..46: note = Probe
  source 1..46: mol_type = other DNA
gcctgtcacgcgggagaccggggttcgattccccgacggggaggcc

SEQ ID NO: 6071 - DNA, 32 bp, synthetic construct
  misc_feature 1..32: note = Probe
  source 1..32: mol_type = other DNA
gccttggtggtgcagtggtagaattctcgcct

SEQ ID NO: 6072 - DNA, 24 bp, synthetic construct
  misc_feature 1..24: note = Probe
  source 1..24: mol_type = other DNA
gccttttttcccggcggcgggaga

SEQ ID NO: 6073 - DNA, 25 bp, synthetic construct
  misc_feature 1..25: note = Probe
  source 1..25: mol_type = other DNA
gccttttttcccggcggcgggagaa

SEQ ID NO: 6074 - DNA, 27 bp, synthetic construct
  misc_feature 1..27: note = Probe
  source 1..27: mol_type = other DNA
gccttttttcccggcggcgggagaagt

SEQ ID NO: 6075 - DNA, 28 bp, synthetic construct
  misc_feature 1..28: note = Probe
  source 1..28: mol_type = other DNA
gccttttttcccggcggcgggagaagta

SEQ ID NO: 6076 - DNA, 19 bp, synthetic construct
  misc_feature 1..19: note = Probe
  source 1..19: mol_type = other DNA
gcgaaaggtccccggttcg

SEQ ID NO: 6077 - DNA, 32 bp, synthetic construct
  misc_feature 1..32: note = Probe
  source 1..32: mol_type = other DNA
gcgaaaggtccccggttcgaaaccgggcggaa

SEQ ID NO: 6078 - DNA, 38 bp, synthetic construct
  misc_feature 1..38: note = Probe
  source 1..38: mol_type = other DNA
gcgaaaggtccccggttcgaaaccgggcggaaacacct

SEQ ID NO: 6079 - DNA, 32 bp, synthetic construct
  misc_feature 1..32: note = Probe
  source 1..32: mol_type = other DNA
gcgacccgggttcgattcccgggcggcgcact

SEQ ID NO: 6080 - DNA, 33 bp, synthetic construct
  misc_feature 1..33: note = Probe
  source 1..33: mol_type = other DNA
gcgacccgggttcgattcccgggcggcgcactt

SEQ ID NO: 6081 - DNA, 18 bp, synthetic construct
  misc_feature 1..18: note = Probe
  source 1..18: mol_type = other DNA
gcgagaggtcccgggttc

SEQ ID NO: 6082 - DNA, 19 bp, synthetic construct
  misc_feature 1..19: note = Probe
  source 1..19: mol_type = other DNA
gcgagaggtcccgggttca

SEQ ID NO: 6083 - DNA, 32 bp, synthetic construct
  misc_feature 1..32: note = Probe
  source 1..32: mol_type = other DNA
gcgatccgagttcaaatctcggtggaacctgc

SEQ ID NO: 6084 - DNA, 33 bp, synthetic construct
  misc_feature 1..33: note = Probe
  source 1..33: mol_type = other DNA
gcgatccgagttcaaatctcggtggaacctgca

SEQ ID NO: 6085 - DNA, 29 bp, synthetic construct
  misc_feature 1..29: note = Probe
  source 1..29: mol_type = other DNA
gcgatccgagttcaaatctcggtgggacc

SEQ ID NO: 6086 - DNA, 33 bp, synthetic construct
  misc_feature 1..33: note = Probe
  source 1..33: mol_type = other DNA
gcgatccgagttcaaatctcggtgggacctcac

SEQ ID NO: 6087 - DNA, 33 bp, synthetic construct
  misc_feature 1..33: note = Probe
  source 1..33: mol_type = other DNA
gcgatccgagttcgagtctcggtggaacctttg

SEQ ID NO: 6088 - DNA, 19 bp, synthetic construct
  misc_feature 1..19: note = Probe
  source 1..19: mol_type = other DNA
gcgccgctggtgtagtggt

SEQ ID NO: 6089 - DNA, 38 bp, synthetic construct
  misc_feature 1..38: note = Probe
  source 1..38: mol_type = other DNA
gcgccgctggtgtagtggtatcatgcaagattcccatt

SEQ ID NO: 6090 - DNA, 42 bp, synthetic construct
  misc_feature 1..42: note = Probe
  source 1..42: mol_type = other DNA
gcgccgctggtgtagtggtatcatgcaagattcccattcttg

SEQ ID NO: 6091 - DNA, 43 bp, synthetic construct
  misc_feature 1..43: note = Probe
  source 1..43: mol_type = other DNA
gcgccgctggtgtagtggtatcatgcaagattcccattcttgc

SEQ ID NO: 6092 - DNA, 44 bp, synthetic construct
  misc_feature 1..44: note = Probe
  source 1..44: mol_type = other DNA
gcgccgctggtgtagtggtatcatgcaagattcccattcttgcg

SEQ ID NO: 6093 - DNA, 45 bp, synthetic construct
  misc_feature 1..45: note = Probe
  source 1..45: mol_type = other DNA
gcgccgctggtgtagtggtatcatgcaagattcccattcttgcga

SEQ ID NO: 6094 - DNA, 47 bp, synthetic construct
  misc_feature 1..47: note = Probe
  source 1..47: mol_type = other DNA
gcgccgctggtgtagtggtatcatgcaagattcccattcttgcgacc

SEQ ID NO: 6095 - DNA, 48 bp, synthetic construct
  misc_feature 1..48: note = Probe
  source 1..48: mol_type = other DNA
gcgccgctggtgtagtggtatcatgcaagattcccattcttgcgaccc

SEQ ID NO: 6096 - DNA, 49 bp, synthetic construct
  misc_feature 1..49: note = Probe
  source 1..49: mol_type = other DNA
gcgccgctggtgtagtggtatcatgcaagattcccattcttgcgacccg

SEQ ID NO: 6097 - DNA, 50 bp, synthetic construct
  misc_feature 1..50: note = Probe
  source 1..50: mol_type = other DNA
gcgctttcaccgccgcggcccgggttcgattcccggtcagggaattgttt

SEQ ID NO: 6098 - DNA, 32 bp, synthetic construct
  misc_feature 1..32: note = Probe
  source 1..32: mol_type = other DNA
gcggcccgggttcgactcccggtgtgggaacg

SEQ ID NO: 6099 - DNA, 33 bp, synthetic construct
  misc_feature 1..33: note = Probe
  source 1..33: mol_type = other DNA
gcggcccgggttcgactcccggtgtgggaacgc

SEQ ID NO: 6100 - DNA, 23 bp, synthetic construct
  misc_feature 1..23: note = Probe
  source 1..23: mol_type = other DNA
gcggcccgggttcgattcccggt

SEQ ID NO: 6101 - DNA, 31 bp, synthetic construct
  misc_feature 1..31: note = Probe
  source 1..31: mol_type = other DNA
gcggcccgggttcgattcccggtcagggaaa

SEQ ID NO: 6102 - DNA, 31 bp, synthetic construct
  misc_feature 1..31: note = Probe
  source 1..31: mol_type = other DNA
gcggcccgggttcgattcccggtcagggaag

SEQ ID NO: 6103 - DNA, 31 bp, synthetic construct
  misc_feature 1..31: note = Probe
  source 1..31: mol_type = other DNA
gcggcccgggttcgattcccggtcagggaat

SEQ ID NO: 6104 - DNA, 33 bp, synthetic construct
  misc_feature 1..33: note = Probe
  source 1..33: mol_type = other DNA
gcggcccgggttcgattcccggtcagggaattg

SEQ ID NO: 6105 - DNA, 31 bp, synthetic construct
  misc_feature 1..31: note = Probe
  source 1..31: mol_type = other DNA
gcgggagaccggggttcaattccccgacggg

SEQ ID NO: 6106 - DNA, 32 bp, synthetic construct
  misc_feature 1..32: note = Probe
  source 1..32: mol_type = other DNA
gcgggagaccggggttcaattccccgacgggg

SEQ ID NO: 6107 - DNA, 33 bp, synthetic construct
  misc_feature 1..33: note = Probe
  source 1..33: mol_type = other DNA
gcgggagaccggggttcaattccccgacgggga

SEQ ID NO: 6108 - DNA, 35 bp, synthetic construct
  misc_feature 1..35: note = Probe
  source 1..35: mol_type = other DNA
gcgggagaccggggttcaattccccgacggggagg

SEQ ID NO: 6109 - DNA, 37 bp, synthetic construct
  misc_feature 1..37: note = Probe
  source 1..37: mol_type = other DNA
gcgggagaccggggttcaattccccgacggggaggtg

SEQ ID NO: 6110 - DNA, 27 bp, synthetic construct
  misc_feature 1..27: note = Probe
  source 1..27: mol_type = other DNA
gcgggagaccggggttcgattccccga

SEQ ID NO: 6111 - DNA, 29 bp, synthetic construct
  misc_feature 1..29: note = Probe
  source 1..29: mol_type = other DNA
gcgggagaccggggttcgattccccgacg

SEQ ID NO: 6112 - DNA, 35 bp, synthetic construct
  misc_feature 1..35: note = Probe
  source 1..35: mol_type = other DNA
gcgggagaccggggttcgattccccgacggggaga

SEQ ID NO: 6113 - DNA, 36 bp, synthetic construct
  misc_feature 1..36: note = Probe
  source 1..36: mol_type = other DNA
gcgggagaccggggttcgattccccgacggggagaa

SEQ ID NO: 6114 - DNA, 37 bp, synthetic construct
  misc_feature 1..37: note = Probe
  source 1..37: mol_type = other DNA
gcgggagaccggggttcgattccccgacggggagaaa

SEQ ID NO: 6115 - DNA, 36 bp, synthetic construct
  misc_feature 1..36: note = Probe
  source 1..36: mol_type = other DNA
gcgggagaccggggttcgattccccgacggggagac

SEQ ID NO: 6116 - DNA, 37 bp, synthetic construct
  misc_feature 1..37: note = Probe
  source 1..37: mol_type = other DNA
gcgggagaccggggttcgattccccgacggggagacg

SEQ ID NO: 6117 - DNA, 37 bp, synthetic construct
  misc_feature 1..37: note = Probe
  source 1..37: mol_type = other DNA
gcgggagaccggggttcgattccccgacggggagagt

SEQ ID NO: 6118 - DNA, 35 bp, synthetic construct
  misc_feature 1..35: note = Probe
  source 1..35: mol_type = other DNA
gcgggagaccggggttcgattccccgacggggagg

SEQ ID NO: 6119 - DNA, 36 bp, synthetic construct
  misc_feature 1..36: note = Probe
  source 1..36: mol_type = other DNA
gcgggagaccggggttcgattccccgacggggagga

SEQ ID NO: 6120 - DNA, 36 bp, synthetic construct
  misc_feature 1..36: note = Probe
  source 1..36: mol_type = other DNA
gcgggagaccggggttcgattccccgacggggaggc

SEQ ID NO: 6121 - DNA, 37 bp, synthetic construct
  misc_feature 1..37: note = Probe
  source 1..37: mol_type = other DNA
gcgggagaccggggttcgattccccgacggggaggca

SEQ ID NO: 6122 - DNA, 37 bp, synthetic construct
  misc_feature 1..37: note = Probe
  source 1..37: mol_type = other DNA
gcgggagaccggggttcgattccccgacggggaggcc

SEQ ID NO: 6123 - DNA, 17 bp, synthetic construct
  misc_feature 1..17: note = Probe
  source 1..17: mol_type = other DNA
gcgggaggcccgggttc

SEQ ID NO: 6124 - DNA, 33 bp, synthetic construct
  misc_feature 1..33: note = Probe
  source 1..33: mol_type = other DNA
gcgggaggcccgggttcgattcccggccaatgc

SEQ ID NO: 6125 - DNA, 34 bp, synthetic construct
  misc_feature 1..34: note = Probe
  source 1..34: mol_type = other DNA
gcgggaggcccgggttcgattcccggccaatgca

SEQ ID NO: 6126 - DNA, 37 bp, synthetic construct
  misc_feature 1..37: note = Probe
  source 1..37: mol_type = other DNA
gcgggaggcccgggttcgattcccggccaatgcaagt

SEQ ID NO: 6127 - DNA, 37 bp, synthetic construct
  misc_feature 1..37: note = Probe
  source 1..37: mol_type = other DNA
gcgggaggcccgggttcgattcccggccaatgcacga

SEQ ID NO: 6128 - DNA, 37 bp, synthetic construct
  misc_feature 1..37: note = Probe
  source 1..37: mol_type = other DNA
gcgggaggcccgggttcgattcccggccaatgcagca

SEQ ID NO: 6129 - DNA, 32 bp, synthetic construct
  misc_feature 1..32: note = Probe
  source 1..32: mol_type = other DNA
gcgggaggcccgggttcgattcccggcccatg

SEQ ID NO: 6130 - DNA, 16 bp, synthetic construct
  misc_feature 1..16: note = Probe
  source 1..16: mol_type = other DNA
gcgttggtggtatagt

SEQ ID NO: 6131 - DNA, 17 bp, synthetic construct
  misc_feature 1..17: note = Probe
  source 1..17: mol_type = other DNA
gcgttggtggtatagtg

SEQ ID NO: 6132 - DNA, 18 bp, synthetic construct
  misc_feature 1..18: note = Probe
  source 1..18: mol_type = other DNA
gcgttggtggtatagtgg

SEQ ID NO: 6133 - DNA, 19 bp, synthetic construct
  misc_feature 1..19: note = Probe
  source 1..19: mol_type = other DNA
gcgttggtggtatagtggt

SEQ ID NO: 6134 - DNA, 20 bp, synthetic construct
  misc_feature 1..20: note = Probe
  source 1..20: mol_type = other DNA
gcgttggtggtatagtggta

SEQ ID NO: 6135 - DNA, 23 bp, synthetic construct
  misc_feature 1..23: note = Probe
  source 1..23: mol_type = other DNA
gcgttggtggtatagtggtaagc

SEQ ID NO: 6136 - DNA, 28 bp, synthetic construct
  misc_feature 1..28: note = Probe
  source 1..28: mol_type = other DNA
gcgttggtggtatagtggtaagcatagc

SEQ ID NO: 6137 - DNA, 40 bp, synthetic construct
  misc_feature 1..40: note = Probe
  source 1..40: mol_type = other DNA
gcgttggtggtatagtggtaagcatagctgccttccaagc

SEQ ID NO: 6138 - DNA, 43 bp, synthetic construct
  misc_feature 1..43: note = Probe
  source 1..43: mol_type = other DNA
gcgttggtggtatagtggtaagcatagctgccttccaagcagt

SEQ ID NO: 6139 - DNA, 48 bp, synthetic construct
  misc_feature 1..48: note = Probe
  source 1..48: mol_type = other DNA
gcgttggtggtatagtggtaagcatagctgccttccaagcagttgacc

SEQ ID NO: 6140 - DNA, 49 bp, synthetic construct
  misc_feature 1..49: note = Probe
  source 1..49: mol_type = other DNA
gcgttggtggtatagtggtaagcatagctgccttccaagcagttgaccc

SEQ ID NO: 6141 - DNA, 20 bp, synthetic construct
  misc_feature 1..20: note = Probe
  source 1..20: mol_type = other DNA
gcgttggtggtatagtggtg

SEQ ID NO: 6142 - DNA, 22 bp, synthetic construct
  misc_feature 1..22: note = Probe
  source 1..22: mol_type = other DNA
gcgttggtggtatagtggtgag

SEQ ID NO: 6143 - DNA, 23 bp, synthetic construct
  misc_feature 1..23: note = Probe
  source 1..23: mol_type = other DNA
gcgttggtggtatagtggtgagc

SEQ ID NO: 6144 - DNA, 24 bp, synthetic construct
  misc_feature 1..24: note = Probe
  source 1..24: mol_type = other DNA
gcgttggtggtatagtggtgagca

SEQ ID NO: 6145 - DNA, 25 bp, synthetic construct
  misc_feature 1..25: note = Probe
  source 1..25: mol_type = other DNA
gcgttggtggtatagtggtgagcat

SEQ ID NO: 6146 - DNA, 26 bp, synthetic construct
  misc_feature 1..26: note = Probe
  source 1..26: mol_type = other DNA
gcgttggtggtatagtggtgagcata

SEQ ID NO: 6147 - DNA, 27 bp, synthetic construct
  misc_feature 1..27: note = Probe
  source 1..27: mol_type = other DNA
gcgttggtggtatagtggtgagcatag

SEQ ID NO: 6148 - DNA, 28 bp, synthetic construct
  misc_feature 1..28: note = Probe
  source 1..28: mol_type = other DNA
gcgttggtggtatagtggtgagcatagc

SEQ ID NO: 6149 - DNA, 29 bp, synthetic construct
  misc_feature 1..29: note = Probe
  source 1..29: mol_type = other DNA
gcgttggtggtatagtggtgagcatagct

SEQ ID NO: 6150 - DNA, 30 bp, synthetic construct
  misc_feature 1..30: note = Probe
  source 1..30: mol_type = other DNA
gcgttggtggtatagtggtgagcatagctg

SEQ ID NO: 6151 - DNA, 31 bp, synthetic construct
  misc_feature 1..31: note = Probe
  source 1..31: mol_type = other DNA
gcgttggtggtatagtggtgagcatagctgc

SEQ ID NO: 6152 - DNA, 32 bp, synthetic construct
  misc_feature 1..32: note = Probe
  source 1..32: mol_type = other DNA
gcgttggtggtatagtggtgagcatagctgcc

SEQ ID NO: 6153 - DNA, 33 bp, synthetic construct
  misc_feature 1..33: note = Probe
  source 1..33: mol_type = other DNA
gcgttggtggtatagtggtgagcatagctgcct

SEQ ID NO: 6154 - DNA, 34 bp, synthetic construct
  misc_feature 1..34: note = Probe
  source 1..34: mol_type = other DNA
gcgttggtggtatagtggtgagcatagctgcctt

SEQ ID NO: 6155 - DNA, 35 bp, synthetic construct
  misc_feature 1..35: note = Probe
  source 1..35: mol_type = other DNA
gcgttggtggtatagtggtgagcatagctgccttc

SEQ ID NO: 6156 - DNA, 36 bp, synthetic construct
  misc_feature 1..36: note = Probe
  source 1..36: mol_type = other DNA
gcgttggtggtatagtggtgagcatagctgccttcc

SEQ ID NO: 6157 - DNA, 37 bp, synthetic construct
  misc_feature 1..37: note = Probe
  source 1..37: mol_type = other DNA
gcgttggtggtatagtggtgagcatagctgccttcca

SEQ ID NO: 6158 - DNA, 39 bp, synthetic construct
  misc_feature 1..39: note = Probe
  source 1..39: mol_type = other DNA
gcgttggtggtatagtggtgagcatagctgccttccaag

SEQ ID NO: 6159 - DNA, 43 bp, synthetic construct
  misc_feature 1..43: note = Probe
  source 1..43: mol_type = other DNA
gcgttggtggtatagtggtgagcatagctgccttccaagcagt

SEQ ID NO: 6160 - DNA, 45 bp, synthetic construct
  misc_feature 1..45: note = Probe
  source 1..45: mol_type = other DNA
gcgttggtggtatagtggtgagcatagctgccttccaagcagttg

SEQ ID NO: 6161 - DNA, 46 bp, synthetic construct
  misc_feature 1..46: note = Probe
  source 1..46: mol_type = other DNA
gcgttggtggtatagtggtgagcatagctgccttccaagcagttga

SEQ ID NO: 6162 - DNA, 47 bp, synthetic construct
  misc_feature 1..47: note = Probe
  source 1..47: mol_type = other DNA
gcgttggtggtatagtggtgagcatagctgccttccaagcagttgac

SEQ ID NO: 6163 - DNA, 48 bp, synthetic construct
  misc_feature 1..48: note = Probe
  source 1..48: mol_type = other DNA
gcgttggtggtatagtggtgagcatagctgccttccaagcagttgacc

SEQ ID NO: 6164 - DNA, 49 bp, synthetic construct
  misc_feature 1..49: note = Probe
  source 1..49: mol_type = other DNA
gcgttggtggtatagtggtgagcatagctgccttccaagcagttgaccc

SEQ ID NO: 6165 - DNA, 23 bp, synthetic construct
  misc_feature 1..23: note = Probe
  source 1..23: mol_type = other DNA
gcgttggtggtatagtggttagc

SEQ ID NO: 6166 - DNA, 24 bp, synthetic construct
  misc_feature 1..24: note = Probe
  source 1..24: mol_type = other DNA
gcgttggtggtatagtggttagca

SEQ ID NO: 6167 - DNA, 25 bp, synthetic construct
  misc_feature 1..25: note = Probe
  source 1..25: mol_type = other DNA
gcgttggtggtatagtggttagcat

SEQ ID NO: 6168 - DNA, 26 bp, synthetic construct
  misc_feature 1..26: note = Probe
  source 1..26: mol_type = other DNA
gcgttggtggtatagtggttagcata

SEQ ID NO: 6169 - DNA, 27 bp, synthetic construct
  misc_feature 1..27: note = Probe
  source 1..27: mol_type = other DNA
gcgttggtggtatagtggttagcatag

SEQ ID NO: 6170 - DNA, 28 bp, synthetic construct
  misc_feature 1..28: note = Probe
  source 1..28: mol_type = other DNA
gcgttggtggtatagtggttagcatagc

SEQ ID NO: 6171 - DNA, 29 bp, synthetic construct
  misc_feature 1..29: note = Probe
  source 1..29: mol_type = other DNA
gcgttggtggtatagtggttagcatagct

SEQ ID NO: 6172 - DNA, 30 bp, synthetic construct
  misc_feature 1..30: note = Probe
  source 1..30: mol_type = other DNA
gcgttggtggtatagtggttagcatagctg

SEQ ID NO: 6173 - DNA, 31 bp, synthetic construct
  misc_feature 1..31: note = Probe
  source 1..31: mol_type = other DNA
gcgttggtggtatagtggttagcatagctgc

SEQ ID NO: 6174 - DNA, 32 bp, synthetic construct
  misc_feature 1..32: note = Probe
  source 1..32: mol_type = other DNA
gcgttggtggtatagtggttagcatagctgcc

SEQ ID NO: 6175 - DNA, 33 bp, synthetic construct
  misc_feature 1..33: note = Probe
  source 1..33: mol_type = other DNA
gcgttggtggtatagtggttagcatagctgcct

SEQ ID NO: 6176 - DNA, 34 bp, synthetic construct
  misc_feature 1..34: note = Probe
  source 1..34: mol_type = other DNA
gcgttggtggtatagtggttagcatagctgcctt

SEQ ID NO: 6177 - DNA, 35 bp, synthetic construct
  misc_feature 1..35: note = Probe
  source 1..35: mol_type = other DNA
gcgttggtggtatagtggttagcatagctgccttc

SEQ ID NO: 6178 - DNA, 36 bp, synthetic construct
  misc_feature 1..36: note = Probe
  source 1..36: mol_type = other DNA
gcgttggtggtatagtggttagcatagctgccttcc

SEQ ID NO: 6179 - DNA, 37 bp, synthetic construct
  misc_feature 1..37: note = Probe
  source 1..37: mol_type = other DNA
gcgttggtggtatagtggttagcatagctgccttcca

SEQ ID NO: 6180 - DNA, 39 bp, synthetic construct
  misc_feature 1..39: note = Probe
  source 1..39: mol_type = other DNA
gcgttggtggtatagtggttagcatagctgccttccaag

SEQ ID NO: 6181 - DNA, 40 bp, synthetic construct
  misc_feature 1..40: note = Probe
  source 1..40: mol_type = other DNA
gcgttggtggtatagtggttagcatagctgccttccaagc

SEQ ID NO: 6182 - DNA, 43 bp, synthetic construct
  misc_feature 1..43: note = Probe
  source 1..43: mol_type = other DNA
gcgttggtggtatagtggttagcatagctgccttccaagcagt

SEQ ID NO: 6183 - DNA, 47 bp, synthetic construct
  misc_feature 1..47: note = Probe
  source 1..47: mol_type = other DNA
gcgttggtggtatagtggttagcatagctgccttccaagcagttgac

SEQ ID NO: 6184 - DNA, 48 bp, synthetic construct
  misc_feature 1..48: note = Probe
  source 1..48: mol_type = other DNA
gcgttggtggtatagtggttagcatagctgccttccaagcagttgacc

SEQ ID NO: 6185 - DNA, 49 bp, synthetic construct
  misc_feature 1..49: note = Probe
  source 1..49: mol_type = other DNA
gcgttggtggtatagtggttagcatagctgccttccaagcagttgaccc

SEQ ID NO: 6186 - DNA, 27 bp, synthetic construct
  misc_feature 1..27: note = Probe
  source 1..27: mol_type = other DNA
gcgttggtggtttagtggtagaattct

SEQ ID NO: 6187 - DNA, 31 bp, synthetic construct
  misc_feature 1..31: note = Probe
  source 1..31: mol_type = other DNA
gcgttggtggtttagtggtagaattctcgcc

SEQ ID NO: 6188 - DNA, 32 bp, synthetic construct
  misc_feature 1..32: note = Probe
  source 1..32: mol_type = other DNA
gcgttggtggtttagtggtagaattctcgcct

SEQ ID NO: 6189 - DNA, 16 bp, synthetic construct
  misc_feature 1..16: note = Probe
  source 1..16: mol_type = other DNA
gctaaacctagcccca

SEQ ID NO: 6190 - DNA, 17 bp, synthetic construct
  misc_feature 1..17: note = Probe
  source 1..17: mol_type = other DNA
gctaaacctagccccaa

SEQ ID NO: 6191 - DNA, 18 bp, synthetic construct
  misc_feature 1..18: note = Probe
  source 1..18: mol_type = other DNA
gctaaacctagccccaaa

SEQ ID NO: 6192 - DNA, 19 bp, synthetic construct
  misc_feature 1..19: note = Probe
  source 1..19: mol_type = other DNA
gctaaacctagccccaaac

SEQ ID NO: 6193 - DNA, 20 bp, synthetic construct
  misc_feature 1..20: note = Probe
  source 1..20: mol_type = other DNA
gctaaacctagccccaaacc

SEQ ID NO: 6194 - DNA, 21 bp, synthetic construct
  misc_feature 1..21: note = Probe
  source 1..21: mol_type = other DNA
gctaaacctagccccaaaccc

SEQ ID NO: 6195 - DNA, 22 bp, synthetic construct
  misc_feature 1..22: note = Probe
  source 1..22: mol_type = other DNA
gctaaacctagccccaaaccca

SEQ ID NO: 6196 - DNA, 23 bp, synthetic construct
  misc_feature 1..23: note = Probe
  source 1..23: mol_type = other DNA
gctaaacctagccccaaacccac

SEQ ID NO: 6197 - DNA, 24 bp, synthetic construct
  misc_feature 1..24: note = Probe
  source 1..24: mol_type = other DNA
gctaaacctagccccaaacccact

SEQ ID NO: 6198 - DNA, 25 bp, synthetic construct
  misc_feature 1..25: note = Probe
  source 1..25: mol_type = other DNA
gctaaacctagccccaaacccactc

SEQ ID NO: 6199 - DNA, 26 bp, synthetic construct
  misc_feature 1..26: note = Probe
  source 1..26: mol_type = other DNA
gctaaacctagccccaaacccactcc

SEQ ID NO: 6200 - DNA, 27 bp, synthetic construct
  misc_feature 1..27: note = Probe
  source 1..27: mol_type = other DNA
gctaaacctagccccaaacccactcca

SEQ ID NO: 6201 - DNA, 28 bp, synthetic construct
  misc_feature 1..28: note = Probe
  source 1..28: mol_type = other DNA
gctaaacctagccccaaacccactccac

SEQ ID NO: 6202 - DNA, 29 bp, synthetic construct
  misc_feature 1..29: note = Probe
  source 1..29: mol_type = other DNA
gctaaacctagccccaaacccactccacc

SEQ ID NO: 6203 - DNA, 30 bp, synthetic construct
  misc_feature 1..30: note = Probe
  source 1..30: mol_type = other DNA
gctaaacctagccccaaacccactccacct

SEQ ID NO: 6204 - DNA, 23 bp, synthetic construct
  misc_feature 1..23: note = Probe
  source 1..23: mol_type = other DNA
gctaaataagctatcgggcccat

SEQ ID NO: 6205 - DNA, 24 bp, synthetic construct
  misc_feature 1..24: note = Probe
  source 1..24: mol_type = other DNA
gctaaataagctatcgggcccata

SEQ ID NO: 6206 - DNA, 25 bp, synthetic construct
  misc_feature 1..25: note = Probe
  source 1..25: mol_type = other DNA
gctaaataagctatcgggcccatac

SEQ ID NO: 6207 - DNA, 29 bp, synthetic construct
  misc_feature 1..29: note = Probe
  source 1..29: mol_type = other DNA
gctaaataagctatcgggcccataccccg

SEQ ID NO: 6208 - DNA, 31 bp, synthetic construct
  misc_feature 1..31: note = Probe
  source 1..31: mol_type = other DNA
gctaaataagctatcgggcccataccccgaa

SEQ ID NO: 6209 - DNA, 46 bp, synthetic construct
  misc_feature 1..46: note = Probe
  source 1..46: mol_type = other DNA
gctaaataagctatcgggcccataccccgaaaatgttggttatacc

SEQ ID NO: 6210 - DNA, 49 bp, synthetic construct
  misc_feature 1..49: note = Probe
  source 1..49: mol_type = other DNA
gctaaataagctatcgggcccataccccgaaaatgttggttataccctt

SEQ ID NO: 6211 - DNA, 50 bp, synthetic construct
  misc_feature 1..50: note = Probe
  source 1..50: mol_type = other DNA
gctaaataagctatcgggcccataccccgaaaatgttggttatacccttc

SEQ ID NO: 6212 - DNA, 23 bp, synthetic construct
  misc_feature 1..23: note = Probe
  source 1..23: mol_type = other DNA
gctaaatcctatatatcttaatg

SEQ ID NO: 6213 - DNA, 17 bp, synthetic construct
  misc_feature 1..17: note = Probe
  source 1..17: mol_type = other DNA
gctaactcatgccccca

SEQ ID NO: 6214 - DNA, 23 bp, synthetic construct
  misc_feature 1..23: note = Probe
  source 1..23: mol_type = other DNA
gctaactcatgcccccatgtcta

SEQ ID NO: 6215 - DNA, 24 bp, synthetic construct
  misc_feature 1..24: note = Probe
  source 1..24: mol_type = other DNA
gctaactcatgcccccatgtctaa

SEQ ID NO: 6216 - DNA, 26 bp, synthetic construct
  misc_feature 1..26: note = Probe
  source 1..26: mol_type = other DNA
gctaactcatgcccccatgtctaaca

SEQ ID NO: 6217 - DNA, 34 bp, synthetic construct
  misc_feature 1..34: note = Probe
  source 1..34: mol_type = other DNA
gctaactcatgcccccatgtctaacaacatggct

SEQ ID NO: 6218 - DNA, 35 bp, synthetic construct
  misc_feature 1..35: note = Probe
  source 1..35: mol_type = other DNA
gctaactcatgcccccatgtctaacaacatggctt

SEQ ID NO: 6219 - DNA, 36 bp, synthetic construct
  misc_feature 1..36: note = Probe
  source 1..36: mol_type = other DNA
gctaactcatgcccccatgtctaacaacatggcttt

SEQ ID NO: 6220 - DNA, 37 bp, synthetic construct
  misc_feature 1..37: note = Probe
  source 1..37: mol_type = other DNA
gctaactcatgcccccatgtctaacaacatggctttc

SEQ ID NO: 6221 - DNA, 38 bp, synthetic construct
  misc_feature 1..38: note = Probe
  source 1..38: mol_type = other DNA
gctaactcatgcccccatgtctaacaacatggctttct

SEQ ID NO: 6222 - DNA, 39 bp, synthetic construct
  misc_feature 1..39: note = Probe
  source 1..39: mol_type = other DNA
gctaactcatgcccccatgtctaacaacatggctttctc

SEQ ID NO: 6223 - DNA, 40 bp, synthetic construct
  misc_feature 1..40: note = Probe
  source 1..40: mol_type = other DNA
gctaactcatgcccccatgtctaacaacatggctttctca

SEQ ID NO: 6224 - DNA, 41 bp, synthetic construct
  misc_feature 1..41: note = Probe
  source 1..41: mol_type = other DNA
gctaactcatgcccccatgtctaacaacatggctttctcaa

SEQ ID NO: 6225 - DNA, 42 bp, synthetic construct
  misc_feature 1..42: note = Probe
  source 1..42: mol_type = other DNA
gctaactcatgcccccatgtctaacaacatggctttctcaac

SEQ ID NO: 6226 - DNA, 43 bp, synthetic construct
  misc_feature 1..43: note = Probe
  source 1..43: mol_type = other DNA
gctaactcatgcccccatgtctaacaacatggctttctcaact

SEQ ID NO: 6227 - DNA, 50 bp, synthetic construct
  misc_feature 1..50: note = Probe
  source 1..50: mol_type = other DNA
gctaactcatgcccccatgtctaacaacatggctttctcaacttttaaag

SEQ ID NO: 6228 - DNA, 50 bp, synthetic construct
  misc_feature 1..50: note = Probe
  source 1..50: mol_type = other DNA
gctaacttagcattaaccttttaagttaaagattaagagaaccaacacct

SEQ ID NO: 6229 - DNA, 23 bp, synthetic construct
  misc_feature 1..23: note = Probe
  source 1..23: mol_type = other DNA
gctaaggaagtcctgtgctcagt

SEQ ID NO: 6230 - DNA, 24 bp, synthetic construct
  misc_feature 1..24: note = Probe
  source 1..24: mol_type = other DNA
gctaaggaagtcctgtgctcagtt

SEQ ID NO: 6231 - DNA, 16 bp, synthetic construct
  misc_feature 1..16: note = Probe
  source 1..16: mol_type = other DNA
gctaatggtggagtta

SEQ ID NO: 6232 - DNA, 33 bp, synthetic construct
  misc_feature 1..33: note = Probe
  source 1..33: mol_type = other DNA
gctaatggtggagttaaagactttttctctgat

SEQ ID NO: 6233 - DNA, 34 bp, synthetic construct
  misc_feature 1..34: note = Probe
  source 1..34: mol_type = other DNA
gctaatggtggagttaaagactttttctctgatt

SEQ ID NO: 6234 - DNA, 35 bp, synthetic construct
  misc_feature 1..35: note = Probe
  source 1..35: mol_type = other DNA
gctaatggtggagttaaagactttttctctgattt

SEQ ID NO: 6235 - DNA, 37 bp, synthetic construct
  misc_feature 1..37: note = Probe
  source 1..37: mol_type = other DNA
gctaatggtggagttaaagactttttctctgatttgt

SEQ ID NO: 6236 - DNA, 38 bp, synthetic construct
  misc_feature 1..38: note = Probe
  source 1..38: mol_type = other DNA
gctaatggtggagttaaagactttttctctgatttgtc

SEQ ID NO: 6237 - DNA, 39 bp, synthetic construct
  misc_feature 1..39: note = Probe
  source 1..39: mol_type = other DNA
gctaatggtggagttaaagactttttctctgatttgtcc

SEQ ID NO: 6238 - DNA, 40 bp, synthetic construct
  misc_feature 1..40: note = Probe
  source 1..40: mol_type = other DNA
gctaatggtggagttaaagactttttctctgatttgtcct

SEQ ID NO: 6239 - DNA, 41 bp, synthetic construct
  misc_feature 1..41: note = Probe
  source 1..41: mol_type = other DNA
gctaatggtggagttaaagactttttctctgatttgtcctt

SEQ ID NO: 6240 - DNA, 42 bp, synthetic construct
  misc_feature 1..42: note = Probe
  source 1..42: mol_type = other DNA
gctaatggtggagttaaagactttttctctgatttgtccttg

SEQ ID NO: 6241 - DNA, 43 bp, synthetic construct
  misc_feature 1..43: note = Probe
  source 1..43: mol_type = other DNA
gctaatggtggagttaaagactttttctctgatttgtccttgg

SEQ ID NO: 6242 - DNA, 22 bp, synthetic construct
  misc_feature 1..22: note = Probe
  source 1..22: mol_type = other DNA
gctacttttaaattctgacctc

SEQ ID NO: 6243 - DNA, 23 bp, synthetic construct
  misc_feature 1..23: note = Probe
  source 1..23: mol_type = other DNA
gctacttttaaattctgacctca

SEQ ID NO: 6244 - DNA, 24 bp, synthetic construct
  misc_feature 1..24: note = Probe
  source 1..24: mol_type = other DNA
gctacttttaaattctgacctcaa

SEQ ID NO: 6245 - DNA, 27 bp, synthetic construct
  misc_feature 1..27: note = Probe
  source 1..27: mol_type = other DNA
gctagctcagtcggtagagcatgagac

SEQ ID NO: 6246 - DNA, 29 bp, synthetic construct
  misc_feature 1..29: note = Probe
  source 1..29: mol_type = other DNA
gctagctcagtcggtagagcatgagactc

SEQ ID NO: 6247 - DNA, 31 bp, synthetic construct
  misc_feature 1..31: note = Probe
  source 1..31: mol_type = other DNA
gctagctcagtcggtagagcatgagactctt

SEQ ID NO: 6248 - DNA, 27 bp, synthetic construct
  misc_feature 1..27: note = Probe
  source 1..27: mol_type = other DNA
gctagctcagtcggtagagcatgggac

SEQ ID NO: 6249 - DNA, 28 bp, synthetic construct
  misc_feature 1..28: note = Probe
  source 1..28: mol_type = other DNA
gctagctcagtcggtagagcatgggact

SEQ ID NO: 6250 - DNA, 17 bp, synthetic construct
  misc_feature 1..17: note = Probe
  source 1..17: mol_type = other DNA
gctatccattggtctta

SEQ ID NO: 6251 - DNA, 24 bp, synthetic construct
  misc_feature 1..24: note = Probe
  source 1..24: mol_type = other DNA
gctatccattggtcttaggcccca

SEQ ID NO: 6252 - DNA, 25 bp, synthetic construct
  misc_feature 1..25: note = Probe
  source 1..25: mol_type = other DNA
gctatccattggtcttaggccccaa

SEQ ID NO: 6253 - DNA, 18 bp, synthetic construct
  misc_feature 1..18: note = Probe
  source 1..18: mol_type = other DNA
gctatcgggcccataccc

SEQ ID NO: 6254 - DNA, 20 bp, synthetic construct
  misc_feature 1..20: note = Probe
  source 1..20: mol_type = other DNA
gctatcgggcccataccccg

SEQ ID NO: 6255 - DNA, 21 bp, synthetic construct
  misc_feature 1..21: note = Probe
  source 1..21: mol_type = other DNA
gctatcgggcccataccccga

SEQ ID NO: 6256 - DNA, 22 bp, synthetic construct
  misc_feature 1..22: note = Probe
  source 1..22: mol_type = other DNA
gctatcgggcccataccccgaa

SEQ ID NO: 6257 - DNA, 23 bp, synthetic construct
  misc_feature 1..23: note = Probe
  source 1..23: mol_type = other DNA
gctatcgggcccataccccgaaa

SEQ ID NO: 6258 - DNA, 24 bp, synthetic construct
  misc_feature 1..24: note = Probe
  source 1..24: mol_type = other DNA
gctatcgggcccataccccgaaaa

SEQ ID NO: 6259 - DNA, 25 bp, synthetic construct
  misc_feature 1..25: note = Probe
  source 1..25: mol_type = other DNA
gctatcgggcccataccccgaaaat

SEQ ID NO: 6260 - DNA, 26 bp, synthetic construct
  misc_feature 1..26: note = Probe
  source 1..26: mol_type = other DNA
gctatcgggcccataccccgaaaatg

SEQ ID NO: 6261 - DNA, 27 bp, synthetic construct
  misc_feature 1..27: note = Probe
  source 1..27: mol_type = other DNA
gctatcgggcccataccccgaaaatgt

SEQ ID NO: 6262 - DNA, 28 bp, synthetic construct
  misc_feature 1..28: note = Probe
  source 1..28: mol_type = other DNA
gctatcgggcccataccccgaaaatgtt

SEQ ID NO: 6263 - DNA, 29 bp, synthetic construct
  misc_feature 1..29: note = Probe
  source 1..29: mol_type = other DNA
gctatcgggcccataccccgaaaatgttg

SEQ ID NO: 6264 - DNA, 30 bp, synthetic construct
  misc_feature 1..30: note = Probe
  source 1..30: mol_type = other DNA
gctatcgggcccataccccgaaaatgttgg

SEQ ID NO: 6265 - DNA, 31 bp, synthetic construct
  misc_feature 1..31: note = Probe
  source 1..31: mol_type = other DNA
gctatcgggcccataccccgaaaatgttggt

SEQ ID NO: 6266 - DNA, 33 bp, synthetic construct
  misc_feature 1..33: note = Probe
  source 1..33: mol_type = other DNA
gctatcgggcccataccccgaaaatgttggtta

SEQ ID NO: 6267 - DNA, 46 bp, synthetic construct
  misc_feature 1..46: note = Probe
  source 1..46: mol_type = other DNA
gctatcgggcccataccccgaaaatgttggttatacccttcccgta

SEQ ID NO: 6268 - DNA, 48 bp, synthetic construct
  misc_feature 1..48: note = Probe
  source 1..48: mol_type = other DNA
gctatcgggcccataccccgaaaatgttggttatacccttcccgtact

SEQ ID NO: 6269 - DNA, 50 bp, synthetic construct
  misc_feature 1..50: note = Probe
  source 1..50: mol_type = other DNA
gctatcgggcccataccccgaaaatgttggttatacccttcccgtactaa

SEQ ID NO: 6270 - DNA, 17 bp, synthetic construct
  misc_feature 1..17: note = Probe
  source 1..17: mol_type = other DNA
gctcacaagaactgcta

SEQ ID NO: 6271 - DNA, 25 bp, synthetic construct
  misc_feature 1..25: note = Probe
  source 1..25: mol_type = other DNA
gctcacaagaactgctaactcatgc

SEQ ID NO: 6272 - DNA, 27 bp, synthetic construct
  misc_feature 1..27: note = Probe
  source 1..27: mol_type = other DNA
gctcacaagaactgctaactcatgccc

SEQ ID NO: 6273 - DNA, 33 bp, synthetic construct
  misc_feature 1..33: note = Probe
  source 1..33: mol_type = other DNA
gctcacaagaactgctaactcatgcccccatgt

SEQ ID NO: 6274 - DNA, 49 bp, synthetic construct
  misc_feature 1..49: note = Probe
  source 1..49: mol_type = other DNA
gctcacaagaactgctaactcatgcccccatgtctaacaacatggcttt

SEQ ID NO: 6275 - DNA, 17 bp, synthetic construct
  misc_feature 1..17: note = Probe
  source 1..17: mol_type = other DNA
gctcacatcaccccata

SEQ ID NO: 6276 - DNA, 21 bp, synthetic construct
  misc_feature 1..21: note = Probe
  source 1..21: mol_type = other DNA
gctcacatcaccccataaaca

SEQ ID NO: 6277 - DNA, 23 bp, synthetic construct
  misc_feature 1..23: note = Probe
  source 1..23: mol_type = other DNA
gctcacatcaccccataaacaaa

SEQ ID NO: 6278 - DNA, 24 bp, synthetic construct
  misc_feature 1..24: note = Probe
  source 1..24: mol_type = other DNA
gctcacatcaccccataaacaaat

SEQ ID NO: 6279 - DNA, 20 bp, synthetic construct
  misc_feature 1..20: note = Probe
  source 1..20: mol_type = other DNA
gctccagtggcgcaatcggt

SEQ ID NO: 6280 - DNA, 33 bp, synthetic construct
  misc_feature 1..33: note = Probe
  source 1..33: mol_type = other DNA
gctccagtggcgcaatcggttagcgcgcggtac

SEQ ID NO: 6281 - DNA, 29 bp, synthetic construct
  misc_feature 1..29: note = Probe
  source 1..29: mol_type = other DNA
gctccgaggtgattttcatattgaattgc

SEQ ID NO: 6282 - DNA, 31 bp, synthetic construct
  misc_feature 1..31: note = Probe
  source 1..31: mol_type = other DNA
gctccgaggtgattttcatattgaattgcaa

SEQ ID NO: 6283 - DNA, 32 bp, synthetic construct
  misc_feature 1..32: note = Probe
  source 1..32: mol_type = other DNA
gctccgaggtgattttcatattgaattgcaaa

SEQ ID NO: 6284 - DNA, 34 bp, synthetic construct
  misc_feature 1..34: note = Probe
  source 1..34: mol_type = other DNA
gctccgaggtgattttcatattgaattgcaaatt

SEQ ID NO: 6285 - DNA, 46 bp, synthetic construct
  misc_feature 1..46: note = Probe
  source 1..46: mol_type = other DNA
gctccgaggtgattttcatattgaattgcaaattcgaagaagcagc

SEQ ID NO: 6286 - DNA, 50 bp, synthetic construct
  misc_feature 1..50: note = Probe
  source 1..50: mol_type = other DNA
gctccgaggtgattttcatattgaattgcaaattcgaagaagcagcttca

SEQ ID NO: 6287 - DNA, 45 bp, synthetic construct
  misc_feature 1..45: note = Probe
  source 1..45: mol_type = other DNA
gctctcaccgccgcggcccgggttcgattcccggtcagggaagtc

SEQ ID NO: 6288 - DNA, 31 bp, synthetic construct
  misc_feature 1..31: note = Probe
  source 1..31: mol_type = other DNA
gctgcgtgttcgaatcacgtcggggtcaaac

SEQ ID NO: 6289 - DNA, 33 bp, synthetic construct
  misc_feature 1..33: note = Probe
  source 1..33: mol_type = other DNA
gctggggattgtgggttcgagtcccatctgggt

SEQ ID NO: 6290 - DNA, 38 bp, synthetic construct
  misc_feature 1..38: note = Probe
  source 1..38: mol_type = other DNA
gctggggattgtgggttcgagtcccatctgggtcgcgt

SEQ ID NO: 6291 - DNA, 17 bp, synthetic construct
  misc_feature 1..17: note = Probe
  source 1..17: mol_type = other DNA
gctggtgtagtggtatc

SEQ ID NO: 6292 - DNA, 23 bp, synthetic construct
  misc_feature 1..23: note = Probe
  source 1..23: mol_type = other DNA
gctggtgtagtggtatcatgcaa

SEQ ID NO: 6293 - DNA, 24 bp, synthetic construct
  misc_feature 1..24: note = Probe
  source 1..24: mol_type = other DNA
gctggtgtagtggtatcatgcaag

SEQ ID NO: 6294 - DNA, 25 bp, synthetic construct
  misc_feature 1..25: note = Probe
  source 1..25: mol_type = other DNA
gctggtgtagtggtatcatgcaaga

SEQ ID NO: 6295 - DNA, 27 bp, synthetic construct
  misc_feature 1..27: note = Probe
  source 1..27: mol_type = other DNA
gctggtgtagtggtatcatgcaagatt

SEQ ID NO: 6296 - DNA, 28 bp, synthetic construct
  misc_feature 1..28: note = Probe
  source 1..28: mol_type = other DNA
gctggtgtagtggtatcatgcaagattc

SEQ ID NO: 6297 - DNA, 24 bp, synthetic construct
  misc_feature 1..24: note = Probe
  source 1..24: mol_type = other DNA
gctgtgatggccgagtggttaagg

SEQ ID NO: 6298 - DNA, 25 bp, synthetic construct
  misc_feature 1..25: note = Probe
  source 1..25: mol_type = other DNA
gctgtgatggccgagtggttaaggc

SEQ ID NO: 6299 - DNA, 40 bp, synthetic construct
  misc_feature 1..40: note = Probe
  source 1..40: mol_type = other DNA
gctgttaactaagtgtttgtgggtttaagtcccattggtc

SEQ ID NO: 6300 - DNA, 44 bp, synthetic construct
  misc_feature 1..44: note = Probe
  source 1..44: mol_type = other DNA
gctgttaactaagtgtttgtgggtttaagtcccattggtctagt

SEQ ID NO: 6301 - DNA, 45 bp, synthetic construct
  misc_feature 1..45: note = Probe
  source 1..45: mol_type = other DNA
gctgttaactaagtgtttgtgggtttaagtcccattggtctagta

SEQ ID NO: 6302 - DNA, 46 bp, synthetic construct
  misc_feature 1..46: note = Probe
  source 1..46: mol_type = other DNA
gctgttaactaagtgtttgtgggtttaagtcccattggtctagtaa

SEQ ID NO: 6303 - DNA, 24 bp, synthetic construct
  misc_feature 1..24: note = Probe
  source 1..24: mol_type = other DNA
gctgttacagaaattaagtattgc

SEQ ID NO: 6304 - DNA, 25 bp, synthetic construct
  misc_feature 1..25: note = Probe
  source 1..25: mol_type = other DNA
gctgttacagaaattaagtattgca

SEQ ID NO: 6305 - DNA, 27 bp, synthetic construct
  misc_feature 1..27: note = Probe
  source 1..27: mol_type = other DNA
gctgttacagaaattaagtattgcaac

SEQ ID NO: 6306 - DNA, 28 bp, synthetic construct
  misc_feature 1..28: note = Probe
  source 1..28: mol_type = other DNA
gctgttacagaaattaagtattgcaact

SEQ ID NO: 6307 - DNA, 29 bp, synthetic construct
  misc_feature 1..29: note = Probe
  source 1..29: mol_type = other DNA
gctgttacagaaattaagtattgcaactt

SEQ ID NO: 6308 - DNA, 30 bp, synthetic construct
  misc_feature 1..30: note = Probe
  source 1..30: mol_type = other DNA
gctgttacagaaattaagtattgcaactta

SEQ ID NO: 6309 - DNA, 18 bp, synthetic construct
  misc_feature 1..18: note = Probe
  source 1..18: mol_type = other DNA
gcttaaacccccttattt

SEQ ID NO: 6310 - DNA, 19 bp, synthetic construct
  misc_feature 1..19: note = Probe
  source 1..19: mol_type = other DNA
gcttaaacccccttatttc

SEQ ID NO: 6311 - DNA, 21 bp, synthetic construct
  misc_feature 1..21: note = Probe
  source 1..21: mol_type = other DNA
gcttaaacccccttatttcta

SEQ ID NO: 6312 - DNA, 22 bp, synthetic construct
  misc_feature 1..22: note = Probe
  source 1..22: mol_type = other DNA
gcttaaacccccttatttctag

SEQ ID NO: 6313 - DNA, 23 bp, synthetic construct
  misc_feature 1..23: note = Probe
  source 1..23: mol_type = other DNA
gcttaaacccccttatttctagg

SEQ ID NO: 6314 - DNA, 24 bp, synthetic construct
  misc_feature 1..24: note = Probe
  source 1..24: mol_type = other DNA
gcttaaacccccttatttctagga

SEQ ID NO: 6315 - DNA, 23 bp, synthetic construct
  misc_feature 1..23: note = Probe
  source 1..23: mol_type = other DNA
gcttacgaccccttatttaccga

SEQ ID NO: 6316 - DNA, 17 bp, synthetic construct
  misc_feature 1..17: note = Probe
  source 1..17: mol_type = other DNA
gcttcaaacctgccggg

SEQ ID NO: 6317 - DNA, 20 bp, synthetic construct
  misc_feature 1..20: note = Probe
  source 1..20: mol_type = other DNA
gcttcaaacctgccggggct

SEQ ID NO: 6318 - DNA, 21 bp, synthetic construct
  misc_feature 1..21: note = Probe
  source 1..21: mol_type = other DNA
gcttcaaacctgccggggctt

SEQ ID NO: 6319 - DNA, 22 bp, synthetic construct
  misc_feature 1..22: note = Probe
  source 1..22: mol_type = other DNA
gcttcaaacctgccggggcttc

SEQ ID NO: 6320 - DNA, 23 bp, synthetic construct
  misc_feature 1..23: note = Probe
  source 1..23: mol_type = other DNA
gcttcaaacctgccggggcttct

SEQ ID NO: 6321 - DNA, 24 bp, synthetic construct
  misc_feature 1..24: note = Probe
  source 1..24: mol_type = other DNA
gcttcaaacctgccggggcttctc

SEQ ID NO: 6322 - DNA, 33 bp, synthetic construct
  misc_feature 1..33: note = Probe
  source 1..33: mol_type = other DNA
gcttctgtaatgtagtggttatcacattcgcct

SEQ ID NO: 6323 - DNA, 17 bp, synthetic construct
  misc_feature 1..17: note = Probe
  source 1..17: mol_type = other DNA
gcttctgtagtgtagtg

SEQ ID NO: 6324 - DNA, 37 bp, synthetic construct
  misc_feature 1..37: note = Probe
  source 1..37: mol_type = other DNA
gcttctgtagtgtagtggttatcacgttcgcctcaca

SEQ ID NO: 6325 - DNA, 15 bp, synthetic construct
  misc_feature 1..15: note = Probe
  source 1..15: mol_type = other DNA
gctttggctgtgggg

SEQ ID NO: 6326 - DNA, 27 bp, synthetic construct
  misc_feature 1..27: note = Probe
  source 1..27: mol_type = other DNA
gctttggggggttcgattccttccttt

SEQ ID NO: 6327 - DNA, 28 bp, synthetic construct
  misc_feature 1..28: note = Probe
  source 1..28: mol_type = other DNA
gctttggggggttcgattccttcctttt

SEQ ID NO: 6328 - DNA, 31 bp, synthetic construct
  misc_feature 1..31: note = Probe
  source 1..31: mol_type = other DNA
gctttggggggttcgattccttccttttttg

SEQ ID NO: 6329 - DNA, 32 bp, synthetic construct
  misc_feature 1..32: note = Probe
  source 1..32: mol_type = other DNA
gctttggggggttcgattccttccttttttgt

SEQ ID NO: 6330 - DNA, 33 bp, synthetic construct
  misc_feature 1..33: note = Probe
  source 1..33: mol_type = other DNA
gctttggggggttcgattccttccttttttgtc

SEQ ID NO: 6331 - DNA, 43 bp, synthetic construct
  misc_feature 1..43: note = Probe
  source 1..43: mol_type = other DNA
gctttgggtgctaatggtggagttaaagactttttctctgatt

SEQ ID NO: 6332 - DNA, 37 bp, synthetic construct
  misc_feature 1..37: note = Probe
  source 1..37: mol_type = other DNA
ggaagcgtgctgggcccataacccagaggtcgatgga

SEQ ID NO: 6333 - DNA, 39 bp, synthetic construct
  misc_feature 1..39: note = Probe
  source 1..39: mol_type = other DNA
ggaagcgtgctgggcccataacccagaggtcgatggatc

SEQ ID NO: 6334 - DNA, 17 bp, synthetic construct
  misc_feature 1..17: note = Probe
  source 1..17: mol_type = other DNA
ggactatgagaatcgaa

SEQ ID NO: 6335 - DNA, 24 bp, synthetic construct
  misc_feature 1..24: note = Probe
  source 1..24: mol_type = other DNA
ggactatgagaatcgaacccatcc

SEQ ID NO: 6336 - DNA, 25 bp, synthetic construct
  misc_feature 1..25: note = Probe
  source 1..25: mol_type = other DNA
ggactatgagaatcgaacccatccc

SEQ ID NO: 6337 - DNA, 30 bp, synthetic construct
  misc_feature 1..30: note = Probe
  source 1..30: mol_type = other DNA
ggactatgagaatcgaacccatccctgaga

SEQ ID NO: 6338 - DNA, 16 bp, synthetic construct
  misc_feature 1..16: note = Probe
  source 1..16: mol_type = other DNA
ggactctgaatccagc

SEQ ID NO: 6339 - DNA, 23 bp, synthetic construct
  misc_feature 1..23: note = Probe
  source 1..23: mol_type = other DNA
ggactctgaatccagcgatccga

SEQ ID NO: 6340 - DNA, 24 bp, synthetic construct
  misc_feature 1..24: note = Probe
  source 1..24: mol_type = other DNA
ggactctgaatccagcgatccgag

SEQ ID NO: 6341 - DNA, 41 bp, synthetic construct
  misc_feature 1..41: note = Probe
  source 1..41: mol_type = other DNA
ggactgtaaatctaaagacaggggttaggcctctttttacc

SEQ ID NO: 6342 - DNA, 44 bp, synthetic construct
  misc_feature 1..44: note = Probe
  source 1..44: mol_type = other DNA
ggactgtaaatctaaagacaggggttaggcctctttttaccagc

SEQ ID NO: 6343 - DNA, 45 bp, synthetic construct
  misc_feature 1..45: note = Probe
  source 1..45: mol_type = other DNA
ggactgtaaatctaaagacaggggttaggcctctttttaccagct

SEQ ID NO: 6344 - DNA, 32 bp, synthetic construct
  misc_feature 1..32: note = Probe
  source 1..32: mol_type = other DNA
ggagaccggggttcaattccccgacggggagg

SEQ ID NO: 6345 - DNA, 33 bp, synthetic construct
  misc_feature 1..33: note = Probe
  source 1..33: mol_type = other DNA
ggagaccggggttcaattccccgacggggaggt

SEQ ID NO: 6346 - DNA, 34 bp, synthetic construct
  misc_feature 1..34: note = Probe
  source 1..34: mol_type = other DNA
ggagaccggggttcaattccccgacggggaggtg

SEQ ID NO: 6347 - DNA, 24 bp, synthetic construct
  misc_feature 1..24: note = Probe
  source 1..24: mol_type = other DNA
ggagaccggggttcgattccccga

SEQ ID NO: 6348 - DNA, 32 bp, synthetic construct
  misc_feature 1..32: note = Probe
  source 1..32: mol_type = other DNA
ggagaccggggttcgattccccgacggggaga

SEQ ID NO: 6349 - DNA, 33 bp, synthetic construct
  misc_feature 1..33: note = Probe
  source 1..33: mol_type = other DNA
ggagaccggggttcgattccccgacggggagaa

SEQ ID NO: 6350 - DNA, 34 bp, synthetic construct
  misc_feature 1..34: note = Probe
  source 1..34: mol_type = other DNA
ggagaccggggttcgattccccgacggggagaaa

SEQ ID NO: 6351 - DNA, 33 bp, synthetic construct
  misc_feature 1..33: note = Probe
  source 1..33: mol_type = other DNA
ggagaccggggttcgattccccgacggggagac

SEQ ID NO: 6352 - DNA, 34 bp, synthetic construct
  misc_feature 1..34: note = Probe
  source 1..34: mol_type = other DNA
ggagaccggggttcgattccccgacggggagagt

SEQ ID NO: 6353 - DNA, 32 bp, synthetic construct
  misc_feature 1..32: note = Probe
  source 1..32: mol_type = other DNA
ggagaccggggttcgattccccgacggggagg

SEQ ID NO: 6354 - DNA, 33 bp, synthetic construct
  misc_feature 1..33: note = Probe
  source 1..33: mol_type = other DNA
ggagaccggggttcgattccccgacggggaggc

SEQ ID NO: 6355 - DNA, 34 bp, synthetic construct
  misc_feature 1..34: note = Probe
  source 1..34: mol_type = other DNA
ggagaccggggttcgattccccgacggggaggca

SEQ ID NO: 6356 - DNA, 32 bp, synthetic construct
  misc_feature 1..32: note = Probe
  source 1..32: mol_type = other DNA
ggagatcctgggttcgaatcccagcggtgcct

SEQ ID NO: 6357 - DNA, 33 bp, synthetic construct
  misc_feature 1..33: note = Probe
  source 1..33: mol_type = other DNA
ggagatcctgggttcgaatcccagcggtgcctc

SEQ ID NO: 6358 - DNA, 23 bp, synthetic construct
  misc_feature 1..23: note = Probe
  source 1..23: mol_type = other DNA
ggagatgaaaacctttttccaag

SEQ ID NO: 6359 - DNA, 25 bp, synthetic construct
  misc_feature 1..25: note = Probe
  source 1..25: mol_type = other DNA
ggagatgaaaacctttttccaagga

SEQ ID NO: 6360 - DNA, 28 bp, synthetic construct
  misc_feature 1..28: note = Probe
  source 1..28: mol_type = other DNA
ggagatgaaaacctttttccaaggacaa

SEQ ID NO: 6361 - DNA, 29 bp, synthetic construct
  misc_feature 1..29: note = Probe
  source 1..29: mol_type = other DNA
ggagatgaaaacctttttccaaggacaaa

SEQ ID NO: 6362 - DNA, 30 bp, synthetic construct
  misc_feature 1..30: note = Probe
  source 1..30: mol_type = other DNA
ggagatgaaaacctttttccaaggacaaat

SEQ ID NO: 6363 - DNA, 31 bp, synthetic construct
  misc_feature 1..31: note = Probe
  source 1..31: mol_type = other DNA
ggagatgaaaacctttttccaaggacaaatc

SEQ ID NO: 6364 - DNA, 22 bp, synthetic construct
  misc_feature 1..22: note = Probe
  source 1..22: mol_type = other DNA
ggagatttcaacttaacttgac

SEQ ID NO: 6365 - DNA, 23 bp, synthetic construct
  misc_feature 1..23: note = Probe
  source 1..23: mol_type = other DNA
ggagatttcaacttaacttgacc

SEQ ID NO: 6366 - DNA, 24 bp, synthetic construct
  misc_feature 1..24: note = Probe
  source 1..24: mol_type = other DNA
ggagatttcaacttaacttgaccg

SEQ ID NO: 6367 - DNA, 25 bp, synthetic construct
  misc_feature 1..25: note = Probe
  source 1..25: mol_type = other DNA
ggagatttcaacttaacttgaccgc

SEQ ID NO: 6368 - DNA, 26 bp, synthetic construct
  misc_feature 1..26: note = Probe
  source 1..26: mol_type = other DNA
ggagatttcaacttaacttgaccgct

SEQ ID NO: 6369 - DNA, 27 bp, synthetic construct
  misc_feature 1..27: note = Probe
  source 1..27: mol_type = other DNA
ggagatttcaacttaacttgaccgctc

SEQ ID NO: 6370 - DNA, 28 bp, synthetic construct
  misc_feature 1..28: note = Probe
  source 1..28: mol_type = other DNA
ggagatttcaacttaacttgaccgctct

SEQ ID NO: 6371 - DNA, 29 bp, synthetic construct
  misc_feature 1..29: note = Probe
  source 1..29: mol_type = other DNA
ggagatttcaacttaacttgaccgctctg

SEQ ID NO: 6372 - DNA, 30 bp, synthetic construct
  misc_feature 1..30: note = Probe
  source 1..30: mol_type = other DNA
ggagatttcaacttaacttgaccgctctga

SEQ ID NO: 6373 - DNA, 31 bp, synthetic construct
  misc_feature 1..31: note = Probe
  source 1..31: mol_type = other DNA
ggagatttcaacttaacttgaccgctctgag

SEQ ID NO: 6374 - DNA, 32 bp, synthetic construct
  misc_feature 1..32: note = Probe
  source 1..32: mol_type = other DNA
ggagatttcaacttaacttgaccgctctgagc

SEQ ID NO: 6375 - DNA, 33 bp, synthetic construct
  misc_feature 1..33: note = Probe
  source 1..33: mol_type = other DNA
ggagatttcaacttaacttgaccgctctgagct

SEQ ID NO: 6376 - DNA, 25 bp, synthetic construct
  misc_feature 1..25: note = Probe
  source 1..25: mol_type = other DNA
ggagcttaaacccccttatttctag

SEQ ID NO: 6377 - DNA, 26 bp, synthetic construct
  misc_feature 1..26: note = Probe
  source 1..26: mol_type = other DNA
ggagcttaaacccccttatttctagg

SEQ ID NO: 6378 - DNA, 27 bp, synthetic construct
  misc_feature 1..27: note = Probe
  source 1..27: mol_type = other DNA
ggagcttaaacccccttatttctagga

SEQ ID NO: 6379 - DNA, 23 bp, synthetic construct
  misc_feature 1..23: note = Probe
  source 1..23: mol_type = other DNA
ggagttaaagactttttctctga

SEQ ID NO: 6380 - DNA, 25 bp, synthetic construct
  misc_feature 1..25: note = Probe
  source 1..25: mol_type = other DNA
ggagttaaagactttttctctgatt

SEQ ID NO: 6381 - DNA, 26 bp, synthetic construct
  misc_feature 1..26: note = Probe
  source 1..26: mol_type = other DNA
ggagttaaagactttttctctgattt

SEQ ID NO: 6382 - DNA, 24 bp, synthetic construct
  misc_feature 1..24: note = Probe
  source 1..24: mol_type = other DNA
ggatagctcagtcggtagagcatc

SEQ ID NO: 6383 - DNA, 30 bp, synthetic construct
  misc_feature 1..30: note = Probe
  source 1..30: mol_type = other DNA
ggatagctcagtcggtagagcatcagactt

SEQ ID NO: 6384 - DNA, 22 bp, synthetic construct
  misc_feature 1..22: note = Probe
  source 1..22: mol_type = other DNA
ggatcagaagattgagggttcg

SEQ ID NO: 6385 - DNA, 25 bp, synthetic construct
  misc_feature 1..25: note = Probe
  source 1..25: mol_type = other DNA
ggatcgaaaccatcctctgctaggt

SEQ ID NO: 6386 - DNA, 25 bp, synthetic construct
  misc_feature 1..25: note = Probe
  source 1..25: mol_type = other DNA
ggatcgatgcccgcattctccatac

SEQ ID NO: 6387 - DNA, 32 bp, synthetic construct
  misc_feature 1..32: note = Probe
  source 1..32: mol_type = other DNA
ggatggggtgtgataggtggcacggagaattt

SEQ ID NO: 6388 - DNA, 27 bp, synthetic construct
  misc_feature 1..27: note = Probe
  source 1..27: mol_type = other DNA
ggatgggttcgattctcatagtcctag

SEQ ID NO: 6389 - DNA, 23 bp, synthetic construct
  misc_feature 1..23: note = Probe
  source 1..23: mol_type = other DNA
ggattcggcgctctcaccgccgc

SEQ ID NO: 6390 - DNA, 27 bp, synthetic construct
  misc_feature 1..27: note = Probe
  source 1..27: mol_type = other DNA
ggattggtggtccagtggtagaattct

SEQ ID NO: 6391 - DNA, 23 bp, synthetic construct
  misc_feature 1..23: note = Probe
  source 1..23: mol_type = other DNA
ggattgtgggttcgagtcccacc

SEQ ID NO: 6392 - DNA, 50 bp, synthetic construct
  misc_feature 1..50: note = Probe
  source 1..50: mol_type = other DNA
ggcacggagaattttggattctcagggatgggttcgattctcatagtcct

SEQ ID NO: 6393 - DNA, 35 bp, synthetic construct
  misc_feature 1..35: note = Probe
  source 1..35: mol_type = other DNA
ggcatcagcctccggagctggggattgtgggttcg

SEQ ID NO: 6394 - DNA, 24 bp, synthetic construct
  misc_feature 1..24: note = Probe
  source 1..24: mol_type = other DNA
ggcattggcctcctaagccaggga

SEQ ID NO: 6395 - DNA, 28 bp, synthetic construct
  misc_feature 1..28: note = Probe
  source 1..28: mol_type = other DNA
ggcattggcctcctaagccagggattgt

SEQ ID NO: 6396 - DNA, 33 bp, synthetic construct
  misc_feature 1..33: note = Probe
  source 1..33: mol_type = other DNA
ggcattggtggttcagtggtagaattctcgcct

SEQ ID NO: 6397 - DNA, 27 bp, synthetic construct
  misc_feature 1..27: note = Probe
  source 1..27: mol_type = other DNA
ggcccataacccagaggtcgatggatc

SEQ ID NO: 6398 - DNA, 50 bp, synthetic construct
  misc_feature 1..50: note = Probe
  source 1..50: mol_type = other DNA
ggcccataacccagaggtcgatggatcgaaaccatcctctgctaggtgcc

SEQ ID NO: 6399 - DNA, 16 bp, synthetic construct
  misc_feature 1..16: note = Probe
  source 1..16: mol_type = other DNA
ggcccataccccgaaa

SEQ ID NO: 6400 - DNA, 17 bp, synthetic construct
  misc_feature 1..17: note = Probe
  source 1..17: mol_type = other DNA
ggcccataccccgaaaa

SEQ ID NO: 6401 - DNA, 18 bp, synthetic construct
  misc_feature 1..18: note = Probe
  source 1..18: mol_type = other DNA
ggcccataccccgaaaat

SEQ ID NO: 6402 - DNA, 20 bp, synthetic construct
  misc_feature 1..20: note = Probe
  source 1..20: mol_type = other DNA
ggcccataccccgaaaatgt

SEQ ID NO: 6403 - DNA, 21 bp, synthetic construct
  misc_feature 1..21: note = Probe
  source 1..21: mol_type = other DNA
ggcccataccccgaaaatgtt

SEQ ID NO: 6404 - DNA, 22 bp, synthetic construct
  misc_feature 1..22: note = Probe
  source 1..22: mol_type = other DNA
ggcccataccccgaaaatgttg

SEQ ID NO: 6405 - DNA, 23 bp, synthetic construct
  misc_feature 1..23: note = Probe
  source 1..23: mol_type = other DNA
ggcccataccccgaaaatgttgg

SEQ ID NO: 6406 - DNA, 25 bp, synthetic construct
  misc_feature 1..25: note = Probe
  source 1..25: mol_type = other DNA
ggcccataccccgaaaatgttggtt

SEQ ID NO: 6407 - DNA, 26 bp, synthetic construct
  misc_feature 1..26: note = Probe
  source 1..26: mol_type = other DNA
ggcccataccccgaaaatgttggtta

SEQ ID NO: 6408 - DNA, 27 bp, synthetic construct
  misc_feature 1..27: note = Probe
  source 1..27: mol_type = other DNA
ggcccataccccgaaaatgttggttat

SEQ ID NO: 6409 - DNA, 28 bp, synthetic construct
  misc_feature 1..28: note = Probe
  source 1..28: mol_type = other DNA
ggcccataccccgaaaatgttggttata

SEQ ID NO: 6410 - DNA, 29 bp, synthetic construct
  misc_feature 1..29: note = Probe
  source 1..29: mol_type = other DNA
ggcccataccccgaaaatgttggttatac

SEQ ID NO: 6411 - DNA, 30 bp, synthetic construct
  misc_feature 1..30: note = Probe
  source 1..30: mol_type = other DNA
ggcccataccccgaaaatgttggttatacc

SEQ ID NO: 6412 - DNA, 31 bp, synthetic construct
  misc_feature 1..31: note = Probe
  source 1..31: mol_type = other DNA
ggcccataccccgaaaatgttggttataccc

SEQ ID NO: 6413 - DNA, 32 bp, synthetic construct
  misc_feature 1..32: note = Probe
  source 1..32: mol_type = other DNA
ggcccataccccgaaaatgttggttataccct

SEQ ID NO: 6414 - DNA, 33 bp, synthetic construct
  misc_feature 1..33: note = Probe
  source 1..33: mol_type = other DNA
ggcccataccccgaaaatgttggttataccctt

SEQ ID NO: 6415 - DNA, 34 bp, synthetic construct
  misc_feature 1..34: note = Probe
  source 1..34: mol_type = other DNA
ggcccataccccgaaaatgttggttatacccttc

SEQ ID NO: 6416 - DNA, 35 bp, synthetic construct
  misc_feature 1..35: note = Probe
  source 1..35: mol_type = other DNA
ggcccataccccgaaaatgttggttatacccttcc

SEQ ID NO: 6417 - DNA, 36 bp, synthetic construct
  misc_feature 1..36: note = Probe
  source 1..36: mol_type = other DNA
ggcccataccccgaaaatgttggttatacccttccc

SEQ ID NO: 6418 - DNA, 37 bp, synthetic construct
  misc_feature 1..37: note = Probe
  source 1..37: mol_type = other DNA
ggcccataccccgaaaatgttggttatacccttcccg

SEQ ID NO: 6419 - DNA, 39 bp, synthetic construct
  misc_feature 1..39: note = Probe
  source 1..39: mol_type = other DNA
ggcccataccccgaaaatgttggttatacccttcccgta

SEQ ID NO: 6420 - DNA, 43 bp, synthetic construct
  misc_feature 1..43: note = Probe
  source 1..43: mol_type = other DNA
ggcccataccccgaaaatgttggttatacccttcccgtactaa

SEQ ID NO: 6421 - DNA, 44 bp, synthetic construct
  misc_feature 1..44: note = Probe
  source 1..44: mol_type = other DNA
ggcccataccccgaaaatgttggttatacccttcccgtactaat

SEQ ID NO: 6422 - DNA, 45 bp, synthetic construct
  misc_feature 1..45: note = Probe
  source 1..45: mol_type = other DNA
ggcccataccccgaaaatgttggttatacccttcccgtactaatt

SEQ ID NO: 6423 - DNA, 32 bp, synthetic construct
  misc_feature 1..32: note = Probe
  source 1..32: mol_type = other DNA
ggccccatggtgtaatggtcagcactctggac

SEQ ID NO: 6424 - DNA, 33 bp, synthetic construct
  misc_feature 1..33: note = Probe
  source 1..33: mol_type = other DNA
ggccccatggtgtaatggtcagcactctggact

SEQ ID NO: 6425 - DNA, 35 bp, synthetic construct
  misc_feature 1..35: note = Probe
  source 1..35: mol_type = other DNA
ggccccatggtgtaatggtcagcactctggactct

SEQ ID NO: 6426 - DNA, 37 bp, synthetic construct
  misc_feature 1..37: note = Probe
  source 1..37: mol_type = other DNA
ggccccatggtgtaatggtcagcactctggactctga

SEQ ID NO: 6427 - DNA, 50 bp, synthetic construct
  misc_feature 1..50: note = Probe
  source 1..50: mol_type = other DNA
ggccccatggtgtaatggttagcactctggactttgaatccagcgatccg

SEQ ID NO: 6428 - DNA, 22 bp, synthetic construct
  misc_feature 1..22: note = Probe
  source 1..22: mol_type = other DNA
ggccccgggttcgatccccggc

SEQ ID NO: 6429 - DNA, 23 bp, synthetic construct
  misc_feature 1..23: note = Probe
  source 1..23: mol_type = other DNA
ggccccgggttcgatccccggca

SEQ ID NO: 6430 - DNA, 32 bp, synthetic construct
  misc_feature 1..32: note = Probe
  source 1..32: mol_type = other DNA
ggccccgggttcgatccccggcatctccattg

SEQ ID NO: 6431 - DNA, 31 bp, synthetic construct
  misc_feature 1..31: note = Probe
  source 1..31: mol_type = other DNA
ggcccgggttcgactcccggtatgggaacaa

SEQ ID NO: 6432 - DNA, 31 bp, synthetic construct
  misc_feature 1..31: note = Probe
  source 1..31: mol_type = other DNA
ggcccgggttcgactcccggtgtgggaacgc

SEQ ID NO: 6433 - DNA, 31 bp, synthetic construct
  misc_feature 1..31: note = Probe
  source 1..31: mol_type = other DNA
ggcccgggttcgattcccggtcagggaattg

SEQ ID NO: 6434 - DNA, 17 bp, synthetic construct
  misc_feature 1..17: note = Probe
  source 1..17: mol_type = other DNA
ggccctatagctcaggg

SEQ ID NO: 6435 - DNA, 19 bp, synthetic construct
  misc_feature 1..19: note = Probe
  source 1..19: mol_type = other DNA
ggccctatagctcaggggt

SEQ ID NO: 6436 - DNA, 23 bp, synthetic construct
  misc_feature 1..23: note = Probe
  source 1..23: mol_type = other DNA
ggccctatagctcaggggttaga

SEQ ID NO: 6437 - DNA, 25 bp, synthetic construct
  misc_feature 1..25: note = Probe
  source 1..25: mol_type = other DNA
ggccctatagctcaggggttagagc

SEQ ID NO: 6438 - DNA, 49 bp, synthetic construct
  misc_feature 1..49: note = Probe
  source 1..49: mol_type = other DNA
ggccctatagctcaggggttagagcactggtcttgtaaaccaggggtcg

SEQ ID NO: 6439 - DNA, 16 bp, synthetic construct
  misc_feature 1..16: note = Probe
  source 1..16: mol_type = other DNA
ggccggttagctcagt

SEQ ID NO: 6440 - DNA, 19 bp, synthetic construct
  misc_feature 1..19: note = Probe
  source 1..19: mol_type = other DNA
ggccggttagctcagttgg

SEQ ID NO: 6441 - DNA, 20 bp, synthetic construct
  misc_feature 1..20: note = Probe
  source 1..20: mol_type = other DNA
ggccggttagctcagttggt

SEQ ID NO: 6442 - DNA, 21 bp, synthetic construct
  misc_feature 1..21: note = Probe
  source 1..21: mol_type = other DNA
ggccggttagctcagttggta

SEQ ID NO: 6443 - DNA, 21 bp, synthetic construct
  misc_feature 1..21: note = Probe
  source 1..21: mol_type = other DNA
ggccggttagctcagttggtt

SEQ ID NO: 6444 - DNA, 22 bp, synthetic construct
  misc_feature 1..22: note = Probe
  source 1..22: mol_type = other DNA
ggccggttagctcagttggtta

SEQ ID NO: 6445 - DNA, 23 bp, synthetic construct
  misc_feature 1..23: note = Probe
  source 1..23: mol_type = other DNA
ggccggttagctcagttggttag

SEQ ID NO: 6446 - DNA, 24 bp, synthetic construct
  misc_feature 1..24: note = Probe
  source 1..24: mol_type = other DNA
ggccggttagctcagttggttaga

SEQ ID NO: 6447 - DNA, 26 bp, synthetic construct
  misc_feature 1..26: note = Probe
  source 1..26: mol_type = other DNA
ggccggttagctcagttggttagagc

SEQ ID NO: 6448 - DNA, 27 bp, synthetic construct
  misc_feature 1..27: note = Probe
  source 1..27: mol_type = other DNA
ggccggttagctcagttggttagagcg

SEQ ID NO: 6449 - DNA, 33 bp, synthetic construct
  misc_feature 1..33: note = Probe
  source 1..33: mol_type = other DNA
ggccggttagctcagttggttagagcgtggtgc

SEQ ID NO: 6450 - DNA, 34 bp, synthetic construct
  misc_feature 1..34: note = Probe
  source 1..34: mol_type = other DNA
ggccggttagctcagttggttagagcgtggtgct

SEQ ID NO: 6451 - DNA, 36 bp, synthetic construct
  misc_feature 1..36: note = Probe
  source 1..36: mol_type = other DNA
ggccggttagctcagttggttagagcgtggtgctaa

SEQ ID NO: 6452 - DNA, 32 bp, synthetic construct
  misc_feature 1..32: note = Probe
  source 1..32: mol_type = other DNA
ggcctcgtggcgcaacggtagcgcgtctgact

SEQ ID NO: 6453 - DNA, 25 bp, synthetic construct
  misc_feature 1..25: note = Probe
  source 1..25: mol_type = other DNA
ggcgccgtggcttagttggttaaag

SEQ ID NO: 6454 - DNA, 23 bp, synthetic construct
  misc_feature 1..23: note = Probe
  source 1..23: mol_type = other DNA
ggcgcggtggccaagtggtaagg

SEQ ID NO: 6455 - DNA, 33 bp, synthetic construct
  misc_feature 1..33: note = Probe
  source 1..33: mol_type = other DNA
ggcggcccgggttcgactcccggtgtgggaacg

SEQ ID NO: 6456 - DNA, 18 bp, synthetic construct
  misc_feature 1..18: note = Probe
  source 1..18: mol_type = other DNA
ggcgtgattcataccttt

SEQ ID NO: 6457 - DNA, 24 bp, synthetic construct
  misc_feature 1..24: note = Probe
  source 1..24: mol_type = other DNA
ggctaaatcctatatatcttaatg

SEQ ID NO: 6458 - DNA, 27 bp, synthetic construct
  misc_feature 1..27: note = Probe
  source 1..27: mol_type = other DNA
ggctagctcagtcggtagagcatgaga

SEQ ID NO: 6459 - DNA, 33 bp, synthetic construct
  misc_feature 1..33: note = Probe
  source 1..33: mol_type = other DNA
ggctagctcagtcggtagagcatgagactctta

SEQ ID NO: 6460 - DNA, 45 bp, synthetic construct
  misc_feature 1..45: note = Probe
  source 1..45: mol_type = other DNA
ggctagctcagtcggtagagcatgagactcttaatctcagggtcg

SEQ ID NO: 6461 - DNA, 50 bp, synthetic construct
  misc_feature 1..50: note = Probe
  source 1..50: mol_type = other DNA
ggctagctcagtcggtagagcatgagactcttaatctcagggtcgtgggt

SEQ ID NO: 6462 - DNA, 50 bp, synthetic construct
  misc_feature 1..50: note = Probe
  source 1..50: mol_type = other DNA
ggctagctcagtcggtagagcatgggactcttaatcccagggtcgtgggt

SEQ ID NO: 6463 - DNA, 16 bp, synthetic construct
  misc_feature 1..16: note = Probe
  source 1..16: mol_type = other DNA
ggctcacatcacccca

SEQ ID NO: 6464 - DNA, 17 bp, synthetic construct
  misc_feature 1..17: note = Probe
  source 1..17: mol_type = other DNA
ggctcacatcaccccat

SEQ ID NO: 6465 - DNA, 18 bp, synthetic construct
  misc_feature 1..18: note = Probe
  source 1..18: mol_type = other DNA
ggctcacatcaccccata

SEQ ID NO: 6466 - DNA, 19 bp, synthetic construct
  misc_feature 1..19: note = Probe
  source 1..19: mol_type = other DNA
ggctcacatcaccccataa

SEQ ID NO: 6467 - DNA, 21 bp, synthetic construct
  misc_feature 1..21: note = Probe
  source 1..21: mol_type = other DNA
ggctcacatcaccccataaac

SEQ ID NO: 6468 - DNA, 22 bp, synthetic construct
  misc_feature 1..22: note = Probe
  source 1..22: mol_type = other DNA
ggctcacatcaccccataaaca

SEQ ID NO: 6469 - DNA, 23 bp, synthetic construct
  misc_feature 1..23: note = Probe
  source 1..23: mol_type = other DNA
ggctcacatcaccccataaacaa

SEQ ID NO: 6470 - DNA, 24 bp, synthetic construct
  misc_feature 1..24: note = Probe
  source 1..24: mol_type = other DNA
ggctcacatcaccccataaacaaa

SEQ ID NO: 6471 - DNA, 25 bp, synthetic construct
  misc_feature 1..25: note = Probe
  source 1..25: mol_type = other DNA
ggctcacatcaccccataaacaaat

SEQ ID NO: 6472 - DNA, 16 bp, synthetic construct
  misc_feature 1..16: note = Probe
  source 1..16: mol_type = other DNA
ggctccatagctcagg

SEQ ID NO: 6473 - DNA, 17 bp, synthetic construct
  misc_feature 1..17: note = Probe
  source 1..17: mol_type = other DNA
ggctccatagctcaggg

SEQ ID NO: 6474 - DNA, 18 bp, synthetic construct
  misc_feature 1..18: note = Probe
  source 1..18: mol_type = other DNA
ggctccatagctcagggg

SEQ ID NO: 6475 - DNA, 19 bp, synthetic construct
  misc_feature 1..19: note = Probe
  source 1..19: mol_type = other DNA
ggctccatagctcaggggt

SEQ ID NO: 6476 - DNA, 20 bp, synthetic construct
  misc_feature 1..20: note = Probe
  source 1..20: mol_type = other DNA
ggctccatagctcaggggtt

SEQ ID NO: 6477 - DNA, 23 bp, synthetic construct
  misc_feature 1..23: note = Probe
  source 1..23: mol_type = other DNA
ggctccatagctcaggggttaga

SEQ ID NO: 6478 - DNA, 25 bp, synthetic construct
  misc_feature 1..25: note = Probe
  source 1..25: mol_type = other DNA
ggctccatagctcaggggttagagc

SEQ ID NO: 6479 - DNA, 26 bp, synthetic construct
  misc_feature 1..26: note = Probe
  source 1..26: mol_type = other DNA
ggctccatagctcaggggttagagca

SEQ ID NO: 6480 - DNA, 28 bp, synthetic construct
  misc_feature 1..28: note = Probe
  source 1..28: mol_type = other DNA
ggctccatagctcaggggttagagcact

SEQ ID NO: 6481 - DNA, 29 bp, synthetic construct
  misc_feature 1..29: note = Probe
  source 1..29: mol_type = other DNA
ggctccatagctcaggggttagagcactg

SEQ ID NO: 6482 - DNA, 31 bp, synthetic construct
  misc_feature 1..31: note = Probe
  source 1..31: mol_type = other DNA
ggctccatagctcaggggttagagcactggt

SEQ ID NO: 6483 - DNA, 32 bp, synthetic construct
  misc_feature 1..32: note = Probe
  source 1..32: mol_type = other DNA
ggctccatagctcaggggttagagcactggtc

SEQ ID NO: 6484 - DNA, 33 bp, synthetic construct
  misc_feature 1..33: note = Probe
  source 1..33: mol_type = other DNA
ggctccatagctcaggggttagagcactggtct

SEQ ID NO: 6485 - DNA, 34 bp, synthetic construct
  misc_feature 1..34: note = Probe
  source 1..34: mol_type = other DNA
ggctccatagctcaggggttagagcactggtctt

SEQ ID NO: 6486 - DNA, 35 bp, synthetic construct
  misc_feature 1..35: note = Probe
  source 1..35: mol_type = other DNA
ggctccatagctcaggggttagagcactggtcttg

SEQ ID NO: 6487 - DNA, 36 bp, synthetic construct
  misc_feature 1..36: note = Probe
  source 1..36: mol_type = other DNA
ggctccatagctcaggggttagagcactggtcttgt

SEQ ID NO: 6488 - DNA, 37 bp, synthetic construct
  misc_feature 1..37: note = Probe
  source 1..37: mol_type = other DNA
ggctccatagctcaggggttagagcactggtcttgta

SEQ ID NO: 6489 - DNA, 48 bp, synthetic construct
  misc_feature 1..48: note = Probe
  source 1..48: mol_type = other DNA
ggctccatagctcaggggttagagcactggtcttgtaaaccaggggtc

SEQ ID NO: 6490 - DNA, 49 bp, synthetic construct
  misc_feature 1..49: note = Probe
  source 1..49: mol_type = other DNA
ggctccatagctcaggggttagagcactggtcttgtaaaccaggggtcg

SEQ ID NO: 6491 - DNA, 27 bp, synthetic construct
  misc_feature 1..27: note = Probe
  source 1..27: mol_type = other DNA
ggctccatagctcagtggttagagcac

SEQ ID NO: 6492 - DNA, 33 bp, synthetic construct
  misc_feature 1..33: note = Probe
  source 1..33: mol_type = other DNA
ggctccgtggcgcaatggatagcgcattggact

SEQ ID NO: 6493 - DNA, 20 bp, synthetic construct
  misc_feature 1..20: note = Probe
  source 1..20: mol_type = other DNA
ggctcgttggtctaggggta

SEQ ID NO: 6494 - DNA, 25 bp, synthetic construct
  misc_feature 1..25: note = Probe
  source 1..25: mol_type = other DNA
ggctcgttggtctaggggtatgatt

SEQ ID NO: 6495 - DNA, 29 bp, synthetic construct
  misc_feature 1..29: note = Probe
  source 1..29: mol_type = other DNA
ggctcgttggtctaggggtatgattctcg

SEQ ID NO: 6496 - DNA, 30 bp, synthetic construct
  misc_feature 1..30: note = Probe
  source 1..30: mol_type = other DNA
ggctcgttggtctaggggtatgattctcgc

SEQ ID NO: 6497 - DNA, 31 bp, synthetic construct
  misc_feature 1..31: note = Probe
  source 1..31: mol_type = other DNA
ggctcgttggtctaggggtatgattctcgct

SEQ ID NO: 6498 - DNA, 32 bp, synthetic construct
  misc_feature 1..32: note = Probe
  source 1..32: mol_type = other DNA
ggctcgttggtctaggggtatgattctcgctt

SEQ ID NO: 6499 - DNA, 33 bp, synthetic construct
  misc_feature 1..33: note = Probe
  source 1..33: mol_type = other DNA
ggctcgttggtctaggggtatgattctcgctta

SEQ ID NO: 6500 - DNA, 34 bp, synthetic construct
  misc_feature 1..34: note = Probe
  source 1..34: mol_type = other DNA
ggctcgttggtctaggggtatgattctcgcttcg

SEQ ID NO: 6501 - DNA, 35 bp, synthetic construct
  misc_feature 1..35: note = Probe
  source 1..35: mol_type = other DNA
ggctcgttggtctaggggtatgattctcgctttgg

SEQ ID NO: 6502 - DNA, 31 bp, synthetic construct
  misc_feature 1..31: note = Probe
  source 1..31: mol_type = other DNA
ggctcgttggtctaggggtatgattctcggt

SEQ ID NO: 6503 - DNA, 33 bp, synthetic construct
  misc_feature 1..33: note = Probe
  source 1..33: mol_type = other DNA
ggctcgttggtctaggggtatgattctcggttt

SEQ ID NO: 6504 - DNA, 32 bp, synthetic construct
  misc_feature 1..32: note = Probe
  source 1..32: mol_type = other DNA
ggctgcgtgttcgaatcacgtcggggtcaaac

SEQ ID NO: 6505 - DNA, 32 bp, synthetic construct
  misc_feature 1..32: note = Probe
  source 1..32: mol_type = other DNA
ggctgtatagctcagtggtagagcatttgact

SEQ ID NO: 6506 - DNA, 23 bp, synthetic construct
  misc_feature 1..23: note = Probe
  source 1..23: mol_type = other DNA
ggcttacgaccccttatttaccg

SEQ ID NO: 6507 - DNA, 29 bp, synthetic construct
  misc_feature 1..29: note = Probe
  source 1..29: mol_type = other DNA
gggagaccggggttcaattccccgacggg

SEQ ID NO: 6508 - DNA, 31 bp, synthetic construct
  misc_feature 1..31: note = Probe
  source 1..31: mol_type = other DNA
gggagaccggggttcaattccccgacgggga

SEQ ID NO: 6509 - DNA, 32 bp, synthetic construct
  misc_feature 1..32: note = Probe
  source 1..32: mol_type = other DNA
gggagaccggggttcaattccccgacggggag

SEQ ID NO: 6510 - DNA, 33 bp, synthetic construct
  misc_feature 1..33: note = Probe
  source 1..33: mol_type = other DNA
gggagaccggggttcaattccccgacggggagg

SEQ ID NO: 6511 - DNA, 35 bp, synthetic construct
  misc_feature 1..35: note = Probe
  source 1..35: mol_type = other DNA
gggagaccggggttcaattccccgacggggaggtg

SEQ ID NO: 6512 - DNA, 35 bp, synthetic construct
  misc_feature 1..35: note = Probe
  source 1..35: mol_type = other DNA
gggagaccggggttcgattccccaacggggaggct

SEQ ID NO: 6513 - DNA, 25 bp, synthetic construct
  misc_feature 1..25: note = Probe
  source 1..25: mol_type = other DNA
gggagaccggggttcgattccccga

SEQ ID NO: 6514 - DNA, 27 bp, synthetic construct
  misc_feature 1..27: note = Probe
  source 1..27: mol_type = other DNA
gggagaccggggttcgattccccgacg

SEQ ID NO: 6515 - DNA, 28 bp, synthetic construct
  misc_feature 1..28: note = Probe
  source 1..28: mol_type = other DNA
gggagaccggggttcgattccccgacgg

SEQ ID NO: 6516 - DNA, 33 bp, synthetic construct
  misc_feature 1..33: note = Probe
  source 1..33: mol_type = other DNA
gggagaccggggttcgattccccgacggggaga

SEQ ID NO: 6517 - DNA, 35 bp, synthetic construct
  misc_feature 1..35: note = Probe
  source 1..35: mol_type = other DNA
gggagaccggggttcgattccccgacggggagaaa

SEQ ID NO: 6518 - DNA, 35 bp, synthetic construct
  misc_feature 1..35: note = Probe
  source 1..35: mol_type = other DNA
gggagaccggggttcgattccccgacggggagacg

SEQ ID NO: 6519 - DNA, 33 bp, synthetic construct
  misc_feature 1..33: note = Probe
  source 1..33: mol_type = other DNA
gggagaccggggttcgattccccgacggggagg

SEQ ID NO: 6520 - DNA, 35 bp, synthetic construct
  misc_feature 1..35: note = Probe
  source 1..35: mol_type = other DNA
gggagaccggggttcgattccccgacggggaggca

SEQ ID NO: 6521 - DNA, 35 bp, synthetic construct
  misc_feature 1..35: note = Probe
  source 1..35: mol_type = other DNA
gggagaccggggttcgattccccgacggggaggcc

SEQ ID NO: 6522 - DNA, 39 bp, synthetic construct
  misc_feature 1..39: note = Probe
  source 1..39: mol_type = other DNA
gggagcgcccggatagctcagtcggtagagcatcagact

SEQ ID NO: 6523 - DNA, 25 bp, synthetic construct
  misc_feature 1..25: note = Probe
  source 1..25: mol_type = other DNA
gggaggcccgggttcgattcccggc

SEQ ID NO: 6524 - DNA, 27 bp, synthetic construct
  misc_feature 1..27: note = Probe
  source 1..27: mol_type = other DNA
gggaggcccgggttcgattcccggcca

SEQ ID NO: 6525 - DNA, 31 bp, synthetic construct
  misc_feature 1..31: note = Probe
  source 1..31: mol_type = other DNA
gggaggcccgggttcgattcccggccaatgc

SEQ ID NO: 6526 - DNA, 32 bp, synthetic construct
  misc_feature 1..32: note = Probe
  source 1..32: mol_type = other DNA
gggaggcccgggttcgattcccggccaatgca

SEQ ID NO: 6527 - DNA, 31 bp, synthetic construct
  misc_feature 1..31: note = Probe
  source 1..31: mol_type = other DNA
gggaggcccgggttcgattcccggcccatgc

SEQ ID NO: 6528 - DNA, 32 bp, synthetic construct
  misc_feature 1..32: note = Probe
  source 1..32: mol_type = other DNA
gggaggcccgggttcgattcccggcccatgca

SEQ ID NO: 6529 - DNA, 30 bp, synthetic construct
  misc_feature 1..30: note = Probe
  source 1..30: mol_type = other DNA
gggatgggttcgattctcatagtcctagaa

SEQ ID NO: 6530 - DNA, 31 bp, synthetic construct
  misc_feature 1..31: note = Probe
  source 1..31: mol_type = other DNA
gggatgggttcgattctcatagtcctagaaa

SEQ ID NO: 6531 - DNA, 25 bp, synthetic construct
  misc_feature 1..25: note = Probe
  source 1..25: mol_type = other DNA
gggattgtgggttcgagtcccacct

SEQ ID NO: 6532 - DNA, 27 bp, synthetic construct
  misc_feature 1..27: note = Probe
  source 1..27: mol_type = other DNA
gggattgtgggttcgagtcccatctgg

SEQ ID NO: 6533 - DNA, 29 bp, synthetic construct
  misc_feature 1..29: note = Probe
  source 1..29: mol_type = other DNA
gggattgtgggttcgagtcccatctgggg

SEQ ID NO: 6534 - DNA, 31 bp, synthetic construct
  misc_feature 1..31: note = Probe
  source 1..31: mol_type = other DNA
gggattgtgggttcgagtcccatctggggtg

SEQ ID NO: 6535 - DNA, 29 bp, synthetic construct
  misc_feature 1..29: note = Probe
  source 1..29: mol_type = other DNA
gggattgtgggttcgagtcccatctgggt

SEQ ID NO: 6536 - DNA, 31 bp, synthetic construct
  misc_feature 1..31: note = Probe
  source 1..31: mol_type = other DNA
gggattgtgggttcgagtcccatctgggtcg

SEQ ID NO: 6537 - DNA, 34 bp, synthetic construct
  misc_feature 1..34: note = Probe
  source 1..34: mol_type = other DNA
gggattgtgggttcgagtcccatctgggtcgcgt

SEQ ID NO: 6538 - DNA, 19 bp, synthetic construct
  misc_feature 1..19: note = Probe
  source 1..19: mol_type = other DNA
gggccagtggcgcaatgga

SEQ ID NO: 6539 - DNA, 21 bp, synthetic construct
  misc_feature 1..21: note = Probe
  source 1..21: mol_type = other DNA
gggcccataacccagaggtcg

SEQ ID NO: 6540 - DNA, 50 bp, synthetic construct
  misc_feature 1..50: note = Probe
  source 1..50: mol_type = other DNA
gggcccataacccagaggtcgatggatcgaaaccatcctctgctaggtgc

SEQ ID NO: 6541 - DNA, 16 bp, synthetic construct
  misc_feature 1..16: note = Probe
  source 1..16: mol_type = other DNA
gggcccataccccgaa

SEQ ID NO: 6542 - DNA, 17 bp, synthetic construct
  misc_feature 1..17: note = Probe
  source 1..17: mol_type = other DNA
gggcccataccccgaaa

SEQ ID NO: 6543 - DNA, 18 bp, synthetic construct
  misc_feature 1..18: note = Probe
  source 1..18: mol_type = other DNA
gggcccataccccgaaaa

SEQ ID NO: 6544 - DNA, 19 bp, synthetic construct
  misc_feature 1..19: note = Probe
  source 1..19: mol_type = other DNA
gggcccataccccgaaaat

SEQ ID NO: 6545 - DNA, 22 bp, synthetic construct
  misc_feature 1..22: note = Probe
  source 1..22: mol_type = other DNA
gggcccataccccgaaaatgtt

SEQ ID NO: 6546 - DNA, 24 bp, synthetic construct
  misc_feature 1..24: note = Probe
  source 1..24: mol_type = other DNA
gggcccataccccgaaaatgttgg

SEQ ID NO: 6547 - DNA, 26 bp, synthetic construct
  misc_feature 1..26: note = Probe
  source 1..26: mol_type = other DNA
gggcccataccccgaaaatgttggtt

SEQ ID NO: 6548 - DNA, 27 bp, synthetic construct
  misc_feature 1..27: note = Probe
  source 1..27: mol_type = other DNA
gggcccataccccgaaaatgttggtta

SEQ ID NO: 6549 - DNA, 31 bp, synthetic construct
  misc_feature 1..31: note = Probe
  source 1..31: mol_type = other DNA
gggcccataccccgaaaatgttggttatacc

SEQ ID NO: 6550 - DNA, 32 bp, synthetic construct
  misc_feature 1..32: note = Probe
  source 1..32: mol_type = other DNA
gggcccataccccgaaaatgttggttataccc

SEQ ID NO: 6551 - DNA, 33 bp, synthetic construct
  misc_feature 1..33: note = Probe
  source 1..33: mol_type = other DNA
gggcccataccccgaaaatgttggttataccct

SEQ ID NO: 6552 - DNA, 34 bp, synthetic construct
  misc_feature 1..34: note = Probe
  source 1..34: mol_type = other DNA
gggcccataccccgaaaatgttggttataccctt

SEQ ID NO: 6553 - DNA, 35 bp, synthetic construct
  misc_feature 1..35: note = Probe
  source 1..35: mol_type = other DNA
gggcccataccccgaaaatgttggttatacccttc

SEQ ID NO: 6554 - DNA, 37 bp, synthetic construct
  misc_feature 1..37: note = Probe
  source 1..37: mol_type = other DNA
gggcccataccccgaaaatgttggttatacccttccc

SEQ ID NO: 6555 - DNA, 40 bp, synthetic construct
  misc_feature 1..40: note = Probe
  source 1..40: mol_type = other DNA
gggcccataccccgaaaatgttggttatacccttcccgta

SEQ ID NO: 6556 - DNA, 44 bp, synthetic construct
  misc_feature 1..44: note = Probe
  source 1..44: mol_type = other DNA
gggcccataccccgaaaatgttggttatacccttcccgtactaa

SEQ ID NO: 6557 - DNA, 45 bp, synthetic construct
  misc_feature 1..45: note = Probe
  source 1..45: mol_type = other DNA
gggcccataccccgaaaatgttggttatacccttcccgtactaat

SEQ ID NO: 6558 - DNA, 46 bp, synthetic construct
  misc_feature 1..46: note = Probe
  source 1..46: mol_type = other DNA
gggcccataccccgaaaatgttggttatacccttcccgtactaatt

SEQ ID NO: 6559 - DNA, 17 bp, synthetic construct
  misc_feature 1..17: note = Probe
  source 1..17: mol_type = other DNA
gggctcacatcacccca

SEQ ID NO: 6560 - DNA, 18 bp, synthetic construct
  misc_feature 1..18: note = Probe
  source 1..18: mol_type = other DNA
gggctcacatcaccccat

SEQ ID NO: 6561 - DNA, 19 bp, synthetic construct
  misc_feature 1..19: note = Probe
  source 1..19: mol_type = other DNA
gggctcacatcaccccata

SEQ ID NO: 6562 - DNA, 23 bp, synthetic construct
  misc_feature 1..23: note = Probe
  source 1..23: mol_type = other DNA
gggctcacatcaccccataaaca

SEQ ID NO: 6563 - DNA, 25 bp, synthetic construct
  misc_feature 1..25: note = Probe
  source 1..25: mol_type = other DNA
gggctcacatcaccccataaacaaa

SEQ ID NO: 6564 - DNA, 26 bp, synthetic construct
  misc_feature 1..26: note = Probe
  source 1..26: mol_type = other DNA
gggctcacatcaccccataaacaaat

SEQ ID NO: 6565 - DNA, 27 bp, synthetic construct
  misc_feature 1..27: note = Probe
  source 1..27: mol_type = other DNA
gggctcacatcaccccataaacaaata

SEQ ID NO: 6566 - DNA, 21 bp, synthetic construct
  misc_feature 1..21: note = Probe
  source 1..21: mol_type = other DNA
ggggaattagctcaaatggta

SEQ ID NO: 6567 - DNA, 24 bp, synthetic construct
  misc_feature 1..24: note = Probe
  source 1..24: mol_type = other DNA
ggggaattagctcaaatggtagag

SEQ ID NO: 6568 - DNA, 23 bp, synthetic construct
  misc_feature 1..23: note = Probe
  source 1..23: mol_type = other DNA
ggggaattagctcaagtggtaga

SEQ ID NO: 6569 - DNA, 32 bp, synthetic construct
  misc_feature 1..32: note = Probe
  source 1..32: mol_type = other DNA
ggggatatagctcaggggtagagcatttgact

SEQ ID NO: 6570 - DNA, 23 bp, synthetic construct
  misc_feature 1..23: note = Probe
  source 1..23: mol_type = other DNA
ggggatgtagctcagtggtagag

SEQ ID NO: 6571 - DNA, 33 bp, synthetic construct
  misc_feature 1..33: note = Probe
  source 1..33: mol_type = other DNA
ggggatgtagctcagtggtagagcgcatgctta

SEQ ID NO: 6572 - DNA, 33 bp, synthetic construct
  misc_feature 1..33: note = Probe
  source 1..33: mol_type = other DNA
ggggatgtagctcagtggtagagcgcatgcttc

SEQ ID NO: 6573 - DNA, 33 bp, synthetic construct
  misc_feature 1..33: note = Probe
  source 1..33: mol_type = other DNA
ggggatgtagctcagtggtagagcgcgcgcttc

SEQ ID NO: 6574 - DNA, 32 bp, synthetic construct
  misc_feature 1..32: note = Probe
  source 1..32: mol_type = other DNA
ggggattgtgggttcgagtcccatctgggtcg

SEQ ID NO: 6575 - DNA, 35 bp, synthetic construct
  misc_feature 1..35: note = Probe
  source 1..35: mol_type = other DNA
ggggattgtgggttcgagtcccatctgggtcgcgt

SEQ ID NO: 6576 - DNA, 32 bp, synthetic construct
  misc_feature 1..32: note = Probe
  source 1..32: mol_type = other DNA
gggggattagctcaaatggtagagcgctcgct

SEQ ID NO: 6577 - DNA, 33 bp, synthetic construct
  misc_feature 1..33: note = Probe
  source 1..33: mol_type = other DNA
gggggattagctcaaatggtagagcgctcgctt

SEQ ID NO: 6578 - DNA, 34 bp, synthetic construct
  misc_feature 1..34: note = Probe
  source 1..34: mol_type = other DNA
gggggattagctcaaatggtagagcgctcgctta

SEQ ID NO: 6579 - DNA, 24 bp, synthetic construct
  misc_feature 1..24: note = Probe
  source 1..24: mol_type = other DNA
gggggcatagctcagtggtagagc

SEQ ID NO: 6580 - DNA, 31 bp, synthetic construct
  misc_feature 1..31: note = Probe
  source 1..31: mol_type = other DNA
gggggcatagctcagtggtagagcatttgac

SEQ ID NO: 6581 - DNA, 24 bp, synthetic construct
  misc_feature 1..24: note = Probe
  source 1..24: mol_type = other DNA
gggggtatagctcaggggtagagc

SEQ ID NO: 6582 - DNA, 32 bp, synthetic construct
  misc_feature 1..32: note = Probe
  source 1..32: mol_type = other DNA
gggggtatagctcaggggtagagcacttgact

SEQ ID NO: 6583 - DNA, 27 bp, synthetic construct
  misc_feature 1..27: note = Probe
  source 1..27: mol_type = other DNA
gggggtatagctcaggggtagagcatt

SEQ ID NO: 6584 - DNA, 31 bp, synthetic construct
  misc_feature 1..31: note = Probe
  source 1..31: mol_type = other DNA
gggggtatagctcaggggtagagcatttgac

SEQ ID NO: 6585 - DNA, 33 bp, synthetic construct
  misc_feature 1..33: note = Probe
  source 1..33: mol_type = other DNA
gggggtatagctcaggtggtagagcatttgact

SEQ ID NO: 6586 - DNA, 35 bp, synthetic construct
  misc_feature 1..35: note = Probe
  source 1..35: mol_type = other DNA
gggggtatagctcaggtggtagagcatttgactgc

SEQ ID NO: 6587 - DNA, 16 bp, synthetic construct
  misc_feature 1..16: note = Probe
  source 1..16: mol_type = other DNA
gggggtatagctcagt

SEQ ID NO: 6588 - DNA, 17 bp, synthetic construct
  misc_feature 1..17: note = Probe
  source 1..17: mol_type = other DNA
gggggtatagctcagtg

SEQ ID NO: 6589 - DNA, 18 bp, synthetic construct
  misc_feature 1..18: note = Probe
  source 1..18: mol_type = other DNA
gggggtatagctcagtgg

SEQ ID NO: 6590 - DNA, 33 bp, synthetic construct
  misc_feature 1..33: note = Probe
  source 1..33: mol_type = other DNA
gggggtatagctcagtgggtagagcatttgact

SEQ ID NO: 6591 - DNA, 20 bp, synthetic construct
  misc_feature 1..20: note = Probe
  source 1..20: mol_type = other DNA
gggggtatagctcagtggta

SEQ ID NO: 6592 - DNA, 22 bp, synthetic construct
  misc_feature 1..22: note = Probe
  source 1..22: mol_type = other DNA
gggggtatagctcagtggtaga

SEQ ID NO: 6593 - DNA, 24 bp, synthetic construct
  misc_feature 1..24: note = Probe
  source 1..24: mol_type = other DNA
gggggtatagctcagtggtagagc

SEQ ID NO: 6594 - DNA, 25 bp, synthetic construct
  misc_feature 1..25: note = Probe
  source 1..25: mol_type = other DNA
gggggtatagctcagtggtagagca

SEQ ID NO: 6595 - DNA, 27 bp, synthetic construct
  misc_feature 1..27: note = Probe
  source 1..27: mol_type = other DNA
gggggtatagctcagtggtagagcatt

SEQ ID NO: 6596 - DNA, 28 bp, synthetic construct
  misc_feature 1..28: note = Probe
  source 1..28: mol_type = other DNA
gggggtatagctcagtggtagagcattt

SEQ ID NO: 6597 - DNA, 29 bp, synthetic construct
  misc_feature 1..29: note = Probe
  source 1..29: mol_type = other DNA
gggggtatagctcagtggtagagcatttg

SEQ ID NO: 6598 - DNA, 30 bp, synthetic construct
  misc_feature 1..30: note = Probe
  source 1..30: mol_type = other DNA
gggggtatagctcagtggtagagcatttga

SEQ ID NO: 6599 - DNA, 31 bp, synthetic construct
  misc_feature 1..31: note = Probe
  source 1..31: mol_type = other DNA
gggggtatagctcagtggtagagcatttgac

SEQ ID NO: 6600 - DNA, 32 bp, synthetic construct
  misc_feature 1..32: note = Probe
  source 1..32: mol_type = other DNA
gggggtatagctcagtggtagagcatttgact

SEQ ID NO: 6601 - DNA, 33 bp, synthetic construct
  misc_feature 1..33: note = Probe
  source 1..33: mol_type = other DNA
gggggtatagctcagtggtagagcatttgactg

SEQ ID NO: 6602 - DNA, 34 bp, synthetic construct
  misc_feature 1..34: note = Probe
  source 1..34: mol_type = other DNA
gggggtatagctcagtggtagagcatttgactgc

SEQ ID NO: 6603 - DNA, 35 bp, synthetic construct
  misc_feature 1..35: note = Probe
  source 1..35: mol_type = other DNA
gggggtatagctcagtggtagagcatttgactgca

SEQ ID NO: 6604 - DNA, 50 bp, synthetic construct
  misc_feature 1..50: note = Probe
  source 1..50: mol_type = other DNA
gggggtatagctcagtggtagagcatttgactgcagatcaagaggtccct

SEQ ID NO: 6605 - DNA, 33 bp, synthetic construct
  misc_feature 1..33: note = Probe
  source 1..33: mol_type = other DNA
gggggtatagcttagcggtagagcatttgactg

SEQ ID NO: 6606 - DNA, 34 bp, synthetic construct
  misc_feature 1..34: note = Probe
  source 1..34: mol_type = other DNA
gggggtatagcttagcggtagagcatttgactgc

SEQ ID NO: 6607 - DNA, 32 bp, synthetic construct
  misc_feature 1..32: note = Probe
  source 1..32: mol_type = other DNA
gggggtatagttcaggggtagagcatttgact

SEQ ID NO: 6608 - DNA, 17 bp, synthetic construct
  misc_feature 1..17: note = Probe
  source 1..17: mol_type = other DNA
gggggtgtagctcagtg

SEQ ID NO: 6609 - DNA, 18 bp, synthetic construct
  misc_feature 1..18: note = Probe
  source 1..18: mol_type = other DNA
gggggtgtagctcagtgg

SEQ ID NO: 6610 - DNA, 20 bp, synthetic construct
  misc_feature 1..20: note = Probe
  source 1..20: mol_type = other DNA
gggggtgtagctcagtggta

SEQ ID NO: 6611 - DNA, 31 bp, synthetic construct
  misc_feature 1..31: note = Probe
  source 1..31: mol_type = other DNA
gggggtgtagctcagtggtagagcacatgct

SEQ ID NO: 6612 - DNA, 32 bp, synthetic construct
  misc_feature 1..32: note = Probe
  source 1..32: mol_type = other DNA
gggggtgtagctcagtggtagagcacatgctt

SEQ ID NO: 6613 - DNA, 27 bp, synthetic construct
  misc_feature 1..27: note = Probe
  source 1..27: mol_type = other DNA
gggggtgtagctcagtggtagagcatt

SEQ ID NO: 6614 - DNA, 33 bp, synthetic construct
  misc_feature 1..33: note = Probe
  source 1..33: mol_type = other DNA
gggggtgtagctcagtggtagagcatttgactg

SEQ ID NO: 6615 - DNA, 31 bp, synthetic construct
  misc_feature 1..31: note = Probe
  source 1..31: mol_type = other DNA
gggggtgtagctcagtggtagagcgcatgct

SEQ ID NO: 6616 - DNA, 33 bp, synthetic construct
  misc_feature 1..33: note = Probe
  source 1..33: mol_type = other DNA
gggggtgtagctcagtggtagagcgcgtgctta

SEQ ID NO: 6617 - DNA, 33 bp, synthetic construct
  misc_feature 1..33: note = Probe
  source 1..33: mol_type = other DNA
gggggtgtagctcagtggtagagcgcgtgcttc

SEQ ID NO: 6618 - DNA, 33 bp, synthetic construct
  misc_feature 1..33: note = Probe
  source 1..33: mol_type = other DNA
ggggtatagctcaggggtagagcatttgactgc

SEQ ID NO: 6619 - DNA, 31 bp, synthetic construct
  misc_feature 1..31: note = Probe
  source 1..31: mol_type = other DNA
ggggtatagctcagtggtagagcatttgact

SEQ ID NO: 6620 - DNA, 32 bp, synthetic construct
  misc_feature 1..32: note = Probe
  source 1..32: mol_type = other DNA
ggggtatagctcagtggtagagcatttgactg

SEQ ID NO: 6621 - DNA, 33 bp, synthetic construct
  misc_feature 1..33: note = Probe
  source 1..33: mol_type = other DNA
ggggtatagctcagtggtagagcatttgactgc

SEQ ID NO: 6622 - DNA, 34 bp, synthetic construct
  misc_feature 1..34: note = Probe
  source 1..34: mol_type = other DNA
ggggtatagctcagtggtagagcatttgactgca

SEQ ID NO: 6623 - DNA, 16 bp, synthetic construct
  misc_feature 1..16: note = Probe
  source 1..16: mol_type = other DNA
ggggtatgattctcgc

SEQ ID NO: 6624 - DNA, 17 bp, synthetic construct
  misc_feature 1..17: note = Probe
  source 1..17: mol_type = other DNA
ggggtatgattctcgct

SEQ ID NO: 6625 - DNA, 24 bp, synthetic construct
  misc_feature 1..24: note = Probe
  source 1..24: mol_type = other DNA
ggggtcgcgagttcaaatctcgct

SEQ ID NO: 6626 - DNA, 31 bp, synthetic construct
  misc_feature 1..31: note = Probe
  source 1..31: mol_type = other DNA
ggggtcgcgagttcaattctcgctggggcct

SEQ ID NO: 6627 - DNA, 33 bp, synthetic construct
  misc_feature 1..33: note = Probe
  source 1..33: mol_type = other DNA
ggggtgtagctcagtggtagagcatttgactgc

SEQ ID NO: 6628 - DNA, 24 bp, synthetic construct
  misc_feature 1..24: note = Probe
  source 1..24: mol_type = other DNA
ggggttaggcctctttttaccagc

SEQ ID NO: 6629 - DNA, 25 bp, synthetic construct
  misc_feature 1..25: note = Probe
  source 1..25: mol_type = other DNA
ggggttaggcctctttttaccagct

SEQ ID NO: 6630 - DNA, 26 bp, synthetic construct
  misc_feature 1..26: note = Probe
  source 1..26: mol_type = other DNA
ggggttcgattccccgacggggagac

SEQ ID NO: 6631 - DNA, 26 bp, synthetic construct
  misc_feature 1..26: note = Probe
  source 1..26: mol_type = other DNA
ggggttcgattccccgacggggaggc

SEQ ID NO: 6632 - DNA, 27 bp, synthetic construct
  misc_feature 1..27: note = Probe
  source 1..27: mol_type = other DNA
ggggttcgattccccgacggggaggca

SEQ ID NO: 6633 - DNA, 17 bp, synthetic construct
  misc_feature 1..17: note = Probe
  source 1..17: mol_type = other DNA
ggggttcgattccttcc

SEQ ID NO: 6634 - DNA, 21 bp, synthetic construct
  misc_feature 1..21: note = Probe
  source 1..21: mol_type = other DNA
ggggttttgcagtccttagct

SEQ ID NO: 6635 - DNA, 29 bp, synthetic construct
  misc_feature 1..29: note = Probe
  source 1..29: mol_type = other DNA
gggtagctcagtcggtagagcatcagact

SEQ ID NO: 6636 - DNA, 26 bp, synthetic construct
  misc_feature 1..26: note = Probe
  source 1..26: mol_type = other DNA
gggtatagctcaggggtagagcattt

SEQ ID NO: 6637 - DNA, 16 bp, synthetic construct
  misc_feature 1..16: note = Probe
  source 1..16: mol_type = other DNA
gggtatagctcagtgg

SEQ ID NO: 6638 - DNA, 25 bp, synthetic construct
  misc_feature 1..25: note = Probe
  source 1..25: mol_type = other DNA
gggtatagctcagtggtagagcatt

SEQ ID NO: 6639 - DNA, 26 bp, synthetic construct
  misc_feature 1..26: note = Probe
  source 1..26: mol_type = other DNA
gggtatagctcagtggtagagcattt

SEQ ID NO: 6640 - DNA, 27 bp, synthetic construct
  misc_feature 1..27: note = Probe
  source 1..27: mol_type = other DNA
gggtatagctcagtggtagagcatttg

SEQ ID NO: 6641 - DNA, 28 bp, synthetic construct
  misc_feature 1..28: note = Probe
  source 1..28: mol_type = other DNA
gggtatagctcagtggtagagcatttga

SEQ ID NO: 6642 - DNA, 29 bp, synthetic construct
  misc_feature 1..29: note = Probe
  source 1..29: mol_type = other DNA
gggtatagctcagtggtagagcatttgac

SEQ ID NO: 6643 - DNA, 30 bp, synthetic construct
  misc_feature 1..30: note = Probe
  source 1..30: mol_type = other DNA
gggtatagctcagtggtagagcatttgact

SEQ ID NO: 6644 - DNA, 31 bp, synthetic construct
  misc_feature 1..31: note = Probe
  source 1..31: mol_type = other DNA
gggtatagctcagtggtagagcatttgactg

SEQ ID NO: 6645 - DNA, 32 bp, synthetic construct
  misc_feature 1..32: note = Probe
  source 1..32: mol_type = other DNA
gggtatagctcagtggtagagcatttgactgc

SEQ ID NO: 6646 - DNA, 33 bp, synthetic construct
  misc_feature 1..33: note = Probe
  source 1..33: mol_type = other DNA
gggtatagctcagtggtagagcatttgactgca

SEQ ID NO: 6647 - DNA, 32 bp, synthetic construct
  misc_feature 1..32: note = Probe
  source 1..32: mol_type = other DNA
gggtatagcttagcggtagagcatttgactgc

SEQ ID NO: 6648 - DNA, 16 bp, synthetic construct
  misc_feature 1..16: note = Probe
  source 1..16: mol_type = other DNA
gggtatgattctcgct

SEQ ID NO: 6649 - DNA, 33 bp, synthetic construct
  misc_feature 1..33: note = Probe
  source 1..33: mol_type = other DNA
gggtatgattctcgcttagggtgcgagaggtcc

SEQ ID NO: 6650 - DNA, 33 bp, synthetic construct
  misc_feature 1..33: note = Probe
  source 1..33: mol_type = other DNA
gggtatgattctcgcttcgggtgcgagaggtcc

SEQ ID NO: 6651 - DNA, 33 bp, synthetic construct
  misc_feature 1..33: note = Probe
  source 1..33: mol_type = other DNA
gggtatgattctcgctttgggtgcgagaggtcc

SEQ ID NO: 6652 - DNA, 24 bp, synthetic construct
  misc_feature 1..24: note = Probe
  source 1..24: mol_type = other DNA
gggtccagggttcaagtccctgtt

SEQ ID NO: 6653 - DNA, 24 bp, synthetic construct
  misc_feature 1..24: note = Probe
  source 1..24: mol_type = other DNA
gggtcgtgggttcgagccccacgt

SEQ ID NO: 6654 - DNA, 33 bp, synthetic construct
  misc_feature 1..33: note = Probe
  source 1..33: mol_type = other DNA
gggtcgtgggttcgagccccacgttgggcgggt

SEQ ID NO: 6655 - DNA, 39 bp, synthetic construct
  misc_feature 1..39: note = Probe
  source 1..39: mol_type = other DNA
gggtgctaatggtggagttaaagactttttctctgattt

SEQ ID NO: 6656 - DNA, 50 bp, synthetic construct
  misc_feature 1..50: note = Probe
  source 1..50: mol_type = other DNA
gggtgcttagctgttaactaagtgtttgtgggtttaagtcccattggtct

SEQ ID NO: 6657 - DNA, 23 bp, synthetic construct
  misc_feature 1..23: note = Probe
  source 1..23: mol_type = other DNA
gggtggttcagtggtagaattct

SEQ ID NO: 6658 - DNA, 25 bp, synthetic construct
  misc_feature 1..25: note = Probe
  source 1..25: mol_type = other DNA
gggtggttcagtggtagaattctcg

SEQ ID NO: 6659 - DNA, 30 bp, synthetic construct
  misc_feature 1..30: note = Probe
  source 1..30: mol_type = other DNA
gggtggttcagtggtagaattctcgcctgc

SEQ ID NO: 6660 - DNA, 23 bp, synthetic construct
  misc_feature 1..23: note = Probe
  source 1..23: mol_type = other DNA
gggttaggcctctttttaccagc

SEQ ID NO: 6661 - DNA, 24 bp, synthetic construct
  misc_feature 1..24: note = Probe
  source 1..24: mol_type = other DNA
gggttaggcctctttttaccagct

SEQ ID NO: 6662 - DNA, 26 bp, synthetic construct
  misc_feature 1..26: note = Probe
  source 1..26: mol_type = other DNA
gggttcaatccccggcacctccacca

SEQ ID NO: 6663 - DNA, 24 bp, synthetic construct
  misc_feature 1..24: note = Probe
  source 1..24: mol_type = other DNA
gggttcaattccccgacggggagg

SEQ ID NO: 6664 - DNA, 26 bp, synthetic construct
  misc_feature 1..26: note = Probe
  source 1..26: mol_type = other DNA
gggttcaattccccgacggggaggtg

SEQ ID NO: 6665 - DNA, 26 bp, synthetic construct
  misc_feature 1..26: note = Probe
  source 1..26: mol_type = other DNA
gggttcaattcccggtcagggaacca

SEQ ID NO: 6666 - DNA, 26 bp, synthetic construct
  misc_feature 1..26: note = Probe
  source 1..26: mol_type = other DNA
gggttcgactcccggtgtgggaacgc

SEQ ID NO: 6667 - DNA, 25 bp, synthetic construct
  misc_feature 1..25: note = Probe
  source 1..25: mol_type = other DNA
gggttcgagtcccatctggggtggc

SEQ ID NO: 6668 - DNA, 26 bp, synthetic construct
  misc_feature 1..26: note = Probe
  source 1..26: mol_type = other DNA
gggttcgagtcccatctgggtcgcgt

SEQ ID NO: 6669 - DNA, 26 bp, synthetic construct
  misc_feature 1..26: note = Probe
  source 1..26: mol_type = other DNA
gggttcgagtcccttcgtggtcgttg

SEQ ID NO: 6670 - DNA, 21 bp, synthetic construct
  misc_feature 1..21: note = Probe
  source 1..21: mol_type = other DNA
gggttcgatccccggcatctc

SEQ ID NO: 6671 - DNA, 24 bp, synthetic construct
  misc_feature 1..24: note = Probe
  source 1..24: mol_type = other DNA
gggttcgatccccggcatctccaa

SEQ ID NO: 6672 - DNA, 24 bp, synthetic construct
  misc_feature 1..24: note = Probe
  source 1..24: mol_type = other DNA
gggttcgatccccggcatctccag

SEQ ID NO: 6673 - DNA, 24 bp, synthetic construct
  misc_feature 1..24: note = Probe
  source 1..24: mol_type = other DNA
gggttcgatccccggcatctccat

SEQ ID NO: 6674 - DNA, 24 bp, synthetic construct
  misc_feature 1..24: note = Probe
  source 1..24: mol_type = other DNA
gggttcgattccccgacggggaga

SEQ ID NO: 6675 - DNA, 25 bp, synthetic construct
  misc_feature 1..25: note = Probe
  source 1..25: mol_type = other DNA
gggttcgattccccgacggggagaa

SEQ ID NO: 6676 - DNA, 25 bp, synthetic construct
  misc_feature 1..25: note = Probe
  source 1..25: mol_type = other DNA
gggttcgattccccgacggggagac

SEQ ID NO: 6677 - DNA, 24 bp, synthetic construct
  misc_feature 1..24: note = Probe
  source 1..24: mol_type = other DNA
gggttcgattccccgacggggagg

SEQ ID NO: 6678 - DNA, 25 bp, synthetic construct
  misc_feature 1..25: note = Probe
  source 1..25: mol_type = other DNA
gggttcgattccccgacggggaggc

SEQ ID NO: 6679 - DNA, 26 bp, synthetic construct
  misc_feature 1..26: note = Probe
  source 1..26: mol_type = other DNA
gggttcgattccccgacggggaggca

SEQ ID NO: 6680 - DNA, 23 bp, synthetic construct
  misc_feature 1..23: note = Probe
  source 1..23: mol_type = other DNA
gggttcgattcccgggcggcgca

SEQ ID NO: 6681 - DNA, 23 bp, synthetic construct
  misc_feature 1..23: note = Probe
  source 1..23: mol_type = other DNA
gggttcgattctcatagtcctag

SEQ ID NO: 6682 - DNA, 24 bp, synthetic construct
  misc_feature 1..24: note = Probe
  source 1..24: mol_type = other DNA
gggttcgattctcatagtcctaga

SEQ ID NO: 6683 - DNA, 25 bp, synthetic construct
  misc_feature 1..25: note = Probe
  source 1..25: mol_type = other DNA
gggttcgattctcatagtcctagaa

SEQ ID NO: 6684 - DNA, 24 bp, synthetic construct
  misc_feature 1..24: note = Probe
  source 1..24: mol_type = other DNA
ggtaaaatggctgagtgaagcatt

SEQ ID NO: 6685 - DNA, 25 bp, synthetic construct
  misc_feature 1..25: note = Probe
  source 1..25: mol_type = other DNA
ggtaaaatggctgagtgaagcattg

SEQ ID NO: 6686 - DNA, 28 bp, synthetic construct
  misc_feature 1..28: note = Probe
  source 1..28: mol_type = other DNA
ggtaaaatggctgagtgaagcattggac

SEQ ID NO: 6687 - DNA, 29 bp, synthetic construct
  misc_feature 1..29: note = Probe
  source 1..29: mol_type = other DNA
ggtaaaatggctgagtgaagcattggact

SEQ ID NO: 6688 - DNA, 30 bp, synthetic construct
  misc_feature 1..30: note = Probe
  source 1..30: mol_type = other DNA
ggtaaaatggctgagtgaagcattggactg

SEQ ID NO: 6689 - DNA, 31 bp, synthetic construct
  misc_feature 1..31: note = Probe
  source 1..31: mol_type = other DNA
ggtaaaatggctgagtgaagcattggactgt

SEQ ID NO: 6690 - DNA, 32 bp, synthetic construct
  misc_feature 1..32: note = Probe
  source 1..32: mol_type = other DNA
ggtaaaatggctgagtgaagcattggactgta

SEQ ID NO: 6691 - DNA, 33 bp, synthetic construct
  misc_feature 1..33: note = Probe
  source 1..33: mol_type = other DNA
ggtaaaatggctgagtgaagcattggactgtaa

SEQ ID NO: 6692 - DNA, 34 bp, synthetic construct
  misc_feature 1..34: note = Probe
  source 1..34: mol_type = other DNA
ggtaaaatggctgagtgaagcattggactgtaaa

SEQ ID NO: 6693 - DNA, 35 bp, synthetic construct
  misc_feature 1..35: note = Probe
  source 1..35: mol_type = other DNA
ggtaaaatggctgagtgaagcattggactgtaaat

SEQ ID NO: 6694 - DNA, 36 bp, synthetic construct
  misc_feature 1..36: note = Probe
  source 1..36: mol_type = other DNA
ggtaaaatggctgagtgaagcattggactgtaaatc

SEQ ID NO: 6695 - DNA, 37 bp, synthetic construct
  misc_feature 1..37: note = Probe
  source 1..37: mol_type = other DNA
ggtaaaatggctgagtgaagcattggactgtaaatct

SEQ ID NO: 6696 - DNA, 38 bp, synthetic construct
  misc_feature 1..38: note = Probe
  source 1..38: mol_type = other DNA
ggtaaaatggctgagtgaagcattggactgtaaatcta

SEQ ID NO: 6697 - DNA, 29 bp, synthetic construct
  misc_feature 1..29: note = Probe
  source 1..29: mol_type = other DNA
ggtaatcgcataaaacttaaaactttaca

SEQ ID NO: 6698 - DNA, 50 bp, synthetic construct
  misc_feature 1..50: note = Probe
  source 1..50: mol_type = other DNA
ggtaatcgcataaaacttaaaactttacagtcagaggttcaattcctctt

SEQ ID NO: 6699 - DNA, 15 bp, synthetic construct
  misc_feature 1..15: note = Probe
  source 1..15: mol_type = other DNA
ggtacccaaatctgc

SEQ ID NO: 6700 - DNA, 17 bp, synthetic construct
  misc_feature 1..17: note = Probe
  source 1..17: mol_type = other DNA
ggtacccaaatctgctt

SEQ ID NO: 6701 - DNA, 24 bp, synthetic construct
  misc_feature 1..24: note = Probe
  source 1..24: mol_type = other DNA
ggtacccaaatctgcttccccatg

SEQ ID NO: 6702 - DNA, 19 bp, synthetic construct
  misc_feature 1..19: note = Probe
  source 1..19: mol_type = other DNA
ggtagaattctcgcctgcc

SEQ ID NO: 6703 - DNA, 32 bp, synthetic construct
  misc_feature 1..32: note = Probe
  source 1..32: mol_type = other DNA
ggtagaattctcgcctgccacgcgggaggccc

SEQ ID NO: 6704 - DNA, 32 bp, synthetic construct
  misc_feature 1..32: note = Probe
  source 1..32: mol_type = other DNA
ggtagagcatgagactcttaatctcagggtcg

SEQ ID NO: 6705 - DNA, 34 bp, synthetic construct
  misc_feature 1..34: note = Probe
  source 1..34: mol_type = other DNA
ggtagagcatgagactcttaatctcagggtcgtg

SEQ ID NO: 6706 - DNA, 32 bp, synthetic construct
  misc_feature 1..32: note = Probe
  source 1..32: mol_type = other DNA
ggtagagcatgggactcttaatcccagggtcg

SEQ ID NO: 6707 - DNA, 35 bp, synthetic construct
  misc_feature 1..35: note = Probe
  source 1..35: mol_type = other DNA
ggtagagcatgggactcttaatcccagggtcgtgg

SEQ ID NO: 6708 - DNA, 35 bp, synthetic construct
  misc_feature 1..35: note = Probe
  source 1..35: mol_type = other DNA
ggtagcgtggccgagcggtctaaggcgctggattt

SEQ ID NO: 6709 - DNA, 36 bp, synthetic construct
  misc_feature 1..36: note = Probe
  source 1..36: mol_type = other DNA
ggtagcgtggccgagcggtctaaggcgctggattta

SEQ ID NO: 6710 - DNA, 18 bp, synthetic construct
  misc_feature 1..18: note = Probe
  source 1..18: mol_type = other DNA
ggtagcgtggccgagtgg

SEQ ID NO: 6711 - DNA, 25 bp, synthetic construct
  misc_feature 1..25: note = Probe
  source 1..25: mol_type = other DNA
ggtagcgtggccgagtggtctaaga

SEQ ID NO: 6712 - DNA, 34 bp, synthetic construct
  misc_feature 1..34: note = Probe
  source 1..34: mol_type = other DNA
ggtagcgtggccgagtggtctaagacgctggatt

SEQ ID NO: 6713 - DNA, 29 bp, synthetic construct
  misc_feature 1..29: note = Probe
  source 1..29: mol_type = other DNA
ggtagcgtggccgagtggtctaaggcgct

SEQ ID NO: 6714 - DNA, 31 bp, synthetic construct
  misc_feature 1..31: note = Probe
  source 1..31: mol_type = other DNA
ggtagcgtggccgagtggtctaaggcgctgg

SEQ ID NO: 6715 - DNA, 16 bp, synthetic construct
  misc_feature 1..16: note = Probe
  source 1..16: mol_type = other DNA
ggtagtgtggccgagc

SEQ ID NO: 6716 - DNA, 24 bp, synthetic construct
  misc_feature 1..24: note = Probe
  source 1..24: mol_type = other DNA
ggtagtgtggccgagcggtctaag

SEQ ID NO: 6717 - DNA, 31 bp, synthetic construct
  misc_feature 1..31: note = Probe
  source 1..31: mol_type = other DNA
ggtatagctcaggggtagagcatttgactgc

SEQ ID NO: 6718 - DNA, 32 bp, synthetic construct
  misc_feature 1..32: note = Probe
  source 1..32: mol_type = other DNA
ggtatagctcaggggtagagcatttgactgca

SEQ ID NO: 6719 - DNA, 24 bp, synthetic construct
  misc_feature 1..24: note = Probe
  source 1..24: mol_type = other DNA
ggtatagctcagtggtagagcatt

SEQ ID NO: 6720 - DNA, 27 bp, synthetic construct
  misc_feature 1..27: note = Probe
  source 1..27: mol_type = other DNA
ggtatagctcagtggtagagcatttga

SEQ ID NO: 6721 - DNA, 29 bp, synthetic construct
  misc_feature 1..29: note = Probe
  source 1..29: mol_type = other DNA
ggtatagctcagtggtagagcatttgact

SEQ ID NO: 6722 - DNA, 30 bp, synthetic construct
  misc_feature 1..30: note = Probe
  source 1..30: mol_type = other DNA
ggtatagctcagtggtagagcatttgactg

SEQ ID NO: 6723 - DNA, 31 bp, synthetic construct
  misc_feature 1..31: note = Probe
  source 1..31: mol_type = other DNA
ggtatagctcagtggtagagcatttgactgc

SEQ ID NO: 6724 - DNA, 32 bp, synthetic construct
  misc_feature 1..32: note = Probe
  source 1..32: mol_type = other DNA
ggtatagctcagtggtagagcatttgactgca

SEQ ID NO: 6725 - DNA, 32 bp, synthetic construct
  misc_feature 1..32: note = Probe
  source 1..32: mol_type = other DNA
ggtatgattctcgcttagggtgcgagaggtcc

SEQ ID NO: 6726 - DNA, 33 bp, synthetic construct
  misc_feature 1..33: note = Probe
  source 1..33: mol_type = other DNA
ggtatgattctcgcttagggtgcgagaggtccc

SEQ ID NO: 6727 - DNA, 32 bp, synthetic construct
  misc_feature 1..32: note = Probe
  source 1..32: mol_type = other DNA
ggtatgattctcgcttcgggtgcgagaggtcc

SEQ ID NO: 6728 - DNA, 33 bp, synthetic construct
  misc_feature 1..33: note = Probe
  source 1..33: mol_type = other DNA
ggtatgattctcgcttcgggtgcgagaggtccc

SEQ ID NO: 6729 - DNA, 32 bp, synthetic construct
  misc_feature 1..32: note = Probe
  source 1..32: mol_type = other DNA
ggtatgattctcgctttgggtgcgagaggtcc

SEQ ID NO: 6730 - DNA, 32 bp, synthetic construct
  misc_feature 1..32: note = Probe
  source 1..32: mol_type = other DNA
ggtatgattctcggtttgggtccgagaggtcc

SEQ ID NO: 6731 - DNA, 25 bp, synthetic construct
  misc_feature 1..25: note = Probe
  source 1..25: mol_type = other DNA
ggtcagctaaataagctatcgggcc

SEQ ID NO: 6732 - DNA, 27 bp, synthetic construct
  misc_feature 1..27: note = Probe
  source 1..27: mol_type = other DNA
ggtcagctaaataagctatcgggccca

SEQ ID NO: 6733 - DNA, 28 bp, synthetic construct
  misc_feature 1..28: note = Probe
  source 1..28: mol_type = other DNA
ggtcagctaaataagctatcgggcccat

SEQ ID NO: 6734 - DNA, 29 bp, synthetic construct
  misc_feature 1..29: note = Probe
  source 1..29: mol_type = other DNA
ggtcagctaaataagctatcgggcccata

SEQ ID NO: 6735 - DNA, 30 bp, synthetic construct
  misc_feature 1..30: note = Probe
  source 1..30: mol_type = other DNA
ggtcagctaaataagctatcgggcccatac

SEQ ID NO: 6736 - DNA, 31 bp, synthetic construct
  misc_feature 1..31: note = Probe
  source 1..31: mol_type = other DNA
ggtcagctaaataagctatcgggcccatacc

SEQ ID NO: 6737 - DNA, 32 bp, synthetic construct
  misc_feature 1..32: note = Probe
  source 1..32: mol_type = other DNA
ggtcagctaaataagctatcgggcccataccc

SEQ ID NO: 6738 - DNA, 35 bp, synthetic construct
  misc_feature 1..35: note = Probe
  source 1..35: mol_type = other DNA
ggtcagctaaataagctatcgggcccataccccga

SEQ ID NO: 6739 - DNA, 37 bp, synthetic construct
  misc_feature 1..37: note = Probe
  source 1..37: mol_type = other DNA
ggtcagctaaataagctatcgggcccataccccgaaa

SEQ ID NO: 6740 - DNA, 39 bp, synthetic construct
  misc_feature 1..39: note = Probe
  source 1..39: mol_type = other DNA
ggtcagctaaataagctatcgggcccataccccgaaaat

SEQ ID NO: 6741 - DNA, 40 bp, synthetic construct
  misc_feature 1..40: note = Probe
  source 1..40: mol_type = other DNA
ggtcagctaaataagctatcgggcccataccccgaaaatg

SEQ ID NO: 6742 - DNA, 41 bp, synthetic construct
  misc_feature 1..41: note = Probe
  source 1..41: mol_type = other DNA
ggtcagctaaataagctatcgggcccataccccgaaaatgt

SEQ ID NO: 6743 - DNA, 42 bp, synthetic construct
  misc_feature 1..42: note = Probe
  source 1..42: mol_type = other DNA
ggtcagctaaataagctatcgggcccataccccgaaaatgtt

SEQ ID NO: 6744 - DNA, 43 bp, synthetic construct
  misc_feature 1..43: note = Probe
  source 1..43: mol_type = other DNA
ggtcagctaaataagctatcgggcccataccccgaaaatgttg

SEQ ID NO: 6745 - DNA, 44 bp, synthetic construct
  misc_feature 1..44: note = Probe
  source 1..44: mol_type = other DNA
ggtcagctaaataagctatcgggcccataccccgaaaatgttgg

SEQ ID NO: 6746 - DNA, 45 bp, synthetic construct
  misc_feature 1..45: note = Probe
  source 1..45: mol_type = other DNA
ggtcagctaaataagctatcgggcccataccccgaaaatgttggt

SEQ ID NO: 6747 - DNA, 46 bp, synthetic construct
  misc_feature 1..46: note = Probe
  source 1..46: mol_type = other DNA
ggtcagctaaataagctatcgggcccataccccgaaaatgttggtt

SEQ ID NO: 6748 - DNA, 48 bp, synthetic construct
  misc_feature 1..48: note = Probe
  source 1..48: mol_type = other DNA
ggtcagctaaataagctatcgggcccataccccgaaaatgttggttat

SEQ ID NO: 6749 - DNA, 49 bp, synthetic construct
  misc_feature 1..49: note = Probe
  source 1..49: mol_type = other DNA
ggtcagctaaataagctatcgggcccataccccgaaaatgttggttata

SEQ ID NO: 6750 - DNA, 27 bp, synthetic construct
  misc_feature 1..27: note = Probe
  source 1..27: mol_type = other DNA
ggtccagggttcaagtccctgttcggg

SEQ ID NO: 6751 - DNA, 24 bp, synthetic construct
  misc_feature 1..24: note = Probe
  source 1..24: mol_type = other DNA
ggtcccatggtgtaatggttagca

SEQ ID NO: 6752 - DNA, 32 bp, synthetic construct
  misc_feature 1..32: note = Probe
  source 1..32: mol_type = other DNA
ggtcccgggttcaatccccggcacctccacca

SEQ ID NO: 6753 - DNA, 21 bp, synthetic construct
  misc_feature 1..21: note = Probe
  source 1..21: mol_type = other DNA
ggtcctagcctttctattagc

SEQ ID NO: 6754 - DNA, 32 bp, synthetic construct
  misc_feature 1..32: note = Probe
  source 1..32: mol_type = other DNA
ggtcctgggttcgagccccagtggaaccacgg

SEQ ID NO: 6755 - DNA, 32 bp, synthetic construct
  misc_feature 1..32: note = Probe
  source 1..32: mol_type = other DNA
ggtcgatggatcgaaaccatcctctgctaggt

SEQ ID NO: 6756 - DNA, 22 bp, synthetic construct
  misc_feature 1..22: note = Probe
  source 1..22: mol_type = other DNA
ggtcgcgggttcgatccccgta

SEQ ID NO: 6757 - DNA, 32 bp, synthetic construct
  misc_feature 1..32: note = Probe
  source 1..32: mol_type = other DNA
ggtcgcgggttcgatccccgtacgggccacga

SEQ ID NO: 6758 - DNA, 32 bp, synthetic construct
  misc_feature 1..32: note = Probe
  source 1..32: mol_type = other DNA
ggtcgcgggttcgatccccgtacgggccactg

SEQ ID NO: 6759 - DNA, 20 bp, synthetic construct
  misc_feature 1..20: note = Probe
  source 1..20: mol_type = other DNA
ggtcgtggttgtagtccgtg

SEQ ID NO: 6760 - DNA, 21 bp, synthetic construct
  misc_feature 1..21: note = Probe
  source 1..21: mol_type = other DNA
ggtcgtggttgtagtccgtgc

SEQ ID NO: 6761 - DNA, 22 bp, synthetic construct
  misc_feature 1..22: note = Probe
  source 1..22: mol_type = other DNA
ggtcgtggttgtagtccgtgcg

SEQ ID NO: 6762 - DNA, 24 bp, synthetic construct
  misc_feature 1..24: note = Probe
  source 1..24: mol_type = other DNA
ggtcgtggttgtagtccgtgcgag

SEQ ID NO: 6763 - DNA, 25 bp, synthetic construct
  misc_feature 1..25: note = Probe
  source 1..25: mol_type = other DNA
ggtcgtggttgtagtccgtgcgaga

SEQ ID NO: 6764 - DNA, 29 bp, synthetic construct
  misc_feature 1..29: note = Probe
  source 1..29: mol_type = other DNA
ggtcgtggttgtagtccgtgcgagaataa

SEQ ID NO: 6765 - DNA, 31 bp, synthetic construct
  misc_feature 1..31: note = Probe
  source 1..31: mol_type = other DNA
ggtcgtggttgtagtccgtgcgagaataatg

SEQ ID NO: 6766 - DNA, 24 bp, synthetic construct
  misc_feature 1..24: note = Probe
  source 1..24: mol_type = other DNA
ggtctagtggttaggattcggcgc

SEQ ID NO: 6767 - DNA, 27 bp, synthetic construct
  misc_feature 1..27: note = Probe
  source 1..27: mol_type = other DNA
ggtctagtggttaggattcggcgctct

SEQ ID NO: 6768 - DNA, 28 bp, synthetic construct
  misc_feature 1..28: note = Probe
  source 1..28: mol_type = other DNA
ggtctagtggttaggattcggcgctctc

SEQ ID NO: 6769 - DNA, 23 bp, synthetic construct
  misc_feature 1..23: note = Probe
  source 1..23: mol_type = other DNA
ggtgcaactccaaataaaagtaa

SEQ ID NO: 6770 - DNA, 37 bp, synthetic construct
  misc_feature 1..37: note = Probe
  source 1..37: mol_type = other DNA
ggtgctaatggtggagttaaagactttttctctgatt

SEQ ID NO: 6771 - DNA, 42 bp, synthetic construct
  misc_feature 1..42: note = Probe
  source 1..42: mol_type = other DNA
ggtgctaatggtggagttaaagactttttctctgatttgtcc

SEQ ID NO: 6772 - DNA, 45 bp, synthetic construct
  misc_feature 1..45: note = Probe
  source 1..45: mol_type = other DNA
ggtgctaatggtggagttaaagactttttctctgatttgtccttg

SEQ ID NO: 6773 - DNA, 50 bp, synthetic construct
  misc_feature 1..50: note = Probe
  source 1..50: mol_type = other DNA
ggtgcttagctgttaactaagtgtttgtgggtttaagtcccattggtcta

SEQ ID NO: 6774 - DNA, 25 bp, synthetic construct
  misc_feature 1..25: note = Probe
  source 1..25: mol_type = other DNA
ggtggagttaaagactttttctctg

SEQ ID NO: 6775 - DNA, 27 bp, synthetic construct
  misc_feature 1..27: note = Probe
  source 1..27: mol_type = other DNA
ggtggagttaaagactttttctctgat

SEQ ID NO: 6776 - DNA, 28 bp, synthetic construct
  misc_feature 1..28: note = Probe
  source 1..28: mol_type = other DNA
ggtggagttaaagactttttctctgatt

SEQ ID NO: 6777 - DNA, 29 bp, synthetic construct
  misc_feature 1..29: note = Probe
  source 1..29: mol_type = other DNA
ggtggagttaaagactttttctctgattt

SEQ ID NO: 6778 - DNA, 31 bp, synthetic construct
  misc_feature 1..31: note = Probe
  source 1..31: mol_type = other DNA
ggtggagttaaagactttttctctgatttgt

SEQ ID NO: 6779 - DNA, 32 bp, synthetic construct
  misc_feature 1..32: note = Probe
  source 1..32: mol_type = other DNA
ggtggcccgggttcgactcccggtatgggaac

SEQ ID NO: 6780 - DNA, 33 bp, synthetic construct
  misc_feature 1..33: note = Probe
  source 1..33: mol_type = other DNA
ggtggcccgggttcgactcccggtatgggaaca

SEQ ID NO: 6781 - DNA, 33 bp, synthetic construct
  misc_feature 1..33: note = Probe
  source 1..33: mol_type = other DNA
ggtggcccgggttcgactcccggtatgggaacg

SEQ ID NO: 6782 - DNA, 28 bp, synthetic construct
  misc_feature 1..28: note = Probe
  source 1..28: mol_type = other DNA
ggtggtctagtggttaggattcggcgct

SEQ ID NO: 6783 - DNA, 25 bp, synthetic construct
  misc_feature 1..25: note = Probe
  source 1..25: mol_type = other DNA
ggtggttcagtggtagaattctcgc

SEQ ID NO: 6784 - DNA, 26 bp, synthetic construct
  misc_feature 1..26: note = Probe
  source 1..26: mol_type = other DNA
ggtggttcagtggtagaattctcgcc

SEQ ID NO: 6785 - DNA, 27 bp, synthetic construct
  misc_feature 1..27: note = Probe
  source 1..27: mol_type = other DNA
ggtggttcagtggtagaattctcgcct

SEQ ID NO: 6786 - DNA, 29 bp, synthetic construct
  misc_feature 1..29: note = Probe
  source 1..29: mol_type = other DNA
ggtggttcagtggtagaattctcgcctgc

SEQ ID NO: 6787 - DNA, 30 bp, synthetic construct
  misc_feature 1..30: note = Probe
  source 1..30: mol_type = other DNA
ggtggttcagtggtagaattctcgcctgcc

SEQ ID NO: 6788 - DNA, 31 bp, synthetic construct
  misc_feature 1..31: note = Probe
  source 1..31: mol_type = other DNA
ggtgtagctcagtggtagagcatttgactgc

SEQ ID NO: 6789 - DNA, 27 bp, synthetic construct
  misc_feature 1..27: note = Probe
  source 1..27: mol_type = other DNA
ggtgtagtggtatcatgcaagattccc

SEQ ID NO: 6790 - DNA, 50 bp, synthetic construct
  misc_feature 1..50: note = Probe
  source 1..50: mol_type = other DNA
ggttagcactctggactctgaatccagcgatccgagttcaaatctcggtg

SEQ ID NO: 6791 - DNA, 17 bp, synthetic construct
  misc_feature 1..17: note = Probe
  source 1..17: mol_type = other DNA
ggttaggattcggcgct

SEQ ID NO: 6792 - DNA, 19 bp, synthetic construct
  misc_feature 1..19: note = Probe
  source 1..19: mol_type = other DNA
ggttaggattcggcgctct

SEQ ID NO: 6793 - DNA, 21 bp, synthetic construct
  misc_feature 1..21: note = Probe
  source 1..21: mol_type = other DNA
ggttaggattcggcgctctca

SEQ ID NO: 6794 - DNA, 22 bp, synthetic construct
  misc_feature 1..22: note = Probe
  source 1..22: mol_type = other DNA
ggttaggcctctttttaccagc

SEQ ID NO: 6795 - DNA, 23 bp, synthetic construct
  misc_feature 1..23: note = Probe
  source 1..23: mol_type = other DNA
ggttaggcctctttttaccagct

SEQ ID NO: 6796 - DNA, 23 bp, synthetic construct
  misc_feature 1..23: note = Probe
  source 1..23: mol_type = other DNA
ggttatacccttcccgtactaat

SEQ ID NO: 6797 - DNA, 24 bp, synthetic construct
  misc_feature 1..24: note = Probe
  source 1..24: mol_type = other DNA
ggttatacccttcccgtactaatt

SEQ ID NO: 6798 - DNA, 25 bp, synthetic construct
  misc_feature 1..25: note = Probe
  source 1..25: mol_type = other DNA
ggttcaaatcccggacgagccccct

SEQ ID NO: 6799 - DNA, 25 bp, synthetic construct
  misc_feature 1..25: note = Probe
  source 1..25: mol_type = other DNA
ggttcaaatccgggtgccccctcaa

SEQ ID NO: 6800 - DNA, 23 bp, synthetic construct
  misc_feature 1..23: note = Probe
  source 1..23: mol_type = other DNA
ggttcaattccccgacggggagg

SEQ ID NO: 6801 - DNA, 25 bp, synthetic construct
  misc_feature 1..25: note = Probe
  source 1..25: mol_type = other DNA
ggttcaattccccgacggggaggtg

SEQ ID NO: 6802 - DNA, 25 bp, synthetic construct
  misc_feature 1..25: note = Probe
  source 1..25: mol_type = other DNA
ggttcaattcccggtcagggaacca

SEQ ID NO: 6803 - DNA, 19 bp, synthetic construct
  misc_feature 1..19: note = Probe
  source 1..19: mol_type = other DNA
ggttcagtggtagaattct

SEQ ID NO: 6804 - DNA, 23 bp, synthetic construct
  misc_feature 1..23: note = Probe
  source 1..23: mol_type = other DNA
ggttcagtggtagaattctcgcc

SEQ ID NO: 6805 - DNA, 24 bp, synthetic construct
  misc_feature 1..24: note = Probe
  source 1..24: mol_type = other DNA
ggttcagtggtagaattctcgcct

SEQ ID NO: 6806 - DNA, 25 bp, synthetic construct
  misc_feature 1..25: note = Probe
  source 1..25: mol_type = other DNA
ggttcagtggtagaattctcgcctg

SEQ ID NO: 6807 - DNA, 26 bp, synthetic construct
  misc_feature 1..26: note = Probe
  source 1..26: mol_type = other DNA
ggttcagtggtagaattctcgcctgc

SEQ ID NO: 6808 - DNA, 27 bp, synthetic construct
  misc_feature 1..27: note = Probe
  source 1..27: mol_type = other DNA
ggttcagtggtagaattctcgcctgcc

SEQ ID NO: 6809 - DNA, 18 bp, synthetic construct
  misc_feature 1..18: note = Probe
  source 1..18: mol_type = other DNA
ggttccatagtgtagcgg

SEQ ID NO: 6810 - DNA, 20 bp, synthetic construct
  misc_feature 1..20: note = Probe
  source 1..20: mol_type = other DNA
ggttccatagtgtagcggtt

SEQ ID NO: 6811 - DNA, 37 bp, synthetic construct
  misc_feature 1..37: note = Probe
  source 1..37: mol_type = other DNA
ggttccatagtgtagcggttatcacgtctgctttaca

SEQ ID NO: 6812 - DNA, 50 bp, synthetic construct
  misc_feature 1..50: note = Probe
  source 1..50: mol_type = other DNA
ggttccatagtgtagcggttatcacgtctgctttacacgcagaaggtcct

SEQ ID NO: 6813 - DNA, 17 bp, synthetic construct
  misc_feature 1..17: note = Probe
  source 1..17: mol_type = other DNA
ggttccatagtgtagtg

SEQ ID NO: 6814 - DNA, 18 bp, synthetic construct
  misc_feature 1..18: note = Probe
  source 1..18: mol_type = other DNA
ggttccatagtgtagtgg

SEQ ID NO: 6815 - DNA, 19 bp, synthetic construct
  misc_feature 1..19: note = Probe
  source 1..19: mol_type = other DNA
ggttccatagtgtagtggt

SEQ ID NO: 6816 - DNA, 36 bp, synthetic construct
  misc_feature 1..36: note = Probe
  source 1..36: mol_type = other DNA
ggttccatagtgtagtggttatcacatctgctttac

SEQ ID NO: 6817 - DNA, 35 bp, synthetic construct
  misc_feature 1..35: note = Probe
  source 1..35: mol_type = other DNA
ggttccatagtgtagtggttatcacgtctgcttta

SEQ ID NO: 6818 - DNA, 37 bp, synthetic construct
  misc_feature 1..37: note = Probe
  source 1..37: mol_type = other DNA
ggttccatagtgtagtggttatcacgtctgctttaca

SEQ ID NO: 6819 - DNA, 39 bp, synthetic construct
  misc_feature 1..39: note = Probe
  source 1..39: mol_type = other DNA
ggttccatagtgtagtggttatcacgtctgctttacacg

SEQ ID NO: 6820 - DNA, 19 bp, synthetic construct
  misc_feature 1..19: note = Probe
  source 1..19: mol_type = other DNA
ggttccatggtgtaatggt

SEQ ID NO: 6821 - DNA, 34 bp, synthetic construct
  misc_feature 1..34: note = Probe
  source 1..34: mol_type = other DNA
ggttccatggtgtaatggtgagcactctggactc

SEQ ID NO: 6822 - DNA, 23 bp, synthetic construct
  misc_feature 1..23: note = Probe
  source 1..23: mol_type = other DNA
ggttccatggtgtaatggttagc

SEQ ID NO: 6823 - DNA, 24 bp, synthetic construct
  misc_feature 1..24: note = Probe
  source 1..24: mol_type = other DNA
ggttccatggtgtaatggttagca

SEQ ID NO: 6824 - DNA, 27 bp, synthetic construct
  misc_feature 1..27: note = Probe
  source 1..27: mol_type = other DNA
ggttccatggtgtaatggttagcactc

SEQ ID NO: 6825 - DNA, 29 bp, synthetic construct
  misc_feature 1..29: note = Probe
  source 1..29: mol_type = other DNA
ggttccatggtgtaatggttagcactctg

SEQ ID NO: 6826 - DNA, 30 bp, synthetic construct
  misc_feature 1..30: note = Probe
  source 1..30: mol_type = other DNA
ggttccatggtgtaatggttagcactctgg

SEQ ID NO: 6827 - DNA, 32 bp, synthetic construct
  misc_feature 1..32: note = Probe
  source 1..32: mol_type = other DNA
ggttccatggtgtaatggttagcactctggac

SEQ ID NO: 6828 - DNA, 35 bp, synthetic construct
  misc_feature 1..35: note = Probe
  source 1..35: mol_type = other DNA
ggttccatggtgtaatggttagcactctggactct

SEQ ID NO: 6829 - DNA, 22 bp, synthetic construct
  misc_feature 1..22: note = Probe
  source 1..22: mol_type = other DNA
ggttccgggttcgagtcccggc

SEQ ID NO: 6830 - DNA, 25 bp, synthetic construct
  misc_feature 1..25: note = Probe
  source 1..25: mol_type = other DNA
ggttcgaaaccgggcggaaacacct

SEQ ID NO: 6831 - DNA, 25 bp, synthetic construct
  misc_feature 1..25: note = Probe
  source 1..25: mol_type = other DNA
ggttcgaatcccaccgctgccacac

SEQ ID NO: 6832 - DNA, 25 bp, synthetic construct
  misc_feature 1..25: note = Probe
  source 1..25: mol_type = other DNA
ggttcgaatcccaccgctgccaggt

SEQ ID NO: 6833 - DNA, 25 bp, synthetic construct
  misc_feature 1..25: note = Probe
  source 1..25: mol_type = other DNA
ggttcgaatcccacttctgacacaa

SEQ ID NO: 6834 - DNA, 25 bp, synthetic construct
  misc_feature 1..25: note = Probe
  source 1..25: mol_type = other DNA
ggttcgaatcccagcggtgcctccg

SEQ ID NO: 6835 - DNA, 25 bp, synthetic construct
  misc_feature 1..25: note = Probe
  source 1..25: mol_type = other DNA
ggttcgaatcctgccgactacggca

SEQ ID NO: 6836 - DNA, 25 bp, synthetic construct
  misc_feature 1..25: note = Probe
  source 1..25: mol_type = other DNA
ggttcgaatcctgccgactacgtca

SEQ ID NO: 6837 - DNA, 23 bp, synthetic construct
  misc_feature 1..23: note = Probe
  source 1..23: mol_type = other DNA
ggttcgactcccggtgtgggaac

SEQ ID NO: 6838 - DNA, 24 bp, synthetic construct
  misc_feature 1..24: note = Probe
  source 1..24: mol_type = other DNA
ggttcgactcccggtgtgggaacg

SEQ ID NO: 6839 - DNA, 25 bp, synthetic construct
  misc_feature 1..25: note = Probe
  source 1..25: mol_type = other DNA
ggttcgactcccggtgtgggaacgc

SEQ ID NO: 6840 - DNA, 24 bp, synthetic construct
  misc_feature 1..24: note = Probe
  source 1..24: mol_type = other DNA
ggttcgagtcccatctggggtggc

SEQ ID NO: 6841 - DNA, 25 bp, synthetic construct
  misc_feature 1..25: note = Probe
  source 1..25: mol_type = other DNA
ggttcgagtcccatctgggtcgcgt

SEQ ID NO: 6842 - DNA, 24 bp, synthetic construct
  misc_feature 1..24: note = Probe
  source 1..24: mol_type = other DNA
ggttcgagtcccttcgtggtcgtc

SEQ ID NO: 6843 - DNA, 25 bp, synthetic construct
  misc_feature 1..25: note = Probe
  source 1..25: mol_type = other DNA
ggttcgagtcccttcgtggtcgttg

SEQ ID NO: 6844 - DNA, 25 bp, synthetic construct
  misc_feature 1..25: note = Probe
  source 1..25: mol_type = other DNA
ggttcgatccccagcatctccagtg

SEQ ID NO: 6845 - DNA, 19 bp, synthetic construct
  misc_feature 1..19: note = Probe
  source 1..19: mol_type = other DNA
ggttcgatccccggcatct

SEQ ID NO: 6846 - DNA, 20 bp, synthetic construct
  misc_feature 1..20: note = Probe
  source 1..20: mol_type = other DNA
ggttcgatccccggcatctc

SEQ ID NO: 6847 - DNA, 23 bp, synthetic construct
  misc_feature 1..23: note = Probe
  source 1..23: mol_type = other DNA
ggttcgatccccggcatctccaa

SEQ ID NO: 6848 - DNA, 23 bp, synthetic construct
  misc_feature 1..23: note = Probe
  source 1..23: mol_type = other DNA
ggttcgatccccggcatctccag

SEQ ID NO: 6849 - DNA, 23 bp, synthetic construct
  misc_feature 1..23: note = Probe
  source 1..23: mol_type = other DNA
ggttcgatccccggcatctccat

SEQ ID NO: 6850 - DNA, 25 bp, synthetic construct
  misc_feature 1..25: note = Probe
  source 1..25: mol_type = other DNA
ggttcgatccccggcatctccattg

SEQ ID NO: 6851 - DNA, 23 bp, synthetic construct
  misc_feature 1..23: note = Probe
  source 1..23: mol_type = other DNA
ggttcgattccccgacggggaga

SEQ ID NO: 6852 - DNA, 24 bp, synthetic construct
  misc_feature 1..24: note = Probe
  source 1..24: mol_type = other DNA
ggttcgattccccgacggggagaa

SEQ ID NO: 6853 - DNA, 24 bp, synthetic construct
  misc_feature 1..24: note = Probe
  source 1..24: mol_type = other DNA
ggttcgattccccgacggggagac

SEQ ID NO: 6854 - DNA, 23 bp, synthetic construct
  misc_feature 1..23: note = Probe
  source 1..23: mol_type = other DNA
ggttcgattccccgacggggagg

SEQ ID NO: 6855 - DNA, 24 bp, synthetic construct
  misc_feature 1..24: note = Probe
  source 1..24: mol_type = other DNA
ggttcgattccccgacggggaggc

SEQ ID NO: 6856 - DNA, 25 bp, synthetic construct
  misc_feature 1..25: note = Probe
  source 1..25: mol_type = other DNA
ggttcgattccccgacggggaggca

SEQ ID NO: 6857 - DNA, 25 bp, synthetic construct
  misc_feature 1..25: note = Probe
  source 1..25: mol_type = other DNA
ggttcgattcccggccaatgcacga

SEQ ID NO: 6858 - DNA, 25 bp, synthetic construct
  misc_feature 1..25: note = Probe
  source 1..25: mol_type = other DNA
ggttcgattcccggccaatgcagca

SEQ ID NO: 6859 - DNA, 25 bp, synthetic construct
  misc_feature 1..25: note = Probe
  source 1..25: mol_type = other DNA
ggttcgattcccggtcatggaacca

SEQ ID NO: 6860 - DNA, 25 bp, synthetic construct
  misc_feature 1..25: note = Probe
  source 1..25: mol_type = other DNA
ggttcgattcctggtcagggaacca

SEQ ID NO: 6861 - DNA, 24 bp, synthetic construct
  misc_feature 1..24: note = Probe
  source 1..24: mol_type = other DNA
ggttcgattccttccttttttgtc

SEQ ID NO: 6862 - DNA, 23 bp, synthetic construct
  misc_feature 1..23: note = Probe
  source 1..23: mol_type = other DNA
ggttcgattctcatagtcctaga

SEQ ID NO: 6863 - DNA, 24 bp, synthetic construct
  misc_feature 1..24: note = Probe
  source 1..24: mol_type = other DNA
ggttcgattctcatagtcctagaa

SEQ ID NO: 6864 - DNA, 25 bp, synthetic construct
  misc_feature 1..25: note = Probe
  source 1..25: mol_type = other DNA
ggttcgattctcatagtcctagaaa

SEQ ID NO: 6865 - DNA, 22 bp, synthetic construct
  misc_feature 1..22: note = Probe
  source 1..22: mol_type = other DNA
ggttgtagtccgtgcgagaata

SEQ ID NO: 6866 - DNA, 23 bp, synthetic construct
  misc_feature 1..23: note = Probe
  source 1..23: mol_type = other DNA
ggttgtagtccgtgcgagaataa

SEQ ID NO: 6867 - DNA, 25 bp, synthetic construct
  misc_feature 1..25: note = Probe
  source 1..25: mol_type = other DNA
ggttgtagtccgtgcgagaataatg

SEQ ID NO: 6868 - DNA, 17 bp, synthetic construct
  misc_feature 1..17: note = Probe
  source 1..17: mol_type = other DNA
ggtttttcatatcattg

SEQ ID NO: 6869 - DNA, 33 bp, synthetic construct
  misc_feature 1..33: note = Probe
  source 1..33: mol_type = other DNA
ggtttttcatatcattggtcgtggttgtagtcc

SEQ ID NO: 6870 - DNA, 36 bp, synthetic construct
  misc_feature 1..36: note = Probe
  source 1..36: mol_type = other DNA
ggtttttcatatcattggtcgtggttgtagtccgtg

SEQ ID NO: 6871 - DNA, 38 bp, synthetic construct
  misc_feature 1..38: note = Probe
  source 1..38: mol_type = other DNA
ggtttttcatatcattggtcgtggttgtagtccgtgcg

SEQ ID NO: 6872 - DNA, 50 bp, synthetic construct
  misc_feature 1..50: note = Probe
  source 1..50: mol_type = other DNA
ggtttttcatatcattggtcgtggttgtagtccgtgcgagaataatgatg

SEQ ID NO: 6873 - DNA, 23 bp, synthetic construct
  misc_feature 1..23: note = Probe
  source 1..23: mol_type = other DNA
gtaaacaggagatcctgggttcg

SEQ ID NO: 6874 - DNA, 42 bp, synthetic construct
  misc_feature 1..42: note = Probe
  source 1..42: mol_type = other DNA
gtaaacaggagatcctgggttcgaatcccagcggtgcctccg

SEQ ID NO: 6875 - DNA, 23 bp, synthetic construct
  misc_feature 1..23: note = Probe
  source 1..23: mol_type = other DNA
gtaaaccaggggtcgcgagttca

SEQ ID NO: 6876 - DNA, 42 bp, synthetic construct
  misc_feature 1..42: note = Probe
  source 1..42: mol_type = other DNA
gtaaaccaggggtcgcgagttcaattctcgctggggcctgtg

SEQ ID NO: 6877 - DNA, 32 bp, synthetic construct
  misc_feature 1..32: note = Probe
  source 1..32: mol_type = other DNA
gtaaaccggagatgaaaacctttttccaagga

SEQ ID NO: 6878 - DNA, 35 bp, synthetic construct
  misc_feature 1..35: note = Probe
  source 1..35: mol_type = other DNA
gtaaaccggagatgaaaacctttttccaaggacaa

SEQ ID NO: 6879 - DNA, 36 bp, synthetic construct
  misc_feature 1..36: note = Probe
  source 1..36: mol_type = other DNA
gtaaaccggagatgaaaacctttttccaaggacaaa

SEQ ID NO: 6880 - DNA, 37 bp, synthetic construct
  misc_feature 1..37: note = Probe
  source 1..37: mol_type = other DNA
gtaaaccggagatgaaaacctttttccaaggacaaat

SEQ ID NO: 6881 - DNA, 38 bp, synthetic construct
  misc_feature 1..38: note = Probe
  source 1..38: mol_type = other DNA
gtaaaccggagatgaaaacctttttccaaggacaaatc

SEQ ID NO: 6882 - DNA, 39 bp, synthetic construct
  misc_feature 1..39: note = Probe
  source 1..39: mol_type = other DNA
gtaaaccggagatgaaaacctttttccaaggacaaatca

SEQ ID NO: 6883 - DNA, 37 bp, synthetic construct
  misc_feature 1..37: note = Probe
  source 1..37: mol_type = other DNA
gtaaataataggagcttaaacccccttatttctagga

SEQ ID NO: 6884 - DNA, 42 bp, synthetic construct
  misc_feature 1..42: note = Probe
  source 1..42: mol_type = other DNA
gtaaatatagtttaaccaaaacatcagattgtgaatctgaca

SEQ ID NO: 6885 - DNA, 43 bp, synthetic construct
  misc_feature 1..43: note = Probe
  source 1..43: mol_type = other DNA
gtaaatatagtttaaccaaaacatcagattgtgaatctgacaa

SEQ ID NO: 6886 - DNA, 45 bp, synthetic construct
  misc_feature 1..45: note = Probe
  source 1..45: mol_type = other DNA
gtaaatatagtttaaccaaaacatcagattgtgaatctgacaaca

SEQ ID NO: 6887 - DNA, 50 bp, synthetic construct
  misc_feature 1..50: note = Probe
  source 1..50: mol_type = other DNA
gtaaatatagtttaaccaaaacatcagattgtgaatctgacaacagaggc

SEQ ID NO: 6888 - DNA, 40 bp, synthetic construct
  misc_feature 1..40: note = Probe
  source 1..40: mol_type = other DNA
gtaaatctaaagacaggggttaggcctctttttaccagct

SEQ ID NO: 6889 - DNA, 26 bp, synthetic construct
  misc_feature 1..26: note = Probe
  source 1..26: mol_type = other DNA
gtaaggtcagctaaataagctatcgg

SEQ ID NO: 6890 - DNA, 29 bp, synthetic construct
  misc_feature 1..29: note = Probe
  source 1..29: mol_type = other DNA
gtaaggtcagctaaataagctatcgggcc

SEQ ID NO: 6891 - DNA, 30 bp, synthetic construct
  misc_feature 1..30: note = Probe
  source 1..30: mol_type = other DNA
gtaaggtcagctaaataagctatcgggccc

SEQ ID NO: 6892 - DNA, 31 bp, synthetic construct
  misc_feature 1..31: note = Probe
  source 1..31: mol_type = other DNA
gtaaggtcagctaaataagctatcgggccca

SEQ ID NO: 6893 - DNA, 32 bp, synthetic construct
  misc_feature 1..32: note = Probe
  source 1..32: mol_type = other DNA
gtaaggtcagctaaataagctatcgggcccat

SEQ ID NO: 6894 - DNA, 33 bp, synthetic construct
  misc_feature 1..33: note = Probe
  source 1..33: mol_type = other DNA
gtaaggtcagctaaataagctatcgggcccata

SEQ ID NO: 6895 - DNA, 34 bp, synthetic construct
  misc_feature 1..34: note = Probe
  source 1..34: mol_type = other DNA
gtaaggtcagctaaataagctatcgggcccatac

SEQ ID NO: 6896 - DNA, 35 bp, synthetic construct
  misc_feature 1..35: note = Probe
  source 1..35: mol_type = other DNA
gtaaggtcagctaaataagctatcgggcccatacc

SEQ ID NO: 6897 - DNA, 36 bp, synthetic construct
  misc_feature 1..36: note = Probe
  source 1..36: mol_type = other DNA
gtaaggtcagctaaataagctatcgggcccataccc

SEQ ID NO: 6898 - DNA, 37 bp, synthetic construct
  misc_feature 1..37: note = Probe
  source 1..37: mol_type = other DNA
gtaaggtcagctaaataagctatcgggcccatacccc

SEQ ID NO: 6899 - DNA, 39 bp, synthetic construct
  misc_feature 1..39: note = Probe
  source 1..39: mol_type = other DNA
gtaaggtcagctaaataagctatcgggcccataccccga

SEQ ID NO: 6900 - DNA, 40 bp, synthetic construct
  misc_feature 1..40: note = Probe
  source 1..40: mol_type = other DNA
gtaaggtcagctaaataagctatcgggcccataccccgaa

SEQ ID NO: 6901 - DNA, 41 bp, synthetic construct
  misc_feature 1..41: note = Probe
  source 1..41: mol_type = other DNA
gtaaggtcagctaaataagctatcgggcccataccccgaaa

SEQ ID NO: 6902 - DNA, 42 bp, synthetic construct
  misc_feature 1..42: note = Probe
  source 1..42: mol_type = other DNA
gtaaggtcagctaaataagctatcgggcccataccccgaaaa

SEQ ID NO: 6903 - DNA, 43 bp, synthetic construct
  misc_feature 1..43: note = Probe
  source 1..43: mol_type = other DNA
gtaaggtcagctaaataagctatcgggcccataccccgaaaat

SEQ ID NO: 6904 - DNA, 44 bp, synthetic construct
  misc_feature 1..44: note = Probe
  source 1..44: mol_type = other DNA
gtaaggtcagctaaataagctatcgggcccataccccgaaaatg

SEQ ID NO: 6905 - DNA, 45 bp, synthetic construct
  misc_feature 1..45: note = Probe
  source 1..45: mol_type = other DNA
gtaaggtcagctaaataagctatcgggcccataccccgaaaatgt

SEQ ID NO: 6906 - DNA, 46 bp, synthetic construct
  misc_feature 1..46: note = Probe
  source 1..46: mol_type = other DNA
gtaaggtcagctaaataagctatcgggcccataccccgaaaatgtt

SEQ ID NO: 6907 - DNA, 50 bp, synthetic construct
  misc_feature 1..50: note = Probe
  source 1..50: mol_type = other DNA
gtaaggtcagctaaataagctatcgggcccataccccgaaaatgttggtt

SEQ ID NO: 6908 - DNA, 50 bp, synthetic construct
  misc_feature 1..50: note = Probe
  source 1..50: mol_type = other DNA
gtaatcgcataaaacttaaaactttacagtcagaggttcaattcctcttc

SEQ ID NO: 6909 - DNA, 31 bp, synthetic construct
  misc_feature 1..31: note = Probe
  source 1..31: mol_type = other DNA
gtacatgcagagcaatgccgaggttgtgagt

SEQ ID NO: 6910 - DNA, 27 bp, synthetic construct
  misc_feature 1..27: note = Probe
  source 1..27: mol_type = other DNA
gtaccgttaacttccaattaactagtt

SEQ ID NO: 6911 - DNA, 30 bp, synthetic construct
  misc_feature 1..30: note = Probe
  source 1..30: mol_type = other DNA
gtaccgttaacttccaattaactagttttg

SEQ ID NO: 6912 - DNA, 31 bp, synthetic construct
  misc_feature 1..31: note = Probe
  source 1..31: mol_type = other DNA
gtaccgttaacttccaattaactagttttga

SEQ ID NO: 6913 - DNA, 33 bp, synthetic construct
  misc_feature 1..33: note = Probe
  source 1..33: mol_type = other DNA
gtaccgttaacttccaattaactagttttgaca

SEQ ID NO: 6914 - DNA, 38 bp, synthetic construct
  misc_feature 1..38: note = Probe
  source 1..38: mol_type = other DNA
gtacgaggtcccgggttcaatccccggcacctccacca

SEQ ID NO: 6915 - DNA, 33 bp, synthetic construct
  misc_feature 1..33: note = Probe
  source 1..33: mol_type = other DNA
gtagagcatgggactcttaatcccagggtcgtg

SEQ ID NO: 6916 - DNA, 27 bp, synthetic construct
  misc_feature 1..27: note = Probe
  source 1..27: mol_type = other DNA
gtagctcagtggtagagcgcatgcttt

SEQ ID NO: 6917 - DNA, 18 bp, synthetic construct
  misc_feature 1..18: note = Probe
  source 1..18: mol_type = other DNA
gtagtccgtgcgagaata

SEQ ID NO: 6918 - DNA, 21 bp, synthetic construct
  misc_feature 1..21: note = Probe
  source 1..21: mol_type = other DNA
gtagtccgtgcgagaataatg

SEQ ID NO: 6919 - DNA, 19 bp, synthetic construct
  misc_feature 1..19: note = Probe
  source 1..19: mol_type = other DNA
gtagtcgtggccgagtggt

SEQ ID NO: 6920 - DNA, 26 bp, synthetic construct
  misc_feature 1..26: note = Probe
  source 1..26: mol_type = other DNA
gtagtcgtggccgagtggttaaggcg

SEQ ID NO: 6921 - DNA, 25 bp, synthetic construct
  misc_feature 1..25: note = Probe
  source 1..25: mol_type = other DNA
gtagtcgtggccgagtggttaaggt

SEQ ID NO: 6922 - DNA, 30 bp, synthetic construct
  misc_feature 1..30: note = Probe
  source 1..30: mol_type = other DNA
gtatagctcagtggtagagcatttgactgc

SEQ ID NO: 6923 - DNA, 31 bp, synthetic construct
  misc_feature 1..31: note = Probe
  source 1..31: mol_type = other DNA
gtatagctcagtggtagagcatttgactgca

SEQ ID NO: 6924 - DNA, 27 bp, synthetic construct
  misc_feature 1..27: note = Probe
  source 1..27: mol_type = other DNA
gtatagtggtgagtatccccgcctgtc

SEQ ID NO: 6925 - DNA, 25 bp, synthetic construct
  misc_feature 1..25: note = Probe
  source 1..25: mol_type = other DNA
gtatagtggttagtactctgcgttg

SEQ ID NO: 6926 - DNA, 27 bp, synthetic construct
  misc_feature 1..27: note = Probe
  source 1..27: mol_type = other DNA
gtatagtggttagtactctgcgttgtg

SEQ ID NO: 6927 - DNA, 46 bp, synthetic construct
  misc_feature 1..46: note = Probe
  source 1..46: mol_type = other DNA
gtatcatgcaagattcccattcttgcgacccgggttcgattcccgg

SEQ ID NO: 6928 - DNA, 38 bp, synthetic construct
  misc_feature 1..38: note = Probe
  source 1..38: mol_type = other DNA
gtatgaggtcccgggttcgatccccggcatctccaagt

SEQ ID NO: 6929 - DNA, 32 bp, synthetic construct
  misc_feature 1..32: note = Probe
  source 1..32: mol_type = other DNA
gtatgattctcgcttagggtgcgagaggtccc

SEQ ID NO: 6930 - DNA, 33 bp, synthetic construct
  misc_feature 1..33: note = Probe
  source 1..33: mol_type = other DNA
gtatgattctcgcttagggtgcgagaggtcccg

SEQ ID NO: 6931 - DNA, 32 bp, synthetic construct
  misc_feature 1..32: note = Probe
  source 1..32: mol_type = other DNA
gtatgattctcgcttcgggtgcgagaggtccc

SEQ ID NO: 6932 - DNA, 33 bp, synthetic construct
  misc_feature 1..33: note = Probe
  source 1..33: mol_type = other DNA
gtatgattctcgcttcgggtgcgagaggtcccg

SEQ ID NO: 6933 - DNA, 37 bp, synthetic construct
  misc_feature 1..37: note = Probe
  source 1..37: mol_type = other DNA
gtatgattctcgcttcgggtgcgagaggtcccgggtt

SEQ ID NO: 6934 - DNA, 33 bp, synthetic construct
  misc_feature 1..33: note = Probe
  source 1..33: mol_type = other DNA
gtatgattctcgctttgggtgcgagaggtcccg

SEQ ID NO: 6935 - DNA, 34 bp, synthetic construct
  misc_feature 1..34: note = Probe
  source 1..34: mol_type = other DNA
gtatgattctcgctttgggtgcgagaggtcccgg

SEQ ID NO: 6936 - DNA, 27 bp, synthetic construct
  misc_feature 1..27: note = Probe
  source 1..27: mol_type = other DNA
gtatgtctccatctattgatgagggtc

SEQ ID NO: 6937 - DNA, 29 bp, synthetic construct
  misc_feature 1..29: note = Probe
  source 1..29: mol_type = other DNA
gtatgtctccatctattgatgagggtctt

SEQ ID NO: 6938 - DNA, 33 bp, synthetic construct
  misc_feature 1..33: note = Probe
  source 1..33: mol_type = other DNA
gtcaaagttaaattataggctaaatcctatata

SEQ ID NO: 6939 - DNA, 20 bp, synthetic construct
  misc_feature 1..20: note = Probe
  source 1..20: mol_type = other DNA
gtcacctggcaggtgcctct

SEQ ID NO: 6940 - DNA, 21 bp, synthetic construct
  misc_feature 1..21: note = Probe
  source 1..21: mol_type = other DNA
gtcacctggcaggtgcctctt

SEQ ID NO: 6941 - DNA, 22 bp, synthetic construct
  misc_feature 1..22: note = Probe
  source 1..22: mol_type = other DNA
gtcacctggcaggtgcctcttt

SEQ ID NO: 6942 - DNA, 23 bp, synthetic construct
  misc_feature 1..23: note = Probe
  source 1..23: mol_type = other DNA
gtcacctggcaggtgcctctttt

SEQ ID NO: 6943 - DNA, 23 bp, synthetic construct
  misc_feature 1..23: note = Probe
  source 1..23: mol_type = other DNA
gtcacgcgggagaccggggttca

SEQ ID NO: 6944 - DNA, 39 bp, synthetic construct
  misc_feature 1..39: note = Probe
  source 1..39: mol_type = other DNA
gtcacgcgggagaccggggttcaattccccgacggggag

SEQ ID NO: 6945 - DNA, 42 bp, synthetic construct
  misc_feature 1..42: note = Probe
  source 1..42: mol_type = other DNA
gtcacgcgggagaccggggttcaattccccgacggggaggtg

SEQ ID NO: 6946 - DNA, 40 bp, synthetic construct
  misc_feature 1..40: note = Probe
  source 1..40: mol_type = other DNA
gtcacgcgggagaccggggttcgattccccgacggggaga

SEQ ID NO: 6947 - DNA, 41 bp, synthetic construct
  misc_feature 1..41: note = Probe
  source 1..41: mol_type = other DNA
gtcacgcgggagaccggggttcgattccccgacggggagac

SEQ ID NO: 6948 - DNA, 40 bp, synthetic construct
  misc_feature 1..40: note = Probe
  source 1..40: mol_type = other DNA
gtcacgcgggagaccggggttcgattccccgacggggagg

SEQ ID NO: 6949 - DNA, 41 bp, synthetic construct
  misc_feature 1..41: note = Probe
  source 1..41: mol_type = other DNA
gtcacgcgggagaccggggttcgattccccgacggggaggc

SEQ ID NO: 6950 - DNA, 42 bp, synthetic construct
  misc_feature 1..42: note = Probe
  source 1..42: mol_type = other DNA
gtcacgcgggagaccggggttcgattccccgacggggaggca

SEQ ID NO: 6951 - DNA, 49 bp, synthetic construct
  misc_feature 1..49: note = Probe
  source 1..49: mol_type = other DNA
gtcacgcgggagaccggggttcgattccccgacggggaggcacagtaat

SEQ ID NO: 6952 - DNA, 50 bp, synthetic construct
  misc_feature 1..50: note = Probe
  source 1..50: mol_type = other DNA
gtcacgcgggagaccggggttcgattccccgacggggaggcacagtaatt

SEQ ID NO: 6953 - DNA, 17 bp, synthetic construct
  misc_feature 1..17: note = Probe
  source 1..17: mol_type = other DNA
gtcacggtggccgagtg

SEQ ID NO: 6954 - DNA, 22 bp, synthetic construct
  misc_feature 1..22: note = Probe
  source 1..22: mol_type = other DNA
gtcagaggttcaattcctcttc

SEQ ID NO: 6955 - DNA, 23 bp, synthetic construct
  misc_feature 1..23: note = Probe
  source 1..23: mol_type = other DNA
gtcagaggttcaattcctcttct

SEQ ID NO: 6956 - DNA, 24 bp, synthetic construct
  misc_feature 1..24: note = Probe
  source 1..24: mol_type = other DNA
gtcagaggttcaattcctcttctt

SEQ ID NO: 6957 - DNA, 25 bp, synthetic construct
  misc_feature 1..25: note = Probe
  source 1..25: mol_type = other DNA
gtcagaggttcaattcctcttctta

SEQ ID NO: 6958 - DNA, 28 bp, synthetic construct
  misc_feature 1..28: note = Probe
  source 1..28: mol_type = other DNA
gtcagaggttcaattcctcttcttaaca

SEQ ID NO: 6959 - DNA, 31 bp, synthetic construct
  misc_feature 1..31: note = Probe
  source 1..31: mol_type = other DNA
gtcagaggttcaattcctcttcttaacaaca

SEQ ID NO: 6960 - DNA, 25 bp, synthetic construct
  misc_feature 1..25: note = Probe
  source 1..25: mol_type = other DNA
gtcagctaaataagctatcgggccc

SEQ ID NO: 6961 - DNA, 26 bp, synthetic construct
  misc_feature 1..26: note = Probe
  source 1..26: mol_type = other DNA
gtcagctaaataagctatcgggccca

SEQ ID NO: 6962 - DNA, 27 bp, synthetic construct
  misc_feature 1..27: note = Probe
  source 1..27: mol_type = other DNA
gtcagctaaataagctatcgggcccat

SEQ ID NO: 6963 - DNA, 28 bp, synthetic construct
  misc_feature 1..28: note = Probe
  source 1..28: mol_type = other DNA
gtcagctaaataagctatcgggcccata

SEQ ID NO: 6964 - DNA, 29 bp, synthetic construct
  misc_feature 1..29: note = Probe
  source 1..29: mol_type = other DNA
gtcagctaaataagctatcgggcccatac

SEQ ID NO: 6965 - DNA, 32 bp, synthetic construct
  misc_feature 1..32: note = Probe
  source 1..32: mol_type = other DNA
gtcagctaaataagctatcgggcccatacccc

SEQ ID NO: 6966 - DNA, 33 bp, synthetic construct
  misc_feature 1..33: note = Probe
  source 1..33: mol_type = other DNA
gtcagctaaataagctatcgggcccataccccg

SEQ ID NO: 6967 - DNA, 36 bp, synthetic construct
  misc_feature 1..36: note = Probe
  source 1..36: mol_type = other DNA
gtcagctaaataagctatcgggcccataccccgaaa

SEQ ID NO: 6968 - DNA, 37 bp, synthetic construct
  misc_feature 1..37: note = Probe
  source 1..37: mol_type = other DNA
gtcagctaaataagctatcgggcccataccccgaaaa

SEQ ID NO: 6969 - DNA, 38 bp, synthetic construct
  misc_feature 1..38: note = Probe
  source 1..38: mol_type = other DNA
gtcagctaaataagctatcgggcccataccccgaaaat

SEQ ID NO: 6970 - DNA, 39 bp, synthetic construct
  misc_feature 1..39: note = Probe
  source 1..39: mol_type = other DNA
gtcagctaaataagctatcgggcccataccccgaaaatg

SEQ ID NO: 6971 - DNA, 40 bp, synthetic construct
  misc_feature 1..40: note = Probe
  source 1..40: mol_type = other DNA
gtcagctaaataagctatcgggcccataccccgaaaatgt

SEQ ID NO: 6972 - DNA, 41 bp, synthetic construct
  misc_feature 1..41: note = Probe
  source 1..41: mol_type = other DNA
gtcagctaaataagctatcgggcccataccccgaaaatgtt

SEQ ID NO: 6973 - DNA, 43 bp, synthetic construct
  misc_feature 1..43: note = Probe
  source 1..43: mol_type = other DNA
gtcagctaaataagctatcgggcccataccccgaaaatgttgg

SEQ ID NO: 6974 - DNA, 44 bp, synthetic construct
  misc_feature 1..44: note = Probe
  source 1..44: mol_type = other DNA
gtcagctaaataagctatcgggcccataccccgaaaatgttggt

SEQ ID NO: 6975 - DNA, 45 bp, synthetic construct
  misc_feature 1..45: note = Probe
  source 1..45: mol_type = other DNA
gtcagctaaataagctatcgggcccataccccgaaaatgttggtt

SEQ ID NO: 6976 - DNA, 46 bp, synthetic construct
  misc_feature 1..46: note = Probe
  source 1..46: mol_type = other DNA
gtcagctaaataagctatcgggcccataccccgaaaatgttggtta

SEQ ID NO: 6977 - DNA, 16 bp, synthetic construct
  misc_feature 1..16: note = Probe
  source 1..16: mol_type = other DNA
gtcaggatggccgagc

SEQ ID NO: 6978 - DNA, 17 bp, synthetic construct
  misc_feature 1..17: note = Probe
  source 1..17: mol_type = other DNA
gtcaggatggccgagcg

SEQ ID NO: 6979 - DNA, 18 bp, synthetic construct
  misc_feature 1..18: note = Probe
  source 1..18: mol_type = other DNA
gtcaggatggccgagcgg

SEQ ID NO: 6980 - DNA, 19 bp, synthetic construct
  misc_feature 1..19: note = Probe
  source 1..19: mol_type = other DNA
gtcaggatggccgagcggt

SEQ ID NO: 6981 - DNA, 20 bp, synthetic construct
  misc_feature 1..20: note = Probe
  source 1..20: mol_type = other DNA
gtcaggatggccgagcggtc

SEQ ID NO: 6982 - DNA, 21 bp, synthetic construct
  misc_feature 1..21: note = Probe
  source 1..21: mol_type = other DNA
gtcaggatggccgagcggtct

SEQ ID NO: 6983 - DNA, 22 bp, synthetic construct
  misc_feature 1..22: note = Probe
  source 1..22: mol_type = other DNA
gtcaggatggccgagcggtcta

SEQ ID NO: 6984 - DNA, 23 bp, synthetic construct
  misc_feature 1..23: note = Probe
  source 1..23: mol_type = other DNA
gtcaggatggccgagcggtctaa

SEQ ID NO: 6985 - DNA, 24 bp, synthetic construct
  misc_feature 1..24: note = Probe
  source 1..24: mol_type = other DNA
gtcaggatggccgagcggtctaag

SEQ ID NO: 6986 - DNA, 25 bp, synthetic construct
  misc_feature 1..25: note = Probe
  source 1..25: mol_type = other DNA
gtcaggatggccgagcggtctaagg

SEQ ID NO: 6987 - DNA, 26 bp, synthetic construct
  misc_feature 1..26: note = Probe
  source 1..26: mol_type = other DNA
gtcaggatggccgagcggtctaaggc

SEQ ID NO: 6988 - DNA, 27 bp, synthetic construct
  misc_feature 1..27: note = Probe
  source 1..27: mol_type = other DNA
gtcaggatggccgagcggtctaaggcg

SEQ ID NO: 6989 - DNA, 31 bp, synthetic construct
  misc_feature 1..31: note = Probe
  source 1..31: mol_type = other DNA
gtcaggatggccgagcggtctaaggcgctgc

SEQ ID NO: 6990 - DNA, 32 bp, synthetic construct
  misc_feature 1..32: note = Probe
  source 1..32: mol_type = other DNA
gtcaggatggccgagcggtctaaggcgctgcg

SEQ ID NO: 6991 - DNA, 33 bp, synthetic construct
  misc_feature 1..33: note = Probe
  source 1..33: mol_type = other DNA
gtcaggatggccgagcggtctaaggcgctgcgt

SEQ ID NO: 6992 - DNA, 50 bp, synthetic construct
  misc_feature 1..50: note = Probe
  source 1..50: mol_type = other DNA
gtcaggatggccgagcggtctaaggcgctgcgttcaggtcgcagtctccc

SEQ ID NO: 6993 - DNA, 16 bp, synthetic construct
  misc_feature 1..16: note = Probe
  source 1..16: mol_type = other DNA
gtcaggatggccgagt

SEQ ID NO: 6994 - DNA, 18 bp, synthetic construct
  misc_feature 1..18: note = Probe
  source 1..18: mol_type = other DNA
gtcaggatggccgagtgg

SEQ ID NO: 6995 - DNA, 19 bp, synthetic construct
  misc_feature 1..19: note = Probe
  source 1..19: mol_type = other DNA
gtcaggatggccgagtggt

SEQ ID NO: 6996 - DNA, 20 bp, synthetic construct
  misc_feature 1..20: note = Probe
  source 1..20: mol_type = other DNA
gtcaggatggccgagtggtc

SEQ ID NO: 6997 - DNA, 21 bp, synthetic construct
  misc_feature 1..21: note = Probe
  source 1..21: mol_type = other DNA
gtcaggatggccgagtggtct

SEQ ID NO: 6998 - DNA, 22 bp, synthetic construct
  misc_feature 1..22: note = Probe
  source 1..22: mol_type = other DNA
gtcaggatggccgagtggtcta

SEQ ID NO: 6999 - DNA, 23 bp, synthetic construct
  misc_feature 1..23: note = Probe
  source 1..23: mol_type = other DNA
gtcaggatggccgagtggtctaa

SEQ ID NO: 7000 - DNA, 24 bp, synthetic construct
  misc_feature 1..24: note = Probe
  source 1..24: mol_type = other DNA
gtcaggatggccgagtggtctaag

SEQ ID NO: 7001 - DNA, 27 bp, synthetic construct
  misc_feature 1..27: note = Probe
  source 1..27: mol_type = other DNA
gtcccatctggggtggcctgtgacttt

SEQ ID NO: 7002 - DNA, 31 bp, synthetic construct
  misc_feature 1..31: note = Probe
  source 1..31: mol_type = other DNA
gtcccgggttcaatccccggcacctccacca

SEQ ID NO: 7003 - DNA, 27 bp, synthetic construct
  misc_feature 1..27: note = Probe
  source 1..27: mol_type = other DNA
gtccttggaaaaaggttttcatctccg

SEQ ID NO: 7004 - DNA, 17 bp, synthetic construct
  misc_feature 1..17: note = Probe
  source 1..17: mol_type = other DNA
gtccttgtagtataaac

SEQ ID NO: 7005 - DNA, 21 bp, synthetic construct
  misc_feature 1..21: note = Probe
  source 1..21: mol_type = other DNA
gtccttgtagtataaactaat

SEQ ID NO: 7006 - DNA, 22 bp, synthetic construct
  misc_feature 1..22: note = Probe
  source 1..22: mol_type = other DNA
gtccttgtagtataaactaata

SEQ ID NO: 7007 - DNA, 23 bp, synthetic construct
  misc_feature 1..23: note = Probe
  source 1..23: mol_type = other DNA
gtccttgtagtataaactaatac

SEQ ID NO: 7008 - DNA, 24 bp, synthetic construct
  misc_feature 1..24: note = Probe
  source 1..24: mol_type = other DNA
gtccttgtagtataaactaataca

SEQ ID NO: 7009 - DNA, 25 bp, synthetic construct
  misc_feature 1..25: note = Probe
  source 1..25: mol_type = other DNA
gtccttgtagtataaactaatacac

SEQ ID NO: 7010 - DNA, 32 bp, synthetic construct
  misc_feature 1..32: note = Probe
  source 1..32: mol_type = other DNA
gtccttgtagtataaactaatacaccagtctt

SEQ ID NO: 7011 - DNA, 33 bp, synthetic construct
  misc_feature 1..33: note = Probe
  source 1..33: mol_type = other DNA
gtccttgtagtataaactaatacaccagtcttg

SEQ ID NO: 7012 - DNA, 34 bp, synthetic construct
  misc_feature 1..34: note = Probe
  source 1..34: mol_type = other DNA
gtccttgtagtataaactaatacaccagtcttgt

SEQ ID NO: 7013 - DNA, 35 bp, synthetic construct
  misc_feature 1..35: note = Probe
  source 1..35: mol_type = other DNA
gtccttgtagtataaactaatacaccagtcttgta

SEQ ID NO: 7014 - DNA, 39 bp, synthetic construct
  misc_feature 1..39: note = Probe
  source 1..39: mol_type = other DNA
gtccttgtagtataaactaatacaccagtcttgtaaacc

SEQ ID NO: 7015 - DNA, 40 bp, synthetic construct
  misc_feature 1..40: note = Probe
  source 1..40: mol_type = other DNA
gtccttgtagtataaactaatacaccagtcttgtaaaccg

SEQ ID NO: 7016 - DNA, 31 bp, synthetic construct
  misc_feature 1..31: note = Probe
  source 1..31: mol_type = other DNA
gtcgatggatcgaaaccatcctctgctaggt

SEQ ID NO: 7017 - DNA, 31 bp, synthetic construct
  misc_feature 1..31: note = Probe
  source 1..31: mol_type = other DNA
gtcgcgggttcgatccccgtacgggccacga

SEQ ID NO: 7018 - DNA, 17 bp, synthetic construct
  misc_feature 1..17: note = Probe
  source 1..17: mol_type = other DNA
gtcggtagagcatgaga

SEQ ID NO: 7019 - DNA, 18 bp, synthetic construct
  misc_feature 1..18: note = Probe
  source 1..18: mol_type = other DNA
gtcggtagagcatgagac

SEQ ID NO: 7020 - DNA, 20 bp, synthetic construct
  misc_feature 1..20: note = Probe
  source 1..20: mol_type = other DNA
gtcggtagagcatgagactc

SEQ ID NO: 7021 - DNA, 36 bp, synthetic construct
  misc_feature 1..36: note = Probe
  source 1..36: mol_type = other DNA
gtcggtagagcatgagactcttaatctcagggtcgt

SEQ ID NO: 7022 - DNA, 20 bp, synthetic construct
  misc_feature 1..20: note = Probe
  source 1..20: mol_type = other DNA
gtcggtagagcatgggactc

SEQ ID NO: 7023 - DNA, 26 bp, synthetic construct
  misc_feature 1..26: note = Probe
  source 1..26: mol_type = other DNA
gtcgtggttgtagtccgtgcgagaat

SEQ ID NO: 7024 - DNA, 30 bp, synthetic construct
  misc_feature 1..30: note = Probe
  source 1..30: mol_type = other DNA
gtcgtggttgtagtccgtgcgagaataatg

SEQ ID NO: 7025 - DNA, 16 bp, synthetic construct
  misc_feature 1..16: note = Probe
  source 1..16: mol_type = other DNA
gtctaacaacatggct

SEQ ID NO: 7026 - DNA, 17 bp, synthetic construct
  misc_feature 1..17: note = Probe
  source 1..17: mol_type = other DNA
gtctaacaacatggctt

SEQ ID NO: 7027 - DNA, 24 bp, synthetic construct
  misc_feature 1..24: note = Probe
  source 1..24: mol_type = other DNA
gtctaacaacatggctttctcaac

SEQ ID NO: 7028 - DNA, 25 bp, synthetic construct
  misc_feature 1..25: note = Probe
  source 1..25: mol_type = other DNA
gtctaacaacatggctttctcaact

SEQ ID NO: 7029 - DNA, 27 bp, synthetic construct
  misc_feature 1..27: note = Probe
  source 1..27: mol_type = other DNA
gtctagcggttaggattcctggttttc

SEQ ID NO: 7030 - DNA, 50 bp, synthetic construct
  misc_feature 1..50: note = Probe
  source 1..50: mol_type = other DNA
gtctagcggttaggattcctggttttcacccaggcggcccgggttcgact

SEQ ID NO: 7031 - DNA, 24 bp, synthetic construct
  misc_feature 1..24: note = Probe
  source 1..24: mol_type = other DNA
gtctaggggtatgattctcgctta

SEQ ID NO: 7032 - DNA, 24 bp, synthetic construct
  misc_feature 1..24: note = Probe
  source 1..24: mol_type = other DNA
gtctaggggtatgattctcgcttc

SEQ ID NO: 7033 - DNA, 24 bp, synthetic construct
  misc_feature 1..24: note = Probe
  source 1..24: mol_type = other DNA
gtctaggggtatgattctcgcttt

SEQ ID NO: 7034 - DNA, 23 bp, synthetic construct
  misc_feature 1..23: note = Probe
  source 1..23: mol_type = other DNA
gtctagtggttaggattcggcgc

SEQ ID NO: 7035 - DNA, 25 bp, synthetic construct
  misc_feature 1..25: note = Probe
  source 1..25: mol_type = other DNA
gtctagtggttaggattcggcgctc

SEQ ID NO: 7036 - DNA, 27 bp, synthetic construct
  misc_feature 1..27: note = Probe
  source 1..27: mol_type = other DNA
gtctagtggttaggattcggcgctctc

SEQ ID NO: 7037 - DNA, 25 bp, synthetic construct
  misc_feature 1..25: note = Probe
  source 1..25: mol_type = other DNA
gtctccatctattgatgagggtctt

SEQ ID NO: 7038 - DNA, 27 bp, synthetic construct
  misc_feature 1..27: note = Probe
  source 1..27: mol_type = other DNA
gtctccatctattgatgagggtcttac

SEQ ID NO: 7039 - DNA, 39 bp, synthetic construct
  misc_feature 1..39: note = Probe
  source 1..39: mol_type = other DNA
gtctgcaccaggatggccgagtggttaaggcgttggact

SEQ ID NO: 7040 - DNA, 40 bp, synthetic construct
  misc_feature 1..40: note = Probe
  source 1..40: mol_type = other DNA
gtctgcaccaggatggccgagtggttaaggcgttggactt

SEQ ID NO: 7041 - DNA, 42 bp, synthetic construct
  misc_feature 1..42: note = Probe
  source 1..42: mol_type = other DNA
gtcttgtaaaccggagatgaaaacctttttccaaggacaaat

SEQ ID NO: 7042 - DNA, 27 bp, synthetic construct
  misc_feature 1..27: note = Probe
  source 1..27: mol_type = other DNA
gtgaatctgacaacagaggcttacgac

SEQ ID NO: 7043 - DNA, 29 bp, synthetic construct
  misc_feature 1..29: note = Probe
  source 1..29: mol_type = other DNA
gtgaatctgacaacagaggcttacgaccc

SEQ ID NO: 7044 - DNA, 30 bp, synthetic construct
  misc_feature 1..30: note = Probe
  source 1..30: mol_type = other DNA
gtgaatctgacaacagaggcttacgacccc

SEQ ID NO: 7045 - DNA, 32 bp, synthetic construct
  misc_feature 1..32: note = Probe
  source 1..32: mol_type = other DNA
gtgaatctgacaacagaggcttacgacccctt

SEQ ID NO: 7046 - DNA, 40 bp, synthetic construct
  misc_feature 1..40: note = Probe
  source 1..40: mol_type = other DNA
gtgaatctgacaacagaggcttacgaccccttatttaccg

SEQ ID NO: 7047 - DNA, 41 bp, synthetic construct
  misc_feature 1..41: note = Probe
  source 1..41: mol_type = other DNA
gtgaatctgacaacagaggcttacgaccccttatttaccga

SEQ ID NO: 7048 - DNA, 42 bp, synthetic construct
  misc_feature 1..42: note = Probe
  source 1..42: mol_type = other DNA
gtgaatctgacaacagaggcttacgaccccttatttaccgag

SEQ ID NO: 7049 - DNA, 49 bp, synthetic construct
  misc_feature 1..49: note = Probe
  source 1..49: mol_type = other DNA
gtgagtatccccgcctgtcacgcgggagaccggggttcgattccccgac

SEQ ID NO: 7050 - DNA, 23 bp, synthetic construct
  misc_feature 1..23: note = Probe
  source 1..23: mol_type = other DNA
gtgatcgtatagtggttagtact

SEQ ID NO: 7051 - DNA, 24 bp, synthetic construct
  misc_feature 1..24: note = Probe
  source 1..24: mol_type = other DNA
gtgatcgtatagtggttagtactc

SEQ ID NO: 7052 - DNA, 25 bp, synthetic construct
  misc_feature 1..25: note = Probe
  source 1..25: mol_type = other DNA
gtgatcgtatagtggttagtactct

SEQ ID NO: 7053 - DNA, 26 bp, synthetic construct
  misc_feature 1..26: note = Probe
  source 1..26: mol_type = other DNA
gtgatcgtatagtggttagtactctg

SEQ ID NO: 7054 - DNA, 27 bp, synthetic construct
  misc_feature 1..27: note = Probe
  source 1..27: mol_type = other DNA
gtgatcgtatagtggttagtactctgc

SEQ ID NO: 7055 - DNA, 17 bp, synthetic construct
  misc_feature 1..17: note = Probe
  source 1..17: mol_type = other DNA
gtgcacttggacgaacc

SEQ ID NO: 7056 - DNA, 37 bp, synthetic construct
  misc_feature 1..37: note = Probe
  source 1..37: mol_type = other DNA
gtgctaatggtggagttaaagactttttctctgattt

SEQ ID NO: 7057 - DNA, 17 bp, synthetic construct
  misc_feature 1..17: note = Probe
  source 1..17: mol_type = other DNA
gtggagttaaagacttt

SEQ ID NO: 7058 - DNA, 25 bp, synthetic construct
  misc_feature 1..25: note = Probe
  source 1..25: mol_type = other DNA
gtggagttaaagactttttctctga

SEQ ID NO: 7059 - DNA, 27 bp, synthetic construct
  misc_feature 1..27: note = Probe
  source 1..27: mol_type = other DNA
gtggagttaaagactttttctctgatt

SEQ ID NO: 7060 - DNA, 28 bp, synthetic construct
  misc_feature 1..28: note = Probe
  source 1..28: mol_type = other DNA
gtggagttaaagactttttctctgattt

SEQ ID NO: 7061 - DNA, 29 bp, synthetic construct
  misc_feature 1..29: note = Probe
  source 1..29: mol_type = other DNA
gtggagttaaagactttttctctgatttg

SEQ ID NO: 7062 - DNA, 30 bp, synthetic construct
  misc_feature 1..30: note = Probe
  source 1..30: mol_type = other DNA
gtggagttaaagactttttctctgatttgt

SEQ ID NO: 7063 - DNA, 32 bp, synthetic construct
  misc_feature 1..32: note = Probe
  source 1..32: mol_type = other DNA
gtggagttaaagactttttctctgatttgtcc

SEQ ID NO: 7064 - DNA, 33 bp, synthetic construct
  misc_feature 1..33: note = Probe
  source 1..33: mol_type = other DNA
gtggcccgggttcgactcccggtatgggaacaa

SEQ ID NO: 7065 - DNA, 23 bp, synthetic construct
  misc_feature 1..23: note = Probe
  source 1..23: mol_type = other DNA
gtggggttttgcagtccttagct

SEQ ID NO: 7066 - DNA, 35 bp, synthetic construct
  misc_feature 1..35: note = Probe
  source 1..35: mol_type = other DNA
gtggtaagcatagctgccttccaagcagttgaccc

SEQ ID NO: 7067 - DNA, 17 bp, synthetic construct
  misc_feature 1..17: note = Probe
  source 1..17: mol_type = other DNA
gtggtagaattctcgcc

SEQ ID NO: 7068 - DNA, 18 bp, synthetic construct
  misc_feature 1..18: note = Probe
  source 1..18: mol_type = other DNA
gtggtagaattctcgcct

SEQ ID NO: 7069 - DNA, 19 bp, synthetic construct
  misc_feature 1..19: note = Probe
  source 1..19: mol_type = other DNA
gtggtagaattctcgcctg

SEQ ID NO: 7070 - DNA, 20 bp, synthetic construct
  misc_feature 1..20: note = Probe
  source 1..20: mol_type = other DNA
gtggtagaattctcgcctgc

SEQ ID NO: 7071 - DNA, 21 bp, synthetic construct
  misc_feature 1..21: note = Probe
  source 1..21: mol_type = other DNA
gtggtagaattctcgcctgcc

SEQ ID NO: 7072 - DNA, 18 bp, synthetic construct
  misc_feature 1..18: note = Probe
  source 1..18: mol_type = other DNA
gtggtatcatgcaagatt

SEQ ID NO: 7073 - DNA, 19 bp, synthetic construct
  misc_feature 1..19: note = Probe
  source 1..19: mol_type = other DNA
gtggtatcatgcaagattc

SEQ ID NO: 7074 - DNA, 28 bp, synthetic construct
  misc_feature 1..28: note = Probe
  source 1..28: mol_type = other DNA
gtggtctagtggttaggattcggcgctc

SEQ ID NO: 7075 - DNA, 29 bp, synthetic construct
  misc_feature 1..29: note = Probe
  source 1..29: mol_type = other DNA
gtggtctagtggttaggattcggcgctct

SEQ ID NO: 7076 - DNA, 30 bp, synthetic construct
  misc_feature 1..30: note = Probe
  source 1..30: mol_type = other DNA
gtggtctagtggttaggattcggcgctctc

SEQ ID NO: 7077 - DNA, 31 bp, synthetic construct
  misc_feature 1..31: note = Probe
  source 1..31: mol_type = other DNA
gtggtctagtggttaggattcggcgctctca

SEQ ID NO: 7078 - DNA, 35 bp, synthetic construct
  misc_feature 1..35: note = Probe
  source 1..35: mol_type = other DNA
gtggtgagcatagctgccttccaagcagttgaccc

SEQ ID NO: 7079 - DNA, 17 bp, synthetic construct
  misc_feature 1..17: note = Probe
  source 1..17: mol_type = other DNA
gtggttaggattcggcg

SEQ ID NO: 7080 - DNA, 20 bp, synthetic construct
  misc_feature 1..20: note = Probe
  source 1..20: mol_type = other DNA
gtggttaggattcggcgctc

SEQ ID NO: 7081 - DNA, 21 bp, synthetic construct
  misc_feature 1..21: note = Probe
  source 1..21: mol_type = other DNA
gtggttaggattcggcgctct

SEQ ID NO: 7082 - DNA, 22 bp, synthetic construct
  misc_feature 1..22: note = Probe
  source 1..22: mol_type = other DNA
gtggttaggattcggcgctctc

SEQ ID NO: 7083 - DNA, 31 bp, synthetic construct
  misc_feature 1..31: note = Probe
  source 1..31: mol_type = other DNA
gtggttaggattcggcgctctcaccgccgcg

SEQ ID NO: 7084 - DNA, 17 bp, synthetic construct
  misc_feature 1..17: note = Probe
  source 1..17: mol_type = other DNA
gtggttagtactctgcg

SEQ ID NO: 7085 - DNA, 17 bp, synthetic construct
  misc_feature 1..17: note = Probe
  source 1..17: mol_type = other DNA
gtggttatcacgttcgc

SEQ ID NO: 7086 - DNA, 19 bp, synthetic construct
  misc_feature 1..19: note = Probe
  source 1..19: mol_type = other DNA
gtggttatcacgttcgcct

SEQ ID NO: 7087 - DNA, 22 bp, synthetic construct
  misc_feature 1..22: note = Probe
  source 1..22: mol_type = other DNA
gtggttatcacgttcgcctcac

SEQ ID NO: 7088 - DNA, 21 bp, synthetic construct
  misc_feature 1..21: note = Probe
  source 1..21: mol_type = other DNA
gtggttcagtggtagaattct

SEQ ID NO: 7089 - DNA, 24 bp, synthetic construct
  misc_feature 1..24: note = Probe
  source 1..24: mol_type = other DNA
gtggttcagtggtagaattctcgc

SEQ ID NO: 7090 - DNA, 25 bp, synthetic construct
  misc_feature 1..25: note = Probe
  source 1..25: mol_type = other DNA
gtggttcagtggtagaattctcgcc

SEQ ID NO: 7091 - DNA, 26 bp, synthetic construct
  misc_feature 1..26: note = Probe
  source 1..26: mol_type = other DNA
gtggttcagtggtagaattctcgcct

SEQ ID NO: 7092 - DNA, 27 bp, synthetic construct
  misc_feature 1..27: note = Probe
  source 1..27: mol_type = other DNA
gtggttcagtggtagaattctcgcctg

SEQ ID NO: 7093 - DNA, 28 bp, synthetic construct
  misc_feature 1..28: note = Probe
  source 1..28: mol_type = other DNA
gtggttcagtggtagaattctcgcctgc

SEQ ID NO: 7094 - DNA, 29 bp, synthetic construct
  misc_feature 1..29: note = Probe
  source 1..29: mol_type = other DNA
gtggttcagtggtagaattctcgcctgcc

SEQ ID NO: 7095 - DNA, 20 bp, synthetic construct
  misc_feature 1..20: note = Probe
  source 1..20: mol_type = other DNA
gtggttgtagtccgtgcgag

SEQ ID NO: 7096 - DNA, 23 bp, synthetic construct
  misc_feature 1..23: note = Probe
  source 1..23: mol_type = other DNA
gtggttgtagtccgtgcgagaat

SEQ ID NO: 7097 - DNA, 24 bp, synthetic construct
  misc_feature 1..24: note = Probe
  source 1..24: mol_type = other DNA
gtggttgtagtccgtgcgagaata

SEQ ID NO: 7098 - DNA, 27 bp, synthetic construct
  misc_feature 1..27: note = Probe
  source 1..27: mol_type = other DNA
gtggttgtagtccgtgcgagaataatg

SEQ ID NO: 7099 - DNA, 27 bp, synthetic construct
  misc_feature 1..27: note = Probe
  source 1..27: mol_type = other DNA
gtgtaatggttagcactctggactctg

SEQ ID NO: 7100 - DNA, 41 bp, synthetic construct
  misc_feature 1..41: note = Probe
  source 1..41: mol_type = other DNA
gtgtagcttaacacaaagcacccaacttacacttaggagat

SEQ ID NO: 7101 - DNA, 27 bp, synthetic construct
  misc_feature 1..27: note = Probe
  source 1..27: mol_type = other DNA
gtgtagtggtatcatgcaagattccca

SEQ ID NO: 7102 - DNA, 24 bp, synthetic construct
  misc_feature 1..24: note = Probe
  source 1..24: mol_type = other DNA
gtgtagtggttatcacgttcgcct

SEQ ID NO: 7103 - DNA, 45 bp, synthetic construct
  misc_feature 1..45: note = Probe
  source 1..45: mol_type = other DNA
gtgtagtggttatcacgttcgcctcacacgcgaaaggtccccggt

SEQ ID NO: 7104 - DNA, 26 bp, synthetic construct
  misc_feature 1..26: note = Probe
  source 1..26: mol_type = other DNA
gtgtttgtgggtttaagtcccattgg

SEQ ID NO: 7105 - DNA, 27 bp, synthetic construct
  misc_feature 1..27: note = Probe
  source 1..27: mol_type = other DNA
gtgtttgtgggtttaagtcccattggt

SEQ ID NO: 7106 - DNA, 28 bp, synthetic construct
  misc_feature 1..28: note = Probe
  source 1..28: mol_type = other DNA
gtgtttgtgggtttaagtcccattggtc

SEQ ID NO: 7107 - DNA, 32 bp, synthetic construct
  misc_feature 1..32: note = Probe
  source 1..32: mol_type = other DNA
gtgtttgtgggtttaagtcccattggtctagt

SEQ ID NO: 7108 - DNA, 33 bp, synthetic construct
  misc_feature 1..33: note = Probe
  source 1..33: mol_type = other DNA
gtgtttgtgggtttaagtcccattggtctagta

SEQ ID NO: 7109 - DNA, 22 bp, synthetic construct
  misc_feature 1..22: note = Probe
  source 1..22: mol_type = other DNA
gttaaagactttttctctgatt

SEQ ID NO: 7110 - DNA, 23 bp, synthetic construct
  misc_feature 1..23: note = Probe
  source 1..23: mol_type = other DNA
gttaaagactttttctctgattt

SEQ ID NO: 7111 - DNA, 23 bp, synthetic construct
  misc_feature 1..23: note = Probe
  source 1..23: mol_type = other DNA
gttaaagattaagagaaccaaca

SEQ ID NO: 7112 - DNA, 25 bp, synthetic construct
  misc_feature 1..25: note = Probe
  source 1..25: mol_type = other DNA
gttaaagattaagagaaccaacacc

SEQ ID NO: 7113 - DNA, 31 bp, synthetic construct
  misc_feature 1..31: note = Probe
  source 1..31: mol_type = other DNA
gttaaagattaagagaaccaacacctcttta

SEQ ID NO: 7114 - DNA, 32 bp, synthetic construct
  misc_feature 1..32: note = Probe
  source 1..32: mol_type = other DNA
gttaaagattaagagaaccaacacctctttac

SEQ ID NO: 7115 - DNA, 33 bp, synthetic construct
  misc_feature 1..33: note = Probe
  source 1..33: mol_type = other DNA
gttaaagattaagagaaccaacacctctttaca

SEQ ID NO: 7116 - DNA, 36 bp, synthetic construct
  misc_feature 1..36: note = Probe
  source 1..36: mol_type = other DNA
gttaaagattaagagaaccaacacctctttacagtg

SEQ ID NO: 7117 - DNA, 37 bp, synthetic construct
  misc_feature 1..37: note = Probe
  source 1..37: mol_type = other DNA
gttaaagattaagagaaccaacacctctttacagtga

SEQ ID NO: 7118 - DNA, 38 bp, synthetic construct
  misc_feature 1..38: note = Probe
  source 1..38: mol_type = other DNA
gttaaagattaagagaaccaacacctctttacagtgaa

SEQ ID NO: 7119 - DNA, 39 bp, synthetic construct
  misc_feature 1..39: note = Probe
  source 1..39: mol_type = other DNA
gttaaagattaagagaaccaacacctctttacagtgaaa

SEQ ID NO: 7120 - DNA, 40 bp, synthetic construct
  misc_feature 1..40: note = Probe
  source 1..40: mol_type = other DNA
gttaaagattaagagaaccaacacctctttacagtgaaat

SEQ ID NO: 7121 - DNA, 41 bp, synthetic construct
  misc_feature 1..41: note = Probe
  source 1..41: mol_type = other DNA
gttaaagattaagagaaccaacacctctttacagtgaaatg

SEQ ID NO: 7122 - DNA, 42 bp, synthetic construct
  misc_feature 1..42: note = Probe
  source 1..42: mol_type = other DNA
gttaaagattaagagaaccaacacctctttacagtgaaatgc

SEQ ID NO: 7123 - DNA, 45 bp, synthetic construct
  misc_feature 1..45: note = Probe
  source 1..45: mol_type = other DNA
gttaaagattaagagaaccaacacctctttacagtgaaatgcccc

SEQ ID NO: 7124 - DNA, 46 bp, synthetic construct
  misc_feature 1..46: note = Probe
  source 1..46: mol_type = other DNA
gttaaagattaagagaaccaacacctctttacagtgaaatgcccca

SEQ ID NO: 7125 - DNA, 50 bp, synthetic construct
  misc_feature 1..50: note = Probe
  source 1..50: mol_type = other DNA
gttaaagattaagagaaccaacacctctttacagtgaaatgccccaacta

SEQ ID NO: 7126 - DNA, 23 bp, synthetic construct
  misc_feature 1..23: note = Probe
  source 1..23: mol_type = other DNA
gttaactaagtgtttgtgggttt

SEQ ID NO: 7127 - DNA, 38 bp, synthetic construct
  misc_feature 1..38: note = Probe
  source 1..38: mol_type = other DNA
gttaactaagtgtttgtgggtttaagtcccattggtct

SEQ ID NO: 7128 - DNA, 41 bp, synthetic construct
  misc_feature 1..41: note = Probe
  source 1..41: mol_type = other DNA
gttaactaagtgtttgtgggtttaagtcccattggtctagt

SEQ ID NO: 7129 - DNA, 43 bp, synthetic construct
  misc_feature 1..43: note = Probe
  source 1..43: mol_type = other DNA
gttaactaagtgtttgtgggtttaagtcccattggtctagtaa

SEQ ID NO: 7130 - DNA, 21 bp, synthetic construct
  misc_feature 1..21: note = Probe
  source 1..21: mol_type = other DNA
gttaagatggcagagcccggc

SEQ ID NO: 7131 - DNA, 22 bp, synthetic construct
  misc_feature 1..22: note = Probe
  source 1..22: mol_type = other DNA
gttaagatggcagagcccggta

SEQ ID NO: 7132 - DNA, 23 bp, synthetic construct
  misc_feature 1..23: note = Probe
  source 1..23: mol_type = other DNA
gttaagatggcagagcccggtaa

SEQ ID NO: 7133 - DNA, 24 bp, synthetic construct
  misc_feature 1..24: note = Probe
  source 1..24: mol_type = other DNA
gttaagatggcagagcccggtaat

SEQ ID NO: 7134 - DNA, 25 bp, synthetic construct
  misc_feature 1..25: note = Probe
  source 1..25: mol_type = other DNA
gttaagatggcagagcccggtaatc

SEQ ID NO: 7135 - DNA, 27 bp, synthetic construct
  misc_feature 1..27: note = Probe
  source 1..27: mol_type = other DNA
gttaagatggcagagcccggtaatcgc

SEQ ID NO: 7136 - DNA, 28 bp, synthetic construct
  misc_feature 1..28: note = Probe
  source 1..28: mol_type = other DNA
gttaagatggcagagcccggtaatcgca

SEQ ID NO: 7137 - DNA, 29 bp, synthetic construct
  misc_feature 1..29: note = Probe
  source 1..29: mol_type = other DNA
gttaagatggcagagcccggtaatcgcat

SEQ ID NO: 7138 - DNA, 32 bp, synthetic construct
  misc_feature 1..32: note = Probe
  source 1..32: mol_type = other DNA
gttaagatggcagagcccggtaatcgcataaa

SEQ ID NO: 7139 - DNA, 35 bp, synthetic construct
  misc_feature 1..35: note = Probe
  source 1..35: mol_type = other DNA
gttaagatggcagagcccggtaatcgcataaaact

SEQ ID NO: 7140 - DNA, 38 bp, synthetic construct
  misc_feature 1..38: note = Probe
  source 1..38: mol_type = other DNA
gttaagatggcagagcccggtaatcgcataaaacttaa

SEQ ID NO: 7141 - DNA, 39 bp, synthetic construct
  misc_feature 1..39: note = Probe
  source 1..39: mol_type = other DNA
gttaagatggcagagcccggtaatcgcataaaacttaaa

SEQ ID NO: 7142 - DNA, 41 bp, synthetic construct
  misc_feature 1..41: note = Probe
  source 1..41: mol_type = other DNA
gttaagatggcagagcccggtaatcgcataaaacttaaaac

SEQ ID NO: 7143 - DNA, 43 bp, synthetic construct
  misc_feature 1..43: note = Probe
  source 1..43: mol_type = other DNA
gttaagatggcagagcccggtaatcgcataaaacttaaaactt

SEQ ID NO: 7144 - DNA, 45 bp, synthetic construct
  misc_feature 1..45: note = Probe
  source 1..45: mol_type = other DNA
gttaagatggcagagcccggtaatcgcataaaacttaaaacttta

SEQ ID NO: 7145 - DNA, 50 bp, synthetic construct
  misc_feature 1..50: note = Probe
  source 1..50: mol_type = other DNA
gttaagatggcagagcccggtaatcgcataaaacttaaaactttacagtc

SEQ ID NO: 7146 - DNA, 22 bp, synthetic construct
  misc_feature 1..22: note = Probe
  source 1..22: mol_type = other DNA
gttaggcctctttttaccagct

SEQ ID NO: 7147 - DNA, 20 bp, synthetic construct
  misc_feature 1..20: note = Probe
  source 1..20: mol_type = other DNA
gttatacccttcccgtacta

SEQ ID NO: 7148 - DNA, 23 bp, synthetic construct
  misc_feature 1..23: note = Probe
  source 1..23: mol_type = other DNA
gttatacccttcccgtactaatt

SEQ ID NO: 7149 - DNA, 15 bp, synthetic construct
  misc_feature 1..15: note = Probe
  source 1..15: mol_type = other DNA
gttatgaaatggttt

SEQ ID NO: 7150 - DNA, 27 bp, synthetic construct
  misc_feature 1..27: note = Probe
  source 1..27: mol_type = other DNA
gttatgaaatggtttttctaatacctt

SEQ ID NO: 7151 - DNA, 29 bp, synthetic construct
  misc_feature 1..29: note = Probe
  source 1..29: mol_type = other DNA
gttatgaaatggtttttctaatacctttt

SEQ ID NO: 7152 - DNA, 31 bp, synthetic construct
  misc_feature 1..31: note = Probe
  source 1..31: mol_type = other DNA
gttatgaaatggtttttctaatacctttttg

SEQ ID NO: 7153 - DNA, 24 bp, synthetic construct
  misc_feature 1..24: note = Probe
  source 1..24: mol_type = other DNA
gttcaaatcccggacgagccccct

SEQ ID NO: 7154 - DNA, 17 bp, synthetic construct
  misc_feature 1..17: note = Probe
  source 1..17: mol_type = other DNA
gttcaaatccgggtgcc

SEQ ID NO: 7155 - DNA, 23 bp, synthetic construct
  misc_feature 1..23: note = Probe
  source 1..23: mol_type = other DNA
gttcaaatccgggtgccccctca

SEQ ID NO: 7156 - DNA, 24 bp, synthetic construct
  misc_feature 1..24: note = Probe
  source 1..24: mol_type = other DNA
gttcaaatccgggtgccccctcaa

SEQ ID NO: 7157 - DNA, 23 bp, synthetic construct
  misc_feature 1..23: note = Probe
  source 1..23: mol_type = other DNA
gttcaaatccgggtgccccctcg

SEQ ID NO: 7158 - DNA, 23 bp, synthetic construct
  misc_feature 1..23: note = Probe
  source 1..23: mol_type = other DNA
gttcaaatccgggtgccccctct

SEQ ID NO: 7159 - DNA, 22 bp, synthetic construct
  misc_feature 1..22: note = Probe
  source 1..22: mol_type = other DNA
gttcaattccccgacggggagg

SEQ ID NO: 7160 - DNA, 24 bp, synthetic construct
  misc_feature 1..24: note = Probe
  source 1..24: mol_type = other DNA
gttcaattccccgacggggaggtg

SEQ ID NO: 7161 - DNA, 24 bp, synthetic construct
  misc_feature 1..24: note = Probe
  source 1..24: mol_type = other DNA
gttcaattcccggtcagggaacca

SEQ ID NO: 7162 - DNA, 23 bp, synthetic construct
  misc_feature 1..23: note = Probe
  source 1..23: mol_type = other DNA
gttcagtggtagaattctcgcct

SEQ ID NO: 7163 - DNA, 24 bp, synthetic construct
  misc_feature 1..24: note = Probe
  source 1..24: mol_type = other DNA
gttcagtggtagaattctcgcctg

SEQ ID NO: 7164 - DNA, 26 bp, synthetic construct
  misc_feature 1..26: note = Probe
  source 1..26: mol_type = other DNA
gttcagtggtagaattctcgcctgcc

SEQ ID NO: 7165 - DNA, 32 bp, synthetic construct
  misc_feature 1..32: note = Probe
  source 1..32: mol_type = other DNA
gttccatagtgtagtggttatcacgtctgctt

SEQ ID NO: 7166 - DNA, 24 bp, synthetic construct
  misc_feature 1..24: note = Probe
  source 1..24: mol_type = other DNA
gttcgaaaccgggcggaaacacct

SEQ ID NO: 7167 - DNA, 24 bp, synthetic construct
  misc_feature 1..24: note = Probe
  source 1..24: mol_type = other DNA
gttcgaatcccaccgctgccacac

SEQ ID NO: 7168 - DNA, 24 bp, synthetic construct
  misc_feature 1..24: note = Probe
  source 1..24: mol_type = other DNA
gttcgaatcccaccgctgccaggt

SEQ ID NO: 7169 - DNA, 24 bp, synthetic construct
  misc_feature 1..24: note = Probe
  source 1..24: mol_type = other DNA
gttcgaatcccacttctgacacaa

SEQ ID NO: 7170 - DNA, 24 bp, synthetic construct
  misc_feature 1..24: note = Probe
  source 1..24: mol_type = other DNA
gttcgaatcccagcggtgcctccg

SEQ ID NO: 7171 - DNA, 23 bp, synthetic construct
  misc_feature 1..23: note = Probe
  source 1..23: mol_type = other DNA
gttcgactcccggtgtgggaacg

SEQ ID NO: 7172 - DNA, 24 bp, synthetic construct
  misc_feature 1..24: note = Probe
  source 1..24: mol_type = other DNA
gttcgactcccggtgtgggaacgc

SEQ ID NO: 7173 - DNA, 23 bp, synthetic construct
  misc_feature 1..23: note = Probe
  source 1..23: mol_type = other DNA
gttcgagtcccatctggggtggc

SEQ ID NO: 7174 - DNA, 24 bp, synthetic construct
  misc_feature 1..24: note = Probe
  source 1..24: mol_type = other DNA
gttcgagtcccatctgggtcgcgt

SEQ ID NO: 7175 - DNA, 23 bp, synthetic construct
  misc_feature 1..23: note = Probe
  source 1..23: mol_type = other DNA
gttcgagtcccttcgtggtcgtc

SEQ ID NO: 7176 - DNA, 24 bp, synthetic construct
  misc_feature 1..24: note = Probe
  source 1..24: mol_type = other DNA
gttcgagtcccttcgtggtcgttg

SEQ ID NO: 7177 - DNA, 24 bp, synthetic construct
  misc_feature 1..24: note = Probe
  source 1..24: mol_type = other DNA
gttcgatccccagcatctccagtg

SEQ ID NO: 7178 - DNA, 24 bp, synthetic construct
  misc_feature 1..24: note = Probe
  source 1..24: mol_type = other DNA
gttcgatccccggcatctccattg

SEQ ID NO: 7179 - DNA, 24 bp, synthetic construct
  misc_feature 1..24: note = Probe
  source 1..24: mol_type = other DNA
gttcgatccccgtacgggccacga

SEQ ID NO: 7180 - DNA, 24 bp, synthetic construct
  misc_feature 1..24: note = Probe
  source 1..24: mol_type = other DNA
gttcgatcctcacacggggcacaa

SEQ ID NO: 7181 - DNA, 23 bp, synthetic construct
  misc_feature 1..23: note = Probe
  source 1..23: mol_type = other DNA
gttcgattccccgacggggagaa

SEQ ID NO: 7182 - DNA, 23 bp, synthetic construct
  misc_feature 1..23: note = Probe
  source 1..23: mol_type = other DNA
gttcgattccccgacggggagac

SEQ ID NO: 7183 - DNA, 23 bp, synthetic construct
  misc_feature 1..23: note = Probe
  source 1..23: mol_type = other DNA
gttcgattccccgacggggaggc

SEQ ID NO: 7184 - DNA, 24 bp, synthetic construct
  misc_feature 1..24: note = Probe
  source 1..24: mol_type = other DNA
gttcgattccccgacggggaggca

SEQ ID NO: 7185 - DNA, 24 bp, synthetic construct
  misc_feature 1..24: note = Probe
  source 1..24: mol_type = other DNA
gttcgattcccggccaatgcacga

SEQ ID NO: 7186 - DNA, 24 bp, synthetic construct
  misc_feature 1..24: note = Probe
  source 1..24: mol_type = other DNA
gttcgattcccggccaatgcagca

SEQ ID NO: 7187 - DNA, 21 bp, synthetic construct
  misc_feature 1..21: note = Probe
  source 1..21: mol_type = other DNA
gttcgattcccgggcggcgca

SEQ ID NO: 7188 - DNA, 24 bp, synthetic construct
  misc_feature 1..24: note = Probe
  source 1..24: mol_type = other DNA
gttcgattcccggtcagggaacaa

SEQ ID NO: 7189 - DNA, 23 bp, synthetic construct
  misc_feature 1..23: note = Probe
  source 1..23: mol_type = other DNA
gttcgattccttccttttttgtc

SEQ ID NO: 7190 - DNA, 23 bp, synthetic construct
  misc_feature 1..23: note = Probe
  source 1..23: mol_type = other DNA
gttcgattctcatagtcctagaa

SEQ ID NO: 7191 - DNA, 23 bp, synthetic construct
  misc_feature 1..23: note = Probe
  source 1..23: mol_type = other DNA
gttcttgtagttgaaatacaacg

SEQ ID NO: 7192 - DNA, 26 bp, synthetic construct
  misc_feature 1..26: note = Probe
  source 1..26: mol_type = other DNA
gttcttgtagttgaaatacaacgatg

SEQ ID NO: 7193 - DNA, 27 bp, synthetic construct
  misc_feature 1..27: note = Probe
  source 1..27: mol_type = other DNA
gttcttgtagttgaaatacaacgatgg

SEQ ID NO: 7194 - DNA, 29 bp, synthetic construct
  misc_feature 1..29: note = Probe
  source 1..29: mol_type = other DNA
gttcttgtagttgaaatacaacgatggtt

SEQ ID NO: 7195 - DNA, 30 bp, synthetic construct
  misc_feature 1..30: note = Probe
  source 1..30: mol_type = other DNA
gttcttgtagttgaaatacaacgatggttt

SEQ ID NO: 7196 - DNA, 31 bp, synthetic construct
  misc_feature 1..31: note = Probe
  source 1..31: mol_type = other DNA
gttcttgtagttgaaatacaacgatggtttt

SEQ ID NO: 7197 - DNA, 32 bp, synthetic construct
  misc_feature 1..32: note = Probe
  source 1..32: mol_type = other DNA
gttcttgtagttgaaatacaacgatggttttt

SEQ ID NO: 7198 - DNA, 33 bp, synthetic construct
  misc_feature 1..33: note = Probe
  source 1..33: mol_type = other DNA
gttcttgtagttgaaatacaacgatggtttttc

SEQ ID NO: 7199 - DNA, 34 bp, synthetic construct
  misc_feature 1..34: note = Probe
  source 1..34: mol_type = other DNA
gttcttgtagttgaaatacaacgatggtttttca

SEQ ID NO: 7200 - DNA, 38 bp, synthetic construct
  misc_feature 1..38: note = Probe
  source 1..38: mol_type = other DNA
gttcttgtagttgaaatacaacgatggtttttcatatc

SEQ ID NO: 7201 - DNA, 42 bp, synthetic construct
  misc_feature 1..42: note = Probe
  source 1..42: mol_type = other DNA
gttcttgtagttgaaatacaacgatggtttttcatatcattg

SEQ ID NO: 7202 - DNA, 43 bp, synthetic construct
  misc_feature 1..43: note = Probe
  source 1..43: mol_type = other DNA
gttcttgtagttgaaatacaacgatggtttttcatatcattgg

SEQ ID NO: 7203 - DNA, 44 bp, synthetic construct
  misc_feature 1..44: note = Probe
  source 1..44: mol_type = other DNA
gttcttgtagttgaaatacaacgatggtttttcatatcattggt

SEQ ID NO: 7204 - DNA, 45 bp, synthetic construct
  misc_feature 1..45: note = Probe
  source 1..45: mol_type = other DNA
gttcttgtagttgaaatacaacgatggtttttcatatcattggtc

SEQ ID NO: 7205 - DNA, 29 bp, synthetic construct
  misc_feature 1..29: note = Probe
  source 1..29: mol_type = other DNA
gttgatgcagagtggggttttgcagtcct

SEQ ID NO: 7206 - DNA, 31 bp, synthetic construct
  misc_feature 1..31: note = Probe
  source 1..31: mol_type = other DNA
gttgatgcagagtggggttttgcagtcctta

SEQ ID NO: 7207 - DNA, 32 bp, synthetic construct
  misc_feature 1..32: note = Probe
  source 1..32: mol_type = other DNA
gttgatgcagagtggggttttgcagtccttag

SEQ ID NO: 7208 - DNA, 34 bp, synthetic construct
  misc_feature 1..34: note = Probe
  source 1..34: mol_type = other DNA
gttgatgcagagtggggttttgcagtccttagct

SEQ ID NO: 7209 - DNA, 50 bp, synthetic construct
  misc_feature 1..50: note = Probe
  source 1..50: mol_type = other DNA
gttgattagggtgcttagctgttaactaagtgtttgtgggtttaagtccc

SEQ ID NO: 7210 - DNA, 27 bp, synthetic construct
  misc_feature 1..27: note = Probe
  source 1..27: mol_type = other DNA
gttggtggtatagtggtaagcatagct

SEQ ID NO: 7211 - DNA, 34 bp, synthetic construct
  misc_feature 1..34: note = Probe
  source 1..34: mol_type = other DNA
gttggtggtatagtggtaagcatagctgccttcc

SEQ ID NO: 7212 - DNA, 32 bp, synthetic construct
  misc_feature 1..32: note = Probe
  source 1..32: mol_type = other DNA
gttggtggtatagtggtgagcatagctgcctt

SEQ ID NO: 7213 - DNA, 33 bp, synthetic construct
  misc_feature 1..33: note = Probe
  source 1..33: mol_type = other DNA
gttggtggtatagtggtgagcatagctgccttc

SEQ ID NO: 7214 - DNA, 34 bp, synthetic construct
  misc_feature 1..34: note = Probe
  source 1..34: mol_type = other DNA
gttggtggtatagtggtgagcatagctgccttcc

SEQ ID NO: 7215 - DNA, 27 bp, synthetic construct
  misc_feature 1..27: note = Probe
  source 1..27: mol_type = other DNA
gttggtggtatagtggttagcatagct

SEQ ID NO: 7216 - DNA, 28 bp, synthetic construct
  misc_feature 1..28: note = Probe
  source 1..28: mol_type = other DNA
gttggtggtatagtggttagcatagctg

SEQ ID NO: 7217 - DNA, 31 bp, synthetic construct
  misc_feature 1..31: note = Probe
  source 1..31: mol_type = other DNA
gttggtggtatagtggttagcatagctgcct

SEQ ID NO: 7218 - DNA, 33 bp, synthetic construct
  misc_feature 1..33: note = Probe
  source 1..33: mol_type = other DNA
gttggtggtatagtggttagcatagctgccttc

SEQ ID NO: 7219 - DNA, 34 bp, synthetic construct
  misc_feature 1..34: note = Probe
  source 1..34: mol_type = other DNA
gttggtggtatagtggttagcatagctgccttcc

SEQ ID NO: 7220 - DNA, 21 bp, synthetic construct
  misc_feature 1..21: note = Probe
  source 1..21: mol_type = other DNA
gttgtagtccgtgcgagaata

SEQ ID NO: 7221 - DNA, 23 bp, synthetic construct
  misc_feature 1..23: note = Probe
  source 1..23: mol_type = other DNA
gttgtagtccgtgcgagaataat

SEQ ID NO: 7222 - DNA, 24 bp, synthetic construct
  misc_feature 1..24: note = Probe
  source 1..24: mol_type = other DNA
gttgtagtccgtgcgagaataatg

SEQ ID NO: 7223 - DNA, 33 bp, synthetic construct
  misc_feature 1..33: note = Probe
  source 1..33: mol_type = other DNA
gtttaaccaaaacatcagattgtgaatctgaca

SEQ ID NO: 7224 - DNA, 23 bp, synthetic construct
  misc_feature 1..23: note = Probe
  source 1..23: mol_type = other DNA
gtttaagtcccattggtctagta

SEQ ID NO: 7225 - DNA, 17 bp, synthetic construct
  misc_feature 1..17: note = Probe
  source 1..17: mol_type = other DNA
gtttagacgggctcaca

SEQ ID NO: 7226 - DNA, 18 bp, synthetic construct
  misc_feature 1..18: note = Probe
  source 1..18: mol_type = other DNA
gtttagacgggctcacat

SEQ ID NO: 7227 - DNA, 19 bp, synthetic construct
  misc_feature 1..19: note = Probe
  source 1..19: mol_type = other DNA
gtttagacgggctcacatc

SEQ ID NO: 7228 - DNA, 20 bp, synthetic construct
  misc_feature 1..20: note = Probe
  source 1..20: mol_type = other DNA
gtttagacgggctcacatca

SEQ ID NO: 7229 - DNA, 23 bp, synthetic construct
  misc_feature 1..23: note = Probe
  source 1..23: mol_type = other DNA
gtttagacgggctcacatcaccc

SEQ ID NO: 7230 - DNA, 24 bp, synthetic construct
  misc_feature 1..24: note = Probe
  source 1..24: mol_type = other DNA
gtttagacgggctcacatcacccc

SEQ ID NO: 7231 - DNA, 25 bp, synthetic construct
  misc_feature 1..25: note = Probe
  source 1..25: mol_type = other DNA
gtttagacgggctcacatcacccca

SEQ ID NO: 7232 - DNA, 26 bp, synthetic construct
  misc_feature 1..26: note = Probe
  source 1..26: mol_type = other DNA
gtttagacgggctcacatcaccccat

SEQ ID NO: 7233 - DNA, 27 bp, synthetic construct
  misc_feature 1..27: note = Probe
  source 1..27: mol_type = other DNA
gtttagacgggctcacatcaccccata

SEQ ID NO: 7234 - DNA, 28 bp, synthetic construct
  misc_feature 1..28: note = Probe
  source 1..28: mol_type = other DNA
gtttagacgggctcacatcaccccataa

SEQ ID NO: 7235 - DNA, 29 bp, synthetic construct
  misc_feature 1..29: note = Probe
  source 1..29: mol_type = other DNA
gtttagacgggctcacatcaccccataaa

SEQ ID NO: 7236 - DNA, 31 bp, synthetic construct
  misc_feature 1..31: note = Probe
  source 1..31: mol_type = other DNA
gtttagacgggctcacatcaccccataaaca

SEQ ID NO: 7237 - DNA, 32 bp, synthetic construct
  misc_feature 1..32: note = Probe
  source 1..32: mol_type = other DNA
gtttagacgggctcacatcaccccataaacaa

SEQ ID NO: 7238 - DNA, 33 bp, synthetic construct
  misc_feature 1..33: note = Probe
  source 1..33: mol_type = other DNA
gtttagacgggctcacatcaccccataaacaaa

SEQ ID NO: 7239 - DNA, 34 bp, synthetic construct
  misc_feature 1..34: note = Probe
  source 1..34: mol_type = other DNA
gtttagacgggctcacatcaccccataaacaaat

SEQ ID NO: 7240 - DNA, 17 bp, synthetic construct
  misc_feature 1..17: note = Probe
  source 1..17: mol_type = other DNA
gtttatgtagcttacct

SEQ ID NO: 7241 - DNA, 21 bp, synthetic construct
  misc_feature 1..21: note = Probe
  source 1..21: mol_type = other DNA
gtttatgtagcttacctcctc

SEQ ID NO: 7242 - DNA, 23 bp, synthetic construct
  misc_feature 1..23: note = Probe
  source 1..23: mol_type = other DNA
gtttatgtagcttacctcctcaa

SEQ ID NO: 7243 - DNA, 25 bp, synthetic construct
  misc_feature 1..25: note = Probe
  source 1..25: mol_type = other DNA
gtttatgtagcttacctcctcaaag

SEQ ID NO: 7244 - DNA, 31 bp, synthetic construct
  misc_feature 1..31: note = Probe
  source 1..31: mol_type = other DNA
gtttatgtagcttacctcctcaaagcaatac

SEQ ID NO: 7245 - DNA, 32 bp, synthetic construct
  misc_feature 1..32: note = Probe
  source 1..32: mol_type = other DNA
gtttatgtagcttacctcctcaaagcaataca

SEQ ID NO: 7246 - DNA, 38 bp, synthetic construct
  misc_feature 1..38: note = Probe
  source 1..38: mol_type = other DNA
gtttatgtagcttacctcctcaaagcaatacactgaaa

SEQ ID NO: 7247 - DNA, 39 bp, synthetic construct
  misc_feature 1..39: note = Probe
  source 1..39: mol_type = other DNA
gtttatgtagcttacctcctcaaagcaatacactgaaaa

SEQ ID NO: 7248 - DNA, 41 bp, synthetic construct
  misc_feature 1..41: note = Probe
  source 1..41: mol_type = other DNA
gtttatgtagcttacctcctcaaagcaatacactgaaaatg

SEQ ID NO: 7249 - DNA, 43 bp, synthetic construct
  misc_feature 1..43: note = Probe
  source 1..43: mol_type = other DNA
gtttatgtagcttacctcctcaaagcaatacactgaaaatgtt

SEQ ID NO: 7250 - DNA, 44 bp, synthetic construct
  misc_feature 1..44: note = Probe
  source 1..44: mol_type = other DNA
gtttatgtagcttacctcctcaaagcaatacactgaaaatgttt

SEQ ID NO: 7251 - DNA, 50 bp, synthetic construct
  misc_feature 1..50: note = Probe
  source 1..50: mol_type = other DNA
gtttatgtagcttacctcctcaaagcaatacactgaaaatgtttagacgg

SEQ ID NO: 7252 - DNA, 33 bp, synthetic construct
  misc_feature 1..33: note = Probe
  source 1..33: mol_type = other DNA
gtttccgtagtggagtggttatcacgttcgcct

SEQ ID NO: 7253 - DNA, 27 bp, synthetic construct
  misc_feature 1..27: note = Probe
  source 1..27: mol_type = other DNA
gtttccgtagtgtagcggttatcacat

SEQ ID NO: 7254 - DNA, 37 bp, synthetic construct
  misc_feature 1..37: note = Probe
  source 1..37: mol_type = other DNA
gtttccgtagtgtagcggttatcacattcgcctcaca

SEQ ID NO: 7255 - DNA, 50 bp, synthetic construct
  misc_feature 1..50: note = Probe
  source 1..50: mol_type = other DNA
gtttccgtagtgtagcggttatcacattcgcctcacacgcgaaaggtccc

SEQ ID NO: 7256 - DNA, 17 bp, synthetic construct
  misc_feature 1..17: note = Probe
  source 1..17: mol_type = other DNA
gtttccgtagtgtagtg

SEQ ID NO: 7257 - DNA, 18 bp, synthetic construct
  misc_feature 1..18: note = Probe
  source 1..18: mol_type = other DNA
gtttccgtagtgtagtgg

SEQ ID NO: 7258 - DNA, 19 bp, synthetic construct
  misc_feature 1..19: note = Probe
  source 1..19: mol_type = other DNA
gtttccgtagtgtagtggt

SEQ ID NO: 7259 - DNA, 34 bp, synthetic construct
  misc_feature 1..34: note = Probe
  source 1..34: mol_type = other DNA
gtttccgtagtgtagtggtcatcacgttcgccta

SEQ ID NO: 7260 - DNA, 35 bp, synthetic construct
  misc_feature 1..35: note = Probe
  source 1..35: mol_type = other DNA
gtttccgtagtgtagtggtcatcacgttcgcctaa

SEQ ID NO: 7261 - DNA, 36 bp, synthetic construct
  misc_feature 1..36: note = Probe
  source 1..36: mol_type = other DNA
gtttccgtagtgtagtggtcatcacgttcgcctaac

SEQ ID NO: 7262 - DNA, 37 bp, synthetic construct
  misc_feature 1..37: note = Probe
  source 1..37: mol_type = other DNA
gtttccgtagtgtagtggtcatcacgttcgcctaaca

SEQ ID NO: 7263 - DNA, 50 bp, synthetic construct
  misc_feature 1..50: note = Probe
  source 1..50: mol_type = other DNA
gtttccgtagtgtagtggtcatcacgttcgcctaacacgcgaaaggtccc

SEQ ID NO: 7264 - DNA, 20 bp, synthetic construct
  misc_feature 1..20: note = Probe
  source 1..20: mol_type = other DNA
gtttccgtagtgtagtggtt

SEQ ID NO: 7265 - DNA, 22 bp, synthetic construct
  misc_feature 1..22: note = Probe
  source 1..22: mol_type = other DNA
gtttccgtagtgtagtggttat

SEQ ID NO: 7266 - DNA, 23 bp, synthetic construct
  misc_feature 1..23: note = Probe
  source 1..23: mol_type = other DNA
gtttccgtagtgtagtggttatc

SEQ ID NO: 7267 - DNA, 24 bp, synthetic construct
  misc_feature 1..24: note = Probe
  source 1..24: mol_type = other DNA
gtttccgtagtgtagtggttatca

SEQ ID NO: 7268 - DNA, 25 bp, synthetic construct
  misc_feature 1..25: note = Probe
  source 1..25: mol_type = other DNA
gtttccgtagtgtagtggttatcac

SEQ ID NO: 7269 - DNA, 26 bp, synthetic construct
  misc_feature 1..26: note = Probe
  source 1..26: mol_type = other DNA
gtttccgtagtgtagtggttatcacg

SEQ ID NO: 7270 - DNA, 27 bp, synthetic construct
  misc_feature 1..27: note = Probe
  source 1..27: mol_type = other DNA
gtttccgtagtgtagtggttatcacgt

SEQ ID NO: 7271 - DNA, 28 bp, synthetic construct
  misc_feature 1..28: note = Probe
  source 1..28: mol_type = other DNA
gtttccgtagtgtagtggttatcacgtt

SEQ ID NO: 7272 - DNA, 29 bp, synthetic construct
  misc_feature 1..29: note = Probe
  source 1..29: mol_type = other DNA
gtttccgtagtgtagtggttatcacgttc

SEQ ID NO: 7273 - DNA, 30 bp, synthetic construct
  misc_feature 1..30: note = Probe
  source 1..30: mol_type = other DNA
gtttccgtagtgtagtggttatcacgttcg

SEQ ID NO: 7274 - DNA, 31 bp, synthetic construct
  misc_feature 1..31: note = Probe
  source 1..31: mol_type = other DNA
gtttccgtagtgtagtggttatcacgttcgc

SEQ ID NO: 7275 - DNA, 32 bp, synthetic construct
  misc_feature 1..32: note = Probe
  source 1..32: mol_type = other DNA
gtttccgtagtgtagtggttatcacgttcgcc

SEQ ID NO: 7276 - DNA, 33 bp, synthetic construct
  misc_feature 1..33: note = Probe
  source 1..33: mol_type = other DNA
gtttccgtagtgtagtggttatcacgttcgcct

SEQ ID NO: 7277 - DNA, 50 bp, synthetic construct
  misc_feature 1..50: note = Probe
  source 1..50: mol_type = other DNA
gtttccgtagtgtagtggttatcacgttcgcctaacacgcgaaaggtccc

SEQ ID NO: 7278 - DNA, 34 bp, synthetic construct
  misc_feature 1..34: note = Probe
  source 1..34: mol_type = other DNA
gtttccgtagtgtagtggttatcacgttcgcctc

SEQ ID NO: 7279 - DNA, 35 bp, synthetic construct
  misc_feature 1..35: note = Probe
  source 1..35: mol_type = other DNA
gtttccgtagtgtagtggttatcacgttcgcctca

SEQ ID NO: 7280 - DNA, 36 bp, synthetic construct
  misc_feature 1..36: note = Probe
  source 1..36: mol_type = other DNA
gtttccgtagtgtagtggttatcacgttcgcctcac

SEQ ID NO: 7281 - DNA, 37 bp, synthetic construct
  misc_feature 1..37: note = Probe
  source 1..37: mol_type = other DNA
gtttccgtagtgtagtggttatcacgttcgcctcaca

SEQ ID NO: 7282 - DNA, 33 bp, synthetic construct
  misc_feature 1..33: note = Probe
  source 1..33: mol_type = other DNA
gtttccgtagtgtagtggttattatgttcgcct

SEQ ID NO: 7283 - DNA, 28 bp, synthetic construct
  misc_feature 1..28: note = Probe
  source 1..28: mol_type = other DNA
gtttccgtggtgtagtggttatcacatt

SEQ ID NO: 7284 - DNA, 32 bp, synthetic construct
  misc_feature 1..32: note = Probe
  source 1..32: mol_type = other DNA
gtttccgtggtgtagtggttatcacattcgcc

SEQ ID NO: 7285 - DNA, 33 bp, synthetic construct
  misc_feature 1..33: note = Probe
  source 1..33: mol_type = other DNA
gtttccgtggtgtagtggttatcacattcgcct

SEQ ID NO: 7286 - DNA, 25 bp, synthetic construct
  misc_feature 1..25: note = Probe
  source 1..25: mol_type = other DNA
gtttggtcctagcctttctattagc

SEQ ID NO: 7287 - DNA, 15 bp, synthetic construct
  misc_feature 1..15: note = Probe
  source 1..15: mol_type = other DNA
gtttgtgggtttaag

SEQ ID NO: 7288 - DNA, 16 bp, synthetic construct
  misc_feature 1..16: note = Probe
  source 1..16: mol_type = other DNA
gtttgtgggtttaagt

SEQ ID NO: 7289 - DNA, 17 bp, synthetic construct
  misc_feature 1..17: note = Probe
  source 1..17: mol_type = other DNA
gtttgtgggtttaagtc

SEQ ID NO: 7290 - DNA, 18 bp, synthetic construct
  misc_feature 1..18: note = Probe
  source 1..18: mol_type = other DNA
gtttgtgggtttaagtcc

SEQ ID NO: 7291 - DNA, 19 bp, synthetic construct
  misc_feature 1..19: note = Probe
  source 1..19: mol_type = other DNA
gtttgtgggtttaagtccc

SEQ ID NO: 7292 - DNA, 21 bp, synthetic construct
  misc_feature 1..21: note = Probe
  source 1..21: mol_type = other DNA
gtttgtgggtttaagtcccat

SEQ ID NO: 7293 - DNA, 23 bp, synthetic construct
  misc_feature 1..23: note = Probe
  source 1..23: mol_type = other DNA
gtttgtgggtttaagtcccattg

SEQ ID NO: 7294 - DNA, 24 bp, synthetic construct
  misc_feature 1..24: note = Probe
  source 1..24: mol_type = other DNA
gtttgtgggtttaagtcccattgg

SEQ ID NO: 7295 - DNA, 25 bp, synthetic construct
  misc_feature 1..25: note = Probe
  source 1..25: mol_type = other DNA
gtttgtgggtttaagtcccattggt

SEQ ID NO: 7296 - DNA, 26 bp, synthetic construct
  misc_feature 1..26: note = Probe
  source 1..26: mol_type = other DNA
gtttgtgggtttaagtcccattggtc

SEQ ID NO: 7297 - DNA, 27 bp, synthetic construct
  misc_feature 1..27: note = Probe
  source 1..27: mol_type = other DNA
gtttgtgggtttaagtcccattggtct

SEQ ID NO: 7298 - DNA, 28 bp, synthetic construct
  misc_feature 1..28: note = Probe
  source 1..28: mol_type = other DNA
gtttgtgggtttaagtcccattggtcta

SEQ ID NO: 7299 - DNA, 29 bp, synthetic construct
  misc_feature 1..29: note = Probe
  source 1..29: mol_type = other DNA
gtttgtgggtttaagtcccattggtctag

SEQ ID NO: 7300 - DNA, 30 bp, synthetic construct
  misc_feature 1..30: note = Probe
  source 1..30: mol_type = other DNA
gtttgtgggtttaagtcccattggtctagt

SEQ ID NO: 7301 - DNA, 31 bp, synthetic construct
  misc_feature 1..31: note = Probe
  source 1..31: mol_type = other DNA
gtttgtgggtttaagtcccattggtctagta

SEQ ID NO: 7302 - DNA, 32 bp, synthetic construct
  misc_feature 1..32: note = Probe
  source 1..32: mol_type = other DNA
gtttgtgggtttaagtcccattggtctagtaa

SEQ ID NO: 7303 - DNA, 33 bp, synthetic construct
  misc_feature 1..33: note = Probe
  source 1..33: mol_type = other DNA
gtttgtgggtttaagtcccattggtctagtaag

SEQ ID NO: 7304 - DNA, 34 bp, synthetic construct
  misc_feature 1..34: note = Probe
  source 1..34: mol_type = other DNA
gtttgtgggtttaagtcccattggtctagtaagg

SEQ ID NO: 7305 - DNA, 35 bp, synthetic construct
  misc_feature 1..35: note = Probe
  source 1..35: mol_type = other DNA
gtttgtgggtttaagtcccattggtctagtaaggg

SEQ ID NO: 7306 - DNA, 43 bp, synthetic construct
  misc_feature 1..43: note = Probe
  source 1..43: mol_type = other DNA
gtttttcatatcattggtcgtggttgtagtccgtgcgagaata

SEQ ID NO: 7307 - DNA, 46 bp, synthetic construct
  misc_feature 1..46: note = Probe
  source 1..46: mol_type = other DNA
gtttttcatatcattggtcgtggttgtagtccgtgcgagaataatg

SEQ ID NO: 7308 - DNA, 50 bp, synthetic construct
  misc_feature 1..50: note = Probe
  source 1..50: mol_type = other DNA
taaaacttaaaactttacagtcagaggttcaattcctcttcttaacaaca

SEQ ID NO: 7309 - DNA, 33 bp, synthetic construct
  misc_feature 1..33: note = Probe
  source 1..33: mol_type = other DNA
taaaactttacagtcagaggttcaattcctctt

SEQ ID NO: 7310 - DNA, 34 bp, synthetic construct
  misc_feature 1..34: note = Probe
  source 1..34: mol_type = other DNA
taaaactttacagtcagaggttcaattcctcttc

SEQ ID NO: 7311 - DNA, 36 bp, synthetic construct
  misc_feature 1..36: note = Probe
  source 1..36: mol_type = other DNA
taaaactttacagtcagaggttcaattcctcttctt

SEQ ID NO: 7312 - DNA, 38 bp, synthetic construct
  misc_feature 1..38: note = Probe
  source 1..38: mol_type = other DNA
taaaactttacagtcagaggttcaattcctcttcttaa

SEQ ID NO: 7313 - DNA, 39 bp, synthetic construct
  misc_feature 1..39: note = Probe
  source 1..39: mol_type = other DNA
taaaactttacagtcagaggttcaattcctcttcttaac

SEQ ID NO: 7314 - DNA, 42 bp, synthetic construct
  misc_feature 1..42: note = Probe
  source 1..42: mol_type = other DNA
taaaactttacagtcagaggttcaattcctcttcttaacaac

SEQ ID NO: 7315 - DNA, 43 bp, synthetic construct
  misc_feature 1..43: note = Probe
  source 1..43: mol_type = other DNA
taaaactttacagtcagaggttcaattcctcttcttaacaaca

SEQ ID NO: 7316 - DNA, 24 bp, synthetic construct
  misc_feature 1..24: note = Probe
  source 1..24: mol_type = other DNA
taaacaaaacgaatgatttcgact

SEQ ID NO: 7317 - DNA, 37 bp, synthetic construct
  misc_feature 1..37: note = Probe
  source 1..37: mol_type = other DNA
taaacaaaacgaatgatttcgactcattaaattatga

SEQ ID NO: 7318 - DNA, 39 bp, synthetic construct
  misc_feature 1..39: note = Probe
  source 1..39: mol_type = other DNA
taaacaaaacgaatgatttcgactcattaaattatgata

SEQ ID NO: 7319 - DNA, 43 bp, synthetic construct
  misc_feature 1..43: note = Probe
  source 1..43: mol_type = other DNA
taaacaaaacgaatgatttcgactcattaaattatgataatca

SEQ ID NO: 7320 - DNA, 45 bp, synthetic construct
  misc_feature 1..45: note = Probe
  source 1..45: mol_type = other DNA
taaacaaaacgaatgatttcgactcattaaattatgataatcata

SEQ ID NO: 7321 - DNA, 50 bp, synthetic construct
  misc_feature 1..50: note = Probe
  source 1..50: mol_type = other DNA
taaacaaaacgaatgatttcgactcattaaattatgataatcatatttac

SEQ ID NO: 7322 - DNA, 41 bp, synthetic construct
  misc_feature 1..41: note = Probe
  source 1..41: mol_type = other DNA
taaacaggagatcctgggttcgaatcccagcggtgcctccg

SEQ ID NO: 7323 - DNA, 41 bp, synthetic construct
  misc_feature 1..41: note = Probe
  source 1..41: mol_type = other DNA
taaaccaggggtcgcgagttcaaatctcgctggggcctcgg

SEQ ID NO: 7324 - DNA, 41 bp, synthetic construct
  misc_feature 1..41: note = Probe
  source 1..41: mol_type = other DNA
taaaccaggggtcgcgagttcaattctcgctggggcctgtg

SEQ ID NO: 7325 - DNA, 20 bp, synthetic construct
  misc_feature 1..20: note = Probe
  source 1..20: mol_type = other DNA
taaacccccttatttctagg

SEQ ID NO: 7326 - DNA, 21 bp, synthetic construct
  misc_feature 1..21: note = Probe
  source 1..21: mol_type = other DNA
taaacccccttatttctagga

SEQ ID NO: 7327 - DNA, 33 bp, synthetic construct
  misc_feature 1..33: note = Probe
  source 1..33: mol_type = other DNA
taaaccggagatgaaaacctttttccaaggaca

SEQ ID NO: 7328 - DNA, 34 bp, synthetic construct
  misc_feature 1..34: note = Probe
  source 1..34: mol_type = other DNA
taaaccggagatgaaaacctttttccaaggacaa

SEQ ID NO: 7329 - DNA, 36 bp, synthetic construct
  misc_feature 1..36: note = Probe
  source 1..36: mol_type = other DNA
taaaccggagatgaaaacctttttccaaggacaaat

SEQ ID NO: 7330 - DNA, 28 bp, synthetic construct
  misc_feature 1..28: note = Probe
  source 1..28: mol_type = other DNA
taaacctagccccaaacccactccacct

SEQ ID NO: 7331 - DNA, 37 bp, synthetic construct
  misc_feature 1..37: note = Probe
  source 1..37: mol_type = other DNA
taaagattaagagaaccaacacctctttacagtgaaa

SEQ ID NO: 7332 - DNA, 38 bp, synthetic construct
  misc_feature 1..38: note = Probe
  source 1..38: mol_type = other DNA
taaagattaagagaaccaacacctctttacagtgaaat

SEQ ID NO: 7333 - DNA, 22 bp, synthetic construct
  misc_feature 1..22: note = Probe
  source 1..22: mol_type = other DNA
taaataagctatcgggcccata

SEQ ID NO: 7334 - DNA, 23 bp, synthetic construct
  misc_feature 1..23: note = Probe
  source 1..23: mol_type = other DNA
taaataagctatcgggcccatac

SEQ ID NO: 7335 - DNA, 27 bp, synthetic construct
  misc_feature 1..27: note = Probe
  source 1..27: mol_type = other DNA
taaataagctatcgggcccataccccg

SEQ ID NO: 7336 - DNA, 31 bp, synthetic construct
  misc_feature 1..31: note = Probe
  source 1..31: mol_type = other DNA
taaataagctatcgggcccataccccgaaaa

SEQ ID NO: 7337 - DNA, 32 bp, synthetic construct
  misc_feature 1..32: note = Probe
  source 1..32: mol_type = other DNA
taaataagctatcgggcccataccccgaaaat

SEQ ID NO: 7338 - DNA, 33 bp, synthetic construct
  misc_feature 1..33: note = Probe
  source 1..33: mol_type = other DNA
taaataagctatcgggcccataccccgaaaatg

SEQ ID NO: 7339 - DNA, 50 bp, synthetic construct
  misc_feature 1..50: note = Probe
  source 1..50: mol_type = other DNA
taaataagctatcgggcccataccccgaaaatgttggttatacccttccc

SEQ ID NO: 7340 - DNA, 23 bp, synthetic construct
  misc_feature 1..23: note = Probe
  source 1..23: mol_type = other DNA
taaatacagaccaagagccttca

SEQ ID NO: 7341 - DNA, 50 bp, synthetic construct
  misc_feature 1..50: note = Probe
  source 1..50: mol_type = other DNA
taaatacagaccaagagccttcaaagccctcagtaagttgcaatacttaa

SEQ ID NO: 7342 - DNA, 40 bp, synthetic construct
  misc_feature 1..40: note = Probe
  source 1..40: mol_type = other DNA
taaatagtaccgttaacttccaattaactagttttgacaa

SEQ ID NO: 7343 - DNA, 39 bp, synthetic construct
  misc_feature 1..39: note = Probe
  source 1..39: mol_type = other DNA
taaatctaaagacaggggttaggcctctttttaccagct

SEQ ID NO: 7344 - DNA, 21 bp, synthetic construct
  misc_feature 1..21: note = Probe
  source 1..21: mol_type = other DNA
taacaacatggctttctcaac

SEQ ID NO: 7345 - DNA, 16 bp, synthetic construct
  misc_feature 1..16: note = Probe
  source 1..16: mol_type = other DNA
taacacaaagcaccca

SEQ ID NO: 7346 - DNA, 17 bp, synthetic construct
  misc_feature 1..17: note = Probe
  source 1..17: mol_type = other DNA
taacacaaagcacccaa

SEQ ID NO: 7347 - DNA, 18 bp, synthetic construct
  misc_feature 1..18: note = Probe
  source 1..18: mol_type = other DNA
taacacaaagcacccaac

SEQ ID NO: 7348 - DNA, 19 bp, synthetic construct
  misc_feature 1..19: note = Probe
  source 1..19: mol_type = other DNA
taacacaaagcacccaact

SEQ ID NO: 7349 - DNA, 20 bp, synthetic construct
  misc_feature 1..20: note = Probe
  source 1..20: mol_type = other DNA
taacacaaagcacccaactt

SEQ ID NO: 7350 - DNA, 23 bp, synthetic construct
  misc_feature 1..23: note = Probe
  source 1..23: mol_type = other DNA
taacacaaagcacccaacttaca

SEQ ID NO: 7351 - DNA, 25 bp, synthetic construct
  misc_feature 1..25: note = Probe
  source 1..25: mol_type = other DNA
taacacaaagcacccaacttacact

SEQ ID NO: 7352 - DNA, 26 bp, synthetic construct
  misc_feature 1..26: note = Probe
  source 1..26: mol_type = other DNA
taacacaaagcacccaacttacactt

SEQ ID NO: 7353 - DNA, 27 bp, synthetic construct
  misc_feature 1..27: note = Probe
  source 1..27: mol_type = other DNA
taacacaaagcacccaacttacactta

SEQ ID NO: 7354 - DNA, 29 bp, synthetic construct
  misc_feature 1..29: note = Probe
  source 1..29: mol_type = other DNA
taacacaaagcacccaacttacacttagg

SEQ ID NO: 7355 - DNA, 30 bp, synthetic construct
  misc_feature 1..30: note = Probe
  source 1..30: mol_type = other DNA
taacacaaagcacccaacttacacttagga

SEQ ID NO: 7356 - DNA, 32 bp, synthetic construct
  misc_feature 1..32: note = Probe
  source 1..32: mol_type = other DNA
taacacaaagcacccaacttacacttaggaga

SEQ ID NO: 7357 - DNA, 37 bp, synthetic construct
  misc_feature 1..37: note = Probe
  source 1..37: mol_type = other DNA
taacacaaagcacccaacttacacttaggagatttca

SEQ ID NO: 7358 - DNA, 39 bp, synthetic construct
  misc_feature 1..39: note = Probe
  source 1..39: mol_type = other DNA
taacacaaagcacccaacttacacttaggagatttcaac

SEQ ID NO: 7359 - DNA, 41 bp, synthetic construct
  misc_feature 1..41: note = Probe
  source 1..41: mol_type = other DNA
taacacaaagcacccaacttacacttaggagatttcaactt

SEQ ID NO: 7360 - DNA, 44 bp, synthetic construct
  misc_feature 1..44: note = Probe
  source 1..44: mol_type = other DNA
taacacaaagcacccaacttacacttaggagatttcaacttaac

SEQ ID NO: 7361 - DNA, 19 bp, synthetic construct
  misc_feature 1..19: note = Probe
  source 1..19: mol_type = other DNA
taacacgcgaaaggtcccc

SEQ ID NO: 7362 - DNA, 18 bp, synthetic construct
  misc_feature 1..18: note = Probe
  source 1..18: mol_type = other DNA
taacagctatccattggt

SEQ ID NO: 7363 - DNA, 24 bp, synthetic construct
  misc_feature 1..24: note = Probe
  source 1..24: mol_type = other DNA
taaccaaaacatcagattgtgaat

SEQ ID NO: 7364 - DNA, 29 bp, synthetic construct
  misc_feature 1..29: note = Probe
  source 1..29: mol_type = other DNA
taaccaaaacatcagattgtgaatctgac

SEQ ID NO: 7365 - DNA, 30 bp, synthetic construct
  misc_feature 1..30: note = Probe
  source 1..30: mol_type = other DNA
taaccaaaacatcagattgtgaatctgaca

SEQ ID NO: 7366 - DNA, 31 bp, synthetic construct
  misc_feature 1..31: note = Probe
  source 1..31: mol_type = other DNA
taaccaaaacatcagattgtgaatctgacaa

SEQ ID NO: 7367 - DNA, 32 bp, synthetic construct
  misc_feature 1..32: note = Probe
  source 1..32: mol_type = other DNA
taaccaaaacatcagattgtgaatctgacaac

SEQ ID NO: 7368 - DNA, 33 bp, synthetic construct
  misc_feature 1..33: note = Probe
  source 1..33: mol_type = other DNA
taaccaaaacatcagattgtgaatctgacaaca

SEQ ID NO: 7369 - DNA, 37 bp, synthetic construct
  misc_feature 1..37: note = Probe
  source 1..37: mol_type = other DNA
taaccaaaacatcagattgtgaatctgacaacagagg

SEQ ID NO: 7370 - DNA, 38 bp, synthetic construct
  misc_feature 1..38: note = Probe
  source 1..38: mol_type = other DNA
taaccaaaacatcagattgtgaatctgacaacagaggc

SEQ ID NO: 7371 - DNA, 39 bp, synthetic construct
  misc_feature 1..39: note = Probe
  source 1..39: mol_type = other DNA
taaccaaaacatcagattgtgaatctgacaacagaggct

SEQ ID NO: 7372 - DNA, 40 bp, synthetic construct
  misc_feature 1..40: note = Probe
  source 1..40: mol_type = other DNA
taaccaaaacatcagattgtgaatctgacaacagaggctt

SEQ ID NO: 7373 - DNA, 45 bp, synthetic construct
  misc_feature 1..45: note = Probe
  source 1..45: mol_type = other DNA
taaccaaaacatcagattgtgaatctgacaacagaggcttacgac

SEQ ID NO: 7374 - DNA, 48 bp, synthetic construct
  misc_feature 1..48: note = Probe
  source 1..48: mol_type = other DNA
taaccaaaacatcagattgtgaatctgacaacagaggcttacgacccc

SEQ ID NO: 7375 - DNA, 49 bp, synthetic construct
  misc_feature 1..49: note = Probe
  source 1..49: mol_type = other DNA
taaccaaaacatcagattgtgaatctgacaacagaggcttacgacccct

SEQ ID NO: 7376 - DNA, 41 bp, synthetic construct
  misc_feature 1..41: note = Probe
  source 1..41: mol_type = other DNA
taacccagaggtcgatggatcgaaaccatcctctgctaggt

SEQ ID NO: 7377 - DNA, 40 bp, synthetic construct
  misc_feature 1..40: note = Probe
  source 1..40: mol_type = other DNA
taacccagaggtcgatggatcgaaaccatcctctgctatc

SEQ ID NO: 7378 - DNA, 41 bp, synthetic construct
  misc_feature 1..41: note = Probe
  source 1..41: mol_type = other DNA
taaccgaaaggttggtggttcgagcccacccagggacgcct

SEQ ID NO: 7379 - DNA, 50 bp, synthetic construct
  misc_feature 1..50: note = Probe
  source 1..50: mol_type = other DNA
taaccttttaagttaaagattaagagaaccaacacctctttacagtgaaa

SEQ ID NO: 7380 - DNA, 23 bp, synthetic construct
  misc_feature 1..23: note = Probe
  source 1..23: mol_type = other DNA
taacgccaaggtcgcgggttcga

SEQ ID NO: 7381 - DNA, 24 bp, synthetic construct
  misc_feature 1..24: note = Probe
  source 1..24: mol_type = other DNA
taacgccaaggtcgcgggttcgat

SEQ ID NO: 7382 - DNA, 41 bp, synthetic construct
  misc_feature 1..41: note = Probe
  source 1..41: mol_type = other DNA
taactaagtgtttgtgggtttaagtcccattggtctagtaa

SEQ ID NO: 7383 - DNA, 18 bp, synthetic construct
  misc_feature 1..18: note = Probe
  source 1..18: mol_type = other DNA
taactcatgcccccatgt

SEQ ID NO: 7384 - DNA, 20 bp, synthetic construct
  misc_feature 1..20: note = Probe
  source 1..20: mol_type = other DNA
taactcatgcccccatgtct

SEQ ID NO: 7385 - DNA, 21 bp, synthetic construct
  misc_feature 1..21: note = Probe
  source 1..21: mol_type = other DNA
taactcatgcccccatgtcta

SEQ ID NO: 7386 - DNA, 23 bp, synthetic construct
  misc_feature 1..23: note = Probe
  source 1..23: mol_type = other DNA
taactcatgcccccatgtctaac

SEQ ID NO: 7387 - DNA, 32 bp, synthetic construct
  misc_feature 1..32: note = Probe
  source 1..32: mol_type = other DNA
taactcatgcccccatgtctaacaacatggct

SEQ ID NO: 7388 - DNA, 33 bp, synthetic construct
  misc_feature 1..33: note = Probe
  source 1..33: mol_type = other DNA
taactcatgcccccatgtctaacaacatggctt

SEQ ID NO: 7389 - DNA, 34 bp, synthetic construct
  misc_feature 1..34: note = Probe
  source 1..34: mol_type = other DNA
taactcatgcccccatgtctaacaacatggcttt

SEQ ID NO: 7390 - DNA, 35 bp, synthetic construct
  misc_feature 1..35: note = Probe
  source 1..35: mol_type = other DNA
taactcatgcccccatgtctaacaacatggctttc

SEQ ID NO: 7391 - DNA, 36 bp, synthetic construct
  misc_feature 1..36: note = Probe
  source 1..36: mol_type = other DNA
taactcatgcccccatgtctaacaacatggctttct

SEQ ID NO: 7392 - DNA, 37 bp, synthetic construct
  misc_feature 1..37: note = Probe
  source 1..37: mol_type = other DNA
taactcatgcccccatgtctaacaacatggctttctc

SEQ ID NO: 7393 - DNA, 38 bp, synthetic construct
  misc_feature 1..38: note = Probe
  source 1..38: mol_type = other DNA
taactcatgcccccatgtctaacaacatggctttctca

SEQ ID NO: 7394 - DNA, 39 bp, synthetic construct
  misc_feature 1..39: note = Probe
  source 1..39: mol_type = other DNA
taactcatgcccccatgtctaacaacatggctttctcaa

SEQ ID NO: 7395 - DNA, 40 bp, synthetic construct
  misc_feature 1..40: note = Probe
  source 1..40: mol_type = other DNA
taactcatgcccccatgtctaacaacatggctttctcaac

SEQ ID NO: 7396 - DNA, 41 bp, synthetic construct
  misc_feature 1..41: note = Probe
  source 1..41: mol_type = other DNA
taactcatgcccccatgtctaacaacatggctttctcaact

SEQ ID NO: 7397 - DNA, 49 bp, synthetic construct
  misc_feature 1..49: note = Probe
  source 1..49: mol_type = other DNA
taacttagcattaaccttttaagttaaagattaagagaaccaacacctc

SEQ ID NO: 7398 - DNA, 50 bp, synthetic construct
  misc_feature 1..50: note = Probe
  source 1..50: mol_type = other DNA
taacttagcattaaccttttaagttaaagattaagagaaccaacacctct

SEQ ID NO: 7399 - DNA, 46 bp, synthetic construct
  misc_feature 1..46: note = Probe
  source 1..46: mol_type = other DNA
taacttccaattaactagttttgacaacattcaaaaaagagtaata

SEQ ID NO: 7400 - DNA, 17 bp, synthetic construct
  misc_feature 1..17: note = Probe
  source 1..17: mol_type = other DNA
taacttgaccgctctga

SEQ ID NO: 7401 - DNA, 19 bp, synthetic construct
  misc_feature 1..19: note = Probe
  source 1..19: mol_type = other DNA
taacttgaccgctctgagc

SEQ ID NO: 7402 - DNA, 20 bp, synthetic construct
  misc_feature 1..20: note = Probe
  source 1..20: mol_type = other DNA
taacttgaccgctctgagct

SEQ ID NO: 7403 - DNA, 27 bp, synthetic construct
  misc_feature 1..27: note = Probe
  source 1..27: mol_type = other DNA
taagagaaccaacacctctttacagtg

SEQ ID NO: 7404 - DNA, 29 bp, synthetic construct
  misc_feature 1..29: note = Probe
  source 1..29: mol_type = other DNA
taagagaaccaacacctctttacagtgaa

SEQ ID NO: 7405 - DNA, 30 bp, synthetic construct
  misc_feature 1..30: note = Probe
  source 1..30: mol_type = other DNA
taagagaaccaacacctctttacagtgaaa

SEQ ID NO: 7406 - DNA, 31 bp, synthetic construct
  misc_feature 1..31: note = Probe
  source 1..31: mol_type = other DNA
taagagaaccaacacctctttacagtgaaat

SEQ ID NO: 7407 - DNA, 17 bp, synthetic construct
  misc_feature 1..17: note = Probe
  source 1..17: mol_type = other DNA
taagccagggattgtgg

SEQ ID NO: 7408 - DNA, 22 bp, synthetic construct
  misc_feature 1..22: note = Probe
  source 1..22: mol_type = other DNA
taagccagggattgtgggttcg

SEQ ID NO: 7409 - DNA, 41 bp, synthetic construct
  misc_feature 1..41: note = Probe
  source 1..41: mol_type = other DNA
taagccagggattgtgggttcgagtcccacctggggtgtcg

SEQ ID NO: 7410 - DNA, 40 bp, synthetic construct
  misc_feature 1..40: note = Probe
  source 1..40: mol_type = other DNA
taagccagggattgtgggttcgagtcccatctggggtggc

SEQ ID NO: 7411 - DNA, 41 bp, synthetic construct
  misc_feature 1..41: note = Probe
  source 1..41: mol_type = other DNA
taagccagggattgtgggttcgagtcccatctggggtggcc

SEQ ID NO: 7412 - DNA, 18 bp, synthetic construct
  misc_feature 1..18: note = Probe
  source 1..18: mol_type = other DNA
taagctatcgggcccata

SEQ ID NO: 7413 - DNA, 19 bp, synthetic construct
  misc_feature 1..19: note = Probe
  source 1..19: mol_type = other DNA
taagctatcgggcccatac

SEQ ID NO: 7414 - DNA, 21 bp, synthetic construct
  misc_feature 1..21: note = Probe
  source 1..21: mol_type = other DNA
taagctatcgggcccataccc

SEQ ID NO: 7415 - DNA, 22 bp, synthetic construct
  misc_feature 1..22: note = Probe
  source 1..22: mol_type = other DNA
taagctatcgggcccatacccc

SEQ ID NO: 7416 - DNA, 23 bp, synthetic construct
  misc_feature 1..23: note = Probe
  source 1..23: mol_type = other DNA
taagctatcgggcccataccccg

SEQ ID NO: 7417 - DNA, 24 bp, synthetic construct
  misc_feature 1..24: note = Probe
  source 1..24: mol_type = other DNA
taagctatcgggcccataccccga

SEQ ID NO: 7418 - DNA, 25 bp, synthetic construct
  misc_feature 1..25: note = Probe
  source 1..25: mol_type = other DNA
taagctatcgggcccataccccgaa

SEQ ID NO: 7419 - DNA, 26 bp, synthetic construct
  misc_feature 1..26: note = Probe
  source 1..26: mol_type = other DNA
taagctatcgggcccataccccgaaa

SEQ ID NO: 7420 - DNA, 27 bp, synthetic construct
  misc_feature 1..27: note = Probe
  source 1..27: mol_type = other DNA
taagctatcgggcccataccccgaaaa

SEQ ID NO: 7421 - DNA, 28 bp, synthetic construct
  misc_feature 1..28: note = Probe
  source 1..28: mol_type = other DNA
taagctatcgggcccataccccgaaaat

SEQ ID NO: 7422 - DNA, 29 bp, synthetic construct
  misc_feature 1..29: note = Probe
  source 1..29: mol_type = other DNA
taagctatcgggcccataccccgaaaatg

SEQ ID NO: 7423 - DNA, 30 bp, synthetic construct
  misc_feature 1..30: note = Probe
  source 1..30: mol_type = other DNA
taagctatcgggcccataccccgaaaatgt

SEQ ID NO: 7424 - DNA, 31 bp, synthetic construct
  misc_feature 1..31: note = Probe
  source 1..31: mol_type = other DNA
taagctatcgggcccataccccgaaaatgtt

SEQ ID NO: 7425 - DNA, 32 bp, synthetic construct
  misc_feature 1..32: note = Probe
  source 1..32: mol_type = other DNA
taagctatcgggcccataccccgaaaatgttg

SEQ ID NO: 7426 - DNA, 33 bp, synthetic construct
  misc_feature 1..33: note = Probe
  source 1..33: mol_type = other DNA
taagctatcgggcccataccccgaaaatgttgg

SEQ ID NO: 7427 - DNA, 34 bp, synthetic construct
  misc_feature 1..34: note = Probe
  source 1..34: mol_type = other DNA
taagctatcgggcccataccccgaaaatgttggt

SEQ ID NO: 7428 - DNA, 35 bp, synthetic construct
  misc_feature 1..35: note = Probe
  source 1..35: mol_type = other DNA
taagctatcgggcccataccccgaaaatgttggtt

SEQ ID NO: 7429 - DNA, 36 bp, synthetic construct
  misc_feature 1..36: note = Probe
  source 1..36: mol_type = other DNA
taagctatcgggcccataccccgaaaatgttggtta

SEQ ID NO: 7430 - DNA, 40 bp, synthetic construct
  misc_feature 1..40: note = Probe
  source 1..40: mol_type = other DNA
taagctatcgggcccataccccgaaaatgttggttatacc

SEQ ID NO: 7431 - DNA, 41 bp, synthetic construct
  misc_feature 1..41: note = Probe
  source 1..41: mol_type = other DNA
taagctatcgggcccataccccgaaaatgttggttataccc

SEQ ID NO: 7432 - DNA, 43 bp, synthetic construct
  misc_feature 1..43: note = Probe
  source 1..43: mol_type = other DNA
taagctatcgggcccataccccgaaaatgttggttataccctt

SEQ ID NO: 7433 - DNA, 46 bp, synthetic construct
  misc_feature 1..46: note = Probe
  source 1..46: mol_type = other DNA
taagctatcgggcccataccccgaaaatgttggttatacccttccc

SEQ ID NO: 7434 - DNA, 48 bp, synthetic construct
  misc_feature 1..48: note = Probe
  source 1..48: mol_type = other DNA
taagctatcgggcccataccccgaaaatgttggttatacccttcccgt

SEQ ID NO: 7435 - DNA, 49 bp, synthetic construct
  misc_feature 1..49: note = Probe
  source 1..49: mol_type = other DNA
taagctatcgggcccataccccgaaaatgttggttatacccttcccgta

SEQ ID NO: 7436 - DNA, 27 bp, synthetic construct
  misc_feature 1..27: note = Probe
  source 1..27: mol_type = other DNA
taaggtcagctaaataagctatcgggc

SEQ ID NO: 7437 - DNA, 28 bp, synthetic construct
  misc_feature 1..28: note = Probe
  source 1..28: mol_type = other DNA
taaggtcagctaaataagctatcgggcc

SEQ ID NO: 7438 - DNA, 29 bp, synthetic construct
  misc_feature 1..29: note = Probe
  source 1..29: mol_type = other DNA
taaggtcagctaaataagctatcgggccc

SEQ ID NO: 7439 - DNA, 30 bp, synthetic construct
  misc_feature 1..30: note = Probe
  source 1..30: mol_type = other DNA
taaggtcagctaaataagctatcgggccca

SEQ ID NO: 7440 - DNA, 31 bp, synthetic construct
  misc_feature 1..31: note = Probe
  source 1..31: mol_type = other DNA
taaggtcagctaaataagctatcgggcccat

SEQ ID NO: 7441 - DNA, 32 bp, synthetic construct
  misc_feature 1..32: note = Probe
  source 1..32: mol_type = other DNA
taaggtcagctaaataagctatcgggcccata

SEQ ID NO: 7442 - DNA, 33 bp, synthetic construct
  misc_feature 1..33: note = Probe
  source 1..33: mol_type = other DNA
taaggtcagctaaataagctatcgggcccatac

SEQ ID NO: 7443 - DNA, 34 bp, synthetic construct
  misc_feature 1..34: note = Probe
  source 1..34: mol_type = other DNA
taaggtcagctaaataagctatcgggcccatacc

SEQ ID NO: 7444 - DNA, 37 bp, synthetic construct
  misc_feature 1..37: note = Probe
  source 1..37: mol_type = other DNA
taaggtcagctaaataagctatcgggcccataccccg

SEQ ID NO: 7445 - DNA, 39 bp, synthetic construct
  misc_feature 1..39: note = Probe
  source 1..39: mol_type = other DNA
taaggtcagctaaataagctatcgggcccataccccgaa

SEQ ID NO: 7446 - DNA, 40 bp, synthetic construct
  misc_feature 1..40: note = Probe
  source 1..40: mol_type = other DNA
taaggtcagctaaataagctatcgggcccataccccgaaa

SEQ ID NO: 7447 - DNA, 41 bp, synthetic construct
  misc_feature 1..41: note = Probe
  source 1..41: mol_type = other DNA
taaggtcagctaaataagctatcgggcccataccccgaaaa

SEQ ID NO: 7448 - DNA, 42 bp, synthetic construct
  misc_feature 1..42: note = Probe
  source 1..42: mol_type = other DNA
taaggtcagctaaataagctatcgggcccataccccgaaaat

SEQ ID NO: 7449 - DNA, 43 bp, synthetic construct
  misc_feature 1..43: note = Probe
  source 1..43: mol_type = other DNA
taaggtcagctaaataagctatcgggcccataccccgaaaatg

SEQ ID NO: 7450 - DNA, 44 bp, synthetic construct
  misc_feature 1..44: note = Probe
  source 1..44: mol_type = other DNA
taaggtcagctaaataagctatcgggcccataccccgaaaatgt

SEQ ID NO: 7451 - DNA, 45 bp, synthetic construct
  misc_feature 1..45: note = Probe
  source 1..45: mol_type = other DNA
taaggtcagctaaataagctatcgggcccataccccgaaaatgtt

SEQ ID NO: 7452 - DNA, 46 bp, synthetic construct
  misc_feature 1..46: note = Probe
  source 1..46: mol_type = other DNA
taaggtcagctaaataagctatcgggcccataccccgaaaatgttg

SEQ ID NO: 7453 - DNA, 49 bp, synthetic construct
  misc_feature 1..49: note = Probe
  source 1..49: mol_type = other DNA
taaggtcagctaaataagctatcgggcccataccccgaaaatgttggtt

SEQ ID NO: 7454 - DNA, 50 bp, synthetic construct
  misc_feature 1..50: note = Probe
  source 1..50: mol_type = other DNA
taaggtcagctaaataagctatcgggcccataccccgaaaatgttggtta

SEQ ID NO: 7455 - DNA, 29 bp, synthetic construct
  misc_feature 1..29: note = Probe
  source 1..29: mol_type = other DNA
taagtgtttgtgggtttaagtcccattgg

SEQ ID NO: 7456 - DNA, 31 bp, synthetic construct
  misc_feature 1..31: note = Probe
  source 1..31: mol_type = other DNA
taagtgtttgtgggtttaagtcccattggtc

SEQ ID NO: 7457 - DNA, 32 bp, synthetic construct
  misc_feature 1..32: note = Probe
  source 1..32: mol_type = other DNA
taagtgtttgtgggtttaagtcccattggtct

SEQ ID NO: 7458 - DNA, 33 bp, synthetic construct
  misc_feature 1..33: note = Probe
  source 1..33: mol_type = other DNA
taagtgtttgtgggtttaagtcccattggtcta

SEQ ID NO: 7459 - DNA, 40 bp, synthetic construct
  misc_feature 1..40: note = Probe
  source 1..40: mol_type = other DNA
taagttaaagattaagagaaccaacacctctttacagtga

SEQ ID NO: 7460 - DNA, 43 bp, synthetic construct
  misc_feature 1..43: note = Probe
  source 1..43: mol_type = other DNA
taagttaaagattaagagaaccaacacctctttacagtgaaat

SEQ ID NO: 7461 - DNA, 50 bp, synthetic construct
  misc_feature 1..50: note = Probe
  source 1..50: mol_type = other DNA
taagttaaagattaagagaaccaacacctctttacagtgaaatgccccaa

SEQ ID NO: 7462 - DNA, 50 bp, synthetic construct
  misc_feature 1..50: note = Probe
  source 1..50: mol_type = other DNA
taatacaccagtcttgtaaaccggagatgaaaacctttttccaaggacaa

SEQ ID NO: 7463 - DNA, 19 bp, synthetic construct
  misc_feature 1..19: note = Probe
  source 1..19: mol_type = other DNA
taatcatatttaccaaatg

SEQ ID NO: 7464 - DNA, 50 bp, synthetic construct
  misc_feature 1..50: note = Probe
  source 1..50: mol_type = other DNA
taatcgcataaaacttaaaactttacagtcagaggttcaattcctcttct

SEQ ID NO: 7465 - DNA, 41 bp, synthetic construct
  misc_feature 1..41: note = Probe
  source 1..41: mol_type = other DNA
taatctgaaggtcgtgagttcgatcctcacacggggcacaa

SEQ ID NO: 7466 - DNA, 33 bp, synthetic construct
  misc_feature 1..33: note = Probe
  source 1..33: mol_type = other DNA
taatggtggagttaaagactttttctctgattt

SEQ ID NO: 7467 - DNA, 29 bp, synthetic construct
  misc_feature 1..29: note = Probe
  source 1..29: mol_type = other DNA
taattgaaaacaaaatactcaaatgggcc

SEQ ID NO: 7468 - DNA, 30 bp, synthetic construct
  misc_feature 1..30: note = Probe
  source 1..30: mol_type = other DNA
taattgaaaacaaaatactcaaatgggcct

SEQ ID NO: 7469 - DNA, 31 bp, synthetic construct
  misc_feature 1..31: note = Probe
  source 1..31: mol_type = other DNA
taattgaaaacaaaatactcaaatgggcctg

SEQ ID NO: 7470 - DNA, 32 bp, synthetic construct
  misc_feature 1..32: note = Probe
  source 1..32: mol_type = other DNA
taattgaaaacaaaatactcaaatgggcctgt

SEQ ID NO: 7471 - DNA, 33 bp, synthetic construct
  misc_feature 1..33: note = Probe
  source 1..33: mol_type = other DNA
taattgaaaacaaaatactcaaatgggcctgtc

SEQ ID NO: 7472 - DNA, 49 bp, synthetic construct
  misc_feature 1..49: note = Probe
  source 1..49: mol_type = other DNA
tacaacgatggtttttcatatcattggtcgtggttgtagtccgtgcgag

SEQ ID NO: 7473 - DNA, 15 bp, synthetic construct
  misc_feature 1..15: note = Probe
  source 1..15: mol_type = other DNA
tacaatctccagcat

SEQ ID NO: 7474 - DNA, 20 bp, synthetic construct
  misc_feature 1..20: note = Probe
  source 1..20: mol_type = other DNA
tacaatctccagcattcccc

SEQ ID NO: 7475 - DNA, 23 bp, synthetic construct
  misc_feature 1..23: note = Probe
  source 1..23: mol_type = other DNA
tacaatctccagcattccccctc

SEQ ID NO: 7476 - DNA, 25 bp, synthetic construct
  misc_feature 1..25: note = Probe
  source 1..25: mol_type = other DNA
tacaatctccagcattccccctcaa

SEQ ID NO: 7477 - DNA, 29 bp, synthetic construct
  misc_feature 1..29: note = Probe
  source 1..29: mol_type = other DNA
tacaatctccagcattccccctcaaacct

SEQ ID NO: 7478 - DNA, 30 bp, synthetic construct
  misc_feature 1..30: note = Probe
  source 1..30: mol_type = other DNA
tacaatctccagcattccccctcaaaccta

SEQ ID NO: 7479 - DNA, 31 bp, synthetic construct
  misc_feature 1..31: note = Probe
  source 1..31: mol_type = other DNA
tacaatctccagcattccccctcaaacctaa

SEQ ID NO: 7480 - DNA, 32 bp, synthetic construct
  misc_feature 1..32: note = Probe
  source 1..32: mol_type = other DNA
tacaatctccagcattccccctcaaacctaag

SEQ ID NO: 7481 - DNA, 33 bp, synthetic construct
  misc_feature 1..33: note = Probe
  source 1..33: mol_type = other DNA
tacaatctccagcattccccctcaaacctaaga

SEQ ID NO: 7482 - DNA, 50 bp, synthetic construct
  misc_feature 1..50: note = Probe
  source 1..50: mol_type = other DNA
tacaccagtcttgtaaaccggagatgaaaacctttttccaaggacaaatc

SEQ ID NO: 7483 - DNA, 43 bp, synthetic construct
  misc_feature 1..43: note = Probe
  source 1..43: mol_type = other DNA
tacacgcagaaggtcctgggttcgagccccagtggaaccacgg

SEQ ID NO: 7484 - DNA, 45 bp, synthetic construct
  misc_feature 1..45: note = Probe
  source 1..45: mol_type = other DNA
tacactgaaaatgtttagacgggctcacatcaccccataaacaaa

SEQ ID NO: 7485 - DNA, 46 bp, synthetic construct
  misc_feature 1..46: note = Probe
  source 1..46: mol_type = other DNA
tacactgaaaatgtttagacgggctcacatcaccccataaacaaat

SEQ ID NO: 7486 - DNA, 50 bp, synthetic construct
  misc_feature 1..50: note = Probe
  source 1..50: mol_type = other DNA
tacactgaaaatgtttagacgggctcacatcaccccataaacaaataggt

SEQ ID NO: 7487 - DNA, 30 bp, synthetic construct
  misc_feature 1..30: note = Probe
  source 1..30: mol_type = other DNA
tacacttaggagatttcaacttaacttgac

SEQ ID NO: 7488 - DNA, 32 bp, synthetic construct
  misc_feature 1..32: note = Probe
  source 1..32: mol_type = other DNA
tacacttaggagatttcaacttaacttgaccg

SEQ ID NO: 7489 - DNA, 33 bp, synthetic construct
  misc_feature 1..33: note = Probe
  source 1..33: mol_type = other DNA
tacacttaggagatttcaacttaacttgaccgc

SEQ ID NO: 7490 - DNA, 34 bp, synthetic construct
  misc_feature 1..34: note = Probe
  source 1..34: mol_type = other DNA
tacacttaggagatttcaacttaacttgaccgct

SEQ ID NO: 7491 - DNA, 35 bp, synthetic construct
  misc_feature 1..35: note = Probe
  source 1..35: mol_type = other DNA
tacacttaggagatttcaacttaacttgaccgctc

SEQ ID NO: 7492 - DNA, 36 bp, synthetic construct
  misc_feature 1..36: note = Probe
  source 1..36: mol_type = other DNA
tacacttaggagatttcaacttaacttgaccgctct

SEQ ID NO: 7493 - DNA, 37 bp, synthetic construct
  misc_feature 1..37: note = Probe
  source 1..37: mol_type = other DNA
tacacttaggagatttcaacttaacttgaccgctctg

SEQ ID NO: 7494 - DNA, 38 bp, synthetic construct
  misc_feature 1..38: note = Probe
  source 1..38: mol_type = other DNA
tacacttaggagatttcaacttaacttgaccgctctga

SEQ ID NO: 7495 - DNA, 39 bp, synthetic construct
  misc_feature 1..39: note = Probe
  source 1..39: mol_type = other DNA
tacacttaggagatttcaacttaacttgaccgctctgag

SEQ ID NO: 7496 - DNA, 40 bp, synthetic construct
  misc_feature 1..40: note = Probe
  source 1..40: mol_type = other DNA
tacacttaggagatttcaacttaacttgaccgctctgagc

SEQ ID NO: 7497 - DNA, 41 bp, synthetic construct
  misc_feature 1..41: note = Probe
  source 1..41: mol_type = other DNA
tacacttaggagatttcaacttaacttgaccgctctgagct

SEQ ID NO: 7498 - DNA, 42 bp, synthetic construct
  misc_feature 1..42: note = Probe
  source 1..42: mol_type = other DNA
tacacttaggagatttcaacttaacttgaccgctctgagcta

SEQ ID NO: 7499 - DNA, 43 bp, synthetic construct
  misc_feature 1..43: note = Probe
  source 1..43: mol_type = other DNA
tacacttaggagatttcaacttaacttgaccgctctgagctaa

SEQ ID NO: 7500 - DNA, 44 bp, synthetic construct
  misc_feature 1..44: note = Probe
  source 1..44: mol_type = other DNA
tacacttaggagatttcaacttaacttgaccgctctgagctaaa

SEQ ID NO: 7501 - DNA, 18 bp, synthetic construct
  misc_feature 1..18: note = Probe
  source 1..18: mol_type = other DNA
tacagaccaagagccttc

SEQ ID NO: 7502 - DNA, 50 bp, synthetic construct
  misc_feature 1..50: note = Probe
  source 1..50: mol_type = other DNA
tacagaccaagagccttcaaagccctcagtaagttgcaatacttaatttc

SEQ ID NO: 7503 - DNA, 24 bp, synthetic construct
  misc_feature 1..24: note = Probe
  source 1..24: mol_type = other DNA
tacagtcagaggttcaattcctct

SEQ ID NO: 7504 - DNA, 25 bp, synthetic construct
  misc_feature 1..25: note = Probe
  source 1..25: mol_type = other DNA
tacagtcagaggttcaattcctctt

SEQ ID NO: 7505 - DNA, 27 bp, synthetic construct
  misc_feature 1..27: note = Probe
  source 1..27: mol_type = other DNA
tacagtcagaggttcaattcctcttct

SEQ ID NO: 7506 - DNA, 32 bp, synthetic construct
  misc_feature 1..32: note = Probe
  source 1..32: mol_type = other DNA
tacagtcagaggttcaattcctcttcttaaca

SEQ ID NO: 7507 - DNA, 27 bp, synthetic construct
  misc_feature 1..27: note = Probe
  source 1..27: mol_type = other DNA
tacccacacccacccaagaacagggtt

SEQ ID NO: 7508 - DNA, 28 bp, synthetic construct
  misc_feature 1..28: note = Probe
  source 1..28: mol_type = other DNA
tacccacacccacccaagaacagggttt

SEQ ID NO: 7509 - DNA, 29 bp, synthetic construct
  misc_feature 1..29: note = Probe
  source 1..29: mol_type = other DNA
tacccacacccacccaagaacagggtttg

SEQ ID NO: 7510 - DNA, 30 bp, synthetic construct
  misc_feature 1..30: note = Probe
  source 1..30: mol_type = other DNA
tacccacacccacccaagaacagggtttgt

SEQ ID NO: 7511 - DNA, 31 bp, synthetic construct
  misc_feature 1..31: note = Probe
  source 1..31: mol_type = other DNA
tacccacacccacccaagaacagggtttgtt

SEQ ID NO: 7512 - DNA, 32 bp, synthetic construct
  misc_feature 1..32: note = Probe
  source 1..32: mol_type = other DNA
tacccacacccacccaagaacagggtttgtta

SEQ ID NO: 7513 - DNA, 28 bp, synthetic construct
  misc_feature 1..28: note = Probe
  source 1..28: mol_type = other DNA
taccccgaaaatgttggttatacccttc

SEQ ID NO: 7514 - DNA, 29 bp, synthetic construct
  misc_feature 1..29: note = Probe
  source 1..29: mol_type = other DNA
taccccgaaaatgttggttatacccttcc

SEQ ID NO: 7515 - DNA, 30 bp, synthetic construct
  misc_feature 1..30: note = Probe
  source 1..30: mol_type = other DNA
taccccgaaaatgttggttatacccttccc

SEQ ID NO: 7516 - DNA, 31 bp, synthetic construct
  misc_feature 1..31: note = Probe
  source 1..31: mol_type = other DNA
taccccgaaaatgttggttatacccttcccg

SEQ ID NO: 7517 - DNA, 32 bp, synthetic construct
  misc_feature 1..32: note = Probe
  source 1..32: mol_type = other DNA
taccccgaaaatgttggttatacccttcccgt

SEQ ID NO: 7518 - DNA, 33 bp, synthetic construct
  misc_feature 1..33: note = Probe
  source 1..33: mol_type = other DNA
taccccgaaaatgttggttatacccttcccgta

SEQ ID NO: 7519 - DNA, 38 bp, synthetic construct
  misc_feature 1..38: note = Probe
  source 1..38: mol_type = other DNA
taccccgaaaatgttggttatacccttcccgtactaat

SEQ ID NO: 7520 - DNA, 39 bp, synthetic construct
  misc_feature 1..39: note = Probe
  source 1..39: mol_type = other DNA
taccccgaaaatgttggttatacccttcccgtactaatt

SEQ ID NO: 7521 - DNA, 17 bp, synthetic construct
  misc_feature 1..17: note = Probe
  source 1..17: mol_type = other DNA
tacccttcccgtactaa

SEQ ID NO: 7522 - DNA, 32 bp, synthetic construct
  misc_feature 1..32: note = Probe
  source 1..32: mol_type = other DNA
taccgttaacttccaattaactagttttgaca

SEQ ID NO: 7523 - DNA, 50 bp, synthetic construct
  misc_feature 1..50: note = Probe
  source 1..50: mol_type = other DNA
taccgttaacttccaattaactagttttgacaacattcaaaaaagagtaa

SEQ ID NO: 7524 - DNA, 20 bp, synthetic construct
  misc_feature 1..20: note = Probe
  source 1..20: mol_type = other DNA
tacctcctcaaagcaataca

SEQ ID NO: 7525 - DNA, 22 bp, synthetic construct
  misc_feature 1..22: note = Probe
  source 1..22: mol_type = other DNA
tacctcctcaaagcaatacact

SEQ ID NO: 7526 - DNA, 23 bp, synthetic construct
  misc_feature 1..23: note = Probe
  source 1..23: mol_type = other DNA
tacctcctcaaagcaatacactg

SEQ ID NO: 7527 - DNA, 24 bp, synthetic construct
  misc_feature 1..24: note = Probe
  source 1..24: mol_type = other DNA
tacctcctcaaagcaatacactga

SEQ ID NO: 7528 - DNA, 39 bp, synthetic construct
  misc_feature 1..39: note = Probe
  source 1..39: mol_type = other DNA
tacctcctcaaagcaatacactgaaaatgtttagacggg

SEQ ID NO: 7529 - DNA, 40 bp, synthetic construct
  misc_feature 1..40: note = Probe
  source 1..40: mol_type = other DNA
tacctcctcaaagcaatacactgaaaatgtttagacgggc

SEQ ID NO: 7530 - DNA, 41 bp, synthetic construct
  misc_feature 1..41: note = Probe
  source 1..41: mol_type = other DNA
tacctcctcaaagcaatacactgaaaatgtttagacgggct

SEQ ID NO: 7531 - DNA, 43 bp, synthetic construct
  misc_feature 1..43: note = Probe
  source 1..43: mol_type = other DNA
tacctcctcaaagcaatacactgaaaatgtttagacgggctca

SEQ ID NO: 7532 - DNA, 44 bp, synthetic construct
  misc_feature 1..44: note = Probe
  source 1..44: mol_type = other DNA
tacctcctcaaagcaatacactgaaaatgtttagacgggctcac

SEQ ID NO: 7533 - DNA, 45 bp, synthetic construct
  misc_feature 1..45: note = Probe
  source 1..45: mol_type = other DNA
tacctcctcaaagcaatacactgaaaatgtttagacgggctcaca

SEQ ID NO: 7534 - DNA, 40 bp, synthetic construct
  misc_feature 1..40: note = Probe
  source 1..40: mol_type = other DNA
tactttgatagagtaaataataggagcttaaaccccctta

SEQ ID NO: 7535 - DNA, 50 bp, synthetic construct
  misc_feature 1..50: note = Probe
  source 1..50: mol_type = other DNA
tactttgatagagtaaataataggagcttaaacccccttatttctaggac

SEQ ID NO: 7536 - DNA, 22 bp, synthetic construct
  misc_feature 1..22: note = Probe
  source 1..22: mol_type = other DNA
tagacgggctcacatcacccca

SEQ ID NO: 7537 - DNA, 23 bp, synthetic construct
  misc_feature 1..23: note = Probe
  source 1..23: mol_type = other DNA
tagacgggctcacatcaccccat

SEQ ID NO: 7538 - DNA, 24 bp, synthetic construct
  misc_feature 1..24: note = Probe
  source 1..24: mol_type = other DNA
tagacgggctcacatcaccccata

SEQ ID NO: 7539 - DNA, 27 bp, synthetic construct
  misc_feature 1..27: note = Probe
  source 1..27: mol_type = other DNA
tagacgggctcacatcaccccataaac

SEQ ID NO: 7540 - DNA, 28 bp, synthetic construct
  misc_feature 1..28: note = Probe
  source 1..28: mol_type = other DNA
tagacgggctcacatcaccccataaaca

SEQ ID NO: 7541 - DNA, 29 bp, synthetic construct
  misc_feature 1..29: note = Probe
  source 1..29: mol_type = other DNA
tagacgggctcacatcaccccataaacaa

SEQ ID NO: 7542 - DNA, 30 bp, synthetic construct
  misc_feature 1..30: note = Probe
  source 1..30: mol_type = other DNA
tagacgggctcacatcaccccataaacaaa

SEQ ID NO: 7543 - DNA, 31 bp, synthetic construct
  misc_feature 1..31: note = Probe
  source 1..31: mol_type = other DNA
tagacgggctcacatcaccccataaacaaat

SEQ ID NO: 7544 - DNA, 32 bp, synthetic construct
  misc_feature 1..32: note = Probe
  source 1..32: mol_type = other DNA
tagacgggctcacatcaccccataaacaaata

SEQ ID NO: 7545 - DNA, 32 bp, synthetic construct
  misc_feature 1..32: note = Probe
  source 1..32: mol_type = other DNA
tagagcatgggactcttaatcccagggtcgtg

SEQ ID NO: 7546 - DNA, 22 bp, synthetic construct
  misc_feature 1..22: note = Probe
  source 1..22: mol_type = other DNA
tagagccagactgcctgggttt

SEQ ID NO: 7547 - DNA, 23 bp, synthetic construct
  misc_feature 1..23: note = Probe
  source 1..23: mol_type = other DNA
tagagccagactgcctgggtttg

SEQ ID NO: 7548 - DNA, 31 bp, synthetic construct
  misc_feature 1..31: note = Probe
  source 1..31: mol_type = other DNA
tagagtaaataataggagcttaaaccccctt

SEQ ID NO: 7549 - DNA, 37 bp, synthetic construct
  misc_feature 1..37: note = Probe
  source 1..37: mol_type = other DNA
tagagtaaataataggagcttaaacccccttatttct

SEQ ID NO: 7550 - DNA, 39 bp, synthetic construct
  misc_feature 1..39: note = Probe
  source 1..39: mol_type = other DNA
tagagtaaataataggagcttaaacccccttatttctag

SEQ ID NO: 7551 - DNA, 40 bp, synthetic construct
  misc_feature 1..40: note = Probe
  source 1..40: mol_type = other DNA
tagagtaaataataggagcttaaacccccttatttctagg

SEQ ID NO: 7552 - DNA, 41 bp, synthetic construct
  misc_feature 1..41: note = Probe
  source 1..41: mol_type = other DNA
tagagtaaataataggagcttaaacccccttatttctagga

SEQ ID NO: 7553 - DNA, 25 bp, synthetic construct
  misc_feature 1..25: note = Probe
  source 1..25: mol_type = other DNA
tagattgaagccagttgattagggt

SEQ ID NO: 7554 - DNA, 35 bp, synthetic construct
  misc_feature 1..35: note = Probe
  source 1..35: mol_type = other DNA
tagattgaagccagttgattagggtgcttagctgt

SEQ ID NO: 7555 - DNA, 36 bp, synthetic construct
  misc_feature 1..36: note = Probe
  source 1..36: mol_type = other DNA
tagattgaagccagttgattagggtgcttagctgtt

SEQ ID NO: 7556 - DNA, 37 bp, synthetic construct
  misc_feature 1..37: note = Probe
  source 1..37: mol_type = other DNA
tagattgaagccagttgattagggtgcttagctgtta

SEQ ID NO: 7557 - DNA, 40 bp, synthetic construct
  misc_feature 1..40: note = Probe
  source 1..40: mol_type = other DNA
tagattgaagccagttgattagggtgcttagctgttaact

SEQ ID NO: 7558 - DNA, 50 bp, synthetic construct
  misc_feature 1..50: note = Probe
  source 1..50: mol_type = other DNA
tagcactctggactctgaatccagcgatccgagttcaaatctcggtggaa

SEQ ID NO: 7559 - DNA, 37 bp, synthetic construct
  misc_feature 1..37: note = Probe
  source 1..37: mol_type = other DNA
tagcattaaccttttaagttaaagattaagagaacca

SEQ ID NO: 7560 - DNA, 39 bp, synthetic construct
  misc_feature 1..39: note = Probe
  source 1..39: mol_type = other DNA
tagcattaaccttttaagttaaagattaagagaaccaac

SEQ ID NO: 7561 - DNA, 48 bp, synthetic construct
  misc_feature 1..48: note = Probe
  source 1..48: mol_type = other DNA
tagcattaaccttttaagttaaagattaagagaaccaacacctcttta

SEQ ID NO: 7562 - DNA, 22 bp, synthetic construct
  misc_feature 1..22: note = Probe
  source 1..22: mol_type = other DNA
tagccccaaacccactccacct

SEQ ID NO: 7563 - DNA, 22 bp, synthetic construct
  misc_feature 1..22: note = Probe
  source 1..22: mol_type = other DNA
tagcgtggccgagcggtctaag

SEQ ID NO: 7564 - DNA, 29 bp, synthetic construct
  misc_feature 1..29: note = Probe
  source 1..29: mol_type = other DNA
tagctcagtcggtagagcatcagactttt

SEQ ID NO: 7565 - DNA, 25 bp, synthetic construct
  misc_feature 1..25: note = Probe
  source 1..25: mol_type = other DNA
tagctcagtcggtagagcatgagac

SEQ ID NO: 7566 - DNA, 27 bp, synthetic construct
  misc_feature 1..27: note = Probe
  source 1..27: mol_type = other DNA
tagctcagtcggtagagcatgagactc

SEQ ID NO: 7567 - DNA, 29 bp, synthetic construct
  misc_feature 1..29: note = Probe
  source 1..29: mol_type = other DNA
tagctcagtcggtagagcatgagactctt

SEQ ID NO: 7568 - DNA, 50 bp, synthetic construct
  misc_feature 1..50: note = Probe
  source 1..50: mol_type = other DNA
tagctgttaactaagtgtttgtgggtttaagtcccattggtctagtaagg

SEQ ID NO: 7569 - DNA, 24 bp, synthetic construct
  misc_feature 1..24: note = Probe
  source 1..24: mol_type = other DNA
taggagatttcaacttaacttgac

SEQ ID NO: 7570 - DNA, 25 bp, synthetic construct
  misc_feature 1..25: note = Probe
  source 1..25: mol_type = other DNA
taggagatttcaacttaacttgacc

SEQ ID NO: 7571 - DNA, 26 bp, synthetic construct
  misc_feature 1..26: note = Probe
  source 1..26: mol_type = other DNA
taggagatttcaacttaacttgaccg

SEQ ID NO: 7572 - DNA, 27 bp, synthetic construct
  misc_feature 1..27: note = Probe
  source 1..27: mol_type = other DNA
taggagatttcaacttaacttgaccgc

SEQ ID NO: 7573 - DNA, 28 bp, synthetic construct
  misc_feature 1..28: note = Probe
  source 1..28: mol_type = other DNA
taggagatttcaacttaacttgaccgct

SEQ ID NO: 7574 - DNA, 29 bp, synthetic construct
  misc_feature 1..29: note = Probe
  source 1..29: mol_type = other DNA
taggagatttcaacttaacttgaccgctc

SEQ ID NO: 7575 - DNA, 31 bp, synthetic construct
  misc_feature 1..31: note = Probe
  source 1..31: mol_type = other DNA
taggagatttcaacttaacttgaccgctctg

SEQ ID NO: 7576 - DNA, 32 bp, synthetic construct
  misc_feature 1..32: note = Probe
  source 1..32: mol_type = other DNA
taggagatttcaacttaacttgaccgctctga

SEQ ID NO: 7577 - DNA, 33 bp, synthetic construct
  misc_feature 1..33: note = Probe
  source 1..33: mol_type = other DNA
taggagatttcaacttaacttgaccgctctgag

SEQ ID NO: 7578 - DNA, 34 bp, synthetic construct
  misc_feature 1..34: note = Probe
  source 1..34: mol_type = other DNA
taggagatttcaacttaacttgaccgctctgagc

SEQ ID NO: 7579 - DNA, 35 bp, synthetic construct
  misc_feature 1..35: note = Probe
  source 1..35: mol_type = other DNA
taggagatttcaacttaacttgaccgctctgagct

SEQ ID NO: 7580 - DNA, 29 bp, synthetic construct
  misc_feature 1..29: note = Probe
  source 1..29: mol_type = other DNA
taggagcttaaacccccttatttctagga

SEQ ID NO: 7581 - DNA, 17 bp, synthetic construct
  misc_feature 1..17: note = Probe
  source 1..17: mol_type = other DNA
taggatggggtgtgata

SEQ ID NO: 7582 - DNA, 22 bp, synthetic construct
  misc_feature 1..22: note = Probe
  source 1..22: mol_type = other DNA
taggatggggtgtgataggtgg

SEQ ID NO: 7583 - DNA, 25 bp, synthetic construct
  misc_feature 1..25: note = Probe
  source 1..25: mol_type = other DNA
taggatggggtgtgataggtggcac

SEQ ID NO: 7584 - DNA, 27 bp, synthetic construct
  misc_feature 1..27: note = Probe
  source 1..27: mol_type = other DNA
taggatggggtgtgataggtggcacgg

SEQ ID NO: 7585 - DNA, 31 bp, synthetic construct
  misc_feature 1..31: note = Probe
  source 1..31: mol_type = other DNA
taggatggggtgtgataggtggcacggagaa

SEQ ID NO: 7586 - DNA, 34 bp, synthetic construct
  misc_feature 1..34: note = Probe
  source 1..34: mol_type = other DNA
taggatggggtgtgataggtggcacggagaattt

SEQ ID NO: 7587 - DNA, 35 bp, synthetic construct
  misc_feature 1..35: note = Probe
  source 1..35: mol_type = other DNA
taggatggggtgtgataggtggcacggagaatttt

SEQ ID NO: 7588 - DNA, 37 bp, synthetic construct
  misc_feature 1..37: note = Probe
  source 1..37: mol_type = other DNA
taggatggggtgtgataggtggcacggagaattttgg

SEQ ID NO: 7589 - DNA, 17 bp, synthetic construct
  misc_feature 1..17: note = Probe
  source 1..17: mol_type = other DNA
taggggtatgattctcg

SEQ ID NO: 7590 - DNA, 19 bp, synthetic construct
  misc_feature 1..19: note = Probe
  source 1..19: mol_type = other DNA
tagggtgcgagaggtcccg

SEQ ID NO: 7591 - DNA, 49 bp, synthetic construct
  misc_feature 1..49: note = Probe
  source 1..49: mol_type = other DNA
tagggtgcttagctgttaactaagtgtttgtgggtttaagtcccattgg

SEQ ID NO: 7592 - DNA, 44 bp, synthetic construct
  misc_feature 1..44: note = Probe
  source 1..44: mol_type = other DNA
tagtaaacaggagatcctgggttcgaatcccagcggggccttac

SEQ ID NO: 7593 - DNA, 44 bp, synthetic construct
  misc_feature 1..44: note = Probe
  source 1..44: mol_type = other DNA
tagtaaacaggagatcctgggttcgaatcccagcggtgcctccg

SEQ ID NO: 7594 - DNA, 28 bp, synthetic construct
  misc_feature 1..28: note = Probe
  source 1..28: mol_type = other DNA
tagtaccgttaacttccaattaactagt

SEQ ID NO: 7595 - DNA, 38 bp, synthetic construct
  misc_feature 1..38: note = Probe
  source 1..38: mol_type = other DNA
tagtaccgttaacttccaattaactagttttgacaaca

SEQ ID NO: 7596 - DNA, 40 bp, synthetic construct
  misc_feature 1..40: note = Probe
  source 1..40: mol_type = other DNA
tagtaccgttaacttccaattaactagttttgacaacatt

SEQ ID NO: 7597 - DNA, 41 bp, synthetic construct
  misc_feature 1..41: note = Probe
  source 1..41: mol_type = other DNA
tagtaccgttaacttccaattaactagttttgacaacattc

SEQ ID NO: 7598 - DNA, 50 bp, synthetic construct
  misc_feature 1..50: note = Probe
  source 1..50: mol_type = other DNA
tagtaccgttaacttccaattaactagttttgacaacattcaaaaaagag

SEQ ID NO: 7599 - DNA, 17 bp, synthetic construct
  misc_feature 1..17: note = Probe
  source 1..17: mol_type = other DNA
tagtccgtgcgagaata

SEQ ID NO: 7600 - DNA, 20 bp, synthetic construct
  misc_feature 1..20: note = Probe
  source 1..20: mol_type = other DNA
tagtccgtgcgagaataatg

SEQ ID NO: 7601 - DNA, 19 bp, synthetic construct
  misc_feature 1..19: note = Probe
  source 1..19: mol_type = other DNA
tagtggtgagtatccccgc

SEQ ID NO: 7602 - DNA, 24 bp, synthetic construct
  misc_feature 1..24: note = Probe
  source 1..24: mol_type = other DNA
tagtggtgagtatccccgcctgtc

SEQ ID NO: 7603 - DNA, 25 bp, synthetic construct
  misc_feature 1..25: note = Probe
  source 1..25: mol_type = other DNA
tagtggtgagtatccccgcctgtca

SEQ ID NO: 7604 - DNA, 27 bp, synthetic construct
  misc_feature 1..27: note = Probe
  source 1..27: mol_type = other DNA
tagtggtgagtatccccgcctgtcacg

SEQ ID NO: 7605 - DNA, 20 bp, synthetic construct
  misc_feature 1..20: note = Probe
  source 1..20: mol_type = other DNA
tagtggttaggattcggcgc

SEQ ID NO: 7606 - DNA, 24 bp, synthetic construct
  misc_feature 1..24: note = Probe
  source 1..24: mol_type = other DNA
tagtggttaggattcggcgctctc

SEQ ID NO: 7607 - DNA, 19 bp, synthetic construct
  misc_feature 1..19: note = Probe
  source 1..19: mol_type = other DNA
tagtggttagtatccccgc

SEQ ID NO: 7608 - DNA, 29 bp, synthetic construct
  misc_feature 1..29: note = Probe
  source 1..29: mol_type = other DNA
tagtgtagtggttatcacgttcgcctcac

SEQ ID NO: 7609 - DNA, 15 bp, synthetic construct
  misc_feature 1..15: note = Probe
  source 1..15: mol_type = other DNA
tatacccacacccac

SEQ ID NO: 7610 - DNA, 16 bp, synthetic construct
  misc_feature 1..16: note = Probe
  source 1..16: mol_type = other DNA
tatacccacacccacc

SEQ ID NO: 7611 - DNA, 17 bp, synthetic construct
  misc_feature 1..17: note = Probe
  source 1..17: mol_type = other DNA
tatacccacacccaccc

SEQ ID NO: 7612 - DNA, 18 bp, synthetic construct
  misc_feature 1..18: note = Probe
  source 1..18: mol_type = other DNA
tatacccacacccaccca

SEQ ID NO: 7613 - DNA, 19 bp, synthetic construct
  misc_feature 1..19: note = Probe
  source 1..19: mol_type = other DNA
tatacccacacccacccaa

SEQ ID NO: 7614 - DNA, 20 bp, synthetic construct
  misc_feature 1..20: note = Probe
  source 1..20: mol_type = other DNA
tatacccacacccacccaag

SEQ ID NO: 7615 - DNA, 21 bp, synthetic construct
  misc_feature 1..21: note = Probe
  source 1..21: mol_type = other DNA
tatacccacacccacccaaga

SEQ ID NO: 7616 - DNA, 22 bp, synthetic construct
  misc_feature 1..22: note = Probe
  source 1..22: mol_type = other DNA
tatacccacacccacccaagaa

SEQ ID NO: 7617 - DNA, 23 bp, synthetic construct
  misc_feature 1..23: note = Probe
  source 1..23: mol_type = other DNA
tatacccacacccacccaagaac

SEQ ID NO: 7618 - DNA, 24 bp, synthetic construct
  misc_feature 1..24: note = Probe
  source 1..24: mol_type = other DNA
tatacccacacccacccaagaaca

SEQ ID NO: 7619 - DNA, 26 bp, synthetic construct
  misc_feature 1..26: note = Probe
  source 1..26: mol_type = other DNA
tatacccacacccacccaagaacagg

SEQ ID NO: 7620 - DNA, 27 bp, synthetic construct
  misc_feature 1..27: note = Probe
  source 1..27: mol_type = other DNA
tatacccacacccacccaagaacaggg

SEQ ID NO: 7621 - DNA, 28 bp, synthetic construct
  misc_feature 1..28: note = Probe
  source 1..28: mol_type = other DNA
tatacccacacccacccaagaacagggt

SEQ ID NO: 7622 - DNA, 29 bp, synthetic construct
  misc_feature 1..29: note = Probe
  source 1..29: mol_type = other DNA
tatacccacacccacccaagaacagggtt

SEQ ID NO: 7623 - DNA, 30 bp, synthetic construct
  misc_feature 1..30: note = Probe
  source 1..30: mol_type = other DNA
tatacccacacccacccaagaacagggttt

SEQ ID NO: 7624 - DNA, 31 bp, synthetic construct
  misc_feature 1..31: note = Probe
  source 1..31: mol_type = other DNA
tatacccacacccacccaagaacagggtttg

SEQ ID NO: 7625 - DNA, 32 bp, synthetic construct
  misc_feature 1..32: note = Probe
  source 1..32: mol_type = other DNA
tatacccacacccacccaagaacagggtttgt

SEQ ID NO: 7626 - DNA, 33 bp, synthetic construct
  misc_feature 1..33: note = Probe
  source 1..33: mol_type = other DNA
tatacccacacccacccaagaacagggtttgtt

SEQ ID NO: 7627 - DNA, 34 bp, synthetic construct
  misc_feature 1..34: note = Probe
  source 1..34: mol_type = other DNA
tatacccacacccacccaagaacagggtttgtta

SEQ ID NO: 7628 - DNA, 35 bp, synthetic construct
  misc_feature 1..35: note = Probe
  source 1..35: mol_type = other DNA
tatacccacacccacccaagaacagggtttgttaa

SEQ ID NO: 7629 - DNA, 36 bp, synthetic construct
  misc_feature 1..36: note = Probe
  source 1..36: mol_type = other DNA
tatacccacacccacccaagaacagggtttgttaag

SEQ ID NO: 7630 - DNA, 37 bp, synthetic construct
  misc_feature 1..37: note = Probe
  source 1..37: mol_type = other DNA
tatacccacacccacccaagaacagggtttgttaaga

SEQ ID NO: 7631 - DNA, 39 bp, synthetic construct
  misc_feature 1..39: note = Probe
  source 1..39: mol_type = other DNA
tatacccacacccacccaagaacagggtttgttaagatg

SEQ ID NO: 7632 - DNA, 40 bp, synthetic construct
  misc_feature 1..40: note = Probe
  source 1..40: mol_type = other DNA
tatacccacacccacccaagaacagggtttgttaagatgg

SEQ ID NO: 7633 - DNA, 25 bp, synthetic construct
  misc_feature 1..25: note = Probe
  source 1..25: mol_type = other DNA
tatagtggtgagtatccccgcctgt

SEQ ID NO: 7634 - DNA, 25 bp, synthetic construct
  misc_feature 1..25: note = Probe
  source 1..25: mol_type = other DNA
tatagtggttagtactctgcgttgt

SEQ ID NO: 7635 - DNA, 27 bp, synthetic construct
  misc_feature 1..27: note = Probe
  source 1..27: mol_type = other DNA
tatcattggtcgtggttgtagtccgtg

SEQ ID NO: 7636 - DNA, 29 bp, synthetic construct
  misc_feature 1..29: note = Probe
  source 1..29: mol_type = other DNA
tatcattggtcgtggttgtagtccgtgcg

SEQ ID NO: 7637 - DNA, 38 bp, synthetic construct
  misc_feature 1..38: note = Probe
  source 1..38: mol_type = other DNA
tatcattggtcgtggttgtagtccgtgcgagaataatg

SEQ ID NO: 7638 - DNA, 24 bp, synthetic construct
  misc_feature 1..24: note = Probe
  source 1..24: mol_type = other DNA
tatgataatcatatttaccaaatg

SEQ ID NO: 7639 - DNA, 27 bp, synthetic construct
  misc_feature 1..27: note = Probe
  source 1..27: mol_type = other DNA
tcaaagttaaattataggctaaatcct

SEQ ID NO: 7640 - DNA, 29 bp, synthetic construct
  misc_feature 1..29: note = Probe
  source 1..29: mol_type = other DNA
tcaaagttaaattataggctaaatcctat

SEQ ID NO: 7641 - DNA, 30 bp, synthetic construct
  misc_feature 1..30: note = Probe
  source 1..30: mol_type = other DNA
tcaaagttaaattataggctaaatcctata

SEQ ID NO: 7642 - DNA, 31 bp, synthetic construct
  misc_feature 1..31: note = Probe
  source 1..31: mol_type = other DNA
tcaaagttaaattataggctaaatcctatat

SEQ ID NO: 7643 - DNA, 32 bp, synthetic construct
  misc_feature 1..32: note = Probe
  source 1..32: mol_type = other DNA
tcaaagttaaattataggctaaatcctatata

SEQ ID NO: 7644 - DNA, 22 bp, synthetic construct
  misc_feature 1..22: note = Probe
  source 1..22: mol_type = other DNA
tcaaatcccggacgagccccct

SEQ ID NO: 7645 - DNA, 23 bp, synthetic construct
  misc_feature 1..23: note = Probe
  source 1..23: mol_type = other DNA
tcaaatcccggacgagccccctt

SEQ ID NO: 7646 - DNA, 23 bp, synthetic construct
  misc_feature 1..23: note = Probe
  source 1..23: mol_type = other DNA
tcaaatcccggacgagccctcat

SEQ ID NO: 7647 - DNA, 17 bp, synthetic construct
  misc_feature 1..17: note = Probe
  source 1..17: mol_type = other DNA
tcaacttaacttgaccg

SEQ ID NO: 7648 - DNA, 24 bp, synthetic construct
  misc_feature 1..24: note = Probe
  source 1..24: mol_type = other DNA
tcaacttaacttgaccgctctgag

SEQ ID NO: 7649 - DNA, 25 bp, synthetic construct
  misc_feature 1..25: note = Probe
  source 1..25: mol_type = other DNA
tcaacttaacttgaccgctctgagc

SEQ ID NO: 7650 - DNA, 26 bp, synthetic construct
  misc_feature 1..26: note = Probe
  source 1..26: mol_type = other DNA
tcaacttaacttgaccgctctgagct

SEQ ID NO: 7651 - DNA, 22 bp, synthetic construct
  misc_feature 1..22: note = Probe
  source 1..22: mol_type = other DNA
tcaagtccctgttcgggcggca

SEQ ID NO: 7652 - DNA, 23 bp, synthetic construct
  misc_feature 1..23: note = Probe
  source 1..23: mol_type = other DNA
tcaagtccctgttcgggcggcat

SEQ ID NO: 7653 - DNA, 22 bp, synthetic construct
  misc_feature 1..22: note = Probe
  source 1..22: mol_type = other DNA
tcaattccccgacggggaggtg

SEQ ID NO: 7654 - DNA, 22 bp, synthetic construct
  misc_feature 1..22: note = Probe
  source 1..22: mol_type = other DNA
tcaattcccggtcagggaacca

SEQ ID NO: 7655 - DNA, 17 bp, synthetic construct
  misc_feature 1..17: note = Probe
  source 1..17: mol_type = other DNA
tcacaagaactgctaac

SEQ ID NO: 7656 - DNA, 22 bp, synthetic construct
  misc_feature 1..22: note = Probe
  source 1..22: mol_type = other DNA
tcacaagaactgctaactcatg

SEQ ID NO: 7657 - DNA, 23 bp, synthetic construct
  misc_feature 1..23: note = Probe
  source 1..23: mol_type = other DNA
tcacaagaactgctaactcatgc

SEQ ID NO: 7658 - DNA, 24 bp, synthetic construct
  misc_feature 1..24: note = Probe
  source 1..24: mol_type = other DNA
tcacaagaactgctaactcatgcc

SEQ ID NO: 7659 - DNA, 25 bp, synthetic construct
  misc_feature 1..25: note = Probe
  source 1..25: mol_type = other DNA
tcacaagaactgctaactcatgccc

SEQ ID NO: 7660 - DNA, 32 bp, synthetic construct
  misc_feature 1..32: note = Probe
  source 1..32: mol_type = other DNA
tcacaagaactgctaactcatgcccccatgtc

SEQ ID NO: 7661 - DNA, 48 bp, synthetic construct
  misc_feature 1..48: note = Probe
  source 1..48: mol_type = other DNA
tcacaagaactgctaactcatgcccccatgtctaacaacatggctttc

SEQ ID NO: 7662 - DNA, 24 bp, synthetic construct
  misc_feature 1..24: note = Probe
  source 1..24: mol_type = other DNA
tcacacgcgaaaggtccccggttt

SEQ ID NO: 7663 - DNA, 21 bp, synthetic construct
  misc_feature 1..21: note = Probe
  source 1..21: mol_type = other DNA
tcacacggggcacaataattt

SEQ ID NO: 7664 - DNA, 16 bp, synthetic construct
  misc_feature 1..16: note = Probe
  source 1..16: mol_type = other DNA
tcacatcaccccataa

SEQ ID NO: 7665 - DNA, 17 bp, synthetic construct
  misc_feature 1..17: note = Probe
  source 1..17: mol_type = other DNA
tcacatcaccccataaa

SEQ ID NO: 7666 - DNA, 18 bp, synthetic construct
  misc_feature 1..18: note = Probe
  source 1..18: mol_type = other DNA
tcacatcaccccataaac

SEQ ID NO: 7667 - DNA, 19 bp, synthetic construct
  misc_feature 1..19: note = Probe
  source 1..19: mol_type = other DNA
tcacatcaccccataaaca

SEQ ID NO: 7668 - DNA, 20 bp, synthetic construct
  misc_feature 1..20: note = Probe
  source 1..20: mol_type = other DNA
tcacatcaccccataaacaa

SEQ ID NO: 7669 - DNA, 21 bp, synthetic construct
  misc_feature 1..21: note = Probe
  source 1..21: mol_type = other DNA
tcacatcaccccataaacaaa

SEQ ID NO: 7670 - DNA, 22 bp, synthetic construct
  misc_feature 1..22: note = Probe
  source 1..22: mol_type = other DNA
tcacatcaccccataaacaaat

SEQ ID NO: 7671 - DNA, 23 bp, synthetic construct
  misc_feature 1..23: note = Probe
  source 1..23: mol_type = other DNA
tcacatcaccccataaacaaata

SEQ ID NO: 7672 - DNA, 39 bp, synthetic construct
  misc_feature 1..39: note = Probe
  source 1..39: mol_type = other DNA
tcacccaggcggcccgggttcgactcccggtgtgggaac

SEQ ID NO: 7673 - DNA, 40 bp, synthetic construct
  misc_feature 1..40: note = Probe
  source 1..40: mol_type = other DNA
tcacccaggcggcccgggttcgactcccggtgtgggaacg

SEQ ID NO: 7674 - DNA, 41 bp, synthetic construct
  misc_feature 1..41: note = Probe
  source 1..41: mol_type = other DNA
tcacccaggcggcccgggttcgactcccggtgtgggaacgc

SEQ ID NO: 7675 - DNA, 49 bp, synthetic construct
  misc_feature 1..49: note = Probe
  source 1..49: mol_type = other DNA
tcacccaggcggcccgggttcgactcccggtgtgggaacgccgaaattt

SEQ ID NO: 7676 - DNA, 50 bp, synthetic construct
  misc_feature 1..50: note = Probe
  source 1..50: mol_type = other DNA
tcacccaggcggcccgggttcgactcccggtgtgggaacgccgaaatttt

SEQ ID NO: 7677 - DNA, 41 bp, synthetic construct
  misc_feature 1..41: note = Probe
  source 1..41: mol_type = other DNA
tcacccaggtggcccgggttcgactcccggtatgggaacaa

SEQ ID NO: 7678 - DNA, 21 bp, synthetic construct
  misc_feature 1..21: note = Probe
  source 1..21: mol_type = other DNA
tcaccgccgcggcccgggttc

SEQ ID NO: 7679 - DNA, 39 bp, synthetic construct
  misc_feature 1..39: note = Probe
  source 1..39: mol_type = other DNA
tcaccgccgcggcccgggttcgattcccggtcagggaaa

SEQ ID NO: 7680 - DNA, 39 bp, synthetic construct
  misc_feature 1..39: note = Probe
  source 1..39: mol_type = other DNA
tcaccgccgcggcccgggttcgattcccggtcagggaag

SEQ ID NO: 7681 - DNA, 39 bp, synthetic construct
  misc_feature 1..39: note = Probe
  source 1..39: mol_type = other DNA
tcaccgccgcggcccgggttcgattcccggtcagggaat

SEQ ID NO: 7682 - DNA, 41 bp, synthetic construct
  misc_feature 1..41: note = Probe
  source 1..41: mol_type = other DNA
tcaccgccgcggcccgggttcgattcccggtcagggaattg

SEQ ID NO: 7683 - DNA, 22 bp, synthetic construct
  misc_feature 1..22: note = Probe
  source 1..22: mol_type = other DNA
tcacctggagcatgttttcttc

SEQ ID NO: 7684 - DNA, 21 bp, synthetic construct
  misc_feature 1..21: note = Probe
  source 1..21: mol_type = other DNA
tcacgcgggagaccggggttc

SEQ ID NO: 7685 - DNA, 24 bp, synthetic construct
  misc_feature 1..24: note = Probe
  source 1..24: mol_type = other DNA
tcacgcgggagaccggggttcaat

SEQ ID NO: 7686 - DNA, 32 bp, synthetic construct
  misc_feature 1..32: note = Probe
  source 1..32: mol_type = other DNA
tcacgcgggagaccggggttcaattccccgac

SEQ ID NO: 7687 - DNA, 35 bp, synthetic construct
  misc_feature 1..35: note = Probe
  source 1..35: mol_type = other DNA
tcacgcgggagaccggggttcaattccccgacggg

SEQ ID NO: 7688 - DNA, 37 bp, synthetic construct
  misc_feature 1..37: note = Probe
  source 1..37: mol_type = other DNA
tcacgcgggagaccggggttcaattccccgacgggga

SEQ ID NO: 7689 - DNA, 39 bp, synthetic construct
  misc_feature 1..39: note = Probe
  source 1..39: mol_type = other DNA
tcacgcgggagaccggggttcaattccccgacggggagg

SEQ ID NO: 7690 - DNA, 40 bp, synthetic construct
  misc_feature 1..40: note = Probe
  source 1..40: mol_type = other DNA
tcacgcgggagaccggggttcaattccccgacggggaggt

SEQ ID NO: 7691 - DNA, 41 bp, synthetic construct
  misc_feature 1..41: note = Probe
  source 1..41: mol_type = other DNA
tcacgcgggagaccggggttcaattccccgacggggaggtg

SEQ ID NO: 7692 - DNA, 42 bp, synthetic construct
  misc_feature 1..42: note = Probe
  source 1..42: mol_type = other DNA
tcacgcgggagaccggggttcaattccccgacggggaggtgt

SEQ ID NO: 7693 - DNA, 43 bp, synthetic construct
  misc_feature 1..43: note = Probe
  source 1..43: mol_type = other DNA
tcacgcgggagaccggggttcaattccccgacggggaggtgtg

SEQ ID NO: 7694 - DNA, 23 bp, synthetic construct
  misc_feature 1..23: note = Probe
  source 1..23: mol_type = other DNA
tcacgcgggagaccggggttcga

SEQ ID NO: 7695 - DNA, 24 bp, synthetic construct
  misc_feature 1..24: note = Probe
  source 1..24: mol_type = other DNA
tcacgcgggagaccggggttcgat

SEQ ID NO: 7696 - DNA, 25 bp, synthetic construct
  misc_feature 1..25: note = Probe
  source 1..25: mol_type = other DNA
tcacgcgggagaccggggttcgatt

SEQ ID NO: 7697 - DNA, 31 bp, synthetic construct
  misc_feature 1..31: note = Probe
  source 1..31: mol_type = other DNA
tcacgcgggagaccggggttcgattccccga

SEQ ID NO: 7698 - DNA, 37 bp, synthetic construct
  misc_feature 1..37: note = Probe
  source 1..37: mol_type = other DNA
tcacgcgggagaccggggttcgattccccgacgggga

SEQ ID NO: 7699 - DNA, 39 bp, synthetic construct
  misc_feature 1..39: note = Probe
  source 1..39: mol_type = other DNA
tcacgcgggagaccggggttcgattccccgacggggaga

SEQ ID NO: 7700 - DNA, 40 bp, synthetic construct
  misc_feature 1..40: note = Probe
  source 1..40: mol_type = other DNA
tcacgcgggagaccggggttcgattccccgacggggagaa

SEQ ID NO: 7701 - DNA, 41 bp, synthetic construct
  misc_feature 1..41: note = Probe
  source 1..41: mol_type = other DNA
tcacgcgggagaccggggttcgattccccgacggggagaaa

SEQ ID NO: 7702 - DNA, 42 bp, synthetic construct
  misc_feature 1..42: note = Probe
  source 1..42: mol_type = other DNA
tcacgcgggagaccggggttcgattccccgacggggagaaaa

SEQ ID NO: 7703 - DNA, 43 bp, synthetic construct
  misc_feature 1..43: note = Probe
  source 1..43: mol_type = other DNA
tcacgcgggagaccggggttcgattccccgacggggagaaaag

SEQ ID NO: 7704 - DNA, 49 bp, synthetic construct
  misc_feature 1..49: note = Probe
  source 1..49: mol_type = other DNA
tcacgcgggagaccggggttcgattccccgacggggagaaaagttgctt

SEQ ID NO: 7705 - DNA, 50 bp, synthetic construct
  misc_feature 1..50: note = Probe
  source 1..50: mol_type = other DNA
tcacgcgggagaccggggttcgattccccgacggggagaaaagttgcttt

SEQ ID NO: 7706 - DNA, 40 bp, synthetic construct
  misc_feature 1..40: note = Probe
  source 1..40: mol_type = other DNA
tcacgcgggagaccggggttcgattccccgacggggagac

SEQ ID NO: 7707 - DNA, 41 bp, synthetic construct
  misc_feature 1..41: note = Probe
  source 1..41: mol_type = other DNA
tcacgcgggagaccggggttcgattccccgacggggagacg

SEQ ID NO: 7708 - DNA, 40 bp, synthetic construct
  misc_feature 1..40: note = Probe
  source 1..40: mol_type = other DNA
tcacgcgggagaccggggttcgattccccgacggggagag

SEQ ID NO: 7709 - DNA, 41 bp, synthetic construct
  misc_feature 1..41: note = Probe
  source 1..41: mol_type = other DNA
tcacgcgggagaccggggttcgattccccgacggggagagt

SEQ ID NO: 7710 - DNA, 42 bp, synthetic construct
  misc_feature 1..42: note = Probe
  source 1..42: mol_type = other DNA
tcacgcgggagaccggggttcgattccccgacggggagagta

SEQ ID NO: 7711 - DNA, 39 bp, synthetic construct
  misc_feature 1..39: note = Probe
  source 1..39: mol_type = other DNA
tcacgcgggagaccggggttcgattccccgacggggagg

SEQ ID NO: 7712 - DNA, 40 bp, synthetic construct
  misc_feature 1..40: note = Probe
  source 1..40: mol_type = other DNA
tcacgcgggagaccggggttcgattccccgacggggagga

SEQ ID NO: 7713 - DNA, 42 bp, synthetic construct
  misc_feature 1..42: note = Probe
  source 1..42: mol_type = other DNA
tcacgcgggagaccggggttcgattccccgacggggaggagg

SEQ ID NO: 7714 - DNA, 43 bp, synthetic construct
  misc_feature 1..43: note = Probe
  source 1..43: mol_type = other DNA
tcacgcgggagaccggggttcgattccccgacggggaggaggc

SEQ ID NO: 7715 - DNA, 40 bp, synthetic construct
  misc_feature 1..40: note = Probe
  source 1..40: mol_type = other DNA
tcacgcgggagaccggggttcgattccccgacggggaggc

SEQ ID NO: 7716 - DNA, 41 bp, synthetic construct
  misc_feature 1..41: note = Probe
  source 1..41: mol_type = other DNA
tcacgcgggagaccggggttcgattccccgacggggaggca

SEQ ID NO: 7717 - DNA, 42 bp, synthetic construct
  misc_feature 1..42: note = Probe
  source 1..42: mol_type = other DNA
tcacgcgggagaccggggttcgattccccgacggggaggcac

SEQ ID NO: 7718 - DNA, 43 bp, synthetic construct
  misc_feature 1..43: note = Probe
  source 1..43: mol_type = other DNA
tcacgcgggagaccggggttcgattccccgacggggaggcaca

SEQ ID NO: 7719 - DNA, 49 bp, synthetic construct
  misc_feature 1..49: note = Probe
  source 1..49: mol_type = other DNA
tcacgcgggagaccggggttcgattccccgacggggaggcacagtaatt

SEQ ID NO: 7720 - DNA, 50 bp, synthetic construct
  misc_feature 1..50: note = Probe
  source 1..50: mol_type = other DNA
tcacgcgggagaccggggttcgattccccgacggggaggcacagtaattg

SEQ ID NO: 7721 - DNA, 42 bp, synthetic construct
  misc_feature 1..42: note = Probe
  source 1..42: mol_type = other DNA
tcacgcgggagaccggggttcgattccccgacggggaggcag

SEQ ID NO: 7722 - DNA, 44 bp, synthetic construct
  misc_feature 1..44: note = Probe
  source 1..44: mol_type = other DNA
tcacgcgggagaccggggttcgattccccgacggggaggcagcc

SEQ ID NO: 7723 - DNA, 41 bp, synthetic construct
  misc_feature 1..41: note = Probe
  source 1..41: mol_type = other DNA
tcacgcgggagaccggggttcgattccccgacggggaggcc

SEQ ID NO: 7724 - DNA, 42 bp, synthetic construct
  misc_feature 1..42: note = Probe
  source 1..42: mol_type = other DNA
tcacgcgggagaccggggttcgattccccgacggggaggccg

SEQ ID NO: 7725 - DNA, 43 bp, synthetic construct
  misc_feature 1..43: note = Probe
  source 1..43: mol_type = other DNA
tcacgcgggagaccggggttcgattccccgacggggaggccgg

SEQ ID NO: 7726 - DNA, 44 bp, synthetic construct
  misc_feature 1..44: note = Probe
  source 1..44: mol_type = other DNA
tcacgcgggagaccggggttcgattccccgacggggaggccggg

SEQ ID NO: 7727 - DNA, 45 bp, synthetic construct
  misc_feature 1..45: note = Probe
  source 1..45: mol_type = other DNA
tcacgcgggagaccggggttcgattccccgacggggaggccgggt

SEQ ID NO: 7728 - DNA, 33 bp, synthetic construct
  misc_feature 1..33: note = Probe
  source 1..33: mol_type = other DNA
tcagaagattccaggttcgactcctggctggct

SEQ ID NO: 7729 - DNA, 38 bp, synthetic construct
  misc_feature 1..38: note = Probe
  source 1..38: mol_type = other DNA
tcagaagattctaggttcgactcctggctggctcgcga

SEQ ID NO: 7730 - DNA, 37 bp, synthetic construct
  misc_feature 1..37: note = Probe
  source 1..37: mol_type = other DNA
tcagaagattgcaggttcgagtcctgccgcggtcgaa

SEQ ID NO: 7731 - DNA, 50 bp, synthetic construct
  misc_feature 1..50: note = Probe
  source 1..50: mol_type = other DNA
tcagattgtgaatctgacaacagaggcttacgaccccttatttaccgaga

SEQ ID NO: 7732 - DNA, 25 bp, synthetic construct
  misc_feature 1..25: note = Probe
  source 1..25: mol_type = other DNA
tcagctaaataagctatcgggccca

SEQ ID NO: 7733 - DNA, 26 bp, synthetic construct
  misc_feature 1..26: note = Probe
  source 1..26: mol_type = other DNA
tcagctaaataagctatcgggcccat

SEQ ID NO: 7734 - DNA, 27 bp, synthetic construct
  misc_feature 1..27: note = Probe
  source 1..27: mol_type = other DNA
tcagctaaataagctatcgggcccata

SEQ ID NO: 7735 - DNA, 28 bp, synthetic construct
  misc_feature 1..28: note = Probe
  source 1..28: mol_type = other DNA
tcagctaaataagctatcgggcccatac

SEQ ID NO: 7736 - DNA, 36 bp, synthetic construct
  misc_feature 1..36: note = Probe
  source 1..36: mol_type = other DNA
tcagctaaataagctatcgggcccataccccgaaaa

SEQ ID NO: 7737 - DNA, 37 bp, synthetic construct
  misc_feature 1..37: note = Probe
  source 1..37: mol_type = other DNA
tcagctaaataagctatcgggcccataccccgaaaat

SEQ ID NO: 7738 - DNA, 39 bp, synthetic construct
  misc_feature 1..39: note = Probe
  source 1..39: mol_type = other DNA
tcagctaaataagctatcgggcccataccccgaaaatgt

SEQ ID NO: 7739 - DNA, 40 bp, synthetic construct
  misc_feature 1..40: note = Probe
  source 1..40: mol_type = other DNA
tcagctaaataagctatcgggcccataccccgaaaatgtt

SEQ ID NO: 7740 - DNA, 41 bp, synthetic construct
  misc_feature 1..41: note = Probe
  source 1..41: mol_type = other DNA
tcagctaaataagctatcgggcccataccccgaaaatgttg

SEQ ID NO: 7741 - DNA, 42 bp, synthetic construct
  misc_feature 1..42: note = Probe
  source 1..42: mol_type = other DNA
tcagctaaataagctatcgggcccataccccgaaaatgttgg

SEQ ID NO: 7742 - DNA, 45 bp, synthetic construct
  misc_feature 1..45: note = Probe
  source 1..45: mol_type = other DNA
tcagctaaataagctatcgggcccataccccgaaaatgttggtta

SEQ ID NO: 7743 - DNA, 50 bp, synthetic construct
  misc_feature 1..50: note = Probe
  source 1..50: mol_type = other DNA
tcagctaaataagctatcgggcccataccccgaaaatgttggttataccc

SEQ ID NO: 7744 - DNA, 33 bp, synthetic construct
  misc_feature 1..33: note = Probe
  source 1..33: mol_type = other DNA
tcagggatgggttcgattctcatagtcctagaa

SEQ ID NO: 7745 - DNA, 31 bp, synthetic construct
  misc_feature 1..31: note = Probe
  source 1..31: mol_type = other DNA
tcagggtcgtgggttcgagccccacgttggg

SEQ ID NO: 7746 - DNA, 27 bp, synthetic construct
  misc_feature 1..27: note = Probe
  source 1..27: mol_type = other DNA
tcagtaagttgcaatacttaatttctg

SEQ ID NO: 7747 - DNA, 37 bp, synthetic construct
  misc_feature 1..37: note = Probe
  source 1..37: mol_type = other DNA
tcagttgatgcagagtggggttttgcagtccttagct

SEQ ID NO: 7748 - DNA, 32 bp, synthetic construct
  misc_feature 1..32: note = Probe
  source 1..32: mol_type = other DNA
tcatatcattggtcgtggttgtagtccgtgcg

SEQ ID NO: 7749 - DNA, 39 bp, synthetic construct
  misc_feature 1..39: note = Probe
  source 1..39: mol_type = other DNA
tcatatcattggtcgtggttgtagtccgtgcgagaataa

SEQ ID NO: 7750 - DNA, 40 bp, synthetic construct
  misc_feature 1..40: note = Probe
  source 1..40: mol_type = other DNA
tcatatcattggtcgtggttgtagtccgtgcgagaataat

SEQ ID NO: 7751 - DNA, 41 bp, synthetic construct
  misc_feature 1..41: note = Probe
  source 1..41: mol_type = other DNA
tcatatcattggtcgtggttgtagtccgtgcgagaataatg

SEQ ID NO: 7752 - DNA, 15 bp, synthetic construct
  misc_feature 1..15: note = Probe
  source 1..15: mol_type = other DNA
tcatattgaattgca

SEQ ID NO: 7753 - DNA, 50 bp, synthetic construct
  misc_feature 1..50: note = Probe
  source 1..50: mol_type = other DNA
tcatattgaattgcaaattcgaagaagcagcttcaaacctgccggggctt

SEQ ID NO: 7754 - DNA, 17 bp, synthetic construct
  misc_feature 1..17: note = Probe
  source 1..17: mol_type = other DNA
tcatgcccccatgtcta

SEQ ID NO: 7755 - DNA, 18 bp, synthetic construct
  misc_feature 1..18: note = Probe
  source 1..18: mol_type = other DNA
tcatgcccccatgtctaa

SEQ ID NO: 7756 - DNA, 20 bp, synthetic construct
  misc_feature 1..20: note = Probe
  source 1..20: mol_type = other DNA
tcatgcccccatgtctaaca

SEQ ID NO: 7757 - DNA, 23 bp, synthetic construct
  misc_feature 1..23: note = Probe
  source 1..23: mol_type = other DNA
tcatgcccccatgtctaacaaca

SEQ ID NO: 7758 - DNA, 27 bp, synthetic construct
  misc_feature 1..27: note = Probe
  source 1..27: mol_type = other DNA
tcatgcccccatgtctaacaacatggc

SEQ ID NO: 7759 - DNA, 28 bp, synthetic construct
  misc_feature 1..28: note = Probe
  source 1..28: mol_type = other DNA
tcatgcccccatgtctaacaacatggct

SEQ ID NO: 7760 - DNA, 29 bp, synthetic construct
  misc_feature 1..29: note = Probe
  source 1..29: mol_type = other DNA
tcatgcccccatgtctaacaacatggctt

SEQ ID NO: 7761 - DNA, 30 bp, synthetic construct
  misc_feature 1..30: note = Probe
  source 1..30: mol_type = other DNA
tcatgcccccatgtctaacaacatggcttt

SEQ ID NO: 7762 - DNA, 31 bp, synthetic construct
  misc_feature 1..31: note = Probe
  source 1..31: mol_type = other DNA
tcatgcccccatgtctaacaacatggctttc

SEQ ID NO: 7763 - DNA, 32 bp, synthetic construct
  misc_feature 1..32: note = Probe
  source 1..32: mol_type = other DNA
tcatgcccccatgtctaacaacatggctttct

SEQ ID NO: 7764 - DNA, 33 bp, synthetic construct
  misc_feature 1..33: note = Probe
  source 1..33: mol_type = other DNA
tcatgcccccatgtctaacaacatggctttctc

SEQ ID NO: 7765 - DNA, 34 bp, synthetic construct
  misc_feature 1..34: note = Probe
  source 1..34: mol_type = other DNA
tcatgcccccatgtctaacaacatggctttctca

SEQ ID NO: 7766 - DNA, 35 bp, synthetic construct
  misc_feature 1..35: note = Probe
  source 1..35: mol_type = other DNA
tcatgcccccatgtctaacaacatggctttctcaa

SEQ ID NO: 7767 - DNA, 36 bp, synthetic construct
  misc_feature 1..36: note = Probe
  source 1..36: mol_type = other DNA
tcatgcccccatgtctaacaacatggctttctcaac

SEQ ID NO: 7768 - DNA, 37 bp, synthetic construct
  misc_feature 1..37: note = Probe
  source 1..37: mol_type = other DNA
tcatgcccccatgtctaacaacatggctttctcaact

SEQ ID NO: 7769 - DNA, 33 bp, synthetic construct
  misc_feature 1..33: note = Probe
  source 1..33: mol_type = other DNA
tcattaaattatgataatcatatttaccaaatg

SEQ ID NO: 7770 - DNA, 33 bp, synthetic construct
  misc_feature 1..33: note = Probe
  source 1..33: mol_type = other DNA
tcattggtcgtggttgtagtccgtgcgagaata

SEQ ID NO: 7771 - DNA, 25 bp, synthetic construct
  misc_feature 1..25: note = Probe
  source 1..25: mol_type = other DNA
tccaatgggggttccccgcgcaggt

SEQ ID NO: 7772 - DNA, 25 bp, synthetic construct
  misc_feature 1..25: note = Probe
  source 1..25: mol_type = other DNA
tccaatggggtctccccgcgcaggt

SEQ ID NO: 7773 - DNA, 21 bp, synthetic construct
  misc_feature 1..21: note = Probe
  source 1..21: mol_type = other DNA
tccaatggggtttccccgcac

SEQ ID NO: 7774 - DNA, 25 bp, synthetic construct
  misc_feature 1..25: note = Probe
  source 1..25: mol_type = other DNA
tccaatggggtttccccgcacaggt

SEQ ID NO: 7775 - DNA, 39 bp, synthetic construct
  misc_feature 1..39: note = Probe
  source 1..39: mol_type = other DNA
tccaattaactagttttgacaacattcaaaaaagagtaa

SEQ ID NO: 7776 - DNA, 40 bp, synthetic construct
  misc_feature 1..40: note = Probe
  source 1..40: mol_type = other DNA
tccaattaactagttttgacaacattcaaaaaagagtaat

SEQ ID NO: 7777 - DNA, 41 bp, synthetic construct
  misc_feature 1..41: note = Probe
  source 1..41: mol_type = other DNA
tccaattaactagttttgacaacattcaaaaaagagtaata

SEQ ID NO: 7778 - DNA, 19 bp, synthetic construct
  misc_feature 1..19: note = Probe
  source 1..19: mol_type = other DNA
tccagaggttccgggttcg

SEQ ID NO: 7779 - DNA, 32 bp, synthetic construct
  misc_feature 1..32: note = Probe
  source 1..32: mol_type = other DNA
tccagcgatccgagttcaaatctcggtggaac

SEQ ID NO: 7780 - DNA, 33 bp, synthetic construct
  misc_feature 1..33: note = Probe
  source 1..33: mol_type = other DNA
tccagcgatccgagttcaaatctcggtggaacc

SEQ ID NO: 7781 - DNA, 37 bp, synthetic construct
  misc_feature 1..37: note = Probe
  source 1..37: mol_type = other DNA
tccagcgatccgagttcaaatctcggtggaacctgca

SEQ ID NO: 7782 - DNA, 35 bp, synthetic construct
  misc_feature 1..35: note = Probe
  source 1..35: mol_type = other DNA
tccagcgatccgagttcaaatctcggtgggacctc

SEQ ID NO: 7783 - DNA, 37 bp, synthetic construct
  misc_feature 1..37: note = Probe
  source 1..37: mol_type = other DNA
tccagcgatccgagttcaaatctcggtgggacctcac

SEQ ID NO: 7784 - DNA, 37 bp, synthetic construct
  misc_feature 1..37: note = Probe
  source 1..37: mol_type = other DNA
tccagcgatccgagttcgagtctcggtggaacctttg

SEQ ID NO: 7785 - DNA, 27 bp, synthetic construct
  misc_feature 1..27: note = Probe
  source 1..27: mol_type = other DNA
tccagggttcaagtccctgttcgggcg

SEQ ID NO: 7786 - DNA, 46 bp, synthetic construct
  misc_feature 1..46: note = Probe
  source 1..46: mol_type = other DNA
tccagtcatttcgatggcgtgggttcgaatcccaccgctgccacac

SEQ ID NO: 7787 - DNA, 22 bp, synthetic construct
  misc_feature 1..22: note = Probe
  source 1..22: mol_type = other DNA
tccattggggtttccccgcgca

SEQ ID NO: 7788 - DNA, 25 bp, synthetic construct
  misc_feature 1..25: note = Probe
  source 1..25: mol_type = other DNA
tccattggggtttccccgcgcaggt

SEQ ID NO: 7789 - DNA, 26 bp, synthetic construct
  misc_feature 1..26: note = Probe
  source 1..26: mol_type = other DNA
tccattggggtttccccgcgcaggtt

SEQ ID NO: 7790 - DNA, 27 bp, synthetic construct
  misc_feature 1..27: note = Probe
  source 1..27: mol_type = other DNA
tccattggggtttccccgcgcaggttc

SEQ ID NO: 7791 - DNA, 16 bp, synthetic construct
  misc_feature 1..16: note = Probe
  source 1..16: mol_type = other DNA
tcccacatggtctagc

SEQ ID NO: 7792 - DNA, 17 bp, synthetic construct
  misc_feature 1..17: note = Probe
  source 1..17: mol_type = other DNA
tcccacatggtctagcg

SEQ ID NO: 7793 - DNA, 21 bp, synthetic construct
  misc_feature 1..21: note = Probe
  source 1..21: mol_type = other DNA
tcccacatggtctagcggtta

SEQ ID NO: 7794 - DNA, 38 bp, synthetic construct
  misc_feature 1..38: note = Probe
  source 1..38: mol_type = other DNA
tcccacatggtctagcggttaggattcctggttttcac

SEQ ID NO: 7795 - DNA, 39 bp, synthetic construct
  misc_feature 1..39: note = Probe
  source 1..39: mol_type = other DNA
tcccacatggtctagcggttaggattcctggttttcacc

SEQ ID NO: 7796 - DNA, 41 bp, synthetic construct
  misc_feature 1..41: note = Probe
  source 1..41: mol_type = other DNA
tcccacatggtctagcggttaggattcctggttttcaccca

SEQ ID NO: 7797 - DNA, 49 bp, synthetic construct
  misc_feature 1..49: note = Probe
  source 1..49: mol_type = other DNA
tcccacatggtctagcggttaggattcctggttttcacccaggcggccc

SEQ ID NO: 7798 - DNA, 50 bp, synthetic construct
  misc_feature 1..50: note = Probe
  source 1..50: mol_type = other DNA
tcccacatggtctagcggttaggattcctggttttcacccaggcggcccg

SEQ ID NO: 7799 - DNA, 16 bp, synthetic construct
  misc_feature 1..16: note = Probe
  source 1..16: mol_type = other DNA
tcccatatggtctagc

SEQ ID NO: 7800 - DNA, 22 bp, synthetic construct
  misc_feature 1..22: note = Probe
  source 1..22: mol_type = other DNA
tcccatatggtctagcggttag

SEQ ID NO: 7801 - DNA, 25 bp, synthetic construct
  misc_feature 1..25: note = Probe
  source 1..25: mol_type = other DNA
tcccatatggtctagcggttaggat

SEQ ID NO: 7802 - DNA, 27 bp, synthetic construct
  misc_feature 1..27: note = Probe
  source 1..27: mol_type = other DNA
tcccatatggtctagcggttaggattc

SEQ ID NO: 7803 - DNA, 39 bp, synthetic construct
  misc_feature 1..39: note = Probe
  source 1..39: mol_type = other DNA
tcccatatggtctagcggttaggattcctggttttcacc

SEQ ID NO: 7804 - DNA, 40 bp, synthetic construct
  misc_feature 1..40: note = Probe
  source 1..40: mol_type = other DNA
tcccatatggtctagcggttaggattcctggttttcaccc

SEQ ID NO: 7805 - DNA, 50 bp, synthetic construct
  misc_feature 1..50: note = Probe
  source 1..50: mol_type = other DNA
tcccatatggtctagcggttaggattcctggttttcacccaggtggcccg

SEQ ID NO: 7806 - DNA, 43 bp, synthetic construct
  misc_feature 1..43: note = Probe
  source 1..43: mol_type = other DNA
tcccattcttgcgacccgggttcgattcccgggcggcgcactt

SEQ ID NO: 7807 - DNA, 22 bp, synthetic construct
  misc_feature 1..22: note = Probe
  source 1..22: mol_type = other DNA
tccccgcacaggttcgaatcct

SEQ ID NO: 7808 - DNA, 50 bp, synthetic construct
  misc_feature 1..50: note = Probe
  source 1..50: mol_type = other DNA
tccccgcctgtcacgcgggagaccggggttcgattccccgacggggagaa

SEQ ID NO: 7809 - DNA, 50 bp, synthetic construct
  misc_feature 1..50: note = Probe
  source 1..50: mol_type = other DNA
tccccgcctgtcacgcgggagaccggggttcgattccccgacggggaggc

SEQ ID NO: 7810 - DNA, 23 bp, synthetic construct
  misc_feature 1..23: note = Probe
  source 1..23: mol_type = other DNA
tccccgcgcaggttcgaatcctg

SEQ ID NO: 7811 - DNA, 19 bp, synthetic construct
  misc_feature 1..19: note = Probe
  source 1..19: mol_type = other DNA
tccccggcacctccaccag

SEQ ID NO: 7812 - DNA, 20 bp, synthetic construct
  misc_feature 1..20: note = Probe
  source 1..20: mol_type = other DNA
tccccggcacctccaccagt

SEQ ID NO: 7813 - DNA, 21 bp, synthetic construct
  misc_feature 1..21: note = Probe
  source 1..21: mol_type = other DNA
tccccggcacctccaccagtt

SEQ ID NO: 7814 - DNA, 15 bp, synthetic construct
  misc_feature 1..15: note = Probe
  source 1..15: mol_type = other DNA
tcccgccttttttcc

SEQ ID NO: 7815 - DNA, 16 bp, synthetic construct
  misc_feature 1..16: note = Probe
  source 1..16: mol_type = other DNA
tcccgccttttttccc

SEQ ID NO: 7816 - DNA, 17 bp, synthetic construct
  misc_feature 1..17: note = Probe
  source 1..17: mol_type = other DNA
tcccgccttttttcccg

SEQ ID NO: 7817 - DNA, 18 bp, synthetic construct
  misc_feature 1..18: note = Probe
  source 1..18: mol_type = other DNA
tcccgccttttttcccgg

SEQ ID NO: 7818 - DNA, 19 bp, synthetic construct
  misc_feature 1..19: note = Probe
  source 1..19: mol_type = other DNA
tcccgccttttttcccggc

SEQ ID NO: 7819 - DNA, 20 bp, synthetic construct
  misc_feature 1..20: note = Probe
  source 1..20: mol_type = other DNA
tcccgccttttttcccggcg

SEQ ID NO: 7820 - DNA, 21 bp, synthetic construct
  misc_feature 1..21: note = Probe
  source 1..21: mol_type = other DNA
tcccgccttttttcccggcgg

SEQ ID NO: 7821 - DNA, 22 bp, synthetic construct
  misc_feature 1..22: note = Probe
  source 1..22: mol_type = other DNA
tcccgccttttttcccggcggc

SEQ ID NO: 7822 - DNA, 23 bp, synthetic construct
  misc_feature 1..23: note = Probe
  source 1..23: mol_type = other DNA
tcccgccttttttcccggcggcg

SEQ ID NO: 7823 - DNA, 24 bp, synthetic construct
  misc_feature 1..24: note = Probe
  source 1..24: mol_type = other DNA
tcccgccttttttcccggcggcgg

SEQ ID NO: 7824 - DNA, 25 bp, synthetic construct
  misc_feature 1..25: note = Probe
  source 1..25: mol_type = other DNA
tcccgccttttttcccggcggcggg

SEQ ID NO: 7825 - DNA, 26 bp, synthetic construct
  misc_feature 1..26: note = Probe
  source 1..26: mol_type = other DNA
tcccgccttttttcccggcggcggga

SEQ ID NO: 7826 - DNA, 27 bp, synthetic construct
  misc_feature 1..27: note = Probe
  source 1..27: mol_type = other DNA
tcccgccttttttcccggcggcgggag

SEQ ID NO: 7827 - DNA, 28 bp, synthetic construct
  misc_feature 1..28: note = Probe
  source 1..28: mol_type = other DNA
tcccgccttttttcccggcggcgggaga

SEQ ID NO: 7828 - DNA, 29 bp, synthetic construct
  misc_feature 1..29: note = Probe
  source 1..29: mol_type = other DNA
tcccgccttttttcccggcggcgggagaa

SEQ ID NO: 7829 - DNA, 30 bp, synthetic construct
  misc_feature 1..30: note = Probe
  source 1..30: mol_type = other DNA
tcccgccttttttcccggcggcgggagaag

SEQ ID NO: 7830 - DNA, 31 bp, synthetic construct
  misc_feature 1..31: note = Probe
  source 1..31: mol_type = other DNA
tcccgccttttttcccggcggcgggagaagt

SEQ ID NO: 7831 - DNA, 32 bp, synthetic construct
  misc_feature 1..32: note = Probe
  source 1..32: mol_type = other DNA
tcccgccttttttcccggcggcgggagaagta

SEQ ID NO: 7832 - DNA, 33 bp, synthetic construct
  misc_feature 1..33: note = Probe
  source 1..33: mol_type = other DNA
tcccgccttttttcccggcggcgggagaagtag

SEQ ID NO: 7833 - DNA, 17 bp, synthetic construct
  misc_feature 1..17: note = Probe
  source 1..17: mol_type = other DNA
tcccggcggcgggagaa

SEQ ID NO: 7834 - DNA, 29 bp, synthetic construct
  misc_feature 1..29: note = Probe
  source 1..29: mol_type = other DNA
tcccgggttcaatccccggcacctccacc

SEQ ID NO: 7835 - DNA, 30 bp, synthetic construct
  misc_feature 1..30: note = Probe
  source 1..30: mol_type = other DNA
tcccgggttcaatccccggcacctccacca

SEQ ID NO: 7836 - DNA, 27 bp, synthetic construct
  misc_feature 1..27: note = Probe
  source 1..27: mol_type = other DNA
tcccgggttcgatccccagcatctcca

SEQ ID NO: 7837 - DNA, 17 bp, synthetic construct
  misc_feature 1..17: note = Probe
  source 1..17: mol_type = other DNA
tcccggtcagggaacca

SEQ ID NO: 7838 - DNA, 23 bp, synthetic construct
  misc_feature 1..23: note = Probe
  source 1..23: mol_type = other DNA
tccctggtctagtggttaggatt

SEQ ID NO: 7839 - DNA, 26 bp, synthetic construct
  misc_feature 1..26: note = Probe
  source 1..26: mol_type = other DNA
tccctggtctagtggttaggatttat

SEQ ID NO: 7840 - DNA, 28 bp, synthetic construct
  misc_feature 1..28: note = Probe
  source 1..28: mol_type = other DNA
tccctggtctagtggttaggatttatta

SEQ ID NO: 7841 - DNA, 29 bp, synthetic construct
  misc_feature 1..29: note = Probe
  source 1..29: mol_type = other DNA
tccctggtctagtggttaggatttattat

SEQ ID NO: 7842 - DNA, 16 bp, synthetic construct
  misc_feature 1..16: note = Probe
  source 1..16: mol_type = other DNA
tccctggtggtctagt

SEQ ID NO: 7843 - DNA, 17 bp, synthetic construct
  misc_feature 1..17: note = Probe
  source 1..17: mol_type = other DNA
tccctggtggtctagtg

SEQ ID NO: 7844 - DNA, 18 bp, synthetic construct
  misc_feature 1..18: note = Probe
  source 1..18: mol_type = other DNA
tccctggtggtctagtgg

SEQ ID NO: 7845 - DNA, 19 bp, synthetic construct
  misc_feature 1..19: note = Probe
  source 1..19: mol_type = other DNA
tccctggtggtctagtggc

SEQ ID NO: 7846 - DNA, 20 bp, synthetic construct
  misc_feature 1..20: note = Probe
  source 1..20: mol_type = other DNA
tccctggtggtctagtggct

SEQ ID NO: 7847 - DNA, 21 bp, synthetic construct
  misc_feature 1..21: note = Probe
  source 1..21: mol_type = other DNA
tccctggtggtctagtggcta

SEQ ID NO: 7848 - DNA, 22 bp, synthetic construct
  misc_feature 1..22: note = Probe
  source 1..22: mol_type = other DNA
tccctggtggtctagtggctag

SEQ ID NO: 7849 - DNA, 23 bp, synthetic construct
  misc_feature 1..23: note = Probe
  source 1..23: mol_type = other DNA
tccctggtggtctagtggctagg

SEQ ID NO: 7850 - DNA, 24 bp, synthetic construct
  misc_feature 1..24: note = Probe
  source 1..24: mol_type = other DNA
tccctggtggtctagtggctagga

SEQ ID NO: 7851 - DNA, 25 bp, synthetic construct
  misc_feature 1..25: note = Probe
  source 1..25: mol_type = other DNA
tccctggtggtctagtggctaggat

SEQ ID NO: 7852 - DNA, 26 bp, synthetic construct
  misc_feature 1..26: note = Probe
  source 1..26: mol_type = other DNA
tccctggtggtctagtggctaggatt

SEQ ID NO: 7853 - DNA, 27 bp, synthetic construct
  misc_feature 1..27: note = Probe
  source 1..27: mol_type = other DNA
tccctggtggtctagtggctaggattc

SEQ ID NO: 7854 - DNA, 28 bp, synthetic construct
  misc_feature 1..28: note = Probe
  source 1..28: mol_type = other DNA
tccctggtggtctagtggctaggattcg

SEQ ID NO: 7855 - DNA, 29 bp, synthetic construct
  misc_feature 1..29: note = Probe
  source 1..29: mol_type = other DNA
tccctggtggtctagtggctaggattcgg

SEQ ID NO: 7856 - DNA, 30 bp, synthetic construct
  misc_feature 1..30: note = Probe
  source 1..30: mol_type = other DNA
tccctggtggtctagtggctaggattcggc

SEQ ID NO: 7857 - DNA, 39 bp, synthetic construct
  misc_feature 1..39: note = Probe
  source 1..39: mol_type = other DNA
tccctggtggtctagtggctaggattcggcgctttcacc

SEQ ID NO: 7858 - DNA, 49 bp, synthetic construct
  misc_feature 1..49: note = Probe
  source 1..49: mol_type = other DNA
tccctggtggtctagtggctaggattcggcgctttcaccgccgcggccc

SEQ ID NO: 7859 - DNA, 19 bp, synthetic construct
  misc_feature 1..19: note = Probe
  source 1..19: mol_type = other DNA
tccctggtggtctagtggt

SEQ ID NO: 7860 - DNA, 20 bp, synthetic construct
  misc_feature 1..20: note = Probe
  source 1..20: mol_type = other DNA
tccctggtggtctagtggtt

SEQ ID NO: 7861 - DNA, 21 bp, synthetic construct
  misc_feature 1..21: note = Probe
  source 1..21: mol_type = other DNA
tccctggtggtctagtggtta

SEQ ID NO: 7862 - DNA, 22 bp, synthetic construct
  misc_feature 1..22: note = Probe
  source 1..22: mol_type = other DNA
tccctggtggtctagtggttag

SEQ ID NO: 7863 - DNA, 23 bp, synthetic construct
  misc_feature 1..23: note = Probe
  source 1..23: mol_type = other DNA
tccctggtggtctagtggttagg

SEQ ID NO: 7864 - DNA, 24 bp, synthetic construct
  misc_feature 1..24: note = Probe
  source 1..24: mol_type = other DNA
tccctggtggtctagtggttagga

SEQ ID NO: 7865 - DNA, 25 bp, synthetic construct
  misc_feature 1..25: note = Probe
  source 1..25: mol_type = other DNA
tccctggtggtctagtggttaggat

SEQ ID NO: 7866 - DNA, 26 bp, synthetic construct
  misc_feature 1..26: note = Probe
  source 1..26: mol_type = other DNA
tccctggtggtctagtggttaggatt

SEQ ID NO: 7867 - DNA, 27 bp, synthetic construct
  misc_feature 1..27: note = Probe
  source 1..27: mol_type = other DNA
tccctggtggtctagtggttaggattc

SEQ ID NO: 7868 - DNA, 28 bp, synthetic construct
  misc_feature 1..28: note = Probe
  source 1..28: mol_type = other DNA
tccctggtggtctagtggttaggattcg

SEQ ID NO: 7869 - DNA, 29 bp, synthetic construct
  misc_feature 1..29: note = Probe
  source 1..29: mol_type = other DNA
tccctggtggtctagtggttaggattcgg

SEQ ID NO: 7870 - DNA, 30 bp, synthetic construct
  misc_feature 1..30: note = Probe
  source 1..30: mol_type = other DNA
tccctggtggtctagtggttaggattcggc

SEQ ID NO: 7871 - DNA, 41 bp, synthetic construct
  misc_feature 1..41: note = Probe
  source 1..41: mol_type = other DNA
tccctggtggtctagtggttaggattcggcgctctcaccgc

SEQ ID NO: 7872 - DNA, 43 bp, synthetic construct
  misc_feature 1..43: note = Probe
  source 1..43: mol_type = other DNA
tccctggtggtctagtggttaggattcggcgctctcaccgccg

SEQ ID NO: 7873 - DNA, 44 bp, synthetic construct
  misc_feature 1..44: note = Probe
  source 1..44: mol_type = other DNA
tccctggtggtctagtggttaggattcggcgctctcaccgccgc

SEQ ID NO: 7874 - DNA, 45 bp, synthetic construct
  misc_feature 1..45: note = Probe
  source 1..45: mol_type = other DNA
tccctggtggtctagtggttaggattcggcgctctcaccgccgcg

SEQ ID NO: 7875 - DNA, 46 bp, synthetic construct
  misc_feature 1..46: note = Probe
  source 1..46: mol_type = other DNA
tccctggtggtctagtggttaggattcggcgctctcaccgccgcgg

SEQ ID NO: 7876 - DNA, 47 bp, synthetic construct
  misc_feature 1..47: note = Probe
  source 1..47: mol_type = other DNA
tccctggtggtctagtggttaggattcggcgctctcaccgccgcggc

SEQ ID NO: 7877 - DNA, 48 bp, synthetic construct
  misc_feature 1..48: note = Probe
  source 1..48: mol_type = other DNA
tccctggtggtctagtggttaggattcggcgctctcaccgccgcggcc

SEQ ID NO: 7878 - DNA, 30 bp, synthetic construct
  misc_feature 1..30: note = Probe
  source 1..30: mol_type = other DNA
tccgtagtgtagcggttatcacattcgcct

SEQ ID NO: 7879 - DNA, 31 bp, synthetic construct
  misc_feature 1..31: note = Probe
  source 1..31: mol_type = other DNA
tccgtagtgtagcggttatcacattcgcctc

SEQ ID NO: 7880 - DNA, 32 bp, synthetic construct
  misc_feature 1..32: note = Probe
  source 1..32: mol_type = other DNA
tccgtagtgtagcggttatcacattcgcctca

SEQ ID NO: 7881 - DNA, 16 bp, synthetic construct
  misc_feature 1..16: note = Probe
  source 1..16: mol_type = other DNA
tccgtagtgtagtggt

SEQ ID NO: 7882 - DNA, 25 bp, synthetic construct
  misc_feature 1..25: note = Probe
  source 1..25: mol_type = other DNA
tccgtagtgtagtggtcatcacgtt

SEQ ID NO: 7883 - DNA, 27 bp, synthetic construct
  misc_feature 1..27: note = Probe
  source 1..27: mol_type = other DNA
tccgtagtgtagtggtcatcacgttcg

SEQ ID NO: 7884 - DNA, 31 bp, synthetic construct
  misc_feature 1..31: note = Probe
  source 1..31: mol_type = other DNA
tccgtagtgtagtggtcatcacgttcgccta

SEQ ID NO: 7885 - DNA, 32 bp, synthetic construct
  misc_feature 1..32: note = Probe
  source 1..32: mol_type = other DNA
tccgtagtgtagtggtcatcacgttcgcctaa

SEQ ID NO: 7886 - DNA, 33 bp, synthetic construct
  misc_feature 1..33: note = Probe
  source 1..33: mol_type = other DNA
tccgtagtgtagtggtcatcacgttcgcctaac

SEQ ID NO: 7887 - DNA, 34 bp, synthetic construct
  misc_feature 1..34: note = Probe
  source 1..34: mol_type = other DNA
tccgtagtgtagtggtcatcacgttcgcctaaca

SEQ ID NO: 7888 - DNA, 20 bp, synthetic construct
  misc_feature 1..20: note = Probe
  source 1..20: mol_type = other DNA
tccgtagtgtagtggttatc

SEQ ID NO: 7889 - DNA, 25 bp, synthetic construct
  misc_feature 1..25: note = Probe
  source 1..25: mol_type = other DNA
tccgtagtgtagtggttatcacgtt

SEQ ID NO: 7890 - DNA, 27 bp, synthetic construct
  misc_feature 1..27: note = Probe
  source 1..27: mol_type = other DNA
tccgtagtgtagtggttatcacgttcg

SEQ ID NO: 7891 - DNA, 28 bp, synthetic construct
  misc_feature 1..28: note = Probe
  source 1..28: mol_type = other DNA
tccgtagtgtagtggttatcacgttcgc

SEQ ID NO: 7892 - DNA, 29 bp, synthetic construct
  misc_feature 1..29: note = Probe
  source 1..29: mol_type = other DNA
tccgtagtgtagtggttatcacgttcgcc

SEQ ID NO: 7893 - DNA, 30 bp, synthetic construct
  misc_feature 1..30: note = Probe
  source 1..30: mol_type = other DNA
tccgtagtgtagtggttatcacgttcgcct

SEQ ID NO: 7894 - DNA, 33 bp, synthetic construct
  misc_feature 1..33: note = Probe
  source 1..33: mol_type = other DNA
tccgtagtgtagtggttatcacgttcgcctaac

SEQ ID NO: 7895 - DNA, 31 bp, synthetic construct
  misc_feature 1..31: note = Probe
  source 1..31: mol_type = other DNA
tccgtagtgtagtggttatcacgttcgcctc

SEQ ID NO: 7896 - DNA, 32 bp, synthetic construct
  misc_feature 1..32: note = Probe
  source 1..32: mol_type = other DNA
tccgtagtgtagtggttatcacgttcgcctca

SEQ ID NO: 7897 - DNA, 33 bp, synthetic construct
  misc_feature 1..33: note = Probe
  source 1..33: mol_type = other DNA
tccgtagtgtagtggttatcacgttcgcctcac

SEQ ID NO: 7898 - DNA, 34 bp, synthetic construct
  misc_feature 1..34: note = Probe
  source 1..34: mol_type = other DNA
tccgtagtgtagtggttatcacgttcgcctcaca

SEQ ID NO: 7899 - DNA, 50 bp, synthetic construct
  misc_feature 1..50: note = Probe
  source 1..50: mol_type = other DNA
tccgtagtgtagtggttatcacgttcgcctcacacgcgaaaggtccccgg

SEQ ID NO: 7900 - DNA, 33 bp, synthetic construct
  misc_feature 1..33: note = Probe
  source 1..33: mol_type = other DNA
tccgtggtggtctagtggctaggattcggcgct

SEQ ID NO: 7901 - DNA, 43 bp, synthetic construct
  misc_feature 1..43: note = Probe
  source 1..43: mol_type = other DNA
tcctaagccagggattgtgggttcgagtcccacccggggtaaa

SEQ ID NO: 7902 - DNA, 44 bp, synthetic construct
  misc_feature 1..44: note = Probe
  source 1..44: mol_type = other DNA
tcctaagccagggattgtgggttcgagtcccacccggggtaaag

SEQ ID NO: 7903 - DNA, 44 bp, synthetic construct
  misc_feature 1..44: note = Probe
  source 1..44: mol_type = other DNA
tcctaagccagggattgtgggttcgagtcccacctggggtgtcg

SEQ ID NO: 7904 - DNA, 43 bp, synthetic construct
  misc_feature 1..43: note = Probe
  source 1..43: mol_type = other DNA
tcctaagccagggattgtgggttcgagtcccatctggggtggc

SEQ ID NO: 7905 - DNA, 44 bp, synthetic construct
  misc_feature 1..44: note = Probe
  source 1..44: mol_type = other DNA
tcctaagccagggattgtgggttcgagtcccatctggggtggcc

SEQ ID NO: 7906 - DNA, 20 bp, synthetic construct
  misc_feature 1..20: note = Probe
  source 1..20: mol_type = other DNA
tcctcaaagcaatacactga

SEQ ID NO: 7907 - DNA, 37 bp, synthetic construct
  misc_feature 1..37: note = Probe
  source 1..37: mol_type = other DNA
tcctcaaagcaatacactgaaaatgtttagacgggct

SEQ ID NO: 7908 - DNA, 39 bp, synthetic construct
  misc_feature 1..39: note = Probe
  source 1..39: mol_type = other DNA
tcctcaaagcaatacactgaaaatgtttagacgggctca

SEQ ID NO: 7909 - DNA, 41 bp, synthetic construct
  misc_feature 1..41: note = Probe
  source 1..41: mol_type = other DNA
tcctcaaagcaatacactgaaaatgtttagacgggctcaca

SEQ ID NO: 7910 - DNA, 49 bp, synthetic construct
  misc_feature 1..49: note = Probe
  source 1..49: mol_type = other DNA
tcctcaaagcaatacactgaaaatgtttagacgggctcacatcacccca

SEQ ID NO: 7911 - DNA, 24 bp, synthetic construct
  misc_feature 1..24: note = Probe
  source 1..24: mol_type = other DNA
tcctcacacggggcacaataattt

SEQ ID NO: 7912 - DNA, 32 bp, synthetic construct
  misc_feature 1..32: note = Probe
  source 1..32: mol_type = other DNA
tcctcatcagtatagtggtgagtatccccgcc

SEQ ID NO: 7913 - DNA, 36 bp, synthetic construct
  misc_feature 1..36: note = Probe
  source 1..36: mol_type = other DNA
tcctcatcagtatagtggtgagtatccccgcctgtc

SEQ ID NO: 7914 - DNA, 18 bp, synthetic construct
  misc_feature 1..18: note = Probe
  source 1..18: mol_type = other DNA
tcctcgctggggcctcct

SEQ ID NO: 7915 - DNA, 17 bp, synthetic construct
  misc_feature 1..17: note = Probe
  source 1..17: mol_type = other DNA
tcctcgttagtatagtg

SEQ ID NO: 7916 - DNA, 18 bp, synthetic construct
  misc_feature 1..18: note = Probe
  source 1..18: mol_type = other DNA
tcctcgttagtatagtgg

SEQ ID NO: 7917 - DNA, 19 bp, synthetic construct
  misc_feature 1..19: note = Probe
  source 1..19: mol_type = other DNA
tcctcgttagtatagtggt

SEQ ID NO: 7918 - DNA, 20 bp, synthetic construct
  misc_feature 1..20: note = Probe
  source 1..20: mol_type = other DNA
tcctcgttagtatagtggtg

SEQ ID NO: 7919 - DNA, 21 bp, synthetic construct
  misc_feature 1..21: note = Probe
  source 1..21: mol_type = other DNA
tcctcgttagtatagtggtga

SEQ ID NO: 7920 - DNA, 25 bp, synthetic construct
  misc_feature 1..25: note = Probe
  source 1..25: mol_type = other DNA
tcctcgttagtatagtggtgagtat

SEQ ID NO: 7921 - DNA, 27 bp, synthetic construct
  misc_feature 1..27: note = Probe
  source 1..27: mol_type = other DNA
tcctcgttagtatagtggtgagtatcc

SEQ ID NO: 7922 - DNA, 40 bp, synthetic construct
  misc_feature 1..40: note = Probe
  source 1..40: mol_type = other DNA
tcctcgttagtatagtggtgagtatccccgcctgtcacgc

SEQ ID NO: 7923 - DNA, 41 bp, synthetic construct
  misc_feature 1..41: note = Probe
  source 1..41: mol_type = other DNA
tcctcgttagtatagtggtgagtatccccgcctgtcacgcg

SEQ ID NO: 7924 - DNA, 49 bp, synthetic construct
  misc_feature 1..49: note = Probe
  source 1..49: mol_type = other DNA
tcctcgttagtatagtggtgagtatccccgcctgtcacgcgggagaccg

SEQ ID NO: 7925 - DNA, 24 bp, synthetic construct
  misc_feature 1..24: note = Probe
  source 1..24: mol_type = other DNA
tcctcgttagtatagtggtgagtg

SEQ ID NO: 7926 - DNA, 20 bp, synthetic construct
  misc_feature 1..20: note = Probe
  source 1..20: mol_type = other DNA
tcctcgttagtatagtggtt

SEQ ID NO: 7927 - DNA, 23 bp, synthetic construct
  misc_feature 1..23: note = Probe
  source 1..23: mol_type = other DNA
tcctcgttagtatagtggttagt

SEQ ID NO: 7928 - DNA, 29 bp, synthetic construct
  misc_feature 1..29: note = Probe
  source 1..29: mol_type = other DNA
tcctcgttagtatagtggttagtatcccc

SEQ ID NO: 7929 - DNA, 39 bp, synthetic construct
  misc_feature 1..39: note = Probe
  source 1..39: mol_type = other DNA
tcctcgttagtatagtggttagtatccccgcctgtcacg

SEQ ID NO: 7930 - DNA, 50 bp, synthetic construct
  misc_feature 1..50: note = Probe
  source 1..50: mol_type = other DNA
tcctcgttagtatagtggttagtatccccgcctgtcacgcgggagaccgg

SEQ ID NO: 7931 - DNA, 19 bp, synthetic construct
  misc_feature 1..19: note = Probe
  source 1..19: mol_type = other DNA
tccttaggtcgctggttcg

SEQ ID NO: 7932 - DNA, 22 bp, synthetic construct
  misc_feature 1..22: note = Probe
  source 1..22: mol_type = other DNA
tcgaaaccatcctctgctaggt

SEQ ID NO: 7933 - DNA, 21 bp, synthetic construct
  misc_feature 1..21: note = Probe
  source 1..21: mol_type = other DNA
tcgaaaccatcctctgctatc

SEQ ID NO: 7934 - DNA, 22 bp, synthetic construct
  misc_feature 1..22: note = Probe
  source 1..22: mol_type = other DNA
tcgaaaccgggcggaaacacct

SEQ ID NO: 7935 - DNA, 28 bp, synthetic construct
  misc_feature 1..28: note = Probe
  source 1..28: mol_type = other DNA
tcgaagaagcagcttcaaacctgccggg

SEQ ID NO: 7936 - DNA, 29 bp, synthetic construct
  misc_feature 1..29: note = Probe
  source 1..29: mol_type = other DNA
tcgaagaagcagcttcaaacctgccgggg

SEQ ID NO: 7937 - DNA, 31 bp, synthetic construct
  misc_feature 1..31: note = Probe
  source 1..31: mol_type = other DNA
tcgaagaagcagcttcaaacctgccggggct

SEQ ID NO: 7938 - DNA, 32 bp, synthetic construct
  misc_feature 1..32: note = Probe
  source 1..32: mol_type = other DNA
tcgaagaagcagcttcaaacctgccggggctt

SEQ ID NO: 7939 - DNA, 33 bp, synthetic construct
  misc_feature 1..33: note = Probe
  source 1..33: mol_type = other DNA
tcgaagaagcagcttcaaacctgccggggcttc

SEQ ID NO: 7940 - DNA, 34 bp, synthetic construct
  misc_feature 1..34: note = Probe
  source 1..34: mol_type = other DNA
tcgaagaagcagcttcaaacctgccggggcttct

SEQ ID NO: 7941 - DNA, 35 bp, synthetic construct
  misc_feature 1..35: note = Probe
  source 1..35: mol_type = other DNA
tcgaagaagcagcttcaaacctgccggggcttctc

SEQ ID NO: 7942 - DNA, 37 bp, synthetic construct
  misc_feature 1..37: note = Probe
  source 1..37: mol_type = other DNA
tcgaagaagcagcttcaaacctgccggggcttctccc

SEQ ID NO: 7943 - DNA, 22 bp, synthetic construct
  misc_feature 1..22: note = Probe
  source 1..22: mol_type = other DNA
tcgaatcccacttctgacacaa

SEQ ID NO: 7944 - DNA, 22 bp, synthetic construct
  misc_feature 1..22: note = Probe
  source 1..22: mol_type = other DNA
tcgaatcccagcggtgcctccg

SEQ ID NO: 7945 - DNA, 20 bp, synthetic construct
  misc_feature 1..20: note = Probe
  source 1..20: mol_type = other DNA
tcgaatcccatcctcgtcgc

SEQ ID NO: 7946 - DNA, 21 bp, synthetic construct
  misc_feature 1..21: note = Probe
  source 1..21: mol_type = other DNA
tcgaatcccatcctcgtcgct

SEQ ID NO: 7947 - DNA, 22 bp, synthetic construct
  misc_feature 1..22: note = Probe
  source 1..22: mol_type = other DNA
tcgaatcccatcctcgtcgctc

SEQ ID NO: 7948 - DNA, 20 bp, synthetic construct
  misc_feature 1..20: note = Probe
  source 1..20: mol_type = other DNA
tcgaatccgagtcacggcaa

SEQ ID NO: 7949 - DNA, 21 bp, synthetic construct
  misc_feature 1..21: note = Probe
  source 1..21: mol_type = other DNA
tcgaatccgagtcacggcaaa

SEQ ID NO: 7950 - DNA, 22 bp, synthetic construct
  misc_feature 1..22: note = Probe
  source 1..22: mol_type = other DNA
tcgaatccgagtcacggcaaag

SEQ ID NO: 7951 - DNA, 20 bp, synthetic construct
  misc_feature 1..20: note = Probe
  source 1..20: mol_type = other DNA
tcgaatccgagtcacggcag

SEQ ID NO: 7952 - DNA, 22 bp, synthetic construct
  misc_feature 1..22: note = Probe
  source 1..22: mol_type = other DNA
tcgaatccgagtcacggcagga

SEQ ID NO: 7953 - DNA, 22 bp, synthetic construct
  misc_feature 1..22: note = Probe
  source 1..22: mol_type = other DNA
tcgaatccgagtcacggcaggt

SEQ ID NO: 7954 - DNA, 20 bp, synthetic construct
  misc_feature 1..20: note = Probe
  source 1..20: mol_type = other DNA
tcgaatccgagtcacggcat

SEQ ID NO: 7955 - DNA, 22 bp, synthetic construct
  misc_feature 1..22: note = Probe
  source 1..22: mol_type = other DNA
tcgaatccgagtcacggcattg

SEQ ID NO: 7956 - DNA, 23 bp, synthetic construct
  misc_feature 1..23: note = Probe
  source 1..23: mol_type = other DNA
tcgaatccgagtcacggcattgt

SEQ ID NO: 7957 - DNA, 24 bp, synthetic construct
  misc_feature 1..24: note = Probe
  source 1..24: mol_type = other DNA
tcgactcattaaattatgataatc

SEQ ID NO: 7958 - DNA, 33 bp, synthetic construct
  misc_feature 1..33: note = Probe
  source 1..33: mol_type = other DNA
tcgactcattaaattatgataatcatatttacc

SEQ ID NO: 7959 - DNA, 22 bp, synthetic construct
  misc_feature 1..22: note = Probe
  source 1..22: mol_type = other DNA
tcgactcccggtatgggaacaa

SEQ ID NO: 7960 - DNA, 21 bp, synthetic construct
  misc_feature 1..21: note = Probe
  source 1..21: mol_type = other DNA
tcgactcccggtgtgggaacg

SEQ ID NO: 7961 - DNA, 22 bp, synthetic construct
  misc_feature 1..22: note = Probe
  source 1..22: mol_type = other DNA
tcgactcccggtgtgggaacgc

SEQ ID NO: 7962 - DNA, 20 bp, synthetic construct
  misc_feature 1..20: note = Probe
  source 1..20: mol_type = other DNA
tcgagcctcacctggagcaa

SEQ ID NO: 7963 - DNA, 20 bp, synthetic construct
  misc_feature 1..20: note = Probe
  source 1..20: mol_type = other DNA
tcgagcctcacctggagcat

SEQ ID NO: 7964 - DNA, 22 bp, synthetic construct
  misc_feature 1..22: note = Probe
  source 1..22: mol_type = other DNA
tcgagtcccatctgggtcgcgt

SEQ ID NO: 7965 - DNA, 22 bp, synthetic construct
  misc_feature 1..22: note = Probe
  source 1..22: mol_type = other DNA
tcgatccccggcatctccattg

SEQ ID NO: 7966 - DNA, 22 bp, synthetic construct
  misc_feature 1..22: note = Probe
  source 1..22: mol_type = other DNA
tcgatccccgtacgggccacga

SEQ ID NO: 7967 - DNA, 23 bp, synthetic construct
  misc_feature 1..23: note = Probe
  source 1..23: mol_type = other DNA
tcgatcctcacacggggcacaat

SEQ ID NO: 7968 - DNA, 22 bp, synthetic construct
  misc_feature 1..22: note = Probe
  source 1..22: mol_type = other DNA
tcgatgcccgcatcctccactc

SEQ ID NO: 7969 - DNA, 20 bp, synthetic construct
  misc_feature 1..20: note = Probe
  source 1..20: mol_type = other DNA
tcgattccccgacggggaga

SEQ ID NO: 7970 - DNA, 21 bp, synthetic construct
  misc_feature 1..21: note = Probe
  source 1..21: mol_type = other DNA
tcgattccccgacggggagaa

SEQ ID NO: 7971 - DNA, 22 bp, synthetic construct
  misc_feature 1..22: note = Probe
  source 1..22: mol_type = other DNA
tcgattccccgacggggagaaa

SEQ ID NO: 7972 - DNA, 21 bp, synthetic construct
  misc_feature 1..21: note = Probe
  source 1..21: mol_type = other DNA
tcgattccccgacggggagac

SEQ ID NO: 7973 - DNA, 20 bp, synthetic construct
  misc_feature 1..20: note = Probe
  source 1..20: mol_type = other DNA
tcgattccccgacggggagg

SEQ ID NO: 7974 - DNA, 21 bp, synthetic construct
  misc_feature 1..21: note = Probe
  source 1..21: mol_type = other DNA
tcgattccccgacggggaggc

SEQ ID NO: 7975 - DNA, 22 bp, synthetic construct
  misc_feature 1..22: note = Probe
  source 1..22: mol_type = other DNA
tcgattccccgacggggaggca

SEQ ID NO: 7976 - DNA, 22 bp, synthetic construct
  misc_feature 1..22: note = Probe
  source 1..22: mol_type = other DNA
tcgattcccggccaacgcaagt

SEQ ID NO: 7977 - DNA, 22 bp, synthetic construct
  misc_feature 1..22: note = Probe
  source 1..22: mol_type = other DNA
tcgattcccggccaacgcagtg

SEQ ID NO: 7978 - DNA, 22 bp, synthetic construct
  misc_feature 1..22: note = Probe
  source 1..22: mol_type = other DNA
tcgattcccggccaatgcacga

SEQ ID NO: 7979 - DNA, 22 bp, synthetic construct
  misc_feature 1..22: note = Probe
  source 1..22: mol_type = other DNA
tcgattcccggccaatgcagca

SEQ ID NO: 7980 - DNA, 22 bp, synthetic construct
  misc_feature 1..22: note = Probe
  source 1..22: mol_type = other DNA
tcgattcccgggcggcgcactt

SEQ ID NO: 7981 - DNA, 22 bp, synthetic construct
  misc_feature 1..22: note = Probe
  source 1..22: mol_type = other DNA
tcgattcccggtcagggaacaa

SEQ ID NO: 7982 - DNA, 22 bp, synthetic construct
  misc_feature 1..22: note = Probe
  source 1..22: mol_type = other DNA
tcgattcccggtcatggaacca

SEQ ID NO: 7983 - DNA, 22 bp, synthetic construct
  misc_feature 1..22: note = Probe
  source 1..22: mol_type = other DNA
tcgattcctggtcagggaacca

SEQ ID NO: 7984 - DNA, 21 bp, synthetic construct
  misc_feature 1..21: note = Probe
  source 1..21: mol_type = other DNA
tcgattctcatagtcctagaa

SEQ ID NO: 7985 - DNA, 27 bp, synthetic construct
  misc_feature 1..27: note = Probe
  source 1..27: mol_type = other DNA
tcgcataaaacttaaaactttacagtc

SEQ ID NO: 7986 - DNA, 29 bp, synthetic construct
  misc_feature 1..29: note = Probe
  source 1..29: mol_type = other DNA
tcgcataaaacttaaaactttacagtcag

SEQ ID NO: 7987 - DNA, 35 bp, synthetic construct
  misc_feature 1..35: note = Probe
  source 1..35: mol_type = other DNA
tcgcataaaacttaaaactttacagtcagaggttc

SEQ ID NO: 7988 - DNA, 46 bp, synthetic construct
  misc_feature 1..46: note = Probe
  source 1..46: mol_type = other DNA
tcgcataaaacttaaaactttacagtcagaggttcaattcctcttc

SEQ ID NO: 7989 - DNA, 48 bp, synthetic construct
  misc_feature 1..48: note = Probe
  source 1..48: mol_type = other DNA
tcgcataaaacttaaaactttacagtcagaggttcaattcctcttctt

SEQ ID NO: 7990 - DNA, 49 bp, synthetic construct
  misc_feature 1..49: note = Probe
  source 1..49: mol_type = other DNA
tcgcataaaacttaaaactttacagtcagaggttcaattcctcttctta

SEQ ID NO: 7991 - DNA, 50 bp, synthetic construct
  misc_feature 1..50: note = Probe
  source 1..50: mol_type = other DNA
tcgcataaaacttaaaactttacagtcagaggttcaattcctcttcttaa

SEQ ID NO: 7992 - DNA, 50 bp, synthetic construct
  misc_feature 1..50: note = Probe
  source 1..50: mol_type = other DNA
tcgggcccataccccgaaaatgttggttatacccttcccgtactaattaa

SEQ ID NO: 7993 - DNA, 22 bp, synthetic construct
  misc_feature 1..22: note = Probe
  source 1..22: mol_type = other DNA
tcgtatagtggttagtactctg

SEQ ID NO: 7994 - DNA, 23 bp, synthetic construct
  misc_feature 1..23: note = Probe
  source 1..23: mol_type = other DNA
tcgtatagtggttagtactctgc

SEQ ID NO: 7995 - DNA, 29 bp, synthetic construct
  misc_feature 1..29: note = Probe
  source 1..29: mol_type = other DNA
tcgtggttgtagtccgtgcgagaataatg

SEQ ID NO: 7996 - DNA, 35 bp, synthetic construct
  misc_feature 1..35: note = Probe
  source 1..35: mol_type = other DNA
tctaaagacaggggttaggcctctttttaccagct

SEQ ID NO: 7997 - DNA, 23 bp, synthetic construct
  misc_feature 1..23: note = Probe
  source 1..23: mol_type = other DNA
tctaacaacatggctttctcaac

SEQ ID NO: 7998 - DNA, 24 bp, synthetic construct
  misc_feature 1..24: note = Probe
  source 1..24: mol_type = other DNA
tctaacaacatggctttctcaact

SEQ ID NO: 7999 - DNA, 19 bp, synthetic construct
  misc_feature 1..19: note = Probe
  source 1..19: mol_type = other DNA
tctaggggtatgattctcg

SEQ ID NO: 8000 - DNA, 43 bp, synthetic construct
  misc_feature 1..43: note = Probe
  source 1..43: mol_type = other DNA
tctcaccgccgcggcccgggttcgattcccggtcagggaagcc

SEQ ID NO: 8001 - DNA, 43 bp, synthetic construct
  misc_feature 1..43: note = Probe
  source 1..43: mol_type = other DNA
tctcaccgccgcggcccgggttcgattcccggtcagggaagtc

SEQ ID NO: 8002 - DNA, 36 bp, synthetic construct
  misc_feature 1..36: note = Probe
  source 1..36: mol_type = other DNA
tctcagggatgggttcgattctcatagtcctagaaa

SEQ ID NO: 8003 - DNA, 33 bp, synthetic construct
  misc_feature 1..33: note = Probe
  source 1..33: mol_type = other DNA
tctcagggtcgtgggttcgagccccacgttggg

SEQ ID NO: 8004 - DNA, 25 bp, synthetic construct
  misc_feature 1..25: note = Probe
  source 1..25: mol_type = other DNA
tctcccgccttttttcccggcggcg

SEQ ID NO: 8005 - DNA, 38 bp, synthetic construct
  misc_feature 1..38: note = Probe
  source 1..38: mol_type = other DNA
tctgaaggtcgtgagttcgatcctcacacggggcacaa

SEQ ID NO: 8006 - DNA, 23 bp, synthetic construct
  misc_feature 1..23: note = Probe
  source 1..23: mol_type = other DNA
tctgaatccagcgatccgagttc

SEQ ID NO: 8007 - DNA, 29 bp, synthetic construct
  misc_feature 1..29: note = Probe
  source 1..29: mol_type = other DNA
tctgacaacagaggcttacgaccccttat

SEQ ID NO: 8008 - DNA, 35 bp, synthetic construct
  misc_feature 1..35: note = Probe
  source 1..35: mol_type = other DNA
tctgacaacagaggcttacgaccccttatttaccg

SEQ ID NO: 8009 - DNA, 36 bp, synthetic construct
  misc_feature 1..36: note = Probe
  source 1..36: mol_type = other DNA
tctgacaacagaggcttacgaccccttatttaccga

SEQ ID NO: 8010 - DNA, 37 bp, synthetic construct
  misc_feature 1..37: note = Probe
  source 1..37: mol_type = other DNA
tctgacaacagaggcttacgaccccttatttaccgag

SEQ ID NO: 8011 - DNA, 19 bp, synthetic construct
  misc_feature 1..19: note = Probe
  source 1..19: mol_type = other DNA
tctgagggtccagggttca

SEQ ID NO: 8012 - DNA, 22 bp, synthetic construct
  misc_feature 1..22: note = Probe
  source 1..22: mol_type = other DNA
tctgagggtccagggttcaagt

SEQ ID NO: 8013 - DNA, 33 bp, synthetic construct
  misc_feature 1..33: note = Probe
  source 1..33: mol_type = other DNA
tctgagggtccagggttcaagtccctgttcggg

SEQ ID NO: 8014 - DNA, 50 bp, synthetic construct
  misc_feature 1..50: note = Probe
  source 1..50: mol_type = other DNA
tcttagctttgggtgctaatggtggagttaaagactttttctctgatttg

SEQ ID NO: 8015 - DNA, 17 bp, synthetic construct
  misc_feature 1..17: note = Probe
  source 1..17: mol_type = other DNA
tcttcgggggcgtgggt

SEQ ID NO: 8016 - DNA, 18 bp, synthetic construct
  misc_feature 1..18: note = Probe
  source 1..18: mol_type = other DNA
tcttcgggggcgtgggtt

SEQ ID NO: 8017 - DNA, 37 bp, synthetic construct
  misc_feature 1..37: note = Probe
  source 1..37: mol_type = other DNA
tcttgcgacccgggttcgattcccgggcggcgcactt

SEQ ID NO: 8018 - DNA, 27 bp, synthetic construct
  misc_feature 1..27: note = Probe
  source 1..27: mol_type = other DNA
tgaaaaagtcatggaggccatggggtt

SEQ ID NO: 8019 - DNA, 24 bp, synthetic construct
  misc_feature 1..24: note = Probe
  source 1..24: mol_type = other DNA
tgaaaacctttttccaaggacaaa

SEQ ID NO: 8020 - DNA, 25 bp, synthetic construct
  misc_feature 1..25: note = Probe
  source 1..25: mol_type = other DNA
tgaaaacctttttccaaggacaaat

SEQ ID NO: 8021 - DNA, 41 bp, synthetic construct
  misc_feature 1..41: note = Probe
  source 1..41: mol_type = other DNA
tgaaaatgtttagacgggctcacatcaccccataaacaaat

SEQ ID NO: 8022 - DNA, 17 bp, synthetic construct
  misc_feature 1..17: note = Probe
  source 1..17: mol_type = other DNA
tgaaggtcgtgagttcg

SEQ ID NO: 8023 - DNA, 33 bp, synthetic construct
  misc_feature 1..33: note = Probe
  source 1..33: mol_type = other DNA
tgaaggtcgtgagttcgagcctcacacggggca

SEQ ID NO: 8024 - DNA, 33 bp, synthetic construct
  misc_feature 1..33: note = Probe
  source 1..33: mol_type = other DNA
tgaaggtcgtgagttcgatcctcacacggggca

SEQ ID NO: 8025 - DNA, 36 bp, synthetic construct
  misc_feature 1..36: note = Probe
  source 1..36: mol_type = other DNA
tgaaggtcgtgagttcgatcctcacacggggcacaa

SEQ ID NO: 8026 - DNA, 17 bp, synthetic construct
  misc_feature 1..17: note = Probe
  source 1..17: mol_type = other DNA
tgaatccagcgatccga

SEQ ID NO: 8027 - DNA, 18 bp, synthetic construct
  misc_feature 1..18: note = Probe
  source 1..18: mol_type = other DNA
tgaatccagcgatccgag

SEQ ID NO: 8028 - DNA, 23 bp, synthetic construct
  misc_feature 1..23: note = Probe
  source 1..23: mol_type = other DNA
tgaatccagcgatccgagttcaa

SEQ ID NO: 8029 - DNA, 24 bp, synthetic construct
  misc_feature 1..24: note = Probe
  source 1..24: mol_type = other DNA
tgaatccagcgatccgagttcaaa

SEQ ID NO: 8030 - DNA, 38 bp, synthetic construct
  misc_feature 1..38: note = Probe
  source 1..38: mol_type = other DNA
tgaatccagcgatccgagttcaaatctcggtggaacct

SEQ ID NO: 8031 - DNA, 39 bp, synthetic construct
  misc_feature 1..39: note = Probe
  source 1..39: mol_type = other DNA
tgaatccagcgatccgagttcaaatctcggtggaacctg

SEQ ID NO: 8032 - DNA, 40 bp, synthetic construct
  misc_feature 1..40: note = Probe
  source 1..40: mol_type = other DNA
tgaatccagcgatccgagttcaaatctcggtggaacctgc

SEQ ID NO: 8033 - DNA, 41 bp, synthetic construct
  misc_feature 1..41: note = Probe
  source 1..41: mol_type = other DNA
tgaatccagcgatccgagttcaaatctcggtggaacctgca

SEQ ID NO: 8034 - DNA, 40 bp, synthetic construct
  misc_feature 1..40: note = Probe
  source 1..40: mol_type = other DNA
tgaatccagcgatccgagttcaaatctcggtggaacctgt

SEQ ID NO: 8035 - DNA, 39 bp, synthetic construct
  misc_feature 1..39: note = Probe
  source 1..39: mol_type = other DNA
tgaatccagcgatccgagttcaaatctcggtggaacctt

SEQ ID NO: 8036 - DNA, 40 bp, synthetic construct
  misc_feature 1..40: note = Probe
  source 1..40: mol_type = other DNA
tgaatccagcgatccgagttcaaatctcggtggaaccttt

SEQ ID NO: 8037 - DNA, 41 bp, synthetic construct
  misc_feature 1..41: note = Probe
  source 1..41: mol_type = other DNA
tgaatccagcgatccgagttcaaatctcggtggaacctttc

SEQ ID NO: 8038 - DNA, 41 bp, synthetic construct
  misc_feature 1..41: note = Probe
  source 1..41: mol_type = other DNA
tgaatccagcgatccgagttcaaatctcggtgggacctcac

SEQ ID NO: 8039 - DNA, 41 bp, synthetic construct
  misc_feature 1..41: note = Probe
  source 1..41: mol_type = other DNA
tgaatccagcgatccgagttcgagtctcggtggaacctttg

SEQ ID NO: 8040 - DNA, 24 bp, synthetic construct
  misc_feature 1..24: note = Probe
  source 1..24: mol_type = other DNA
tgaatctgacaacagaggcttacg

SEQ ID NO: 8041 - DNA, 26 bp, synthetic construct
  misc_feature 1..26: note = Probe
  source 1..26: mol_type = other DNA
tgaatctgacaacagaggcttacgac

SEQ ID NO: 8042 - DNA, 39 bp, synthetic construct
  misc_feature 1..39: note = Probe
  source 1..39: mol_type = other DNA
tgaatctgacaacagaggcttacgaccccttatttaccg

SEQ ID NO: 8043 - DNA, 40 bp, synthetic construct
  misc_feature 1..40: note = Probe
  source 1..40: mol_type = other DNA
tgaatctgacaacagaggcttacgaccccttatttaccga

SEQ ID NO: 8044 - DNA, 41 bp, synthetic construct
  misc_feature 1..41: note = Probe
  source 1..41: mol_type = other DNA
tgaatctgacaacagaggcttacgaccccttatttaccgag

SEQ ID NO: 8045 - DNA, 42 bp, synthetic construct
  misc_feature 1..42: note = Probe
  source 1..42: mol_type = other DNA
tgaatctgacaacagaggcttacgaccccttatttaccgaga

SEQ ID NO: 8046 - DNA, 43 bp, synthetic construct
  misc_feature 1..43: note = Probe
  source 1..43: mol_type = other DNA
tgaatctgacaacagaggcttacgaccccttatttaccgagaa

SEQ ID NO: 8047 - DNA, 44 bp, synthetic construct
  misc_feature 1..44: note = Probe
  source 1..44: mol_type = other DNA
tgaatctgacaacagaggcttacgaccccttatttaccgagaaa

SEQ ID NO: 8048 - DNA, 46 bp, synthetic construct
  misc_feature 1..46: note = Probe
  source 1..46: mol_type = other DNA
tgaatctgacaacagaggcttacgaccccttatttaccgagaaagc

SEQ ID NO: 8049 - DNA, 47 bp, synthetic construct
  misc_feature 1..47: note = Probe
  source 1..47: mol_type = other DNA
tgaatctgacaacagaggcttacgaccccttatttaccgagaaagct

SEQ ID NO: 8050 - DNA, 49 bp, synthetic construct
  misc_feature 1..49: note = Probe
  source 1..49: mol_type = other DNA
tgaatctgacaacagaggcttacgaccccttatttaccgagaaagctca

SEQ ID NO: 8051 - DNA, 50 bp, synthetic construct
  misc_feature 1..50: note = Probe
  source 1..50: mol_type = other DNA
tgaatctgacaacagaggcttacgaccccttatttaccgagaaagctcac

SEQ ID NO: 8052 - DNA, 22 bp, synthetic construct
  misc_feature 1..22: note = Probe
  source 1..22: mol_type = other DNA
tgacaacagaggcttacgaccc

SEQ ID NO: 8053 - DNA, 23 bp, synthetic construct
  misc_feature 1..23: note = Probe
  source 1..23: mol_type = other DNA
tgacaacagaggcttacgacccc

SEQ ID NO: 8054 - DNA, 25 bp, synthetic construct
  misc_feature 1..25: note = Probe
  source 1..25: mol_type = other DNA
tgacaacagaggcttacgacccctt

SEQ ID NO: 8055 - DNA, 28 bp, synthetic construct
  misc_feature 1..28: note = Probe
  source 1..28: mol_type = other DNA
tgacaacagaggcttacgaccccttatt

SEQ ID NO: 8056 - DNA, 29 bp, synthetic construct
  misc_feature 1..29: note = Probe
  source 1..29: mol_type = other DNA
tgacaacagaggcttacgaccccttattt

SEQ ID NO: 8057 - DNA, 33 bp, synthetic construct
  misc_feature 1..33: note = Probe
  source 1..33: mol_type = other DNA
tgacaacagaggcttacgaccccttatttaccg

SEQ ID NO: 8058 - DNA, 34 bp, synthetic construct
  misc_feature 1..34: note = Probe
  source 1..34: mol_type = other DNA
tgacaacagaggcttacgaccccttatttaccga

SEQ ID NO: 8059 - DNA, 35 bp, synthetic construct
  misc_feature 1..35: note = Probe
  source 1..35: mol_type = other DNA
tgacaacagaggcttacgaccccttatttaccgag

SEQ ID NO: 8060 - DNA, 24 bp, synthetic construct
  misc_feature 1..24: note = Probe
  source 1..24: mol_type = other DNA
tgacaacattcaaaaaagagtaat

SEQ ID NO: 8061 - DNA, 32 bp, synthetic construct
  misc_feature 1..32: note = Probe
  source 1..32: mol_type = other DNA
tgacccgggttcgattcccggccaacgcaagt

SEQ ID NO: 8062 - DNA, 32 bp, synthetic construct
  misc_feature 1..32: note = Probe
  source 1..32: mol_type = other DNA
tgacccgggttcgattcccggccaacgcagtg

SEQ ID NO: 8063 - DNA, 31 bp, synthetic construct
  misc_feature 1..31: note = Probe
  source 1..31: mol_type = other DNA
tgagcatagctgccttccaagcagttgaccc

SEQ ID NO: 8064 - DNA, 17 bp, synthetic construct
  misc_feature 1..17: note = Probe
  source 1..17: mol_type = other DNA
tgagggtccagggttca

SEQ ID NO: 8065 - DNA, 31 bp, synthetic construct
  misc_feature 1..31: note = Probe
  source 1..31: mol_type = other DNA
tgagggtccagggttcaagtccctgttcggg

SEQ ID NO: 8066 - DNA, 33 bp, synthetic construct
  misc_feature 1..33: note = Probe
  source 1..33: mol_type = other DNA
tgagggtccagggttcaagtccctgttcgggcg

SEQ ID NO: 8067 - DNA, 49 bp, synthetic construct
  misc_feature 1..49: note = Probe
  source 1..49: mol_type = other DNA
tgataaaagagttactttgatagagtaaataataggagcttaaaccccc

SEQ ID NO: 8068 - DNA, 22 bp, synthetic construct
  misc_feature 1..22: note = Probe
  source 1..22: mol_type = other DNA
tgataatcatatttaccaaatg

SEQ ID NO: 8069 - DNA, 35 bp, synthetic construct
  misc_feature 1..35: note = Probe
  source 1..35: mol_type = other DNA
tgatagagtaaataataggagcttaaaccccctta

SEQ ID NO: 8070 - DNA, 43 bp, synthetic construct
  misc_feature 1..43: note = Probe
  source 1..43: mol_type = other DNA
tgatagagtaaataataggagcttaaacccccttatttctagg

SEQ ID NO: 8071 - DNA, 44 bp, synthetic construct
  misc_feature 1..44: note = Probe
  source 1..44: mol_type = other DNA
tgatagagtaaataataggagcttaaacccccttatttctagga

SEQ ID NO: 8072 - DNA, 26 bp, synthetic construct
  misc_feature 1..26: note = Probe
  source 1..26: mol_type = other DNA
tgatcgtatagtggttagtactctgc

SEQ ID NO: 8073 - DNA, 31 bp, synthetic construct
  misc_feature 1..31: note = Probe
  source 1..31: mol_type = other DNA
tgatcgtatagtggttagtactctgcgttgt

SEQ ID NO: 8074 - DNA, 32 bp, synthetic construct
  misc_feature 1..32: note = Probe
  source 1..32: mol_type = other DNA
tgatgcagagtggggttttgcagtccttagct

SEQ ID NO: 8075 - DNA, 50 bp, synthetic construct
  misc_feature 1..50: note = Probe
  source 1..50: mol_type = other DNA
tgatttcgactcattaaattatgataatcatatttaccaaatgcccctca

SEQ ID NO: 8076 - DNA, 20 bp, synthetic construct
  misc_feature 1..20: note = Probe
  source 1..20: mol_type = other DNA
tgcaaattcgaagaagcagc

SEQ ID NO: 8077 - DNA, 33 bp, synthetic construct
  misc_feature 1..33: note = Probe
  source 1..33: mol_type = other DNA
tgcaaattcgaagaagcagcttcaaacctgccg

SEQ ID NO: 8078 - DNA, 36 bp, synthetic construct
  misc_feature 1..36: note = Probe
  source 1..36: mol_type = other DNA
tgcaaattcgaagaagcagcttcaaacctgccgggg

SEQ ID NO: 8079 - DNA, 39 bp, synthetic construct
  misc_feature 1..39: note = Probe
  source 1..39: mol_type = other DNA
tgcaaattcgaagaagcagcttcaaacctgccggggctt

SEQ ID NO: 8080 - DNA, 40 bp, synthetic construct
  misc_feature 1..40: note = Probe
  source 1..40: mol_type = other DNA
tgcaaattcgaagaagcagcttcaaacctgccggggcttc

SEQ ID NO: 8081 - DNA, 41 bp, synthetic construct
  misc_feature 1..41: note = Probe
  source 1..41: mol_type = other DNA
tgcaaattcgaagaagcagcttcaaacctgccggggcttct

SEQ ID NO: 8082 - DNA, 42 bp, synthetic construct
  misc_feature 1..42: note = Probe
  source 1..42: mol_type = other DNA
tgcaaattcgaagaagcagcttcaaacctgccggggcttctc

SEQ ID NO: 8083 - DNA, 44 bp, synthetic construct
  misc_feature 1..44: note = Probe
  source 1..44: mol_type = other DNA
tgcaaattcgaagaagcagcttcaaacctgccggggcttctccc

SEQ ID NO: 8084 - DNA, 39 bp, synthetic construct
  misc_feature 1..39: note = Probe
  source 1..39: mol_type = other DNA
tgcacgaggccccgggttcaatccccggcacctccagct

SEQ ID NO: 8085 - DNA, 39 bp, synthetic construct
  misc_feature 1..39: note = Probe
  source 1..39: mol_type = other DNA
tgcacgaggtcctgggttcgatccccagtacctccaggc

SEQ ID NO: 8086 - DNA, 29 bp, synthetic construct
  misc_feature 1..29: note = Probe
  source 1..29: mol_type = other DNA
tgcagagtggggttttgcagtccttagct

SEQ ID NO: 8087 - DNA, 37 bp, synthetic construct
  misc_feature 1..37: note = Probe
  source 1..37: mol_type = other DNA
tgcatgaggtcccgggttcgatccccagcatctccag

SEQ ID NO: 8088 - DNA, 39 bp, synthetic construct
  misc_feature 1..39: note = Probe
  source 1..39: mol_type = other DNA
tgcatgaggtcccgggttcgatccccagcatctccagtg

SEQ ID NO: 8089 - DNA, 33 bp, synthetic construct
  misc_feature 1..33: note = Probe
  source 1..33: mol_type = other DNA
tgcatgggtggttcagtggtagaattctcgcct

SEQ ID NO: 8090 - DNA, 22 bp, synthetic construct
  misc_feature 1..22: note = Probe
  source 1..22: mol_type = other DNA
tgccacgcgggaggcccgggtt

SEQ ID NO: 8091 - DNA, 43 bp, synthetic construct
  misc_feature 1..43: note = Probe
  source 1..43: mol_type = other DNA
tgccacgcgggaggcccgggttcgattcccggcccatgcagca

SEQ ID NO: 8092 - DNA, 27 bp, synthetic construct
  misc_feature 1..27: note = Probe
  source 1..27: mol_type = other DNA
tgccccaactaaatactaccgtatggc

SEQ ID NO: 8093 - DNA, 17 bp, synthetic construct
  misc_feature 1..17: note = Probe
  source 1..17: mol_type = other DNA
tgcccccatgtctaaca

SEQ ID NO: 8094 - DNA, 19 bp, synthetic construct
  misc_feature 1..19: note = Probe
  source 1..19: mol_type = other DNA
tgcccccatgtctaacaac

SEQ ID NO: 8095 - DNA, 20 bp, synthetic construct
  misc_feature 1..20: note = Probe
  source 1..20: mol_type = other DNA
tgcccccatgtctaacaaca

SEQ ID NO: 8096 - DNA, 23 bp, synthetic construct
  misc_feature 1..23: note = Probe
  source 1..23: mol_type = other DNA
tgcccccatgtctaacaacatgg

SEQ ID NO: 8097 - DNA, 24 bp, synthetic construct
  misc_feature 1..24: note = Probe
  source 1..24: mol_type = other DNA
tgcccccatgtctaacaacatggc

SEQ ID NO: 8098 - DNA, 25 bp, synthetic construct
  misc_feature 1..25: note = Probe
  source 1..25: mol_type = other DNA
tgcccccatgtctaacaacatggct

SEQ ID NO: 8099 - DNA, 26 bp, synthetic construct
  misc_feature 1..26: note = Probe
  source 1..26: mol_type = other DNA
tgcccccatgtctaacaacatggctt

SEQ ID NO: 8100 - DNA, 27 bp, synthetic construct
  misc_feature 1..27: note = Probe
  source 1..27: mol_type = other DNA
tgcccccatgtctaacaacatggcttt

SEQ ID NO: 8101 - DNA, 28 bp, synthetic construct
  misc_feature 1..28: note = Probe
  source 1..28: mol_type = other DNA
tgcccccatgtctaacaacatggctttc

SEQ ID NO: 8102 - DNA, 29 bp, synthetic construct
  misc_feature 1..29: note = Probe
  source 1..29: mol_type = other DNA
tgcccccatgtctaacaacatggctttct

SEQ ID NO: 8103 - DNA, 30 bp, synthetic construct
  misc_feature 1..30: note = Probe
  source 1..30: mol_type = other DNA
tgcccccatgtctaacaacatggctttctc

SEQ ID NO: 8104 - DNA, 31 bp, synthetic construct
  misc_feature 1..31: note = Probe
  source 1..31: mol_type = other DNA
tgcccccatgtctaacaacatggctttctca

SEQ ID NO: 8105 - DNA, 32 bp, synthetic construct
  misc_feature 1..32: note = Probe
  source 1..32: mol_type = other DNA
tgcccccatgtctaacaacatggctttctcaa

SEQ ID NO: 8106 - DNA, 33 bp, synthetic construct
  misc_feature 1..33: note = Probe
  source 1..33: mol_type = other DNA
tgcccccatgtctaacaacatggctttctcaac

SEQ ID NO: 8107 - DNA, 34 bp, synthetic construct
  misc_feature 1..34: note = Probe
  source 1..34: mol_type = other DNA
tgcccccatgtctaacaacatggctttctcaact

SEQ ID NO: 8108 - DNA, 29 bp, synthetic construct
  misc_feature 1..29: note = Probe
  source 1..29: mol_type = other DNA
tgcccctcatttacataaatattatacta

SEQ ID NO: 8109 - DNA, 34 bp, synthetic construct
  misc_feature 1..34: note = Probe
  source 1..34: mol_type = other DNA
tgcccggctagctcagtcggtagagcatgagact

SEQ ID NO: 8110 - DNA, 34 bp, synthetic construct
  misc_feature 1..34: note = Probe
  source 1..34: mol_type = other DNA
tgcccggctagctcagtcggtagagcatgggact

SEQ ID NO: 8111 - DNA, 17 bp, synthetic construct
  misc_feature 1..17: note = Probe
  source 1..17: mol_type = other DNA
tgccgtgatcgtatagt

SEQ ID NO: 8112 - DNA, 25 bp, synthetic construct
  misc_feature 1..25: note = Probe
  source 1..25: mol_type = other DNA
tgccgtgatcgtatagtggttagta

SEQ ID NO: 8113 - DNA, 26 bp, synthetic construct
  misc_feature 1..26: note = Probe
  source 1..26: mol_type = other DNA
tgccgtgatcgtatagtggttagtac

SEQ ID NO: 8114 - DNA, 27 bp, synthetic construct
  misc_feature 1..27: note = Probe
  source 1..27: mol_type = other DNA
tgccgtgatcgtatagtggttagtact

SEQ ID NO: 8115 - DNA, 31 bp, synthetic construct
  misc_feature 1..31: note = Probe
  source 1..31: mol_type = other DNA
tgccgtgatcgtatagtggttagtactctgc

SEQ ID NO: 8116 - DNA, 32 bp, synthetic construct
  misc_feature 1..32: note = Probe
  source 1..32: mol_type = other DNA
tgccgtgatcgtatagtggttagtactctgcg

SEQ ID NO: 8117 - DNA, 34 bp, synthetic construct
  misc_feature 1..34: note = Probe
  source 1..34: mol_type = other DNA
tgccgtgatcgtatagtggttagtactctgcgtt

SEQ ID NO: 8118 - DNA, 38 bp, synthetic construct
  misc_feature 1..38: note = Probe
  source 1..38: mol_type = other DNA
tgccgtgatcgtatagtggttagtactctgcgttgtgg

SEQ ID NO: 8119 - DNA, 34 bp, synthetic construct
  misc_feature 1..34: note = Probe
  source 1..34: mol_type = other DNA
tgcgacccgggttcgattcccgggcggcgcactt

SEQ ID NO: 8120 - DNA, 20 bp, synthetic construct
  misc_feature 1..20: note = Probe
  source 1..20: mol_type = other DNA
tgcgagaggtcccgggttca

SEQ ID NO: 8121 - DNA, 39 bp, synthetic construct
  misc_feature 1..39: note = Probe
  source 1..39: mol_type = other DNA
tgcgagaggtcccgggttcaaatcccggacgagccccct

SEQ ID NO: 8122 - DNA, 17 bp, synthetic construct
  misc_feature 1..17: note = Probe
  source 1..17: mol_type = other DNA
tgctaactcatgccccc

SEQ ID NO: 8123 - DNA, 21 bp, synthetic construct
  misc_feature 1..21: note = Probe
  source 1..21: mol_type = other DNA
tgctaactcatgcccccatgt

SEQ ID NO: 8124 - DNA, 24 bp, synthetic construct
  misc_feature 1..24: note = Probe
  source 1..24: mol_type = other DNA
tgctaactcatgcccccatgtcta

SEQ ID NO: 8125 - DNA, 25 bp, synthetic construct
  misc_feature 1..25: note = Probe
  source 1..25: mol_type = other DNA
tgctaactcatgcccccatgtctaa

SEQ ID NO: 8126 - DNA, 35 bp, synthetic construct
  misc_feature 1..35: note = Probe
  source 1..35: mol_type = other DNA
tgctaactcatgcccccatgtctaacaacatggct

SEQ ID NO: 8127 - DNA, 36 bp, synthetic construct
  misc_feature 1..36: note = Probe
  source 1..36: mol_type = other DNA
tgctaactcatgcccccatgtctaacaacatggctt

SEQ ID NO: 8128 - DNA, 37 bp, synthetic construct
  misc_feature 1..37: note = Probe
  source 1..37: mol_type = other DNA
tgctaactcatgcccccatgtctaacaacatggcttt

SEQ ID NO: 8129 - DNA, 38 bp, synthetic construct
  misc_feature 1..38: note = Probe
  source 1..38: mol_type = other DNA
tgctaactcatgcccccatgtctaacaacatggctttc

SEQ ID NO: 8130 - DNA, 39 bp, synthetic construct
  misc_feature 1..39: note = Probe
  source 1..39: mol_type = other DNA
tgctaactcatgcccccatgtctaacaacatggctttct

SEQ ID NO: 8131 - DNA, 40 bp, synthetic construct
  misc_feature 1..40: note = Probe
  source 1..40: mol_type = other DNA
tgctaactcatgcccccatgtctaacaacatggctttctc

SEQ ID NO: 8132 - DNA, 41 bp, synthetic construct
  misc_feature 1..41: note = Probe
  source 1..41: mol_type = other DNA
tgctaactcatgcccccatgtctaacaacatggctttctca

SEQ ID NO: 8133 - DNA, 43 bp, synthetic construct
  misc_feature 1..43: note = Probe
  source 1..43: mol_type = other DNA
tgctaactcatgcccccatgtctaacaacatggctttctcaac

SEQ ID NO: 8134 - DNA, 44 bp, synthetic construct
  misc_feature 1..44: note = Probe
  source 1..44: mol_type = other DNA
tgctaactcatgcccccatgtctaacaacatggctttctcaact

SEQ ID NO: 8135 - DNA, 50 bp, synthetic construct
  misc_feature 1..50: note = Probe
  source 1..50: mol_type = other DNA
tgctaactcatgcccccatgtctaacaacatggctttctcaacttttaaa

SEQ ID NO: 8136 - DNA, 50 bp, synthetic construct
  misc_feature 1..50: note = Probe
  source 1..50: mol_type = other DNA
tgctaatccattgtgctttgcacgcgtgggttcgaatcccatcctcgtcg

SEQ ID NO: 8137 - DNA, 17 bp, synthetic construct
  misc_feature 1..17: note = Probe
  source 1..17: mol_type = other DNA
tgctaatggtggagtta

SEQ ID NO: 8138 - DNA, 35 bp, synthetic construct
  misc_feature 1..35: note = Probe
  source 1..35: mol_type = other DNA
tgctaatggtggagttaaagactttttctctgatt

SEQ ID NO: 8139 - DNA, 36 bp, synthetic construct
  misc_feature 1..36: note = Probe
  source 1..36: mol_type = other DNA
tgctaatggtggagttaaagactttttctctgattt

SEQ ID NO: 8140 - DNA, 38 bp, synthetic construct
  misc_feature 1..38: note = Probe
  source 1..38: mol_type = other DNA
tgctaatggtggagttaaagactttttctctgatttgt

SEQ ID NO: 8141 - DNA, 39 bp, synthetic construct
  misc_feature 1..39: note = Probe
  source 1..39: mol_type = other DNA
tgctaatggtggagttaaagactttttctctgatttgtc

SEQ ID NO: 8142 - DNA, 40 bp, synthetic construct
  misc_feature 1..40: note = Probe
  source 1..40: mol_type = other DNA
tgctaatggtggagttaaagactttttctctgatttgtcc

SEQ ID NO: 8143 - DNA, 41 bp, synthetic construct
  misc_feature 1..41: note = Probe
  source 1..41: mol_type = other DNA
tgctaatggtggagttaaagactttttctctgatttgtcct

SEQ ID NO: 8144 - DNA, 42 bp, synthetic construct
  misc_feature 1..42: note = Probe
  source 1..42: mol_type = other DNA
tgctaatggtggagttaaagactttttctctgatttgtcctt

SEQ ID NO: 8145 - DNA, 43 bp, synthetic construct
  misc_feature 1..43: note = Probe
  source 1..43: mol_type = other DNA
tgctaatggtggagttaaagactttttctctgatttgtccttg

SEQ ID NO: 8146 - DNA, 44 bp, synthetic construct
  misc_feature 1..44: note = Probe
  source 1..44: mol_type = other DNA
tgctaatggtggagttaaagactttttctctgatttgtccttgg

SEQ ID NO: 8147 - DNA, 45 bp, synthetic construct
  misc_feature 1..45: note = Probe
  source 1..45: mol_type = other DNA
tgctaatggtggagttaaagactttttctctgatttgtccttgga

SEQ ID NO: 8148 - DNA, 46 bp, synthetic construct
  misc_feature 1..46: note = Probe
  source 1..46: mol_type = other DNA
tggactgtaaatctaaagacaggggttaggcctctttttaccagct

SEQ ID NO: 8149 - DNA, 27 bp, synthetic construct
  misc_feature 1..27: note = Probe
  source 1..27: mol_type = other DNA
tggagttaaagactttttctctgattt

SEQ ID NO: 8150 - DNA, 26 bp, synthetic construct
  misc_feature 1..26: note = Probe
  source 1..26: mol_type = other DNA
tggatcgaaaccatcctctgctaggt

SEQ ID NO: 8151 - DNA, 16 bp, synthetic construct
  misc_feature 1..16: note = Probe
  source 1..16: mol_type = other DNA
tggcaggtgcctcttt

SEQ ID NO: 8152 - DNA, 17 bp, synthetic construct
  misc_feature 1..17: note = Probe
  source 1..17: mol_type = other DNA
tggcaggtgcctctttt

SEQ ID NO: 8153 - DNA, 32 bp, synthetic construct
  misc_feature 1..32: note = Probe
  source 1..32: mol_type = other DNA
tggcccgggttcgactcccggtatgggaacaa

SEQ ID NO: 8154 - DNA, 22 bp, synthetic construct
  misc_feature 1..22: note = Probe
  source 1..22: mol_type = other DNA
tggctaggattcggcgctttca

SEQ ID NO: 8155 - DNA, 23 bp, synthetic construct
  misc_feature 1..23: note = Probe
  source 1..23: mol_type = other DNA
tggctaggattcggcgctttcac

SEQ ID NO: 8156 - DNA, 50 bp, synthetic construct
  misc_feature 1..50: note = Probe
  source 1..50: mol_type = other DNA
tgggcccataacccagaggtcgatggatcgaaaccatcctctgctaggtg

SEQ ID NO: 8157 - DNA, 31 bp, synthetic construct
  misc_feature 1..31: note = Probe
  source 1..31: mol_type = other DNA
tggggattgtgggttcgagtcccatctgggt

SEQ ID NO: 8158 - DNA, 33 bp, synthetic construct
  misc_feature 1..33: note = Probe
  source 1..33: mol_type = other DNA
tggggattgtgggttcgagtcccatctgggtcg

SEQ ID NO: 8159 - DNA, 36 bp, synthetic construct
  misc_feature 1..36: note = Probe
  source 1..36: mol_type = other DNA
tggggattgtgggttcgagtcccatctgggtcgcgt

SEQ ID NO: 8160 - DNA, 29 bp, synthetic construct
  misc_feature 1..29: note = Probe
  source 1..29: mol_type = other DNA
tgggtagctcagtcggtagagcatcagac

SEQ ID NO: 8161 - DNA, 18 bp, synthetic construct
  misc_feature 1..18: note = Probe
  source 1..18: mol_type = other DNA
tgggtgcgagaggtcccg

SEQ ID NO: 8162 - DNA, 19 bp, synthetic construct
  misc_feature 1..19: note = Probe
  source 1..19: mol_type = other DNA
tgggtgcgagaggtcccgg

SEQ ID NO: 8163 - DNA, 39 bp, synthetic construct
  misc_feature 1..39: note = Probe
  source 1..39: mol_type = other DNA
tgggtgctaatggtggagttaaagactttttctctgatt

SEQ ID NO: 8164 - DNA, 40 bp, synthetic construct
  misc_feature 1..40: note = Probe
  source 1..40: mol_type = other DNA
tgggtgctaatggtggagttaaagactttttctctgattt

SEQ ID NO: 8165 - DNA, 27 bp, synthetic construct
  misc_feature 1..27: note = Probe
  source 1..27: mol_type = other DNA
tgggtggttcagtggtagaattctcgc

SEQ ID NO: 8166 - DNA, 24 bp, synthetic construct
  misc_feature 1..24: note = Probe
  source 1..24: mol_type = other DNA
tgggttcgattctcatagtcctag

SEQ ID NO: 8167 - DNA, 26 bp, synthetic construct
  misc_feature 1..26: note = Probe
  source 1..26: mol_type = other DNA
tgggttcgattctcatagtcctagaa

SEQ ID NO: 8168 - DNA, 16 bp, synthetic construct
  misc_feature 1..16: note = Probe
  source 1..16: mol_type = other DNA
tggtagaattctcgcc

SEQ ID NO: 8169 - DNA, 17 bp, synthetic construct
  misc_feature 1..17: note = Probe
  source 1..17: mol_type = other DNA
tggtagaattctcgcct

SEQ ID NO: 8170 - DNA, 20 bp, synthetic construct
  misc_feature 1..20: note = Probe
  source 1..20: mol_type = other DNA
tggtagaattctcgcctgcc

SEQ ID NO: 8171 - DNA, 23 bp, synthetic construct
  misc_feature 1..23: note = Probe
  source 1..23: mol_type = other DNA
tggtagaattctcgcctgccacg

SEQ ID NO: 8172 - DNA, 24 bp, synthetic construct
  misc_feature 1..24: note = Probe
  source 1..24: mol_type = other DNA
tggtagaattctcgcctgccacgc

SEQ ID NO: 8173 - DNA, 29 bp, synthetic construct
  misc_feature 1..29: note = Probe
  source 1..29: mol_type = other DNA
tggtatagtggtgagcatagctgccttcc

SEQ ID NO: 8174 - DNA, 32 bp, synthetic construct
  misc_feature 1..32: note = Probe
  source 1..32: mol_type = other DNA
tggtatagtggtgagcatagctgccttccaag

SEQ ID NO: 8175 - DNA, 38 bp, synthetic construct
  misc_feature 1..38: note = Probe
  source 1..38: mol_type = other DNA
tggtatatagtttaaacaaaacgaatgatttcgactca

SEQ ID NO: 8176 - DNA, 43 bp, synthetic construct
  misc_feature 1..43: note = Probe
  source 1..43: mol_type = other DNA
tggtatatagtttaaacaaaacgaatgatttcgactcattaaa

SEQ ID NO: 8177 - DNA, 23 bp, synthetic construct
  misc_feature 1..23: note = Probe
  source 1..23: mol_type = other DNA
tggtcgtggttgtagtccgtgcg

SEQ ID NO: 8178 - DNA, 29 bp, synthetic construct
  misc_feature 1..29: note = Probe
  source 1..29: mol_type = other DNA
tggtcgtggttgtagtccgtgcgagaata

SEQ ID NO: 8179 - DNA, 31 bp, synthetic construct
  misc_feature 1..31: note = Probe
  source 1..31: mol_type = other DNA
tggtcgtggttgtagtccgtgcgagaataat

SEQ ID NO: 8180 - DNA, 32 bp, synthetic construct
  misc_feature 1..32: note = Probe
  source 1..32: mol_type = other DNA
tggtcgtggttgtagtccgtgcgagaataatg

SEQ ID NO: 8181 - DNA, 20 bp, synthetic construct
  misc_feature 1..20: note = Probe
  source 1..20: mol_type = other DNA
tggtctaaggcgccagactc

SEQ ID NO: 8182 - DNA, 23 bp, synthetic construct
  misc_feature 1..23: note = Probe
  source 1..23: mol_type = other DNA
tggtctagtggttaggattcggc

SEQ ID NO: 8183 - DNA, 28 bp, synthetic construct
  misc_feature 1..28: note = Probe
  source 1..28: mol_type = other DNA
tggtctagtggttaggattcggcgctct

SEQ ID NO: 8184 - DNA, 25 bp, synthetic construct
  misc_feature 1..25: note = Probe
  source 1..25: mol_type = other DNA
tggtgagtatccccgcctgtcacgc

SEQ ID NO: 8185 - DNA, 29 bp, synthetic construct
  misc_feature 1..29: note = Probe
  source 1..29: mol_type = other DNA
tggtggagttaaagactttttctctgatt

SEQ ID NO: 8186 - DNA, 32 bp, synthetic construct
  misc_feature 1..32: note = Probe
  source 1..32: mol_type = other DNA
tggtggagttaaagactttttctctgatttgt

SEQ ID NO: 8187 - DNA, 32 bp, synthetic construct
  misc_feature 1..32: note = Probe
  source 1..32: mol_type = other DNA
tggtggtctagtggctaggattcggcgctttc

SEQ ID NO: 8188 - DNA, 27 bp, synthetic construct
  misc_feature 1..27: note = Probe
  source 1..27: mol_type = other DNA
tggtggtctagtggttaggattcggcg

SEQ ID NO: 8189 - DNA, 29 bp, synthetic construct
  misc_feature 1..29: note = Probe
  source 1..29: mol_type = other DNA
tggtggtctagtggttaggattcggcgct

SEQ ID NO: 8190 - DNA, 33 bp, synthetic construct
  misc_feature 1..33: note = Probe
  source 1..33: mol_type = other DNA
tggtggtctagtggttaggattcggcgctctca

SEQ ID NO: 8191 - DNA, 25 bp, synthetic construct
  misc_feature 1..25: note = Probe
  source 1..25: mol_type = other DNA
tggtggttcagtggtagaattctcg

SEQ ID NO: 8192 - DNA, 26 bp, synthetic construct
  misc_feature 1..26: note = Probe
  source 1..26: mol_type = other DNA
tggtggttcagtggtagaattctcgc

SEQ ID NO: 8193 - DNA, 27 bp, synthetic construct
  misc_feature 1..27: note = Probe
  source 1..27: mol_type = other DNA
tggtggttcagtggtagaattctcgcc

SEQ ID NO: 8194 - DNA, 28 bp, synthetic construct
  misc_feature 1..28: note = Probe
  source 1..28: mol_type = other DNA
tggtggttcagtggtagaattctcgcct

SEQ ID NO: 8195 - DNA, 29 bp, synthetic construct
  misc_feature 1..29: note = Probe
  source 1..29: mol_type = other DNA
tggtggttcagtggtagaattctcgcctg

SEQ ID NO: 8196 - DNA, 30 bp, synthetic construct
  misc_feature 1..30: note = Probe
  source 1..30: mol_type = other DNA
tggtggttcagtggtagaattctcgcctgc

SEQ ID NO: 8197 - DNA, 31 bp, synthetic construct
  misc_feature 1..31: note = Probe
  source 1..31: mol_type = other DNA
tggtggttcagtggtagaattctcgcctgcc

SEQ ID NO: 8198 - DNA, 50 bp, synthetic construct
  misc_feature 1..50: note = Probe
  source 1..50: mol_type = other DNA
tggtggttcagtggtagaattctcgcctgccacgcgggaggcccgggttt

SEQ ID NO: 8199 - DNA, 23 bp, synthetic construct
  misc_feature 1..23: note = Probe
  source 1..23: mol_type = other DNA
tggtgtagtggtatcatgcaaga

SEQ ID NO: 8200 - DNA, 28 bp, synthetic construct
  misc_feature 1..28: note = Probe
  source 1..28: mol_type = other DNA
tggtgtagtggtatcatgcaagattccc

SEQ ID NO: 8201 - DNA, 24 bp, synthetic construct
  misc_feature 1..24: note = Probe
  source 1..24: mol_type = other DNA
tggttaggattcggcgctctcacc

SEQ ID NO: 8202 - DNA, 16 bp, synthetic construct
  misc_feature 1..16: note = Probe
  source 1..16: mol_type = other DNA
tggttagtactctgcg

SEQ ID NO: 8203 - DNA, 20 bp, synthetic construct
  misc_feature 1..20: note = Probe
  source 1..20: mol_type = other DNA
tggttagtactctgcgttgt

SEQ ID NO: 8204 - DNA, 24 bp, synthetic construct
  misc_feature 1..24: note = Probe
  source 1..24: mol_type = other DNA
tggttatacccttcccgtactaat

SEQ ID NO: 8205 - DNA, 25 bp, synthetic construct
  misc_feature 1..25: note = Probe
  source 1..25: mol_type = other DNA
tggttatacccttcccgtactaatt

SEQ ID NO: 8206 - DNA, 17 bp, synthetic construct
  misc_feature 1..17: note = Probe
  source 1..17: mol_type = other DNA
tggttatcacgttcgcc

SEQ ID NO: 8207 - DNA, 26 bp, synthetic construct
  misc_feature 1..26: note = Probe
  source 1..26: mol_type = other DNA
tggttcaaatccgggtgccccctcaa

SEQ ID NO: 8208 - DNA, 25 bp, synthetic construct
  misc_feature 1..25: note = Probe
  source 1..25: mol_type = other DNA
tggttcagtggtagaattctcgcct

SEQ ID NO: 8209 - DNA, 27 bp, synthetic construct
  misc_feature 1..27: note = Probe
  source 1..27: mol_type = other DNA
tggttcagtggtagaattctcgcctgc

SEQ ID NO: 8210 - DNA, 28 bp, synthetic construct
  misc_feature 1..28: note = Probe
  source 1..28: mol_type = other DNA
tggttcagtggtagaattctcgcctgcc

SEQ ID NO: 8211 - DNA, 41 bp, synthetic construct
  misc_feature 1..41: note = Probe
  source 1..41: mol_type = other DNA
tggttcagtggtagaattctcgcctgccacgcgggaggccc

SEQ ID NO: 8212 - DNA, 42 bp, synthetic construct
  misc_feature 1..42: note = Probe
  source 1..42: mol_type = other DNA
tggttcagtggtagaattctcgcctgccacgcgggaggcccg

SEQ ID NO: 8213 - DNA, 43 bp, synthetic construct
  misc_feature 1..43: note = Probe
  source 1..43: mol_type = other DNA
tggttcagtggtagaattctcgcctgccacgcgggaggcccgg

SEQ ID NO: 8214 - DNA, 50 bp, synthetic construct
  misc_feature 1..50: note = Probe
  source 1..50: mol_type = other DNA
tggttcagtggtagaattctcgcctgccacgcgggaggcccgggttcgat

SEQ ID NO: 8215 - DNA, 50 bp, synthetic construct
  misc_feature 1..50: note = Probe
  source 1..50: mol_type = other DNA
tggttcagtggtagaattctcgcctgccacgcgggaggcccgggtttgat

SEQ ID NO: 8216 - DNA, 23 bp, synthetic construct
  misc_feature 1..23: note = Probe
  source 1..23: mol_type = other DNA
tggttgtagtccgtgcgagaata

SEQ ID NO: 8217 - DNA, 24 bp, synthetic construct
  misc_feature 1..24: note = Probe
  source 1..24: mol_type = other DNA
tggttgtagtccgtgcgagaataa

SEQ ID NO: 8218 - DNA, 26 bp, synthetic construct
  misc_feature 1..26: note = Probe
  source 1..26: mol_type = other DNA
tggttgtagtccgtgcgagaataatg

SEQ ID NO: 8219 - DNA, 33 bp, synthetic construct
  misc_feature 1..33: note = Probe
  source 1..33: mol_type = other DNA
tgtaaaccggagatgaaaacctttttccaagga

SEQ ID NO: 8220 - DNA, 36 bp, synthetic construct
  misc_feature 1..36: note = Probe
  source 1..36: mol_type = other DNA
tgtaaaccggagatgaaaacctttttccaaggacaa

SEQ ID NO: 8221 - DNA, 37 bp, synthetic construct
  misc_feature 1..37: note = Probe
  source 1..37: mol_type = other DNA
tgtaaaccggagatgaaaacctttttccaaggacaaa

SEQ ID NO: 8222 - DNA, 38 bp, synthetic construct
  misc_feature 1..38: note = Probe
  source 1..38: mol_type = other DNA
tgtaaaccggagatgaaaacctttttccaaggacaaat

SEQ ID NO: 8223 - DNA, 40 bp, synthetic construct
  misc_feature 1..40: note = Probe
  source 1..40: mol_type = other DNA
tgtaaaccggagatgaaaacctttttccaaggacaaatca

SEQ ID NO: 8224 - DNA, 18 bp, synthetic construct
  misc_feature 1..18: note = Probe
  source 1..18: mol_type = other DNA
tgtaaatatagtttaacc

SEQ ID NO: 8225 - DNA, 29 bp, synthetic construct
  misc_feature 1..29: note = Probe
  source 1..29: mol_type = other DNA
tgtaaatatagtttaaccaaaacatcaga

SEQ ID NO: 8226 - DNA, 31 bp, synthetic construct
  misc_feature 1..31: note = Probe
  source 1..31: mol_type = other DNA
tgtaaatatagtttaaccaaaacatcagatt

SEQ ID NO: 8227 - DNA, 33 bp, synthetic construct
  misc_feature 1..33: note = Probe
  source 1..33: mol_type = other DNA
tgtaaatatagtttaaccaaaacatcagattgt

SEQ ID NO: 8228 - DNA, 34 bp, synthetic construct
  misc_feature 1..34: note = Probe
  source 1..34: mol_type = other DNA
tgtaaatatagtttaaccaaaacatcagattgtg

SEQ ID NO: 8229 - DNA, 38 bp, synthetic construct
  misc_feature 1..38: note = Probe
  source 1..38: mol_type = other DNA
tgtaaatatagtttaaccaaaacatcagattgtgaatc

SEQ ID NO: 8230 - DNA, 40 bp, synthetic construct
  misc_feature 1..40: note = Probe
  source 1..40: mol_type = other DNA
tgtaaatatagtttaaccaaaacatcagattgtgaatctg

SEQ ID NO: 8231 - DNA, 41 bp, synthetic construct
  misc_feature 1..41: note = Probe
  source 1..41: mol_type = other DNA
tgtaaatatagtttaaccaaaacatcagattgtgaatctga

SEQ ID NO: 8232 - DNA, 42 bp, synthetic construct
  misc_feature 1..42: note = Probe
  source 1..42: mol_type = other DNA
tgtaaatatagtttaaccaaaacatcagattgtgaatctgac

SEQ ID NO: 8233 - DNA, 43 bp, synthetic construct
  misc_feature 1..43: note = Probe
  source 1..43: mol_type = other DNA
tgtaaatatagtttaaccaaaacatcagattgtgaatctgaca

SEQ ID NO: 8234 - DNA, 44 bp, synthetic construct
  misc_feature 1..44: note = Probe
  source 1..44: mol_type = other DNA
tgtaaatatagtttaaccaaaacatcagattgtgaatctgacaa

SEQ ID NO: 8235 - DNA, 45 bp, synthetic construct
  misc_feature 1..45: note = Probe
  source 1..45: mol_type = other DNA
tgtaaatatagtttaaccaaaacatcagattgtgaatctgacaac

SEQ ID NO: 8236 - DNA, 46 bp, synthetic construct
  misc_feature 1..46: note = Probe
  source 1..46: mol_type = other DNA
tgtaaatatagtttaaccaaaacatcagattgtgaatctgacaaca

SEQ ID NO: 8237 - DNA, 49 bp, synthetic construct
  misc_feature 1..49: note = Probe
  source 1..49: mol_type = other DNA
tgtaaatatagtttaaccaaaacatcagattgtgaatctgacaacagag

SEQ ID NO: 8238 - DNA, 50 bp, synthetic construct
  misc_feature 1..50: note = Probe
  source 1..50: mol_type = other DNA
tgtaaatatagtttaaccaaaacatcagattgtgaatctgacaacagagg

SEQ ID NO: 8239 - DNA, 41 bp, synthetic construct
  misc_feature 1..41: note = Probe
  source 1..41: mol_type = other DNA
tgtaaatctaaagacaggggttaggcctctttttaccagct

SEQ ID NO: 8240 - DNA, 39 bp, synthetic construct
  misc_feature 1..39: note = Probe
  source 1..39: mol_type = other DNA
tgtacgaggtcccgggttcaatccccggcacctccacca

SEQ ID NO: 8241 - DNA, 24 bp, synthetic construct
  misc_feature 1..24: note = Probe
  source 1..24: mol_type = other DNA
tgtagcggttatcacattcgcctc

SEQ ID NO: 8242 - DNA, 25 bp, synthetic construct
  misc_feature 1..25: note = Probe
  source 1..25: mol_type = other DNA
tgtagcggttatcacattcgcctca

SEQ ID NO: 8243 - DNA, 39 bp, synthetic construct
  misc_feature 1..39: note = Probe
  source 1..39: mol_type = other DNA
tgtagcttaacacaaagcacccaacttacacttaggaga

SEQ ID NO: 8244 - DNA, 19 bp, synthetic construct
  misc_feature 1..19: note = Probe
  source 1..19: mol_type = other DNA
tgtagtccgtgcgagaata

SEQ ID NO: 8245 - DNA, 22 bp, synthetic construct
  misc_feature 1..22: note = Probe
  source 1..22: mol_type = other DNA
tgtagtccgtgcgagaataatg

SEQ ID NO: 8246 - DNA, 21 bp, synthetic construct
  misc_feature 1..21: note = Probe
  source 1..21: mol_type = other DNA
tgtagtggttatcacgttcgc

SEQ ID NO: 8247 - DNA, 23 bp, synthetic construct
  misc_feature 1..23: note = Probe
  source 1..23: mol_type = other DNA
tgtagtggttatcacgttcgcct

SEQ ID NO: 8248 - DNA, 39 bp, synthetic construct
  misc_feature 1..39: note = Probe
  source 1..39: mol_type = other DNA
tgtatgaggtcccgggttcgatccccggcatctccaagt

SEQ ID NO: 8249 - DNA, 15 bp, synthetic construct
  misc_feature 1..15: note = Probe
  source 1..15: mol_type = other DNA
tgtatgtctccatct

SEQ ID NO: 8250 - DNA, 29 bp, synthetic construct
  misc_feature 1..29: note = Probe
  source 1..29: mol_type = other DNA
tgtatgtctccatctattgatgagggtct

SEQ ID NO: 8251 - DNA, 31 bp, synthetic construct
  misc_feature 1..31: note = Probe
  source 1..31: mol_type = other DNA
tgtatgtctccatctattgatgagggtctta

SEQ ID NO: 8252 - DNA, 37 bp, synthetic construct
  misc_feature 1..37: note = Probe
  source 1..37: mol_type = other DNA
tgtatgtctccatctattgatgagggtcttactcttt

SEQ ID NO: 8253 - DNA, 21 bp, synthetic construct
  misc_feature 1..21: note = Probe
  source 1..21: mol_type = other DNA
tgtcacgcgggagaccggggt

SEQ ID NO: 8254 - DNA, 43 bp, synthetic construct
  misc_feature 1..43: note = Probe
  source 1..43: mol_type = other DNA
tgtcacgcgggagaccggggttcaattccccgacggggaggtg

SEQ ID NO: 8255 - DNA, 43 bp, synthetic construct
  misc_feature 1..43: note = Probe
  source 1..43: mol_type = other DNA
tgtcacgcgggagaccggggttcgattccccgacggggagagt

SEQ ID NO: 8256 - DNA, 50 bp, synthetic construct
  misc_feature 1..50: note = Probe
  source 1..50: mol_type = other DNA
tgtcacgcgggagaccggggttcgattccccgacggggaggaggcttaaa

SEQ ID NO: 8257 - DNA, 43 bp, synthetic construct
  misc_feature 1..43: note = Probe
  source 1..43: mol_type = other DNA
tgtcacgcgggagaccggggttcgattccccgacggggaggca

SEQ ID NO: 8258 - DNA, 49 bp, synthetic construct
  misc_feature 1..49: note = Probe
  source 1..49: mol_type = other DNA
tgtcacgcgggagaccggggttcgattccccgacggggaggcacagtaa

SEQ ID NO: 8259 - DNA, 50 bp, synthetic construct
  misc_feature 1..50: note = Probe
  source 1..50: mol_type = other DNA
tgtcacgcgggagaccggggttcgattccccgacggggaggcacagtaat

SEQ ID NO: 8260 - DNA, 30 bp, synthetic construct
  misc_feature 1..30: note = Probe
  source 1..30: mol_type = other DNA
tgtccttgtagtataaactaatacaccagt

SEQ ID NO: 8261 - DNA, 25 bp, synthetic construct
  misc_feature 1..25: note = Probe
  source 1..25: mol_type = other DNA
tgtctaacaacatggctttctcaac

SEQ ID NO: 8262 - DNA, 27 bp, synthetic construct
  misc_feature 1..27: note = Probe
  source 1..27: mol_type = other DNA
tgtgaatctgacaacagaggcttacga

SEQ ID NO: 8263 - DNA, 29 bp, synthetic construct
  misc_feature 1..29: note = Probe
  source 1..29: mol_type = other DNA
tgtgaatctgacaacagaggcttacgacc

SEQ ID NO: 8264 - DNA, 31 bp, synthetic construct
  misc_feature 1..31: note = Probe
  source 1..31: mol_type = other DNA
tgtgaatctgacaacagaggcttacgacccc

SEQ ID NO: 8265 - DNA, 32 bp, synthetic construct
  misc_feature 1..32: note = Probe
  source 1..32: mol_type = other DNA
tgtgaatctgacaacagaggcttacgacccct

SEQ ID NO: 8266 - DNA, 33 bp, synthetic construct
  misc_feature 1..33: note = Probe
  source 1..33: mol_type = other DNA
tgtgaatctgacaacagaggcttacgacccctt

SEQ ID NO: 8267 - DNA, 37 bp, synthetic construct
  misc_feature 1..37: note = Probe
  source 1..37: mol_type = other DNA
tgtgaatctgacaacagaggcttacgaccccttattt

SEQ ID NO: 8268 - DNA, 38 bp, synthetic construct
  misc_feature 1..38: note = Probe
  source 1..38: mol_type = other DNA
tgtgaatctgacaacagaggcttacgaccccttattta

SEQ ID NO: 8269 - DNA, 41 bp, synthetic construct
  misc_feature 1..41: note = Probe
  source 1..41: mol_type = other DNA
tgtgaatctgacaacagaggcttacgaccccttatttaccg

SEQ ID NO: 8270 - DNA, 42 bp, synthetic construct
  misc_feature 1..42: note = Probe
  source 1..42: mol_type = other DNA
tgtgaatctgacaacagaggcttacgaccccttatttaccga

SEQ ID NO: 8271 - DNA, 43 bp, synthetic construct
  misc_feature 1..43: note = Probe
  source 1..43: mol_type = other DNA
tgtgaatctgacaacagaggcttacgaccccttatttaccgag

SEQ ID NO: 8272 - DNA, 21 bp, synthetic construct
  misc_feature 1..21: note = Probe
  source 1..21: mol_type = other DNA
tgtgctccggagttacctcgt

SEQ ID NO: 8273 - DNA, 22 bp, synthetic construct
  misc_feature 1..22: note = Probe
  source 1..22: mol_type = other DNA
tgtgctccggagttacctcgtt

SEQ ID NO: 8274 - DNA, 23 bp, synthetic construct
  misc_feature 1..23: note = Probe
  source 1..23: mol_type = other DNA
tgtgctccggagttacctcgttt

SEQ ID NO: 8275 - DNA, 24 bp, synthetic construct
  misc_feature 1..24: note = Probe
  source 1..24: mol_type = other DNA
tgtgctccggagttacctcgtttt

SEQ ID NO: 8276 - DNA, 44 bp, synthetic construct
  misc_feature 1..44: note = Probe
  source 1..44: mol_type = other DNA
tgttaaccgaaaggttggtggttcgagcccacccagggacgcct

SEQ ID NO: 8277 - DNA, 43 bp, synthetic construct
  misc_feature 1..43: note = Probe
  source 1..43: mol_type = other DNA
tgttaactaagtgtttgtgggtttaagtcccattggtctagta

SEQ ID NO: 8278 - DNA, 44 bp, synthetic construct
  misc_feature 1..44: note = Probe
  source 1..44: mol_type = other DNA
tgttaactaagtgtttgtgggtttaagtcccattggtctagtaa

SEQ ID NO: 8279 - DNA, 25 bp, synthetic construct
  misc_feature 1..25: note = Probe
  source 1..25: mol_type = other DNA
tgttcgaatcacgtcggggtcaaac

SEQ ID NO: 8280 - DNA, 17 bp, synthetic construct
  misc_feature 1..17: note = Probe
  source 1..17: mol_type = other DNA
tgtttagacgggctcac

SEQ ID NO: 8281 - DNA, 18 bp, synthetic construct
  misc_feature 1..18: note = Probe
  source 1..18: mol_type = other DNA
tgtttagacgggctcaca

SEQ ID NO: 8282 - DNA, 19 bp, synthetic construct
  misc_feature 1..19: note = Probe
  source 1..19: mol_type = other DNA
tgtttagacgggctcacat

SEQ ID NO: 8283 - DNA, 20 bp, synthetic construct
  misc_feature 1..20: note = Probe
  source 1..20: mol_type = other DNA
tgtttagacgggctcacatc

SEQ ID NO: 8284 - DNA, 21 bp, synthetic construct
  misc_feature 1..21: note = Probe
  source 1..21: mol_type = other DNA
tgtttagacgggctcacatca

SEQ ID NO: 8285 - DNA, 26 bp, synthetic construct
  misc_feature 1..26: note = Probe
  source 1..26: mol_type = other DNA
tgtttagacgggctcacatcacccca

SEQ ID NO: 8286 - DNA, 27 bp, synthetic construct
  misc_feature 1..27: note = Probe
  source 1..27: mol_type = other DNA
tgtttagacgggctcacatcaccccat

SEQ ID NO: 8287 - DNA, 28 bp, synthetic construct
  misc_feature 1..28: note = Probe
  source 1..28: mol_type = other DNA
tgtttagacgggctcacatcaccccata

SEQ ID NO: 8288 - DNA, 34 bp, synthetic construct
  misc_feature 1..34: note = Probe
  source 1..34: mol_type = other DNA
tgtttagacgggctcacatcaccccataaacaaa

SEQ ID NO: 8289 - DNA, 35 bp, synthetic construct
  misc_feature 1..35: note = Probe
  source 1..35: mol_type = other DNA
tgtttagacgggctcacatcaccccataaacaaat

SEQ ID NO: 8290 - DNA, 36 bp, synthetic construct
  misc_feature 1..36: note = Probe
  source 1..36: mol_type = other DNA
tgtttagacgggctcacatcaccccataaacaaata

SEQ ID NO: 8291 - DNA, 23 bp, synthetic construct
  misc_feature 1..23: note = Probe
  source 1..23: mol_type = other DNA
tgtttgtgggtttaagtcccatt

SEQ ID NO: 8292 - DNA, 25 bp, synthetic construct
  misc_feature 1..25: note = Probe
  source 1..25: mol_type = other DNA
tgtttgtgggtttaagtcccattgg

SEQ ID NO: 8293 - DNA, 31 bp, synthetic construct
  misc_feature 1..31: note = Probe
  source 1..31: mol_type = other DNA
tgtttgtgggtttaagtcccattggtctagt

SEQ ID NO: 8294 - DNA, 32 bp, synthetic construct
  misc_feature 1..32: note = Probe
  source 1..32: mol_type = other DNA
tgtttgtgggtttaagtcccattggtctagta

SEQ ID NO: 8295 - DNA, 43 bp, synthetic construct
  misc_feature 1..43: note = Probe
  source 1..43: mol_type = other DNA
ttaaaactttacagtcagaggttcaattcctcttcttaacaac

SEQ ID NO: 8296 - DNA, 50 bp, synthetic construct
  misc_feature 1..50: note = Probe
  source 1..50: mol_type = other DNA
ttaaacaaaacgaatgatttcgactcattaaattatgataatcatattta

SEQ ID NO: 8297 - DNA, 21 bp, synthetic construct
  misc_feature 1..21: note = Probe
  source 1..21: mol_type = other DNA
ttaaacccccttatttctagg

SEQ ID NO: 8298 - DNA, 39 bp, synthetic construct
  misc_feature 1..39: note = Probe
  source 1..39: mol_type = other DNA
ttaaagattaagagaaccaacacctctttacagtgaaat

SEQ ID NO: 8299 - DNA, 17 bp, synthetic construct
  misc_feature 1..17: note = Probe
  source 1..17: mol_type = other DNA
ttaacacaaagcaccca

SEQ ID NO: 8300 - DNA, 50 bp, synthetic construct
  misc_feature 1..50: note = Probe
  source 1..50: mol_type = other DNA
ttaacacaaagcacccaacttacacttaggagatttcaacttaacttgac

SEQ ID NO: 8301 - DNA, 31 bp, synthetic construct
  misc_feature 1..31: note = Probe
  source 1..31: mol_type = other DNA
ttaaccaaaacatcagattgtgaatctgaca

SEQ ID NO: 8302 - DNA, 32 bp, synthetic construct
  misc_feature 1..32: note = Probe
  source 1..32: mol_type = other DNA
ttaaccaaaacatcagattgtgaatctgacaa

SEQ ID NO: 8303 - DNA, 33 bp, synthetic construct
  misc_feature 1..33: note = Probe
  source 1..33: mol_type = other DNA
ttaaccaaaacatcagattgtgaatctgacaac

SEQ ID NO: 8304 - DNA, 34 bp, synthetic construct
  misc_feature 1..34: note = Probe
  source 1..34: mol_type = other DNA
ttaaccaaaacatcagattgtgaatctgacaaca

SEQ ID NO: 8305 - DNA, 40 bp, synthetic construct
  misc_feature 1..40: note = Probe
  source 1..40: mol_type = other DNA
ttaaccaaaacatcagattgtgaatctgacaacagaggct

SEQ ID NO: 8306 - DNA, 42 bp, synthetic construct
  misc_feature 1..42: note = Probe
  source 1..42: mol_type = other DNA
ttaaccaaaacatcagattgtgaatctgacaacagaggctta

SEQ ID NO: 8307 - DNA, 40 bp, synthetic construct
  misc_feature 1..40: note = Probe
  source 1..40: mol_type = other DNA
ttaaccgaaaggttggtggttcgagcccacccagggacgc

SEQ ID NO: 8308 - DNA, 41 bp, synthetic construct
  misc_feature 1..41: note = Probe
  source 1..41: mol_type = other DNA
ttaaccgaaaggttggtggttcgagcccacccagggacgcg

SEQ ID NO: 8309 - DNA, 41 bp, synthetic construct
  misc_feature 1..41: note = Probe
  source 1..41: mol_type = other DNA
ttaaccgaaaggttggtggttcgagcccacccagggacgct

SEQ ID NO: 8310 - DNA, 49 bp, synthetic construct
  misc_feature 1..49: note = Probe
  source 1..49: mol_type = other DNA
ttaaccttttaagttaaagattaagagaaccaacacctctttacagtga

SEQ ID NO: 8311 - DNA, 50 bp, synthetic construct
  misc_feature 1..50: note = Probe
  source 1..50: mol_type = other DNA
ttaaccttttaagttaaagattaagagaaccaacacctctttacagtgaa

SEQ ID NO: 8312 - DNA, 22 bp, synthetic construct
  misc_feature 1..22: note = Probe
  source 1..22: mol_type = other DNA
ttaactaagtgtttgtgggttt

SEQ ID NO: 8313 - DNA, 23 bp, synthetic construct
  misc_feature 1..23: note = Probe
  source 1..23: mol_type = other DNA
ttaactaagtgtttgtgggttta

SEQ ID NO: 8314 - DNA, 32 bp, synthetic construct
  misc_feature 1..32: note = Probe
  source 1..32: mol_type = other DNA
ttaactaagtgtttgtgggtttaagtcccatt

SEQ ID NO: 8315 - DNA, 34 bp, synthetic construct
  misc_feature 1..34: note = Probe
  source 1..34: mol_type = other DNA
ttaactaagtgtttgtgggtttaagtcccattgg

SEQ ID NO: 8316 - DNA, 39 bp, synthetic construct
  misc_feature 1..39: note = Probe
  source 1..39: mol_type = other DNA
ttaactaagtgtttgtgggtttaagtcccattggtctag

SEQ ID NO: 8317 - DNA, 40 bp, synthetic construct
  misc_feature 1..40: note = Probe
  source 1..40: mol_type = other DNA
ttaactaagtgtttgtgggtttaagtcccattggtctagt

SEQ ID NO: 8318 - DNA, 41 bp, synthetic construct
  misc_feature 1..41: note = Probe
  source 1..41: mol_type = other DNA
ttaactaagtgtttgtgggtttaagtcccattggtctagta

SEQ ID NO: 8319 - DNA, 42 bp, synthetic construct
  misc_feature 1..42: note = Probe
  source 1..42: mol_type = other DNA
ttaactaagtgtttgtgggtttaagtcccattggtctagtaa

SEQ ID NO: 8320 - DNA, 43 bp, synthetic construct
  misc_feature 1..43: note = Probe
  source 1..43: mol_type = other DNA
ttaactaagtgtttgtgggtttaagtcccattggtctagtaag

SEQ ID NO: 8321 - DNA, 44 bp, synthetic construct
  misc_feature 1..44: note = Probe
  source 1..44: mol_type = other DNA
ttaactaagtgtttgtgggtttaagtcccattggtctagtaagg

SEQ ID NO: 8322 - DNA, 17 bp, synthetic construct
  misc_feature 1..17: note = Probe
  source 1..17: mol_type = other DNA
ttaactagttttgacaa

SEQ ID NO: 8323 - DNA, 18 bp, synthetic construct
  misc_feature 1..18: note = Probe
  source 1..18: mol_type = other DNA
ttaacttgaccgctctga

SEQ ID NO: 8324 - DNA, 19 bp, synthetic construct
  misc_feature 1..19: note = Probe
  source 1..19: mol_type = other DNA
ttaacttgaccgctctgag

SEQ ID NO: 8325 - DNA, 21 bp, synthetic construct
  misc_feature 1..21: note = Probe
  source 1..21: mol_type = other DNA
ttaacttgaccgctctgagct

SEQ ID NO: 8326 - DNA, 32 bp, synthetic construct
  misc_feature 1..32: note = Probe
  source 1..32: mol_type = other DNA
ttaagagaaccaacacctctttacagtgaaat

SEQ ID NO: 8327 - DNA, 43 bp, synthetic construct
  misc_feature 1..43: note = Probe
  source 1..43: mol_type = other DNA
ttaagttaaagattaagagaaccaacacctctttacagtgaaa

SEQ ID NO: 8328 - DNA, 44 bp, synthetic construct
  misc_feature 1..44: note = Probe
  source 1..44: mol_type = other DNA
ttaagttaaagattaagagaaccaacacctctttacagtgaaat

SEQ ID NO: 8329 - DNA, 44 bp, synthetic construct
  misc_feature 1..44: note = Probe
  source 1..44: mol_type = other DNA
ttacacgcagaaggtcctgggttcgagccccagtggaaccacgg

SEQ ID NO: 8330 - DNA, 19 bp, synthetic construct
  misc_feature 1..19: note = Probe
  source 1..19: mol_type = other DNA
ttacacttaggagatttca

SEQ ID NO: 8331 - DNA, 23 bp, synthetic construct
  misc_feature 1..23: note = Probe
  source 1..23: mol_type = other DNA
ttacacttaggagatttcaactt

SEQ ID NO: 8332 - DNA, 31 bp, synthetic construct
  misc_feature 1..31: note = Probe
  source 1..31: mol_type = other DNA
ttacacttaggagatttcaacttaacttgac

SEQ ID NO: 8333 - DNA, 33 bp, synthetic construct
  misc_feature 1..33: note = Probe
  source 1..33: mol_type = other DNA
ttacacttaggagatttcaacttaacttgaccg

SEQ ID NO: 8334 - DNA, 35 bp, synthetic construct
  misc_feature 1..35: note = Probe
  source 1..35: mol_type = other DNA
ttacacttaggagatttcaacttaacttgaccgct

SEQ ID NO: 8335 - DNA, 37 bp, synthetic construct
  misc_feature 1..37: note = Probe
  source 1..37: mol_type = other DNA
ttacacttaggagatttcaacttaacttgaccgctct

SEQ ID NO: 8336 - DNA, 39 bp, synthetic construct
  misc_feature 1..39: note = Probe
  source 1..39: mol_type = other DNA
ttacacttaggagatttcaacttaacttgaccgctctga

SEQ ID NO: 8337 - DNA, 40 bp, synthetic construct
  misc_feature 1..40: note = Probe
  source 1..40: mol_type = other DNA
ttacacttaggagatttcaacttaacttgaccgctctgag

SEQ ID NO: 8338 - DNA, 41 bp, synthetic construct
  misc_feature 1..41: note = Probe
  source 1..41: mol_type = other DNA
ttacacttaggagatttcaacttaacttgaccgctctgagc

SEQ ID NO: 8339 - DNA, 42 bp, synthetic construct
  misc_feature 1..42: note = Probe
  source 1..42: mol_type = other DNA
ttacacttaggagatttcaacttaacttgaccgctctgagct

SEQ ID NO: 8340 - DNA, 43 bp, synthetic construct
  misc_feature 1..43: note = Probe
  source 1..43: mol_type = other DNA
ttacacttaggagatttcaacttaacttgaccgctctgagcta

SEQ ID NO: 8341 - DNA, 44 bp, synthetic construct
  misc_feature 1..44: note = Probe
  source 1..44: mol_type = other DNA
ttacacttaggagatttcaacttaacttgaccgctctgagctaa

SEQ ID NO: 8342 - DNA, 49 bp, synthetic construct
  misc_feature 1..49: note = Probe
  source 1..49: mol_type = other DNA
ttacacttaggagatttcaacttaacttgaccgctctgagctaaaccta

SEQ ID NO: 8343 - DNA, 50 bp, synthetic construct
  misc_feature 1..50: note = Probe
  source 1..50: mol_type = other DNA
ttacacttaggagatttcaacttaacttgaccgctctgagctaaacctag

SEQ ID NO: 8344 - DNA, 28 bp, synthetic construct
  misc_feature 1..28: note = Probe
  source 1..28: mol_type = other DNA
ttacagtcagaggttcaattcctcttct

SEQ ID NO: 8345 - DNA, 29 bp, synthetic construct
  misc_feature 1..29: note = Probe
  source 1..29: mol_type = other DNA
ttacagtcagaggttcaattcctcttctt

SEQ ID NO: 8346 - DNA, 32 bp, synthetic construct
  misc_feature 1..32: note = Probe
  source 1..32: mol_type = other DNA
ttacagtcagaggttcaattcctcttcttaac

SEQ ID NO: 8347 - DNA, 37 bp, synthetic construct
  misc_feature 1..37: note = Probe
  source 1..37: mol_type = other DNA
ttactttgatagagtaaataataggagcttaaacccc

SEQ ID NO: 8348 - DNA, 39 bp, synthetic construct
  misc_feature 1..39: note = Probe
  source 1..39: mol_type = other DNA
ttactttgatagagtaaataataggagcttaaaccccct

SEQ ID NO: 8349 - DNA, 49 bp, synthetic construct
  misc_feature 1..49: note = Probe
  source 1..49: mol_type = other DNA
ttactttgatagagtaaataataggagcttaaacccccttatttctagg

SEQ ID NO: 8350 - DNA, 50 bp, synthetic construct
  misc_feature 1..50: note = Probe
  source 1..50: mol_type = other DNA
ttactttgatagagtaaataataggagcttaaacccccttatttctagga

SEQ ID NO: 8351 - DNA, 23 bp, synthetic construct
  misc_feature 1..23: note = Probe
  source 1..23: mol_type = other DNA
ttagacgggctcacatcacccca

SEQ ID NO: 8352 - DNA, 24 bp, synthetic construct
  misc_feature 1..24: note = Probe
  source 1..24: mol_type = other DNA
ttagacgggctcacatcaccccat

SEQ ID NO: 8353 - DNA, 25 bp, synthetic construct
  misc_feature 1..25: note = Probe
  source 1..25: mol_type = other DNA
ttagacgggctcacatcaccccata

SEQ ID NO: 8354 - DNA, 27 bp, synthetic construct
  misc_feature 1..27: note = Probe
  source 1..27: mol_type = other DNA
ttagacgggctcacatcaccccataaa

SEQ ID NO: 8355 - DNA, 28 bp, synthetic construct
  misc_feature 1..28: note = Probe
  source 1..28: mol_type = other DNA
ttagacgggctcacatcaccccataaac

SEQ ID NO: 8356 - DNA, 29 bp, synthetic construct
  misc_feature 1..29: note = Probe
  source 1..29: mol_type = other DNA
ttagacgggctcacatcaccccataaaca

SEQ ID NO: 8357 - DNA, 30 bp, synthetic construct
  misc_feature 1..30: note = Probe
  source 1..30: mol_type = other DNA
ttagacgggctcacatcaccccataaacaa

SEQ ID NO: 8358 - DNA, 31 bp, synthetic construct
  misc_feature 1..31: note = Probe
  source 1..31: mol_type = other DNA
ttagacgggctcacatcaccccataaacaaa

SEQ ID NO: 8359 - DNA, 32 bp, synthetic construct
  misc_feature 1..32: note = Probe
  source 1..32: mol_type = other DNA
ttagacgggctcacatcaccccataaacaaat

SEQ ID NO: 8360 - DNA, 33 bp, synthetic construct
  misc_feature 1..33: note = Probe
  source 1..33: mol_type = other DNA
ttagacgggctcacatcaccccataaacaaata

SEQ ID NO: 8361 - DNA, 22 bp, synthetic construct
  misc_feature 1..22: note = Probe
  source 1..22: mol_type = other DNA
ttagagccagactgcctgggtt

SEQ ID NO: 8362 - DNA, 24 bp, synthetic construct
  misc_feature 1..24: note = Probe
  source 1..24: mol_type = other DNA
ttagagccagactgcctgggtttg

SEQ ID NO: 8363 - DNA, 25 bp, synthetic construct
  misc_feature 1..25: note = Probe
  source 1..25: mol_type = other DNA
ttagagccagactgcctgggtttga

SEQ ID NO: 8364 - DNA, 37 bp, synthetic construct
  misc_feature 1..37: note = Probe
  source 1..37: mol_type = other DNA
ttagcattaaccttttaagttaaagattaagagaacc

SEQ ID NO: 8365 - DNA, 50 bp, synthetic construct
  misc_feature 1..50: note = Probe
  source 1..50: mol_type = other DNA
ttagctgttaactaagtgtttgtgggtttaagtcccattggtctagtaag

SEQ ID NO: 8366 - DNA, 29 bp, synthetic construct
  misc_feature 1..29: note = Probe
  source 1..29: mol_type = other DNA
ttaggagatttcaacttaacttgaccgct

SEQ ID NO: 8367 - DNA, 30 bp, synthetic construct
  misc_feature 1..30: note = Probe
  source 1..30: mol_type = other DNA
ttaggagatttcaacttaacttgaccgctc

SEQ ID NO: 8368 - DNA, 31 bp, synthetic construct
  misc_feature 1..31: note = Probe
  source 1..31: mol_type = other DNA
ttaggagatttcaacttaacttgaccgctct

SEQ ID NO: 8369 - DNA, 32 bp, synthetic construct
  misc_feature 1..32: note = Probe
  source 1..32: mol_type = other DNA
ttaggagatttcaacttaacttgaccgctctg

SEQ ID NO: 8370 - DNA, 33 bp, synthetic construct
  misc_feature 1..33: note = Probe
  source 1..33: mol_type = other DNA
ttaggagatttcaacttaacttgaccgctctga

SEQ ID NO: 8371 - DNA, 34 bp, synthetic construct
  misc_feature 1..34: note = Probe
  source 1..34: mol_type = other DNA
ttaggagatttcaacttaacttgaccgctctgag

SEQ ID NO: 8372 - DNA, 35 bp, synthetic construct
  misc_feature 1..35: note = Probe
  source 1..35: mol_type = other DNA
ttaggagatttcaacttaacttgaccgctctgagc

SEQ ID NO: 8373 - DNA, 36 bp, synthetic construct
  misc_feature 1..36: note = Probe
  source 1..36: mol_type = other DNA
ttaggagatttcaacttaacttgaccgctctgagct

SEQ ID NO: 8374 - DNA, 19 bp, synthetic construct
  misc_feature 1..19: note = Probe
  source 1..19: mol_type = other DNA
ttagggtgcgagaggtccc

SEQ ID NO: 8375 - DNA, 20 bp, synthetic construct
  misc_feature 1..20: note = Probe
  source 1..20: mol_type = other DNA
ttagggtgcgagaggtcccg

SEQ ID NO: 8376 - DNA, 21 bp, synthetic construct
  misc_feature 1..21: note = Probe
  source 1..21: mol_type = other DNA
ttagggtgcgagaggtcccgg

SEQ ID NO: 8377 - DNA, 50 bp, synthetic construct
  misc_feature 1..50: note = Probe
  source 1..50: mol_type = other DNA
ttagggtgcttagctgttaactaagtgtttgtgggtttaagtcccattgg

SEQ ID NO: 8378 - DNA, 23 bp, synthetic construct
  misc_feature 1..23: note = Probe
  source 1..23: mol_type = other DNA
ttcaaatcacgtcggggtcaaca

SEQ ID NO: 8379 - DNA, 23 bp, synthetic construct
  misc_feature 1..23: note = Probe
  source 1..23: mol_type = other DNA
ttcaaatcccggacgagccccct

SEQ ID NO: 8380 - DNA, 23 bp, synthetic construct
  misc_feature 1..23: note = Probe
  source 1..23: mol_type = other DNA
ttcaacttaacttgaccgctctg

SEQ ID NO: 8381 - DNA, 24 bp, synthetic construct
  misc_feature 1..24: note = Probe
  source 1..24: mol_type = other DNA
ttcaacttaacttgaccgctctga

SEQ ID NO: 8382 - DNA, 25 bp, synthetic construct
  misc_feature 1..25: note = Probe
  source 1..25: mol_type = other DNA
ttcaacttaacttgaccgctctgag

SEQ ID NO: 8383 - DNA, 26 bp, synthetic construct
  misc_feature 1..26: note = Probe
  source 1..26: mol_type = other DNA
ttcaacttaacttgaccgctctgagc

SEQ ID NO: 8384 - DNA, 27 bp, synthetic construct
  misc_feature 1..27: note = Probe
  source 1..27: mol_type = other DNA
ttcaacttaacttgaccgctctgagct

SEQ ID NO: 8385 - DNA, 23 bp, synthetic construct
  misc_feature 1..23: note = Probe
  source 1..23: mol_type = other DNA
ttcaagtccctgttcgggcggca

SEQ ID NO: 8386 - DNA, 23 bp, synthetic construct
  misc_feature 1..23: note = Probe
  source 1..23: mol_type = other DNA
ttcaatccccggcacctccacca

SEQ ID NO: 8387 - DNA, 23 bp, synthetic construct
  misc_feature 1..23: note = Probe
  source 1..23: mol_type = other DNA
ttcaattccccgacggggaggtg

SEQ ID NO: 8388 - DNA, 23 bp, synthetic construct
  misc_feature 1..23: note = Probe
  source 1..23: mol_type = other DNA
ttcaattcccggtcagggaacca

SEQ ID NO: 8389 - DNA, 29 bp, synthetic construct
  misc_feature 1..29: note = Probe
  source 1..29: mol_type = other DNA
ttcagtggtagaattctcgcctgccacgc

SEQ ID NO: 8390 - DNA, 23 bp, synthetic construct
  misc_feature 1..23: note = Probe
  source 1..23: mol_type = other DNA
ttcagttgatgcagagtggggtt

SEQ ID NO: 8391 - DNA, 24 bp, synthetic construct
  misc_feature 1..24: note = Probe
  source 1..24: mol_type = other DNA
ttcagttgatgcagagtggggttt

SEQ ID NO: 8392 - DNA, 28 bp, synthetic construct
  misc_feature 1..28: note = Probe
  source 1..28: mol_type = other DNA
ttcagttgatgcagagtggggttttgca

SEQ ID NO: 8393 - DNA, 31 bp, synthetic construct
  misc_feature 1..31: note = Probe
  source 1..31: mol_type = other DNA
ttcagttgatgcagagtggggttttgcagtc

SEQ ID NO: 8394 - DNA, 33 bp, synthetic construct
  misc_feature 1..33: note = Probe
  source 1..33: mol_type = other DNA
ttcagttgatgcagagtggggttttgcagtcct

SEQ ID NO: 8395 - DNA, 34 bp, synthetic construct
  misc_feature 1..34: note = Probe
  source 1..34: mol_type = other DNA
ttcagttgatgcagagtggggttttgcagtcctt

SEQ ID NO: 8396 - DNA, 36 bp, synthetic construct
  misc_feature 1..36: note = Probe
  source 1..36: mol_type = other DNA
ttcagttgatgcagagtggggttttgcagtccttag

SEQ ID NO: 8397 - DNA, 37 bp, synthetic construct
  misc_feature 1..37: note = Probe
  source 1..37: mol_type = other DNA
ttcagttgatgcagagtggggttttgcagtccttagc

SEQ ID NO: 8398 - DNA, 38 bp, synthetic construct
  misc_feature 1..38: note = Probe
  source 1..38: mol_type = other DNA
ttcagttgatgcagagtggggttttgcagtccttagct

SEQ ID NO: 8399 - DNA, 39 bp, synthetic construct
  misc_feature 1..39: note = Probe
  source 1..39: mol_type = other DNA
ttcagttgatgcagagtggggttttgcagtccttagctg

SEQ ID NO: 8400 - DNA, 40 bp, synthetic construct
  misc_feature 1..40: note = Probe
  source 1..40: mol_type = other DNA
ttcagttgatgcagagtggggttttgcagtccttagctgt

SEQ ID NO: 8401 - DNA, 41 bp, synthetic construct
  misc_feature 1..41: note = Probe
  source 1..41: mol_type = other DNA
ttcatatcattggtcgtggttgtagtccgtgcgagaataat

SEQ ID NO: 8402 - DNA, 42 bp, synthetic construct
  misc_feature 1..42: note = Probe
  source 1..42: mol_type = other DNA
ttcatatcattggtcgtggttgtagtccgtgcgagaataatg

SEQ ID NO: 8403 - DNA, 16 bp, synthetic construct
  misc_feature 1..16: note = Probe
  source 1..16: mol_type = other DNA
ttcatattgaattgca

SEQ ID NO: 8404 - DNA, 49 bp, synthetic construct
  misc_feature 1..49: note = Probe
  source 1..49: mol_type = other DNA
ttcatattgaattgcaaattcgaagaagcagcttcaaacctgccggggc

SEQ ID NO: 8405 - DNA, 50 bp, synthetic construct
  misc_feature 1..50: note = Probe
  source 1..50: mol_type = other DNA
ttcatattgaattgcaaattcgaagaagcagcttcaaacctgccggggct

SEQ ID NO: 8406 - DNA, 41 bp, synthetic construct
  misc_feature 1..41: note = Probe
  source 1..41: mol_type = other DNA
ttccaattaactagttttgacaacattcaaaaaagagtaat

SEQ ID NO: 8407 - DNA, 42 bp, synthetic construct
  misc_feature 1..42: note = Probe
  source 1..42: mol_type = other DNA
ttccaattaactagttttgacaacattcaaaaaagagtaata

SEQ ID NO: 8408 - DNA, 31 bp, synthetic construct
  misc_feature 1..31: note = Probe
  source 1..31: mol_type = other DNA
ttccatagtgtagtggttatcacgtctgctt

SEQ ID NO: 8409 - DNA, 23 bp, synthetic construct
  misc_feature 1..23: note = Probe
  source 1..23: mol_type = other DNA
ttcccattcttgcgacccgggtt

SEQ ID NO: 8410 - DNA, 24 bp, synthetic construct
  misc_feature 1..24: note = Probe
  source 1..24: mol_type = other DNA
ttcccattcttgcgacccgggttc

SEQ ID NO: 8411 - DNA, 37 bp, synthetic construct
  misc_feature 1..37: note = Probe
  source 1..37: mol_type = other DNA
ttcccattcttgcgacccgggttcgattcccgggcgg

SEQ ID NO: 8412 - DNA, 44 bp, synthetic construct
  misc_feature 1..44: note = Probe
  source 1..44: mol_type = other DNA
ttcccattcttgcgacccgggttcgattcccgggcggcgcactt

SEQ ID NO: 8413 - DNA, 17 bp, synthetic construct
  misc_feature 1..17: note = Probe
  source 1..17: mol_type = other DNA
ttccccgcacaggttcg

SEQ ID NO: 8414 - DNA, 17 bp, synthetic construct
  misc_feature 1..17: note = Probe
  source 1..17: mol_type = other DNA
ttcccggcggcgggaga

SEQ ID NO: 8415 - DNA, 18 bp, synthetic construct
  misc_feature 1..18: note = Probe
  source 1..18: mol_type = other DNA
ttcccggcggcgggagaa

SEQ ID NO: 8416 - DNA, 17 bp, synthetic construct
  misc_feature 1..17: note = Probe
  source 1..17: mol_type = other DNA
ttcccgggcggcgcact

SEQ ID NO: 8417 - DNA, 24 bp, synthetic construct
  misc_feature 1..24: note = Probe
  source 1..24: mol_type = other DNA
ttccctggtggtctagtggttagg

SEQ ID NO: 8418 - DNA, 17 bp, synthetic construct
  misc_feature 1..17: note = Probe
  source 1..17: mol_type = other DNA
ttccggctcgaaggact

SEQ ID NO: 8419 - DNA, 32 bp, synthetic construct
  misc_feature 1..32: note = Probe
  source 1..32: mol_type = other DNA
ttccgtagtgtagcggttatcacattcgcctc

SEQ ID NO: 8420 - DNA, 33 bp, synthetic construct
  misc_feature 1..33: note = Probe
  source 1..33: mol_type = other DNA
ttccgtagtgtagcggttatcacattcgcctca

SEQ ID NO: 8421 - DNA, 31 bp, synthetic construct
  misc_feature 1..31: note = Probe
  source 1..31: mol_type = other DNA
ttccgtagtgtagtggtcatcacgttcgcct

SEQ ID NO: 8422 - DNA, 33 bp, synthetic construct
  misc_feature 1..33: note = Probe
  source 1..33: mol_type = other DNA
ttccgtagtgtagtggtcatcacgttcgcctaa

SEQ ID NO: 8423 - DNA, 26 bp, synthetic construct
  misc_feature 1..26: note = Probe
  source 1..26: mol_type = other DNA
ttccgtagtgtagtggttatcacgtt

SEQ ID NO: 8424 - DNA, 29 bp, synthetic construct
  misc_feature 1..29: note = Probe
  source 1..29: mol_type = other DNA
ttccgtagtgtagtggttatcacgttcgc

SEQ ID NO: 8425 - DNA, 30 bp, synthetic construct
  misc_feature 1..30: note = Probe
  source 1..30: mol_type = other DNA
ttccgtagtgtagtggttatcacgttcgcc

SEQ ID NO: 8426 - DNA, 31 bp, synthetic construct
  misc_feature 1..31: note = Probe
  source 1..31: mol_type = other DNA
ttccgtagtgtagtggttatcacgttcgcct

SEQ ID NO: 8427 - DNA, 32 bp, synthetic construct
  misc_feature 1..32: note = Probe
  source 1..32: mol_type = other DNA
ttccgtagtgtagtggttatcacgttcgcctc

SEQ ID NO: 8428 - DNA, 33 bp, synthetic construct
  misc_feature 1..33: note = Probe
  source 1..33: mol_type = other DNA
ttccgtagtgtagtggttatcacgttcgcctca

SEQ ID NO: 8429 - DNA, 34 bp, synthetic construct
  misc_feature 1..34: note = Probe
  source 1..34: mol_type = other DNA
ttccgtagtgtagtggttatcacgttcgcctcac

SEQ ID NO: 8430 - DNA, 35 bp, synthetic construct
  misc_feature 1..35: note = Probe
  source 1..35: mol_type = other DNA
ttccgtagtgtagtggttatcacgttcgcctcaca

SEQ ID NO: 8431 - DNA, 49 bp, synthetic construct
  misc_feature 1..49: note = Probe
  source 1..49: mol_type = other DNA
ttcctggttttcacccaggcggcccgggttcgactcccggtgtgggaac

SEQ ID NO: 8432 - DNA, 50 bp, synthetic construct
  misc_feature 1..50: note = Probe
  source 1..50: mol_type = other DNA
ttcctggttttcacccaggcggcccgggttcgactcccggtgtgggaacg

SEQ ID NO: 8433 - DNA, 23 bp, synthetic construct
  misc_feature 1..23: note = Probe
  source 1..23: mol_type = other DNA
ttcgaaaccgggcggaaacacct

SEQ ID NO: 8434 - DNA, 27 bp, synthetic construct
  misc_feature 1..27: note = Probe
  source 1..27: mol_type = other DNA
ttcgaagaagcagcttcaaacctgccg

SEQ ID NO: 8435 - DNA, 32 bp, synthetic construct
  misc_feature 1..32: note = Probe
  source 1..32: mol_type = other DNA
ttcgaagaagcagcttcaaacctgccggggct

SEQ ID NO: 8436 - DNA, 33 bp, synthetic construct
  misc_feature 1..33: note = Probe
  source 1..33: mol_type = other DNA
ttcgaagaagcagcttcaaacctgccggggctt

SEQ ID NO: 8437 - DNA, 35 bp, synthetic construct
  misc_feature 1..35: note = Probe
  source 1..35: mol_type = other DNA
ttcgaagaagcagcttcaaacctgccggggcttct

SEQ ID NO: 8438 - DNA, 36 bp, synthetic construct
  misc_feature 1..36: note = Probe
  source 1..36: mol_type = other DNA
ttcgaagaagcagcttcaaacctgccggggcttctc

SEQ ID NO: 8439 - DNA, 23 bp, synthetic construct
  misc_feature 1..23: note = Probe
  source 1..23: mol_type = other DNA
ttcgaatcacgtcggggtcaaac

SEQ ID NO: 8440 - DNA, 23 bp, synthetic construct
  misc_feature 1..23: note = Probe
  source 1..23: mol_type = other DNA
ttcgaatcccaccgctgccacac

SEQ ID NO: 8441 - DNA, 23 bp, synthetic construct
  misc_feature 1..23: note = Probe
  source 1..23: mol_type = other DNA
ttcgaatcccaccgctgccaggt

SEQ ID NO: 8442 - DNA, 23 bp, synthetic construct
  misc_feature 1..23: note = Probe
  source 1..23: mol_type = other DNA
ttcgaatcccagcggtgcctccg

SEQ ID NO: 8443 - DNA, 37 bp, synthetic construct
  misc_feature 1..37: note = Probe
  source 1..37: mol_type = other DNA
ttcgactcattaaattatgataatcatatttaccaaa

SEQ ID NO: 8444 - DNA, 39 bp, synthetic construct
  misc_feature 1..39: note = Probe
  source 1..39: mol_type = other DNA
ttcgactcattaaattatgataatcatatttaccaaatg

SEQ ID NO: 8445 - DNA, 23 bp, synthetic construct
  misc_feature 1..23: note = Probe
  source 1..23: mol_type = other DNA
ttcgactcccggtatgggaacaa

SEQ ID NO: 8446 - DNA, 22 bp, synthetic construct
  misc_feature 1..22: note = Probe
  source 1..22: mol_type = other DNA
ttcgactcccggtgtgggaacg

SEQ ID NO: 8447 - DNA, 23 bp, synthetic construct
  misc_feature 1..23: note = Probe
  source 1..23: mol_type = other DNA
ttcgactcccggtgtgggaacgc

SEQ ID NO: 8448 - DNA, 23 bp, synthetic construct
  misc_feature 1..23: note = Probe
  source 1..23: mol_type = other DNA
ttcgagcccacccagggacgcct

SEQ ID NO: 8449 - DNA, 23 bp, synthetic construct
  misc_feature 1..23: note = Probe
  source 1..23: mol_type = other DNA
ttcgagtcccatctgggtcgcgt

SEQ ID NO: 8450 - DNA, 23 bp, synthetic construct
  misc_feature 1..23: note = Probe
  source 1..23: mol_type = other DNA
ttcgagtcccttcgtggtcgttg

SEQ ID NO: 8451 - DNA, 23 bp, synthetic construct
  misc_feature 1..23: note = Probe
  source 1..23: mol_type = other DNA
ttcgatccccggcatctccattg

SEQ ID NO: 8452 - DNA, 21 bp, synthetic construct
  misc_feature 1..21: note = Probe
  source 1..21: mol_type = other DNA
ttcgattccccgacggggaga

SEQ ID NO: 8453 - DNA, 22 bp, synthetic construct
  misc_feature 1..22: note = Probe
  source 1..22: mol_type = other DNA
ttcgattccccgacggggagac

SEQ ID NO: 8454 - DNA, 21 bp, synthetic construct
  misc_feature 1..21: note = Probe
  source 1..21: mol_type = other DNA
ttcgattccccgacggggagg

SEQ ID NO: 8455 - DNA, 22 bp, synthetic construct
  misc_feature 1..22: note = Probe
  source 1..22: mol_type = other DNA
ttcgattccccgacggggaggc

SEQ ID NO: 8456 - DNA, 23 bp, synthetic construct
  misc_feature 1..23: note = Probe
  source 1..23: mol_type = other DNA
ttcgattccccgacggggaggca

SEQ ID NO: 8457 - DNA, 23 bp, synthetic construct
  misc_feature 1..23: note = Probe
  source 1..23: mol_type = other DNA
ttcgattcccggccaatgcacga

SEQ ID NO: 8458 - DNA, 23 bp, synthetic construct
  misc_feature 1..23: note = Probe
  source 1..23: mol_type = other DNA
ttcgattcccggccaatgcagca

SEQ ID NO: 8459 - DNA, 22 bp, synthetic construct
  misc_feature 1..22: note = Probe
  source 1..22: mol_type = other DNA
ttcgattcccggtcagggaaca

SEQ ID NO: 8460 - DNA, 23 bp, synthetic construct
  misc_feature 1..23: note = Probe
  source 1..23: mol_type = other DNA
ttcgattcccggtcagggaacaa

SEQ ID NO: 8461 - DNA, 23 bp, synthetic construct
  misc_feature 1..23: note = Probe
  source 1..23: mol_type = other DNA
ttcgattcccggtcatggaacca

SEQ ID NO: 8462 - DNA, 23 bp, synthetic construct
  misc_feature 1..23: note = Probe
  source 1..23: mol_type = other DNA
ttcgattcctggtcagggaacca

SEQ ID NO: 8463 - DNA, 19 bp, synthetic construct
  misc_feature 1..19: note = Probe
  source 1..19: mol_type = other DNA
ttcgggtgcgagaggtccc

SEQ ID NO: 8464 - DNA, 20 bp, synthetic construct
  misc_feature 1..20: note = Probe
  source 1..20: mol_type = other DNA
ttcgggtgcgagaggtcccg

SEQ ID NO: 8465 - DNA, 21 bp, synthetic construct
  misc_feature 1..21: note = Probe
  source 1..21: mol_type = other DNA
ttcgggtgcgagaggtcccgg

SEQ ID NO: 8466 - DNA, 37 bp, synthetic construct
  misc_feature 1..37: note = Probe
  source 1..37: mol_type = other DNA
ttctcagggatgggttcgattctcatagtcctagaaa

SEQ ID NO: 8467 - DNA, 37 bp, synthetic construct
  misc_feature 1..37: note = Probe
  source 1..37: mol_type = other DNA
ttcttgcgacccgggttcgattcccgggcggcgcact

SEQ ID NO: 8468 - DNA, 38 bp, synthetic construct
  misc_feature 1..38: note = Probe
  source 1..38: mol_type = other DNA
ttcttgcgacccgggttcgattcccgggcggcgcactt

SEQ ID NO: 8469 - DNA, 50 bp, synthetic construct
  misc_feature 1..50: note = Probe
  source 1..50: mol_type = other DNA
ttgaatccagcgatccgagttcaaatctcggtgggacctaccaaactttt

SEQ ID NO: 8470 - DNA, 41 bp, synthetic construct
  misc_feature 1..41: note = Probe
  source 1..41: mol_type = other DNA
ttgaatccagcgatccgagttcaaatctcggtgggacctca

SEQ ID NO: 8471 - DNA, 25 bp, synthetic construct
  misc_feature 1..25: note = Probe
  source 1..25: mol_type = other DNA
ttgacaacattcaaaaaagagtaat

SEQ ID NO: 8472 - DNA, 44 bp, synthetic construct
  misc_feature 1..44: note = Probe
  source 1..44: mol_type = other DNA
ttgatagagtaaataataggagcttaaacccccttatttctagg

SEQ ID NO: 8473 - DNA, 45 bp, synthetic construct
  misc_feature 1..45: note = Probe
  source 1..45: mol_type = other DNA
ttgatagagtaaataataggagcttaaacccccttatttctagga

SEQ ID NO: 8474 - DNA, 33 bp, synthetic construct
  misc_feature 1..33: note = Probe
  source 1..33: mol_type = other DNA
ttgatgcagagtggggttttgcagtccttagct

SEQ ID NO: 8475 - DNA, 40 bp, synthetic construct
  misc_feature 1..40: note = Probe
  source 1..40: mol_type = other DNA
ttgcaaattcgaagaagcagcttcaaacctgccggggctt

SEQ ID NO: 8476 - DNA, 41 bp, synthetic construct
  misc_feature 1..41: note = Probe
  source 1..41: mol_type = other DNA
ttgcaaattcgaagaagcagcttcaaacctgccggggcttc

SEQ ID NO: 8477 - DNA, 43 bp, synthetic construct
  misc_feature 1..43: note = Probe
  source 1..43: mol_type = other DNA
ttgcaaattcgaagaagcagcttcaaacctgccggggcttctc

SEQ ID NO: 8478 - DNA, 50 bp, synthetic construct
  misc_feature 1..50: note = Probe
  source 1..50: mol_type = other DNA
ttggactgtaaatctaaagacaggggttaggcctctttttaccagctccg

SEQ ID NO: 8479 - DNA, 19 bp, synthetic construct
  misc_feature 1..19: note = Probe
  source 1..19: mol_type = other DNA
ttgggtgcgagaggtcccg

SEQ ID NO: 8480 - DNA, 40 bp, synthetic construct
  misc_feature 1..40: note = Probe
  source 1..40: mol_type = other DNA
ttgggtgctaatggtggagttaaagactttttctctgatt

SEQ ID NO: 8481 - DNA, 41 bp, synthetic construct
  misc_feature 1..41: note = Probe
  source 1..41: mol_type = other DNA
ttgggtgctaatggtggagttaaagactttttctctgattt

SEQ ID NO: 8482 - DNA, 24 bp, synthetic construct
  misc_feature 1..24: note = Probe
  source 1..24: mol_type = other DNA
ttggtcgtggttgtagtccgtgcg

SEQ ID NO: 8483 - DNA, 32 bp, synthetic construct
  misc_feature 1..32: note = Probe
  source 1..32: mol_type = other DNA
ttggtcgtggttgtagtccgtgcgagaataat

SEQ ID NO: 8484 - DNA, 33 bp, synthetic construct
  misc_feature 1..33: note = Probe
  source 1..33: mol_type = other DNA
ttggtcgtggttgtagtccgtgcgagaataatg

SEQ ID NO: 8485 - DNA, 33 bp, synthetic construct
  misc_feature 1..33: note = Probe
  source 1..33: mol_type = other DNA
ttggtggtatagtggtaagcatagctgccttcc

SEQ ID NO: 8486 - DNA, 26 bp, synthetic construct
  misc_feature 1..26: note = Probe
  source 1..26: mol_type = other DNA
ttggtggttcagtggtagaattctcg

SEQ ID NO: 8487 - DNA, 27 bp, synthetic construct
  misc_feature 1..27: note = Probe
  source 1..27: mol_type = other DNA
ttggtggttcagtggtagaattctcgc

SEQ ID NO: 8488 - DNA, 28 bp, synthetic construct
  misc_feature 1..28: note = Probe
  source 1..28: mol_type = other DNA
ttggtggttcagtggtagaattctcgcc

SEQ ID NO: 8489 - DNA, 29 bp, synthetic construct
  misc_feature 1..29: note = Probe
  source 1..29: mol_type = other DNA
ttggtggttcagtggtagaattctcgcct

SEQ ID NO: 8490 - DNA, 31 bp, synthetic construct
  misc_feature 1..31: note = Probe
  source 1..31: mol_type = other DNA
ttggtggttcagtggtagaattctcgcctcc

SEQ ID NO: 8491 - DNA, 30 bp, synthetic construct
  misc_feature 1..30: note = Probe
  source 1..30: mol_type = other DNA
ttggtggttcagtggtagaattctcgcctg

SEQ ID NO: 8492 - DNA, 31 bp, synthetic construct
  misc_feature 1..31: note = Probe
  source 1..31: mol_type = other DNA
ttggtggttcagtggtagaattctcgcctgc

SEQ ID NO: 8493 - DNA, 32 bp, synthetic construct
  misc_feature 1..32: note = Probe
  source 1..32: mol_type = other DNA
ttggtggttcagtggtagaattctcgcctgcc

SEQ ID NO: 8494 - DNA, 50 bp, synthetic construct
  misc_feature 1..50: note = Probe
  source 1..50: mol_type = other DNA
ttggtggttcagtggtagaattctcgcctgccacgcgggaggcccgggtt

SEQ ID NO: 8495 - DNA, 25 bp, synthetic construct
  misc_feature 1..25: note = Probe
  source 1..25: mol_type = other DNA
ttggtggttcgagcccacccaggga

SEQ ID NO: 8496 - DNA, 44 bp, synthetic construct
  misc_feature 1..44: note = Probe
  source 1..44: mol_type = other DNA
ttgtaaaccaggggtcgcgagttcaattctcgctggggcctgtg

SEQ ID NO: 8497 - DNA, 37 bp, synthetic construct
  misc_feature 1..37: note = Probe
  source 1..37: mol_type = other DNA
ttgtaaaccggagatgaaaacctttttccaaggacaa

SEQ ID NO: 8498 - DNA, 38 bp, synthetic construct
  misc_feature 1..38: note = Probe
  source 1..38: mol_type = other DNA
ttgtaaaccggagatgaaaacctttttccaaggacaaa

SEQ ID NO: 8499 - DNA, 39 bp, synthetic construct
  misc_feature 1..39: note = Probe
  source 1..39: mol_type = other DNA
ttgtaaaccggagatgaaaacctttttccaaggacaaat

SEQ ID NO: 8500 - DNA, 40 bp, synthetic construct
  misc_feature 1..40: note = Probe
  source 1..40: mol_type = other DNA
ttgtaaaccggagatgaaaacctttttccaaggacaaatc

SEQ ID NO: 8501 - DNA, 41 bp, synthetic construct
  misc_feature 1..41: note = Probe
  source 1..41: mol_type = other DNA
ttgtaaaccggagatgaaaacctttttccaaggacaaatca

SEQ ID NO: 8502 - DNA, 43 bp, synthetic construct
  misc_feature 1..43: note = Probe
  source 1..43: mol_type = other DNA
ttgtaaaccggagatgaaaacctttttccaaggacaaatcaga

SEQ ID NO: 8503 - DNA, 44 bp, synthetic construct
  misc_feature 1..44: note = Probe
  source 1..44: mol_type = other DNA
ttgtaaatatagtttaaccaaaacatcagattgtgaatctgaca

SEQ ID NO: 8504 - DNA, 50 bp, synthetic construct
  misc_feature 1..50: note = Probe
  source 1..50: mol_type = other DNA
ttgtaaatatagtttaaccaaaacatcagattgtgaatctgacaacagag

SEQ ID NO: 8505 - DNA, 20 bp, synthetic construct
  misc_feature 1..20: note = Probe
  source 1..20: mol_type = other DNA
ttgtagtccgtgcgagaata

SEQ ID NO: 8506 - DNA, 23 bp, synthetic construct
  misc_feature 1..23: note = Probe
  source 1..23: mol_type = other DNA
ttgtagtccgtgcgagaataatg

SEQ ID NO: 8507 - DNA, 17 bp, synthetic construct
  misc_feature 1..17: note = Probe
  source 1..17: mol_type = other DNA
ttgtgaatctgacaaca

SEQ ID NO: 8508 - DNA, 25 bp, synthetic construct
  misc_feature 1..25: note = Probe
  source 1..25: mol_type = other DNA
ttgtgaatctgacaacagaggctta

SEQ ID NO: 8509 - DNA, 32 bp, synthetic construct
  misc_feature 1..32: note = Probe
  source 1..32: mol_type = other DNA
ttgtgaatctgacaacagaggcttacgacccc

SEQ ID NO: 8510 - DNA, 43 bp, synthetic construct
  misc_feature 1..43: note = Probe
  source 1..43: mol_type = other DNA
ttgtgaatctgacaacagaggcttacgaccccttatttaccga

SEQ ID NO: 8511 - DNA, 44 bp, synthetic construct
  misc_feature 1..44: note = Probe
  source 1..44: mol_type = other DNA
ttgtgaatctgacaacagaggcttacgaccccttatttaccgag

SEQ ID NO: 8512 - DNA, 50 bp, synthetic construct
  misc_feature 1..50: note = Probe
  source 1..50: mol_type = other DNA
ttgtgaatctgacaacagaggcttacgaccccttatttaccgagaaagct

SEQ ID NO: 8513 - DNA, 32 bp, synthetic construct
  misc_feature 1..32: note = Probe
  source 1..32: mol_type = other DNA
tttaaccaaaacatcagattgtgaatctgaca

SEQ ID NO: 8514 - DNA, 33 bp, synthetic construct
  misc_feature 1..33: note = Probe
  source 1..33: mol_type = other DNA
tttaaccaaaacatcagattgtgaatctgacaa

SEQ ID NO: 8515 - DNA, 35 bp, synthetic construct
  misc_feature 1..35: note = Probe
  source 1..35: mol_type = other DNA
tttaaccaaaacatcagattgtgaatctgacaaca

SEQ ID NO: 8516 - DNA, 45 bp, synthetic construct
  misc_feature 1..45: note = Probe
  source 1..45: mol_type = other DNA
tttaagttaaagattaagagaaccaacacctctttacagtgaaat

SEQ ID NO: 8517 - DNA, 50 bp, synthetic construct
  misc_feature 1..50: note = Probe
  source 1..50: mol_type = other DNA
tttaagttaaagattaagagaaccaacacctctttacagtgaaatgcccc

SEQ ID NO: 8518 - DNA, 16 bp, synthetic construct
  misc_feature 1..16: note = Probe
  source 1..16: mol_type = other DNA
tttacagtcagaggtt

SEQ ID NO: 8519 - DNA, 17 bp, synthetic construct
  misc_feature 1..17: note = Probe
  source 1..17: mol_type = other DNA
tttacagtcagaggttc

SEQ ID NO: 8520 - DNA, 27 bp, synthetic construct
  misc_feature 1..27: note = Probe
  source 1..27: mol_type = other DNA
tttacagtcagaggttcaattcctctt

SEQ ID NO: 8521 - DNA, 33 bp, synthetic construct
  misc_feature 1..33: note = Probe
  source 1..33: mol_type = other DNA
tttacagtcagaggttcaattcctcttcttaac

SEQ ID NO: 8522 - DNA, 17 bp, synthetic construct
  misc_feature 1..17: note = Probe
  source 1..17: mol_type = other DNA
tttagacgggctcacat

SEQ ID NO: 8523 - DNA, 24 bp, synthetic construct
  misc_feature 1..24: note = Probe
  source 1..24: mol_type = other DNA
tttagacgggctcacatcacccca

SEQ ID NO: 8524 - DNA, 25 bp, synthetic construct
  misc_feature 1..25: note = Probe
  source 1..25: mol_type = other DNA
tttagacgggctcacatcaccccat

SEQ ID NO: 8525 - DNA, 31 bp, synthetic construct
  misc_feature 1..31: note = Probe
  source 1..31: mol_type = other DNA
tttagacgggctcacatcaccccataaacaa

SEQ ID NO: 8526 - DNA, 32 bp, synthetic construct
  misc_feature 1..32: note = Probe
  source 1..32: mol_type = other DNA
tttagacgggctcacatcaccccataaacaaa

SEQ ID NO: 8527 - DNA, 33 bp, synthetic construct
  misc_feature 1..33: note = Probe
  source 1..33: mol_type = other DNA
tttagacgggctcacatcaccccataaacaaat

SEQ ID NO: 8528 - DNA, 27 bp, synthetic construct
  misc_feature 1..27: note = Probe
  source 1..27: mol_type = other DNA
tttcaacttaacttgaccgctctgagc

SEQ ID NO: 8529 - DNA, 28 bp, synthetic construct
  misc_feature 1..28: note = Probe
  source 1..28: mol_type = other DNA
tttcaacttaacttgaccgctctgagct

SEQ ID NO: 8530 - DNA, 18 bp, synthetic construct
  misc_feature 1..18: note = Probe
  source 1..18: mol_type = other DNA
tttcccggcggcgggaga

SEQ ID NO: 8531 - DNA, 45 bp, synthetic construct
  misc_feature 1..45: note = Probe
  source 1..45: mol_type = other DNA
tttgatagagtaaataataggagcttaaacccccttatttctagg

SEQ ID NO: 8532 - DNA, 46 bp, synthetic construct
  misc_feature 1..46: note = Probe
  source 1..46: mol_type = other DNA
tttgatagagtaaataataggagcttaaacccccttatttctagga

SEQ ID NO: 8533 - DNA, 43 bp, synthetic construct
  misc_feature 1..43: note = Probe
  source 1..43: mol_type = other DNA
tttggattctcagggatgggttcgattctcatagtcctagaaa

SEQ ID NO: 8534 - DNA, 20 bp, synthetic construct
  misc_feature 1..20: note = Probe
  source 1..20: mol_type = other DNA
tttgggtccgagaggtcccg

SEQ ID NO: 8535 - DNA, 20 bp, synthetic construct
  misc_feature 1..20: note = Probe
  source 1..20: mol_type = other DNA
tttgggtgcgagaggtcccg

SEQ ID NO: 8536 - DNA, 21 bp, synthetic construct
  misc_feature 1..21: note = Probe
  source 1..21: mol_type = other DNA
tttgggtgcgagaggtcccgg

SEQ ID NO: 8537 - DNA, 20 bp, synthetic construct
  misc_feature 1..20: note = Probe
  source 1..20: mol_type = other DNA
tttttcccggcggcgggaga

SEQ ID NO: 8538 - DNA, 25 bp, synthetic construct
  misc_feature 1..25: note = Probe
  source 1..25: mol_type = other DNA
accaggatggccgagtggttaaggc

SEQ ID NO: 8539 - DNA, 30 bp, synthetic construct
  misc_feature 1..30: note = Probe
  source 1..30: mol_type = other DNA
agcagagtggcgcagcggaagcgtgctggg

SEQ ID NO: 8540 - DNA, 18 bp, synthetic construct
  misc_feature 1..18: note = Probe
  source 1..18: mol_type = other DNA
agtcggtagagcatcaga

SEQ ID NO: 8541 - DNA, 19 bp, synthetic construct
  misc_feature 1..19: note = Probe
  source 1..19: mol_type = other DNA
agtcggtagagcatcagac

SEQ ID NO: 8542 - DNA, 18 bp, synthetic construct
  misc_feature 1..18: note = Probe
  source 1..18: mol_type = other DNA
agtggttagtactctgcg

SEQ ID NO: 8543 - DNA, 20 bp, synthetic construct
  misc_feature 1..20: note = Probe
  source 1..20: mol_type = other DNA
agtggttagtactctgcgtt

SEQ ID NO: 8544 - DNA, 21 bp, synthetic construct
  misc_feature 1..21: note = Probe
  source 1..21: mol_type = other DNA
agtggttagtactctgcgttg

SEQ ID NO: 8545 - DNA, 22 bp, synthetic construct
  misc_feature 1..22: note = Probe
  source 1..22: mol_type = other DNA
agtggttagtactctgcgttgt

SEQ ID NO: 8546 - DNA, 21 bp, synthetic construct
  misc_feature 1..21: note = Probe
  source 1..21: mol_type = other DNA
agttaaagactttttctctga

SEQ ID NO: 8547 - DNA, 23 bp, synthetic construct
  misc_feature 1..23: note = Probe
  source 1..23: mol_type = other DNA
ataacccagaggtcgatggatcg

SEQ ID NO: 8548 - DNA, 24 bp, synthetic construct
  misc_feature 1..24: note = Probe
  source 1..24: mol_type = other DNA
atatcattggtcgtggttgtagtc

SEQ ID NO: 8549 - DNA, 25 bp, synthetic construct
  misc_feature 1..25: note = Probe
  source 1..25: mol_type = other DNA
atatcattggtcgtggttgtagtcc

SEQ ID NO: 8550 - DNA, 30 bp, synthetic construct; identical to SEQ ID NO: 3694
  misc_feature 1..30: note = Probe
  source 1..30: mol_type = other DNA

SEQ ID NO: 8551 - DNA, 22 bp, synthetic construct
  misc_feature 1..22: note = Probe
  source 1..22: mol_type = other DNA
atcattggtcgtggttgtagtc

SEQ ID NO: 8552 - DNA, 30 bp, synthetic construct
  misc_feature 1..30: note = Probe
  source 1..30: mol_type = other DNA
atcattggtcgtggttgtagtccgtgcgag

SEQ ID NO: 8553 - DNA, 27 bp, synthetic construct
  misc_feature 1..27: note = Probe
  source 1..27: mol_type = other DNA
atggtgtaatggttagcactctggact

SEQ ID NO: 8554 - DNA, 20 bp, synthetic construct
  misc_feature 1..20: note = Probe
  source 1..20: mol_type = other DNA
atggttagcactctggactt

SEQ ID NO: 8555 - DNA, 21 bp, synthetic construct
  misc_feature 1..21: note = Probe
  source 1..21: mol_type = other DNA
atggttagcactctggacttt

SEQ ID NO: 8556 - DNA, 18 bp, synthetic construct
  misc_feature 1..18: note = Probe
  source 1..18: mol_type = other DNA
attggtcgtggttgtagt

SEQ ID NO: 8557 - DNA, 19 bp, synthetic construct
  misc_feature 1..19: note = Probe
  source 1..19: mol_type = other DNA
attggtcgtggttgtagtc

SEQ ID NO: 8558 - DNA, 20 bp, synthetic construct
  misc_feature 1..20: note = Probe
  source 1..20: mol_type = other DNA
attggtcgtggttgtagtcc

SEQ ID NO: 8559 - DNA, 21 bp, synthetic construct
  misc_feature 1..21: note = Probe
  source 1..21: mol_type = other DNA
attggtcgtggttgtagtccg

SEQ ID NO: 8560 - DNA, 23 bp, synthetic construct
  misc_feature 1..23: note = Probe
  source 1..23: mol_type = other DNA
attggtcgtggttgtagtccgtg

SEQ ID NO: 8561 - DNA, 24 bp, synthetic construct
  misc_feature 1..24: note = Probe
  source 1..24: mol_type = other DNA
attggtcgtggttgtagtccgtgc

SEQ ID NO: 8562 - DNA, 25 bp, synthetic construct
  misc_feature 1..25: note = Probe
  source 1..25: mol_type = other DNA
attggtcgtggttgtagtccgtgcg

SEQ ID NO: 8563 - DNA, 26 bp, synthetic construct
  misc_feature 1..26: note = Probe
  source 1..26: mol_type = other DNA
attggtcgtggttgtagtccgtgcga

SEQ ID NO: 8564 - DNA, 27 bp, synthetic construct
  misc_feature 1..27: note = Probe
  source 1..27: mol_type = other DNA
attggtcgtggttgtagtccgtgcgag

SEQ ID NO: 8565 - DNA, 28 bp, synthetic construct
  misc_feature 1..28: note = Probe
  source 1..28: mol_type = other DNA
attggtcgtggttgtagtccgtgcgaga

SEQ ID NO: 8566 - DNA, 20 bp, synthetic construct
  misc_feature 1..20: note = Probe
  source 1..20: mol_type = other DNA
cactgtaaagctaacttagc

SEQ ID NO: 8567 - DNA, 21 bp, synthetic construct
  misc_feature 1..21: note = Probe
  source 1..21: mol_type = other DNA
cactgtaaagctaacttagca

SEQ ID NO: 8568 - DNA, 20 bp, synthetic construct
  misc_feature 1..20: note = Probe
  source 1..20: mol_type = other DNA
cagtcggtagagcatcagac

SEQ ID NO: 8569 - DNA, 28 bp, synthetic construct
  misc_feature 1..28: note = Probe
  source 1..28: mol_type = other DNA
catggtgtaatggttagcactctggact

SEQ ID NO: 8570 - DNA, 19 bp, synthetic construct
  misc_feature 1..19: note = Probe
  source 1..19: mol_type = other DNA
cattggtcgtggttgtagt

SEQ ID NO: 8571 - DNA, 20 bp, synthetic construct
  misc_feature 1..20: note = Probe
  source 1..20: mol_type = other DNA
cattggtcgtggttgtagtc

SEQ ID NO: 8572 - DNA, 21 bp, synthetic construct
  misc_feature 1..21: note = Probe
  source 1..21: mol_type = other DNA
cattggtcgtggttgtagtcc

SEQ ID NO: 8573 - DNA, 22 bp, synthetic construct
  misc_feature 1..22: note = Probe
  source 1..22: mol_type = other DNA
cattggtcgtggttgtagtccg

SEQ ID NO: 8574 - DNA, 24 bp, synthetic construct
  misc_feature 1..24: note = Probe
  source 1..24: mol_type = other DNA
cattggtcgtggttgtagtccgtg

SEQ ID NO: 8575 - DNA, 29 bp, synthetic construct
  misc_feature 1..29: note = Probe
  source 1..29: mol_type = other DNA
cattggtcgtggttgtagtccgtgcgaga

SEQ ID NO: 8576 - DNA, 29 bp, synthetic construct
  misc_feature 1..29: note = Probe
  source 1..29: mol_type = other DNA
ccatggtgtaatggttagcactctggact

SEQ ID NO: 8577 - DNA, 17 bp, synthetic construct
  misc_feature 1..17: note = Probe
  source 1..17: mol_type = other DNA
ccccggcacctccacca

SEQ ID NO: 8578 - DNA, 30 bp, synthetic construct; identical to SEQ ID NO: 637
  misc_feature 1..30: note = Probe
  source 1..30: mol_type = other DNA

SEQ ID NO: 8579 - DNA, 29 bp, synthetic construct
  misc_feature 1..29: note = Probe
  source 1..29: mol_type = other DNA
ccgtgatcgtatagtggttagtactctgc

SEQ ID NO: 8580 - DNA, 30 bp, synthetic construct
  misc_feature 1..30: note = Probe
  source 1..30: mol_type = other DNA
ccgtgatcgtatagtggttagtactctgcg

SEQ ID NO: 8581 - DNA, 23 bp, synthetic construct
  misc_feature 1..23: note = Probe
  source 1..23: mol_type = other DNA
ccttccaagcagttgacccgggt

SEQ ID NO: 8582 - DNA, 20 bp, synthetic construct
  misc_feature 1..20: note = Probe
  source 1..20: mol_type = other DNA
cggagctggggattgtgggt

SEQ ID NO: 8583 - DNA, 23 bp, synthetic construct
  misc_feature 1..23: note = Probe
  source 1..23: mol_type = other DNA
cgtatagtggttagtactctgcg

SEQ ID NO: 8584 - DNA, 24 bp, synthetic construct
  misc_feature 1..24: note = Probe
  source 1..24: mol_type = other DNA
cgtatagtggttagtactctgcgt

SEQ ID NO: 8585 - DNA, 25 bp, synthetic construct
  misc_feature 1..25: note = Probe
  source 1..25: mol_type = other DNA
cgtatagtggttagtactctgcgtt

SEQ ID NO: 8586 - DNA, 26 bp, synthetic construct
  misc_feature 1..26: note = Probe
  source 1..26: mol_type = other DNA
cgtatagtggttagtactctgcgttg

SEQ ID NO: 8587 - DNA, 28 bp, synthetic construct
  misc_feature 1..28: note = Probe
  source 1..28: mol_type = other DNA
cgtgatcgtatagtggttagtactctgc

SEQ ID NO: 8588 - DNA, 30 bp, synthetic construct
  misc_feature 1..30: note = Probe
  source 1..30: mol_type = other DNA
cgtgatcgtatagtggttagtactctgcgt

SEQ ID NO: 8589 - DNA, 19 bp, synthetic construct
  misc_feature 1..19: note = Probe
  source 1..19: mol_type = other DNA
ctaagccagggattgtggg

SEQ ID NO: 8590 - DNA, 20 bp, synthetic construct
  misc_feature 1..20: note = Probe
  source 1..20: mol_type = other DNA
ctaagccagggattgtgggt

SEQ ID NO: 8591 - DNA, 21 bp, synthetic construct
  misc_feature 1..21: note = Probe
  source 1..21: mol_type = other DNA
ctaagccagggattgtgggtt

SEQ ID NO: 8592 - DNA, 21 bp, synthetic construct
  misc_feature 1..21: note = Probe
  source 1..21: mol_type = other DNA
ctctgaatccagcgatccgag

SEQ ID NO: 8593 - DNA, 22 bp, synthetic construct
  misc_feature 1..22: note = Probe
  source 1..22: mol_type = other DNA
ctgtcacgcgggagaccggggt

SEQ ID NO: 8594 - DNA, 22 bp, synthetic construct
  misc_feature 1..22: note = Probe
  source 1..22: mol_type = other DNA
ctttgaatccagcgatccgagt

SEQ ID NO: 8595 - DNA, 23 bp, synthetic construct
  misc_feature 1..23: note = Probe
  source 1..23: mol_type = other DNA
gaaaaagtcatggaggccatggg

SEQ ID NO: 8596 - DNA, 19 bp, synthetic construct
  misc_feature 1..19: note = Probe
  source 1..19: mol_type = other DNA
gaccacgtggcctaatgga

SEQ ID NO: 8597 - DNA, 23 bp, synthetic construct
  misc_feature 1..23: note = Probe
  source 1..23: mol_type = other DNA
gacccagtggcctaatggataag

SEQ ID NO: 8598 - DNA, 24 bp, synthetic construct
  misc_feature 1..24: note = Probe
  source 1..24: mol_type = other DNA
gacccagtggcctaatggataagg

SEQ ID NO: 8599 - DNA, 30 bp, synthetic construct
  misc_feature 1..30: note = Probe
  source 1..30: mol_type = other DNA
gacccagtggcctaatggataaggcatcag

SEQ ID NO: 8600 - DNA, 18 bp, synthetic construct
  misc_feature 1..18: note = Probe
  source 1..18: mol_type = other DNA
gaccgcgtggcctaatgg

SEQ ID NO: 8601 - DNA, 19 bp, synthetic construct
  misc_feature 1..19: note = Probe
  source 1..19: mol_type = other DNA
gaccgcgtggcctaatgga

SEQ ID NO: 8602 - DNA, 19 bp, synthetic construct
  misc_feature 1..19: note = Probe
  source 1..19: mol_type = other DNA
gacctcgtggcgcaacggt

SEQ ID NO: 8603 - DNA, 24 bp, synthetic construct
  misc_feature 1..24: note = Probe
  source 1..24: mol_type = other DNA
gacctcgtggcgcaacggtagcgc

SEQ ID NO: 8604 - DNA, 18 bp, synthetic construct
  misc_feature 1..18: note = Probe
  source 1..18: mol_type = other DNA
gacctcgtggcgcaatgg

SEQ ID NO: 8605 - DNA, 24 bp, synthetic construct
  misc_feature 1..24: note = Probe
  source 1..24: mol_type = other DNA
gacgaggtggccgagtggttaagg

SEQ ID NO: 8606 - DNA, 25 bp, synthetic construct
  misc_feature 1..25: note = Probe
  source 1..25: mol_type = other DNA
gacgaggtggccgagtggttaaggc

SEQ ID NO: 8607 - DNA, 18 bp, synthetic construct
  misc_feature 1..18: note = Probe
  source 1..18: mol_type = other DNA
gagaaagctcacaagaac

SEQ ID NO: 8608 - DNA, 19 bp, synthetic construct
  misc_feature 1..19: note = Probe
  source 1..19: mol_type = other DNA
gagaaagctcacaagaact

SEQ ID NO: 8609 - DNA, 21 bp, synthetic construct
  misc_feature 1..21: note = Probe
  source 1..21: mol_type = other DNA
gagaaagctcacaagaactgc

SEQ ID NO: 8610 - DNA, 22 bp, synthetic construct
  misc_feature 1..22: note = Probe
  source 1..22: mol_type = other DNA
gagaaagctcacaagaactgct

SEQ ID NO: 8611 - DNA, 25 bp, synthetic construct
  misc_feature 1..25: note = Probe
  source 1..25: mol_type = other DNA
gagaaagctcacaagaactgctaac

SEQ ID NO: 8612 - DNA, 26 bp, synthetic construct
  misc_feature 1..26: note = Probe
  source 1..26: mol_type = other DNA
gagaaagctcacaagaactgctaact

SEQ ID NO: 8613 - DNA, 29 bp, synthetic construct
  misc_feature 1..29: note = Probe
  source 1..29: mol_type = other DNA
gatcgtatagtggttagtactctgcgttg

SEQ ID NO: 8614 - DNA, 30 bp, synthetic construct
  misc_feature 1..30: note = Probe
  source 1..30: mol_type = other DNA
gatcgtatagtggttagtactctgcgttgt

SEQ ID NO: 8615 - DNA, 30 bp, synthetic construct
  misc_feature 1..30: note = Probe
  source 1..30: mol_type = other DNA
gcactggtggttcagtggtagaattctcgc

SEQ ID NO: 8616 - DNA, 21 bp, synthetic construct
  misc_feature 1..21: note = Probe
  source 1..21: mol_type = other DNA
gcagagcccggtaatcgcata

SEQ ID NO: 8617 - DNA, 30 bp, synthetic construct
  misc_feature 1..30: note = Probe
  source 1..30: mol_type = other DNA
gcagagtggcgcagcggaagcgtgctgggc

SEQ ID NO: 8618 - DNA, 28 bp, synthetic construct
  misc_feature 1..28: note = Probe
  source 1..28: mol_type = other DNA
gcatgggtggttcagtggtagaattctc

SEQ ID NO: 8619 - DNA, 29 bp, synthetic construct
  misc_feature 1..29: note = Probe
  source 1..29: mol_type = other DNA
gcatgggtggttcagtggtagaattctcg

SEQ ID NO: 8620 - DNA, 30 bp, synthetic construct; identical to SEQ ID NO: 1002
  misc_feature 1..30: note = Probe
  source 1..30: mol_type = other DNA

SEQ ID NO: 8621 - DNA, 18 bp, synthetic construct
  misc_feature 1..18: note = Probe
  source 1..18: mol_type = other DNA
gccccagtggcctaatgg

SEQ ID NO: 8622 - DNA, 19 bp, synthetic construct
  misc_feature 1..19: note = Probe
  source 1..19: mol_type = other DNA
gccccagtggcctaatgga

SEQ ID NO: 8623 - DNA, 19 bp, synthetic construct
  misc_feature 1..19: note = Probe
  source 1..19: mol_type = other DNA
gccccggtggcctaatgga

SEQ ID NO: 8624 - DNA, 19 bp, synthetic construct
  misc_feature 1..19: note = Probe
  source 1..19: mol_type = other DNA
gcccggatagctcagtcgg

SEQ ID NO: 8625 - DNA, 20 bp, synthetic construct
  misc_feature 1..20: note = Probe
  source 1..20: mol_type = other DNA
gcccggatagctcagtcggt

SEQ ID NO: 8626 - DNA, 22 bp, synthetic construct
  misc_feature 1..22: note = Probe
  source 1..22: mol_type = other DNA
gcccggatagctcagtcggtag

SEQ ID NO: 8627 - DNA, 23 bp, synthetic construct
  misc_feature 1..23: note = Probe
  source 1..23: mol_type = other DNA
gcccggatagctcagtcggtaga

SEQ ID NO: 8628 - DNA, 24 bp, synthetic construct
  misc_feature 1..24: note = Probe
  source 1..24: mol_type = other DNA
gcccggatagctcagtcggtagag

SEQ ID NO: 8629 - DNA, 25 bp, synthetic construct
  misc_feature 1..25: note = Probe
  source 1..25: mol_type = other DNA
gcccggatagctcagtcggtagagc

SEQ ID NO: 8630 - DNA, 26 bp, synthetic construct
  misc_feature 1..26: note = Probe
  source 1..26: mol_type = other DNA
gcccggatagctcagtcggtagagca

SEQ ID NO: 8631 - DNA, 30 bp, synthetic construct; identical to SEQ ID NO: 1038
  misc_feature 1..30: note = Probe
  source 1..30: mol_type = other DNA

SEQ ID NO: 8632 - DNA, 19 bp, synthetic construct
  misc_feature 1..19: note = Probe
  source 1..19: mol_type = other DNA
gcccggctagctcagtcgg

SEQ ID NO: 8633 - DNA, 25 bp, synthetic construct
  misc_feature 1..25: note = Probe
  source 1..25: mol_type = other DNA
gcccggctagctcagtcggtagagc

SEQ ID NO: 8634 - DNA, 30 bp, synthetic construct; identical to SEQ ID NO: 1062
  misc_feature 1..30: note = Probe
  source 1..30: mol_type = other DNA

SEQ ID NO: 8635 - DNA, 30 bp, synthetic construct; identical to SEQ ID NO: 1080
  misc_feature 1..30: note = Probe
  source 1..30: mol_type = other DNA

SEQ ID NO: 8636 - DNA, 30 bp, synthetic construct; identical to SEQ ID NO: 1105
  misc_feature 1..30: note = Probe
  source 1..30: mol_type = other DNA

SEQ ID NO: 8637 - DNA, 16 bp, synthetic construct
  misc_feature 1..16: note = Probe
  source 1..16: mol_type = other DNA
gcgccgctggtgtagt

SEQ ID NO: 8638 - DNA, 18 bp, synthetic construct
  misc_feature 1..18: note = Probe
  source 1..18: mol_type = other DNA
gcgccgctggtgtagtgg

SEQ ID NO: 8639 - DNA, 20 bp, synthetic construct
  misc_feature 1..20: note = Probe
  source 1..20: mol_type = other DNA
gcgccgctggtgtagtggta

SEQ ID NO: 8640 - DNA, 22 bp, synthetic construct
  misc_feature 1..22: note = Probe
  source 1..22: mol_type = other DNA
gcgccgctggtgtagtggtatc

SEQ ID NO: 8641 - DNA, 27 bp, synthetic construct
  misc_feature 1..27: note = Probe
  source 1..27: mol_type = other DNA
gcgccgctggtgtagtggtatcatgca

SEQ ID NO: 8642 - DNA, 29 bp, synthetic construct
  misc_feature 1..29: note = Probe
  source 1..29: mol_type = other DNA
gcgccgctggtgtagtggtatcatgcaag

SEQ ID NO: 8643 - DNA, 25 bp, synthetic construct
  misc_feature 1..25: note = Probe
  source 1..25: mol_type = other DNA
gctgtgatggccgagtggttaaggc

SEQ ID NO: 8644 - DNA, 20 bp, synthetic construct
  misc_feature 1..20: note = Probe
  source 1..20: mol_type = other DNA
gcttctgtagtgtagtggtt

SEQ ID NO: 8645 - DNA, 23 bp, synthetic construct
  misc_feature 1..23: note = Probe
  source 1..23: mol_type = other DNA
gcttctgtagtgtagtggttatc

SEQ ID NO: 8646 - DNA, 30 bp, synthetic construct
  misc_feature 1..30: note = Probe
  source 1..30: mol_type = other DNA
gcttctgtagtgtagtggttatcacgttcg

SEQ ID NO: 8647 - DNA, 25 bp, synthetic construct
  misc_feature 1..25: note = Probe
  source 1..25: mol_type = other DNA
ggactctgaatccagcgatccgagt

SEQ ID NO: 8648 - DNA, 30 bp, synthetic construct
  misc_feature 1..30: note = Probe
  source 1..30: mol_type = other DNA
ggccccatggtgtaatggttagcactctgg

SEQ ID NO: 8649 - DNA, 16 bp, synthetic construct
  misc_feature 1..16: note = Probe
  source 1..16: mol_type = other DNA
ggccgcgtggcctaat

SEQ ID NO: 8650 - DNA, 17 bp, synthetic construct
  misc_feature 1..17: note = Probe
  source 1..17: mol_type = other DNA
ggccgcgtggcctaatg

SEQ ID NO: 8651 - DNA, 18 bp, synthetic construct
  misc_feature 1..18: note = Probe
  source 1..18: mol_type = other DNA
ggccgcgtggcctaatgg

SEQ ID NO: 8652 - DNA, 19 bp, synthetic construct
  misc_feature 1..19: note = Probe
  source 1..19: mol_type = other DNA
ggccgcgtggcctaatgga

SEQ ID NO: 8653 - DNA, 20 bp, synthetic construct
  misc_feature 1..20: note = Probe
  source 1..20: mol_type = other DNA
ggccgcgtggcctaatggat

SEQ ID NO: 8654 - DNA, 24 bp, synthetic construct
  misc_feature 1..24: note = Probe
  source 1..24: mol_type = other DNA
ggccgcgtggcctaatggataagg

SEQ ID NO: 8655 - DNA, 25 bp, synthetic construct
  misc_feature 1..25: note = Probe
  source 1..25: mol_type = other DNA
ggccgcgtggcctaatggataaggc

SEQ ID NO: 8656 - DNA, 30 bp, synthetic construct
  misc_feature 1..30: note = Probe
  source 1..30: mol_type = other DNA
ggccgcgtggcctaatggataaggcgtctg

SEQ ID NO: 8657 - DNA, 20 bp, synthetic construct
  misc_feature 1..20: note = Probe
  source 1..20: mol_type = other DNA
ggccggttagctcagtcggc

SEQ ID NO: 8658 - DNA, 20 bp, synthetic construct
  misc_feature 1..20: note = Probe
  source 1..20: mol_type = other DNA
ggcgccgtggcttagttggt

SEQ ID NO: 8659 - DNA, 22 bp, synthetic construct
  misc_feature 1..22: note = Probe
  source 1..22: mol_type = other DNA
ggcgcggtggccaagtggtaag

SEQ ID NO: 8660 - DNA, 23 bp, synthetic construct
  misc_feature 1..23: note = Probe
  source 1..23: mol_type = other DNA
ggcgcggtggccaagtggtaagg

SEQ ID NO: 8661 - DNA, 24 bp, synthetic construct
  misc_feature 1..24: note = Probe
  source 1..24: mol_type = other DNA
ggcgcggtggccaagtggtaaggc

SEQ ID NO: 8662 - DNA, 24 bp, synthetic construct
  misc_feature 1..24: note = Probe
  source 1..24: mol_type = other DNA
ggctccagtctcttcgggggcgtg

SEQ ID NO: 8663 - DNA, 18 bp, synthetic construct
  misc_feature 1..18: note = Probe
  source 1..18: mol_type = other DNA
ggctccgtggcgcaatgg

SEQ ID NO: 8664 - DNA, 19 bp, synthetic construct
  misc_feature 1..19: note = Probe
  source 1..19: mol_type = other DNA
ggctccgtggcgcaatgga

SEQ ID NO: 8665 - DNA, 30 bp, synthetic construct
  misc_feature 1..30: note = Probe
  source 1..30: mol_type = other DNA
ggctcgttggtctaggggtatgattctcgg

SEQ ID NO: 8666 - DNA, 25 bp, synthetic construct
  misc_feature 1..25: note = Probe
  source 1..25: mol_type = other DNA
ggctcgttggtctagtggtatgatt

SEQ ID NO: 8667 - DNA, 20 bp, synthetic construct
  misc_feature 1..20: note = Probe
  source 1..20: mol_type = other DNA
ggctctgtggcttagttggc

SEQ ID NO: 8668 - DNA, 25 bp, synthetic construct
  misc_feature 1..25: note = Probe
  source 1..25: mol_type = other DNA
ggggaattagctcaaatggtagagc

SEQ ID NO: 8669 - DNA, 18 bp, synthetic construct
  misc_feature 1..18: note = Probe
  source 1..18: mol_type = other DNA
ggggatgtagctcagtgg

SEQ ID NO: 8670 - DNA, 19 bp, synthetic construct
  misc_feature 1..19: note = Probe
  source 1..19: mol_type = other DNA
ggggatgtagctcagtggt

SEQ ID NO: 8671 - DNA, 20 bp, synthetic construct
  misc_feature 1..20: note = Probe
  source 1..20: mol_type = other DNA
ggggatgtagctcagtggta

SEQ ID NO: 8672 - DNA, 21 bp, synthetic construct
  misc_feature 1..21: note = Probe
  source 1..21: mol_type = other DNA
ggggatgtagctcagtggtag

SEQ ID NO: 8673 - DNA, 22 bp, synthetic construct
  misc_feature 1..22: note = Probe
  source 1..22: mol_type = other DNA
ggggatgtagctcagtggtaga

SEQ ID NO: 8674 - DNA, 23 bp, synthetic construct
  misc_feature 1..23: note = Probe
  source 1..23: mol_type = other DNA
ggggatgtagctcagtggtagag

SEQ ID NO: 8675 - DNA, 24 bp, synthetic construct
  misc_feature 1..24: note = Probe
  source 1..24: mol_type = other DNA
ggggatgtagctcagtggtagagc

SEQ ID NO: 8676 - DNA, 20 bp, synthetic construct
  misc_feature 1..20: note = Probe
  source 1..20: mol_type = other DNA
gggggattagctcaaatggt

SEQ ID NO: 8677 - DNA, 25 bp, synthetic construct
  misc_feature 1..25: note = Probe
  source 1..25: mol_type = other DNA
gggggattagctcaaatggtagagc

SEQ ID NO: 8678 - DNA, 29 bp, synthetic construct
  misc_feature 1..29: note = Probe
  source 1..29: mol_type = other DNA
gggggtatagctcaggggtagagcatttg

SEQ ID NO: 8679 - DNA, 19 bp, synthetic construct
  misc_feature 1..19: note = Probe
  source 1..19: mol_type = other DNA
gggggtgtagctcagtggt

SEQ ID NO: 8680 - DNA, 20 bp, synthetic construct
  misc_feature 1..20: note = Probe
  source 1..20: mol_type = other DNA
gggggtgtagctcagtggta

SEQ ID NO: 8681 - DNA, 22 bp, synthetic construct
  misc_feature 1..22: note = Probe
  source 1..22: mol_type = other DNA
gggggtgtagctcagtggtaga

SEQ ID NO: 8682 - DNA, 24 bp, synthetic construct
  misc_feature 1..24: note = Probe
  source 1..24: mol_type = other DNA
gggggtgtagctcagtggtagagc

SEQ ID NO: 8683 - DNA, 16 bp, synthetic construct
  misc_feature 1..16: note = Probe
  source 1..16: mol_type = other DNA
ggtagcgtggccgagc

SEQ ID NO: 8684 - DNA, 17 bp, synthetic construct
  misc_feature 1..17: note = Probe
  source 1..17: mol_type = other DNA
ggtagcgtggccgagcg

SEQ ID NO: 8685 - DNA, 18 bp, synthetic construct
  misc_feature 1..18: note = Probe
  source 1..18: mol_type = other DNA
ggtagcgtggccgagcgg

SEQ ID NO: 8686 - DNA, 19 bp, synthetic construct
  misc_feature 1..19: note = Probe
  source 1..19: mol_type = other DNA
ggtagcgtggccgagcggt

SEQ ID NO: 8687 - DNA, 20 bp, synthetic construct
  misc_feature 1..20: note = Probe
  source 1..20: mol_type = other DNA
ggtagcgtggccgagcggtc

SEQ ID NO: 8688 - DNA, 21 bp, synthetic construct
  misc_feature 1..21: note = Probe
  source 1..21: mol_type = other DNA
ggtagcgtggccgagcggtct

SEQ ID NO: 8689 - DNA, 22 bp, synthetic construct
  misc_feature 1..22: note = Probe
  source 1..22: mol_type = other DNA
ggtagcgtggccgagcggtcta

SEQ ID NO: 8690 - DNA, 23 bp, synthetic construct
  misc_feature 1..23: note = Probe
  source 1..23: mol_type = other DNA
ggtagcgtggccgagcggtctaa

SEQ ID NO: 8691 - DNA, 24 bp, synthetic construct
  misc_feature 1..24: note = Probe
  source 1..24: mol_type = other DNA
ggtagcgtggccgagcggtctaag

SEQ ID NO: 8692 - DNA, 25 bp, synthetic construct
  misc_feature 1..25: note = Probe
  source 1..25: mol_type = other DNA
ggtagcgtggccgagcggtctaagg

SEQ ID NO: 8693 - DNA, 26 bp, synthetic construct
  misc_feature 1..26: note = Probe
  source 1..26: mol_type = other DNA
ggtagcgtggccgagcggtctaaggc

SEQ ID NO: 8694 - DNA, 29 bp, synthetic construct
  misc_feature 1..29: note = Probe
  source 1..29: mol_type = other DNA
ggtagcgtggccgagcggtctaaggcgct

SEQ ID NO: 8695 - DNA, 30 bp, synthetic construct
  misc_feature 1..30: note = Probe
  source 1..30: mol_type = other DNA
ggtagcgtggccgagcggtctaaggcgctg

SEQ ID NO: 8696 - DNA, 22 bp, synthetic construct
  misc_feature 1..22: note = Probe
  source 1..22: mol_type = other DNA
ggtagcgtggccgagtggtcta

SEQ ID NO: 8697 - DNA, 24 bp, synthetic construct
  misc_feature 1..24: note = Probe
  source 1..24: mol_type = other DNA
ggtagcgtggccgagtggtctaag

SEQ ID NO: 8698 - DNA, 25 bp, synthetic construct
  misc_feature 1..25: note = Probe
  source 1..25: mol_type = other DNA
ggtagcgtggccgagtggtctaagg

SEQ ID NO: 8699 - DNA, 26 bp, synthetic construct
  misc_feature 1..26: note = Probe
  source 1..26: mol_type = other DNA
ggtagcgtggccgagtggtctaaggc

SEQ ID NO: 8700 - DNA, 25 bp, synthetic construct
  misc_feature 1..25: note = Probe
  source 1..25: mol_type = other DNA
ggtagtgtggccgagcggtctaagg

SEQ ID NO: 8701 - DNA, 26 bp, synthetic construct
  misc_feature 1..26: note = Probe
  source 1..26: mol_type = other DNA
ggtagtgtggccgagcggtctaaggc

SEQ ID NO: 8702 - DNA, 30 bp, synthetic construct
  misc_feature 1..30: note = Probe
  source 1..30: mol_type = other DNA
ggtagtgtggccgagcggtctaaggcgctg

SEQ ID NO: 8703 - DNA, 19 bp, synthetic construct
  misc_feature 1..19: note = Probe
  source 1..19: mol_type = other DNA
ggtcccatggtgtaatggt

SEQ ID NO: 8704 - DNA, 23 bp, synthetic construct
  misc_feature 1..23: note = Probe
  source 1..23: mol_type = other DNA
ggtcccatggtgtaatggttagc

SEQ ID NO: 8705 - DNA, 29 bp, synthetic construct
  misc_feature 1..29: note = Probe
  source 1..29: mol_type = other DNA
ggtcccatggtgtaatggttagcactctg

SEQ ID NO: 8706 - DNA, 30 bp, synthetic construct
  misc_feature 1..30: note = Probe
  source 1..30: mol_type = other DNA
ggtcccatggtgtaatggttagcactctgg

SEQ ID NO: 8707 - DNA, 21 bp, synthetic construct
  misc_feature 1..21: note = Probe
  source 1..21: mol_type = other DNA
ggtcgtggttgtagtccgtgc

SEQ ID NO: 8708 - DNA, 22 bp, synthetic construct
  misc_feature 1..22: note = Probe
  source 1..22: mol_type = other DNA
ggtcgtggttgtagtccgtgcg

SEQ ID NO: 8709 - DNA, 25 bp, synthetic construct
  misc_feature 1..25: note = Probe
  source 1..25: mol_type = other DNA
ggtcgtggttgtagtccgtgcgaga

SEQ ID NO: 8710 - DNA, 20 bp, synthetic construct
  misc_feature 1..20: note = Probe
  source 1..20: mol_type = other DNA
ggtggccgagtggttaaggc

SEQ ID NO: 8711 - DNA, 24 bp, synthetic construct
  misc_feature 1..24: note = Probe
  source 1..24: mol_type = other DNA
ggtgtagtggtatcatgcaagatt

SEQ ID NO: 8712 - DNA, 24 bp, synthetic construct
  misc_feature 1..24: note = Probe
  source 1..24: mol_type = other DNA
ggttagcactctggactctgaatc

SEQ ID NO: 8713 - DNA, 16 bp, synthetic construct
  misc_feature 1..16: note = Probe
  source 1..16: mol_type = other DNA
ggttagtactctgcgt

SEQ ID NO: 8714 - DNA, 17 bp, synthetic construct
  misc_feature 1..17: note = Probe
  source 1..17: mol_type = other DNA
ggttagtactctgcgtt

SEQ ID NO: 8715 - DNA, 18 bp, synthetic construct
  misc_feature 1..18: note = Probe
  source 1..18: mol_type = other DNA
ggttagtactctgcgttg

SEQ ID NO: 8716 - DNA, 19 bp, synthetic construct
  misc_feature 1..19: note = Probe
  source 1..19: mol_type = other DNA
ggttagtactctgcgttgt

SEQ ID NO: 8717 - DNA, 17 bp, synthetic construct
  misc_feature 1..17: note = Probe
  source 1..17: mol_type = other DNA
ggttccatagtgtagcg

SEQ ID NO: 8718 - DNA, 19 bp, synthetic construct
  misc_feature 1..19: note = Probe
  source 1..19: mol_type = other DNA
ggttccatagtgtagcggt

SEQ ID NO: 8719 - DNA, 20 bp, synthetic construct
  misc_feature 1..20: note = Probe
  source 1..20: mol_type = other DNA
ggttccatagtgtagcggtt

SEQ ID NO: 8720 - DNA, 30 bp, synthetic construct
  misc_feature 1..30: note = Probe
  source 1..30: mol_type = other DNA
ggttccatagtgtagcggttatcacgtctg

SEQ ID NO: 8721 - DNA, 23 bp, synthetic construct
  misc_feature 1..23: note = Probe
  source 1..23: mol_type = other DNA
ggttccatagtgtagtggttatc

SEQ ID NO: 8722 - DNA, 26 bp, synthetic construct
  misc_feature 1..26: note = Probe
  source 1..26: mol_type = other DNA
ggttccatagtgtagtggttatcacg

SEQ ID NO: 8723 - DNA, 28 bp, synthetic construct
  misc_feature 1..28: note = Probe
  source 1..28: mol_type = other DNA
ggttccatagtgtagtggttatcacgtc

SEQ ID NO: 8724 - DNA, 30 bp, synthetic construct; identical to SEQ ID NO: 1451
  misc_feature 1..30: note = Probe
  source 1..30: mol_type = other DNA

SEQ ID NO: 8725 - DNA, 30 bp, synthetic construct; identical to SEQ ID NO: 6826
  misc_feature 1..30: note = Probe
  source 1..30: mol_type = other DNA

SEQ ID NO: 8726 - DNA, 23 bp, synthetic construct
  misc_feature 1..23: note = Probe
  source 1..23: mol_type = other DNA
ggttcgactcccggtgtgggaac

SEQ ID NO: 8727 - DNA, 20 bp, synthetic construct
  misc_feature 1..20: note = Probe
  source 1..20: mol_type = other DNA
ggttcgattccccgacgggg

SEQ ID NO: 8728 - DNA, 21 bp, synthetic construct
  misc_feature 1..21: note = Probe
  source 1..21: mol_type = other DNA
ggttcgattccccgacgggga

SEQ ID NO: 8729 - DNA, 22 bp, synthetic construct
  misc_feature 1..22: note = Probe
  source 1..22: mol_type = other DNA
ggttcgattccccgacggggag

SEQ ID NO: 8730 - DNA, 24 bp, synthetic construct
  misc_feature 1..24: note = Probe
  source 1..24: mol_type = other DNA
gtaatggttagcactctggacttt

SEQ ID NO: 8731 - DNA, 18 bp, synthetic construct
  misc_feature 1..18: note = Probe
  source 1..18: mol_type = other DNA
gtagtcgtggccgagtgg

SEQ ID NO: 8732 - DNA, 19 bp, synthetic construct
  misc_feature 1..19: note = Probe
  source 1..19: mol_type = other DNA
gtagtcgtggccgagtggt

SEQ ID NO: 8733 - DNA, 20 bp, synthetic construct
  misc_feature 1..20: note = Probe
  source 1..20: mol_type = other DNA
gtagtcgtggccgagtggtt

SEQ ID NO: 8734 - DNA, 22 bp, synthetic construct
  misc_feature 1..22: note = Probe
  source 1..22: mol_type = other DNA
gtagtcgtggccgagtggttaa

SEQ ID NO: 8735 - DNA, 23 bp, synthetic construct
  misc_feature 1..23: note = Probe
  source 1..23: mol_type = other DNA
gtagtcgtggccgagtggttaag

SEQ ID NO: 8736 - DNA, 24 bp, synthetic construct
  misc_feature 1..24: note = Probe
  source 1..24: mol_type = other DNA
gtagtcgtggccgagtggttaagg

SEQ ID NO: 8737 - DNA, 25 bp, synthetic construct
  misc_feature 1..25: note = Probe
  source 1..25: mol_type = other DNA
gtagtcgtggccgagtggttaaggc

SEQ ID NO: 8738 - DNA, 25 bp, synthetic construct
  misc_feature 1..25: note = Probe
  source 1..25: mol_type = other DNA
gtcacggtggccgagtggttaaggc

SEQ ID NO: 8739 - DNA, 28 bp, synthetic construct
  misc_feature 1..28: note = Probe
  source 1..28: mol_type = other DNA
gtccttgtagtataaactaatacaccag

SEQ ID NO: 8740 - DNA, 21 bp, synthetic construct
  misc_feature 1..21: note = Probe
  source 1..21: mol_type = other DNA
gtcgtggttgtagtccgtgcg

SEQ ID NO: 8741 - DNA, 23 bp, synthetic construct
  misc_feature 1..23: note = Probe
  source 1..23: mol_type = other DNA
gtcgtggttgtagtccgtgcgag

SEQ ID NO: 8742 - DNA, 24 bp, synthetic construct
  misc_feature 1..24: note = Probe
  source 1..24: mol_type = other DNA
gtcgtggttgtagtccgtgcgaga

SEQ ID NO: 8743 - DNA, 19 bp, synthetic construct
  misc_feature 1..19: note = Probe
  source 1..19: mol_type = other DNA
gtctctgtggcgcaatcgg

SEQ ID NO: 8744 - DNA, 20 bp, synthetic construct
  misc_feature 1..20: note = Probe
  source 1..20: mol_type = other DNA
gtctctgtggcgcaatcggt

SEQ ID NO: 8745 - DNA, 20 bp, synthetic construct
  misc_feature 1..20: note = Probe
  source 1..20: mol_type = other DNA
gtctctgtggcgcaatggac

SEQ ID NO: 8746 - DNA, 30 bp, synthetic construct; identical to SEQ ID NO: 1505
  misc_feature 1..30: note = Probe
  source 1..30: mol_type = other DNA

SEQ ID NO: 8747 - DNA, 21 bp, synthetic construct
  misc_feature 1..21: note = Probe
  source 1..21: mol_type = other DNA
gtggtgagtatccccgcctgt

SEQ ID NO: 8748 - DNA, 22 bp, synthetic construct
  misc_feature 1..22: note = Probe
  source 1..22: mol_type = other DNA
gtggtgagtatccccgcctgtc

SEQ ID NO: 8749 - DNA, 18 bp, synthetic construct
  misc_feature 1..18: note = Probe
  source 1..18: mol_type = other DNA
gtggttaggattcggcgc

SEQ ID NO: 8750 - DNA, 19 bp, synthetic construct
  misc_feature 1..19: note = Probe
  source 1..19: mol_type = other DNA
gtggttaggattcggcgct

SEQ ID NO: 8751 - DNA, 18 bp, synthetic construct
  misc_feature 1..18: note = Probe
  source 1..18: mol_type = other DNA
gtggttagtactctgcgt

SEQ ID NO: 8752 - DNA, 19 bp, synthetic construct
  misc_feature 1..19: note = Probe
  source 1..19: mol_type = other DNA
gtggttagtactctgcgtt

SEQ ID NO: 8753 - DNA, 20 bp, synthetic construct
  misc_feature 1..20: note = Probe
  source 1..20: mol_type = other DNA
gtggttagtactctgcgttg

SEQ ID NO: 8754 - DNA, 21 bp, synthetic construct
  misc_feature 1..21: note = Probe
  source 1..21: mol_type = other DNA
gtggttagtactctgcgttgt

SEQ ID NO: 8755 - DNA, 22 bp, synthetic construct
  misc_feature 1..22: note = Probe
  source 1..22: mol_type = other DNA
gtggttagtactctgcgttgtg

SEQ ID NO: 8756 - DNA, 20 bp, synthetic construct
  misc_feature 1..20: note = Probe
  source 1..20: mol_type = other DNA
gttaaagactttttctctga

SEQ ID NO: 8757 - DNA, 21 bp, synthetic construct
  misc_feature 1..21: note = Probe
  source 1..21: mol_type = other DNA
gttaagatggcagagcccggt

SEQ ID NO: 8758 - DNA, 22 bp, synthetic construct
  misc_feature 1..22: note = Probe
  source 1..22: mol_type = other DNA
gttaagatggcagagcccggta

SEQ ID NO: 8759 - DNA, 23 bp, synthetic construct
  misc_feature 1..23: note = Probe
  source 1..23: mol_type = other DNA
gttaagatggcagagcccggtaa

SEQ ID NO: 8760 - DNA, 24 bp, synthetic construct
  misc_feature 1..24: note = Probe
  source 1..24: mol_type = other DNA
gttaagatggcagagcccggtaat

SEQ ID NO: 8761 - DNA, 25 bp, synthetic construct
  misc_feature 1..25: note = Probe
  source 1..25: mol_type = other DNA
gttaagatggcagagcccggtaatc

SEQ ID NO: 8762 - DNA, 29 bp, synthetic construct
  misc_feature 1..29: note = Probe
  source 1..29: mol_type = other DNA
gttaagatggcagagcccggtaatcgcat

SEQ ID NO: 8763 - DNA, 17 bp, synthetic construct
  misc_feature 1..17: note = Probe
  source 1..17: mol_type = other DNA
gttagtactctgcgttg

SEQ ID NO: 8764 - DNA, 22 bp, synthetic construct
  misc_feature 1..22: note = Probe
  source 1..22: mol_type = other DNA
gttcgactcccggtgtgggaac

SEQ ID NO: 8765 - DNA, 22 bp, synthetic construct
  misc_feature 1..22: note = Probe
  source 1..22: mol_type = other DNA
gttcgattcccggtcagggaac

SEQ ID NO: 8766 - DNA, 18 bp, synthetic construct
  misc_feature 1..18: note = Probe
  source 1..18: mol_type = other DNA
gtttatgtagcttacctc

SEQ ID NO: 8767 - DNA, 19 bp, synthetic construct
  misc_feature 1..19: note = Probe
  source 1..19: mol_type = other DNA
gtttatgtagcttacctcc

SEQ ID NO: 8768 - DNA, 20 bp, synthetic construct
  misc_feature 1..20: note = Probe
  source 1..20: mol_type = other DNA
gtttatgtagcttacctcct

SEQ ID NO: 8769 - DNA, 30 bp, synthetic construct
  misc_feature 1..30: note = Probe
  source 1..30: mol_type = other DNA
gtttccgtagtgtagcggttatcacattcg

SEQ ID NO: 8770 - DNA, 20 bp, synthetic construct
  misc_feature 1..20: note = Probe
  source 1..20: mol_type = other DNA
gtttccgtagtgtagtggtc

SEQ ID NO: 8771 - DNA, 23 bp, synthetic construct
  misc_feature 1..23: note = Probe
  source 1..23: mol_type = other DNA
gtttccgtagtgtagtggtcatc

SEQ ID NO: 8772 - DNA, 30 bp, synthetic construct
  misc_feature 1..30: note = Probe
  source 1..30: mol_type = other DNA
gtttccgtagtgtagtggtcatcacgttcg

SEQ ID NO: 8773 - DNA, 22 bp, synthetic construct
  misc_feature 1..22: note = Probe
  source 1..22: mol_type = other DNA
taacccagaggtcgatggatcg

SEQ ID NO: 8774 - DNA, 23 bp, synthetic construct
  misc_feature 1..23: note = Probe
  source 1..23: mol_type = other DNA
taacccagaggtcgatggatcga

SEQ ID NO: 8775 - DNA, 19 bp, synthetic construct
  misc_feature 1..19: note = Probe
  source 1..19: mol_type = other DNA
taagccagggattgtgggt

SEQ ID NO: 8776 - DNA, 20 bp, synthetic construct
  misc_feature 1..20: note = Probe
  source 1..20: mol_type = other DNA
tagaattctcgcctgccacg

SEQ ID NO: 8777 - DNA, 21 bp, synthetic construct
  misc_feature 1..21: note = Probe
  source 1..21: mol_type = other DNA
tagaattctcgcctgccacgc

SEQ ID NO: 8778 - DNA, 19 bp, synthetic construct
  misc_feature 1..19: note = Probe
  source 1..19: mol_type = other DNA
tagtggttaggattcggcg

SEQ ID NO: 8779 - DNA, 20 bp, synthetic construct
  misc_feature 1..20: note = Probe
  source 1..20: mol_type = other DNA
tagtggttaggattcggcgc

SEQ ID NO: 8780 - DNA, 21 bp, synthetic construct
  misc_feature 1..21: note = Probe
  source 1..21: mol_type = other DNA
tagtggttaggattcggcgct

SEQ ID NO: 8781 - DNA, 19 bp, synthetic construct
  misc_feature 1..19: note = Probe
  source 1..19: mol_type = other DNA
tagtggttagtactctgcg

SEQ ID NO: 8782 - DNA, 20 bp, synthetic construct
  misc_feature 1..20: note = Probe
  source 1..20: mol_type = other DNA
tagtggttagtactctgcgt

SEQ ID NO: 8783 - DNA, 21 bp, synthetic construct
  misc_feature 1..21: note = Probe
  source 1..21: mol_type = other DNA
tagtggttagtactctgcgtt

SEQ ID NO: 8784 - DNA, 22 bp, synthetic construct
  misc_feature 1..22: note = Probe
  source 1..22: mol_type = other DNA
tagtggttagtactctgcgttg

SEQ ID NO: 8785 - DNA, 23 bp, synthetic construct
  misc_feature 1..23: note = Probe
  source 1..23: mol_type = other DNA
tagtggttagtactctgcgttgt

SEQ ID NO: 8786 - DNA, 22 bp, synthetic construct
  misc_feature 1..22: note = Probe
  source 1..22: mol_type = other DNA
tatagtggttagtactctgcgt

SEQ ID NO: 8787 - DNA, 23 bp, synthetic construct
  misc_feature 1..23: note = Probe
  source 1..23: mol_type = other DNA
tatagtggttagtactctgcgtt

SEQ ID NO: 8788 - DNA, 24 bp, synthetic construct
  misc_feature 1..24: note = Probe
  source 1..24: mol_type = other DNA
tatagtggttagtactctgcgttg

SEQ ID NO: 8789 - DNA, 22 bp, synthetic construct
  misc_feature 1..22: note = Probe
  source 1..22: mol_type = other DNA
tatcattggtcgtggttgtagt

SEQ ID NO: 8790 - DNA, 23 bp, synthetic construct
  misc_feature 1..23: note = Probe
  source 1..23: mol_type = other DNA
tatcattggtcgtggttgtagtc

SEQ ID NO: 8791 - DNA, 24 bp, synthetic construct
  misc_feature 1..24: note = Probe
  source 1..24: mol_type = other DNA
tatcattggtcgtggttgtagtcc

SEQ ID NO: 8792 - DNA, 29 bp, synthetic construct
  misc_feature 1..29: note = Probe
  source 1..29: mol_type = other DNA
tatcattggtcgtggttgtagtccgtgcg

SEQ ID NO: 8793 - DNA, 22 bp, synthetic construct
  misc_feature 1..22: note = Probe
  source 1..22: mol_type = other DNA
tcaatccccggcacctccacca

SEQ ID NO: 8794 - DNA, 20 bp, synthetic construct
  misc_feature 1..20: note = Probe
  source 1..20: mol_type = other DNA
tcagtcggtagagcatcaga

SEQ ID NO: 8795 - DNA, 21 bp, synthetic construct
  misc_feature 1..21: note = Probe
  source 1..21: mol_type = other DNA
tcagtcggtagagcatcagac

SEQ ID NO: 8796 - DNA, 21 bp, synthetic construct
  misc_feature 1..21: note = Probe
  source 1..21: mol_type = other DNA
tcagtcggtagagcatgggac

SEQ ID NO: 8797 - DNA, 22 bp, synthetic construct
  misc_feature 1..22: note = Probe
  source 1..22: mol_type = other DNA
tcagtcggtagagcatgggact

SEQ ID NO: 8798 - DNA, 21 bp, synthetic construct
  misc_feature 1..21: note = Probe
  source 1..21: mol_type = other DNA
tcattggtcgtggttgtagtc

SEQ ID NO: 8799 - DNA, 29 bp, synthetic construct
  misc_feature 1..29: note = Probe
  source 1..29: mol_type = other DNA
tcattggtcgtggttgtagtccgtgcgag

SEQ ID NO: 8800 - DNA, 18 bp, synthetic construct
  misc_feature 1..18: note = Probe
  source 1..18: mol_type = other DNA
tcccacatggtctagcgg

SEQ ID NO: 8801 - DNA, 19 bp, synthetic construct
  misc_feature 1..19: note = Probe
  source 1..19: mol_type = other DNA
tcccacatggtctagcggt

SEQ ID NO: 8802 - DNA, 20 bp, synthetic construct
  misc_feature 1..20: note = Probe
  source 1..20: mol_type = other DNA
tcccacatggtctagcggtt

SEQ ID NO: 8803 - DNA, 22 bp, synthetic construct
  misc_feature 1..22: note = Probe
  source 1..22: mol_type = other DNA
tcccacatggtctagcggttag

SEQ ID NO: 8804 - DNA, 23 bp, synthetic construct
  misc_feature 1..23: note = Probe
  source 1..23: mol_type = other DNA
tcccacatggtctagcggttagg

SEQ ID NO: 8805 - DNA, 24 bp, synthetic construct
  misc_feature 1..24: note = Probe
  source 1..24: mol_type = other DNA
tcccacatggtctagcggttagga

SEQ ID NO: 8806 - DNA, 25 bp, synthetic construct
  misc_feature 1..25: note = Probe
  source 1..25: mol_type = other DNA
tcccacatggtctagcggttaggat

SEQ ID NO: 8807 - DNA, 26 bp, synthetic construct
  misc_feature 1..26: note = Probe
  source 1..26: mol_type = other DNA
tcccacatggtctagcggttaggatt

SEQ ID NO: 8808 - DNA, 27 bp, synthetic construct
  misc_feature 1..27: note = Probe
  source 1..27: mol_type = other DNA
tcccacatggtctagcggttaggattc

SEQ ID NO: 8809 - DNA, 28 bp, synthetic construct
  misc_feature 1..28: note = Probe
  source 1..28: mol_type = other DNA
tcccacatggtctagcggttaggattcc

SEQ ID NO: 8810 - DNA, 29 bp, synthetic construct
  misc_feature 1..29: note = Probe
  source 1..29: mol_type = other DNA
tcccacatggtctagcggttaggattcct

SEQ ID NO: 8811 - DNA, 30 bp, synthetic construct; identical to SEQ ID NO: 1643
  misc_feature 1..30: note = Probe
  source 1..30: mol_type = other DNA

SEQ ID NO: 8812 - DNA, 22 bp, synthetic construct
  misc_feature 1..22: note = Probe
  source 1..22: mol_type = other DNA
tcccatatggtctagcggttag

SEQ ID NO: 8813 - DNA, 23 bp, synthetic construct
  misc_feature 1..23: note = Probe
  source 1..23: mol_type = other DNA
tcccatatggtctagcggttagg

SEQ ID NO: 8814 - DNA, 26 bp, synthetic construct
  misc_feature 1..26: note = Probe
  source 1..26: mol_type = other DNA
tcccatatggtctagcggttaggatt

SEQ ID NO: 8815 - DNA, 30 bp, synthetic construct; identical to SEQ ID NO: 1659
  misc_feature 1..30: note = Probe
  source 1..30: mol_type = other DNA

SEQ ID NO: 8816 - DNA, 17 bp, synthetic construct
  misc_feature 1..17: note = Probe
  source 1..17: mol_type = other DNA
tccccggcacctccacc

SEQ ID NO: 8817 - DNA, 18 bp, synthetic construct
  misc_feature 1..18: note = Probe
  source 1..18: mol_type = other DNA
tccccggcacctccacca

SEQ ID NO: 8818 - DNA, 20 bp, synthetic construct
  misc_feature 1..20: note = Probe
  source 1..20: mol_type = other DNA
tccctggtctagtggttagg

SEQ ID NO: 8819 - DNA, 23 bp, synthetic construct
  misc_feature 1..23: note = Probe
  source 1..23: mol_type = other DNA
tccctggtctagtggttaggatt

SEQ ID NO: 8820 - DNA, 23 bp, synthetic construct
  misc_feature 1..23: note = Probe
  source 1..23: mol_type = other DNA
tcctcgttagtatagtggtgagt

SEQ ID NO: 8821 - DNA, 24 bp, synthetic construct
  misc_feature 1..24: note = Probe
  source 1..24: mol_type = other DNA
tcgtatagtggttagtactctgcg

SEQ ID NO: 8822 - DNA, 26 bp, synthetic construct
  misc_feature 1..26: note = Probe
  source 1..26: mol_type = other DNA
tcgtatagtggttagtactctgcgtt

SEQ ID NO: 8823 - DNA, 27 bp, synthetic construct
  misc_feature 1..27: note = Probe
  source 1..27: mol_type = other DNA
tcgtatagtggttagtactctgcgttg

SEQ ID NO: 8824 - DNA, 29 bp, synthetic construct
  misc_feature 1..29: note = Probe
  source 1..29: mol_type = other DNA
tgatcgtatagtggttagtactctgcgtt

SEQ ID NO: 8825 - DNA, 30 bp, synthetic construct
  misc_feature 1..30: note = Probe
  source 1..30: mol_type = other DNA
tgatcgtatagtggttagtactctgcgttg

SEQ ID NO: 8826 - DNA, 19 bp, synthetic construct
  misc_feature 1..19: note = Probe
  source 1..19: mol_type = other DNA
tggtcgtggttgtagtccg

SEQ ID NO: 8827 - DNA, 21 bp, synthetic construct
  misc_feature 1..21: note = Probe
  source 1..21: mol_type = other DNA
tggtcgtggttgtagtccgtg

SEQ ID NO: 8828 - DNA, 22 bp, synthetic construct
  misc_feature 1..22: note = Probe
  source 1..22: mol_type = other DNA
tggtcgtggttgtagtccgtgc

SEQ ID NO: 8829 - DNA, 23 bp, synthetic construct
  misc_feature 1..23: note = Probe
  source 1..23: mol_type = other DNA
tggtcgtggttgtagtccgtgcg

SEQ ID NO: 8830 - DNA, 29 bp, synthetic construct
  misc_feature 1..29: note = Probe
  source 1..29: mol_type = other DNA
tggtcgtggttgtagtccgtgcgagaata

SEQ ID NO: 8831 - DNA, 23 bp, synthetic construct
  misc_feature 1..23: note = Probe
  source 1..23: mol_type = other DNA
tggtctagcggttaggattcctg

SEQ ID NO: 8832 - DNA, 24 bp, synthetic construct
  misc_feature 1..24: note = Probe
  source 1..24: mol_type = other DNA
tggtctagcggttaggattcctgg

SEQ ID NO: 8833 - DNA, 17 bp, synthetic construct
  misc_feature 1..17: note = Probe
  source 1..17: mol_type = other DNA
tggttagtactctgcgt

SEQ ID NO: 8834 - DNA, 18 bp, synthetic construct
  misc_feature 1..18: note = Probe
  source 1..18: mol_type = other DNA
tggttagtactctgcgtt

SEQ ID NO: 8835 - DNA, 19 bp, synthetic construct
  misc_feature 1..19: note = Probe
  source 1..19: mol_type = other DNA
tggttagtactctgcgttg

SEQ ID NO: 8836 - DNA, 20 bp, synthetic construct
  misc_feature 1..20: note = Probe
  source 1..20: mol_type = other DNA
tggttagtactctgcgttgt

SEQ ID NO: 8837 - DNA, 22 bp, synthetic construct
  misc_feature 1..22: note = Probe
  source 1..22: mol_type = other DNA
ttagcactctggactctgaatc

SEQ ID NO: 8838 - DNA, 23 bp, synthetic construct
  misc_feature 1..23: note = Probe
  source 1..23: mol_type = other DNA
ttagcactctggactctgaatcc

SEQ ID NO: 8839 - DNA, 18 bp, synthetic construct
  misc_feature 1..18: note = Probe
  source 1..18: mol_type = other DNA
ttcaggtcgcagtctccc

SEQ ID NO: 8840 - DNA, 22 bp, synthetic construct
  misc_feature 1..22: note = Probe
  source 1..22: mol_type = other DNA
ttgggtccgagaggtcccgggt

SEQ ID NO: 8841 - DNA, 22 bp, synthetic construct
  misc_feature 1..22: note = Probe
  source 1..22: mol_type = other DNA
ttgggtgcgagaggtcccgggt

SEQ ID NO: 8842 - DNA, 18 bp, synthetic construct
  misc_feature 1..18: note = Probe
  source 1..18: mol_type = other DNA
ttggtcgtggttgtagtc

SEQ ID NO: 8843 - DNA, 19 bp, synthetic construct
  misc_feature 1..19: note = Probe
  source 1..19: mol_type = other DNA
ttggtcgtggttgtagtcc

SEQ ID NO: 8844 - DNA, 20 bp, synthetic construct
  misc_feature 1..20: note = Probe
  source 1..20: mol_type = other DNA
ttggtcgtggttgtagtccg

SEQ ID NO: 8845 - DNA, 21 bp, synthetic construct
  misc_feature 1..21: note = Probe
  source 1..21: mol_type = other DNA
ttggtcgtggttgtagtccgt

SEQ ID NO: 8846 - DNA, 22 bp, synthetic construct
  misc_feature 1..22: note = Probe
  source 1..22: mol_type = other DNA
ttggtcgtggttgtagtccgtg

SEQ ID NO: 8847 - DNA, 23 bp, synthetic construct
  misc_feature 1..23: note = Probe
  source 1..23: mol_type = other DNA
ttggtcgtggttgtagtccgtgc

SEQ ID NO: 8848 - DNA, 24 bp, synthetic construct
  misc_feature 1..24: note = Probe
  source 1..24: mol_type = other DNA
ttggtcgtggttgtagtccgtgcg

SEQ ID NO: 8849 - DNA, 25 bp, synthetic construct
  misc_feature 1..25: note = Probe
  source 1..25: mol_type = other DNA
ttggtcgtggttgtagtccgtgcga

SEQ ID NO: 8850 - DNA, 26 bp, synthetic construct
  misc_feature 1..26: note = Probe
  source 1..26: mol_type = other DNA
ttggtcgtggttgtagtccgtgcgag

SEQ ID NO: 8851 - DNA, 27 bp, synthetic construct
  misc_feature 1..27: note = Probe
  source 1..27: mol_type = other DNA
ttggtcgtggttgtagtccgtgcgaga

SEQ ID NO: 8852 - DNA, 29 bp, synthetic construct
  misc_feature 1..29: note = Probe
  source 1..29: mol_type = other DNA
ttggtcgtggttgtagtccgtgcgagaat

SEQ ID NO: 8853 - DNA, 20 bp, synthetic construct
  misc_feature 1..20: note = Probe
  source 1..20: mol_type = other DNA
aaaaaggattagactgaacc

SEQ ID NO: 8854 - DNA, 21 bp, synthetic construct
  misc_feature 1..21: note = Probe
  source 1..21: mol_type = other DNA
aaaaaggattagactgaaccg

SEQ ID NO: 8855 - DNA, 25 bp, synthetic construct
  misc_feature 1..25: note = Probe
  source 1..25: mol_type = other DNA
aaaacatcagattgtgaatctgaca

SEQ ID NO: 8856 - DNA, 28 bp, synthetic construct
  misc_feature 1..28: note = Probe
  source 1..28: mol_type = other DNA
aaaacatcagattgtgaatctgacaaca

SEQ ID NO: 8857 - DNA, 29 bp, synthetic construct
  misc_feature 1..29: note = Probe
  source 1..29: mol_type = other DNA
aaaacatcagattgtgaatctgacaacag

SEQ ID NO: 8858 - DNA, 19 bp, synthetic construct
  misc_feature 1..19: note = Probe
  source 1..19: mol_type = other DNA
aaaaggattagactgaacc

SEQ ID NO: 8859 - DNA, 20 bp, synthetic construct
  misc_feature 1..20: note = Probe
  source 1..20: mol_type = other DNA
aaaaggattagactgaaccg

SEQ ID NO: 8860 - DNA, 28 bp, synthetic construct
  misc_feature 1..28: note = Probe
  source 1..28: mol_type = other DNA
aaaatggctgagtgaagcattggactgt

SEQ ID NO: 8861 - DNA, 29 bp, synthetic construct
  misc_feature 1..29: note = Probe
  source 1..29: mol_type = other DNA
aaaatggctgagtgaagcattggactgta

SEQ ID NO: 8862 - DNA, 19 bp, synthetic construct
  misc_feature 1..19: note = Probe
  source 1..19: mol_type = other DNA
aaaatgtttagacgggctc

SEQ ID NO: 8863 - DNA, 23 bp, synthetic construct
  misc_feature 1..23: note = Probe
  source 1..23: mol_type = other DNA
aaacatcagattgtgaatctgac

SEQ ID NO: 8864 - DNA, 24 bp, synthetic construct
  misc_feature 1..24: note = Probe
  source 1..24: mol_type = other DNA
aaacatcagattgtgaatctgaca

SEQ ID NO: 8865 - DNA, 27 bp, synthetic construct
  misc_feature 1..27: note = Probe
  source 1..27: mol_type = other DNA
aaacatcagattgtgaatctgacaaca

SEQ ID NO: 8866 - DNA, 29 bp, synthetic construct
  misc_feature 1..29: note = Probe
  source 1..29: mol_type = other DNA
aaacatcagattgtgaatctgacaacaga

SEQ ID NO: 8867 - DNA, 30 bp, synthetic construct
  misc_feature 1..30: note = Probe
  source 1..30: mol_type = other DNA
aaacatcagattgtgaatctgacaacagag

SEQ ID NO: 8868 - DNA, 16 bp, synthetic construct
  misc_feature 1..16: note = Probe
  source 1..16: mol_type = other DNA
aaagacaccccccaca

SEQ ID NO: 8869 - DNA, 15 bp, synthetic construct
  misc_feature 1..15: note = Probe
  source 1..15: mol_type = other DNA
aaagactttttctct

SEQ ID NO: 8870 - DNA, 17 bp, synthetic construct
  misc_feature 1..17: note = Probe
  source 1..17: mol_type = other DNA
aaagactttttctctga

SEQ ID NO: 8871 - DNA, 29 bp, synthetic construct
  misc_feature 1..29: note = Probe
  source 1..29: mol_type = other DNA
aaagattaagagaaccaacacctctttac

SEQ ID NO: 8872 - DNA, 18 bp, synthetic construct
  misc_feature 1..18: note = Probe
  source 1..18: mol_type = other DNA
aaaggattagactgaacc

SEQ ID NO: 8873 - DNA, 20 bp, synthetic construct
  misc_feature 1..20: note = Probe
  source 1..20: mol_type = other DNA
aaatctcggtggaacctgca

SEQ ID NO: 8874 - DNA, 27 bp, synthetic construct
  misc_feature 1..27: note = Probe
  source 1..27: mol_type = other DNA
aaatggctgagtgaagcattggactgt

SEQ ID NO: 8875 - DNA, 28 bp, synthetic construct
  misc_feature 1..28: note = Probe
  source 1..28: mol_type = other DNA
aaatggctgagtgaagcattggactgta

SEQ ID NO: 8876 - DNA, 29 bp, synthetic construct
  misc_feature 1..29: note = Probe
  source 1..29: mol_type = other DNA
aaatggctgagtgaagcattggactgtaa

SEQ ID NO: 8877 - DNA, 18 bp, synthetic construct
  misc_feature 1..18: note = Probe
  source 1..18: mol_type = other DNA
aaatgtttagacgggctc

SEQ ID NO: 8878 - DNA, 19 bp, synthetic construct
  misc_feature 1..19: note = Probe
  source 1..19: mol_type = other DNA
aaatgtttagacgggctca

SEQ ID NO: 8879 - DNA, 20 bp, synthetic construct
  misc_feature 1..20: note = Probe
  source 1..20: mol_type = other DNA
aaatgtttagacgggctcac

SEQ ID NO: 8880 - DNA, 21 bp, synthetic construct
  misc_feature 1..21: note = Probe
  source 1..21: mol_type = other DNA
aaatgtttagacgggctcaca

SEQ ID NO: 8881 - DNA, 15 bp, synthetic construct
  misc_feature 1..15: note = Probe
  source 1..15: mol_type = other DNA
aacagctaaggactg

SEQ ID NO: 8882 - DNA, 17 bp, synthetic construct
  misc_feature 1..17: note = Probe
  source 1..17: mol_type = other DNA
aacagctaaggactgca

SEQ ID NO: 8883 - DNA, 18 bp, synthetic construct
  misc_feature 1..18: note = Probe
  source 1..18: mol_type = other DNA
aacagctaaggactgcaa

SEQ ID NO: 8884 - DNA, 19 bp, synthetic construct
  misc_feature 1..19: note = Probe
  source 1..19: mol_type = other DNA
aacagctaaggactgcaaa

SEQ ID NO: 8885 - DNA, 20 bp, synthetic construct
  misc_feature 1..20: note = Probe
  source 1..20: mol_type = other DNA
aacagctaaggactgcaaaa

SEQ ID NO: 8886 - DNA, 21 bp, synthetic construct
  misc_feature 1..21: note = Probe
  source 1..21: mol_type = other DNA
aacagctaaggactgcaaaac

SEQ ID NO: 8887 - DNA, 22 bp, synthetic construct
  misc_feature 1..22: note = Probe
  source 1..22: mol_type = other DNA
aacagctaaggactgcaaaacc

SEQ ID NO: 8888 - DNA, 23 bp, synthetic construct
  misc_feature 1..23: note = Probe
  source 1..23: mol_type = other DNA
aacagctaaggactgcaaaaccc

SEQ ID NO: 8889 - DNA, 24 bp, synthetic construct
  misc_feature 1..24: note = Probe
  source 1..24: mol_type = other DNA
aacagctaaggactgcaaaacccc

SEQ ID NO: 8890 - DNA, 25 bp, synthetic construct
  misc_feature 1..25: note = Probe
  source 1..25: mol_type = other DNA
aacagctaaggactgcaaaacccca

SEQ ID NO: 8891 - DNA, 26 bp, synthetic construct
  misc_feature 1..26: note = Probe
  source 1..26: mol_type = other DNA
aacagctaaggactgcaaaaccccac

SEQ ID NO: 8892 - DNA, 27 bp, synthetic construct
  misc_feature 1..27: note = Probe
  source 1..27: mol_type = other DNA
aacagctaaggactgcaaaaccccact

SEQ ID NO: 8893 - DNA, 28 bp, synthetic construct
  misc_feature 1..28: note = Probe
  source 1..28: mol_type = other DNA
aacagctaaggactgcaaaaccccactc

SEQ ID NO: 8894 - DNA, 29 bp, synthetic construct
  misc_feature 1..29: note = Probe
  source 1..29: mol_type = other DNA
aacagctaaggactgcaaaaccccactct

SEQ ID NO: 8895 - DNA, 17 bp, synthetic construct
  misc_feature 1..17: note = Probe
  source 1..17: mol_type = other DNA
aacagctatccattggt

SEQ ID NO: 8896 - DNA, 22 bp, synthetic construct
  misc_feature 1..22: note = Probe
  source 1..22: mol_type = other DNA
aacatcagattgtgaatctgac

SEQ ID NO: 8897 - DNA, 23 bp, synthetic construct
  misc_feature 1..23: note = Probe
  source 1..23: mol_type = other DNA
aacatcagattgtgaatctgaca

SEQ ID NO: 8898 - DNA, 26 bp, synthetic construct
  misc_feature 1..26: note = Probe
  source 1..26: mol_type = other DNA
aacatcagattgtgaatctgacaaca

SEQ ID NO: 8899 - DNA, 27 bp, synthetic construct
  misc_feature 1..27: note = Probe
  source 1..27: mol_type = other DNA
aacatcagattgtgaatctgacaacag

SEQ ID NO: 8900 - DNA, 28 bp, synthetic construct
  misc_feature 1..28: note = Probe
  source 1..28: mol_type = other DNA
aacatcagattgtgaatctgacaacaga

SEQ ID NO: 8901 - DNA, 29 bp, synthetic construct
  misc_feature 1..29: note = Probe
  source 1..29: mol_type = other DNA
aacatcagattgtgaatctgacaacagag

SEQ ID NO: 8902 - DNA, 30 bp, synthetic construct
  misc_feature 1..30: note = Probe
  source 1..30: mol_type = other DNA
aacatcagattgtgaatctgacaacagagg

SEQ ID NO: 8903 - DNA, 18 bp, synthetic construct
  misc_feature 1..18: note = Probe
  source 1..18: mol_type = other DNA
aaccgggcggaaacacct

SEQ ID NO: 8904 - DNA, 15 bp, synthetic construct
  misc_feature 1..15: note = Probe
  source 1..15: mol_type = other DNA
aactgctaactcatg

SEQ ID NO: 8905 - DNA, 15 bp, synthetic construct
  misc_feature 1..15: note = Probe
  source 1..15: mol_type = other DNA
aacttaacttgaccg

SEQ ID NO: 8906 - DNA, 17 bp, synthetic construct
  misc_feature 1..17: note = Probe
  source 1..17: mol_type = other DNA
aacttaacttgaccgct

SEQ ID NO: 8907 - DNA, 18 bp, synthetic construct
  misc_feature 1..18: note = Probe
  source 1..18: mol_type = other DNA
aacttaacttgaccgctc

SEQ ID NO: 8908 - DNA, 19 bp, synthetic construct
  misc_feature 1..19: note = Probe
  source 1..19: mol_type = other DNA
aacttaacttgaccgctct

SEQ ID NO: 8909 - DNA, 20 bp, synthetic construct
  misc_feature 1..20: note = Probe
  source 1..20: mol_type = other DNA
aacttaacttgaccgctctg

SEQ ID NO: 8910 - DNA, 21 bp, synthetic construct
  misc_feature 1..21: note = Probe
  source 1..21: mol_type = other DNA
aacttaacttgaccgctctga

SEQ ID NO: 8911 - DNA, 22 bp, synthetic construct
  misc_feature 1..22: note = Probe
  source 1..22: mol_type = other DNA
aacttaacttgaccgctctgag

SEQ ID NO: 8912 - DNA, 23 bp, synthetic construct
  misc_feature 1..23: note = Probe
  source 1..23: mol_type = other DNA
aacttaacttgaccgctctgagc

SEQ ID NO: 8913 - DNA, 25 bp, synthetic construct
  misc_feature 1..25: note = Probe
  source 1..25: mol_type = other DNA
aacttccaattaactagttttgaca

SEQ ID NO: 8914 - DNA, 28 bp, synthetic construct
  misc_feature 1..28: note = Probe
  source 1..28: mol_type = other DNA
aacttccaattaactagttttgacaaca

SEQ ID NO: 8915 - DNA, 15 bp, synthetic construct
  misc_feature 1..15: note = Probe
  source 1..15: mol_type = other DNA
aacttgaccgctctg

SEQ ID NO: 8916 - DNA, 16 bp, synthetic construct
  misc_feature 1..16: note = Probe
  source 1..16: mol_type = other DNA
aacttgaccgctctga

SEQ ID NO: 8917 - DNA, 17 bp, synthetic construct
  misc_feature 1..17: note = Probe
  source 1..17: mol_type = other DNA
aacttgaccgctctgag

SEQ ID NO: 8918 - DNA, 18 bp, synthetic construct
  misc_feature 1..18: note = Probe
  source 1..18: mol_type = other DNA
aacttgaccgctctgagc

SEQ ID NO: 8919 - DNA, 19 bp, synthetic construct
  misc_feature 1..19: note = Probe
  source 1..19: mol_type = other DNA
aacttgaccgctctgagct

SEQ ID NO: 8920 - DNA, 18 bp, synthetic construct
  misc_feature 1..18: note = Probe
  source 1..18: mol_type = other DNA
aagaactgctaactcatg

SEQ ID NO: 8921 - DNA, 19 bp, synthetic construct
  misc_feature 1..19: note = Probe
  source 1..19: mol_type = other DNA
aagaactgctaactcatgc

SEQ ID NO: 8922 - DNA, 30 bp, synthetic construct; identical to SEQ ID NO: 2246
  misc_feature 1..30: note = Probe
  source 1..30: mol_type = other DNA

SEQ ID NO: 8923 - DNA, 15 bp, synthetic construct
  misc_feature 1..15: note = Probe
  source 1..15: mol_type = other DNA
aagactttttctctg

SEQ ID NO: 8924 - DNA, 16 bp, synthetic construct
  misc_feature 1..16: note = Probe
  source 1..16: mol_type = other DNA
aagactttttctctga

SEQ ID NO: 8925 - DNA, 21 bp, synthetic construct
  misc_feature 1..21: note = Probe
  source 1..21: mol_type = other DNA
aagattaagagaaccaacacc

SEQ ID NO: 8926 - DNA, 30 bp, synthetic construct
  misc_feature 1..30: note = Probe
  source 1..30: mol_type = other DNA
aagattaagagaaccaacacctctttacag

SEQ ID NO: 8927 - DNA, 20 bp, synthetic construct
  misc_feature 1..20: note = Probe
  source 1..20: mol_type = other DNA
aagattccaggttcgactcc

SEQ ID NO: 8928 - DNA, 30 bp, synthetic construct
  misc_feature 1..30: note = Probe
  source 1..30: mol_type = other DNA
aagattccaggttcgactcctggctggctc

SEQ ID NO: 8929 - DNA, 15 bp, synthetic construct
  misc_feature 1..15: note = Probe
  source 1..15: mol_type = other DNA
aagcattggactgta

SEQ ID NO: 8930 - DNA, 19 bp, synthetic construct
  misc_feature 1..19: note = Probe
  source 1..19: mol_type = other DNA
aagcattggactgtaaatc

SEQ ID NO: 8931 - DNA, 20 bp, synthetic construct
  misc_feature 1..20: note = Probe
  source 1..20: mol_type = other DNA
aagcattggactgtaaatct

SEQ ID NO: 8932 - DNA, 21 bp, synthetic construct
  misc_feature 1..21: note = Probe
  source 1..21: mol_type = other DNA
aagcattggactgtaaatcta

SEQ ID NO: 8933 - DNA, 22 bp, synthetic construct
  misc_feature 1..22: note = Probe
  source 1..22: mol_type = other DNA
aaggactgcaaaaccccactct

SEQ ID NO: 8934 - DNA, 19 bp, synthetic construct
  misc_feature 1..19: note = Probe
  source 1..19: mol_type = other DNA
aaggctccagtctcttcgg

SEQ ID NO: 8935 - DNA, 20 bp, synthetic construct
  misc_feature 1..20: note = Probe
  source 1..20: mol_type = other DNA
aaggctccagtctcttcggg

SEQ ID NO: 8936 - DNA, 25 bp, synthetic construct
  misc_feature 1..25: note = Probe
  source 1..25: mol_type = other DNA
aagggcttagcttaattaaagtggc

SEQ ID NO: 8937 - DNA, 29 bp, synthetic construct
  misc_feature 1..29: note = Probe
  source 1..29: mol_type = other DNA
aagggcttagcttaattaaagtggctgat

SEQ ID NO: 8938 - DNA, 17 bp, synthetic construct
  misc_feature 1..17: note = Probe
  source 1..17: mol_type = other DNA
aaggtattagaaaaacc

SEQ ID NO: 8939 - DNA, 25 bp, synthetic construct
  misc_feature 1..25: note = Probe
  source 1..25: mol_type = other DNA
aaggtattagaaaaaccatttcata

SEQ ID NO: 8940 - DNA, 24 bp, synthetic construct
  misc_feature 1..24: note = Probe
  source 1..24: mol_type = other DNA
aaggtccccggttcgaaaccgggc

SEQ ID NO: 8941 - DNA, 30 bp, synthetic construct
  misc_feature 1..30: note = Probe
  source 1..30: mol_type = other DNA
aaggtcctgggttcgagccccagtggaacc

SEQ ID NO: 8942 - DNA, 24 bp, synthetic construct
  misc_feature 1..24: note = Probe
  source 1..24: mol_type = other DNA
aaggtcgcgggttcgatccccgta

SEQ ID NO: 8943 - DNA, 23 bp, synthetic construct
  misc_feature 1..23: note = Probe
  source 1..23: mol_type = other DNA
aaggttccgggttcgagtcccgg

SEQ ID NO: 8944 - DNA, 24 bp, synthetic construct
  misc_feature 1..24: note = Probe
  source 1..24: mol_type = other DNA
aaggttccgggttcgagtcccggc

SEQ ID NO: 8945 - DNA, 25 bp, synthetic construct
  misc_feature 1..25: note = Probe
  source 1..25: mol_type = other DNA
aaggttccgggttcgagtcccggcg

SEQ ID NO: 8946 - DNA, 28 bp, synthetic construct
  misc_feature 1..28: note = Probe
  source 1..28: mol_type = other DNA
aaggttccgggttcgagtcccggcggag

SEQ ID NO: 8947 - DNA, 21 bp, synthetic construct
  misc_feature 1..21: note = Probe
  source 1..21: mol_type = other DNA
aataacgccaaggtcgcgggt

SEQ ID NO: 8948 - DNA, 19 bp, synthetic construct
  misc_feature 1..19: note = Probe
  source 1..19: mol_type = other DNA
aatccagcgatccgagttc

SEQ ID NO: 8949 - DNA, 20 bp, synthetic construct
  misc_feature 1..20: note = Probe
  source 1..20: mol_type = other DNA
aatccagcgatccgagttca

SEQ ID NO: 8950 - DNA, 21 bp, synthetic construct
  misc_feature 1..21: note = Probe
  source 1..21: mol_type = other DNA
aatccagcgatccgagttcaa

SEQ ID NO: 8951 - DNA, 22 bp, synthetic construct
  misc_feature 1..22: note = Probe
  source 1..22: mol_type = other DNA
aatccagcgatccgagttcaaa

SEQ ID NO: 8952 - DNA, 23 bp, synthetic construct
  misc_feature 1..23: note = Probe
  source 1..23: mol_type = other DNA
aatccagcgatccgagttcaaat

SEQ ID NO: 8953 - DNA, 24 bp, synthetic construct
  misc_feature 1..24: note = Probe
  source 1..24: mol_type = other DNA
aatccagcgatccgagttcaaatc

SEQ ID NO: 8954 - DNA, 19 bp, synthetic construct
  misc_feature 1..19: note = Probe
  source 1..19: mol_type = other DNA
aatcccagcggtgcctcaa

SEQ ID NO: 8955 - DNA, 19 bp, synthetic construct
  misc_feature 1..19: note = Probe
  source 1..19: mol_type = other DNA
aatcccagcggtgcctccg

SEQ ID NO: 8956 - DNA, 20 bp, synthetic construct
  misc_feature 1..20: note = Probe
  source 1..20: mol_type = other DNA
aatccccggcacctccacca

SEQ ID NO: 8957 - DNA, 18 bp, synthetic construct
  misc_feature 1..18: note = Probe
  source 1..18: mol_type = other DNA
aatcccggacgagccccc

SEQ ID NO: 8958 - DNA, 19 bp, synthetic construct
  misc_feature 1..19: note = Probe
  source 1..19: mol_type = other DNA
aatccggctcgaaggacga

SEQ ID NO: 8959 - DNA, 17 bp, synthetic construct
  misc_feature 1..17: note = Probe
  source 1..17: mol_type = other DNA
aatctcggtggaacctg

SEQ ID NO: 8960 - DNA, 19 bp, synthetic construct
  misc_feature 1..19: note = Probe
  source 1..19: mol_type = other DNA
aatctcggtggaacctgca

SEQ ID NO: 8961 - DNA, 19 bp, synthetic construct
  misc_feature 1..19: note = Probe
  source 1..19: mol_type = other DNA
aatgccgaggttgtgagtt

SEQ ID NO: 8962 - DNA, 20 bp, synthetic construct
  misc_feature 1..20: note = Probe
  source 1..20: mol_type = other DNA
aatggataacgcgtctgact

SEQ ID NO: 8963 - DNA, 26 bp, synthetic construct
  misc_feature 1..26: note = Probe
  source 1..26: mol_type = other DNA
aatggctgagtgaagcattggactgt

SEQ ID NO: 8964 - DNA, 27 bp, synthetic construct
  misc_feature 1..27: note = Probe
  source 1..27: mol_type = other DNA
aatggctgagtgaagcattggactgta

SEQ ID NO: 8965 - DNA, 28 bp, synthetic construct
  misc_feature 1..28: note = Probe
  source 1..28: mol_type = other DNA
aatggctgagtgaagcattggactgtaa

SEQ ID NO: 8966 - DNA, 18 bp, synthetic construct
  misc_feature 1..18: note = Probe
  source 1..18: mol_type = other DNA
aatggtggagttaaagac

SEQ ID NO: 8967 - DNA, 19 bp, synthetic construct
  misc_feature 1..19: note = Probe
  source 1..19: mol_type = other DNA
aatggtggagttaaagact

SEQ ID NO: 8968 - DNA, 29 bp, synthetic construct
  misc_feature 1..29: note = Probe
  source 1..29: mol_type = other DNA
aatggtggagttaaagactttttctctga

SEQ ID NO: 8969 - DNA, 30 bp, synthetic construct
  misc_feature 1..30: note = Probe
  source 1..30: mol_type = other DNA
aatggtggagttaaagactttttctctgat

SEQ ID NO: 8970 - DNA, 16 bp, synthetic construct
  misc_feature 1..16: note = Probe
  source 1..16: mol_type = other DNA
aatggttagcactctg

SEQ ID NO: 8971 - DNA, 17 bp, synthetic construct
  misc_feature 1..17: note = Probe
  source 1..17: mol_type = other DNA
aatggttagcactctgg

SEQ ID NO: 8972 - DNA, 18 bp, synthetic construct
  misc_feature 1..18: note = Probe
  source 1..18: mol_type = other DNA
aatggttagcactctgga

SEQ ID NO: 8973 - DNA, 19 bp, synthetic construct
  misc_feature 1..19: note = Probe
  source 1..19: mol_type = other DNA
aatggttagcactctggac

SEQ ID NO: 8974 - DNA, 20 bp, synthetic construct
  misc_feature 1..20: note = Probe
  source 1..20: mol_type = other DNA
aatggttagcactctggact

SEQ ID NO: 8975 - DNA, 21 bp, synthetic construct
  misc_feature 1..21: note = Probe
  source 1..21: mol_type = other DNA
aatggttagcactctggactc

SEQ ID NO: 8976 - DNA, 22 bp, synthetic construct
  misc_feature 1..22: note = Probe
  source 1..22: mol_type = other DNA
aatggttagcactctggactct

SEQ ID NO: 8977 - DNA, 23 bp, synthetic construct
  misc_feature 1..23: note = Probe
  source 1..23: mol_type = other DNA
aatggttagcactctggactctg

SEQ ID NO: 8978 - DNA, 24 bp, synthetic construct
  misc_feature 1..24: note = Probe
  source 1..24: mol_type = other DNA
aatggttagcactctggactctga

SEQ ID NO: 8979 - DNA, 27 bp, synthetic construct
  misc_feature 1..27: note = Probe
  source 1..27: mol_type = other DNA
aatggttagcactctggactctgaatc

SEQ ID NO: 8980 - DNA, 21 bp, synthetic construct
  misc_feature 1..21: note = Probe
  source 1..21: mol_type = other DNA
aatggttagcactctggactt

SEQ ID NO: 8981 - DNA, 22 bp, synthetic construct
  misc_feature 1..22: note = Probe
  source 1..22: mol_type = other DNA
aatggttagcactctggacttt

SEQ ID NO: 8982 - DNA, 18 bp, synthetic construct
  misc_feature 1..18: note = Probe
  source 1..18: mol_type = other DNA
aattaactagttttgaca

SEQ ID NO: 8983 - DNA, 20 bp, synthetic construct
  misc_feature 1..20: note = Probe
  source 1..20: mol_type = other DNA
aattaactagttttgacaac

SEQ ID NO: 8984 - DNA, 21 bp, synthetic construct
  misc_feature 1..21: note = Probe
  source 1..21: mol_type = other DNA
aattaactagttttgacaaca

SEQ ID NO: 8985 - DNA, 29 bp, synthetic construct
  misc_feature 1..29: note = Probe
  source 1..29: mol_type = other DNA
aattaactagttttgacaacattcaaaaa

SEQ ID NO: 8986 - DNA, 20 bp, synthetic construct
  misc_feature 1..20: note = Probe
  source 1..20: mol_type = other DNA
aattcccggtcagggaacca

SEQ ID NO: 8987 - DNA, 16 bp, synthetic construct
  misc_feature 1..16: note = Probe
  source 1..16: mol_type = other DNA
aattctcgcctgccac

SEQ ID NO: 8988 - DNA, 22 bp, synthetic construct
  misc_feature 1..22: note = Probe
  source 1..22: mol_type = other DNA
acaaaaaggattagactgaacc

SEQ ID NO: 8989 - DNA, 23 bp, synthetic construct
  misc_feature 1..23: note = Probe
  source 1..23: mol_type = other DNA
acaaaaaggattagactgaaccg

SEQ ID NO: 8990 - DNA, 15 bp, synthetic construct
  misc_feature 1..15: note = Probe
  source 1..15: mol_type = other DNA
acaacagaggcttac

SEQ ID NO: 8991 - DNA, 16 bp, synthetic construct
  misc_feature 1..16: note = Probe
  source 1..16: mol_type = other DNA
acaacagaggcttacg

SEQ ID NO: 8992 - DNA, 17 bp, synthetic construct
  misc_feature 1..17: note = Probe
  source 1..17: mol_type = other DNA
acaacagaggcttacga

SEQ ID NO: 8993 - DNA, 18 bp, synthetic construct
  misc_feature 1..18: note = Probe
  source 1..18: mol_type = other DNA
acaacagaggcttacgac

SEQ ID NO: 8994 - DNA, 19 bp, synthetic construct
  misc_feature 1..19: note = Probe
  source 1..19: mol_type = other DNA
acaacagaggcttacgacc

SEQ ID NO: 8995 - DNA, 22 bp, synthetic construct
  misc_feature 1..22: note = Probe
  source 1..22: mol_type = other DNA
acaacagaggcttacgacccct

SEQ ID NO: 8996 - DNA, 20 bp, synthetic construct
  misc_feature 1..20: note = Probe
  source 1..20: mol_type = other DNA
acaagaactgctaactcatg

SEQ ID NO: 8997 - DNA, 22 bp, synthetic construct
  misc_feature 1..22: note = Probe
  source 1..22: mol_type = other DNA
acaagaactgctaactcatgcc

SEQ ID NO: 8998 - DNA, 19 bp, synthetic construct
  misc_feature 1..19: note = Probe
  source 1..19: mol_type = other DNA
acacggggcacaataattt

SEQ ID NO: 8999 - DNA, 30 bp, synthetic construct
  misc_feature 1..30: note = Probe
  source 1..30: mol_type = other DNA
acacttaggagatttcaacttaacttgacc

SEQ ID NO: 9000 - DNA, 16 bp, synthetic construct
  misc_feature 1..16: note = Probe
  source 1..16: mol_type = other DNA
acagctatccattggt

SEQ ID NO: 9001 - DNA, 30 bp, synthetic construct
  misc_feature 1..30: note = Probe
  source 1..30: mol_type = other DNA
acaggagatcctgggttcgaatcccagcgg

SEQ ID NO: 9002 - DNA, 20 bp, synthetic construct
  misc_feature 1..20: note = Probe
  source 1..20: mol_type = other DNA
acatacccatggccaacctc

SEQ ID NO: 9003 - DNA, 21 bp, synthetic construct
  misc_feature 1..21: note = Probe
  source 1..21: mol_type = other DNA
acatacccatggccaacctcc

SEQ ID NO: 9004 - DNA, 22 bp, synthetic construct
  misc_feature 1..22: note = Probe
  source 1..22: mol_type = other DNA
acatacccatggccaacctcct

SEQ ID NO: 9005 - DNA, 22 bp, synthetic construct
  misc_feature 1..22: note = Probe
  source 1..22: mol_type = other DNA
acatcagattgtgaatctgaca

SEQ ID NO: 9006 - DNA, 25 bp, synthetic construct
  misc_feature 1..25: note = Probe
  source 1..25: mol_type = other DNA
acatcagattgtgaatctgacaaca

SEQ ID NO: 9007 - DNA, 26 bp, synthetic construct
  misc_feature 1..26: note = Probe
  source 1..26: mol_type = other DNA
acatggtctagcggttaggattcctg

SEQ ID NO: 9008 - DNA, 27 bp, synthetic construct
  misc_feature 1..27: note = Probe
  source 1..27: mol_type = other DNA
acatggtctagcggttaggattcctgg

SEQ ID NO: 9009 - DNA, 30 bp, synthetic construct; identical to SEQ ID NO: 2689
  misc_feature 1..30: note = Probe
  source 1..30: mol_type = other DNA

SEQ ID NO: 9010 - DNA, 25 bp, synthetic construct
  misc_feature 1..25: note = Probe
  source 1..25: mol_type = other DNA
accagaatggccgagtggttaaggc

SEQ ID NO: 9011 - DNA, 15 bp, synthetic construct
  misc_feature 1..15: note = Probe
  source 1..15: mol_type = other DNA
accaggatggccgag

SEQ ID NO: 9012 - DNA, 16 bp, synthetic construct
  misc_feature 1..16: note = Probe
  source 1..16: mol_type = other DNA
accaggatggccgagt

SEQ ID NO: 9013 - DNA, 17 bp, synthetic construct
  misc_feature 1..17: note = Probe
  source 1..17: mol_type = other DNA
accaggatggccgagtg

SEQ ID NO: 9014 - DNA, 24 bp, synthetic construct
  misc_feature 1..24: note = Probe
  source 1..24: mol_type = other DNA
accaggatggccgagtggttaagg

SEQ ID NO: 9015 - DNA, 30 bp, synthetic construct
  misc_feature 1..30: note = Probe
  source 1..30: mol_type = other DNA
accaggatggccgagtggttaaggcgttgg

SEQ ID NO: 9016 - DNA, 18 bp, synthetic construct
  misc_feature 1..18: note = Probe
  source 1..18: mol_type = other DNA
acccaagaacagggtttg

SEQ ID NO: 9017 - DNA, 20 bp, synthetic construct
  misc_feature 1..20: note = Probe
  source 1..20: mol_type = other DNA
acccaagaacagggtttgtt

SEQ ID NO: 9018 - DNA, 21 bp, synthetic construct
  misc_feature 1..21: note = Probe
  source 1..21: mol_type = other DNA
acccaagaacagggtttgtta

SEQ ID NO: 9019 - DNA, 22 bp, synthetic construct
  misc_feature 1..22: note = Probe
  source 1..22: mol_type = other DNA
acccaagaacagggtttgttaa

SEQ ID NO: 9020 - DNA, 23 bp, synthetic construct
  misc_feature 1..23: note = Probe
  source 1..23: mol_type = other DNA
acccaagaacagggtttgttaag

SEQ ID NO: 9021 - DNA, 24 bp, synthetic construct
  misc_feature 1..24: note = Probe
  source 1..24: mol_type = other DNA
acccaagaacagggtttgttaaga

SEQ ID NO: 9022 - DNA, 17 bp, synthetic construct
  misc_feature 1..17: note = Probe
  source 1..17: mol_type = other DNA
accctgtggtctagtgg

SEQ ID NO: 9023 - DNA, 18 bp, synthetic construct
  misc_feature 1..18: note = Probe
  source 1..18: mol_type = other DNA
accctgtggtctagtggc

SEQ ID NO: 9024 - DNA, 20 bp, synthetic construct
  misc_feature 1..20: note = Probe
  source 1..20: mol_type = other DNA
accctgtggtctagtggcta

SEQ ID NO: 9025 - DNA, 18 bp, synthetic construct
  misc_feature 1..18: note = Probe
  source 1..18: mol_type = other DNA
accctgtggtctagtggt

SEQ ID NO: 9026 - DNA, 19 bp, synthetic construct
  misc_feature 1..19: note = Probe
  source 1..19: mol_type = other DNA
accctgtggtctagtggtt

SEQ ID NO: 9027 - DNA, 20 bp, synthetic construct
  misc_feature 1..20: note = Probe
  source 1..20: mol_type = other DNA
accctgtggtctagtggtta

SEQ ID NO: 9028 - DNA, 21 bp, synthetic construct
  misc_feature 1..21: note = Probe
  source 1..21: mol_type = other DNA
accctgtggtctagtggttag

SEQ ID NO: 9029 - DNA, 22 bp, synthetic construct
  misc_feature 1..22: note = Probe
  source 1..22: mol_type = other DNA
accctgtggtctagtggttagg

SEQ ID NO: 9030 - DNA, 23 bp, synthetic construct
  misc_feature 1..23: note = Probe
  source 1..23: mol_type = other DNA
accctgtggtctagtggttagga

SEQ ID NO: 9031 - DNA, 30 bp, synthetic construct
  misc_feature 1..30: note = Probe
  source 1..30: mol_type = other DNA
accgaagatcacgggttcgaaccccgtccg

SEQ ID NO: 9032 - DNA, 30 bp, synthetic construct
  misc_feature 1..30: note = Probe
  source 1..30: mol_type = other DNA
accgccgcggcccgggttcgattcccggtc

SEQ ID NO: 9033 - DNA, 18 bp, synthetic construct
  misc_feature 1..18: note = Probe
  source 1..18: mol_type = other DNA
accgcgtggcctaatgga

SEQ ID NO: 9034 - DNA, 29 bp, synthetic construct
  misc_feature 1..29: note = Probe
  source 1..29: mol_type = other DNA
accgcgtggcctaatggataaggcgtctg

SEQ ID NO: 9035 - DNA, 17 bp, synthetic construct
  misc_feature 1..17: note = Probe
  source 1..17: mol_type = other DNA
accgggcggaaacacct

SEQ ID NO: 9036 - DNA, 15 bp, synthetic construct
  misc_feature 1..15: note = Probe
  source 1..15: mol_type = other DNA
acctattctcaaact

SEQ ID NO: 9037 - DNA, 20 bp, synthetic construct
  misc_feature 1..20: note = Probe
  source 1..20: mol_type = other DNA
acctcagaaggtctcacttt

SEQ ID NO: 9038 - DNA, 21 bp, synthetic construct
  misc_feature 1..21: note = Probe
  source 1..21: mol_type = other DNA
acctcagaaggtctcactttt

SEQ ID NO: 9039 - DNA, 30 bp, synthetic construct
  misc_feature 1..30: note = Probe
  source 1..30: mol_type = other DNA
acctcgtggcgcaacggtagcgcgtctgac

SEQ ID NO: 9040 - DNA, 30 bp, synthetic construct
  misc_feature 1..30: note = Probe
  source 1..30: mol_type = other DNA
acctcgtggcgcaatggtagcgcgtctgac

SEQ ID NO: 9041 - DNA, 23 bp, synthetic construct
  misc_feature 1..23: note = Probe
  source 1..23: mol_type = other DNA
acgaggtggccgagtggttaagg

SEQ ID NO: 9042 - DNA, 29 bp, synthetic construct
  misc_feature 1..29: note = Probe
  source 1..29: mol_type = other DNA
acgaggtggccgagtggttaaggcgatgg

SEQ ID NO: 9043 - DNA, 30 bp, synthetic construct
  misc_feature 1..30: note = Probe
  source 1..30: mol_type = other DNA
acgcagaaggtcctgggttcgagccccagt

SEQ ID NO: 9044 - DNA, 19 bp, synthetic construct
  misc_feature 1..19: note = Probe
  source 1..19: mol_type = other DNA
actaagtgtttgtgggttt

SEQ ID NO: 9045 - DNA, 17 bp, synthetic construct
  misc_feature 1..17: note = Probe
  source 1..17: mol_type = other DNA
actatgagaatcgaacc

SEQ ID NO: 9046 - DNA, 16 bp, synthetic construct
  misc_feature 1..16: note = Probe
  source 1..16: mol_type = other DNA
actctgaatccagcga

SEQ ID NO: 9047 - DNA, 20 bp, synthetic construct
  misc_feature 1..20: note = Probe
  source 1..20: mol_type = other DNA
actctgaatccagcgatccg

SEQ ID NO: 9048 - DNA, 21 bp, synthetic construct
  misc_feature 1..21: note = Probe
  source 1..21: mol_type = other DNA
actctgaatccagcgatccga

SEQ ID NO: 9049 - DNA, 23 bp, synthetic construct
  misc_feature 1..23: note = Probe
  source 1..23: mol_type = other DNA
actctgaatccagcgatccgagt

SEQ ID NO: 9050 - DNA, 17 bp, synthetic construct
  misc_feature 1..17: note = Probe
  source 1..17: mol_type = other DNA
actctggactctgaatc

SEQ ID NO: 9051 - DNA, 18 bp, synthetic construct
  misc_feature 1..18: note = Probe
  source 1..18: mol_type = other DNA
actctggactctgaatcc

SEQ ID NO: 9052 - DNA, 19 bp, synthetic construct
  misc_feature 1..19: note = Probe
  source 1..19: mol_type = other DNA
actctggactctgaatcca

SEQ ID NO: 9053 - DNA, 21 bp, synthetic construct
  misc_feature 1..21: note = Probe
  source 1..21: mol_type = other DNA
actctggactctgaatccagc

SEQ ID NO: 9054 - DNA, 22 bp, synthetic construct
  misc_feature 1..22: note = Probe
  source 1..22: mol_type = other DNA
actctggactctgaatccagcg

SEQ ID NO: 9055 - DNA, 23 bp, synthetic construct
  misc_feature 1..23: note = Probe
  source 1..23: mol_type = other DNA
actctggactctgaatccagcga

SEQ ID NO: 9056 - DNA, 17 bp, synthetic construct
  misc_feature 1..17: note = Probe
  source 1..17: mol_type = other DNA
actctggactttgaatc

SEQ ID NO: 9057 - DNA, 19 bp, synthetic construct
  misc_feature 1..19: note = Probe
  source 1..19: mol_type = other DNA
actcttttagtataaatag

SEQ ID NO: 9058 - DNA, 20 bp, synthetic construct
  misc_feature 1..20: note = Probe
  source 1..20: mol_type = other DNA
actcttttagtataaatagt

SEQ ID NO: 9059 - DNA, 30 bp, synthetic construct; identical to SEQ ID NO: 2927
  misc_feature 1..30: note = Probe
  source 1..30: mol_type = other DNA

SEQ ID NO: 9060 - DNA, 19 bp, synthetic construct
  misc_feature 1..19: note = Probe
  source 1..19: mol_type = other DNA
actgtaaagctaacttagc

SEQ ID NO: 9061 - DNA, 30 bp, synthetic construct
  misc_feature 1..30: note = Probe
  source 1..30: mol_type = other DNA
actgtaaagctaacttagcattaacctttt

SEQ ID NO: 9062 - DNA, 15 bp, synthetic construct
  misc_feature 1..15: note = Probe
  source 1..15: mol_type = other DNA
acttaacttgaccgc

SEQ ID NO: 9063 - DNA, 16 bp, synthetic construct
  misc_feature 1..16: note = Probe
  source 1..16: mol_type = other DNA
acttaacttgaccgct

SEQ ID NO: 9064 - DNA, 17 bp, synthetic construct
  misc_feature 1..17: note = Probe
  source 1..17: mol_type = other DNA
acttaacttgaccgctc

SEQ ID NO: 9065 - DNA, 18 bp, synthetic construct
  misc_feature 1..18: note = Probe
  source 1..18: mol_type = other DNA
acttaacttgaccgctct

SEQ ID NO: 9066 - DNA, 19 bp, synthetic construct
  misc_feature 1..19: note = Probe
  source 1..19: mol_type = other DNA
acttaacttgaccgctctg

SEQ ID NO: 9067 - DNA, 20 bp, synthetic construct
  misc_feature 1..20: note = Probe
  source 1..20: mol_type = other DNA
acttaacttgaccgctctga

SEQ ID NO: 9068 - DNA, 21 bp, synthetic construct
  misc_feature 1..21: note = Probe
  source 1..21: mol_type = other DNA
acttaacttgaccgctctgag

SEQ ID NO: 9069 - DNA, 22 bp, synthetic construct
  misc_feature 1..22: note = Probe
  source 1..22: mol_type = other DNA
acttaacttgaccgctctgagc

SEQ ID NO: 9070 - DNA, 23 bp, synthetic construct
  misc_feature 1..23: note = Probe
  source 1..23: mol_type = other DNA
acttaacttgaccgctctgagct

SEQ ID NO: 9071 - DNA, 29 bp, synthetic construct
  misc_feature 1..29: note = Probe
  source 1..29: mol_type = other DNA
acttaggagatttcaacttaacttgaccg

SEQ ID NO: 9072 - DNA, 30 bp, synthetic construct
  misc_feature 1..30: note = Probe
  source 1..30: mol_type = other DNA
acttaggagatttcaacttaacttgaccgc

SEQ ID NO: 9073 - DNA, 19 bp, synthetic construct
  misc_feature 1..19: note = Probe
  source 1..19: mol_type = other DNA
acttctgacacattcgttt

SEQ ID NO: 9074 - DNA, 15 bp, synthetic construct
  misc_feature 1..15: note = Probe
  source 1..15: mol_type = other DNA
acttgaccgctctga

SEQ ID NO: 9075 - DNA, 16 bp, synthetic construct
  misc_feature 1..16: note = Probe
  source 1..16: mol_type = other DNA
acttgaccgctctgag

SEQ ID NO: 9076 - DNA, 17 bp, synthetic construct
  misc_feature 1..17: note = Probe
  source 1..17: mol_type = other DNA
acttgaccgctctgagc

SEQ ID NO: 9077 - DNA, 23 bp, synthetic construct
  misc_feature 1..23: note = Probe
  source 1..23: mol_type = other DNA
actttgaatccagcgatccgagt

SEQ ID NO: 9078 - DNA, 19 bp, synthetic construct
  misc_feature 1..19: note = Probe
  source 1..19: mol_type = other DNA
acttttaaaggataacagc

SEQ ID NO: 9079 - DNA, 30 bp, synthetic construct; identical to SEQ ID NO: 209
  misc_feature 1..30: note = Probe
  source 1..30: mol_type = other DNA

SEQ ID NO: 9080 - DNA, 16 bp, synthetic construct
  misc_feature 1..16: note = Probe
  source 1..16: mol_type = other DNA
agaaaggccgaatttt

SEQ ID NO: 9081 - DNA, 29 bp, synthetic construct
  misc_feature 1..29: note = Probe
  source 1..29: mol_type = other DNA
agaaatatgtctgataaaagagttacttt

SEQ ID NO: 9082 - DNA, 30 bp, synthetic construct
  misc_feature 1..30: note = Probe
  source 1..30: mol_type = other DNA
agaaatatgtctgataaaagagttactttg

SEQ ID NO: 9083 - DNA, 27 bp, synthetic construct
  misc_feature 1..27: note = Probe
  source 1..27: mol_type = other DNA
agaaatttaggttaaatacagaccaag

SEQ ID NO: 9084 - DNA, 17 bp, synthetic construct
  misc_feature 1..17: note = Probe
  source 1..17: mol_type = other DNA
agaactgctaactcatg

SEQ ID NO: 9085 - DNA, 19 bp, synthetic construct
  misc_feature 1..19: note = Probe
  source 1..19: mol_type = other DNA
agaactgctaactcatgcc

SEQ ID NO: 9086 - DNA, 22 bp, synthetic construct
  misc_feature 1..22: note = Probe
  source 1..22: mol_type = other DNA
agaactgctaactcatgccccc

SEQ ID NO: 9087 - DNA, 30 bp, synthetic construct
  misc_feature 1..30: note = Probe
  source 1..30: mol_type = other DNA
agaatagtttaaattagaatcttagctttg

SEQ ID NO: 9088 - DNA, 29 bp, synthetic construct
  misc_feature 1..29: note = Probe
  source 1..29: mol_type = other DNA
agacaggggttaggcctctttttaccagc

SEQ ID NO: 9089 - DNA, 30 bp, synthetic construct; identical to SEQ ID NO: 3114
  misc_feature 1..30: note = Probe
  source 1..30: mol_type = other DNA

SEQ ID NO: 9090 - DNA, 30 bp, synthetic construct; identical to SEQ ID NO: 3120
  misc_feature 1..30: note = Probe
  source 1..30: mol_type = other DNA

SEQ ID NO: 9091 - DNA, 15 bp, synthetic construct
  misc_feature 1..15: note = Probe
  source 1..15: mol_type = other DNA
agactttttctctga

SEQ ID NO: 9092 - DNA, 23 bp, synthetic construct
  misc_feature 1..23: note = Probe
  source 1..23: mol_type = other DNA
agagaaccaacacctctttacag

SEQ ID NO: 9093 - DNA, 19 bp, synthetic construct
  misc_feature 1..19: note = Probe
  source 1..19: mol_type = other DNA
agaggtcgatggatcgaaa

SEQ ID NO: 9094 - DNA, 22 bp, synthetic construct
  misc_feature 1..22: note = Probe
  source 1..22: mol_type = other DNA
agaggtcgatggatcgaaacca

SEQ ID NO: 9095 - DNA, 28 bp, synthetic construct
  misc_feature 1..28: note = Probe
  source 1..28: mol_type = other DNA
agagtggcgcagcggaagcgtgctgggc

SEQ ID NO: 9096 - DNA, 29 bp, synthetic construct
  misc_feature 1..29: note = Probe
  source 1..29: mol_type = other DNA
agagtggcgcagcggaagcgtgctgggcc

SEQ ID NO: 9097 - DNA, 19 bp, synthetic construct
  misc_feature 1..19: note = Probe
  source 1..19: mol_type = other DNA
agatcaagaggtccccggt

SEQ ID NO: 9098 - DNA, 30 bp, synthetic construct
  misc_feature 1..30: note = Probe
  source 1..30: mol_type = other DNA
agattaagagaaccaacacctctttacagt

SEQ ID NO: 9099 - DNA, 19 bp, synthetic construct
  misc_feature 1..19: note = Probe
  source 1..19: mol_type = other DNA
agattccaggttcgactcc

SEQ ID NO: 9100 - DNA, 21 bp, synthetic construct
  misc_feature 1..21: note = Probe
  source 1..21: mol_type = other DNA
agattccaggttcgactcctg

SEQ ID NO: 9101 - DNA, 29 bp, synthetic construct
  misc_feature 1..29: note = Probe
  source 1..29: mol_type = other DNA
agattccaggttcgactcctggctggctc

SEQ ID NO: 9102 - DNA, 30 bp, synthetic construct
  misc_feature 1..30: note = Probe
  source 1..30: mol_type = other DNA
agattccaggttcgactcctggctggctcg

SEQ ID NO: 9103 - DNA, 23 bp, synthetic construct
  misc_feature 1..23: note = Probe
  source 1..23: mol_type = other DNA
agattcccattcttgcgacccgg

SEQ ID NO: 9104 - DNA, 19 bp, synthetic construct
  misc_feature 1..19: note = Probe
  source 1..19: mol_type = other DNA
agattctaggttcgactcc

SEQ ID NO: 9105 - DNA, 30 bp, synthetic construct
  misc_feature 1..30: note = Probe
  source 1..30: mol_type = other DNA
agattctaggttcgactcctggctggctcg

SEQ ID NO: 9106 - DNA, 30 bp, synthetic construct
  misc_feature 1..30: note = Probe
  source 1..30: mol_type = other DNA
agattgagggttcgagtcccttcgtggtcg

SEQ ID NO: 9107 - DNA, 16 bp, synthetic construct
  misc_feature 1..16: note = Probe
  source 1..16: mol_type = other DNA
agattgtgaatctgac

SEQ ID NO: 9108 - DNA, 17 bp, synthetic construct
  misc_feature 1..17: note = Probe
  source 1..17: mol_type = other DNA
agattgtgaatctgaca

SEQ ID NO: 9109 - DNA, 18 bp, synthetic construct
  misc_feature 1..18: note = Probe
  source 1..18: mol_type = other DNA
agattgtgaatctgacaa

SEQ ID NO: 9110 - DNA, 19 bp, synthetic construct
  misc_feature 1..19: note = Probe
  source 1..19: mol_type = other DNA
agattgtgaatctgacaac

SEQ ID NO: 9111 - DNA, 20 bp, synthetic construct
  misc_feature 1..20: note = Probe
  source 1..20: mol_type = other DNA
agattgtgaatctgacaaca

SEQ ID NO: 9112 - DNA, 20 bp, synthetic construct
  misc_feature 1..20: note = Probe
  source 1..20: mol_type = other DNA
agatttcaacttaacttgac

SEQ ID NO: 9113 - DNA, 21 bp, synthetic construct
  misc_feature 1..21: note = Probe
  source 1..21: mol_type = other DNA
agatttcaacttaacttgacc

SEQ ID NO: 9114 - DNA, 22 bp, synthetic construct
  misc_feature 1..22: note = Probe
  source 1..22: mol_type = other DNA
agatttcaacttaacttgaccg

SEQ ID NO: 9115 - DNA, 24 bp, synthetic construct
  misc_feature 1..24: note = Probe
  source 1..24: mol_type = other DNA
agatttcaacttaacttgaccgct

SEQ ID NO: 9116 - DNA, 25 bp, synthetic construct
  misc_feature 1..25: note = Probe
  source 1..25: mol_type = other DNA
agatttcaacttaacttgaccgctc

SEQ ID NO: 9117 - DNA, 26 bp, synthetic construct
  misc_feature 1..26: note = Probe
  source 1..26: mol_type = other DNA
agatttcaacttaacttgaccgctct

SEQ ID NO: 9118 - DNA, 27 bp, synthetic construct
  misc_feature 1..27: note = Probe
  source 1..27: mol_type = other DNA
agatttcaacttaacttgaccgctctg

SEQ ID NO: 9119 - DNA, 28 bp, synthetic construct
  misc_feature 1..28: note = Probe
  source 1..28: mol_type = other DNA
agatttcaacttaacttgaccgctctga

SEQ ID NO: 9120 - DNA, 29 bp, synthetic construct
  misc_feature 1..29: note = Probe
  source 1..29: mol_type = other DNA
agatttcaacttaacttgaccgctctgag

SEQ ID NO: 9121 - DNA, 30 bp, synthetic construct; identical to SEQ ID NO: 3214
  misc_feature 1..30: note = Probe
  source 1..30: mol_type = other DNA

SEQ ID NO: 9122 - DNA, 16 bp, synthetic construct
  misc_feature 1..16: note = Probe
  source 1..16: mol_type = other DNA
agcactctggactctg

SEQ ID NO: 9123 - DNA, 17 bp, synthetic construct
  misc_feature 1..17: note = Probe
  source 1..17: mol_type = other DNA
agcactctggactctga

SEQ ID NO: 9124 - DNA, 19 bp, synthetic construct
  misc_feature 1..19: note = Probe
  source 1..19: mol_type = other DNA
agcactctggactctgaat

SEQ ID NO: 9125 - DNA, 20 bp, synthetic construct
  misc_feature 1..20: note = Probe
  source 1..20: mol_type = other DNA
agcactctggactctgaatc

SEQ ID NO: 9126 - DNA, 21 bp, synthetic construct
  misc_feature 1..21: note = Probe
  source 1..21: mol_type = other DNA
agcactctggactctgaatcc

SEQ ID NO: 9127 - DNA, 22 bp, synthetic construct
  misc_feature 1..22: note = Probe
  source 1..22: mol_type = other DNA
agcactctggactctgaatcca

SEQ ID NO: 9128 - DNA, 23 bp, synthetic construct
  misc_feature 1..23: note = Probe
  source 1..23: mol_type = other DNA
agcactctggactctgaatccag

SEQ ID NO: 9129 - DNA, 24 bp, synthetic construct
  misc_feature 1..24: note = Probe
  source 1..24: mol_type = other DNA
agcactctggactctgaatccagc

SEQ ID NO: 9130 - DNA, 25 bp, synthetic construct
  misc_feature 1..25: note = Probe
  source 1..25: mol_type = other DNA
agcactctggactctgaatccagcg

SEQ ID NO: 9131 - DNA, 30 bp, synthetic construct; identical to SEQ ID NO: 270
  misc_feature 1..30: note = Probe
  source 1..30: mol_type = other DNA

SEQ ID NO: 9132 - DNA, 20 bp, synthetic construct
  misc_feature 1..20: note = Probe
  source 1..20: mol_type = other DNA
agcactctggactttgaatc

SEQ ID NO: 9133 - DNA, 22 bp, synthetic construct
  misc_feature 1..22: note = Probe
  source 1..22: mol_type = other DNA
agcagagtggcgcagcggaagc

SEQ ID NO: 9134 - DNA, 23 bp, synthetic construct
  misc_feature 1..23: note = Probe
  source 1..23: mol_type = other DNA
agcagagtggcgcagcggaagcg

SEQ ID NO: 9135 - DNA, 24 bp, synthetic construct
  misc_feature 1..24: note = Probe
  source 1..24: mol_type = other DNA
agcagagtggcgcagcggaagcgt

SEQ ID NO: 9136 - DNA, 27 bp, synthetic construct
  misc_feature 1..27: note = Probe
  source 1..27: mol_type = other DNA
agcagagtggcgcagcggaagcgtgct

SEQ ID NO: 9137 - DNA, 28 bp, synthetic construct
  misc_feature 1..28: note = Probe
  source 1..28: mol_type = other DNA
agcagagtggcgcagcggaagcgtgctg

SEQ ID NO: 9138 - DNA, 29 bp, synthetic construct
  misc_feature 1..29: note = Probe
  source 1..29: mol_type = other DNA
agcagagtggcgcagcggaagcgtgctgg

SEQ ID NO: 9139 - DNA, 30 bp, synthetic construct
  misc_feature 1..30: note = Probe
  source 1..30: mol_type = other DNA
agcattggtggttcagtggtagaattctcg

SEQ ID NO: 9140 - DNA, 26 bp, synthetic construct
  misc_feature 1..26: note = Probe
  source 1..26: mol_type = other DNA
agcgcgttcggctgttaaccgaaagg

SEQ ID NO: 9141 - DNA, 24 bp, synthetic construct
  misc_feature 1..24: note = Probe
  source 1..24: mol_type = other DNA
agctcaggggtagagcatttgact

SEQ ID NO: 9142 - DNA, 23 bp, synthetic construct
  misc_feature 1..23: note = Probe
  source 1..23: mol_type = other DNA
agctcagtcggtagagcatcaga

SEQ ID NO: 9143 - DNA, 24 bp, synthetic construct
  misc_feature 1..24: note = Probe
  source 1..24: mol_type = other DNA
agctcagtcggtagagcatcagac

SEQ ID NO: 9144 - DNA, 24 bp, synthetic construct
  misc_feature 1..24: note = Probe
  source 1..24: mol_type = other DNA
agctcagtcggtagagcatgagac

SEQ ID NO: 9145 - DNA, 25 bp, synthetic construct
  misc_feature 1..25: note = Probe
  source 1..25: mol_type = other DNA
agctcagtcggtagagcatgagact

SEQ ID NO: 9146 - DNA, 25 bp, synthetic construct
  misc_feature 1..25: note = Probe
  source 1..25: mol_type = other DNA
agctcagtgggtagagcatttgact

SEQ ID NO: 9147 - DNA, 19 bp, synthetic construct
  misc_feature 1..19: note = Probe
  source 1..19: mol_type = other DNA
agctcagtggtagagcatt

SEQ ID NO: 9148 - DNA, 23 bp, synthetic construct
  misc_feature 1..23: note = Probe
  source 1..23: mol_type = other DNA
agctcagtggtagagcatttgac

SEQ ID NO: 9149 - DNA, 24 bp, synthetic construct
  misc_feature 1..24: note = Probe
  source 1..24: mol_type = other DNA
agctcagtggtagagcatttgact

SEQ ID NO: 9150 - DNA, 25 bp, synthetic construct
  misc_feature 1..25: note = Probe
  source 1..25: mol_type = other DNA
agctcagtggtagagcatttgactg

SEQ ID NO: 9151 - DNA, 26 bp, synthetic construct
  misc_feature 1..26: note = Probe
  source 1..26: mol_type = other DNA
agctcagtggtagagcatttgactgc

SEQ ID NO: 9152 - DNA, 18 bp, synthetic construct
  misc_feature 1..18: note = Probe
  source 1..18: mol_type = other DNA
agctccgaggtgattttc

SEQ ID NO: 9153 - DNA, 21 bp, synthetic construct
  misc_feature 1..21: note = Probe
  source 1..21: mol_type = other DNA
agctccgaggtgattttcata

SEQ ID NO: 9154 - DNA, 23 bp, synthetic construct
  misc_feature 1..23: note = Probe
  source 1..23: mol_type = other DNA
agctccgaggtgattttcatatt

SEQ ID NO: 9155 - DNA, 30 bp, synthetic construct; identical to SEQ ID NO: 314
  misc_feature 1..30: note = Probe
  source 1..30: mol_type = other DNA

SEQ ID NO: 9156 - DNA, 25 bp, synthetic construct
  misc_feature 1..25: note = Probe
  source 1..25: mol_type = other DNA
aggagatttcaacttaacttgaccg

SEQ ID NO: 9157 - DNA, 29 bp, synthetic construct
  misc_feature 1..29: note = Probe
  source 1..29: mol_type = other DNA
aggagatttcaacttaacttgaccgctct

SEQ ID NO: 9158 - DNA, 30 bp, synthetic construct; identical to SEQ ID NO: 3410
  misc_feature 1..30: note = Probe
  source 1..30: mol_type = other DNA

SEQ ID NO: 9159 - DNA, 22 bp, synthetic construct
  misc_feature 1..22: note = Probe
  source 1..22: mol_type = other DNA
aggataacagctatccattggt

SEQ ID NO: 9160 - DNA, 19 bp, synthetic construct
  misc_feature 1..19: note = Probe
  source 1..19: mol_type = other DNA
aggatggccgagcggtcta

SEQ ID NO: 9161 - DNA, 21 bp, synthetic construct
  misc_feature 1..21: note = Probe
  source 1..21: mol_type = other DNA
aggatggccgagcggtctaag

SEQ ID NO: 9162 - DNA, 23 bp, synthetic construct
  misc_feature 1..23: note = Probe
  source 1..23: mol_type = other DNA
aggatggccgagcggtctaaggc

SEQ ID NO: 9163 - DNA, 29 bp, synthetic construct
  misc_feature 1..29: note = Probe
  source 1..29: mol_type = other DNA
aggatggccgagcggtctaaggcgctgcg

SEQ ID NO: 9164 - DNA, 21 bp, synthetic construct
  misc_feature 1..21: note = Probe
  source 1..21: mol_type = other DNA
aggatggccgagtggtctaag

SEQ ID NO: 9165 - DNA, 23 bp, synthetic construct
  misc_feature 1..23: note = Probe
  source 1..23: mol_type = other DNA
aggccccgggttcaatccccggc

SEQ ID NO: 9166 - DNA, 23 bp, synthetic construct
  misc_feature 1..23: note = Probe
  source 1..23: mol_type = other DNA
aggccccgggttcgatccccggc

SEQ ID NO: 9167 - DNA, 18 bp, synthetic construct
  misc_feature 1..18: note = Probe
  source 1..18: mol_type = other DNA
aggctccagtctcttcgg

SEQ ID NO: 9168 - DNA, 19 bp, synthetic construct
  misc_feature 1..19: note = Probe
  source 1..19: mol_type = other DNA
aggctccagtctcttcggg

SEQ ID NO: 9169 - DNA, 22 bp, synthetic construct
  misc_feature 1..22: note = Probe
  source 1..22: mol_type = other DNA
agggattgtgggttcgagtccc

SEQ ID NO: 9170 - DNA, 19 bp, synthetic construct
  misc_feature 1..19: note = Probe
  source 1..19: mol_type = other DNA
aggggtagagcatttgact

SEQ ID NO: 9171 - DNA, 20 bp, synthetic construct
  misc_feature 1..20: note = Probe
  source 1..20: mol_type = other DNA
aggggtagagcatttgactg

SEQ ID NO: 9172 - DNA, 21 bp, synthetic construct
  misc_feature 1..21: note = Probe
  source 1..21: mol_type = other DNA
aggggtagagcatttgactgc

SEQ ID NO: 9173 - DNA, 17 bp, synthetic construct
  misc_feature 1..17: note = Probe
  source 1..17: mol_type = other DNA
aggggtatgattctcgg

SEQ ID NO: 9174 - DNA, 25 bp, synthetic construct
  misc_feature 1..25: note = Probe
  source 1..25: mol_type = other DNA
aggggttaggcctctttttaccagc

SEQ ID NO: 9175 - DNA, 16 bp, synthetic construct
  misc_feature 1..16: note = Probe
  source 1..16: mol_type = other DNA
agggtaggggatgtag

SEQ ID NO: 9176 - DNA, 21 bp, synthetic construct
  misc_feature 1..21: note = Probe
  source 1..21: mol_type = other DNA
agggtcatgggttcgtgcccc

SEQ ID NO: 9177 - DNA, 29 bp, synthetic construct
  misc_feature 1..29: note = Probe
  source 1..29: mol_type = other DNA
agggtccagggttcaagtccctgttcggg

SEQ ID NO: 9178 - DNA, 30 bp, synthetic construct
  misc_feature 1..30: note = Probe
  source 1..30: mol_type = other DNA
agggtccagggttcaagtccctgttcgggc

SEQ ID NO: 9179 - DNA, 21 bp, synthetic construct
  misc_feature 1..21: note = Probe
  source 1..21: mol_type = other DNA
agggtcgtgggttcgagcccc

SEQ ID NO: 9180 - DNA, 24 bp, synthetic construct
  misc_feature 1..24: note = Probe
  source 1..24: mol_type = other DNA
agggtcgtgggttcgagccccacg

SEQ ID NO: 9181 - DNA, 28 bp, synthetic construct
  misc_feature 1..28: note = Probe
  source 1..28: mol_type = other DNA
agggtcgtgggttcgagccccacgttgg

SEQ ID NO: 9182 - DNA, 30 bp, synthetic construct
  misc_feature 1..30: note = Probe
  source 1..30: mol_type = other DNA
agggtcgtgggttcgagccccacgttgggc

SEQ ID NO: 9183 - DNA, 29 bp, synthetic construct
  misc_feature 1..29: note = Probe
  source 1..29: mol_type = other DNA
aggtcctgggttcgagccccagtggaacc

SEQ ID NO: 9184 - DNA, 19 bp, synthetic construct
  misc_feature 1..19: note = Probe
  source 1..19: mol_type = other DNA
aggtcgcgggttcgatccc

SEQ ID NO: 9185 - DNA, 20 bp, synthetic construct
  misc_feature 1..20: note = Probe
  source 1..20: mol_type = other DNA
aggtcgcgggttcgatcccc

SEQ ID NO: 9186 - DNA, 23 bp, synthetic construct
  misc_feature 1..23: note = Probe
  source 1..23: mol_type = other DNA
aggtcgcgggttcgatccccgta

SEQ ID NO: 9187 - DNA, 22 bp, synthetic construct
  misc_feature 1..22: note = Probe
  source 1..22: mol_type = other DNA
aggtcgctggttcgattccggc

SEQ ID NO: 9188 - DNA, 29 bp, synthetic construct
  misc_feature 1..29: note = Probe
  source 1..29: mol_type = other DNA
aggtcgctggttcgattccggctcgaagg

SEQ ID NO: 9189 - DNA, 29 bp, synthetic construct
  misc_feature 1..29: note = Probe
  source 1..29: mol_type = other DNA
aggtcgtgagttcgagcctcacacggggc

SEQ ID NO: 9190 - DNA, 23 bp, synthetic construct
  misc_feature 1..23: note = Probe
  source 1..23: mol_type = other DNA
aggttccgggttcgagtcccggc

SEQ ID NO: 9191 - DNA, 30 bp, synthetic construct
  misc_feature 1..30: note = Probe
  source 1..30: mol_type = other DNA
aggttccgggttcgagtcccggcggagtcg

SEQ ID NO: 9192 - DNA, 29 bp, synthetic construct
  misc_feature 1..29: note = Probe
  source 1..29: mol_type = other DNA
aggttgcgtgttcaagtcacgtcggggtc

SEQ ID NO: 9193 - DNA, 17 bp, synthetic construct
  misc_feature 1..17: note = Probe
  source 1..17: mol_type = other DNA
agtaaggtcagctaaat

SEQ ID NO: 9194 - DNA, 18 bp, synthetic construct
  misc_feature 1..18: note = Probe
  source 1..18: mol_type = other DNA
agtaaggtcagctaaata

SEQ ID NO: 9195 - DNA, 20 bp, synthetic construct
  misc_feature 1..20: note = Probe
  source 1..20: mol_type = other DNA
agtaaggtcagctaaataag

SEQ ID NO: 9196 - DNA, 21 bp, synthetic construct
  misc_feature 1..21: note = Probe
  source 1..21: mol_type = other DNA
agtaaggtcagctaaataagc

SEQ ID NO: 9197 - DNA, 22 bp, synthetic construct
  misc_feature 1..22: note = Probe
  source 1..22: mol_type = other DNA
agtaaggtcagctaaataagct

SEQ ID NO: 9198 - DNA, 27 bp, synthetic construct
  misc_feature 1..27: note = Probe
  source 1..27: mol_type = other DNA
agtaaggtcagctaaataagctatcgg

SEQ ID NO: 9199 - DNA, 28 bp, synthetic construct
  misc_feature 1..28: note = Probe
  source 1..28: mol_type = other DNA
agtaaggtcagctaaataagctatcggg

SEQ ID NO: 9200 - DNA, 30 bp, synthetic construct; identical to SEQ ID NO: 3514
  misc_feature 1..30: note = Probe
  source 1..30: mol_type = other DNA

SEQ ID NO: 9201 - DNA, 24 bp, synthetic construct
  misc_feature 1..24: note = Probe
  source 1..24: mol_type = other DNA
agtatagtggtgagtatccccgcc

SEQ ID NO: 9202 - DNA, 17 bp, synthetic construct
  misc_feature 1..17: note = Probe
  source 1..17: mol_type = other DNA
agtcggtagagcatcag

SEQ ID NO: 9203 - DNA, 15 bp, synthetic construct
  misc_feature 1..15: note = Probe
  source 1..15: mol_type = other DNA
agtcggtagagcatg

SEQ ID NO: 9204 - DNA, 16 bp, synthetic construct
  misc_feature 1..16: note = Probe
  source 1..16: mol_type = other DNA
agtcggtagagcatga

SEQ ID NO: 9205 - DNA, 17 bp, synthetic construct
  misc_feature 1..17: note = Probe
  source 1..17: mol_type = other DNA
agtcggtagagcatgag

SEQ ID NO: 9206 - DNA, 19 bp, synthetic construct
  misc_feature 1..19: note = Probe
  source 1..19: mol_type = other DNA
agtcggtagagcatgagac

SEQ ID NO: 9207 - DNA, 19 bp, synthetic construct
  misc_feature 1..19: note = Probe
  source 1..19: mol_type = other DNA
agtcggtagagcatgggac

SEQ ID NO: 9208 - DNA, 18 bp, synthetic construct
  misc_feature 1..18: note = Probe
  source 1..18: mol_type = other DNA
agtgaagcattggactgt

SEQ ID NO: 9209 - DNA, 19 bp, synthetic construct
  misc_feature 1..19: note = Probe
  source 1..19: mol_type = other DNA
agtgaagcattggactgta

SEQ ID NO: 9210 - DNA, 20 bp, synthetic construct
  misc_feature 1..20: note = Probe
  source 1..20: mol_type = other DNA
agtgaagcattggactgtaa

SEQ ID NO: 9211 - DNA, 21 bp, synthetic construct
  misc_feature 1..21: note = Probe
  source 1..21: mol_type = other DNA
agtgaagcattggactgtaaa

SEQ ID NO: 9212 - DNA, 23 bp, synthetic construct
  misc_feature 1..23: note = Probe
  source 1..23: mol_type = other DNA
agtgaagcattggactgtaaatc

SEQ ID NO: 9213 - DNA, 24 bp, synthetic construct
  misc_feature 1..24: note = Probe
  source 1..24: mol_type = other DNA
agtgaagcattggactgtaaatct

SEQ ID NO: 9214 - DNA, 26 bp, synthetic construct
  misc_feature 1..26: note = Probe
  source 1..26: mol_type = other DNA
agtggcgcagcggaagcgtgctgggc

SEQ ID NO: 9215 - DNA, 15 bp, synthetic construct
  misc_feature 1..15: note = Probe
  source 1..15: mol_type = other DNA
agtggtagaattctc

SEQ ID NO: 9216 - DNA, 16 bp, synthetic construct
  misc_feature 1..16: note = Probe
  source 1..16: mol_type = other DNA
agtggtagaattctcg

SEQ ID NO: 9217 - DNA, 17 bp, synthetic construct
  misc_feature 1..17: note = Probe
  source 1..17: mol_type = other DNA
agtggtagaattctcgc

SEQ ID NO: 9218 - DNA, 18 bp, synthetic construct
  misc_feature 1..18: note = Probe
  source 1..18: mol_type = other DNA
agtggtagaattctcgcc

SEQ ID NO: 9219 - DNA, 19 bp, synthetic construct
  misc_feature 1..19: note = Probe
  source 1..19: mol_type = other DNA
agtggtagaattctcgcct

SEQ ID NO: 9220 - DNA, 20 bp, synthetic construct
  misc_feature 1..20: note = Probe
  source 1..20: mol_type = other DNA
agtggtagaattctcgcctg

SEQ ID NO: 9221 - DNA, 21 bp, synthetic construct
  misc_feature 1..21: note = Probe
  source 1..21: mol_type = other DNA
agtggtagaattctcgcctgc

SEQ ID NO: 9222 - DNA, 17 bp, synthetic construct
  misc_feature 1..17: note = Probe
  source 1..17: mol_type = other DNA
agtggtagagcatttga

SEQ ID NO: 9223 - DNA, 19 bp, synthetic construct
  misc_feature 1..19: note = Probe
  source 1..19: mol_type = other DNA
agtggtagagcatttgact

SEQ ID NO: 9224 - DNA, 20 bp, synthetic construct
  misc_feature 1..20: note = Probe
  source 1..20: mol_type = other DNA
agtggtagagcatttgactg

SEQ ID NO: 9225 - DNA, 21 bp, synthetic construct
  misc_feature 1..21: note = Probe
  source 1..21: mol_type = other DNA
agtggtagagcatttgactgc

SEQ ID NO: 9226 - DNA, 23 bp, synthetic construct
  misc_feature 1..23: note = Probe
  source 1..23: mol_type = other DNA
agtggtctagtggttaggattca

SEQ ID NO: 9227 - DNA, 24 bp, synthetic construct
  misc_feature 1..24: note = Probe
  source 1..24: mol_type = other DNA
agtggtctagtggttaggattcag

SEQ ID NO: 9228 - DNA, 27 bp, synthetic construct
  misc_feature 1..27: note = Probe
  source 1..27: mol_type = other DNA
agtggtctagtggttaggattcagcgc

SEQ ID NO: 9229 - DNA, 28 bp, synthetic construct
  misc_feature 1..28: note = Probe
  source 1..28: mol_type = other DNA
agtggtctagtggttaggattcagcgct

SEQ ID NO: 9230 - DNA, 19 bp, synthetic construct
  misc_feature 1..19: note = Probe
  source 1..19: mol_type = other DNA
agtggttaggattcggcgc

SEQ ID NO: 9231 - DNA, 20 bp, synthetic construct
  misc_feature 1..20: note = Probe
  source 1..20: mol_type = other DNA
agtggttaggattcggcgct

SEQ ID NO: 9232 - DNA, 16 bp, synthetic construct
  misc_feature 1..16: note = Probe
  source 1..16: mol_type = other DNA
agtggttagtactctg

SEQ ID NO: 9233 - DNA, 17 bp, synthetic construct
  misc_feature 1..17: note = Probe
  source 1..17: mol_type = other DNA
agtggttagtactctgc

SEQ ID NO: 9234 - DNA, 19 bp, synthetic construct
  misc_feature 1..19: note = Probe
  source 1..19: mol_type = other DNA
agtggttagtactctgcgt

SEQ ID NO: 9235 - DNA, 29 bp, synthetic construct
  misc_feature 1..29: note = Probe
  source 1..29: mol_type = other DNA
agtgtagcttaacacaaagcacccaactt

SEQ ID NO: 9236 - DNA, 24 bp, synthetic construct
  misc_feature 1..24: note = Probe
  source 1..24: mol_type = other DNA
agtgtagtggttatcacgttcgcc

SEQ ID NO: 9237 - DNA, 20 bp, synthetic construct
  misc_feature 1..20: note = Probe
  source 1..20: mol_type = other DNA
agttaaagactttttctctg

SEQ ID NO: 9238 - DNA, 22 bp, synthetic construct
  misc_feature 1..22: note = Probe
  source 1..22: mol_type = other DNA
agttaaagactttttctctgat

SEQ ID NO: 9239 - DNA, 21 bp, synthetic construct
  misc_feature 1..21: note = Probe
  source 1..21: mol_type = other DNA
agttgacccgggttcgattcc

SEQ ID NO: 9240 - DNA, 24 bp, synthetic construct
  misc_feature 1..24: note = Probe
  source 1..24: mol_type = other DNA
agttggtagagcggaggactgtag

SEQ ID NO: 9241 - DNA, 26 bp, synthetic construct
  misc_feature 1..26: note = Probe
  source 1..26: mol_type = other DNA
agtttaaccaaaacatcagattgtga

SEQ ID NO: 9242 - DNA, 19 bp, synthetic construct
  misc_feature 1..19: note = Probe
  source 1..19: mol_type = other DNA
ataacagctatccattggt

SEQ ID NO: 9243 - DNA, 15 bp, synthetic construct
  misc_feature 1..15: note = Probe
  source 1..15: mol_type = other DNA
ataacccagaggtcg

SEQ ID NO: 9244 - DNA, 16 bp, synthetic construct
  misc_feature 1..16: note = Probe
  source 1..16: mol_type = other DNA
ataacccagaggtcga

SEQ ID NO: 9245 - DNA, 17 bp, synthetic construct
  misc_feature 1..17: note = Probe
  source 1..17: mol_type = other DNA
ataacccagaggtcgat

SEQ ID NO: 9246 - DNA, 18 bp, synthetic construct
  misc_feature 1..18: note = Probe
  source 1..18: mol_type = other DNA
ataacccagaggtcgatg

SEQ ID NO: 9247 - DNA, 19 bp, synthetic construct
  misc_feature 1..19: note = Probe
  source 1..19: mol_type = other DNA
ataacccagaggtcgatgg

SEQ ID NO: 9248 - DNA, 20 bp, synthetic construct
  misc_feature 1..20: note = Probe
  source 1..20: mol_type = other DNA
ataacccagaggtcgatgga

SEQ ID NO: 9249 - DNA, 21 bp, synthetic construct
  misc_feature 1..21: note = Probe
  source 1..21: mol_type = other DNA
ataacccagaggtcgatggat

SEQ ID NO: 9250 - DNA, 22 bp, synthetic construct
  misc_feature 1..22: note = Probe
  source 1..22: mol_type = other DNA
ataacccagaggtcgatggatc

SEQ ID NO: 9251 - DNA, 24 bp, synthetic construct
  misc_feature 1..24: note = Probe
  source 1..24: mol_type = other DNA
ataacccagaggtcgatggatcga

SEQ ID NO: 9252 - DNA, 25 bp, synthetic construct
  misc_feature 1..25: note = Probe
  source 1..25: mol_type = other DNA
ataacccagaggtcgatggatcgaa

SEQ ID NO: 9253 - DNA, 26 bp, synthetic construct
  misc_feature 1..26: note = Probe
  source 1..26: mol_type = other DNA
ataacccagaggtcgatggatcgaaa

SEQ ID NO: 9254 - DNA, 27 bp, synthetic construct
  misc_feature 1..27: note = Probe
  source 1..27: mol_type = other DNA
ataacccagaggtcgatggatcgaaac

SEQ ID NO: 9255 - DNA, 28 bp, synthetic construct
  misc_feature 1..28: note = Probe
  source 1..28: mol_type = other DNA
ataacccagaggtcgatggatcgaaacc

SEQ ID NO: 9256 - DNA, 29 bp, synthetic construct
  misc_feature 1..29: note = Probe
  source 1..29: mol_type = other DNA
ataacccagaggtcgatggatcgaaacca

SEQ ID NO: 9257 - DNA, 20 bp, synthetic construct
  misc_feature 1..20: note = Probe
  source 1..20: mol_type = other DNA
ataacgccaaggtcgcgggt

SEQ ID NO: 9258 - DNA, 26 bp, synthetic construct
  misc_feature 1..26: note = Probe
  source 1..26: mol_type = other DNA
atagctcaggggtagagcatttgact

SEQ ID NO: 9259 - DNA, 27 bp, synthetic construct
  misc_feature 1..27: note = Probe
  source 1..27: mol_type = other DNA
atagctcaggggtagagcatttgactg

SEQ ID NO: 9260 - DNA, 28 bp, synthetic construct
  misc_feature 1..28: note = Probe
  source 1..28: mol_type = other DNA
atagctcaggggtagagcatttgactgc

SEQ ID NO: 9261 - DNA, 27 bp, synthetic construct
  misc_feature 1..27: note = Probe
  source 1..27: mol_type = other DNA
atagctcagtgggtagagcatttgact

SEQ ID NO: 9262 - DNA, 29 bp, synthetic construct
  misc_feature 1..29: note = Probe
  source 1..29: mol_type = other DNA
atagctcagtgggtagagcatttgactgc

SEQ ID NO: 9263 - DNA, 22 bp, synthetic construct
  misc_feature 1..22: note = Probe
  source 1..22: mol_type = other DNA
atagctcagtggtagagcattt

SEQ ID NO: 9264 - DNA, 28 bp, synthetic construct
  misc_feature 1..28: note = Probe
  source 1..28: mol_type = other DNA
atagctcagtggtagagcatttaactgt

SEQ ID NO: 9265 - DNA, 23 bp, synthetic construct
  misc_feature 1..23: note = Probe
  source 1..23: mol_type = other DNA
atagctcagtggtagagcatttg

SEQ ID NO: 9266 - DNA, 24 bp, synthetic construct
  misc_feature 1..24: note = Probe
  source 1..24: mol_type = other DNA
atagctcagtggtagagcatttga

SEQ ID NO: 9267 - DNA, 25 bp, synthetic construct
  misc_feature 1..25: note = Probe
  source 1..25: mol_type = other DNA
atagctcagtggtagagcatttgac

SEQ ID NO: 9268 - DNA, 26 bp, synthetic construct
  misc_feature 1..26: note = Probe
  source 1..26: mol_type = other DNA
atagctcagtggtagagcatttgact

SEQ ID NO: 9269 - DNA, 27 bp, synthetic construct
  misc_feature 1..27: note = Probe
  source 1..27: mol_type = other DNA
atagctcagtggtagagcatttgactg

SEQ ID NO: 9270 - DNA, 28 bp, synthetic construct
  misc_feature 1..28: note = Probe
  source 1..28: mol_type = other DNA
atagctcagtggtagagcatttgactgc

SEQ ID NO: 9271 - DNA, 29 bp, synthetic construct
  misc_feature 1..29: note = Probe
  source 1..29: mol_type = other DNA
ataggtttggtcctagcctttctattagc

SEQ ID NO: 9272 - DNA, 18 bp, synthetic construct
  misc_feature 1..18: note = Probe
  source 1..18: mol_type = other DNA
atagtggttagtactctg

SEQ ID NO: 9273 - DNA, 20 bp, synthetic construct
  misc_feature 1..20: note = Probe
  source 1..20: mol_type = other DNA
atagtggttagtactctgcg

SEQ ID NO: 9274 - DNA, 21 bp, synthetic construct
  misc_feature 1..21: note = Probe
  source 1..21: mol_type = other DNA
atagtggttagtactctgcgt

SEQ ID NO: 9275 - DNA, 22 bp, synthetic construct
  misc_feature 1..22: note = Probe
  source 1..22: mol_type = other DNA
atagtggttagtactctgcgtt

SEQ ID NO: 9276 - DNA, 23 bp, synthetic construct
  misc_feature 1..23: note = Probe
  source 1..23: mol_type = other DNA
atagtggttagtactctgcgttg

SEQ ID NO: 9277 - DNA, 24 bp, synthetic construct
  misc_feature 1..24: note = Probe
  source 1..24: mol_type = other DNA
atagtggttagtactctgcgttgt

SEQ ID NO: 9278 - DNA, 29 bp, synthetic construct
  misc_feature 1..29: note = Probe
  source 1..29: mol_type = other DNA
atatagtttaaccaaaacatcagattgtg

SEQ ID NO: 9279 - DNA, 15 bp, synthetic construct
  misc_feature 1..15: note = Probe
  source 1..15: mol_type = other DNA
atatcattggtcgtg

SEQ ID NO: 9280 - DNA, 17 bp, synthetic construct
  misc_feature 1..17: note = Probe
  source 1..17: mol_type = other DNA
atatcattggtcgtggt

SEQ ID NO: 9281 - DNA, 19 bp, synthetic construct
  misc_feature 1..19: note = Probe
  source 1..19: mol_type = other DNA
atatcattggtcgtggttg

SEQ ID NO: 9282 - DNA, 20 bp, synthetic construct
  misc_feature 1..20: note = Probe
  source 1..20: mol_type = other DNA
atatcattggtcgtggttgt

SEQ ID NO: 9283 - DNA, 21 bp, synthetic construct
  misc_feature 1..21: note = Probe
  source 1..21: mol_type = other DNA
atatcattggtcgtggttgta

SEQ ID NO: 9284 - DNA, 22 bp, synthetic construct
  misc_feature 1..22: note = Probe
  source 1..22: mol_type = other DNA
atatcattggtcgtggttgtag

SEQ ID NO: 9285 - DNA, 23 bp, synthetic construct
  misc_feature 1..23: note = Probe
  source 1..23: mol_type = other DNA
atatcattggtcgtggttgtagt

SEQ ID NO: 9286 - DNA, 26 bp, synthetic construct
  misc_feature 1..26: note = Probe
  source 1..26: mol_type = other DNA
atatcattggtcgtggttgtagtccg

SEQ ID NO: 9287 - DNA, 27 bp, synthetic construct
  misc_feature 1..27: note = Probe
  source 1..27: mol_type = other DNA
atatcattggtcgtggttgtagtccgt

SEQ ID NO: 9288 - DNA, 28 bp, synthetic construct
  misc_feature 1..28: note = Probe
  source 1..28: mol_type = other DNA
atatcattggtcgtggttgtagtccgtg

SEQ ID NO: 9289 - DNA, 29 bp, synthetic construct
  misc_feature 1..29: note = Probe
  source 1..29: mol_type = other DNA
atatcattggtcgtggttgtagtccgtgc

SEQ ID NO: 9290 - DNA, 21 bp, synthetic construct
  misc_feature 1..21: note = Probe
  source 1..21: mol_type = other DNA
atatccaaccttcagctatag

SEQ ID NO: 9291 - DNA, 22 bp, synthetic construct
  misc_feature 1..22: note = Probe
  source 1..22: mol_type = other DNA
atatccaaccttcagctatagg

SEQ ID NO: 9292 - DNA, 23 bp, synthetic construct
  misc_feature 1..23: note = Probe
  source 1..23: mol_type = other DNA
atatccaaccttcagctataggg

SEQ ID NO: 9293 - DNA, 26 bp, synthetic construct
  misc_feature 1..26: note = Probe
  source 1..26: mol_type = other DNA
atatggtctagcggttaggattcctg

SEQ ID NO: 9294 - DNA, 19 bp, synthetic construct
  misc_feature 1..19: note = Probe
  source 1..19: mol_type = other DNA
atcattggtcgtggttgta

SEQ ID NO: 9295 - DNA, 20 bp, synthetic construct
  misc_feature 1..20: note = Probe
  source 1..20: mol_type = other DNA
atcattggtcgtggttgtag

SEQ ID NO: 9296 - DNA, 21 bp, synthetic construct
  misc_feature 1..21: note = Probe
  source 1..21: mol_type = other DNA
atcattggtcgtggttgtagt

SEQ ID NO: 9297 - DNA, 23 bp, synthetic construct
  misc_feature 1..23: note = Probe
  source 1..23: mol_type = other DNA
atcattggtcgtggttgtagtcc

SEQ ID NO: 9298 - DNA, 24 bp, synthetic construct
  misc_feature 1..24: note = Probe
  source 1..24: mol_type = other DNA
atcattggtcgtggttgtagtccg

SEQ ID NO: 9299 - DNA, 25 bp, synthetic construct
  misc_feature 1..25: note = Probe
  source 1..25: mol_type = other DNA
atcattggtcgtggttgtagtccgt

SEQ ID NO: 9300 - DNA, 26 bp, synthetic construct
  misc_feature 1..26: note = Probe
  source 1..26: mol_type = other DNA
atcattggtcgtggttgtagtccgtg

SEQ ID NO: 9301 - DNA, 27 bp, synthetic construct
  misc_feature 1..27: note = Probe
  source 1..27: mol_type = other DNA
atcattggtcgtggttgtagtccgtgc

SEQ ID NO: 9302 - DNA, 28 bp, synthetic construct
  misc_feature 1..28: note = Probe
  source 1..28: mol_type = other DNA
atcattggtcgtggttgtagtccgtgcg

SEQ ID NO: 9303 - DNA, 29 bp, synthetic construct
  misc_feature 1..29: note = Probe
  source 1..29: mol_type = other DNA
atcattggtcgtggttgtagtccgtgcga

SEQ ID NO: 9304 - DNA, 15 bp, synthetic construct
  misc_feature 1..15: note = Probe
  source 1..15: mol_type = other DNA
atccattggtcttag

SEQ ID NO: 9305 - DNA, 17 bp, synthetic construct
  misc_feature 1..17: note = Probe
  source 1..17: mol_type = other DNA
atcccaccgctgccaca

SEQ ID NO: 9306 - DNA, 18 bp, synthetic construct
  misc_feature 1..18: note = Probe
  source 1..18: mol_type = other DNA
atcccaccgctgccacac

SEQ ID NO: 9307 - DNA, 17 bp, synthetic construct
  misc_feature 1..17: note = Probe
  source 1..17: mol_type = other DNA
atcccaccgctgccagc

SEQ ID NO: 9308 - DNA, 15 bp, synthetic construct
  misc_feature 1..15: note = Probe
  source 1..15: mol_type = other DNA
atcccactcctgaca

SEQ ID NO: 9309 - DNA, 18 bp, synthetic construct
  misc_feature 1..18: note = Probe
  source 1..18: mol_type = other DNA
atcccagcggtgcctcaa

SEQ ID NO: 9310 - DNA, 18 bp, synthetic construct
  misc_feature 1..18: note = Probe
  source 1..18: mol_type = other DNA
atcccagcggtgcctccg

SEQ ID NO: 9311 - DNA, 17 bp, synthetic construct
  misc_feature 1..17: note = Probe
  source 1..17: mol_type = other DNA
atcccatcctcgtcgct

SEQ ID NO: 9312 - DNA, 17 bp, synthetic construct
  misc_feature 1..17: note = Probe
  source 1..17: mol_type = other DNA
atcccatcctcgtcggc

SEQ ID NO: 9313 - DNA, 18 bp, synthetic construct
  misc_feature 1..18: note = Probe
  source 1..18: mol_type = other DNA
atccccggcacctccacc

SEQ ID NO: 9314 - DNA, 19 bp, synthetic construct
  misc_feature 1..19: note = Probe
  source 1..19: mol_type = other DNA
atccccggcacctccacca

SEQ ID NO: 9315 - DNA, 17 bp, synthetic construct
  misc_feature 1..17: note = Probe
  source 1..17: mol_type = other DNA
atcccggacgagccccc

SEQ ID NO: 9316 - DNA, 18 bp, synthetic construct
  misc_feature 1..18: note = Probe
  source 1..18: mol_type = other DNA
atcccggacgagccccct

SEQ ID NO: 9317 - DNA, 18 bp, synthetic construct
  misc_feature 1..18: note = Probe
  source 1..18: mol_type = other DNA
atcccggacgagcccctc

SEQ ID NO: 9318 - DNA, 18 bp, synthetic construct
  misc_feature 1..18: note = Probe
  source 1..18: mol_type = other DNA
atcccggacgagccctcc

SEQ ID NO: 9319 - DNA, 16 bp, synthetic construct
  misc_feature 1..16: note = Probe
  source 1..16: mol_type = other DNA
atccggctcgaaggac

SEQ ID NO: 9320 - DNA, 17 bp, synthetic construct
  misc_feature 1..17: note = Probe
  source 1..17: mol_type = other DNA
atccggctcgaaggacg

SEQ ID NO: 9321 - DNA, 18 bp, synthetic construct
  misc_feature 1..18: note = Probe
  source 1..18: mol_type = other DNA
atccggctcgaaggacga

SEQ ID NO: 9322 - DNA, 19 bp, synthetic construct
  misc_feature 1..19: note = Probe
  source 1..19: mol_type = other DNA
atccggctcgaaggacgaa

SEQ ID NO: 9323 - DNA, 20 bp, synthetic construct
  misc_feature 1..20: note = Probe
  source 1..20: mol_type = other DNA
atccggctcgaaggacgaaa

SEQ ID NO: 9324 - DNA, 17 bp, synthetic construct
  misc_feature 1..17: note = Probe
  source 1..17: mol_type = other DNA
atccggctcggaggacg

SEQ ID NO: 9325 - DNA, 17 bp, synthetic construct
  misc_feature 1..17: note = Probe
  source 1..17: mol_type = other DNA
atccgggtgccccctca

SEQ ID NO: 9326 - DNA, 18 bp, synthetic construct
  misc_feature 1..18: note = Probe
  source 1..18: mol_type = other DNA
atccgggtgccccctcaa

SEQ ID NO: 9327 - DNA, 17 bp, synthetic construct
  misc_feature 1..17: note = Probe
  source 1..17: mol_type = other DNA
atccgggtgccccctcg

SEQ ID NO: 9328 - DNA, 17 bp, synthetic construct
  misc_feature 1..17: note = Probe
  source 1..17: mol_type = other DNA
atccgggtgccccctct

SEQ ID NO: 9329 - DNA, 17 bp, synthetic construct
  misc_feature 1..17: note = Probe
  source 1..17: mol_type = other DNA
atccgggtgccccctgc

SEQ ID NO: 9330 - DNA, 17 bp, synthetic construct
  misc_feature 1..17: note = Probe
  source 1..17: mol_type = other DNA
atccgggtgcccccttc

SEQ ID NO: 9331 - DNA, 19 bp, synthetic construct
  misc_feature 1..19: note = Probe
  source 1..19: mol_type = other DNA
atcctcgtcggccctgttt

SEQ ID NO: 9332 - DNA, 20 bp, synthetic construct
  misc_feature 1..20: note = Probe
  source 1..20: mol_type = other DNA
atcctcgtcggccctgtttt

SEQ ID NO: 9333 - DNA, 17 bp, synthetic construct
  misc_feature 1..17: note = Probe
  source 1..17: mol_type = other DNA
atcctgccgactacggc

SEQ ID NO: 9334 - DNA, 18 bp, synthetic construct
  misc_feature 1..18: note = Probe
  source 1..18: mol_type = other DNA
atcctgccgactacggca

SEQ ID NO: 9335 - DNA, 17 bp, synthetic construct
  misc_feature 1..17: note = Probe
  source 1..17: mol_type = other DNA
atcctgccgactacgtc

SEQ ID NO: 9336 - DNA, 18 bp, synthetic construct
  misc_feature 1..18: note = Probe
  source 1..18: mol_type = other DNA
atcctgccgactacgtca

SEQ ID NO: 9337 - DNA, 19 bp, synthetic construct
  misc_feature 1..19: note = Probe
  source 1..19: mol_type = other DNA
atcctgccgactacgtcat

SEQ ID NO: 9338 - DNA, 28 bp, synthetic construct
  misc_feature 1..28: note = Probe
  source 1..28: mol_type = other DNA
atcggtgcatgggtggttcagtggtaga

SEQ ID NO: 9339 - DNA, 15 bp, synthetic construct
  misc_feature 1..15: note = Probe
  source 1..15: mol_type = other DNA
atcgtatagtggtta

SEQ ID NO: 9340 - DNA, 23 bp, synthetic construct
  misc_feature 1..23: note = Probe
  source 1..23: mol_type = other DNA
atcgtatagtggttagtactctg

SEQ ID NO: 9341 - DNA, 24 bp, synthetic construct
  misc_feature 1..24: note = Probe
  source 1..24: mol_type = other DNA
atcgtatagtggttagtactctgc

SEQ ID NO: 9342 - DNA, 27 bp, synthetic construct
  misc_feature 1..27: note = Probe
  source 1..27: mol_type = other DNA
atcgtatagtggttagtactctgcgtt

SEQ ID NO: 9343 - DNA, 28 bp, synthetic construct
  misc_feature 1..28: note = Probe
  source 1..28: mol_type = other DNA
atcgtatagtggttagtactctgcgttg

SEQ ID NO: 9344 - DNA, 29 bp, synthetic construct
  misc_feature 1..29: note = Probe
  source 1..29: mol_type = other DNA
atcgtatagtggttagtactctgcgttgt

SEQ ID NO: 9345 - DNA, 17 bp, synthetic construct
  misc_feature 1..17: note = Probe
  source 1..17: mol_type = other DNA
atctcggtggaacctgc

SEQ ID NO: 9346 - DNA, 18 bp, synthetic construct
  misc_feature 1..18: note = Probe
  source 1..18: mol_type = other DNA
atctcggtggaacctgca

SEQ ID NO: 9347 - DNA, 30 bp, synthetic construct
  misc_feature 1..30: note = Probe
  source 1..30: mol_type = other DNA
atctgaaggtcgtgagttcgatcctcacac

SEQ ID NO: 9348 - DNA, 27 bp, synthetic construct
  misc_feature 1..27: note = Probe
  source 1..27: mol_type = other DNA
atgatcgtatagtggttagtactctgc

SEQ ID NO: 9349 - DNA, 30 bp, synthetic construct; identical to SEQ ID NO: 3818
  misc_feature 1..30: note = Probe
  source 1..30: mol_type = other DNA

SEQ ID NO: 9350 - DNA, 24 bp, synthetic construct
  misc_feature 1..24: note = Probe
  source 1..24: mol_type = other DNA
atggataacgcgtctgactacgga

SEQ ID NO: 9351 - DNA, 20 bp, synthetic construct
  misc_feature 1..20: note = Probe
  source 1..20: mol_type = other DNA
atggataaggcgtctgactt

SEQ ID NO: 9352 - DNA, 20 bp, synthetic construct
  misc_feature 1..20: note = Probe
  source 1..20: mol_type = other DNA
atggataaggcgtctgattc

SEQ ID NO: 9353 - DNA, 28 bp, synthetic construct
  misc_feature 1..28: note = Probe
  source 1..28: mol_type = other DNA
atggcacatgcagcgcaagtaggtctac

SEQ ID NO: 9354 - DNA, 25 bp, synthetic construct
  misc_feature 1..25: note = Probe
  source 1..25: mol_type = other DNA
atggctgagtgaagcattggactgt

SEQ ID NO: 9355 - DNA, 26 bp, synthetic construct
  misc_feature 1..26: note = Probe
  source 1..26: mol_type = other DNA
atggctgagtgaagcattggactgta

SEQ ID NO: 9356 - DNA, 27 bp, synthetic construct
  misc_feature 1..27: note = Probe
  source 1..27: mol_type = other DNA
atggctgagtgaagcattggactgtaa

SEQ ID NO: 9357 - DNA, 25 bp, synthetic construct
  misc_feature 1..25: note = Probe
  source 1..25: mol_type = other DNA
atgggtggttcagtggtagaattct

SEQ ID NO: 9358 - DNA, 26 bp, synthetic construct
  misc_feature 1..26: note = Probe
  source 1..26: mol_type = other DNA
atgggtggttcagtggtagaattctc

SEQ ID NO: 9359 - DNA, 27 bp, synthetic construct
  misc_feature 1..27: note = Probe
  source 1..27: mol_type = other DNA
atgggtggttcagtggtagaattctcg

SEQ ID NO: 9360 - DNA, 28 bp, synthetic construct
  misc_feature 1..28: note = Probe
  source 1..28: mol_type = other DNA
atgggtggttcagtggtagaattctcgc

SEQ ID NO: 9361 - DNA, 29 bp, synthetic construct
  misc_feature 1..29: note = Probe
  source 1..29: mol_type = other DNA
atgggtggttcagtggtagaattctcgcc

SEQ ID NO: 9362 - DNA, 30 bp, synthetic construct; identical to SEQ ID NO: 403
  misc_feature 1..30: note = Probe
  source 1..30: mol_type = other DNA

SEQ ID NO: 9363 - DNA, 19 bp, synthetic construct
  misc_feature 1..19: note = Probe
  source 1..19: mol_type = other DNA
atggtaagcaccctggact

SEQ ID NO: 9364 - DNA, 19 bp, synthetic construct
  misc_feature 1..19: note = Probe
  source 1..19: mol_type = other DNA
atggtaagcactctggact

SEQ ID NO: 9365 - DNA, 19 bp, synthetic construct
  misc_feature 1..19: note = Probe
  source 1..19: mol_type = other DNA
atggtcagcactctggact

SEQ ID NO: 9366 - DNA, 20 bp, synthetic construct
  misc_feature 1..20: note = Probe
  source 1..20: mol_type = other DNA
atggtcagcactctggactc

SEQ ID NO: 9367 - DNA, 24 bp, synthetic construct
  misc_feature 1..24: note = Probe
  source 1..24: mol_type = other DNA
atggtctagcggttaggattcctg

SEQ ID NO: 9368 - DNA, 25 bp, synthetic construct
  misc_feature 1..25: note = Probe
  source 1..25: mol_type = other DNA
atggtctagcggttaggattcctgg

SEQ ID NO: 9369 - DNA, 19 bp, synthetic construct
  misc_feature 1..19: note = Probe
  source 1..19: mol_type = other DNA
atggtgagcaccctggact

SEQ ID NO: 9370 - DNA, 19 bp, synthetic construct
  misc_feature 1..19: note = Probe
  source 1..19: mol_type = other DNA
atggtgagcactctggact

SEQ ID NO: 9371 - DNA, 20 bp, synthetic construct
  misc_feature 1..20: note = Probe
  source 1..20: mol_type = other DNA
atggtgagcactctggactc

SEQ ID NO: 9372 - DNA, 19 bp, synthetic construct
  misc_feature 1..19: note = Probe
  source 1..19: mol_type = other DNA
atggtgagcactttggact

SEQ ID NO: 9373 - DNA, 28 bp, synthetic construct
  misc_feature 1..28: note = Probe
  source 1..28: mol_type = other DNA
atggtggagttaaagactttttctctga

SEQ ID NO: 9374 - DNA, 29 bp, synthetic construct
  misc_feature 1..29: note = Probe
  source 1..29: mol_type = other DNA
atggtggagttaaagactttttctctgat

SEQ ID NO: 9375 - DNA, 24 bp, synthetic construct
  misc_feature 1..24: note = Probe
  source 1..24: mol_type = other DNA
atggtggttcagtggtagaattct

SEQ ID NO: 9376 - DNA, 25 bp, synthetic construct
  misc_feature 1..25: note = Probe
  source 1..25: mol_type = other DNA
atggtggttcagtggtagaattctc

SEQ ID NO: 9377 - DNA, 26 bp, synthetic construct
  misc_feature 1..26: note = Probe
  source 1..26: mol_type = other DNA
atggtggttcagtggtagaattctcg

SEQ ID NO: 9378 - DNA, 27 bp, synthetic construct
  misc_feature 1..27: note = Probe
  source 1..27: mol_type = other DNA
atggtggttcagtggtagaattctcgc

SEQ ID NO: 9379 - DNA, 29 bp, synthetic construct
  misc_feature 1..29: note = Probe
  source 1..29: mol_type = other DNA
atggtggttcagtggtagaattctcgcct

SEQ ID NO: 9380 - DNA, 24 bp, synthetic construct
  misc_feature 1..24: note = Probe
  source 1..24: mol_type = other DNA
atggtgtaatggttagcactctgg

SEQ ID NO: 9381 - DNA, 26 bp, synthetic construct
  misc_feature 1..26: note = Probe
  source 1..26: mol_type = other DNA
atggtgtaatggttagcactctggac

SEQ ID NO: 9382 - DNA, 28 bp, synthetic construct
  misc_feature 1..28: note = Probe
  source 1..28: mol_type = other DNA
atggtgtaatggttagcactctggactc

SEQ ID NO: 9383 - DNA, 29 bp, synthetic construct
  misc_feature 1..29: note = Probe
  source 1..29: mol_type = other DNA
atggtgtaatggttagcactctggactct

SEQ ID NO: 9384 - DNA, 29 bp, synthetic construct
  misc_feature 1..29: note = Probe
  source 1..29: mol_type = other DNA
atggtgtaatggttagcactctggacttt

SEQ ID NO: 9385 - DNA, 15 bp, synthetic construct
  misc_feature 1..15: note = Probe
  source 1..15: mol_type = other DNA
atggttagcactctg

SEQ ID NO: 9386 - DNA, 16 bp, synthetic construct
  misc_feature 1..16: note = Probe
  source 1..16: mol_type = other DNA
atggttagcactctgg

SEQ ID NO: 9387 - DNA, 17 bp, synthetic construct
  misc_feature 1..17: note = Probe
  source 1..17: mol_type = other DNA
atggttagcactctgga

SEQ ID NO: 9388 - DNA, 18 bp, synthetic construct
  misc_feature 1..18: note = Probe
  source 1..18: mol_type = other DNA
atggttagcactctggac

SEQ ID NO: 9389 - DNA, 19 bp, synthetic construct
  misc_feature 1..19: note = Probe
  source 1..19: mol_type = other DNA
atggttagcactctggact

SEQ ID NO: 9390 - DNA, 20 bp, synthetic construct
  misc_feature 1..20: note = Probe
  source 1..20: mol_type = other DNA
atggttagcactctggactc

SEQ ID NO: 9391 - DNA, 21 bp, synthetic construct
  misc_feature 1..21: note = Probe
  source 1..21: mol_type = other DNA
atggttagcactctggactct

SEQ ID NO: 9392 - DNA, 22 bp, synthetic construct
  misc_feature 1..22: note = Probe
  source 1..22: mol_type = other DNA
atggttagcactctggactctg

SEQ ID NO: 9393 - DNA, 23 bp, synthetic construct
  misc_feature 1..23: note = Probe
  source 1..23: mol_type = other DNA
atggttagcactctggactctga

SEQ ID NO: 9394 - DNA, 24 bp, synthetic construct
  misc_feature 1..24: note = Probe
  source 1..24: mol_type = other DNA
atggttagcactctggactctgaa

SEQ ID NO: 9395 - DNA, 25 bp, synthetic construct
  misc_feature 1..25: note = Probe
  source 1..25: mol_type = other DNA
atggttagcactctggactctgaat

SEQ ID NO: 9396 - DNA, 26 bp, synthetic construct
  misc_feature 1..26: note = Probe
  source 1..26: mol_type = other DNA
atggttagcactctggactctgaatc

SEQ ID NO: 9397 - DNA, 27 bp, synthetic construct
  misc_feature 1..27: note = Probe
  source 1..27: mol_type = other DNA
atggttagcactctggactctgaatcc

SEQ ID NO: 9398 - DNA, 28 bp, synthetic construct
  misc_feature 1..28: note = Probe
  source 1..28: mol_type = other DNA
atggttagcactctggactctgaatcca

SEQ ID NO: 9399 - DNA, 30 bp, synthetic construct
  misc_feature 1..30: note = Probe
  source 1..30: mol_type = other DNA
atggttagcactctggactctgaatccagc

SEQ ID NO: 9400 - DNA, 22 bp, synthetic construct
  misc_feature 1..22: note = Probe
  source 1..22: mol_type = other DNA
atggttagcactctggactttg

SEQ ID NO: 9401 - DNA, 23 bp, synthetic construct
  misc_feature 1..23: note = Probe
  source 1..23: mol_type = other DNA
atggttagcactctggactttga

SEQ ID NO: 9402 - DNA, 26 bp, synthetic construct
  misc_feature 1..26: note = Probe
  source 1..26: mol_type = other DNA
atggttagcactctggactttgaatc

SEQ ID NO: 9403 - DNA, 19 bp, synthetic construct
  misc_feature 1..19: note = Probe
  source 1..19: mol_type = other DNA
atggttagcactctgggct

SEQ ID NO: 9404 - DNA, 20 bp, synthetic construct
  misc_feature 1..20: note = Probe
  source 1..20: mol_type = other DNA
atggttagcactctgggctt

SEQ ID NO: 9405 - DNA, 30 bp, synthetic construct
  misc_feature 1..30: note = Probe
  source 1..30: mol_type = other DNA
atggtttttcatatcattggtcgtggttgt

SEQ ID NO: 9406 - DNA, 23 bp, synthetic construct
  misc_feature 1..23: note = Probe
  source 1..23: mol_type = other DNA
atgtcgttagtctaggctgtcag

SEQ ID NO: 9407 - DNA, 24 bp, synthetic construct
  misc_feature 1..24: note = Probe
  source 1..24: mol_type = other DNA
atgtcgttagtctaggctgtcagc

SEQ ID NO: 9408 - DNA, 25 bp, synthetic construct
  misc_feature 1..25: note = Probe
  source 1..25: mol_type = other DNA
atgtcgttagtctaggctgtcagct

SEQ ID NO: 9409 - DNA, 30 bp, synthetic construct
  misc_feature 1..30: note = Probe
  source 1..30: mol_type = other DNA
atgtcgttagtctaggctgtcagctcttcc

SEQ ID NO: 9410 - DNA, 18 bp, synthetic construct
  misc_feature 1..18: note = Probe
  source 1..18: mol_type = other DNA
atgtttagacgggctcac

SEQ ID NO: 9411 - DNA, 29 bp, synthetic construct
  misc_feature 1..29: note = Probe
  source 1..29: mol_type = other DNA
attaagagaaccaacacctctttacagtg

SEQ ID NO: 9412 - DNA, 22 bp, synthetic construct
  misc_feature 1..22: note = Probe
  source 1..22: mol_type = other DNA
attaaggctccagtctcttcgg

SEQ ID NO: 9413 - DNA, 20 bp, synthetic construct
  misc_feature 1..20: note = Probe
  source 1..20: mol_type = other DNA
attaatcccctggcccaacc

SEQ ID NO: 9414 - DNA, 24 bp, synthetic construct
  misc_feature 1..24: note = Probe
  source 1..24: mol_type = other DNA
attaatcccctggcccaacccgtc

SEQ ID NO: 9415 - DNA, 30 bp, synthetic construct
  misc_feature 1..30: note = Probe
  source 1..30: mol_type = other DNA
attcaaaggttccgggttcgagtcccggcg

SEQ ID NO: 9416 - DNA, 19 bp, synthetic construct
  misc_feature 1..19: note = Probe
  source 1..19: mol_type = other DNA
attccaggttcgactcctg

SEQ ID NO: 9417 - DNA, 21 bp, synthetic construct
  misc_feature 1..21: note = Probe
  source 1..21: mol_type = other DNA
attccaggttcgactcctggc

SEQ ID NO: 9418 - DNA, 19 bp, synthetic construct
  misc_feature 1..19: note = Probe
  source 1..19: mol_type = other DNA
attcccggtcagggaacca

SEQ ID NO: 9419 - DNA, 17 bp, synthetic construct
  misc_feature 1..17: note = Probe
  source 1..17: mol_type = other DNA
attccggctcgaaggac

SEQ ID NO: 9420 - DNA, 18 bp, synthetic construct
  misc_feature 1..18: note = Probe
  source 1..18: mol_type = other DNA
attccggctcgaaggact

SEQ ID NO: 9421 - DNA, 30 bp, synthetic construct
  misc_feature 1..30: note = Probe
  source 1..30: mol_type = other DNA
attccggctcgaaggacttcgtctgtaatt

SEQ ID NO: 9422 - DNA, 18 bp, synthetic construct
  misc_feature 1..18: note = Probe
  source 1..18: mol_type = other DNA
attccggctcgaaggagc

SEQ ID NO: 9423 - DNA, 30 bp, synthetic construct
  misc_feature 1..30: note = Probe
  source 1..30: mol_type = other DNA
attcttgcgacccgggttcgattcccgggc

SEQ ID NO: 9424 - DNA, 15 bp, synthetic construct
  misc_feature 1..15: note = Probe
  source 1..15: mol_type = other DNA
attggtcgtggttgt

SEQ ID NO: 9425 - DNA, 16 bp, synthetic construct
  misc_feature 1..16: note = Probe
  source 1..16: mol_type = other DNA
attggtcgtggttgta

SEQ ID NO: 9426 - DNA, 17 bp, synthetic construct
  misc_feature 1..17: note = Probe
  source 1..17: mol_type = other DNA
attggtcgtggttgtag

SEQ ID NO: 9427 - DNA, 22 bp, synthetic construct
  misc_feature 1..22: note = Probe
  source 1..22: mol_type = other DNA
attggtcgtggttgtagtccgt

SEQ ID NO: 9428 - DNA, 29 bp, synthetic construct
  misc_feature 1..29: note = Probe
  source 1..29: mol_type = other DNA
attggtcgtggttgtagtccgtgcgagaa

SEQ ID NO: 9429 - DNA, 30 bp, synthetic construct
  misc_feature 1..30: note = Probe
  source 1..30: mol_type = other DNA
attggtcgtggttgtagtccgtgcgagaat

SEQ ID NO: 9430 - DNA, 20 bp, synthetic construct
  misc_feature 1..20: note = Probe
  source 1..20: mol_type = other DNA
attggtggttcagtggtaga

SEQ ID NO: 9431 - DNA, 21 bp, synthetic construct
  misc_feature 1..21: note = Probe
  source 1..21: mol_type = other DNA
attggtggttcagtggtagaa

SEQ ID NO: 9432 - DNA, 25 bp, synthetic construct
  misc_feature 1..25: note = Probe
  source 1..25: mol_type = other DNA
attggtggttcagtggtagaattct

SEQ ID NO: 9433 - DNA, 26 bp, synthetic construct
  misc_feature 1..26: note = Probe
  source 1..26: mol_type = other DNA
attggtggttcagtggtagaattctc

SEQ ID NO: 9434 - DNA, 27 bp, synthetic construct
  misc_feature 1..27: note = Probe
  source 1..27: mol_type = other DNA
attggtggttcagtggtagaattctcg

SEQ ID NO: 9435 - DNA, 28 bp, synthetic construct
  misc_feature 1..28: note = Probe
  source 1..28: mol_type = other DNA
attggtggttcagtggtagaattctcgc

SEQ ID NO: 9436 - DNA, 29 bp, synthetic construct
  misc_feature 1..29: note = Probe
  source 1..29: mol_type = other DNA
attggtggttcagtggtagaattctcgcc

SEQ ID NO: 9437 - DNA, 30 bp, synthetic construct; identical to SEQ ID NO: 3916
  misc_feature 1..30: note = Probe
  source 1..30: mol_type = other DNA

SEQ ID NO: 9438 - DNA, 15 bp, synthetic construct
  misc_feature 1..15: note = Probe
  source 1..15: mol_type = other DNA
attgtgaatctgaca

SEQ ID NO: 9439 - DNA, 17 bp, synthetic construct
  misc_feature 1..17: note = Probe
  source 1..17: mol_type = other DNA
attgtgaatctgacaac

SEQ ID NO: 9440 - DNA, 18 bp, synthetic construct
  misc_feature 1..18: note = Probe
  source 1..18: mol_type = other DNA
attgtgaatctgacaaca

SEQ ID NO: 9441 - DNA, 19 bp, synthetic construct
  misc_feature 1..19: note = Probe
  source 1..19: mol_type = other DNA
attgtgaatctgacaacag

SEQ ID NO: 9442 - DNA, 20 bp, synthetic construct
  misc_feature 1..20: note = Probe
  source 1..20: mol_type = other DNA
attgtgaatctgacaacaga

SEQ ID NO: 9443 - DNA, 21 bp, synthetic construct
  misc_feature 1..21: note = Probe
  source 1..21: mol_type = other DNA
attgtgaatctgacaacagag

SEQ ID NO: 9444 - DNA, 22 bp, synthetic construct
  misc_feature 1..22: note = Probe
  source 1..22: mol_type = other DNA
attgtgaatctgacaacagagg

SEQ ID NO: 9445 - DNA, 23 bp, synthetic construct
  misc_feature 1..23: note = Probe
  source 1..23: mol_type = other DNA
attgtgaatctgacaacagaggc

SEQ ID NO: 9446 - DNA, 24 bp, synthetic construct
  misc_feature 1..24: note = Probe
  source 1..24: mol_type = other DNA
attgtgaatctgacaacagaggct

SEQ ID NO: 9447 - DNA, 25 bp, synthetic construct
  misc_feature 1..25: note = Probe
  source 1..25: mol_type = other DNA
attgtgaatctgacaacagaggctt

SEQ ID NO: 9448 - DNA, 26 bp, synthetic construct
  misc_feature 1..26: note = Probe
  source 1..26: mol_type = other DNA
attgtgaatctgacaacagaggctta

SEQ ID NO: 9449 - DNA, 28 bp, synthetic construct
  misc_feature 1..28: note = Probe
  source 1..28: mol_type = other DNA
attgtgaatctgacaacagaggcttacg

SEQ ID NO: 9450 - DNA, 29 bp, synthetic construct
  misc_feature 1..29: note = Probe
  source 1..29: mol_type = other DNA
attgtgaatctgacaacagaggcttacga

SEQ ID NO: 9451 - DNA, 30 bp, synthetic construct
  misc_feature 1..30: note = Probe
  source 1..30: mol_type = other DNA
attgtgaatctgacaacagaggcttacgac

SEQ ID NO: 9452 - DNA, 22 bp, synthetic construct
  misc_feature 1..22: note = Probe
  source 1..22: mol_type = other DNA
atttaggctccagtctcttcgg

SEQ ID NO: 9453 - DNA, 19 bp, synthetic construct
  misc_feature 1..19: note = Probe
  source 1..19: mol_type = other DNA
atttcaacttaacttgacc

SEQ ID NO: 9454 - DNA, 20 bp, synthetic construct
  misc_feature 1..20: note = Probe
  source 1..20: mol_type = other DNA
atttcaacttaacttgaccg

SEQ ID NO: 9455 - DNA, 22 bp, synthetic construct
  misc_feature 1..22: note = Probe
  source 1..22: mol_type = other DNA
atttcaacttaacttgaccgct

SEQ ID NO: 9456 - DNA, 25 bp, synthetic construct
  misc_feature 1..25: note = Probe
  source 1..25: mol_type = other DNA
atttcaacttaacttgaccgctctg

SEQ ID NO: 9457 - DNA, 26 bp, synthetic construct
  misc_feature 1..26: note = Probe
  source 1..26: mol_type = other DNA
atttcaacttaacttgaccgctctga

SEQ ID NO: 9458 - DNA, 27 bp, synthetic construct
  misc_feature 1..27: note = Probe
  source 1..27: mol_type = other DNA
atttcaacttaacttgaccgctctgag

SEQ ID NO: 9459 - DNA, 28 bp, synthetic construct
  misc_feature 1..28: note = Probe
  source 1..28: mol_type = other DNA
atttcaacttaacttgaccgctctgagc

SEQ ID NO: 9460 - DNA, 25 bp, synthetic construct
  misc_feature 1..25: note = Probe
  source 1..25: mol_type = other DNA
atttgtggtccagtggtagaattct

SEQ ID NO: 9461 - DNA, 26 bp, synthetic construct
  misc_feature 1..26: note = Probe
  source 1..26: mol_type = other DNA
atttgtggtccagtggtagaattctc

SEQ ID NO: 9462 - DNA, 21 bp, synthetic construct
  misc_feature 1..21: note = Probe
  source 1..21: mol_type = other DNA
caaaaaggattagactgaacc

SEQ ID NO: 9463 - DNA, 22 bp, synthetic construct
  misc_feature 1..22: note = Probe
  source 1..22: mol_type = other DNA
caaaaaggattagactgaaccg

SEQ ID NO: 9464 - DNA, 26 bp, synthetic construct
  misc_feature 1..26: note = Probe
  source 1..26: mol_type = other DNA
caaaacatcagattgtgaatctgaca

SEQ ID NO: 9465 - DNA, 29 bp, synthetic construct
  misc_feature 1..29: note = Probe
  source 1..29: mol_type = other DNA
caaaacatcagattgtgaatctgacaaca

SEQ ID NO: 9466 - DNA, 21 bp, synthetic construct
  misc_feature 1..21: note = Probe
  source 1..21: mol_type = other DNA
caaatcccggacgagcccaca

SEQ ID NO: 9467 - DNA, 20 bp, synthetic construct
  misc_feature 1..20: note = Probe
  source 1..20: mol_type = other DNA
caaatcccggacgagccccc

SEQ ID NO: 9468 - DNA, 21 bp, synthetic construct
  misc_feature 1..21: note = Probe
  source 1..21: mol_type = other DNA
caaatcccggacgagccccct

SEQ ID NO: 9469 - DNA, 21 bp, synthetic construct
  misc_feature 1..21: note = Probe
  source 1..21: mol_type = other DNA
caaatcccggacgagccctca

SEQ ID NO: 9470 - DNA, 19 bp, synthetic construct
  misc_feature 1..19: note = Probe
  source 1..19: mol_type = other DNA
caaatctcggtggaacctg

SEQ ID NO: 9471 - DNA, 21 bp, synthetic construct
  misc_feature 1..21: note = Probe
  source 1..21: mol_type = other DNA
caaatctcggtggaacctgca

SEQ ID NO: 9472 - DNA, 18 bp, synthetic construct
  misc_feature 1..18: note = Probe
  source 1..18: mol_type = other DNA
caacatggctttctcaac

SEQ ID NO: 9473 - DNA, 15 bp, synthetic construct
  misc_feature 1..15: note = Probe
  source 1..15: mol_type = other DNA
caacttaacttgacc

SEQ ID NO: 9474 - DNA, 16 bp, synthetic construct
  misc_feature 1..16: note = Probe
  source 1..16: mol_type = other DNA
caacttaacttgaccg

SEQ ID NO: 9475 - DNA, 18 bp, synthetic construct
  misc_feature 1..18: note = Probe
  source 1..18: mol_type = other DNA
caacttaacttgaccgct

SEQ ID NO: 9476 - DNA, 19 bp, synthetic construct
  misc_feature 1..19: note = Probe
  source 1..19: mol_type = other DNA
caacttaacttgaccgctc

SEQ ID NO: 9477 - DNA, 20 bp, synthetic construct
  misc_feature 1..20: note = Probe
  source 1..20: mol_type = other DNA
caacttaacttgaccgctct

SEQ ID NO: 9478 - DNA, 21 bp, synthetic construct
  misc_feature 1..21: note = Probe
  source 1..21: mol_type = other DNA
caacttaacttgaccgctctg

SEQ ID NO: 9479 - DNA, 22 bp, synthetic construct
  misc_feature 1..22: note = Probe
  source 1..22: mol_type = other DNA
caacttaacttgaccgctctga

SEQ ID NO: 9480 - DNA, 23 bp, synthetic construct
  misc_feature 1..23: note = Probe
  source 1..23: mol_type = other DNA
caacttaacttgaccgctctgag

SEQ ID NO: 9481 - DNA, 24 bp, synthetic construct
  misc_feature 1..24: note = Probe
  source 1..24: mol_type = other DNA
caacttaacttgaccgctctgagc

SEQ ID NO: 9482 - DNA, 19 bp, synthetic construct
  misc_feature 1..19: note = Probe
  source 1..19: mol_type = other DNA
caagaactgctaactcatg

SEQ ID NO: 9483 - DNA, 21 bp, synthetic construct
  misc_feature 1..21: note = Probe
  source 1..21: mol_type = other DNA
caagaactgctaactcatgcc

SEQ ID NO: 9484 - DNA, 21 bp, synthetic construct
  misc_feature 1..21: note = Probe
  source 1..21: mol_type = other DNA
caagtccctgttcgggcggca

SEQ ID NO: 9485 - DNA, 21 bp, synthetic construct
  misc_feature 1..21: note = Probe
  source 1..21: mol_type = other DNA
caatccccggcacctccacca

SEQ ID NO: 9486 - DNA, 21 bp, synthetic construct
  misc_feature 1..21: note = Probe
  source 1..21: mol_type = other DNA
caatggataacgcgtctgact

SEQ ID NO: 9487 - DNA, 27 bp, synthetic construct
  misc_feature 1..27: note = Probe
  source 1..27: mol_type = other DNA
caatggtggttcagtggtagaattctc

SEQ ID NO: 9488 - DNA, 28 bp, synthetic construct
  misc_feature 1..28: note = Probe
  source 1..28: mol_type = other DNA
caatggtggttcagtggtagaattctcg

SEQ ID NO: 9489 - DNA, 29 bp, synthetic construct
  misc_feature 1..29: note = Probe
  source 1..29: mol_type = other DNA
caatggtggttcagtggtagaattctcgc

SEQ ID NO: 9490 - DNA, 30 bp, synthetic construct
  misc_feature 1..30: note = Probe
  source 1..30: mol_type = other DNA
caatggtggttcagtggtagaattctcgcc

SEQ ID NO: 9491 - DNA, 21 bp, synthetic construct
  misc_feature 1..21: note = Probe
  source 1..21: mol_type = other DNA
caattcccggtcagggaacca

SEQ ID NO: 9492 - DNA, 18 bp, synthetic construct
  misc_feature 1..18: note = Probe
  source 1..18: mol_type = other DNA
cacaagaactgctaactc

SEQ ID NO: 9493 - DNA, 21 bp, synthetic construct
  misc_feature 1..21: note = Probe
  source 1..21: mol_type = other DNA
cacaagaactgctaactcatg

SEQ ID NO: 9494 - DNA, 22 bp, synthetic construct
  misc_feature 1..22: note = Probe
  source 1..22: mol_type = other DNA
cacaagaactgctaactcatgc

SEQ ID NO: 9495 - DNA, 20 bp, synthetic construct
  misc_feature 1..20: note = Probe
  source 1..20: mol_type = other DNA
cacacggggcacaataattt

SEQ ID NO: 9496 - DNA, 27 bp, synthetic construct
  misc_feature 1..27: note = Probe
  source 1..27: mol_type = other DNA
cacatggtctagcggttaggattcctg

SEQ ID NO: 9497 - DNA, 28 bp, synthetic construct
  misc_feature 1..28: note = Probe
  source 1..28: mol_type = other DNA
cacatggtctagcggttaggattcctgg

SEQ ID NO: 9498 - DNA, 19 bp, synthetic construct
  misc_feature 1..19: note = Probe
  source 1..19: mol_type = other DNA
caccgccgcggcccgggtt

SEQ ID NO: 9499 - DNA, 20 bp, synthetic construct
  misc_feature 1..20: note = Probe
  source 1..20: mol_type = other DNA
caccgccgcggcccgggttc

SEQ ID NO: 9500 - DNA, 30 bp, synthetic construct
  misc_feature 1..30: note = Probe
  source 1..30: mol_type = other DNA
caccgccgcggcccgggttcgattcccggt

SEQ ID NO: 9501 - DNA, 21 bp, synthetic construct
  misc_feature 1..21: note = Probe
  source 1..21: mol_type = other DNA
cacctcagaaggtctcacttt

SEQ ID NO: 9502 - DNA, 18 bp, synthetic construct
  misc_feature 1..18: note = Probe
  source 1..18: mol_type = other DNA
cacggggcacaataattt

SEQ ID NO: 9503 - DNA, 15 bp, synthetic construct
  misc_feature 1..15: note = Probe
  source 1..15: mol_type = other DNA
cactctggactctga

SEQ ID NO: 9504 - DNA, 16 bp, synthetic construct
  misc_feature 1..16: note = Probe
  source 1..16: mol_type = other DNA
cactctggactctgaa

SEQ ID NO: 9505 - DNA, 17 bp, synthetic construct
  misc_feature 1..17: note = Probe
  source 1..17: mol_type = other DNA
cactctggactctgaat

SEQ ID NO: 9506 - DNA, 18 bp, synthetic construct
  misc_feature 1..18: note = Probe
  source 1..18: mol_type = other DNA
cactctggactctgaatc

SEQ ID NO: 9507 - DNA, 19 bp, synthetic construct
  misc_feature 1..19: note = Probe
  source 1..19: mol_type = other DNA
cactctggactctgaatcc

SEQ ID NO: 9508 - DNA, 20 bp, synthetic construct
  misc_feature 1..20: note = Probe
  source 1..20: mol_type = other DNA
cactctggactctgaatcca

SEQ ID NO: 9509 - DNA, 21 bp, synthetic construct
  misc_feature 1..21: note = Probe
  source 1..21: mol_type = other DNA
cactctggactctgaatccag

SEQ ID NO: 9510 - DNA, 22 bp, synthetic construct
  misc_feature 1..22: note = Probe
  source 1..22: mol_type = other DNA
cactctggactctgaatccagc

SEQ ID NO: 9511 - DNA, 23 bp, synthetic construct
  misc_feature 1..23: note = Probe
  source 1..23: mol_type = other DNA
cactctggactctgaatccagcg

SEQ ID NO: 9512 - DNA, 30 bp, synthetic construct; identical to SEQ ID NO: 4174
  misc_feature 1..30: note = Probe
  source 1..30: mol_type = other DNA

SEQ ID NO: 9513 - DNA, 21 bp, synthetic construct
  misc_feature 1..21: note = Probe
  source 1..21: mol_type = other DNA
cactctggactctgaatccgg

SEQ ID NO: 9514 - DNA, 17 bp, synthetic construct
  misc_feature 1..17: note = Probe
  source 1..17: mol_type = other DNA
cactctggactttgaat

SEQ ID NO: 9515 - DNA, 18 bp, synthetic construct
  misc_feature 1..18: note = Probe
  source 1..18: mol_type = other DNA
cactctggactttgaatc

SEQ ID NO: 9516 - DNA, 19 bp, synthetic construct
  misc_feature 1..19: note = Probe
  source 1..19: mol_type = other DNA
cactctggactttgaatcc

SEQ ID NO: 9517 - DNA, 20 bp, synthetic construct
  misc_feature 1..20: note = Probe
  source 1..20: mol_type = other DNA
cactgaaaatgtttagacgg

SEQ ID NO: 9518 - DNA, 22 bp, synthetic construct
  misc_feature 1..22: note = Probe
  source 1..22: mol_type = other DNA
cactgaaaatgtttagacgggc

SEQ ID NO: 9519 - DNA, 23 bp, synthetic construct
  misc_feature 1..23: note = Probe
  source 1..23: mol_type = other DNA
cactgaaaatgtttagacgggct

SEQ ID NO: 9520 - DNA, 24 bp, synthetic construct
  misc_feature 1..24: note = Probe
  source 1..24: mol_type = other DNA
cactgaaaatgtttagacgggctc

SEQ ID NO: 9521 - DNA, 25 bp, synthetic construct
  misc_feature 1..25: note = Probe
  source 1..25: mol_type = other DNA
cactgaaaatgtttagacgggctca

SEQ ID NO: 9522 - DNA, 27 bp, synthetic construct
  misc_feature 1..27: note = Probe
  source 1..27: mol_type = other DNA
cactgaaaatgtttagacgggctcaca

SEQ ID NO: 9523 - DNA, 15 bp, synthetic construct
  misc_feature 1..15: note = Probe
  source 1..15: mol_type = other DNA
cactgtaaagctaac

SEQ ID NO: 9524 - DNA, 16 bp, synthetic construct
  misc_feature 1..16: note = Probe
  source 1..16: mol_type = other DNA
cactgtaaagctaact

SEQ ID NO: 9525 - DNA, 17 bp, synthetic construct
  misc_feature 1..17: note = Probe
  source 1..17: mol_type = other DNA
cactgtaaagctaactt

SEQ ID NO: 9526 - DNA, 18 bp, synthetic construct
  misc_feature 1..18: note = Probe
  source 1..18: mol_type = other DNA
cactgtaaagctaactta

SEQ ID NO: 9527 - DNA, 19 bp, synthetic construct
  misc_feature 1..19: note = Probe
  source 1..19: mol_type = other DNA
cactgtaaagctaacttag

SEQ ID NO: 9528 - DNA, 22 bp, synthetic construct
  misc_feature 1..22: note = Probe
  source 1..22: mol_type = other DNA
cactgtaaagctaacttagcat

SEQ ID NO: 9529 - DNA, 23 bp, synthetic construct
  misc_feature 1..23: note = Probe
  source 1..23: mol_type = other DNA
cactgtaaagctaacttagcatt

SEQ ID NO: 9530 - DNA, 24 bp, synthetic construct
  misc_feature 1..24: note = Probe
  source 1..24: mol_type = other DNA
cactgtaaagctaacttagcatta

SEQ ID NO: 9531 - DNA, 25 bp, synthetic construct
  misc_feature 1..25: note = Probe
  source 1..25: mol_type = other DNA
cactgtaaagctaacttagcattaa

SEQ ID NO: 9532 - DNA, 26 bp, synthetic construct
  misc_feature 1..26: note = Probe
  source 1..26: mol_type = other DNA
cactgtaaagctaacttagcattaac

SEQ ID NO: 9533 - DNA, 27 bp, synthetic construct
  misc_feature 1..27: note = Probe
  source 1..27: mol_type = other DNA
cactgtaaagctaacttagcattaacc

SEQ ID NO: 9534 - DNA, 28 bp, synthetic construct
  misc_feature 1..28: note = Probe
  source 1..28: mol_type = other DNA
cactgtaaagctaacttagcattaacct

SEQ ID NO: 9535 - DNA, 29 bp, synthetic construct
  misc_feature 1..29: note = Probe
  source 1..29: mol_type = other DNA
cactgtaaagctaacttagcattaacctt

SEQ ID NO: 9536 - DNA, 30 bp, synthetic construct; identical to SEQ ID NO: 493
  misc_feature 1..30: note = Probe
  source 1..30: mol_type = other DNA

SEQ ID NO: 9537 - DNA, 30 bp, synthetic construct; identical to SEQ ID NO: 4195
  misc_feature 1..30: note = Probe
  source 1..30: mol_type = other DNA

SEQ ID NO: 9538 - DNA, 30 bp, synthetic construct
  misc_feature 1..30: note = Probe
  source 1..30: mol_type = other DNA
cagaagattccaggttcgactcctggctgg

SEQ ID NO: 9539 - DNA, 30 bp, synthetic construct
  misc_feature 1..30: note = Probe
  source 1..30: mol_type = other DNA
cagaagattgagggttcgagtcccttcgtg

SEQ ID NO: 9540 - DNA, 30 bp, synthetic construct
  misc_feature 1..30: note = Probe
  source 1..30: mol_type = other DNA
cagaagattgcaggttcgagtcctgccgcg

SEQ ID NO: 9541 - DNA, 29 bp, synthetic construct
  misc_feature 1..29: note = Probe
  source 1..29: mol_type = other DNA
cagaaggtcctgggttcgagccccagtgg

SEQ ID NO: 9542 - DNA, 20 bp, synthetic construct
  misc_feature 1..20: note = Probe
  source 1..20: mol_type = other DNA
cagagaatagtttaaattag

SEQ ID NO: 9543 - DNA, 21 bp, synthetic construct
  misc_feature 1..21: note = Probe
  source 1..21: mol_type = other DNA
cagagaatagtttaaattaga

SEQ ID NO: 9544 - DNA, 22 bp, synthetic construct
  misc_feature 1..22: note = Probe
  source 1..22: mol_type = other DNA
cagagaatagtttaaattagaa

SEQ ID NO: 9545 - DNA, 30 bp, synthetic construct; identical to SEQ ID NO: 519
  misc_feature 1..30: note = Probe
  source 1..30: mol_type = other DNA

SEQ ID NO: 9546 - DNA, 20 bp, synthetic construct
  misc_feature 1..20: note = Probe
  source 1..20: mol_type = other DNA
cagaggtcgatggatcgaaa

SEQ ID NO: 9547 - DNA, 23 bp, synthetic construct
  misc_feature 1..23: note = Probe
  source 1..23: mol_type = other DNA
cagaggtcgatggatcgaaacca

SEQ ID NO: 9548 - DNA, 29 bp, synthetic construct
  misc_feature 1..29: note = Probe
  source 1..29: mol_type = other DNA
cagagtggcgcagcggaagcgtgctgggc

SEQ ID NO: 9549 - DNA, 19 bp, synthetic construct
  misc_feature 1..19: note = Probe
  source 1..19: mol_type = other DNA
cagagtgtagcttaacaca

SEQ ID NO: 9550 - DNA, 23 bp, synthetic construct
  misc_feature 1..23: note = Probe
  source 1..23: mol_type = other DNA
cagagtgtagcttaacacaaagc

SEQ ID NO: 9551 - DNA, 24 bp, synthetic construct
  misc_feature 1..24: note = Probe
  source 1..24: mol_type = other DNA
cagagtgtagcttaacacaaagca

SEQ ID NO: 9552 - DNA, 26 bp, synthetic construct
  misc_feature 1..26: note = Probe
  source 1..26: mol_type = other DNA
cagagtgtagcttaacacaaagcacc

SEQ ID NO: 9553 - DNA, 27 bp, synthetic construct
  misc_feature 1..27: note = Probe
  source 1..27: mol_type = other DNA
cagagtgtagcttaacacaaagcaccc

SEQ ID NO: 9554 - DNA, 28 bp, synthetic construct
  misc_feature 1..28: note = Probe
  source 1..28: mol_type = other DNA
cagagtgtagcttaacacaaagcaccca

SEQ ID NO: 9555 - DNA, 30 bp, synthetic construct; identical to SEQ ID NO: 4262
  misc_feature 1..30: note = Probe
  source 1..30: mol_type = other DNA

SEQ ID NO: 9556 - DNA, 17 bp, synthetic construct
  misc_feature 1..17: note = Probe
  source 1..17: mol_type = other DNA
cagattgtgaatctgac

SEQ ID NO: 9557 - DNA, 18 bp, synthetic construct
  misc_feature 1..18: note = Probe
  source 1..18: mol_type = other DNA
cagattgtgaatctgaca

SEQ ID NO: 9558 - DNA, 20 bp, synthetic construct
  misc_feature 1..20: note = Probe
  source 1..20: mol_type = other DNA
cagattgtgaatctgacaac

SEQ ID NO: 9559 - DNA, 21 bp, synthetic construct
  misc_feature 1..21: note = Probe
  source 1..21: mol_type = other DNA
cagattgtgaatctgacaaca

SEQ ID NO: 9560 - DNA, 30 bp, synthetic construct
  misc_feature 1..30: note = Probe
  source 1..30: mol_type = other DNA
caggagatcctgggttcgaatcccagcggg

SEQ ID NO: 9561 - DNA, 30 bp, synthetic construct
  misc_feature 1..30: note = Probe
  source 1..30: mol_type = other DNA
caggagatcctgggttcgaatcccagcggt

SEQ ID NO: 9562 - DNA, 30 bp, synthetic construct
  misc_feature 1..30: note = Probe
  source 1..30: mol_type = other DNA
caggcggcccgggttcgactcccggtgtgg

SEQ ID NO: 9563 - DNA, 22 bp, synthetic construct
  misc_feature 1..22: note = Probe
  source 1..22: mol_type = other DNA
cagggttcaagtccctgttcgg

SEQ ID NO: 9564 - DNA, 23 bp, synthetic construct
  misc_feature 1..23: note = Probe
  source 1..23: mol_type = other DNA
cagggttcaagtccctgttcggg

SEQ ID NO: 9565 - DNA, 24 bp, synthetic construct
  misc_feature 1..24: note = Probe
  source 1..24: mol_type = other DNA
cagggttcaagtccctgttcgggc

SEQ ID NO: 9566 - DNA, 25 bp, synthetic construct
  misc_feature 1..25: note = Probe
  source 1..25: mol_type = other DNA
cagggttcaagtccctgttcgggcg

SEQ ID NO: 9567 - DNA, 28 bp, synthetic construct
  misc_feature 1..28: note = Probe
  source 1..28: mol_type = other DNA
cagggttcaagtccctgttcgggcggca

SEQ ID NO: 9568 - DNA, 16 bp, synthetic construct
  misc_feature 1..16: note = Probe
  source 1..16: mol_type = other DNA
caggtcgcagtctccc

SEQ ID NO: 9569 - DNA, 24 bp, synthetic construct
  misc_feature 1..24: note = Probe
  source 1..24: mol_type = other DNA
caggttcgactcctggctggctcg

SEQ ID NO: 9570 - DNA, 16 bp, synthetic construct
  misc_feature 1..16: note = Probe
  source 1..16: mol_type = other DNA
cagtcggtagagcatc

SEQ ID NO: 9571 - DNA, 17 bp, synthetic construct
  misc_feature 1..17: note = Probe
  source 1..17: mol_type = other DNA
cagtcggtagagcatca

SEQ ID NO: 9572 - DNA, 18 bp, synthetic construct
  misc_feature 1..18: note = Probe
  source 1..18: mol_type = other DNA
cagtcggtagagcatcag

SEQ ID NO: 9573 - DNA, 19 bp, synthetic construct
  misc_feature 1..19: note = Probe
  source 1..19: mol_type = other DNA
cagtcggtagagcatcaga

SEQ ID NO: 9574 - DNA, 16 bp, synthetic construct
  misc_feature 1..16: note = Probe
  source 1..16: mol_type = other DNA
cagtcggtagagcatg

SEQ ID NO: 9575 - DNA, 17 bp, synthetic construct
  misc_feature 1..17: note = Probe
  source 1..17: mol_type = other DNA
cagtcggtagagcatga

SEQ ID NO: 9576 - DNA, 18 bp, synthetic construct
  misc_feature 1..18: note = Probe
  source 1..18: mol_type = other DNA
cagtcggtagagcatgag

SEQ ID NO: 9577 - DNA, 19 bp, synthetic construct
  misc_feature 1..19: note = Probe
  source 1..19: mol_type = other DNA
cagtcggtagagcatgaga

SEQ ID NO: 9578 - DNA, 20 bp, synthetic construct
  misc_feature 1..20: note = Probe
  source 1..20: mol_type = other DNA
cagtcggtagagcatgagac

SEQ ID NO: 9579 - DNA, 21 bp, synthetic construct
  misc_feature 1..21: note = Probe
  source 1..21: mol_type = other DNA
cagtcggtagagcatgagact

SEQ ID NO: 9580 - DNA, 17 bp, synthetic construct
  misc_feature 1..17: note = Probe
  source 1..17: mol_type = other DNA
cagtcggtagagcatgg

SEQ ID NO: 9581 - DNA, 20 bp, synthetic construct
  misc_feature 1..20: note = Probe
  source 1..20: mol_type = other DNA
cagtcggtagagcatgggac

SEQ ID NO: 9582 - DNA, 21 bp, synthetic construct
  misc_feature 1..21: note = Probe
  source 1..21: mol_type = other DNA
cagtcggtagagcatgggact

SEQ ID NO: 9583 - DNA, 15 bp, synthetic construct
  misc_feature 1..15: note = Probe
  source 1..15: mol_type = other DNA
cagtggtagaattct

SEQ ID NO: 9584 - DNA, 16 bp, synthetic construct
  misc_feature 1..16: note = Probe
  source 1..16: mol_type = other DNA
cagtggtagaattctc

SEQ ID NO: 9585 - DNA, 17 bp, synthetic construct
  misc_feature 1..17: note = Probe
  source 1..17: mol_type = other DNA
cagtggtagaattctcg

SEQ ID NO: 9586 - DNA, 18 bp, synthetic construct
  misc_feature 1..18: note = Probe
  source 1..18: mol_type = other DNA
cagtggtagaattctcgc

SEQ ID NO: 9587 - DNA, 19 bp, synthetic construct
  misc_feature 1..19: note = Probe
  source 1..19: mol_type = other DNA
cagtggtagaattctcgcc

SEQ ID NO: 9588 - DNA, 20 bp, synthetic construct
  misc_feature 1..20: note = Probe
  source 1..20: mol_type = other DNA
cagtggtagaattctcgcct

SEQ ID NO: 9589 - DNA, 21 bp, synthetic construct
  misc_feature 1..21: note = Probe
  source 1..21: mol_type = other DNA
cagtggtagaattctcgcctc

SEQ ID NO: 9590 - DNA, 22 bp, synthetic construct
  misc_feature 1..22: note = Probe
  source 1..22: mol_type = other DNA
cagtggtagaattctcgcctcc

SEQ ID NO: 9591 - DNA, 21 bp, synthetic construct
  misc_feature 1..21: note = Probe
  source 1..21: mol_type = other DNA
cagtggtagaattctcgcctg

SEQ ID NO: 9592 - DNA, 22 bp, synthetic construct
  misc_feature 1..22: note = Probe
  source 1..22: mol_type = other DNA
cagtggtagaattctcgcctgc

SEQ ID NO: 9593 - DNA, 23 bp, synthetic construct
  misc_feature 1..23: note = Probe
  source 1..23: mol_type = other DNA
cagtggtagaattctcgcctgcc

SEQ ID NO: 9594 - DNA, 22 bp, synthetic construct
  misc_feature 1..22: note = Probe
  source 1..22: mol_type = other DNA
cagtggtagaattcttgcctgc

SEQ ID NO: 9595 - DNA, 15 bp, synthetic construct
  misc_feature 1..15: note = Probe
  source 1..15: mol_type = other DNA
cagtggtagagcatt

SEQ ID NO: 9596 - DNA, 17 bp, synthetic construct
  misc_feature 1..17: note = Probe
  source 1..17: mol_type = other DNA
cagtggtagagcatttg

SEQ ID NO: 9597 - DNA, 18 bp, synthetic construct
  misc_feature 1..18: note = Probe
  source 1..18: mol_type = other DNA
cagtggtagagcatttga

SEQ ID NO: 9598 - DNA, 19 bp, synthetic construct
  misc_feature 1..19: note = Probe
  source 1..19: mol_type = other DNA
cagtggtagagcatttgac

SEQ ID NO: 9599 - DNA, 20 bp, synthetic construct
  misc_feature 1..20: note = Probe
  source 1..20: mol_type = other DNA
cagtggtagagcatttgact

SEQ ID NO: 9600 - DNA, 21 bp, synthetic construct
  misc_feature 1..21: note = Probe
  source 1..21: mol_type = other DNA
cagtggtagagcatttgactg

SEQ ID NO: 9601 - DNA, 22 bp, synthetic construct
  misc_feature 1..22: note = Probe
  source 1..22: mol_type = other DNA
cagtggtagagcatttgactgc

SEQ ID NO: 9602 - DNA, 16 bp, synthetic construct
  misc_feature 1..16: note = Probe
  source 1..16: mol_type = other DNA
cagtggtagagcgcat

SEQ ID NO: 9603 - DNA, 22 bp, synthetic construct
  misc_feature 1..22: note = Probe
  source 1..22: mol_type = other DNA
cagttgacccgggttcgattcc

SEQ ID NO: 9604 - DNA, 30 bp, synthetic construct
  misc_feature 1..30: note = Probe
  source 1..30: mol_type = other DNA
cagttgacccgggttcgattcccggccaac

SEQ ID NO: 9605 - DNA, 25 bp, synthetic construct
  misc_feature 1..25: note = Probe
  source 1..25: mol_type = other DNA
cagttggtagagcggaggactgtag

SEQ ID NO: 9606 - DNA, 17 bp, synthetic construct
  misc_feature 1..17: note = Probe
  source 1..17: mol_type = other DNA
cataacccagaggtcga

SEQ ID NO: 9607 - DNA, 19 bp, synthetic construct
  misc_feature 1..19: note = Probe
  source 1..19: mol_type = other DNA
cataacccagaggtcgatg

SEQ ID NO: 9608 - DNA, 20 bp, synthetic construct
  misc_feature 1..20: note = Probe
  source 1..20: mol_type = other DNA
cataacccagaggtcgatgg

SEQ ID NO: 9609 - DNA, 21 bp, synthetic construct
  misc_feature 1..21: note = Probe
  source 1..21: mol_type = other DNA
cataacccagaggtcgatgga

SEQ ID NO: 9610 - DNA, 22 bp, synthetic construct
  misc_feature 1..22: note = Probe
  source 1..22: mol_type = other DNA
cataacccagaggtcgatggat

SEQ ID NO: 9611 - DNA, 23 bp, synthetic construct
  misc_feature 1..23: note = Probe
  source 1..23: mol_type = other DNA
cataacccagaggtcgatggatc

SEQ ID NO: 9612 - DNA, 24 bp, synthetic construct
  misc_feature 1..24: note = Probe
  source 1..24: mol_type = other DNA
cataacccagaggtcgatggatcg

SEQ ID NO: 9613 - DNA, 21 bp, synthetic construct
  misc_feature 1..21: note = Probe
  source 1..21: mol_type = other DNA
cataatctgaaggtcctgagt

SEQ ID NO: 9614 - DNA, 21 bp, synthetic construct
  misc_feature 1..21: note = Probe
  source 1..21: mol_type = other DNA
cataatctgaaggtcgtgagt

SEQ ID NO: 9615 - DNA, 23 bp, synthetic construct
  misc_feature 1..23: note = Probe
  source 1..23: mol_type = other DNA
catatcattggtcgtggttgtag

SEQ ID NO: 9616 - DNA, 25 bp, synthetic construct
  misc_feature 1..25: note = Probe
  source 1..25: mol_type = other DNA
catatcattggtcgtggttgtagtc

SEQ ID NO: 9617 - DNA, 26 bp, synthetic construct
  misc_feature 1..26: note = Probe
  source 1..26: mol_type = other DNA
catatcattggtcgtggttgtagtcc

SEQ ID NO: 9618 - DNA, 29 bp, synthetic construct
  misc_feature 1..29: note = Probe
  source 1..29: mol_type = other DNA
catatcattggtcgtggttgtagtccgtg

SEQ ID NO: 9619 - DNA, 30 bp, synthetic construct
  misc_feature 1..30: note = Probe
  source 1..30: mol_type = other DNA
catatcattggtcgtggttgtagtccgtgc

SEQ ID NO: 9620 - DNA, 21 bp, synthetic construct
  misc_feature 1..21: note = Probe
  source 1..21: mol_type = other DNA
catcagattgtgaatctgaca

SEQ ID NO: 9621 - DNA, 24 bp, synthetic construct
  misc_feature 1..24: note = Probe
  source 1..24: mol_type = other DNA
catcagattgtgaatctgacaaca

SEQ ID NO: 9622 - DNA, 20 bp, synthetic construct
  misc_feature 1..20: note = Probe
  source 1..20: mol_type = other DNA
catcctcgtcggccctgttt

SEQ ID NO: 9623 - DNA, 21 bp, synthetic construct
  misc_feature 1..21: note = Probe
  source 1..21: mol_type = other DNA
catcctcgtcggccctgtttt

SEQ ID NO: 9624 - DNA, 26 bp, synthetic construct
  misc_feature 1..26: note = Probe
  source 1..26: mol_type = other DNA
catgcccccatgtctaacaacatggc

SEQ ID NO: 9625 - DNA, 27 bp, synthetic construct
  misc_feature 1..27: note = Probe
  source 1..27: mol_type = other DNA
catgcccccatgtctaacaacatggct

SEQ ID NO: 9626 - DNA, 30 bp, synthetic construct; identical to SEQ ID NO: 4433
  misc_feature 1..30: note = Probe
  source 1..30: mol_type = other DNA

SEQ ID NO: 9627 - DNA, 26 bp, synthetic construct
  misc_feature 1..26: note = Probe
  source 1..26: mol_type = other DNA
catgggtggttcagtggtagaattct

SEQ ID NO: 9628 - DNA, 28 bp, synthetic construct
  misc_feature 1..28: note = Probe
  source 1..28: mol_type = other DNA
catgggtggttcagtggtagaattctcg

SEQ ID NO: 9629 - DNA, 29 bp, synthetic construct
  misc_feature 1..29: note = Probe
  source 1..29: mol_type = other DNA
catgggtggttcagtggtagaattctcgc

SEQ ID NO: 9630 - DNA, 30 bp, synthetic construct
  misc_feature 1..30: note = Probe
  source 1..30: mol_type = other DNA
catgggtggttcagtggtagaattctcgcc

SEQ ID NO: 9631 - DNA, 25 bp, synthetic construct
  misc_feature 1..25: note = Probe
  source 1..25: mol_type = other DNA
catggtctagcggttaggattcctg

SEQ ID NO: 9632 - DNA, 26 bp, synthetic construct
  misc_feature 1..26: note = Probe
  source 1..26: mol_type = other DNA
catggtctagcggttaggattcctgg

SEQ ID NO: 9633 - DNA, 24 bp, synthetic construct
  misc_feature 1..24: note = Probe
  source 1..24: mol_type = other DNA
catggtgtaatggttagcactctg

SEQ ID NO: 9634 - DNA, 25 bp, synthetic construct
  misc_feature 1..25: note = Probe
  source 1..25: mol_type = other DNA
catggtgtaatggttagcactctgg

SEQ ID NO: 9635 - DNA, 29 bp, synthetic construct
  misc_feature 1..29: note = Probe
  source 1..29: mol_type = other DNA
catggtgtaatggttagcactctggactc

SEQ ID NO: 9636 - DNA, 30 bp, synthetic construct
  misc_feature 1..30: note = Probe
  source 1..30: mol_type = other DNA
cattcttgcgacccgggttcgattcccggg

SEQ ID NO: 9637 - DNA, 16 bp, synthetic construct
  misc_feature 1..16: note = Probe
  source 1..16: mol_type = other DNA
cattggtcgtggttgt

SEQ ID NO: 9638 - DNA, 17 bp, synthetic construct
  misc_feature 1..17: note = Probe
  source 1..17: mol_type = other DNA
cattggtcgtggttgta

SEQ ID NO: 9639 - DNA, 18 bp, synthetic construct
  misc_feature 1..18: note = Probe
  source 1..18: mol_type = other DNA
cattggtcgtggttgtag

SEQ ID NO: 9640 - DNA, 23 bp, synthetic construct
  misc_feature 1..23: note = Probe
  source 1..23: mol_type = other DNA
cattggtcgtggttgtagtccgt

SEQ ID NO: 9641 - DNA, 25 bp, synthetic construct
  misc_feature 1..25: note = Probe
  source 1..25: mol_type = other DNA
cattggtcgtggttgtagtccgtgc

SEQ ID NO: 9642 - DNA, 26 bp, synthetic construct
  misc_feature 1..26: note = Probe
  source 1..26: mol_type = other DNA
cattggtcgtggttgtagtccgtgcg

SEQ ID NO: 9643 - DNA, 27 bp, synthetic construct
  misc_feature 1..27: note = Probe
  source 1..27: mol_type = other DNA
cattggtcgtggttgtagtccgtgcga

SEQ ID NO: 9644 - DNA, 28 bp, synthetic construct
  misc_feature 1..28: note = Probe
  source 1..28: mol_type = other DNA
cattggtcgtggttgtagtccgtgcgag

SEQ ID NO: 9645 - DNA, 21 bp, synthetic construct
  misc_feature 1..21: note = Probe
  source 1..21: mol_type = other DNA
cattggtggttcagtggtaga

SEQ ID NO: 9646 - DNA, 26 bp, synthetic construct
  misc_feature 1..26: note = Probe
  source 1..26: mol_type = other DNA
cattggtggttcagtggtagaattct

SEQ ID NO: 9647 - DNA, 27 bp, synthetic construct
  misc_feature 1..27: note = Probe
  source 1..27: mol_type = other DNA
cattggtggttcagtggtagaattctc

SEQ ID NO: 9648 - DNA, 28 bp, synthetic construct
  misc_feature 1..28: note = Probe
  source 1..28: mol_type = other DNA
cattggtggttcagtggtagaattctcg

SEQ ID NO: 9649 - DNA, 29 bp, synthetic construct
  misc_feature 1..29: note = Probe
  source 1..29: mol_type = other DNA
cattggtggttcagtggtagaattctcgc

SEQ ID NO: 9650 - DNA, 30 bp, synthetic construct; identical to SEQ ID NO: 4462
  misc_feature 1..30: note = Probe
  source 1..30: mol_type = other DNA

SEQ ID NO: 9651 - DNA, 21 bp, synthetic construct
  misc_feature 1..21: note = Probe
  source 1..21: mol_type = other DNA
ccaacacctctttacagtgaa

SEQ ID NO: 9652 - DNA, 28 bp, synthetic construct
  misc_feature 1..28: note = Probe
  source 1..28: mol_type = other DNA
ccacatggtctagcggttaggattcctg

SEQ ID NO: 9653 - DNA, 29 bp, synthetic construct
  misc_feature 1..29: note = Probe
  source 1..29: mol_type = other DNA
ccacatggtctagcggttaggattcctgg

SEQ ID NO: 9654 - DNA, 30 bp, synthetic construct
  misc_feature 1..30: note = Probe
  source 1..30: mol_type = other DNA
ccacatggtctagcggttaggattcctggt

SEQ ID NO: 9655 - DNA, 21 bp, synthetic construct
  misc_feature 1..21: note = Probe
  source 1..21: mol_type = other DNA
ccagaggtcgatggatcgaaa

SEQ ID NO: 9656 - DNA, 22 bp, synthetic construct
  misc_feature 1..22: note = Probe
  source 1..22: mol_type = other DNA
ccagaggtcgatggatcgaaac

SEQ ID NO: 9657 - DNA, 29 bp, synthetic construct
  misc_feature 1..29: note = Probe
  source 1..29: mol_type = other DNA
ccagcgatccgagttcaaatctcggtgga

SEQ ID NO: 9658 - DNA, 24 bp, synthetic construct
  misc_feature 1..24: note = Probe
  source 1..24: mol_type = other DNA
ccaggatggccgagtggttaaggc

SEQ ID NO: 9659 - DNA, 30 bp, synthetic construct
  misc_feature 1..30: note = Probe
  source 1..30: mol_type = other DNA
ccaggcggcccgggttcgactcccggtgtg

SEQ ID NO: 9660 - DNA, 24 bp, synthetic construct
  misc_feature 1..24: note = Probe
  source 1..24: mol_type = other DNA
ccagggattgtgggttcgagtccc

SEQ ID NO: 9661 - DNA, 30 bp, synthetic construct
  misc_feature 1..30: note = Probe
  source 1..30: mol_type = other DNA
ccagggattgtgggttcgagtcccatctgg

SEQ ID NO: 9662 - DNA, 30 bp, synthetic construct
  misc_feature 1..30: note = Probe
  source 1..30: mol_type = other DNA
ccaggggtcgcgagttcaaatctcgctggg

SEQ ID NO: 9663 - DNA, 20 bp, synthetic construct
  misc_feature 1..20: note = Probe
  source 1..20: mol_type = other DNA
ccaggttcgactcctggctg

SEQ ID NO: 9664 - DNA, 21 bp, synthetic construct
  misc_feature 1..21: note = Probe
  source 1..21: mol_type = other DNA
ccaggttcgactcctggctgg

SEQ ID NO: 9665 - DNA, 24 bp, synthetic construct
  misc_feature 1..24: note = Probe
  source 1..24: mol_type = other DNA
ccaggttcgactcctggctggctc

SEQ ID NO: 9666 - DNA, 25 bp, synthetic construct
  misc_feature 1..25: note = Probe
  source 1..25: mol_type = other DNA
ccaggttcgactcctggctggctcg

SEQ ID NO: 9667 - DNA, 21 bp, synthetic construct
  misc_feature 1..21: note = Probe
  source 1..21: mol_type = other DNA
ccataacccagaggtcgatgg

SEQ ID NO: 9668 - DNA, 22 bp, synthetic construct
  misc_feature 1..22: note = Probe
  source 1..22: mol_type = other DNA
ccataacccagaggtcgatgga

SEQ ID NO: 9669 - DNA, 28 bp, synthetic construct
  misc_feature 1..28: note = Probe
  source 1..28: mol_type = other DNA
ccatatggtctagcggttaggattcctg

SEQ ID NO: 9670 - DNA, 21 bp, synthetic construct
  misc_feature 1..21: note = Probe
  source 1..21: mol_type = other DNA
ccatcctcgtcggccctgttt

SEQ ID NO: 9671 - DNA, 22 bp, synthetic construct
  misc_feature 1..22: note = Probe
  source 1..22: mol_type = other DNA
ccatcctcgtcggccctgtttt

SEQ ID NO: 9672 - DNA, 25 bp, synthetic construct
  misc_feature 1..25: note = Probe
  source 1..25: mol_type = other DNA
ccatggtgtaatggttagcactctg

SEQ ID NO: 9673 - DNA, 26 bp, synthetic construct
  misc_feature 1..26: note = Probe
  source 1..26: mol_type = other DNA
ccatggtgtaatggttagcactctgg

SEQ ID NO: 9674 - DNA, 27 bp, synthetic construct
  misc_feature 1..27: note = Probe
  source 1..27: mol_type = other DNA
ccatggtgtaatggttagcactctgga

SEQ ID NO: 9675 - DNA, 30 bp, synthetic construct
  misc_feature 1..30: note = Probe
  source 1..30: mol_type = other DNA
ccatggtgtaatggttagcactctggactc

SEQ ID NO: 9676 - DNA, 20 bp, synthetic construct
  misc_feature 1..20: note = Probe
  source 1..20: mol_type = other DNA
cccaagaacagggtttgtta

SEQ ID NO: 9677 - DNA, 25 bp, synthetic construct
  misc_feature 1..25: note = Probe
  source 1..25: mol_type = other DNA
cccacatggtctagcggttaggatt

SEQ ID NO: 9678 - DNA, 29 bp, synthetic construct
  misc_feature 1..29: note = Probe
  source 1..29: mol_type = other DNA
cccacatggtctagcggttaggattcctg

SEQ ID NO: 9679 - DNA, 30 bp, synthetic construct
  misc_feature 1..30: note = Probe
  source 1..30: mol_type = other DNA
cccacatggtctagcggttaggattcctgg

SEQ ID NO: 9680 - DNA, 19 bp, synthetic construct
  misc_feature 1..19: note = Probe
  source 1..19: mol_type = other DNA
cccataacccagaggtcga

SEQ ID NO: 9681 - DNA, 22 bp, synthetic construct
  misc_feature 1..22: note = Probe
  source 1..22: mol_type = other DNA
cccataacccagaggtcgatgg

SEQ ID NO: 9682 - DNA, 30 bp, synthetic construct
  misc_feature 1..30: note = Probe
  source 1..30: mol_type = other DNA
cccatatggtctagcggttaggattcctgg

SEQ ID NO: 9683 - DNA, 27 bp, synthetic construct
  misc_feature 1..27: note = Probe
  source 1..27: mol_type = other DNA
cccatggtgtaatggttagcactctgg

SEQ ID NO: 9684 - DNA, 29 bp, synthetic construct
  misc_feature 1..29: note = Probe
  source 1..29: mol_type = other DNA
cccatggtgtaatggttagcactctggac

SEQ ID NO: 9685 - DNA, 30 bp, synthetic construct
  misc_feature 1..30: note = Probe
  source 1..30: mol_type = other DNA
cccatggtgtaatggttagcactctggact

SEQ ID NO: 9686 - DNA, 16 bp, synthetic construct
  misc_feature 1..16: note = Probe
  source 1..16: mol_type = other DNA
ccccggcacctccacc

SEQ ID NO: 9687 - DNA, 29 bp, synthetic construct
  misc_feature 1..29: note = Probe
  source 1..29: mol_type = other DNA
ccccgggttcaatccccggcacctccagc

SEQ ID NO: 9688 - DNA, 29 bp, synthetic construct
  misc_feature 1..29: note = Probe
  source 1..29: mol_type = other DNA
cccctggcggtctagtggttaggattcgg

SEQ ID NO: 9689 - DNA, 30 bp, synthetic construct
  misc_feature 1..30: note = Probe
  source 1..30: mol_type = other DNA
cccctggcggtctagtggttaggattcggc

SEQ ID NO: 9690 - DNA, 22 bp, synthetic construct
  misc_feature 1..22: note = Probe
  source 1..22: mol_type = other DNA
cccggatagctcagtcggtaga

SEQ ID NO: 9691 - DNA, 15 bp, synthetic construct
  misc_feature 1..15: note = Probe
  source 1..15: mol_type = other DNA
cccggcacctccacc

SEQ ID NO: 9692 - DNA, 16 bp, synthetic construct
  misc_feature 1..16: note = Probe
  source 1..16: mol_type = other DNA
cccggcacctccacca

SEQ ID NO: 9693 - DNA, 29 bp, synthetic construct
  misc_feature 1..29: note = Probe
  source 1..29: mol_type = other DNA
cccgggttcaatccccggcacctccacca

SEQ ID NO: 9694 - DNA, 16 bp, synthetic construct
  misc_feature 1..16: note = Probe
  source 1..16: mol_type = other DNA
cccggtcagggaacca

SEQ ID NO: 9695 - DNA, 27 bp, synthetic construct
  misc_feature 1..27: note = Probe
  source 1..27: mol_type = other DNA
ccctggtggtctagtggttaggattcg

SEQ ID NO: 9696 - DNA, 28 bp, synthetic construct
  misc_feature 1..28: note = Probe
  source 1..28: mol_type = other DNA
ccctggtggtctagtggttaggattcgg

SEQ ID NO: 9697 - DNA, 24 bp, synthetic construct
  misc_feature 1..24: note = Probe
  source 1..24: mol_type = other DNA
ccctggttcgatcccgggtttcgg

SEQ ID NO: 9698 - DNA, 25 bp, synthetic construct
  misc_feature 1..25: note = Probe
  source 1..25: mol_type = other DNA
ccctggttcgatcccgggtttcggc

SEQ ID NO: 9699 - DNA, 26 bp, synthetic construct
  misc_feature 1..26: note = Probe
  source 1..26: mol_type = other DNA
ccctggttcgatcccgggtttcggca

SEQ ID NO: 9700 - DNA, 27 bp, synthetic construct
  misc_feature 1..27: note = Probe
  source 1..27: mol_type = other DNA
ccctggttcgatcccgggtttcggcac

SEQ ID NO: 9701 - DNA, 28 bp, synthetic construct
  misc_feature 1..28: note = Probe
  source 1..28: mol_type = other DNA
ccctggttcgatcccgggtttcggcact

SEQ ID NO: 9702 - DNA, 28 bp, synthetic construct
  misc_feature 1..28: note = Probe
  source 1..28: mol_type = other DNA
ccctggttcgatcccgggtttcggcagc

SEQ ID NO: 9703 - DNA, 30 bp, synthetic construct
  misc_feature 1..30: note = Probe
  source 1..30: mol_type = other DNA
ccgaaaggttggtggttcgagcccacccag

SEQ ID NO: 9704 - DNA, 30 bp, synthetic construct
  misc_feature 1..30: note = Probe
  source 1..30: mol_type = other DNA
ccgagaggtcccgggttcaaatcccggacg

SEQ ID NO: 9705 - DNA, 29 bp, synthetic construct
  misc_feature 1..29: note = Probe
  source 1..29: mol_type = other DNA
ccgccgcggcccgggttcgattcccggtc

SEQ ID NO: 9706 - DNA, 23 bp, synthetic construct
  misc_feature 1..23: note = Probe
  source 1..23: mol_type = other DNA
ccgcctgtcacgcgggagaccgg

SEQ ID NO: 9707 - DNA, 22 bp, synthetic construct
  misc_feature 1..22: note = Probe
  source 1..22: mol_type = other DNA
ccgcgcaggttcgaatcctgcc

SEQ ID NO: 9708 - DNA, 17 bp, synthetic construct
  misc_feature 1..17: note = Probe
  source 1..17: mol_type = other DNA
ccgcgtggcctaatgga

SEQ ID NO: 9709 - DNA, 19 bp, synthetic construct
  misc_feature 1..19: note = Probe
  source 1..19: mol_type = other DNA
ccggagctggggattgtgg

SEQ ID NO: 9710 - DNA, 21 bp, synthetic construct
  misc_feature 1..21: note = Probe
  source 1..21: mol_type = other DNA
ccggagctggggattgtgggt

SEQ ID NO: 9711 - DNA, 21 bp, synthetic construct
  misc_feature 1..21: note = Probe
  source 1..21: mol_type = other DNA
ccggatagctcagtcggtaga

SEQ ID NO: 9712 - DNA, 15 bp, synthetic construct
  misc_feature 1..15: note = Probe
  source 1..15: mol_type = other DNA
ccggcacctccacca

SEQ ID NO: 9713 - DNA, 29 bp, synthetic construct
  misc_feature 1..29: note = Probe
  source 1..29: mol_type = other DNA
ccggctcgaaggacttcgtctgtaatttt

SEQ ID NO: 9714 - DNA, 16 bp, synthetic construct
  misc_feature 1..16: note = Probe
  source 1..16: mol_type = other DNA
ccgggcggaaacacct

SEQ ID NO: 9715 - DNA, 29 bp, synthetic construct
  misc_feature 1..29: note = Probe
  source 1..29: mol_type = other DNA
ccggggttcgattccccgacggggaggca

SEQ ID NO: 9716 - DNA, 28 bp, synthetic construct
  misc_feature 1..28: note = Probe
  source 1..28: mol_type = other DNA
ccgggttcaattcccggtcagggaacca

SEQ ID NO: 9717 - DNA, 19 bp, synthetic construct
  misc_feature 1..19: note = Probe
  source 1..19: mol_type = other DNA
ccgggttcgattcccggtc

SEQ ID NO: 9718 - DNA, 21 bp, synthetic construct
  misc_feature 1..21: note = Probe
  source 1..21: mol_type = other DNA
ccgggttcgattcccggtcag

SEQ ID NO: 9719 - DNA, 22 bp, synthetic construct
  misc_feature 1..22: note = Probe
  source 1..22: mol_type = other DNA
ccgggttcgattcccggtcagg

SEQ ID NO: 9720 - DNA, 23 bp, synthetic construct
  misc_feature 1..23: note = Probe
  source 1..23: mol_type = other DNA
ccgggttcgattcccggtcaggg

SEQ ID NO: 9721 - DNA, 24 bp, synthetic construct
  misc_feature 1..24: note = Probe
  source 1..24: mol_type = other DNA
ccgggttcgattcccggtcaggga

SEQ ID NO: 9722 - DNA, 25 bp, synthetic construct
  misc_feature 1..25: note = Probe
  source 1..25: mol_type = other DNA
ccgggttcgattcccggtcagggaa

SEQ ID NO: 9723 - DNA, 28 bp, synthetic construct
  misc_feature 1..28: note = Probe
  source 1..28: mol_type = other DNA
ccgggttcgattcccggtcatggaacca

SEQ ID NO: 9724 - DNA, 17 bp, synthetic construct
  misc_feature 1..17: note = Probe
  source 1..17: mol_type = other DNA
ccgtgatcgtatagtgg

SEQ ID NO: 9725 - DNA, 20 bp, synthetic construct
  misc_feature 1..20: note = Probe
  source 1..20: mol_type = other DNA
ccgtgatcgtatagtggtta

SEQ ID NO: 9726 - DNA, 21 bp, synthetic construct
  misc_feature 1..21: note = Probe
  source 1..21: mol_type = other DNA
ccgtgatcgtatagtggttag

SEQ ID NO: 9727 - DNA, 22 bp, synthetic construct
  misc_feature 1..22: note = Probe
  source 1..22: mol_type = other DNA
ccgtgatcgtatagtggttagt

SEQ ID NO: 9728 - DNA, 23 bp, synthetic construct
  misc_feature 1..23: note = Probe
  source 1..23: mol_type = other DNA
ccgtgatcgtatagtggttagta

SEQ ID NO: 9729 - DNA, 26 bp, synthetic construct
  misc_feature 1..26: note = Probe
  source 1..26: mol_type = other DNA
ccgtgatcgtatagtggttagtactc

SEQ ID NO: 9730 - DNA, 27 bp, synthetic construct
  misc_feature 1..27: note = Probe
  source 1..27: mol_type = other DNA
ccgtgatcgtatagtggttagtactct

SEQ ID NO: 9731 - DNA, 28 bp, synthetic construct
  misc_feature 1..28: note = Probe
  source 1..28: mol_type = other DNA
ccgtgatcgtatagtggttagtactctg

SEQ ID NO: 9732 - DNA, 19 bp, synthetic construct
  misc_feature 1..19: note = Probe
  source 1..19: mol_type = other DNA
cctaagccagggattgtgg

SEQ ID NO: 9733 - DNA, 21 bp, synthetic construct
  misc_feature 1..21: note = Probe
  source 1..21: mol_type = other DNA
cctaagccagggattgtgggt

SEQ ID NO: 9734 - DNA, 22 bp, synthetic construct
  misc_feature 1..22: note = Probe
  source 1..22: mol_type = other DNA
cctcctaagccagggattgtgg

SEQ ID NO: 9735 - DNA, 21 bp, synthetic construct
  misc_feature 1..21: note = Probe
  source 1..21: mol_type = other DNA
cctgccacgcgggaggcccgg

SEQ ID NO: 9736 - DNA, 23 bp, synthetic construct
  misc_feature 1..23: note = Probe
  source 1..23: mol_type = other DNA
cctgccacgcgggaggcccgggt

SEQ ID NO: 9737 - DNA, 29 bp, synthetic construct
  misc_feature 1..29: note = Probe
  source 1..29: mol_type = other DNA
cctgggttcgaatcccagcggtgcctcaa

SEQ ID NO: 9738 - DNA, 29 bp, synthetic construct
  misc_feature 1..29: note = Probe
  source 1..29: mol_type = other DNA
cctgggttcgaatcccagcggtgcctccg

SEQ ID NO: 9739 - DNA, 26 bp, synthetic construct
  misc_feature 1..26: note = Probe
  source 1..26: mol_type = other DNA
cctggtggtctagtggttaggattcg

SEQ ID NO: 9740 - DNA, 27 bp, synthetic construct
  misc_feature 1..27: note = Probe
  source 1..27: mol_type = other DNA
cctggtggtctagtggttaggattcgg

SEQ ID NO: 9741 - DNA, 30 bp, synthetic construct; identical to SEQ ID NO: 699
  misc_feature 1..30: note = Probe
  source 1..30: mol_type = other DNA

SEQ ID NO: 9742 - DNA, 23 bp, synthetic construct
  misc_feature 1..23: note = Probe
  source 1..23: mol_type = other DNA
cctggttcaatcccgggtttcgg

SEQ ID NO: 9743 - DNA, 23 bp, synthetic construct
  misc_feature 1..23: note = Probe
  source 1..23: mol_type = other DNA
cctggttcgatcccgggtttcgg

SEQ ID NO: 9744 - DNA, 26 bp, synthetic construct
  misc_feature 1..26: note = Probe
  source 1..26: mol_type = other DNA
cctggttcgatcccgggtttcggcac

SEQ ID NO: 9745 - DNA, 16 bp, synthetic construct
  misc_feature 1..16: note = Probe
  source 1..16: mol_type = other DNA
cctgtcacgcgggaga

SEQ ID NO: 9746 - DNA, 23 bp, synthetic construct
  misc_feature 1..23: note = Probe
  source 1..23: mol_type = other DNA
cctgtcacgcgggagaccggggt

SEQ ID NO: 9747 - DNA, 20 bp, synthetic construct
  misc_feature 1..20: note = Probe
  source 1..20: mol_type = other DNA
ccttccaagcagttgacccg

SEQ ID NO: 9748 - DNA, 21 bp, synthetic construct
  misc_feature 1..21: note = Probe
  source 1..21: mol_type = other DNA
ccttccaagcagttgacccgg

SEQ ID NO: 9749 - DNA, 24 bp, synthetic construct
  misc_feature 1..24: note = Probe
  source 1..24: mol_type = other DNA
ccttccaagcagttgacccgggtt

SEQ ID NO: 9750 - DNA, 15 bp, synthetic construct
  misc_feature 1..15: note = Probe
  source 1..15: mol_type = other DNA
ccttcgatagctcag

SEQ ID NO: 9751 - DNA, 17 bp, synthetic construct
  misc_feature 1..17: note = Probe
  source 1..17: mol_type = other DNA
ccttcgatagctcagct

SEQ ID NO: 9752 - DNA, 18 bp, synthetic construct
  misc_feature 1..18: note = Probe
  source 1..18: mol_type = other DNA
ccttcgatagctcagctg

SEQ ID NO: 9753 - DNA, 19 bp, synthetic construct
  misc_feature 1..19: note = Probe
  source 1..19: mol_type = other DNA
ccttcgatagctcagctgg

SEQ ID NO: 9754 - DNA, 20 bp, synthetic construct
  misc_feature 1..20: note = Probe
  source 1..20: mol_type = other DNA
ccttcgatagctcagctggt

SEQ ID NO: 9755 - DNA, 22 bp, synthetic construct
  misc_feature 1..22: note = Probe
  source 1..22: mol_type = other DNA
ccttcgatagctcagctggtag

SEQ ID NO: 9756 - DNA, 23 bp, synthetic construct
  misc_feature 1..23: note = Probe
  source 1..23: mol_type = other DNA
ccttcgatagctcagctggtaga

SEQ ID NO: 9757 - DNA, 24 bp, synthetic construct
  misc_feature 1..24: note = Probe
  source 1..24: mol_type = other DNA
ccttcgatagctcagctggtagag

SEQ ID NO: 9758 - DNA, 25 bp, synthetic construct
  misc_feature 1..25: note = Probe
  source 1..25: mol_type = other DNA
ccttcgatagctcagctggtagagc

SEQ ID NO: 9759 - DNA, 17 bp, synthetic construct
  misc_feature 1..17: note = Probe
  source 1..17: mol_type = other DNA
ccttcgatagctcagtt

SEQ ID NO: 9760 - DNA, 19 bp, synthetic construct
  misc_feature 1..19: note = Probe
  source 1..19: mol_type = other DNA
ccttcgatagctcagttgg

SEQ ID NO: 9761 - DNA, 20 bp, synthetic construct
  misc_feature 1..20: note = Probe
  source 1..20: mol_type = other DNA
ccttcgatagctcagttggt

SEQ ID NO: 9762 - DNA, 23 bp, synthetic construct
  misc_feature 1..23: note = Probe
  source 1..23: mol_type = other DNA
ccttcgatagctcagttggtaga

SEQ ID NO: 9763 - DNA, 24 bp, synthetic construct
  misc_feature 1..24: note = Probe
  source 1..24: mol_type = other DNA
ccttcgatagctcagttggtagag

SEQ ID NO: 9764 - DNA, 25 bp, synthetic construct
  misc_feature 1..25: note = Probe
  source 1..25: mol_type = other DNA
ccttcgatagctcagttggtagagc

SEQ ID NO: 9765 - DNA, 30 bp, synthetic construct
  misc_feature 1..30: note = Probe
  source 1..30: mol_type = other DNA
ccttcgatagctcagttggtagagcggagg

SEQ ID NO: 9766 - DNA, 29 bp, synthetic construct
  misc_feature 1..29: note = Probe
  source 1..29: mol_type = other DNA
cgaaaggtccccggttcgaaaccgggcgg

SEQ ID NO: 9767 - DNA, 30 bp, synthetic construct
  misc_feature 1..30: note = Probe
  source 1..30: mol_type = other DNA
cgaaaggttggtggttcgagcccacccagg

SEQ ID NO: 9768 - DNA, 24 bp, synthetic construct
  misc_feature 1..24: note = Probe
  source 1..24: mol_type = other DNA
cgaatcacgtcggggtcaaacttt

SEQ ID NO: 9769 - DNA, 21 bp, synthetic construct
  misc_feature 1..21: note = Probe
  source 1..21: mol_type = other DNA
cgaatcccacttctgacacaa

SEQ ID NO: 9770 - DNA, 22 bp, synthetic construct
  misc_feature 1..22: note = Probe
  source 1..22: mol_type = other DNA
cgaatcccagcggggcctgttg

SEQ ID NO: 9771 - DNA, 19 bp, synthetic construct
  misc_feature 1..19: note = Probe
  source 1..19: mol_type = other DNA
cgaatccggctcgaaggac

SEQ ID NO: 9772 - DNA, 21 bp, synthetic construct
  misc_feature 1..21: note = Probe
  source 1..21: mol_type = other DNA
cgaatccggctcgaaggacga

SEQ ID NO: 9773 - DNA, 29 bp, synthetic construct
  misc_feature 1..29: note = Probe
  source 1..29: mol_type = other DNA
cgagaggtcccgggttcaaatcccggacg

SEQ ID NO: 9774 - DNA, 19 bp, synthetic construct
  misc_feature 1..19: note = Probe
  source 1..19: mol_type = other DNA
cgagccccacgttgggcgc

SEQ ID NO: 9775 - DNA, 28 bp, synthetic construct
  misc_feature 1..28: note = Probe
  source 1..28: mol_type = other DNA
cgaggtggccgagtggttaaggcgatgg

SEQ ID NO: 9776 - DNA, 19 bp, synthetic construct
  misc_feature 1..19: note = Probe
  source 1..19: mol_type = other DNA
cgattccccgacggggaga

SEQ ID NO: 9777 - DNA, 19 bp, synthetic construct
  misc_feature 1..19: note = Probe
  source 1..19: mol_type = other DNA
cgattccccgacggggagg

SEQ ID NO: 9778 - DNA, 21 bp, synthetic construct
  misc_feature 1..21: note = Probe
  source 1..21: mol_type = other DNA
cgattccccgacggggaggca

SEQ ID NO: 9779 - DNA, 21 bp, synthetic construct
  misc_feature 1..21: note = Probe
  source 1..21: mol_type = other DNA
cgattcccggtcagggaacaa

SEQ ID NO: 9780 - DNA, 21 bp, synthetic construct
  misc_feature 1..21: note = Probe
  source 1..21: mol_type = other DNA
cgattcccggtcatggaacca

SEQ ID NO: 9781 - DNA, 19 bp, synthetic construct
  misc_feature 1..19: note = Probe
  source 1..19: mol_type = other DNA
cgattccggctcgaaggac

SEQ ID NO: 9782 - DNA, 20 bp, synthetic construct
  misc_feature 1..20: note = Probe
  source 1..20: mol_type = other DNA
cgattccggctcgaaggact

SEQ ID NO: 9783 - DNA, 20 bp, synthetic construct
  misc_feature 1..20: note = Probe
  source 1..20: mol_type = other DNA
cgattccggctcgaaggagc

SEQ ID NO: 9784 - DNA, 21 bp, synthetic construct
  misc_feature 1..21: note = Probe
  source 1..21: mol_type = other DNA
cgattcctggtcagggaacca

SEQ ID NO: 9785 - DNA, 30 bp, synthetic construct
  misc_feature 1..30: note = Probe
  source 1..30: mol_type = other DNA
cgcagcaacctcggttcgaatccgagtcac

SEQ ID NO: 9786 - DNA, 23 bp, synthetic construct
  misc_feature 1..23: note = Probe
  source 1..23: mol_type = other DNA
cgccatgatcgtatagtggttag

SEQ ID NO: 9787 - DNA, 24 bp, synthetic construct
  misc_feature 1..24: note = Probe
  source 1..24: mol_type = other DNA
cgccatgatcgtatagtggttagt

SEQ ID NO: 9788 - DNA, 30 bp, synthetic construct
  misc_feature 1..30: note = Probe
  source 1..30: mol_type = other DNA
cgccgcggcccgggttcgattcccggtcag

SEQ ID NO: 9789 - DNA, 28 bp, synthetic construct
  misc_feature 1..28: note = Probe
  source 1..28: mol_type = other DNA
cgccgctggtgtagtggtatcatgcaag

SEQ ID NO: 9790 - DNA, 17 bp, synthetic construct
  misc_feature 1..17: note = Probe
  source 1..17: mol_type = other DNA
cgccgtgatcgtatagt

SEQ ID NO: 9791 - DNA, 19 bp, synthetic construct
  misc_feature 1..19: note = Probe
  source 1..19: mol_type = other DNA
cgccgtgatcgtatagtgg

SEQ ID NO: 9792 - DNA, 20 bp, synthetic construct
  misc_feature 1..20: note = Probe
  source 1..20: mol_type = other DNA
cgccgtgatcgtatagtggt

SEQ ID NO: 9793 - DNA, 21 bp, synthetic construct
  misc_feature 1..21: note = Probe
  source 1..21: mol_type = other DNA
cgccgtgatcgtatagtggtt

SEQ ID NO: 9794 - DNA, 22 bp, synthetic construct
  misc_feature 1..22: note = Probe
  source 1..22: mol_type = other DNA
cgccgtgatcgtatagtggtta

SEQ ID NO: 9795 - DNA, 23 bp, synthetic construct
  misc_feature 1..23: note = Probe
  source 1..23: mol_type = other DNA
cgccgtgatcgtatagtggttag

SEQ ID NO: 9796 - DNA, 24 bp, synthetic construct
  misc_feature 1..24: note = Probe
  source 1..24: mol_type = other DNA
cgccgtgatcgtatagtggttagt

SEQ ID NO: 9797 - DNA, 25 bp, synthetic construct
  misc_feature 1..25: note = Probe
  source 1..25: mol_type = other DNA
cgccgtgatcgtatagtggttagta

SEQ ID NO: 9798 - DNA, 30 bp, synthetic construct
  misc_feature 1..30: note = Probe
  source 1..30: mol_type = other DNA
cgccgtgatcgtatagtggttagtactctg

SEQ ID NO: 9799 - DNA, 22 bp, synthetic construct
  misc_feature 1..22: note = Probe
  source 1..22: mol_type = other DNA
cgcctgtcacgcgggagaccgg

SEQ ID NO: 9800 - DNA, 18 bp, synthetic construct
  misc_feature 1..18: note = Probe
  source 1..18: mol_type = other DNA
cggagctggggattgtgg

SEQ ID NO: 9801 - DNA, 19 bp, synthetic construct
  misc_feature 1..19: note = Probe
  source 1..19: mol_type = other DNA
cggagctggggattgtggg

SEQ ID NO: 9802 - DNA, 20 bp, synthetic construct
  misc_feature 1..20: note = Probe
  source 1..20: mol_type = other DNA
cggatagctcagtcggtaga

SEQ ID NO: 9803 - DNA, 28 bp, synthetic construct
  misc_feature 1..28: note = Probe
  source 1..28: mol_type = other DNA
cggctcgaaggacttcgtctgtaatttt

SEQ ID NO: 9804 - DNA, 18 bp, synthetic construct
  misc_feature 1..18: note = Probe
  source 1..18: mol_type = other DNA
cggctgtaggaatacttt

SEQ ID NO: 9805 - DNA, 19 bp, synthetic construct
  misc_feature 1..19: note = Probe
  source 1..19: mol_type = other DNA
cggctgtaggaatactttt

SEQ ID NO: 9806 - DNA, 30 bp, synthetic construct; identical to SEQ ID NO: 786
  misc_feature 1..30: note = Probe
  source 1..30: mol_type = other DNA

SEQ ID NO: 9807 - DNA, 28 bp, synthetic construct
  misc_feature 1..28: note = Probe
  source 1..28: mol_type = other DNA
cgggaggcccgggttcgattcccggcca

SEQ ID NO: 9808 - DNA, 16 bp, synthetic construct
  misc_feature 1..16: note = Probe
  source 1..16: mol_type = other DNA
cggggcacaataattt

SEQ ID NO: 9809 - DNA, 28 bp, synthetic construct
  misc_feature 1..28: note = Probe
  source 1..28: mol_type = other DNA
cggggttcgattccccgacggggaggca

SEQ ID NO: 9810 - DNA, 27 bp, synthetic construct
  misc_feature 1..27: note = Probe
  source 1..27: mol_type = other DNA
cgggttcaatccccggcacctccacca

SEQ ID NO: 9811 - DNA, 27 bp, synthetic construct
  misc_feature 1..27: note = Probe
  source 1..27: mol_type = other DNA
cgggttcaattcccggtcagggaacca

SEQ ID NO: 9812 - DNA, 27 bp, synthetic construct
  misc_feature 1..27: note = Probe
  source 1..27: mol_type = other DNA
cgggttcgattcccggtcatggaacca

SEQ ID NO: 9813 - DNA, 16 bp, synthetic construct
  misc_feature 1..16: note = Probe
  source 1..16: mol_type = other DNA
cggtagagcatcagac

SEQ ID NO: 9814 - DNA, 16 bp, synthetic construct
  misc_feature 1..16: note = Probe
  source 1..16: mol_type = other DNA
cggtagagcatgagac

SEQ ID NO: 9815 - DNA, 17 bp, synthetic construct
  misc_feature 1..17: note = Probe
  source 1..17: mol_type = other DNA
cggtctaaggcgctgcg

SEQ ID NO: 9816 - DNA, 20 bp, synthetic construct
  misc_feature 1..20: note = Probe
  source 1..20: mol_type = other DNA
cggtctaaggcgctgcgttc

SEQ ID NO: 9817 - DNA, 17 bp, synthetic construct
  misc_feature 1..17: note = Probe
  source 1..17: mol_type = other DNA
cggtctaaggcgctgga

SEQ ID NO: 9818 - DNA, 16 bp, synthetic construct
  misc_feature 1..16: note = Probe
  source 1..16: mol_type = other DNA
cggttaggattcctgg

SEQ ID NO: 9819 - DNA, 20 bp, synthetic construct
  misc_feature 1..20: note = Probe
  source 1..20: mol_type = other DNA
cggttaggattcctggtttt

SEQ ID NO: 9820 - DNA, 19 bp, synthetic construct
  misc_feature 1..19: note = Probe
  source 1..19: mol_type = other DNA
cgtagtcgtggccgagtgg

SEQ ID NO: 9821 - DNA, 27 bp, synthetic construct
  misc_feature 1..27: note = Probe
  source 1..27: mol_type = other DNA
cgtagtgtagtggttatcacgttcgcc

SEQ ID NO: 9822 - DNA, 15 bp, synthetic construct
  misc_feature 1..15: note = Probe
  source 1..15: mol_type = other DNA
cgtatagtggttagt

SEQ ID NO: 9823 - DNA, 16 bp, synthetic construct
  misc_feature 1..16: note = Probe
  source 1..16: mol_type = other DNA
cgtatagtggttagta

SEQ ID NO: 9824 - DNA, 17 bp, synthetic construct
  misc_feature 1..17: note = Probe
  source 1..17: mol_type = other DNA
cgtatagtggttagtac

SEQ ID NO: 9825 - DNA, 18 bp, synthetic construct
  misc_feature 1..18: note = Probe
  source 1..18: mol_type = other DNA
cgtatagtggttagtact

SEQ ID NO: 9826 - DNA, 19 bp, synthetic construct
  misc_feature 1..19: note = Probe
  source 1..19: mol_type = other DNA
cgtatagtggttagtactc

SEQ ID NO: 9827 - DNA, 20 bp, synthetic construct
  misc_feature 1..20: note = Probe
  source 1..20: mol_type = other DNA
cgtatagtggttagtactct

SEQ ID NO: 9828 - DNA, 21 bp, synthetic construct
  misc_feature 1..21: note = Probe
  source 1..21: mol_type = other DNA
cgtatagtggttagtactctg

SEQ ID NO: 9829 - DNA, 22 bp, synthetic construct
  misc_feature 1..22: note = Probe
  source 1..22: mol_type = other DNA
cgtatagtggttagtactctgc

SEQ ID NO: 9830 - DNA, 25 bp, synthetic construct
  misc_feature 1..25: note = Probe
  source 1..25: mol_type = other DNA
cgtatagtggttagtactctgcgct

SEQ ID NO: 9831 - DNA, 26 bp, synthetic construct
  misc_feature 1..26: note = Probe
  source 1..26: mol_type = other DNA
cgtatagtggttagtactctgcgctg

SEQ ID NO: 9832 - DNA, 27 bp, synthetic construct
  misc_feature 1..27: note = Probe
  source 1..27: mol_type = other DNA
cgtatagtggttagtactctgcgttgt

SEQ ID NO: 9833 - DNA, 28 bp, synthetic construct
  misc_feature 1..28: note = Probe
  source 1..28: mol_type = other DNA
cgtatagtggttagtactctgcgttgtg

SEQ ID NO: 9834 - DNA, 19 bp, synthetic construct
  misc_feature 1..19: note = Probe
  source 1..19: mol_type = other DNA
cgtgatcgtatagtggtta

SEQ ID NO: 9835 - DNA, 20 bp, synthetic construct
  misc_feature 1..20: note = Probe
  source 1..20: mol_type = other DNA
cgtgatcgtatagtggttag

SEQ ID NO: 9836 - DNA, 21 bp, synthetic construct
  misc_feature 1..21: note = Probe
  source 1..21: mol_type = other DNA
cgtgatcgtatagtggttagt

SEQ ID NO: 9837 - DNA, 22 bp, synthetic construct
  misc_feature 1..22: note = Probe
  source 1..22: mol_type = other DNA
cgtgatcgtatagtggttagta

SEQ ID NO: 9838 - DNA, 24 bp, synthetic construct
  misc_feature 1..24: note = Probe
  source 1..24: mol_type = other DNA
cgtgatcgtatagtggttagtact

SEQ ID NO: 9839 - DNA, 25 bp, synthetic construct
  misc_feature 1..25: note = Probe
  source 1..25: mol_type = other DNA
cgtgatcgtatagtggttagtactc

SEQ ID NO: 9840 - DNA, 26 bp, synthetic construct
  misc_feature 1..26: note = Probe
  source 1..26: mol_type = other DNA
cgtgatcgtatagtggttagtactct

SEQ ID NO: 9841 - DNA, 27 bp, synthetic construct
  misc_feature 1..27: note = Probe
  source 1..27: mol_type = other DNA
cgtgatcgtatagtggttagtactctg

SEQ ID NO: 9842 - DNA, 29 bp, synthetic construct
  misc_feature 1..29: note = Probe
  source 1..29: mol_type = other DNA
cgtgatcgtatagtggttagtactctgcg

SEQ ID NO: 9843 - DNA, 22 bp, synthetic construct
  misc_feature 1..22: note = Probe
  source 1..22: mol_type = other DNA
cgtgggttcgagccccacgttg

SEQ ID NO: 9844 - DNA, 26 bp, synthetic construct
  misc_feature 1..26: note = Probe
  source 1..26: mol_type = other DNA
cgtgggttcgagccccacgttgggcg

SEQ ID NO: 9845 - DNA, 27 bp, synthetic construct
  misc_feature 1..27: note = Probe
  source 1..27: mol_type = other DNA
cgtgggttcgagccccacgttgggcgc

SEQ ID NO: 9846 - DNA, 29 bp, synthetic construct
  misc_feature 1..29: note = Probe
  source 1..29: mol_type = other DNA
cgtgggttcgagccccacgttgggcggca

SEQ ID NO: 9847 - DNA, 25 bp, synthetic construct
  misc_feature 1..25: note = Probe
  source 1..25: mol_type = other DNA
cgtggttgtagtccgtgcgagaata

SEQ ID NO: 9848 - DNA, 18 bp, synthetic construct
  misc_feature 1..18: note = Probe
  source 1..18: mol_type = other DNA
cgttcaggtcgcagtctc

SEQ ID NO: 9849 - DNA, 19 bp, synthetic construct
  misc_feature 1..19: note = Probe
  source 1..19: mol_type = other DNA
cgttcaggtcgcagtctcc

SEQ ID NO: 9850 - DNA, 20 bp, synthetic construct
  misc_feature 1..20: note = Probe
  source 1..20: mol_type = other DNA
cgttcaggtcgcagtctccc

SEQ ID NO: 9851 - DNA, 23 bp, synthetic construct
  misc_feature 1..23: note = Probe
  source 1..23: mol_type = other DNA
cgttcgattcccggtcagggaac

SEQ ID NO: 9852 - DNA, 21 bp, synthetic construct
  misc_feature 1..21: note = Probe
  source 1..21: mol_type = other DNA
cgttggtctaggggtatgatt

SEQ ID NO: 9853 - DNA, 28 bp, synthetic construct
  misc_feature 1..28: note = Probe
  source 1..28: mol_type = other DNA
cgttggtctaggggtatgattctcgctt

SEQ ID NO: 9854 - DNA, 22 bp, synthetic construct
  misc_feature 1..22: note = Probe
  source 1..22: mol_type = other DNA
ctaacaacatggctttctcaac

SEQ ID NO: 9855 - DNA, 16 bp, synthetic construct
  misc_feature 1..16: note = Probe
  source 1..16: mol_type = other DNA
ctaagccagggattgt

SEQ ID NO: 9856 - DNA, 17 bp, synthetic construct
  misc_feature 1..17: note = Probe
  source 1..17: mol_type = other DNA
ctaagccagggattgtg

SEQ ID NO: 9857 - DNA, 18 bp, synthetic construct
  misc_feature 1..18: note = Probe
  source 1..18: mol_type = other DNA
ctaagccagggattgtgg

SEQ ID NO: 9858 - DNA, 22 bp, synthetic construct
  misc_feature 1..22: note = Probe
  source 1..22: mol_type = other DNA
ctaagccagggattgtgggttc

SEQ ID NO: 9859 - DNA, 23 bp, synthetic construct
  misc_feature 1..23: note = Probe
  source 1..23: mol_type = other DNA
ctaagccagggattgtgggttcg

SEQ ID NO: 9860 - DNA, 23 bp, synthetic construct
  misc_feature 1..23: note = Probe
  source 1..23: mol_type = other DNA
ctaataacgccaaggtcgcgggt

SEQ ID NO: 9861 - DNA, 18 bp, synthetic construct
  misc_feature 1..18: note = Probe
  source 1..18: mol_type = other DNA
ctaatggataaggcactg

SEQ ID NO: 9862 - DNA, 18 bp, synthetic construct
  misc_feature 1..18: note = Probe
  source 1..18: mol_type = other DNA
ctaatggataaggcattg

SEQ ID NO: 9863 - DNA, 21 bp, synthetic construct
  misc_feature 1..21: note = Probe
  source 1..21: mol_type = other DNA
ctacggatcagaagattccag

SEQ ID NO: 9864 - DNA, 20 bp, synthetic construct
  misc_feature 1..20: note = Probe
  source 1..20: mol_type = other DNA
ctagcggttaggattcctgg

SEQ ID NO: 9865 - DNA, 22 bp, synthetic construct
  misc_feature 1..22: note = Probe
  source 1..22: mol_type = other DNA
ctagcggttaggattcctggtt

SEQ ID NO: 9866 - DNA, 23 bp, synthetic construct
  misc_feature 1..23: note = Probe
  source 1..23: mol_type = other DNA
ctagcggttaggattcctggttt

SEQ ID NO: 9867 - DNA, 24 bp, synthetic construct
  misc_feature 1..24: note = Probe
  source 1..24: mol_type = other DNA
ctagcggttaggattcctggtttt

SEQ ID NO: 9868 - DNA, 19 bp, synthetic construct
  misc_feature 1..19: note = Probe
  source 1..19: mol_type = other DNA
ctaggggtatgattctcgg

SEQ ID NO: 9869 - DNA, 21 bp, synthetic construct
  misc_feature 1..21: note = Probe
  source 1..21: mol_type = other DNA
ctaggggtatgattctcggtt

SEQ ID NO: 9870 - DNA, 20 bp, synthetic construct
  misc_feature 1..20: note = Probe
  source 1..20: mol_type = other DNA
ctaggttcgactcctggctg

SEQ ID NO: 9871 - DNA, 24 bp, synthetic construct
  misc_feature 1..24: note = Probe
  source 1..24: mol_type = other DNA
ctaggttcgactcctggctggctc

SEQ ID NO: 9872 - DNA, 25 bp, synthetic construct
  misc_feature 1..25: note = Probe
  source 1..25: mol_type = other DNA
ctaggttcgactcctggctggctcg

SEQ ID NO: 9873 - DNA, 20 bp, synthetic construct
  misc_feature 1..20: note = Probe
  source 1..20: mol_type = other DNA
ctagtggttaggattcggcg

SEQ ID NO: 9874 - DNA, 21 bp, synthetic construct
  misc_feature 1..21: note = Probe
  source 1..21: mol_type = other DNA
ctagtggttaggattcggcgc

SEQ ID NO: 9875 - DNA, 22 bp, synthetic construct
  misc_feature 1..22: note = Probe
  source 1..22: mol_type = other DNA
ctagtggttaggattcggcgct

SEQ ID NO: 9876 - DNA, 18 bp, synthetic construct
  misc_feature 1..18: note = Probe
  source 1..18: mol_type = other DNA
ctcacaagaactgctaac

SEQ ID NO: 9877 - DNA, 19 bp, synthetic construct
  misc_feature 1..19: note = Probe
  source 1..19: mol_type = other DNA
ctcacaagaactgctaact

SEQ ID NO: 9878 - DNA, 20 bp, synthetic construct
  misc_feature 1..20: note = Probe
  source 1..20: mol_type = other DNA
ctcacaagaactgctaactc

SEQ ID NO: 9879 - DNA, 21 bp, synthetic construct
  misc_feature 1..21: note = Probe
  source 1..21: mol_type = other DNA
ctcacaagaactgctaactca

SEQ ID NO: 9880 - DNA, 22 bp, synthetic construct
  misc_feature 1..22: note = Probe
  source 1..22: mol_type = other DNA
ctcacaagaactgctaactcat

SEQ ID NO: 9881 - DNA, 23 bp, synthetic construct
  misc_feature 1..23: note = Probe
  source 1..23: mol_type = other DNA
ctcacaagaactgctaactcatg

SEQ ID NO: 9882 - DNA, 24 bp, synthetic construct
  misc_feature 1..24: note = Probe
  source 1..24: mol_type = other DNA
ctcacaagaactgctaactcatgc

SEQ ID NO: 9883 - DNA, 23 bp, synthetic construct
  misc_feature 1..23: note = Probe
  source 1..23: mol_type = other DNA
ctcacacgcgaaaggtccccggt

SEQ ID NO: 9884 - DNA, 16 bp, synthetic construct
  misc_feature 1..16: note = Probe
  source 1..16: mol_type = other DNA
ctcaccgccgcggccc

SEQ ID NO: 9885 - DNA, 30 bp, synthetic construct
  misc_feature 1..30: note = Probe
  source 1..30: mol_type = other DNA
ctcaccgccgcggcccgggttcgattcccg

SEQ ID NO: 9886 - DNA, 19 bp, synthetic construct
  misc_feature 1..19: note = Probe
  source 1..19: mol_type = other DNA
ctcacctggagcatgtttt

SEQ ID NO: 9887 - DNA, 20 bp, synthetic construct
  misc_feature 1..20: note = Probe
  source 1..20: mol_type = other DNA
ctcacctggagcatgttttc

SEQ ID NO: 9888 - DNA, 21 bp, synthetic construct
  misc_feature 1..21: note = Probe
  source 1..21: mol_type = other DNA
ctcacctggagcatgttttct

SEQ ID NO: 9889 - DNA, 22 bp, synthetic construct
  misc_feature 1..22: note = Probe
  source 1..22: mol_type = other DNA
ctcacctggagcatgttttctt

SEQ ID NO: 9890 - DNA, 30 bp, synthetic construct
  misc_feature 1..30: note = Probe
  source 1..30: mol_type = other DNA
ctcagggtcgtgggttcgagccccacgttg

SEQ ID NO: 9891 - DNA, 22 bp, synthetic construct
  misc_feature 1..22: note = Probe
  source 1..22: mol_type = other DNA
ctcagtggtagagcatttgact

SEQ ID NO: 9892 - DNA, 24 bp, synthetic construct
  misc_feature 1..24: note = Probe
  source 1..24: mol_type = other DNA
ctcagtggtagagcatttgactgc

SEQ ID NO: 9893 - DNA, 19 bp, synthetic construct
  misc_feature 1..19: note = Probe
  source 1..19: mol_type = other DNA
ctccagtctcttcgggggc

SEQ ID NO: 9894 - DNA, 15 bp, synthetic construct
  misc_feature 1..15: note = Probe
  source 1..15: mol_type = other DNA
ctcccgccttttttc

SEQ ID NO: 9895 - DNA, 16 bp, synthetic construct
  misc_feature 1..16: note = Probe
  source 1..16: mol_type = other DNA
ctcccgccttttttcc

SEQ ID NO: 9896 - DNA, 17 bp, synthetic construct
  misc_feature 1..17: note = Probe
  source 1..17: mol_type = other DNA
ctcccgccttttttccc

SEQ ID NO: 9897 - DNA, 18 bp, synthetic construct
  misc_feature 1..18: note = Probe
  source 1..18: mol_type = other DNA
ctcccgccttttttcccg

SEQ ID NO: 9898 - DNA, 20 bp, synthetic construct
  misc_feature 1..20: note = Probe
  source 1..20: mol_type = other DNA
ctcccgccttttttcccggc

SEQ ID NO: 9899 - DNA, 21 bp, synthetic construct
  misc_feature 1..21: note = Probe
  source 1..21: mol_type = other DNA
ctcccgccttttttcccggcg

SEQ ID NO: 9900 - DNA, 23 bp, synthetic construct
  misc_feature 1..23: note = Probe
  source 1..23: mol_type = other DNA
ctcccgccttttttcccggcggc

SEQ ID NO: 9901 - DNA, 24 bp, synthetic construct
  misc_feature 1..24: note = Probe
  source 1..24: mol_type = other DNA
ctcccgccttttttcccggcggcg

SEQ ID NO: 9902 - DNA, 25 bp, synthetic construct
  misc_feature 1..25: note = Probe
  source 1..25: mol_type = other DNA
ctcccgccttttttcccggcggcgg

SEQ ID NO: 9903 - DNA, 26 bp, synthetic construct
  misc_feature 1..26: note = Probe
  source 1..26: mol_type = other DNA
ctcccgccttttttcccggcggcggg

SEQ ID NO: 9904 - DNA, 29 bp, synthetic construct
  misc_feature 1..29: note = Probe
  source 1..29: mol_type = other DNA
ctcccgccttttttcccggcggcgggaga

SEQ ID NO: 9905 - DNA, 30 bp, synthetic construct
  misc_feature 1..30: note = Probe
  source 1..30: mol_type = other DNA
ctccctggtggtctagtggttaggattcgg

SEQ ID NO: 9906 - DNA, 28 bp, synthetic construct
  misc_feature 1..28: note = Probe
  source 1..28: mol_type = other DNA
ctccgaggtgattttcatattgaattgc

SEQ ID NO: 9907 - DNA, 29 bp, synthetic construct
  misc_feature 1..29: note = Probe
  source 1..29: mol_type = other DNA
ctccgaggtgattttcatattgaattgca

SEQ ID NO: 9908 - DNA, 21 bp, synthetic construct
  misc_feature 1..21: note = Probe
  source 1..21: mol_type = other DNA
ctccggagctggggattgtgg

SEQ ID NO: 9909 - DNA, 21 bp, synthetic construct
  misc_feature 1..21: note = Probe
  source 1..21: mol_type = other DNA
ctcctaagccagggattgtgg

SEQ ID NO: 9910 - DNA, 22 bp, synthetic construct
  misc_feature 1..22: note = Probe
  source 1..22: mol_type = other DNA
ctcctaagccagggattgtggg

SEQ ID NO: 9911 - DNA, 23 bp, synthetic construct
  misc_feature 1..23: note = Probe
  source 1..23: mol_type = other DNA
ctcctaagccagggattgtgggt

SEQ ID NO: 9912 - DNA, 24 bp, synthetic construct
  misc_feature 1..24: note = Probe
  source 1..24: mol_type = other DNA
ctcgaaggacttcgtctgtaattt

SEQ ID NO: 9913 - DNA, 25 bp, synthetic construct
  misc_feature 1..25: note = Probe
  source 1..25: mol_type = other DNA
ctcgaaggacttcgtctgtaatttt

SEQ ID NO: 9914 - DNA, 22 bp, synthetic construct
  misc_feature 1..22: note = Probe
  source 1..22: mol_type = other DNA
ctcggttcgaatccgagtcacg

SEQ ID NO: 9915 - DNA, 23 bp, synthetic construct
  misc_feature 1..23: note = Probe
  source 1..23: mol_type = other DNA
ctcggttcgaatccgagtcacgg

SEQ ID NO: 9916 - DNA, 16 bp, synthetic construct
  misc_feature 1..16: note = Probe
  source 1..16: mol_type = other DNA
ctcgtcggccctgttt

SEQ ID NO: 9917 - DNA, 17 bp, synthetic construct
  misc_feature 1..17: note = Probe
  source 1..17: mol_type = other DNA
ctcgtcggccctgtttt

SEQ ID NO: 9918 - DNA, 23 bp, synthetic construct
  misc_feature 1..23: note = Probe
  source 1..23: mol_type = other DNA
ctcgttggtctaggggtatgatt

SEQ ID NO: 9919 - DNA, 18 bp, synthetic construct
  misc_feature 1..18: note = Probe
  source 1..18: mol_type = other DNA
ctctcaccgccgcggccc

SEQ ID NO: 9920 - DNA, 22 bp, synthetic construct
  misc_feature 1..22: note = Probe
  source 1..22: mol_type = other DNA
ctctcaccgccgcggcccgggt

SEQ ID NO: 9921 - DNA, 15 bp, synthetic construct
  misc_feature 1..15: note = Probe
  source 1..15: mol_type = other DNA
ctctgaatccagcga

SEQ ID NO: 9922 - DNA, 17 bp, synthetic construct
  misc_feature 1..17: note = Probe
  source 1..17: mol_type = other DNA
ctctgaatccagcgatc

SEQ ID NO: 9923 - DNA, 18 bp, synthetic construct
  misc_feature 1..18: note = Probe
  source 1..18: mol_type = other DNA
ctctgaatccagcgatcc

SEQ ID NO: 9924 - DNA, 19 bp, synthetic construct
  misc_feature 1..19: note = Probe
  source 1..19: mol_type = other DNA
ctctgaatccagcgatccg

SEQ ID NO: 9925 - DNA, 20 bp, synthetic construct
  misc_feature 1..20: note = Probe
  source 1..20: mol_type = other DNA
ctctgaatccagcgatccga

SEQ ID NO: 9926 - DNA, 22 bp, synthetic construct
  misc_feature 1..22: note = Probe
  source 1..22: mol_type = other DNA
ctctgaatccagcgatccgagt

SEQ ID NO: 9927 - DNA, 23 bp, synthetic construct
  misc_feature 1..23: note = Probe
  source 1..23: mol_type = other DNA
ctctgaatccagcgatccgagtt

SEQ ID NO: 9928 - DNA, 24 bp, synthetic construct
  misc_feature 1..24: note = Probe
  source 1..24: mol_type = other DNA
ctctgaatccagcgatccgagttc

SEQ ID NO: 9929 - DNA, 26 bp, synthetic construct
  misc_feature 1..26: note = Probe
  source 1..26: mol_type = other DNA
ctctgaatccagcgatccgagttcaa

SEQ ID NO: 9930 - DNA, 19 bp, synthetic construct
  misc_feature 1..19: note = Probe
  source 1..19: mol_type = other DNA
ctctgctatcggagttttt

SEQ ID NO: 9931 - DNA, 16 bp, synthetic construct
  misc_feature 1..16: note = Probe
  source 1..16: mol_type = other DNA
ctctggactctgaatc

SEQ ID NO: 9932 - DNA, 17 bp, synthetic construct
  misc_feature 1..17: note = Probe
  source 1..17: mol_type = other DNA
ctctggactctgaatcc

SEQ ID NO: 9933 - DNA, 18 bp, synthetic construct
  misc_feature 1..18: note = Probe
  source 1..18: mol_type = other DNA
ctctggactctgaatcca

SEQ ID NO: 9934 - DNA, 19 bp, synthetic construct
  misc_feature 1..19: note = Probe
  source 1..19: mol_type = other DNA
ctctggactctgaatccag

SEQ ID NO: 9935 - DNA, 20 bp, synthetic construct
  misc_feature 1..20: note = Probe
  source 1..20: mol_type = other DNA
ctctggactctgaatccagc

SEQ ID NO: 9936 - DNA, 21 bp, synthetic construct
  misc_feature 1..21: note = Probe
  source 1..21: mol_type = other DNA
ctctggactctgaatccagcg

SEQ ID NO: 9937 - DNA, 23 bp, synthetic construct
  misc_feature 1..23: note = Probe
  source 1..23: mol_type = other DNA
ctctggactctgaatccagcgat

SEQ ID NO: 9938 - DNA, 28 bp, synthetic construct
  misc_feature 1..28: note = Probe
  source 1..28: mol_type = other DNA
ctctggactctgaatccagcgatccgag

SEQ ID NO: 9939 - DNA, 29 bp, synthetic construct
  misc_feature 1..29: note = Probe
  source 1..29: mol_type = other DNA
ctctggactctgaatccagcgatccgagt

SEQ ID NO: 9940 - DNA, 16 bp, synthetic construct
  misc_feature 1..16: note = Probe
  source 1..16: mol_type = other DNA
ctctggactttgaatc

SEQ ID NO: 9941 - DNA, 17 bp, synthetic construct
  misc_feature 1..17: note = Probe
  source 1..17: mol_type = other DNA
ctctggactttgaatcc

SEQ ID NO: 9942 - DNA, 20 bp, synthetic construct
  misc_feature 1..20: note = Probe
  source 1..20: mol_type = other DNA
ctctggactttgaatccagc

SEQ ID NO: 9943 - DNA, 17 bp, synthetic construct
  misc_feature 1..17: note = Probe
  source 1..17: mol_type = other DNA
ctctgtggcgcaatgga

SEQ ID NO: 9944 - DNA, 27 bp, synthetic construct
  misc_feature 1..27: note = Probe
  source 1..27: mol_type = other DNA
ctctttggccttttcgagatactgttt

SEQ ID NO: 9945 - DNA, 28 bp, synthetic construct
  misc_feature 1..28: note = Probe
  source 1..28: mol_type = other DNA
ctctttggccttttcgagatactgtttt

SEQ ID NO: 9946 - DNA, 30 bp, synthetic construct
  misc_feature 1..30: note = Probe
  source 1..30: mol_type = other DNA
ctcttttagtataaatagtaccgttaactt

SEQ ID NO: 9947 - DNA, 23 bp, synthetic construct
  misc_feature 1..23: note = Probe
  source 1..23: mol_type = other DNA
ctgaagatctaaaggtccctggt

SEQ ID NO: 9948 - DNA, 15 bp, synthetic construct
  misc_feature 1..15: note = Probe
  source 1..15: mol_type = other DNA
ctgaaggtcctgagt

SEQ ID NO: 9949 - DNA, 22 bp, synthetic construct
  misc_feature 1..22: note = Probe
  source 1..22: mol_type = other DNA
ctgaaggtcctgagttcgaacc

SEQ ID NO: 9950 - DNA, 15 bp, synthetic construct
  misc_feature 1..15: note = Probe
  source 1..15: mol_type = other DNA
ctgaaggtcgtgagt

SEQ ID NO: 9951 - DNA, 30 bp, synthetic construct
  misc_feature 1..30: note = Probe
  source 1..30: mol_type = other DNA
ctgaaggtcgtgagttcgatcctcacacgg

SEQ ID NO: 9952 - DNA, 19 bp, synthetic construct
  misc_feature 1..19: note = Probe
  source 1..19: mol_type = other DNA
ctgaatccagcgatccgag

SEQ ID NO: 9953 - DNA, 20 bp, synthetic construct
  misc_feature 1..20: note = Probe
  source 1..20: mol_type = other DNA
ctgaatccagcgatccgagt

SEQ ID NO: 9954 - DNA, 30 bp, synthetic construct
  misc_feature 1..30: note = Probe
  source 1..30: mol_type = other DNA
ctgagggtccagggttcaagtccctgttcg

SEQ ID NO: 9955 - DNA, 30 bp, synthetic construct
  misc_feature 1..30: note = Probe
  source 1..30: mol_type = other DNA
ctgagggtccagggttcatgtccctgttcc

SEQ ID NO: 9956 - DNA, 21 bp, synthetic construct
  misc_feature 1..21: note = Probe
  source 1..21: mol_type = other DNA
ctgagtgaagcattggactgt

SEQ ID NO: 9957 - DNA, 22 bp, synthetic construct
  misc_feature 1..22: note = Probe
  source 1..22: mol_type = other DNA
ctgagtgaagcattggactgta

SEQ ID NO: 9958 - DNA, 23 bp, synthetic construct
  misc_feature 1..23: note = Probe
  source 1..23: mol_type = other DNA
ctgagtgaagcattggactgtaa

SEQ ID NO: 9959 - DNA, 19 bp, synthetic construct
  misc_feature 1..19: note = Probe
  source 1..19: mol_type = other DNA
ctgcagatcaagaggtccc

SEQ ID NO: 9960 - DNA, 20 bp, synthetic construct
  misc_feature 1..20: note = Probe
  source 1..20: mol_type = other DNA
ctgcagatcaagaggtcccc

SEQ ID NO: 9961 - DNA, 23 bp, synthetic construct
  misc_feature 1..23: note = Probe
  source 1..23: mol_type = other DNA
ctgcagatcaagaggtccccggt

SEQ ID NO: 9962 - DNA, 18 bp, synthetic construct
  misc_feature 1..18: note = Probe
  source 1..18: mol_type = other DNA
ctgccacgcgggaggccc

SEQ ID NO: 9963 - DNA, 22 bp, synthetic construct
  misc_feature 1..22: note = Probe
  source 1..22: mol_type = other DNA
ctgccacgcgggaggcccgggt

SEQ ID NO: 9964 - DNA, 21 bp, synthetic construct
  misc_feature 1..21: note = Probe
  source 1..21: mol_type = other DNA
ctgccttccaagcagttgacc

SEQ ID NO: 9965 - DNA, 22 bp, synthetic construct
  misc_feature 1..22: note = Probe
  source 1..22: mol_type = other DNA
ctgccttccaagcagttgaccc

SEQ ID NO: 9966 - DNA, 23 bp, synthetic construct
  misc_feature 1..23: note = Probe
  source 1..23: mol_type = other DNA
ctgccttccaagcagttgacccg

SEQ ID NO: 9967 - DNA, 24 bp, synthetic construct
  misc_feature 1..24: note = Probe
  source 1..24: mol_type = other DNA
ctgccttccaagcagttgacccgg

SEQ ID NO: 9968 - DNA, 25 bp, synthetic construct
  misc_feature 1..25: note = Probe
  source 1..25: mol_type = other DNA
ctgccttccaagcagttgacccggg

SEQ ID NO: 9969 - DNA, 26 bp, synthetic construct
  misc_feature 1..26: note = Probe
  source 1..26: mol_type = other DNA
ctgccttccaagcagttgacccgggt

SEQ ID NO: 9970 - DNA, 22 bp, synthetic construct
  misc_feature 1..22: note = Probe
  source 1..22: mol_type = other DNA
ctgcgtgttcgaatcacgtcgg

SEQ ID NO: 9971 - DNA, 17 bp, synthetic construct
  misc_feature 1..17: note = Probe
  source 1..17: mol_type = other DNA
ctgctatcggagttttt

SEQ ID NO: 9972 - DNA, 19 bp, synthetic construct
  misc_feature 1..19: note = Probe
  source 1..19: mol_type = other DNA
ctggaaagtgcacttggac

SEQ ID NO: 9973 - DNA, 20 bp, synthetic construct
  misc_feature 1..20: note = Probe
  source 1..20: mol_type = other DNA
ctggaaagtgcacttggacg

SEQ ID NO: 9974 - DNA, 21 bp, synthetic construct
  misc_feature 1..21: note = Probe
  source 1..21: mol_type = other DNA
ctggaaagtgcacttggacga

SEQ ID NO: 9975 - DNA, 22 bp, synthetic construct
  misc_feature 1..22: note = Probe
  source 1..22: mol_type = other DNA
ctggaaagtgcacttggacgaa

SEQ ID NO: 9976 - DNA, 23 bp, synthetic construct
  misc_feature 1..23: note = Probe
  source 1..23: mol_type = other DNA
ctggaaagtgcacttggacgaac

SEQ ID NO: 9977 - DNA, 24 bp, synthetic construct
  misc_feature 1..24: note = Probe
  source 1..24: mol_type = other DNA
ctggaaagtgcacttggacgaacc

SEQ ID NO: 9978 - DNA, 15 bp, synthetic construct
  misc_feature 1..15: note = Probe
  source 1..15: mol_type = other DNA
ctggactctgaatcc

SEQ ID NO: 9979 - DNA, 18 bp, synthetic construct
  misc_feature 1..18: note = Probe
  source 1..18: mol_type = other DNA
ctggactctgaatccagc

SEQ ID NO: 9980 - DNA, 19 bp, synthetic construct
  misc_feature 1..19: note = Probe
  source 1..19: mol_type = other DNA
ctggactctgaatccagcg

SEQ ID NO: 9981 - DNA, 22 bp, synthetic construct
  misc_feature 1..22: note = Probe
  source 1..22: mol_type = other DNA
ctggactctgaatccagcgatc

SEQ ID NO: 9982 - DNA, 25 bp, synthetic construct
  misc_feature 1..25: note = Probe
  source 1..25: mol_type = other DNA
ctggactctgaatccagcgatccga

SEQ ID NO: 9983 - DNA, 27 bp, synthetic construct
  misc_feature 1..27: note = Probe
  source 1..27: mol_type = other DNA
ctggactctgaatccagcgatccgagt

SEQ ID NO: 9984 - DNA, 19 bp, synthetic construct
  misc_feature 1..19: note = Probe
  source 1..19: mol_type = other DNA
ctggtctccggatggaggc

SEQ ID NO: 9985 - DNA, 25 bp, synthetic construct
  misc_feature 1..25: note = Probe
  source 1..25: mol_type = other DNA
ctggtggtctagtggttaggattcg

SEQ ID NO: 9986 - DNA, 26 bp, synthetic construct
  misc_feature 1..26: note = Probe
  source 1..26: mol_type = other DNA
ctggtggtctagtggttaggattcgg

SEQ ID NO: 9987 - DNA, 28 bp, synthetic construct
  misc_feature 1..28: note = Probe
  source 1..28: mol_type = other DNA
ctggtggtctagtggttaggattcggcg

SEQ ID NO: 9988 - DNA, 29 bp, synthetic construct
  misc_feature 1..29: note = Probe
  source 1..29: mol_type = other DNA
ctggtggtctagtggttaggattcggcgc

SEQ ID NO: 9989 - DNA, 30 bp, synthetic construct; identical to SEQ ID NO: 839
  misc_feature 1..30: note = Probe
  source 1..30: mol_type = other DNA

SEQ ID NO: 9990 - DNA, 22 bp, synthetic construct
  misc_feature 1..22: note = Probe
  source 1..22: mol_type = other DNA
ctggttcgatcccgggtttcgg

SEQ ID NO: 9991 - DNA, 25 bp, synthetic construct
  misc_feature 1..25: note = Probe
  source 1..25: mol_type = other DNA
ctggttcgattccggctcgaaggac

SEQ ID NO: 9992 - DNA, 18 bp, synthetic construct
  misc_feature 1..18: note = Probe
  source 1..18: mol_type = other DNA
ctgtaaagctaacttagc

SEQ ID NO: 9993 - DNA, 21 bp, synthetic construct
  misc_feature 1..21: note = Probe
  source 1..21: mol_type = other DNA
ctgtaaagctaacttagcatt

SEQ ID NO: 9994 - DNA, 22 bp, synthetic construct
  misc_feature 1..22: note = Probe
  source 1..22: mol_type = other DNA
ctgtaaagctaacttagcatta

SEQ ID NO: 9995 - DNA, 24 bp, synthetic construct
  misc_feature 1..24: note = Probe
  source 1..24: mol_type = other DNA
ctgtaaagctaacttagcattaac

SEQ ID NO: 9996 - DNA, 25 bp, synthetic construct
  misc_feature 1..25: note = Probe
  source 1..25: mol_type = other DNA
ctgtaaagctaacttagcattaacc

SEQ ID NO: 9997 - DNA, 29 bp, synthetic construct
  misc_feature 1..29: note = Probe
  source 1..29: mol_type = other DNA
ctgtaaagctaacttagcattaacctttt

SEQ ID NO: 9998 - DNA, 15 bp, synthetic construct
  misc_feature 1..15: note = Probe
  source 1..15: mol_type = other DNA
ctgtcacgcgggaga

SEQ ID NO: 9999 - DNA, 21 bp, synthetic construct
  misc_feature 1..21: note = Probe
  source 1..21: mol_type = other DNA
ctgtcacgcgggagaccgggg

SEQ ID NO: 10000 - DNA, 24 bp, synthetic construct
  misc_feature 1..24: note = Probe
  source 1..24: mol_type = other DNA
ctgtgatggccgagtggttaaggc

SEQ ID NO: 10001 - DNA, 15 bp, synthetic construct
  misc_feature 1..15: note = Probe
  source 1..15: mol_type = other DNA
ctgtgctccggagtt

SEQ ID NO: 10002 - DNA, 18 bp, synthetic construct
  misc_feature 1..18: note = Probe
  source 1..18: mol_type = other DNA
ctgtgctccggagttacc

SEQ ID NO: 10003 - DNA, 21 bp, synthetic construct
  misc_feature 1..21: note = Probe
  source 1..21: mol_type = other DNA
ctgtgctccggagttacctcg

SEQ ID NO: 10004 - DNA, 22 bp, synthetic construct
  misc_feature 1..22: note = Probe
  source 1..22: mol_type = other DNA
ctgtgctccggagttacctcgt

SEQ ID NO: 10005 - DNA, 23 bp, synthetic construct
  misc_feature 1..23: note = Probe
  source 1..23: mol_type = other DNA
ctgtgctccggagttacctcgtt

SEQ ID NO: 10006 - DNA, 24 bp, synthetic construct
  misc_feature 1..24: note = Probe
  source 1..24: mol_type = other DNA
ctgtgctccggagttacctcgttt

SEQ ID NO: 10007 - DNA, 25 bp, synthetic construct
  misc_feature 1..25: note = Probe
  source 1..25: mol_type = other DNA
ctgtgctccggagttacctcgtttt

SEQ ID NO: 10008 - DNA, 19 bp, synthetic construct
  misc_feature 1..19: note = Probe
  source 1..19: mol_type = other DNA
ctgttaaccgaaaggttgg

SEQ ID NO: 10009 - DNA, 22 bp, synthetic construct
  misc_feature 1..22: note = Probe
  source 1..22: mol_type = other DNA
ctgttcgggcgtttgtagtttt

SEQ ID NO: 10010 - DNA, 15 bp, synthetic construct
  misc_feature 1..15: note = Probe
  source 1..15: mol_type = other DNA
cttaacttgaccgct

SEQ ID NO: 10011 - DNA, 17 bp, synthetic construct
  misc_feature 1..17: note = Probe
  source 1..17: mol_type = other DNA
cttaacttgaccgctct

SEQ ID NO: 10012 - DNA, 18 bp, synthetic construct
  misc_feature 1..18: note = Probe
  source 1..18: mol_type = other DNA
cttaacttgaccgctctg

SEQ ID NO: 10013 - DNA, 19 bp, synthetic construct
  misc_feature 1..19: note = Probe
  source 1..19: mol_type = other DNA
cttaacttgaccgctctga

SEQ ID NO: 10014 - DNA, 20 bp, synthetic construct
  misc_feature 1..20: note = Probe
  source 1..20: mol_type = other DNA
cttaacttgaccgctctgag

SEQ ID NO: 10015 - DNA, 21 bp, synthetic construct
  misc_feature 1..21: note = Probe
  source 1..21: mol_type = other DNA
cttaacttgaccgctctgagc

SEQ ID NO: 10016 - DNA, 27 bp, synthetic construct
  misc_feature 1..27: note = Probe
  source 1..27: mol_type = other DNA
cttaggagatttcaacttaacttgacc

SEQ ID NO: 10017 - DNA, 28 bp, synthetic construct
  misc_feature 1..28: note = Probe
  source 1..28: mol_type = other DNA
cttaggagatttcaacttaacttgaccg

SEQ ID NO: 10018 - DNA, 30 bp, synthetic construct; identical to SEQ ID NO: 5384
  misc_feature 1..30: note = Probe
  source 1..30: mol_type = other DNA

SEQ ID NO: 10019 - DNA, 29 bp, synthetic construct
  misc_feature 1..29: note = Probe
  source 1..29: mol_type = other DNA
cttaggtcgctggttcgattccggctcga

SEQ ID NO: 10020 - DNA, 19 bp, synthetic construct
  misc_feature 1..19: note = Probe
  source 1..19: mol_type = other DNA
cttccaagcagttgacccg

SEQ ID NO: 10021 - DNA, 20 bp, synthetic construct
  misc_feature 1..20: note = Probe
  source 1..20: mol_type = other DNA
cttccaagcagttgacccgg

SEQ ID NO: 10022 - DNA, 22 bp, synthetic construct
  misc_feature 1..22: note = Probe
  source 1..22: mol_type = other DNA
cttccaagcagttgacccgggt

SEQ ID NO: 10023 - DNA, 24 bp, synthetic construct
  misc_feature 1..24: note = Probe
  source 1..24: mol_type = other DNA
cttcgatagctcagctggtagagc

SEQ ID NO: 10024 - DNA, 24 bp, synthetic construct
  misc_feature 1..24: note = Probe
  source 1..24: mol_type = other DNA
cttcgatagctcagttggtagagc

SEQ ID NO: 10025 - DNA, 17 bp, synthetic construct
  misc_feature 1..17: note = Probe
  source 1..17: mol_type = other DNA
cttctgacacatacttt

SEQ ID NO: 10026 - DNA, 18 bp, synthetic construct
  misc_feature 1..18: note = Probe
  source 1..18: mol_type = other DNA
cttctgacacatactttt

SEQ ID NO: 10027 - DNA, 18 bp, synthetic construct
  misc_feature 1..18: note = Probe
  source 1..18: mol_type = other DNA
cttctgacacattcgttt

SEQ ID NO: 10028 - DNA, 19 bp, synthetic construct
  misc_feature 1..19: note = Probe
  source 1..19: mol_type = other DNA
cttctgacacattcgtttt

SEQ ID NO: 10029 - DNA, 19 bp, synthetic construct
  misc_feature 1..19: note = Probe
  source 1..19: mol_type = other DNA
cttctgtagtgtagtggtt

SEQ ID NO: 10030 - DNA, 20 bp, synthetic construct
  misc_feature 1..20: note = Probe
  source 1..20: mol_type = other DNA
cttgtaaaccaggggtcgcg

SEQ ID NO: 10031 - DNA, 22 bp, synthetic construct
  misc_feature 1..22: note = Probe
  source 1..22: mol_type = other DNA
cttgtaaaccaggggtcgcgag

SEQ ID NO: 10032 - DNA, 23 bp, synthetic construct
  misc_feature 1..23: note = Probe
  source 1..23: mol_type = other DNA
cttgtaaaccaggggtcgcgagt

SEQ ID NO: 10033 - DNA, 25 bp, synthetic construct
  misc_feature 1..25: note = Probe
  source 1..25: mol_type = other DNA
ctttcgatagctcagttggtagagc

SEQ ID NO: 10034 - DNA, 15 bp, synthetic construct
  misc_feature 1..15: note = Probe
  source 1..15: mol_type = other DNA
ctttgaatccagcga

SEQ ID NO: 10035 - DNA, 18 bp, synthetic construct
  misc_feature 1..18: note = Probe
  source 1..18: mol_type = other DNA
ctttgaatccagcgatcc

SEQ ID NO: 10036 - DNA, 19 bp, synthetic construct
  misc_feature 1..19: note = Probe
  source 1..19: mol_type = other DNA
ctttgaatccagcgatccg

SEQ ID NO: 10037 - DNA, 20 bp, synthetic construct
  misc_feature 1..20: note = Probe
  source 1..20: mol_type = other DNA
ctttgaatccagcgatccga

SEQ ID NO: 10038 - DNA, 21 bp, synthetic construct
  misc_feature 1..21: note = Probe
  source 1..21: mol_type = other DNA
ctttgaatccagcgatccgag

SEQ ID NO: 10039 - DNA, 23 bp, synthetic construct
  misc_feature 1..23: note = Probe
  source 1..23: mol_type = other DNA
ctttgaatccagcgatccgagtt

SEQ ID NO: 10040 - DNA, 16 bp, synthetic construct
  misc_feature 1..16: note = Probe
  source 1..16: mol_type = other DNA
ctttgcacgcgtgggt

SEQ ID NO: 10041 - DNA, 23 bp, synthetic construct
  misc_feature 1..23: note = Probe
  source 1..23: mol_type = other DNA
ctttggccttttcgagatactgt

SEQ ID NO: 10042 - DNA, 24 bp, synthetic construct
  misc_feature 1..24: note = Probe
  source 1..24: mol_type = other DNA
ctttggccttttcgagatactgtt

SEQ ID NO: 10043 - DNA, 25 bp, synthetic construct
  misc_feature 1..25: note = Probe
  source 1..25: mol_type = other DNA
ctttggccttttcgagatactgttt

SEQ ID NO: 10044 - DNA, 26 bp, synthetic construct
  misc_feature 1..26: note = Probe
  source 1..26: mol_type = other DNA
ctttggccttttcgagatactgtttt

SEQ ID NO: 10045 - DNA, 27 bp, synthetic construct
  misc_feature 1..27: note = Probe
  source 1..27: mol_type = other DNA
ctttggccttttcgagatactgttttt

SEQ ID NO: 10046 - DNA, 21 bp, synthetic construct
  misc_feature 1..21: note = Probe
  source 1..21: mol_type = other DNA
ctttggtctaggggtatgatc

SEQ ID NO: 10047 - DNA, 20 bp, synthetic construct
  misc_feature 1..20: note = Probe
  source 1..20: mol_type = other DNA
cttttaatctgagggtccag

SEQ ID NO: 10048 - DNA, 19 bp, synthetic construct
  misc_feature 1..19: note = Probe
  source 1..19: mol_type = other DNA
cttttttcccggcggcggg

SEQ ID NO: 10049 - DNA, 18 bp, synthetic construct
  misc_feature 1..18: note = Probe
  source 1..18: mol_type = other DNA
gaaaaagtcatggaggcc

SEQ ID NO: 10050 - DNA, 19 bp, synthetic construct
  misc_feature 1..19: note = Probe
  source 1..19: mol_type = other DNA
gaaaaagtcatggaggcca

SEQ ID NO: 10051 - DNA, 21 bp, synthetic construct
  misc_feature 1..21: note = Probe
  source 1..21: mol_type = other DNA
gaaaaagtcatggaggccatg

SEQ ID NO: 10052 - DNA, 24 bp, synthetic construct
  misc_feature 1..24: note = Probe
  source 1..24: mol_type = other DNA
gaaaaagtcatggaggccatgggg

SEQ ID NO: 10053 - DNA, 26 bp, synthetic construct
  misc_feature 1..26: note = Probe
  source 1..26: mol_type = other DNA
gaaaaagtcatggaggccatggggtt

SEQ ID NO: 10054 - DNA, 27 bp, synthetic construct
  misc_feature 1..27: note = Probe
  source 1..27: mol_type = other DNA
gaaaaagtcatggaggccatggggttg

SEQ ID NO: 10055 - DNA, 28 bp, synthetic construct
  misc_feature 1..28: note = Probe
  source 1..28: mol_type = other DNA
gaaaaagtcatggaggccatggggttgg

SEQ ID NO: 10056 - DNA, 29 bp, synthetic construct
  misc_feature 1..29: note = Probe
  source 1..29: mol_type = other DNA
gaaaaagtcatggaggccatggggttggc

SEQ ID NO: 10057 - DNA, 30 bp, synthetic construct
  misc_feature 1..30: note = Probe
  source 1..30: mol_type = other DNA
gaaaaagtcatggaggccatggggttggct

SEQ ID NO: 10058 - DNA, 20 bp, synthetic construct
  misc_feature 1..20: note = Probe
  source 1..20: mol_type = other DNA
gaaaatgtttagacgggctc

SEQ ID NO: 10059 - DNA, 20 bp, synthetic construct
  misc_feature 1..20: note = Probe
  source 1..20: mol_type = other DNA
gaaagctcacaagaactgct

SEQ ID NO: 10060 - DNA, 23 bp, synthetic construct
  misc_feature 1..23: note = Probe
  source 1..23: mol_type = other DNA
gaaagctcacaagaactgctaac

SEQ ID NO: 10061 - DNA, 24 bp, synthetic construct
  misc_feature 1..24: note = Probe
  source 1..24: mol_type = other DNA
gaaagctcacaagaactgctaact

SEQ ID NO: 10062 - DNA, 26 bp, synthetic construct
  misc_feature 1..26: note = Probe
  source 1..26: mol_type = other DNA
gaaaggtccccggttcgaaaccgggc

SEQ ID NO: 10063 - DNA, 30 bp, synthetic construct
  misc_feature 1..30: note = Probe
  source 1..30: mol_type = other DNA
gaaatacaacgatggtttttcatatcattg

SEQ ID NO: 10064 - DNA, 20 bp, synthetic construct
  misc_feature 1..20: note = Probe
  source 1..20: mol_type = other DNA
gaaccaacacctctttacag

SEQ ID NO: 10065 - DNA, 24 bp, synthetic construct
  misc_feature 1..24: note = Probe
  source 1..24: mol_type = other DNA
gaaccaacacctctttacagtgaa

SEQ ID NO: 10066 - DNA, 16 bp, synthetic construct
  misc_feature 1..16: note = Probe
  source 1..16: mol_type = other DNA
gaactgctaactcatg

SEQ ID NO: 10067 - DNA, 30 bp, synthetic construct; identical to SEQ ID NO: 890
  misc_feature 1..30: note = Probe
  source 1..30: mol_type = other DNA

SEQ ID NO: 10068 - DNA, 16 bp, synthetic construct
  misc_feature 1..16: note = Probe
  source 1..16: mol_type = other DNA
gaagcattggactgta

SEQ ID NO: 10069 - DNA, 21 bp, synthetic construct
  misc_feature 1..21: note = Probe
  source 1..21: mol_type = other DNA
gaagcattggactgtaaatct

SEQ ID NO: 10070 - DNA, 17 bp, synthetic construct
  misc_feature 1..17: note = Probe
  source 1..17: mol_type = other DNA
gaagcgggtgctcttat

SEQ ID NO: 10071 - DNA, 18 bp, synthetic construct
  misc_feature 1..18: note = Probe
  source 1..18: mol_type = other DNA
gaagcgggtgctcttatt

SEQ ID NO: 10072 - DNA, 19 bp, synthetic construct
  misc_feature 1..19: note = Probe
  source 1..19: mol_type = other DNA
gaagcgggtgctcttattt

SEQ ID NO: 10073 - DNA, 20 bp, synthetic construct
  misc_feature 1..20: note = Probe
  source 1..20: mol_type = other DNA
gaagcgggtgctcttatttt

SEQ ID NO: 10074 - DNA, 21 bp, synthetic construct
  misc_feature 1..21: note = Probe
  source 1..21: mol_type = other DNA
gaagcgggtgctcttattttt

SEQ ID NO: 10075 - DNA, 30 bp, synthetic construct; identical to SEQ ID NO: 5510
  misc_feature 1..30: note = Probe
  source 1..30: mol_type = other DNA

SEQ ID NO: 10076 - DNA, 25 bp, synthetic construct
  misc_feature 1..25: note = Probe
  source 1..25: mol_type = other DNA
gaaggttgcgtgttcaagtcacgtc

SEQ ID NO: 10077 - DNA, 23 bp, synthetic construct
  misc_feature 1..23: note = Probe
  source 1..23: mol_type = other DNA
gaagtcgcattttgtgaaccctg

SEQ ID NO: 10078 - DNA, 19 bp, synthetic construct
  misc_feature 1..19: note = Probe
  source 1..19: mol_type = other DNA
gaatccagcgatccgagtt

SEQ ID NO: 10079 - DNA, 20 bp, synthetic construct
  misc_feature 1..20: note = Probe
  source 1..20: mol_type = other DNA
gaatccggctcgaaggacga

SEQ ID NO: 10080 - DNA, 17 bp, synthetic construct
  misc_feature 1..17: note = Probe
  source 1..17: mol_type = other DNA
gaattctcgcctgccac

SEQ ID NO: 10081 - DNA, 18 bp, synthetic construct
  misc_feature 1..18: note = Probe
  source 1..18: mol_type = other DNA
gaccacgtggcctaatgg

SEQ ID NO: 10082 - DNA, 24 bp, synthetic construct
  misc_feature 1..24: note = Probe
  source 1..24: mol_type = other DNA
gaccacgtggcctaatggataagg

SEQ ID NO: 10083 - DNA, 16 bp, synthetic construct
  misc_feature 1..16: note = Probe
  source 1..16: mol_type = other DNA
gacccagtggcctaat

SEQ ID NO: 10084 - DNA, 17 bp, synthetic construct
  misc_feature 1..17: note = Probe
  source 1..17: mol_type = other DNA
gacccagtggcctaatg

SEQ ID NO: 10085 - DNA, 18 bp, synthetic construct
  misc_feature 1..18: note = Probe
  source 1..18: mol_type = other DNA
gacccagtggcctaatgg

SEQ ID NO: 10086 - DNA, 19 bp, synthetic construct
  misc_feature 1..19: note = Probe
  source 1..19: mol_type = other DNA
gacccagtggcctaatgga

SEQ ID NO: 10087 - DNA, 20 bp, synthetic construct
  misc_feature 1..20: note = Probe
  source 1..20: mol_type = other DNA
gacccagtggcctaatggat

SEQ ID NO: 10088 - DNA, 21 bp, synthetic construct
  misc_feature 1..21: note = Probe
  source 1..21: mol_type = other DNA
gacccagtggcctaatggata

SEQ ID NO: 10089 - DNA, 22 bp, synthetic construct
  misc_feature 1..22: note = Probe
  source 1..22: mol_type = other DNA
gacccagtggcctaatggataa

SEQ ID NO: 10090 - DNA, 25 bp, synthetic construct
  misc_feature 1..25: note = Probe
  source 1..25: mol_type = other DNA
gacccagtggcctaatggataaggc

SEQ ID NO: 10091 - DNA, 26 bp, synthetic construct
  misc_feature 1..26: note = Probe
  source 1..26: mol_type = other DNA
gacccagtggcctaatggataaggca

SEQ ID NO: 10092 - DNA, 28 bp, synthetic construct
  misc_feature 1..28: note = Probe
  source 1..28: mol_type = other DNA
gacccagtggcctaatggataaggcatc

SEQ ID NO: 10093 - DNA, 29 bp, synthetic construct
  misc_feature 1..29: note = Probe
  source 1..29: mol_type = other DNA
gacccagtggcctaatggataaggcatca

SEQ ID NO: 10094 - DNA, 21 bp, synthetic construct
  misc_feature 1..21: note = Probe
  source 1..21: mol_type = other DNA
gacccgggttcgattcccggc

SEQ ID NO: 10095 - DNA, 16 bp, synthetic construct
  misc_feature 1..16: note = Probe
  source 1..16: mol_type = other DNA
gaccgcgtggcctaat

SEQ ID NO: 10096 - DNA, 17 bp, synthetic construct
  misc_feature 1..17: note = Probe
  source 1..17: mol_type = other DNA
gaccgcgtggcctaatg

SEQ ID NO: 10097 - DNA, 20 bp, synthetic construct
  misc_feature 1..20: note = Probe
  source 1..20: mol_type = other DNA
gaccgcgtggcctaatggat

SEQ ID NO: 10098 - DNA, 23 bp, synthetic construct
  misc_feature 1..23: note = Probe
  source 1..23: mol_type = other DNA
gaccgcgtggcctaatggataag

SEQ ID NO: 10099 - DNA, 24 bp, synthetic construct
  misc_feature 1..24: note = Probe
  source 1..24: mol_type = other DNA
gaccgcgtggcctaatggataagg

SEQ ID NO: 10100 - DNA, 25 bp, synthetic construct
  misc_feature 1..25: note = Probe
  source 1..25: mol_type = other DNA
gaccgcgtggcctaatggataaggc

SEQ ID NO: 10101 - DNA, 30 bp, synthetic construct
  misc_feature 1..30: note = Probe
  source 1..30: mol_type = other DNA
gaccgcgtggcctaatggataaggcgtctg

SEQ ID NO: 10102 - DNA, 24 bp, synthetic construct
  misc_feature 1..24: note = Probe
  source 1..24: mol_type = other DNA
gaccggggttcgattccccgacgg

SEQ ID NO: 10103 - DNA, 25 bp, synthetic construct
  misc_feature 1..25: note = Probe
  source 1..25: mol_type = other DNA
gaccggggttcgattccccgacggg

SEQ ID NO: 10104 - DNA, 27 bp, synthetic construct
  misc_feature 1..27: note = Probe
  source 1..27: mol_type = other DNA
gaccggggttcgattccccgacgggga

SEQ ID NO: 10105 - DNA, 30 bp, synthetic construct; identical to SEQ ID NO: 5576
  misc_feature 1..30: note = Probe
  source 1..30: mol_type = other DNA

SEQ ID NO: 10106 - DNA, 30 bp, synthetic construct; identical to SEQ ID NO: 5579
  misc_feature 1..30: note = Probe
  source 1..30: mol_type = other DNA

SEQ ID NO: 10107 - DNA, 18 bp, synthetic construct
  misc_feature 1..18: note = Probe
  source 1..18: mol_type = other DNA
gacctcgtggcgcaacgg

SEQ ID NO: 10108 - DNA, 20 bp, synthetic construct
  misc_feature 1..20: note = Probe
  source 1..20: mol_type = other DNA
gacctcgtggcgcaacggta

SEQ ID NO: 10109 - DNA, 22 bp, synthetic construct
  misc_feature 1..22: note = Probe
  source 1..22: mol_type = other DNA
gacctcgtggcgcaacggtagc

SEQ ID NO: 10110 - DNA, 23 bp, synthetic construct
  misc_feature 1..23: note = Probe
  source 1..23: mol_type = other DNA
gacctcgtggcgcaacggtagcg

SEQ ID NO: 10111 - DNA, 29 bp, synthetic construct
  misc_feature 1..29: note = Probe
  source 1..29: mol_type = other DNA
gacctcgtggcgcaacggtagcgcgtctg

SEQ ID NO: 10112 - DNA, 19 bp, synthetic construct
  misc_feature 1..19: note = Probe
  source 1..19: mol_type = other DNA
gacctcgtggcgcaatggt

SEQ ID NO: 10113 - DNA, 22 bp, synthetic construct
  misc_feature 1..22: note = Probe
  source 1..22: mol_type = other DNA
gacctcgtggcgcaatggtagc

SEQ ID NO: 10114 - DNA, 24 bp, synthetic construct
  misc_feature 1..24: note = Probe
  source 1..24: mol_type = other DNA
gacctcgtggcgcaatggtagcgc

SEQ ID NO: 10115 - DNA, 29 bp, synthetic construct
  misc_feature 1..29: note = Probe
  source 1..29: mol_type = other DNA
gacctcgtggcgcaatggtagcgcgtctg

SEQ ID NO: 10116 - DNA, 15 bp, synthetic construct
  misc_feature 1..15: note = Probe
  source 1..15: mol_type = other DNA
gacgaggtggccgag

SEQ ID NO: 10117 - DNA, 16 bp, synthetic construct
  misc_feature 1..16: note = Probe
  source 1..16: mol_type = other DNA
gacgaggtggccgagt

SEQ ID NO: 10118 - DNA, 18 bp, synthetic construct
  misc_feature 1..18: note = Probe
  source 1..18: mol_type = other DNA
gacgaggtggccgagtgg

SEQ ID NO: 10119 - DNA, 19 bp, synthetic construct
  misc_feature 1..19: note = Probe
  source 1..19: mol_type = other DNA
gacgaggtggccgagtggt

SEQ ID NO: 10120 - DNA, 20 bp, synthetic construct
  misc_feature 1..20: note = Probe
  source 1..20: mol_type = other DNA
gacgaggtggccgagtggtt

SEQ ID NO: 10121 - DNA, 21 bp, synthetic construct
  misc_feature 1..21: note = Probe
  source 1..21: mol_type = other DNA
gacgaggtggccgagtggtta

SEQ ID NO: 10122 - DNA, 22 bp, synthetic construct
  misc_feature 1..22: note = Probe
  source 1..22: mol_type = other DNA
gacgaggtggccgagtggttaa

SEQ ID NO: 10123 - DNA, 23 bp, synthetic construct
  misc_feature 1..23: note = Probe
  source 1..23: mol_type = other DNA
gacgaggtggccgagtggttaag

SEQ ID NO: 10124 - DNA, 26 bp, synthetic construct
  misc_feature 1..26: note = Probe
  source 1..26: mol_type = other DNA
gacgaggtggccgagtggttaaggcg

SEQ ID NO: 10125 - DNA, 27 bp, synthetic construct
  misc_feature 1..27: note = Probe
  source 1..27: mol_type = other DNA
gacgaggtggccgagtggttaaggcga

SEQ ID NO: 10126 - DNA, 29 bp, synthetic construct
  misc_feature 1..29: note = Probe
  source 1..29: mol_type = other DNA
gacgaggtggccgagtggttaaggcgatg

SEQ ID NO: 10127 - DNA, 30 bp, synthetic construct
  misc_feature 1..30: note = Probe
  source 1..30: mol_type = other DNA
gacgaggtggccgagtggttaaggcgatgg

SEQ ID NO: 10128 - DNA, 18 bp, synthetic construct
  misc_feature 1..18: note = Probe
  source 1..18: mol_type = other DNA
gactatgagaatcgaacc

SEQ ID NO: 10129 - DNA, 19 bp, synthetic construct
  misc_feature 1..19: note = Probe
  source 1..19: mol_type = other DNA
gactatgagaatcgaaccc

SEQ ID NO: 10130 - DNA, 22 bp, synthetic construct
  misc_feature 1..22: note = Probe
  source 1..22: mol_type = other DNA
gactctgaatccagcgatccga

SEQ ID NO: 10131 - DNA, 15 bp, synthetic construct
  misc_feature 1..15: note = Probe
  source 1..15: mol_type = other DNA
gagaaagctcacaag

SEQ ID NO: 10132 - DNA, 16 bp, synthetic construct
  misc_feature 1..16: note = Probe
  source 1..16: mol_type = other DNA
gagaaagctcacaaga

SEQ ID NO: 10133 - DNA, 17 bp, synthetic construct
  misc_feature 1..17: note = Probe
  source 1..17: mol_type = other DNA
gagaaagctcacaagaa

SEQ ID NO: 10134 - DNA, 20 bp, synthetic construct
  misc_feature 1..20: note = Probe
  source 1..20: mol_type = other DNA
gagaaagctcacaagaactg

SEQ ID NO: 10135 - DNA, 23 bp, synthetic construct
  misc_feature 1..23: note = Probe
  source 1..23: mol_type = other DNA
gagaaagctcacaagaactgcta

SEQ ID NO: 10136 - DNA, 24 bp, synthetic construct
  misc_feature 1..24: note = Probe
  source 1..24: mol_type = other DNA
gagaaagctcacaagaactgctaa

SEQ ID NO: 10137 - DNA, 27 bp, synthetic construct
  misc_feature 1..27: note = Probe
  source 1..27: mol_type = other DNA
gagaaagctcacaagaactgctaactc

SEQ ID NO: 10138 - DNA, 29 bp, synthetic construct
  misc_feature 1..29: note = Probe
  source 1..29: mol_type = other DNA
gagaaagctcacaagaactgctaactcat

SEQ ID NO: 10139 - DNA, 30 bp, synthetic construct; identical to SEQ ID NO: 932
  misc_feature 1..30: note = Probe
  source 1..30: mol_type = other DNA

SEQ ID NO: 10140 - DNA, 22 bp, synthetic construct
  misc_feature 1..22: note = Probe
  source 1..22: mol_type = other DNA
gagaaccaacacctctttacag

SEQ ID NO: 10141 - DNA, 24 bp, synthetic construct
  misc_feature 1..24: note = Probe
  source 1..24: mol_type = other DNA
gagaaccaacacctctttacagtg

SEQ ID NO: 10142 - DNA, 30 bp, synthetic construct
  misc_feature 1..30: note = Probe
  source 1..30: mol_type = other DNA
gagaatagtttaaattagaatcttagcttt

SEQ ID NO: 10143 - DNA, 26 bp, synthetic construct
  misc_feature 1..26: note = Probe
  source 1..26: mol_type = other DNA
gagaccggggttcgattccccgacgg

SEQ ID NO: 10144 - DNA, 27 bp, synthetic construct
  misc_feature 1..27: note = Probe
  source 1..27: mol_type = other DNA
gagaccggggttcgattccccgacggg

SEQ ID NO: 10145 - DNA, 30 bp, synthetic construct; identical to SEQ ID NO: 957
  misc_feature 1..30: note = Probe
  source 1..30: mol_type = other DNA

SEQ ID NO: 10146 - DNA, 22 bp, synthetic construct
  misc_feature 1..22: note = Probe
  source 1..22: mol_type = other DNA
gagatttcaacttaacttgacc

SEQ ID NO: 10147 - DNA, 23 bp, synthetic construct
  misc_feature 1..23: note = Probe
  source 1..23: mol_type = other DNA
gagatttcaacttaacttgaccg

SEQ ID NO: 10148 - DNA, 24 bp, synthetic construct
  misc_feature 1..24: note = Probe
  source 1..24: mol_type = other DNA
gagatttcaacttaacttgaccgc

SEQ ID NO: 10149 - DNA, 25 bp, synthetic construct
  misc_feature 1..25: note = Probe
  source 1..25: mol_type = other DNA
gagatttcaacttaacttgaccgct

SEQ ID NO: 10150 - DNA, 26 bp, synthetic construct
  misc_feature 1..26: note = Probe
  source 1..26: mol_type = other DNA
gagatttcaacttaacttgaccgctc

SEQ ID NO: 10151 - DNA, 27 bp, synthetic construct
  misc_feature 1..27: note = Probe
  source 1..27: mol_type = other DNA
gagatttcaacttaacttgaccgctct

SEQ ID NO: 10152 - DNA, 28 bp, synthetic construct
  misc_feature 1..28: note = Probe
  source 1..28: mol_type = other DNA
gagatttcaacttaacttgaccgctctg

SEQ ID NO: 10153 - DNA, 29 bp, synthetic construct
  misc_feature 1..29: note = Probe
  source 1..29: mol_type = other DNA
gagatttcaacttaacttgaccgctctga

SEQ ID NO: 10154 - DNA, 30 bp, synthetic construct; identical to SEQ ID NO: 5641
  misc_feature 1..30: note = Probe
  source 1..30: mol_type = other DNA

SEQ ID NO: 10155 - DNA, 15 bp, synthetic construct
  misc_feature 1..15: note = Probe
  source 1..15: mol_type = other DNA
gagctcaattacttt

SEQ ID NO: 10156 - DNA, 16 bp, synthetic construct
  misc_feature 1..16: note = Probe
  source 1..16: mol_type = other DNA
gagctcaattactttt

SEQ ID NO: 10157 - DNA, 24 bp, synthetic construct
  misc_feature 1..24: note = Probe
  source 1..24: mol_type = other DNA
gaggccccgggttcaatccccggc

SEQ ID NO: 10158 - DNA, 24 bp, synthetic construct
  misc_feature 1..24: note = Probe
  source 1..24: mol_type = other DNA
gaggccccgggttcgatccccggc

SEQ ID NO: 10159 - DNA, 30 bp, synthetic construct
  misc_feature 1..30: note = Probe
  source 1..30: mol_type = other DNA
gagggtccagggttcaagtccctgttcggg

SEQ ID NO: 10160 - DNA, 28 bp, synthetic construct
  misc_feature 1..28: note = Probe
  source 1..28: mol_type = other DNA
gaggtcccgggttcaaatcccggacgag

SEQ ID NO: 10161 - DNA, 30 bp, synthetic construct
  misc_feature 1..30: note = Probe
  source 1..30: mol_type = other DNA
gaggtcccgggttcaaatcccggacgagcc

SEQ ID NO: 10162 - DNA, 19 bp, synthetic construct
  misc_feature 1..19: note = Probe
  source 1..19: mol_type = other DNA
gaggtcgatggatcgaaac

SEQ ID NO: 10163 - DNA, 21 bp, synthetic construct
  misc_feature 1..21: note = Probe
  source 1..21: mol_type = other DNA
gaggtcgatggatcgaaacca

SEQ ID NO: 10164 - DNA, 24 bp, synthetic construct
  misc_feature 1..24: note = Probe
  source 1..24: mol_type = other DNA
gaggtcgatggatcgaaaccatcc

SEQ ID NO: 10165 - DNA, 15 bp, synthetic construct
  misc_feature 1..15: note = Probe
  source 1..15: mol_type = other DNA
gagtgaagcattgga

SEQ ID NO: 10166 - DNA, 17 bp, synthetic construct
  misc_feature 1..17: note = Probe
  source 1..17: mol_type = other DNA
gagtgaagcattggact

SEQ ID NO: 10167 - DNA, 18 bp, synthetic construct
  misc_feature 1..18: note = Probe
  source 1..18: mol_type = other DNA
gagtgaagcattggactg

SEQ ID NO: 10168 - DNA, 19 bp, synthetic construct
  misc_feature 1..19: note = Probe
  source 1..19: mol_type = other DNA
gagtgaagcattggactgt

SEQ ID NO: 10169 - DNA, 20 bp, synthetic construct
  misc_feature 1..20: note = Probe
  source 1..20: mol_type = other DNA
gagtgaagcattggactgta

SEQ ID NO: 10170 - DNA, 21 bp, synthetic construct
  misc_feature 1..21: note = Probe
  source 1..21: mol_type = other DNA
gagtgaagcattggactgtaa

SEQ ID NO: 10171 - DNA, 22 bp, synthetic construct
  misc_feature 1..22: note = Probe
  source 1..22: mol_type = other DNA
gagtgaagcattggactgtaaa

SEQ ID NO: 10172 - DNA, 23 bp, synthetic construct
  misc_feature 1..23: note = Probe
  source 1..23: mol_type = other DNA
gagtgaagcattggactgtaaat

SEQ ID NO: 10173 - DNA, 24 bp, synthetic construct
  misc_feature 1..24: note = Probe
  source 1..24: mol_type = other DNA
gagtgaagcattggactgtaaatc

SEQ ID NO: 10174 - DNA, 25 bp, synthetic construct
  misc_feature 1..25: note = Probe
  source 1..25: mol_type = other DNA
gagtgaagcattggactgtaaatct

SEQ ID NO: 10175 - DNA, 26 bp, synthetic construct
  misc_feature 1..26: note = Probe
  source 1..26: mol_type = other DNA
gagtgaagcattggactgtaaatcta

SEQ ID NO: 10176 - DNA, 29 bp, synthetic construct
  misc_feature 1..29: note = Probe
  source 1..29: mol_type = other DNA
gagtgaagcattggactgtaaatctaaag

SEQ ID NO: 10177 - DNA, 27 bp, synthetic construct
  misc_feature 1..27: note = Probe
  source 1..27: mol_type = other DNA
gagtggcgcagcggaagcgtgctgggc

SEQ ID NO: 10178 - DNA, 28 bp, synthetic construct
  misc_feature 1..28: note = Probe
  source 1..28: mol_type = other DNA
gagtggcgcagcggaagcgtgctgggcc

SEQ ID NO: 10179 - DNA, 30 bp, synthetic construct; identical to SEQ ID NO: 5697
  misc_feature 1..30: note = Probe
  source 1..30: mol_type = other DNA

SEQ ID NO: 10180 - DNA, 22 bp, synthetic construct
  misc_feature 1..22: note = Probe
  source 1..22: mol_type = other DNA
gagttaaagactttttctctga

SEQ ID NO: 10181 - DNA, 23 bp, synthetic construct
  misc_feature 1..23: note = Probe
  source 1..23: mol_type = other DNA
gagttaaagactttttctctgat

SEQ ID NO: 10182 - DNA, 20 bp, synthetic construct
  misc_feature 1..20: note = Probe
  source 1..20: mol_type = other DNA
gataacagctatccattggt

SEQ ID NO: 10183 - DNA, 23 bp, synthetic construct
  misc_feature 1..23: note = Probe
  source 1..23: mol_type = other DNA
gatatccaaccttcagctatagg

SEQ ID NO: 10184 - DNA, 22 bp, synthetic construct
  misc_feature 1..22: note = Probe
  source 1..22: mol_type = other DNA
gatcctgggttcgaatcccagc

SEQ ID NO: 10185 - DNA, 15 bp, synthetic construct
  misc_feature 1..15: note = Probe
  source 1..15: mol_type = other DNA
gatcgtatagtggtt

SEQ ID NO: 10186 - DNA, 16 bp, synthetic construct
  misc_feature 1..16: note = Probe
  source 1..16: mol_type = other DNA
gatcgtatagtggtta

SEQ ID NO: 10187 - DNA, 17 bp, synthetic construct
  misc_feature 1..17: note = Probe
  source 1..17: mol_type = other DNA
gatcgtatagtggttag

SEQ ID NO: 10188 - DNA, 18 bp, synthetic construct
  misc_feature 1..18: note = Probe
  source 1..18: mol_type = other DNA
gatcgtatagtggttagt

SEQ ID NO: 10189 - DNA, 19 bp, synthetic construct
  misc_feature 1..19: note = Probe
  source 1..19: mol_type = other DNA
gatcgtatagtggttagta

SEQ ID NO: 10190 - DNA, 20 bp, synthetic construct
  misc_feature 1..20: note = Probe
  source 1..20: mol_type = other DNA
gatcgtatagtggttagtac

SEQ ID NO: 10191 - DNA, 21 bp, synthetic construct
  misc_feature 1..21: note = Probe
  source 1..21: mol_type = other DNA
gatcgtatagtggttagtact

SEQ ID NO: 10192 - DNA, 22 bp, synthetic construct
  misc_feature 1..22: note = Probe
  source 1..22: mol_type = other DNA
gatcgtatagtggttagtactc

SEQ ID NO: 10193 - DNA, 23 bp, synthetic construct
  misc_feature 1..23: note = Probe
  source 1..23: mol_type = other DNA
gatcgtatagtggttagtactct

SEQ ID NO: 10194 - DNA, 24 bp, synthetic construct
  misc_feature 1..24: note = Probe
  source 1..24: mol_type = other DNA
gatcgtatagtggttagtactctg

SEQ ID NO: 10195 - DNA, 25 bp, synthetic construct
  misc_feature 1..25: note = Probe
  source 1..25: mol_type = other DNA
gatcgtatagtggttagtactctgc

SEQ ID NO: 10196 - DNA, 27 bp, synthetic construct
  misc_feature 1..27: note = Probe
  source 1..27: mol_type = other DNA
gatcgtatagtggttagtactctgcgt

SEQ ID NO: 10197 - DNA, 28 bp, synthetic construct
  misc_feature 1..28: note = Probe
  source 1..28: mol_type = other DNA
gatcgtatagtggttagtactctgcgtt

SEQ ID NO: 10198 - DNA, 30 bp, synthetic construct; identical to SEQ ID NO: 5730
  misc_feature 1..30: note = Probe
  source 1..30: mol_type = other DNA

SEQ ID NO: 10199 - DNA, 21 bp, synthetic construct
  misc_feature 1..21: note = Probe
  source 1..21: mol_type = other DNA
gatggccgagcggtctaaggc

SEQ ID NO: 10200 - DNA, 29 bp, synthetic construct
  misc_feature 1..29: note = Probe
  source 1..29: mol_type = other DNA
gatggccgagcggtctaaggcgctgcgtt

SEQ ID NO: 10201 - DNA, 30 bp, synthetic construct
  misc_feature 1..30: note = Probe
  source 1..30: mol_type = other DNA
gatggccgagcggtctaaggcgctgcgttc

SEQ ID NO: 10202 - DNA, 30 bp, synthetic construct
  misc_feature 1..30: note = Probe
  source 1..30: mol_type = other DNA
gatggtttttcatatcattggtcgtggttg

SEQ ID NO: 10203 - DNA, 21 bp, synthetic construct
  misc_feature 1..21: note = Probe
  source 1..21: mol_type = other DNA
gatgtagctcagtggtagagc

SEQ ID NO: 10204 - DNA, 30 bp, synthetic construct
  misc_feature 1..30: note = Probe
  source 1..30: mol_type = other DNA
gattaagagaaccaacacctctttacagtg

SEQ ID NO: 10205 - DNA, 20 bp, synthetic construct
  misc_feature 1..20: note = Probe
  source 1..20: mol_type = other DNA
gattccaggttcgactcctg

SEQ ID NO: 10206 - DNA, 25 bp, synthetic construct
  misc_feature 1..25: note = Probe
  source 1..25: mol_type = other DNA
gattccaggttcgactcctggctgg

SEQ ID NO: 10207 - DNA, 28 bp, synthetic construct
  misc_feature 1..28: note = Probe
  source 1..28: mol_type = other DNA
gattccaggttcgactcctggctggctc

SEQ ID NO: 10208 - DNA, 29 bp, synthetic construct
  misc_feature 1..29: note = Probe
  source 1..29: mol_type = other DNA
gattccaggttcgactcctggctggctcg

SEQ ID NO: 10209 - DNA, 30 bp, synthetic construct
  misc_feature 1..30: note = Probe
  source 1..30: mol_type = other DNA
gattccaggttcgactcctggctggctcgg

SEQ ID NO: 10210 - DNA, 30 bp, synthetic construct
  misc_feature 1..30: note = Probe
  source 1..30: mol_type = other DNA
gattccaggttcgactcctggctggctcgt

SEQ ID NO: 10211 - DNA, 21 bp, synthetic construct
  misc_feature 1..21: note = Probe
  source 1..21: mol_type = other DNA
gattcccattcttgcgacccg

SEQ ID NO: 10212 - DNA, 22 bp, synthetic construct
  misc_feature 1..22: note = Probe
  source 1..22: mol_type = other DNA
gattcccattcttgcgacccgg

SEQ ID NO: 10213 - DNA, 18 bp, synthetic construct
  misc_feature 1..18: note = Probe
  source 1..18: mol_type = other DNA
gattccccgacggggaga

SEQ ID NO: 10214 - DNA, 18 bp, synthetic construct
  misc_feature 1..18: note = Probe
  source 1..18: mol_type = other DNA
gattccccgacggggagg

SEQ ID NO: 10215 - DNA, 20 bp, synthetic construct
  misc_feature 1..20: note = Probe
  source 1..20: mol_type = other DNA
gattccccgacggggaggca

SEQ ID NO: 10216 - DNA, 20 bp, synthetic construct
  misc_feature 1..20: note = Probe
  source 1..20: mol_type = other DNA
gattcccggtcagggaacaa

SEQ ID NO: 10217 - DNA, 20 bp, synthetic construct
  misc_feature 1..20: note = Probe
  source 1..20: mol_type = other DNA
gattcccggtcatggaacca

SEQ ID NO: 10218 - DNA, 18 bp, synthetic construct
  misc_feature 1..18: note = Probe
  source 1..18: mol_type = other DNA
gattccggctcgaaggac

SEQ ID NO: 10219 - DNA, 19 bp, synthetic construct
  misc_feature 1..19: note = Probe
  source 1..19: mol_type = other DNA
gattccggctcgaaggact

SEQ ID NO: 10220 - DNA, 28 bp, synthetic construct
  misc_feature 1..28: note = Probe
  source 1..28: mol_type = other DNA
gattccggctcgaaggacttcgtctgta

SEQ ID NO: 10221 - DNA, 20 bp, synthetic construct
  misc_feature 1..20: note = Probe
  source 1..20: mol_type = other DNA
gattcctggtcagggaacca

SEQ ID NO: 10222 - DNA, 20 bp, synthetic construct
  misc_feature 1..20: note = Probe
  source 1..20: mol_type = other DNA
gattctaggttcgactcctg

SEQ ID NO: 10223 - DNA, 25 bp, synthetic construct
  misc_feature 1..25: note = Probe
  source 1..25: mol_type = other DNA
gattctaggttcgactcctggctgg

SEQ ID NO: 10224 - DNA, 29 bp, synthetic construct
  misc_feature 1..29: note = Probe
  source 1..29: mol_type = other DNA
gattctaggttcgactcctggctggctcg

SEQ ID NO: 10225 - DNA, 30 bp, synthetic construct
  misc_feature 1..30: note = Probe
  source 1..30: mol_type = other DNA
gattctaggttcgactcctggctggctcgc

SEQ ID NO: 10226 - DNA, 22 bp, synthetic construct
  misc_feature 1..22: note = Probe
  source 1..22: mol_type = other DNA
gattgagggttcgagtcccttc

SEQ ID NO: 10227 - DNA, 15 bp, synthetic construct
  misc_feature 1..15: note = Probe
  source 1..15: mol_type = other DNA
gattgtgaatctgac

SEQ ID NO: 10228 - DNA, 16 bp, synthetic construct
  misc_feature 1..16: note = Probe
  source 1..16: mol_type = other DNA
gattgtgaatctgaca

SEQ ID NO: 10229 - DNA, 17 bp, synthetic construct
  misc_feature 1..17: note = Probe
  source 1..17: mol_type = other DNA
gattgtgaatctgacaa

SEQ ID NO: 10230 - DNA, 18 bp, synthetic construct
  misc_feature 1..18: note = Probe
  source 1..18: mol_type = other DNA
gattgtgaatctgacaac

SEQ ID NO: 10231 - DNA, 19 bp, synthetic construct
  misc_feature 1..19: note = Probe
  source 1..19: mol_type = other DNA
gattgtgaatctgacaaca

SEQ ID NO: 10232 - DNA, 20 bp, synthetic construct
  misc_feature 1..20: note = Probe
  source 1..20: mol_type = other DNA
gattgtgaatctgacaacag

SEQ ID NO: 10233 - DNA, 21 bp, synthetic construct
  misc_feature 1..21: note = Probe
  source 1..21: mol_type = other DNA
gattgtgaatctgacaacaga

SEQ ID NO: 10234 - DNA, 22 bp, synthetic construct
  misc_feature 1..22: note = Probe
  source 1..22: mol_type = other DNA
gattgtgaatctgacaacagag

SEQ ID NO: 10235 - DNA, 24 bp, synthetic construct
  misc_feature 1..24: note = Probe
  source 1..24: mol_type = other DNA
gattgtgaatctgacaacagaggc

SEQ ID NO: 10236 - DNA, 25 bp, synthetic construct
  misc_feature 1..25: note = Probe
  source 1..25: mol_type = other DNA
gattgtgaatctgacaacagaggct

SEQ ID NO: 10237 - DNA, 29 bp, synthetic construct
  misc_feature 1..29: note = Probe
  source 1..29: mol_type = other DNA
gattgtgaatctgacaacagaggcttacg

SEQ ID NO: 10238 - DNA, 22 bp, synthetic construct
  misc_feature 1..22: note = Probe
  source 1..22: mol_type = other DNA
gattgtgggttcgagtcccatc

SEQ ID NO: 10239 - DNA, 19 bp, synthetic construct
  misc_feature 1..19: note = Probe
  source 1..19: mol_type = other DNA
gatttcaacttaacttgac

SEQ ID NO: 10240 - DNA, 20 bp, synthetic construct
  misc_feature 1..20: note = Probe
  source 1..20: mol_type = other DNA
gatttcaacttaacttgacc

SEQ ID NO: 10241 - DNA, 21 bp, synthetic construct
  misc_feature 1..21: note = Probe
  source 1..21: mol_type = other DNA
gatttcaacttaacttgaccg

SEQ ID NO: 10242 - DNA, 22 bp, synthetic construct
  misc_feature 1..22: note = Probe
  source 1..22: mol_type = other DNA
gatttcaacttaacttgaccgc

SEQ ID NO: 10243 - DNA, 23 bp, synthetic construct
  misc_feature 1..23: note = Probe
  source 1..23: mol_type = other DNA
gatttcaacttaacttgaccgct

SEQ ID NO: 10244 - DNA, 24 bp, synthetic construct
  misc_feature 1..24: note = Probe
  source 1..24: mol_type = other DNA
gatttcaacttaacttgaccgctc

SEQ ID NO: 10245 - DNA, 25 bp, synthetic construct
  misc_feature 1..25: note = Probe
  source 1..25: mol_type = other DNA
gatttcaacttaacttgaccgctct

SEQ ID NO: 10246 - DNA, 26 bp, synthetic construct
  misc_feature 1..26: note = Probe
  source 1..26: mol_type = other DNA
gatttcaacttaacttgaccgctctg

SEQ ID NO: 10247 - DNA, 27 bp, synthetic construct
  misc_feature 1..27: note = Probe
  source 1..27: mol_type = other DNA
gatttcaacttaacttgaccgctctga

SEQ ID NO: 10248 - DNA, 28 bp, synthetic construct
  misc_feature 1..28: note = Probe
  source 1..28: mol_type = other DNA
gatttcaacttaacttgaccgctctgag

SEQ ID NO: 10249 - DNA, 29 bp, synthetic construct
  misc_feature 1..29: note = Probe
  source 1..29: mol_type = other DNA
gatttcaacttaacttgaccgctctgagc

SEQ ID NO: 10250 - DNA, 29 bp, synthetic construct
  misc_feature 1..29: note = Probe
  source 1..29: mol_type = other DNA
gcaacctcggttcgaatccgagtcacggc

SEQ ID NO: 10251 - DNA, 15 bp, synthetic construct
  misc_feature 1..15: note = Probe
  source 1..15: mol_type = other DNA
gcaactggtcgtttt

SEQ ID NO: 10252 - DNA, 19 bp, synthetic construct
  misc_feature 1..19: note = Probe
  source 1..19: mol_type = other DNA
gcaatggatagcgcattgg

SEQ ID NO: 10253 - DNA, 21 bp, synthetic construct
  misc_feature 1..21: note = Probe
  source 1..21: mol_type = other DNA
gcaatggtggttcagtggtag

SEQ ID NO: 10254 - DNA, 22 bp, synthetic construct
  misc_feature 1..22: note = Probe
  source 1..22: mol_type = other DNA
gcaatggtggttcagtggtaga

SEQ ID NO: 10255 - DNA, 23 bp, synthetic construct
  misc_feature 1..23: note = Probe
  source 1..23: mol_type = other DNA
gcaatggtggttcagtggtagaa

SEQ ID NO: 10256 - DNA, 24 bp, synthetic construct
  misc_feature 1..24: note = Probe
  source 1..24: mol_type = other DNA
gcaatggtggttcagtggtagaat

SEQ ID NO: 10257 - DNA, 25 bp, synthetic construct
  misc_feature 1..25: note = Probe
  source 1..25: mol_type = other DNA
gcaatggtggttcagtggtagaatt

SEQ ID NO: 10258 - DNA, 26 bp, synthetic construct
  misc_feature 1..26: note = Probe
  source 1..26: mol_type = other DNA
gcaatggtggttcagtggtagaattc

SEQ ID NO: 10259 - DNA, 27 bp, synthetic construct
  misc_feature 1..27: note = Probe
  source 1..27: mol_type = other DNA
gcaatggtggttcagtggtagaattct

SEQ ID NO: 10260 - DNA, 28 bp, synthetic construct
  misc_feature 1..28: note = Probe
  source 1..28: mol_type = other DNA
gcaatggtggttcagtggtagaattctc

SEQ ID NO: 10261 - DNA, 29 bp, synthetic construct
  misc_feature 1..29: note = Probe
  source 1..29: mol_type = other DNA
gcaatggtggttcagtggtagaattctcg

SEQ ID NO: 10262 - DNA, 30 bp, synthetic construct
  misc_feature 1..30: note = Probe
  source 1..30: mol_type = other DNA
gcaatggtggttcagtggtagaattctcgc

SEQ ID NO: 10263 - DNA, 30 bp, synthetic construct; identical to SEQ ID NO: 5807
  misc_feature 1..30: note = Probe
  source 1..30: mol_type = other DNA

SEQ ID NO: 10264 - DNA, 16 bp, synthetic construct
  misc_feature 1..16: note = Probe
  source 1..16: mol_type = other DNA
gcactctggactctga

SEQ ID NO: 10265 - DNA, 19 bp, synthetic construct
  misc_feature 1..19: note = Probe
  source 1..19: mol_type = other DNA
gcactctggactctgaatc

SEQ ID NO: 10266 - DNA, 20 bp, synthetic construct
  misc_feature 1..20: note = Probe
  source 1..20: mol_type = other DNA
gcactctggactctgaatcc

SEQ ID NO: 10267 - DNA, 21 bp, synthetic construct
  misc_feature 1..21: note = Probe
  source 1..21: mol_type = other DNA
gcactctggactctgaatcca

SEQ ID NO: 10268 - DNA, 23 bp, synthetic construct
  misc_feature 1..23: note = Probe
  source 1..23: mol_type = other DNA
gcactctggactctgaatccagc

SEQ ID NO: 10269 - DNA, 29 bp, synthetic construct
  misc_feature 1..29: note = Probe
  source 1..29: mol_type = other DNA
gcactctggactctgaatccagcgatccg

SEQ ID NO: 10270 - DNA, 19 bp, synthetic construct
  misc_feature 1..19: note = Probe
  source 1..19: mol_type = other DNA
gcactctggactttgaatc

SEQ ID NO: 10271 - DNA, 19 bp, synthetic construct
  misc_feature 1..19: note = Probe
  source 1..19: mol_type = other DNA
gcactggtggttcagtggt

SEQ ID NO: 10272 - DNA, 21 bp, synthetic construct
  misc_feature 1..21: note = Probe
  source 1..21: mol_type = other DNA
gcactggtggttcagtggtag

SEQ ID NO: 10273 - DNA, 22 bp, synthetic construct
  misc_feature 1..22: note = Probe
  source 1..22: mol_type = other DNA
gcactggtggttcagtggtaga

SEQ ID NO: 10274 - DNA, 23 bp, synthetic construct
  misc_feature 1..23: note = Probe
  source 1..23: mol_type = other DNA
gcactggtggttcagtggtagaa

SEQ ID NO: 10275 - DNA, 24 bp, synthetic construct
  misc_feature 1..24: note = Probe
  source 1..24: mol_type = other DNA
gcactggtggttcagtggtagaat

SEQ ID NO: 10276 - DNA, 25 bp, synthetic construct
  misc_feature 1..25: note = Probe
  source 1..25: mol_type = other DNA
gcactggtggttcagtggtagaatt

SEQ ID NO: 10277 - DNA, 26 bp, synthetic construct
  misc_feature 1..26: note = Probe
  source 1..26: mol_type = other DNA
gcactggtggttcagtggtagaattc

SEQ ID NO: 10278 - DNA, 27 bp, synthetic construct
  misc_feature 1..27: note = Probe
  source 1..27: mol_type = other DNA
gcactggtggttcagtggtagaattct

SEQ ID NO: 10279 - DNA, 28 bp, synthetic construct
  misc_feature 1..28: note = Probe
  source 1..28: mol_type = other DNA
gcactggtggttcagtggtagaattctc

SEQ ID NO: 10280 - DNA, 29 bp, synthetic construct
  misc_feature 1..29: note = Probe
  source 1..29: mol_type = other DNA
gcactggtggttcagtggtagaattctcg

SEQ ID NO: 10281 - DNA, 30 bp, synthetic construct
  misc_feature 1..30: note = Probe
  source 1..30: mol_type = other DNA
gcagaaggtcctgggttcgagccccagtgg

SEQ ID NO: 10282 - DNA, 18 bp, synthetic construct
  misc_feature 1..18: note = Probe
  source 1..18: mol_type = other DNA
gcagagcccggtaatcgc

SEQ ID NO: 10283 - DNA, 19 bp, synthetic construct
  misc_feature 1..19: note = Probe
  source 1..19: mol_type = other DNA
gcagagcccggtaatcgca

SEQ ID NO: 10284 - DNA, 20 bp, synthetic construct
  misc_feature 1..20: note = Probe
  source 1..20: mol_type = other DNA
gcagagcccggtaatcgcat

SEQ ID NO: 10285 - DNA, 22 bp, synthetic construct
  misc_feature 1..22: note = Probe
  source 1..22: mol_type = other DNA
gcagagcccggtaatcgcataa

SEQ ID NO: 10286 - DNA, 23 bp, synthetic construct
  misc_feature 1..23: note = Probe
  source 1..23: mol_type = other DNA
gcagagcccggtaatcgcataaa

SEQ ID NO: 10287 - DNA, 29 bp, synthetic construct
  misc_feature 1..29: note = Probe
  source 1..29: mol_type = other DNA
gcagagcccggtaatcgcataaaacttaa

SEQ ID NO: 10288 - DNA, 28 bp, synthetic construct
  misc_feature 1..28: note = Probe
  source 1..28: mol_type = other DNA
gcagagtggcgcagcggaagcgtgctgg

SEQ ID NO: 10289 - DNA, 29 bp, synthetic construct
  misc_feature 1..29: note = Probe
  source 1..29: mol_type = other DNA
gcagagtggcgcagcggaagcgtgctggg

SEQ ID NO: 10290 - DNA, 26 bp, synthetic construct
  misc_feature 1..26: note = Probe
  source 1..26: mol_type = other DNA
gcagcaacctcggttcgaatccgagt

SEQ ID NO: 10291 - DNA, 30 bp, synthetic construct
  misc_feature 1..30: note = Probe
  source 1..30: mol_type = other DNA
gcagcaacctcggttcgaatccgagtcacg

SEQ ID NO: 10292 - DNA, 24 bp, synthetic construct
  misc_feature 1..24: note = Probe
  source 1..24: mol_type = other DNA
gcagcgatggccgagtggttaagg

SEQ ID NO: 10293 - DNA, 25 bp, synthetic construct
  misc_feature 1..25: note = Probe
  source 1..25: mol_type = other DNA
gcagcgatggccgagtggttaaggc

SEQ ID NO: 10294 - DNA, 30 bp, synthetic construct
  misc_feature 1..30: note = Probe
  source 1..30: mol_type = other DNA
gcagcgatggccgagtggttaaggcgttgg

SEQ ID NO: 10295 - DNA, 21 bp, synthetic construct
  misc_feature 1..21: note = Probe
  source 1..21: mol_type = other DNA
gcagcggaagcgtgctgggcc

SEQ ID NO: 10296 - DNA, 23 bp, synthetic construct
  misc_feature 1..23: note = Probe
  source 1..23: mol_type = other DNA
gcaggttcgaatcctgctcacag

SEQ ID NO: 10297 - DNA, 21 bp, synthetic construct
  misc_feature 1..21: note = Probe
  source 1..21: mol_type = other DNA
gcagtaggtagcgcatcagtc

SEQ ID NO: 10298 - DNA, 21 bp, synthetic construct
  misc_feature 1..21: note = Probe
  source 1..21: mol_type = other DNA
gcagtaggtagcgcgtcagtc

SEQ ID NO: 10299 - DNA, 21 bp, synthetic construct
  misc_feature 1..21: note = Probe
  source 1..21: mol_type = other DNA
gcagtggtagaattctcgcct

SEQ ID NO: 10300 - DNA, 19 bp, synthetic construct
  misc_feature 1..19: note = Probe
  source 1..19: mol_type = other DNA
gcataggtggttcagtggt

SEQ ID NO: 10301 - DNA, 24 bp, synthetic construct
  misc_feature 1..24: note = Probe
  source 1..24: mol_type = other DNA
gcataggtggttcagtggtagaat

SEQ ID NO: 10302 - DNA, 25 bp, synthetic construct
  misc_feature 1..25: note = Probe
  source 1..25: mol_type = other DNA
gcataggtggttcagtggtagaatt

SEQ ID NO: 10303 - DNA, 26 bp, synthetic construct
  misc_feature 1..26: note = Probe
  source 1..26: mol_type = other DNA
gcataggtggttcagtggtagaattc

SEQ ID NO: 10304 - DNA, 27 bp, synthetic construct
  misc_feature 1..27: note = Probe
  source 1..27: mol_type = other DNA
gcataggtggttcagtggtagaattct

SEQ ID NO: 10305 - DNA, 28 bp, synthetic construct
  misc_feature 1..28: note = Probe
  source 1..28: mol_type = other DNA
gcataggtggttcagtggtagaattctt

SEQ ID NO: 10306 - DNA, 29 bp, synthetic construct
  misc_feature 1..29: note = Probe
  source 1..29: mol_type = other DNA
gcataggtggttcagtggtagaattcttg

SEQ ID NO: 10307 - DNA, 30 bp, synthetic construct
  misc_feature 1..30: note = Probe
  source 1..30: mol_type = other DNA
gcataggtggttcagtggtagaattcttgc

SEQ ID NO: 10308 - DNA, 20 bp, synthetic construct
  misc_feature 1..20: note = Probe
  source 1..20: mol_type = other DNA
gcatgcacgaggccccgggt

SEQ ID NO: 10309 - DNA, 15 bp, synthetic construct
  misc_feature 1..15: note = Probe
  source 1..15: mol_type = other DNA
gcatgggtggttcag

SEQ ID NO: 10310 - DNA, 16 bp, synthetic construct
  misc_feature 1..16: note = Probe
  source 1..16: mol_type = other DNA
gcatgggtggttcagt

SEQ ID NO: 10311 - DNA, 17 bp, synthetic construct
  misc_feature 1..17: note = Probe
  source 1..17: mol_type = other DNA
gcatgggtggttcagtg

SEQ ID NO: 10312 - DNA, 18 bp, synthetic construct
  misc_feature 1..18: note = Probe
  source 1..18: mol_type = other DNA
gcatgggtggttcagtgg

SEQ ID NO: 10313 - DNA, 19 bp, synthetic construct
  misc_feature 1..19: note = Probe
  source 1..19: mol_type = other DNA
gcatgggtggttcagtggt

SEQ ID NO: 10314 - DNA, 20 bp, synthetic construct
  misc_feature 1..20: note = Probe
  source 1..20: mol_type = other DNA
gcatgggtggttcagtggta

SEQ ID NO: 10315 - DNA, 21 bp, synthetic construct
  misc_feature 1..21: note = Probe
  source 1..21: mol_type = other DNA
gcatgggtggttcagtggtag

SEQ ID NO: 10316 - DNA, 22 bp, synthetic construct
  misc_feature 1..22: note = Probe
  source 1..22: mol_type = other DNA
gcatgggtggttcagtggtaga

SEQ ID NO: 10317 - DNA, 23 bp, synthetic construct
  misc_feature 1..23: note = Probe
  source 1..23: mol_type = other DNA
gcatgggtggttcagtggtagaa

SEQ ID NO: 10318 - DNA, 24 bp, synthetic construct
  misc_feature 1..24: note = Probe
  source 1..24: mol_type = other DNA
gcatgggtggttcagtggtagaat

SEQ ID NO: 10319 - DNA, 25 bp, synthetic construct
  misc_feature 1..25: note = Probe
  source 1..25: mol_type = other DNA
gcatgggtggttcagtggtagaatt

SEQ ID NO: 10320 - DNA, 26 bp, synthetic construct
  misc_feature 1..26: note = Probe
  source 1..26: mol_type = other DNA
gcatgggtggttcagtggtagaattc

SEQ ID NO: 10321 - DNA, 27 bp, synthetic construct
  misc_feature 1..27: note = Probe
  source 1..27: mol_type = other DNA
gcatgggtggttcagtggtagaattct

SEQ ID NO: 10322 - DNA, 20 bp, synthetic construct
  misc_feature 1..20: note = Probe
  source 1..20: mol_type = other DNA
gcatgtgtgaggtcccgggt

SEQ ID NO: 10323 - DNA, 17 bp, synthetic construct
  misc_feature 1..17: note = Probe
  source 1..17: mol_type = other DNA
gcattggactgtaaatc

SEQ ID NO: 10324 - DNA, 18 bp, synthetic construct
  misc_feature 1..18: note = Probe
  source 1..18: mol_type = other DNA
gcattggactgtaaatct

SEQ ID NO: 10325 - DNA, 19 bp, synthetic construct
  misc_feature 1..19: note = Probe
  source 1..19: mol_type = other DNA
gcattggactgtaaatcta

SEQ ID NO: 10326 - DNA, 25 bp, synthetic construct
  misc_feature 1..25: note = Probe
  source 1..25: mol_type = other DNA
gcattggactgtaaatctaaagaca

SEQ ID NO: 10327 - DNA, 29 bp, synthetic construct
  misc_feature 1..29: note = Probe
  source 1..29: mol_type = other DNA
gcattggtggttcaatggtagaattctcg

SEQ ID NO: 10328 - DNA, 30 bp, synthetic construct
  misc_feature 1..30: note = Probe
  source 1..30: mol_type = other DNA
gcattggtggttcaatggtagaattctcgc

SEQ ID NO: 10329 - DNA, 15 bp, synthetic construct
  misc_feature 1..15: note = Probe
  source 1..15: mol_type = other DNA
gcattggtggttcag

SEQ ID NO: 10330 - DNA, 16 bp, synthetic construct
  misc_feature 1..16: note = Probe
  source 1..16: mol_type = other DNA
gcattggtggttcagt

SEQ ID NO: 10331 - DNA, 17 bp, synthetic construct
  misc_feature 1..17: note = Probe
  source 1..17: mol_type = other DNA
gcattggtggttcagtg

SEQ ID NO: 10332 - DNA, 18 bp, synthetic construct
  misc_feature 1..18: note = Probe
  source 1..18: mol_type = other DNA
gcattggtggttcagtgg

SEQ ID NO: 10333 - DNA, 19 bp, synthetic construct
  misc_feature 1..19: note = Probe
  source 1..19: mol_type = other DNA
gcattggtggttcagtggt

SEQ ID NO: 10334 - DNA, 20 bp, synthetic construct
  misc_feature 1..20: note = Probe
  source 1..20: mol_type = other DNA
gcattggtggttcagtggta

SEQ ID NO: 10335 - DNA, 21 bp, synthetic construct
  misc_feature 1..21: note = Probe
  source 1..21: mol_type = other DNA
gcattggtggttcagtggtag

SEQ ID NO: 10336 - DNA, 22 bp, synthetic construct
  misc_feature 1..22: note = Probe
  source 1..22: mol_type = other DNA
gcattggtggttcagtggtaga

SEQ ID NO: 10337 - DNA, 23 bp, synthetic construct
  misc_feature 1..23: note = Probe
  source 1..23: mol_type = other DNA
gcattggtggttcagtggtagaa

SEQ ID NO: 10338 - DNA, 24 bp, synthetic construct
  misc_feature 1..24: note = Probe
  source 1..24: mol_type = other DNA
gcattggtggttcagtggtagaat

SEQ ID NO: 10339 - DNA, 25 bp, synthetic construct
  misc_feature 1..25: note = Probe
  source 1..25: mol_type = other DNA
gcattggtggttcagtggtagaatt

SEQ ID NO: 10340 - DNA, 26 bp, synthetic construct
  misc_feature 1..26: note = Probe
  source 1..26: mol_type = other DNA
gcattggtggttcagtggtagaattc

SEQ ID NO: 10341 - DNA, 27 bp, synthetic construct
  misc_feature 1..27: note = Probe
  source 1..27: mol_type = other DNA
gcattggtggttcagtggtagaattct

SEQ ID NO: 10342 - DNA, 28 bp, synthetic construct
  misc_feature 1..28: note = Probe
  source 1..28: mol_type = other DNA
gcattggtggttcagtggtagaattctc

SEQ ID NO: 10343 - DNA, 29 bp, synthetic construct
  misc_feature 1..29: note = Probe
  source 1..29: mol_type = other DNA
gcattggtggttcagtggtagaattctcg

SEQ ID NO: 10344 - DNA, 30 bp, synthetic construct; identical to SEQ ID NO: 5900
  misc_feature 1..30: note = Probe
  source 1..30: mol_type = other DNA

SEQ ID NO: 10345 - DNA, 27 bp, synthetic construct
  misc_feature 1..27: note = Probe
  source 1..27: mol_type = other DNA
gccaaggtcgcgggttcgatccccgta

SEQ ID NO: 10346 - DNA, 25 bp, synthetic construct
  misc_feature 1..25: note = Probe
  source 1..25: mol_type = other DNA
gccagggattgtgggttcgagtccc

SEQ ID NO: 10347 - DNA, 29 bp, synthetic construct
  misc_feature 1..29: note = Probe
  source 1..29: mol_type = other DNA
gccatgatcgtatagtggttagtactctg

SEQ ID NO: 10348 - DNA, 30 bp, synthetic construct
  misc_feature 1..30: note = Probe
  source 1..30: mol_type = other DNA
gccatgatcgtatagtggttagtactctgc

SEQ ID NO: 10349 - DNA, 30 bp, synthetic construct
  misc_feature 1..30: note = Probe
  source 1..30: mol_type = other DNA
gcccagctagctcagtcggtagagcatgag

SEQ ID NO: 10350 - DNA, 15 bp, synthetic construct
  misc_feature 1..15: note = Probe
  source 1..15: mol_type = other DNA
gccccagtggcctaa

SEQ ID NO: 10351 - DNA, 16 bp, synthetic construct
  misc_feature 1..16: note = Probe
  source 1..16: mol_type = other DNA
gccccagtggcctaat

SEQ ID NO: 10352 - DNA, 17 bp, synthetic construct
  misc_feature 1..17: note = Probe
  source 1..17: mol_type = other DNA
gccccagtggcctaatg

SEQ ID NO: 10353 - DNA, 20 bp, synthetic construct
  misc_feature 1..20: note = Probe
  source 1..20: mol_type = other DNA
gccccagtggcctaatggat

SEQ ID NO: 10354 - DNA, 23 bp, synthetic construct
  misc_feature 1..23: note = Probe
  source 1..23: mol_type = other DNA
gccccagtggcctaatggataag

SEQ ID NO: 10355 - DNA, 24 bp, synthetic construct
  misc_feature 1..24: note = Probe
  source 1..24: mol_type = other DNA
gccccagtggcctaatggataagg

SEQ ID NO: 10356 - DNA, 25 bp, synthetic construct
  misc_feature 1..25: note = Probe
  source 1..25: mol_type = other DNA
gccccagtggcctaatggataaggc

SEQ ID NO: 10357 - DNA, 30 bp, synthetic construct
  misc_feature 1..30: note = Probe
  source 1..30: mol_type = other DNA
gccccagtggcctaatggataaggcattgg

SEQ ID NO: 10358 - DNA, 19 bp, synthetic construct
  misc_feature 1..19: note = Probe
  source 1..19: mol_type = other DNA
gccccagtggcctgatgga

SEQ ID NO: 10359 - DNA, 29 bp, synthetic construct
  misc_feature 1..29: note = Probe
  source 1..29: mol_type = other DNA
gccccatggtgtaatggttagcactctgg

SEQ ID NO: 10360 - DNA, 15 bp, synthetic construct
  misc_feature 1..15: note = Probe
  source 1..15: mol_type = other DNA
gcccccatgtctaac

SEQ ID NO: 10361 - DNA, 16 bp, synthetic construct
  misc_feature 1..16: note = Probe
  source 1..16: mol_type = other DNA
gcccccatgtctaaca

SEQ ID NO: 10362 - DNA, 18 bp, synthetic construct
  misc_feature 1..18: note = Probe
  source 1..18: mol_type = other DNA
gcccccatgtctaacaac

SEQ ID NO: 10363 - DNA, 23 bp, synthetic construct
  misc_feature 1..23: note = Probe
  source 1..23: mol_type = other DNA
gcccccatgtctaacaacatggc

SEQ ID NO: 10364 - DNA, 24 bp, synthetic construct
  misc_feature 1..24: note = Probe
  source 1..24: mol_type = other DNA
gcccccatgtctaacaacatggct

SEQ ID NO: 10365 - DNA, 25 bp, synthetic construct
  misc_feature 1..25: note = Probe
  source 1..25: mol_type = other DNA
gcccccatgtctaacaacatggctt

SEQ ID NO: 10366 - DNA, 27 bp, synthetic construct
  misc_feature 1..27: note = Probe
  source 1..27: mol_type = other DNA
gcccccatgtctaacaacatggctttc

SEQ ID NO: 10367 - DNA, 28 bp, synthetic construct
  misc_feature 1..28: note = Probe
  source 1..28: mol_type = other DNA
gcccccatgtctaacaacatggctttct

SEQ ID NO: 10368 - DNA, 29 bp, synthetic construct
  misc_feature 1..29: note = Probe
  source 1..29: mol_type = other DNA
gcccccatgtctaacaacatggctttctc

SEQ ID NO: 10369 - DNA, 18 bp, synthetic construct
  misc_feature 1..18: note = Probe
  source 1..18: mol_type = other DNA
gccccggtggcctaatgg

SEQ ID NO: 10370 - DNA, 15 bp, synthetic construct
  misc_feature 1..15: note = Probe
  source 1..15: mol_type = other DNA
gcccggatagctcag

SEQ ID NO: 10371 - DNA, 16 bp, synthetic construct
  misc_feature 1..16: note = Probe
  source 1..16: mol_type = other DNA
gcccggatagctcagt

SEQ ID NO: 10372 - DNA, 17 bp, synthetic construct
  misc_feature 1..17: note = Probe
  source 1..17: mol_type = other DNA
gcccggatagctcagtc

SEQ ID NO: 10373 - DNA, 18 bp, synthetic construct
  misc_feature 1..18: note = Probe
  source 1..18: mol_type = other DNA
gcccggatagctcagtcg

SEQ ID NO: 10374 - DNA, 21 bp, synthetic construct
  misc_feature 1..21: note = Probe
  source 1..21: mol_type = other DNA
gcccggatagctcagtcggta

SEQ ID NO: 10375 - DNA, 27 bp, synthetic construct
  misc_feature 1..27: note = Probe
  source 1..27: mol_type = other DNA
gcccggatagctcagtcggtagagcat

SEQ ID NO: 10376 - DNA, 28 bp, synthetic construct
  misc_feature 1..28: note = Probe
  source 1..28: mol_type = other DNA
gcccggatagctcagtcggtagagcatc

SEQ ID NO: 10377 - DNA, 29 bp, synthetic construct
  misc_feature 1..29: note = Probe
  source 1..29: mol_type = other DNA
gcccggatagctcagtcggtagagcatca

SEQ ID NO: 10378 - DNA, 15 bp, synthetic construct
  misc_feature 1..15: note = Probe
  source 1..15: mol_type = other DNA
gcccggctagctcag

SEQ ID NO: 10379 - DNA, 16 bp, synthetic construct
  misc_feature 1..16: note = Probe
  source 1..16: mol_type = other DNA
gcccggctagctcagt

SEQ ID NO: 10380 - DNA, 18 bp, synthetic construct
  misc_feature 1..18: note = Probe
  source 1..18: mol_type = other DNA
gcccggctagctcagtcg

SEQ ID NO: 10381 - DNA, 20 bp, synthetic construct
  misc_feature 1..20: note = Probe
  source 1..20: mol_type = other DNA
gcccggctagctcagtcggt

SEQ ID NO: 10382 - DNA, 21 bp, synthetic construct
  misc_feature 1..21: note = Probe
  source 1..21: mol_type = other DNA
gcccggctagctcagtcggta

SEQ ID NO: 10383 - DNA, 22 bp, synthetic construct
  misc_feature 1..22: note = Probe
  source 1..22: mol_type = other DNA
gcccggctagctcagtcggtag

SEQ ID NO: 10384 - DNA, 23 bp, synthetic construct
  misc_feature 1..23: note = Probe
  source 1..23: mol_type = other DNA
gcccggctagctcagtcggtaga

SEQ ID NO: 10385 - DNA, 24 bp, synthetic construct
  misc_feature 1..24: note = Probe
  source 1..24: mol_type = other DNA
gcccggctagctcagtcggtagag

SEQ ID NO: 10386 - DNA, 26 bp, synthetic construct
  misc_feature 1..26: note = Probe
  source 1..26: mol_type = other DNA
gcccggctagctcagtcggtagagca

SEQ ID NO: 10387 - DNA, 28 bp, synthetic construct
  misc_feature 1..28: note = Probe
  source 1..28: mol_type = other DNA
gcccggctagctcagtcggtagagcatg

SEQ ID NO: 10388 - DNA, 29 bp, synthetic construct
  misc_feature 1..29: note = Probe
  source 1..29: mol_type = other DNA
gcccggctagctcagtcggtagagcatga

SEQ ID NO: 10389 - DNA, 29 bp, synthetic construct
  misc_feature 1..29: note = Probe
  source 1..29: mol_type = other DNA
gcccggctagctcagtcggtagagcatgg

SEQ ID NO: 10390 - DNA, 22 bp, synthetic construct
  misc_feature 1..22: note = Probe
  source 1..22: mol_type = other DNA
gccgaaatagctcagttgggag

SEQ ID NO: 10391 - DNA, 23 bp, synthetic construct
  misc_feature 1..23: note = Probe
  source 1..23: mol_type = other DNA
gccgaaatagctcagttgggaga

SEQ ID NO: 10392 - DNA, 24 bp, synthetic construct
  misc_feature 1..24: note = Probe
  source 1..24: mol_type = other DNA
gccgaaatagctcagttgggagag

SEQ ID NO: 10393 - DNA, 25 bp, synthetic construct
  misc_feature 1..25: note = Probe
  source 1..25: mol_type = other DNA
gccgaaatagctcagttgggagagc

SEQ ID NO: 10394 - DNA, 30 bp, synthetic construct
  misc_feature 1..30: note = Probe
  source 1..30: mol_type = other DNA
gccgaaatagctcagttgggagagcgttag

SEQ ID NO: 10395 - DNA, 30 bp, synthetic construct
  misc_feature 1..30: note = Probe
  source 1..30: mol_type = other DNA
gccgcggcccgggttcgattcccggtcagg

SEQ ID NO: 10396 - DNA, 18 bp, synthetic construct
  misc_feature 1..18: note = Probe
  source 1..18: mol_type = other DNA
gccgcgtggcctaatgga

SEQ ID NO: 10397 - DNA, 19 bp, synthetic construct
  misc_feature 1..19: note = Probe
  source 1..19: mol_type = other DNA
gccgggtactttcgtattt

SEQ ID NO: 10398 - DNA, 20 bp, synthetic construct
  misc_feature 1..20: note = Probe
  source 1..20: mol_type = other DNA
gccgggtactttcgtatttt

SEQ ID NO: 10399 - DNA, 21 bp, synthetic construct
  misc_feature 1..21: note = Probe
  source 1..21: mol_type = other DNA
gccgggtactttcgtattttt

SEQ ID NO: 10400 - DNA, 19 bp, synthetic construct
  misc_feature 1..19: note = Probe
  source 1..19: mol_type = other DNA
gccggttagctcagttggt

SEQ ID NO: 10401 - DNA, 18 bp, synthetic construct
  misc_feature 1..18: note = Probe
  source 1..18: mol_type = other DNA
gccgtgatcgtatagtgg

SEQ ID NO: 10402 - DNA, 19 bp, synthetic construct
  misc_feature 1..19: note = Probe
  source 1..19: mol_type = other DNA
gccgtgatcgtatagtggt

SEQ ID NO: 10403 - DNA, 20 bp, synthetic construct
  misc_feature 1..20: note = Probe
  source 1..20: mol_type = other DNA
gccgtgatcgtatagtggtt

SEQ ID NO: 10404 - DNA, 21 bp, synthetic construct
  misc_feature 1..21: note = Probe
  source 1..21: mol_type = other DNA
gccgtgatcgtatagtggtta

SEQ ID NO: 10405 - DNA, 22 bp, synthetic construct
  misc_feature 1..22: note = Probe
  source 1..22: mol_type = other DNA
gccgtgatcgtatagtggttag

SEQ ID NO: 10406 - DNA, 23 bp, synthetic construct
  misc_feature 1..23: note = Probe
  source 1..23: mol_type = other DNA
gccgtgatcgtatagtggttagt

SEQ ID NO: 10407 - DNA, 24 bp, synthetic construct
  misc_feature 1..24: note = Probe
  source 1..24: mol_type = other DNA
gccgtgatcgtatagtggttagta

SEQ ID NO: 10408 - DNA, 25 bp, synthetic construct
  misc_feature 1..25: note = Probe
  source 1..25: mol_type = other DNA
gccgtgatcgtatagtggttagtac

SEQ ID NO: 10409 - DNA, 26 bp, synthetic construct
  misc_feature 1..26: note = Probe
  source 1..26: mol_type = other DNA
gccgtgatcgtatagtggttagtact

SEQ ID NO: 10410 - DNA, 27 bp, synthetic construct
  misc_feature 1..27: note = Probe
  source 1..27: mol_type = other DNA
gccgtgatcgtatagtggttagtactc

SEQ ID NO: 10411 - DNA, 28 bp, synthetic construct
  misc_feature 1..28: note = Probe
  source 1..28: mol_type = other DNA
gccgtgatcgtatagtggttagtactct

SEQ ID NO: 10412 - DNA, 29 bp, synthetic construct
  misc_feature 1..29: note = Probe
  source 1..29: mol_type = other DNA
gccgtgatcgtatagtggttagtactctg

SEQ ID NO: 10413 - DNA, 24 bp, synthetic construct
  misc_feature 1..24: note = Probe
  source 1..24: mol_type = other DNA
gcctaatggataaggcatcagcct

SEQ ID NO: 10414 - DNA, 25 bp, synthetic construct
  misc_feature 1..25: note = Probe
  source 1..25: mol_type = other DNA
gcctaatggataaggcatcagcctc

SEQ ID NO: 10415 - DNA, 23 bp, synthetic construct
  misc_feature 1..23: note = Probe
  source 1..23: mol_type = other DNA
gcctcctaagccagggattgtgg

SEQ ID NO: 10416 - DNA, 24 bp, synthetic construct
  misc_feature 1..24: note = Probe
  source 1..24: mol_type = other DNA
gcctcctaagccagggattgtggg

SEQ ID NO: 10417 - DNA, 25 bp, synthetic construct
  misc_feature 1..25: note = Probe
  source 1..25: mol_type = other DNA
gcctcctaagccagggattgtgggt

SEQ ID NO: 10418 - DNA, 19 bp, synthetic construct
  misc_feature 1..19: note = Probe
  source 1..19: mol_type = other DNA
gcctccttagcgcagtagg

SEQ ID NO: 10419 - DNA, 18 bp, synthetic construct
  misc_feature 1..18: note = Probe
  source 1..18: mol_type = other DNA
gcctcgttagcgcagtag

SEQ ID NO: 10420 - DNA, 19 bp, synthetic construct
  misc_feature 1..19: note = Probe
  source 1..19: mol_type = other DNA
gcctcgttagcgcagtagg

SEQ ID NO: 10421 - DNA, 24 bp, synthetic construct
  misc_feature 1..24: note = Probe
  source 1..24: mol_type = other DNA
gcctcgttagcgcagtaggtagcg

SEQ ID NO: 10422 - DNA, 30 bp, synthetic construct
  misc_feature 1..30: note = Probe
  source 1..30: mol_type = other DNA
gcctcgttagcgcagtaggtagcgcgtcag

SEQ ID NO: 10423 - DNA, 19 bp, synthetic construct
  misc_feature 1..19: note = Probe
  source 1..19: mol_type = other DNA
gcctggatagctcagtcgg

SEQ ID NO: 10424 - DNA, 24 bp, synthetic construct
  misc_feature 1..24: note = Probe
  source 1..24: mol_type = other DNA
gcctggatagctcagtcggtagag

SEQ ID NO: 10425 - DNA, 30 bp, synthetic construct
  misc_feature 1..30: note = Probe
  source 1..30: mol_type = other DNA
gcctggatagctcagtcggtagagcatcag

SEQ ID NO: 10426 - DNA, 19 bp, synthetic construct
  misc_feature 1..19: note = Probe
  source 1..19: mol_type = other DNA
gccttggtggtgcagtggt

SEQ ID NO: 10427 - DNA, 21 bp, synthetic construct
  misc_feature 1..21: note = Probe
  source 1..21: mol_type = other DNA
gccttggtggtgcagtggtag

SEQ ID NO: 10428 - DNA, 22 bp, synthetic construct
  misc_feature 1..22: note = Probe
  source 1..22: mol_type = other DNA
gccttggtggtgcagtggtaga

SEQ ID NO: 10429 - DNA, 23 bp, synthetic construct
  misc_feature 1..23: note = Probe
  source 1..23: mol_type = other DNA
gccttggtggtgcagtggtagaa

SEQ ID NO: 10430 - DNA, 24 bp, synthetic construct
  misc_feature 1..24: note = Probe
  source 1..24: mol_type = other DNA
gccttggtggtgcagtggtagaat

SEQ ID NO: 10431 - DNA, 25 bp, synthetic construct
  misc_feature 1..25: note = Probe
  source 1..25: mol_type = other DNA
gccttggtggtgcagtggtagaatt

SEQ ID NO: 10432 - DNA, 27 bp, synthetic construct
  misc_feature 1..27: note = Probe
  source 1..27: mol_type = other DNA
gccttggtggtgcagtggtagaattct

SEQ ID NO: 10433 - DNA, 28 bp, synthetic construct
  misc_feature 1..28: note = Probe
  source 1..28: mol_type = other DNA
gccttggtggtgcagtggtagaattctc

SEQ ID NO: 10434 - DNA, 29 bp, synthetic construct
  misc_feature 1..29: note = Probe
  source 1..29: mol_type = other DNA
gccttggtggtgcagtggtagaattctcg

SEQ ID NO: 10435 - DNA, 30 bp, synthetic construct
  misc_feature 1..30: note = Probe
  source 1..30: mol_type = other DNA
gccttggtggtgcagtggtagaattctcgc

SEQ ID NO: 10436 - DNA, 15 bp, synthetic construct
  misc_feature 1..15: note = Probe
  source 1..15: mol_type = other DNA
gcgaaaggtccccgg

SEQ ID NO: 10437 - DNA, 30 bp, synthetic construct
  misc_feature 1..30: note = Probe
  source 1..30: mol_type = other DNA
gcgaaaggtccccggttcgaaaccgggcgg

SEQ ID NO: 10438 - DNA, 24 bp, synthetic construct
  misc_feature 1..24: note = Probe
  source 1..24: mol_type = other DNA
gcgacccgggttcgattcccgggc

SEQ ID NO: 10439 - DNA, 26 bp, synthetic construct
  misc_feature 1..26: note = Probe
  source 1..26: mol_type = other DNA
gcgacccgggttcgattcccgggcgg

SEQ ID NO: 10440 - DNA, 27 bp, synthetic construct
  misc_feature 1..27: note = Probe
  source 1..27: mol_type = other DNA
gcgacccgggttcgattcccgggcggc

SEQ ID NO: 10441 - DNA, 28 bp, synthetic construct
  misc_feature 1..28: note = Probe
  source 1..28: mol_type = other DNA
gcgacccgggttcgattcccgggcggcg

SEQ ID NO: 10442 - DNA, 29 bp, synthetic construct
  misc_feature 1..29: note = Probe
  source 1..29: mol_type = other DNA
gcgacccgggttcgattcccgggcggcgc

SEQ ID NO: 10443 - DNA, 30 bp, synthetic construct
  misc_feature 1..30: note = Probe
  source 1..30: mol_type = other DNA
gcgagaggtcccgggttcaaatcccggacg

SEQ ID NO: 10444 - DNA, 26 bp, synthetic construct
  misc_feature 1..26: note = Probe
  source 1..26: mol_type = other DNA
gcgagttcaaatctcgctggggcctc

SEQ ID NO: 10445 - DNA, 22 bp, synthetic construct
  misc_feature 1..22: note = Probe
  source 1..22: mol_type = other DNA
gcgcagcggaagcgtgctgggc

SEQ ID NO: 10446 - DNA, 15 bp, synthetic construct
  misc_feature 1..15: note = Probe
  source 1..15: mol_type = other DNA
gcgccgctggtgtag

SEQ ID NO: 10447 - DNA, 17 bp, synthetic construct
  misc_feature 1..17: note = Probe
  source 1..17: mol_type = other DNA
gcgccgctggtgtagtg

SEQ ID NO: 10448 - DNA, 19 bp, synthetic construct
  misc_feature 1..19: note = Probe
  source 1..19: mol_type = other DNA
gcgccgctggtgtagtggt

SEQ ID NO: 10449 - DNA, 23 bp, synthetic construct
  misc_feature 1..23: note = Probe
  source 1..23: mol_type = other DNA
gcgccgctggtgtagtggtatca

SEQ ID NO: 10450 - DNA, 24 bp, synthetic construct
  misc_feature 1..24: note = Probe
  source 1..24: mol_type = other DNA
gcgccgctggtgtagtggtatcat

SEQ ID NO: 10451 - DNA, 25 bp, synthetic construct
  misc_feature 1..25: note = Probe
  source 1..25: mol_type = other DNA
gcgccgctggtgtagtggtatcatg

SEQ ID NO: 10452 - DNA, 26 bp, synthetic construct
  misc_feature 1..26: note = Probe
  source 1..26: mol_type = other DNA
gcgccgctggtgtagtggtatcatgc

SEQ ID NO: 10453 - DNA, 28 bp, synthetic construct
  misc_feature 1..28: note = Probe
  source 1..28: mol_type = other DNA
gcgccgctggtgtagtggtatcatgcaa

SEQ ID NO: 10454 - DNA, 17 bp, synthetic construct
  misc_feature 1..17: note = Probe
  source 1..17: mol_type = other DNA
gcggaagcgtgctgggc

SEQ ID NO: 10455 - DNA, 18 bp, synthetic construct
  misc_feature 1..18: note = Probe
  source 1..18: mol_type = other DNA
gcggaagcgtgctgggcc

SEQ ID NO: 10456 - DNA, 29 bp, synthetic construct
  misc_feature 1..29: note = Probe
  source 1..29: mol_type = other DNA
gcggcccgggttcgactcccggtgtggga

SEQ ID NO: 10457 - DNA, 29 bp, synthetic construct
  misc_feature 1..29: note = Probe
  source 1..29: mol_type = other DNA
gcggcccgggttcgattcccggtcaggga

SEQ ID NO: 10458 - DNA, 30 bp, synthetic construct; identical to SEQ ID NO: 1169
  misc_feature 1..30: note = Probe
  source 1..30: mol_type = other DNA

SEQ ID NO: 10459 - DNA, 29 bp, synthetic construct
  misc_feature 1..29: note = Probe
  source 1..29: mol_type = other DNA
gcgggaggcccgggttcgattcccggcca

SEQ ID NO: 10460 - DNA, 20 bp, synthetic construct
  misc_feature 1..20: note = Probe
  source 1..20: mol_type = other DNA
gcggtctaaggcgctgcgtt

SEQ ID NO: 10461 - DNA, 21 bp, synthetic construct
  misc_feature 1..21: note = Probe
  source 1..21: mol_type = other DNA
gcggtctaaggcgctgcgttc

SEQ ID NO: 10462 - DNA, 17 bp, synthetic construct
  misc_feature 1..17: note = Probe
  source 1..17: mol_type = other DNA
gcggttaggattcctgg

SEQ ID NO: 10463 - DNA, 18 bp, synthetic construct
  misc_feature 1..18: note = Probe
  source 1..18: mol_type = other DNA
gcggttaggattcctggt

SEQ ID NO: 10464 - DNA, 19 bp, synthetic construct
  misc_feature 1..19: note = Probe
  source 1..19: mol_type = other DNA
gcggttaggattcctggtt

SEQ ID NO: 10465 - DNA, 20 bp, synthetic construct
  misc_feature 1..20: note = Probe
  source 1..20: mol_type = other DNA
gcggttaggattcctggttt

SEQ ID NO: 10466 - DNA, 21 bp, synthetic construct
  misc_feature 1..21: note = Probe
  source 1..21: mol_type = other DNA
gcggttaggattcctggtttt

SEQ ID NO: 10467 - DNA, 22 bp, synthetic construct
  misc_feature 1..22: note = Probe
  source 1..22: mol_type = other DNA
gcggttaggattcctggttttc

SEQ ID NO: 10468 - DNA, 21 bp, synthetic construct
  misc_feature 1..21: note = Probe
  source 1..21: mol_type = other DNA
gcgtggcctaatggataaggc

SEQ ID NO: 10469 - DNA, 21 bp, synthetic construct
  misc_feature 1..21: note = Probe
  source 1..21: mol_type = other DNA
gcgttcaggtcgcagtctccc

SEQ ID NO: 10470 - DNA, 24 bp, synthetic construct
  misc_feature 1..24: note = Probe
  source 1..24: mol_type = other DNA
gcgttcgattcccggtcagggaac

SEQ ID NO: 10471 - DNA, 15 bp, synthetic construct
  misc_feature 1..15: note = Probe
  source 1..15: mol_type = other DNA
gcgttggtggtatag

SEQ ID NO: 10472 - DNA, 16 bp, synthetic construct
  misc_feature 1..16: note = Probe
  source 1..16: mol_type = other DNA
gcgttggtggtatagt

SEQ ID NO: 10473 - DNA, 17 bp, synthetic construct
  misc_feature 1..17: note = Probe
  source 1..17: mol_type = other DNA
gcgttggtggtatagtg

SEQ ID NO: 10474 - DNA, 18 bp, synthetic construct
  misc_feature 1..18: note = Probe
  source 1..18: mol_type = other DNA
gcgttggtggtatagtgg

SEQ ID NO: 10475 - DNA, 19 bp, synthetic construct
  misc_feature 1..19: note = Probe
  source 1..19: mol_type = other DNA
gcgttggtggtatagtggt

SEQ ID NO: 10476 - DNA, 20 bp, synthetic construct
  misc_feature 1..20: note = Probe
  source 1..20: mol_type = other DNA
gcgttggtggtatagtggta

SEQ ID NO: 10477 - DNA, 23 bp, synthetic construct
  misc_feature 1..23: note = Probe
  source 1..23: mol_type = other DNA
gcgttggtggtatagtggtaagc

SEQ ID NO: 10478 - DNA, 24 bp, synthetic construct
  misc_feature 1..24: note = Probe
  source 1..24: mol_type = other DNA
gcgttggtggtatagtggtaagca

SEQ ID NO: 10479 - DNA, 26 bp, synthetic construct
  misc_feature 1..26: note = Probe
  source 1..26: mol_type = other DNA
gcgttggtggtatagtggtaagcata

SEQ ID NO: 10480 - DNA, 28 bp, synthetic construct
  misc_feature 1..28: note = Probe
  source 1..28: mol_type = other DNA
gcgttggtggtatagtggtaagcatagc

SEQ ID NO: 10481 - DNA, 30 bp, synthetic construct; identical to SEQ ID NO: 1183
  misc_feature 1..30: note = Probe
  source 1..30: mol_type = other DNA

SEQ ID NO: 10482 - DNA, 20 bp, synthetic construct
  misc_feature 1..20: note = Probe
  source 1..20: mol_type = other DNA
gcgttggtggtatagtggtg

SEQ ID NO: 10483 - DNA, 21 bp, synthetic construct
  misc_feature 1..21: note = Probe
  source 1..21: mol_type = other DNA
gcgttggtggtatagtggtga

SEQ ID NO: 10484 - DNA, 22 bp, synthetic construct
  misc_feature 1..22: note = Probe
  source 1..22: mol_type = other DNA
gcgttggtggtatagtggtgag

SEQ ID NO: 10485 - DNA, 23 bp, synthetic construct
  misc_feature 1..23: note = Probe
  source 1..23: mol_type = other DNA
gcgttggtggtatagtggtgagc

SEQ ID NO: 10486 - DNA, 24 bp, synthetic construct
  misc_feature 1..24: note = Probe
  source 1..24: mol_type = other DNA
gcgttggtggtatagtggtgagca

SEQ ID NO: 10487 - DNA, 25 bp, synthetic construct
  misc_feature 1..25: note = Probe
  source 1..25: mol_type = other DNA
gcgttggtggtatagtggtgagcat

SEQ ID NO: 10488 - DNA, 26 bp, synthetic construct
  misc_feature 1..26: note = Probe
  source 1..26: mol_type = other DNA
gcgttggtggtatagtggtgagcata

SEQ ID NO: 10489 - DNA, 27 bp, synthetic construct
  misc_feature 1..27: note = Probe
  source 1..27: mol_type = other DNA
gcgttggtggtatagtggtgagcatag

SEQ ID NO: 10490 - DNA, 28 bp, synthetic construct
  misc_feature 1..28: note = Probe
  source 1..28: mol_type = other DNA
gcgttggtggtatagtggtgagcatagc

SEQ ID NO: 10491 - DNA, 29 bp, synthetic construct
  misc_feature 1..29: note = Probe
  source 1..29: mol_type = other DNA
gcgttggtggtatagtggtgagcatagct

SEQ ID NO: 10492 - DNA, 30 bp, synthetic construct; identical to SEQ ID NO: 6150
  misc_feature 1..30: note = Probe
  source 1..30: mol_type = other DNA

SEQ ID NO: 10493 - DNA, 28 bp, synthetic construct
  misc_feature 1..28: note = Probe
  source 1..28: mol_type = other DNA
gcgttggtggtatagtggtgagcatagt

SEQ ID NO: 10494 - DNA, 20 bp, synthetic construct
  misc_feature 1..20: note = Probe
  source 1..20: mol_type = other DNA
gcgttggtggtatagtggtt

SEQ ID NO: 10495 - DNA, 21 bp, synthetic construct
  misc_feature 1..21: note = Probe
  source 1..21: mol_type = other DNA
gcgttggtggtatagtggtta

SEQ ID NO: 10496 - DNA, 22 bp, synthetic construct
  misc_feature 1..22: note = Probe
  source 1..22: mol_type = other DNA
gcgttggtggtatagtggttag

SEQ ID NO: 10497 - DNA, 23 bp, synthetic construct
  misc_feature 1..23: note = Probe
  source 1..23: mol_type = other DNA
gcgttggtggtatagtggttagc

SEQ ID NO: 10498 - DNA, 24 bp, synthetic construct
  misc_feature 1..24: note = Probe
  source 1..24: mol_type = other DNA
gcgttggtggtatagtggttagca

SEQ ID NO: 10499 - DNA, 25 bp, synthetic construct
  misc_feature 1..25: note = Probe
  source 1..25: mol_type = other DNA
gcgttggtggtatagtggttagcat

SEQ ID NO: 10500 - DNA, 26 bp, synthetic construct
  misc_feature 1..26: note = Probe
  source 1..26: mol_type = other DNA
gcgttggtggtatagtggttagcata

SEQ ID NO: 10501 - DNA, 27 bp, synthetic construct
  misc_feature 1..27: note = Probe
  source 1..27: mol_type = other DNA
gcgttggtggtatagtggttagcatag

SEQ ID NO: 10502 - DNA, 28 bp, synthetic construct
  misc_feature 1..28: note = Probe
  source 1..28: mol_type = other DNA
gcgttggtggtatagtggttagcatagc

SEQ ID NO: 10503 - DNA, 29 bp, synthetic construct
  misc_feature 1..29: note = Probe
  source 1..29: mol_type = other DNA
gcgttggtggtatagtggttagcatagct

SEQ ID NO: 10504 - DNA, 30 bp, synthetic construct; identical to SEQ ID NO: 6172
  misc_feature 1..30: note = Probe
  source 1..30: mol_type = other DNA

SEQ ID NO: 10505 - DNA, 19 bp, synthetic construct
  misc_feature 1..19: note = Probe
  source 1..19: mol_type = other DNA
gcgttggtggtttagtggt

SEQ ID NO: 10506 - DNA, 22 bp, synthetic construct
  misc_feature 1..22: note = Probe
  source 1..22: mol_type = other DNA
gcgttggtggtttagtggtaga

SEQ ID NO: 10507 - DNA, 24 bp, synthetic construct
  misc_feature 1..24: note = Probe
  source 1..24: mol_type = other DNA
gcgttggtggtttagtggtagaat

SEQ ID NO: 10508 - DNA, 25 bp, synthetic construct
  misc_feature 1..25: note = Probe
  source 1..25: mol_type = other DNA
gcgttggtggtttagtggtagaatt

SEQ ID NO: 10509 - DNA, 27 bp, synthetic construct
  misc_feature 1..27: note = Probe
  source 1..27: mol_type = other DNA
gcgttggtggtttagtggtagaattct

SEQ ID NO: 10510 - DNA, 28 bp, synthetic construct
  misc_feature 1..28: note = Probe
  source 1..28: mol_type = other DNA
gcgttggtggtttagtggtagaattctc

SEQ ID NO: 10511 - DNA, 29 bp, synthetic construct
  misc_feature 1..29: note = Probe
  source 1..29: mol_type = other DNA
gcgttggtggtttagtggtagaattctcg

SEQ ID NO: 10512 - DNA, 30 bp, synthetic construct
  misc_feature 1..30: note = Probe
  source 1..30: mol_type = other DNA
gcgttggtggtttagtggtagaattctcgc

SEQ ID NO: 10513 - DNA, 15 bp, synthetic construct
  misc_feature 1..15: note = Probe
  source 1..15: mol_type = other DNA
gctaaacctagcccc

SEQ ID NO: 10514 - DNA, 17 bp, synthetic construct
  misc_feature 1..17: note = Probe
  source 1..17: mol_type = other DNA
gctaaacctagccccaa

SEQ ID NO: 10515 - DNA, 18 bp, synthetic construct
  misc_feature 1..18: note = Probe
  source 1..18: mol_type = other DNA
gctaaacctagccccaaa

SEQ ID NO: 10516 - DNA, 19 bp, synthetic construct
  misc_feature 1..19: note = Probe
  source 1..19: mol_type = other DNA
gctaaacctagccccaaac

SEQ ID NO: 10517 - DNA, 20 bp, synthetic construct
  misc_feature 1..20: note = Probe
  source 1..20: mol_type = other DNA
gctaaacctagccccaaacc

SEQ ID NO: 10518 - DNA, 21 bp, synthetic construct
  misc_feature 1..21: note = Probe
  source 1..21: mol_type = other DNA
gctaaacctagccccaaaccc

SEQ ID NO: 10519 - DNA, 22 bp, synthetic construct
  misc_feature 1..22: note = Probe
  source 1..22: mol_type = other DNA
gctaaacctagccccaaaccca

SEQ ID NO: 10520 - DNA, 23 bp, synthetic construct
  misc_feature 1..23: note = Probe
  source 1..23: mol_type = other DNA
gctaaacctagccccaaacccac

SEQ ID NO: 10521 - DNA, 24 bp, synthetic construct
  misc_feature 1..24: note = Probe
  source 1..24: mol_type = other DNA
gctaaacctagccccaaacccact

SEQ ID NO: 10522 - DNA, 25 bp, synthetic construct
  misc_feature 1..25: note = Probe
  source 1..25: mol_type = other DNA
gctaaacctagccccaaacccactc

SEQ ID NO: 10523 - DNA, 26 bp, synthetic construct
  misc_feature 1..26: note = Probe
  source 1..26: mol_type = other DNA
gctaaacctagccccaaacccactcc

SEQ ID NO: 10524 - DNA, 27 bp, synthetic construct
  misc_feature 1..27: note = Probe
  source 1..27: mol_type = other DNA
gctaaacctagccccaaacccactcca

SEQ ID NO: 10525 - DNA, 28 bp, synthetic construct
  misc_feature 1..28: note = Probe
  source 1..28: mol_type = other DNA
gctaaacctagccccaaacccactccac

SEQ ID NO: 10526 - DNA, 29 bp, synthetic construct
  misc_feature 1..29: note = Probe
  source 1..29: mol_type = other DNA
gctaaacctagccccaaacccactccacc

SEQ ID NO: 10527 - DNA, 30 bp, synthetic construct; identical to SEQ ID NO: 6203
  misc_feature 1..30: note = Probe
  source 1..30: mol_type = other DNA

SEQ ID NO: 10528 - DNA, 21 bp, synthetic construct
  misc_feature 1..21: note = Probe
  source 1..21: mol_type = other DNA
gctaactcatgcccccatgtc

SEQ ID NO: 10529 - DNA, 22 bp, synthetic construct
  misc_feature 1..22: note = Probe
  source 1..22: mol_type = other DNA
gctaactcatgcccccatgtct

SEQ ID NO: 10530 - DNA, 16 bp, synthetic construct
  misc_feature 1..16: note = Probe
  source 1..16: mol_type = other DNA
gctaatggtggagtta

SEQ ID NO: 10531 - DNA, 30 bp, synthetic construct
  misc_feature 1..30: note = Probe
  source 1..30: mol_type = other DNA
gctaatggtggagttaaagactttttctct

SEQ ID NO: 10532 - DNA, 27 bp, synthetic construct
  misc_feature 1..27: note = Probe
  source 1..27: mol_type = other DNA
gctagctcagtcggtagagcatgagac

SEQ ID NO: 10533 - DNA, 28 bp, synthetic construct
  misc_feature 1..28: note = Probe
  source 1..28: mol_type = other DNA
gctagctcagtcggtagagcatgagact

SEQ ID NO: 10534 - DNA, 19 bp, synthetic construct
  misc_feature 1..19: note = Probe
  source 1..19: mol_type = other DNA
gctcacaagaactgctaac

SEQ ID NO: 10535 - DNA, 20 bp, synthetic construct
  misc_feature 1..20: note = Probe
  source 1..20: mol_type = other DNA
gctcacaagaactgctaact

SEQ ID NO: 10536 - DNA, 21 bp, synthetic construct
  misc_feature 1..21: note = Probe
  source 1..21: mol_type = other DNA
gctcacaagaactgctaactc

SEQ ID NO: 10537 - DNA, 23 bp, synthetic construct
  misc_feature 1..23: note = Probe
  source 1..23: mol_type = other DNA
gctcaggggtagagcatttgact

SEQ ID NO: 10538 - DNA, 24 bp, synthetic construct
  misc_feature 1..24: note = Probe
  source 1..24: mol_type = other DNA
gctcaggggtagagcatttgactg

SEQ ID NO: 10539 - DNA, 21 bp, synthetic construct
  misc_feature 1..21: note = Probe
  source 1..21: mol_type = other DNA
gctcagtcggtagagcatcag

SEQ ID NO: 10540 - DNA, 19 bp, synthetic construct
  misc_feature 1..19: note = Probe
  source 1..19: mol_type = other DNA
gctcagtcggtagagcatg

SEQ ID NO: 10541 - DNA, 24 bp, synthetic construct
  misc_feature 1..24: note = Probe
  source 1..24: mol_type = other DNA
gctcagtcggtagagcatgagact

SEQ ID NO: 10542 - DNA, 24 bp, synthetic construct
  misc_feature 1..24: note = Probe
  source 1..24: mol_type = other DNA
gctcagtgggtagagcatttgact

SEQ ID NO: 10543 - DNA, 25 bp, synthetic construct
  misc_feature 1..25: note = Probe
  source 1..25: mol_type = other DNA
gctcagtgggtagagcatttgactg

SEQ ID NO: 10544 - DNA, 20 bp, synthetic construct
  misc_feature 1..20: note = Probe
  source 1..20: mol_type = other DNA
gctcagtggtagagcatttg

SEQ ID NO: 10545 - DNA, 22 bp, synthetic construct
  misc_feature 1..22: note = Probe
  source 1..22: mol_type = other DNA
gctcagtggtagagcatttgac

SEQ ID NO: 10546 - DNA, 23 bp, synthetic construct
  misc_feature 1..23: note = Probe
  source 1..23: mol_type = other DNA
gctcagtggtagagcatttgact

SEQ ID NO: 10547 - DNA, 24 bp, synthetic construct
  misc_feature 1..24: note = Probe
  source 1..24: mol_type = other DNA
gctcagtggtagagcatttgactg

SEQ ID NO: 10548 - DNA, 25 bp, synthetic construct
  misc_feature 1..25: note = Probe
  source 1..25: mol_type = other DNA
gctcagtggtagagcatttgactgc

SEQ ID NO: 10549 - DNA, 17 bp, synthetic construct
  misc_feature 1..17: note = Probe
  source 1..17: mol_type = other DNA
gctccagtctcttcggg

SEQ ID NO: 10550 - DNA, 20 bp, synthetic construct
  misc_feature 1..20: note = Probe
  source 1..20: mol_type = other DNA
gctccagtctcttcgggggc

SEQ ID NO: 10551 - DNA, 23 bp, synthetic construct
  misc_feature 1..23: note = Probe
  source 1..23: mol_type = other DNA
gctccagtctcttcgggggcgtg

SEQ ID NO: 10552 - DNA, 18 bp, synthetic construct
  misc_feature 1..18: note = Probe
  source 1..18: mol_type = other DNA
gctccagtggcgcaatcg

SEQ ID NO: 10553 - DNA, 19 bp, synthetic construct
  misc_feature 1..19: note = Probe
  source 1..19: mol_type = other DNA
gctccagtggcgcaatcgg

SEQ ID NO: 10554 - DNA, 20 bp, synthetic construct
  misc_feature 1..20: note = Probe
  source 1..20: mol_type = other DNA
gctccagtggcgcaatcggt

SEQ ID NO: 10555 - DNA, 21 bp, synthetic construct
  misc_feature 1..21: note = Probe
  source 1..21: mol_type = other DNA
gctccagtggcgcaatcggtt

SEQ ID NO: 10556 - DNA, 23 bp, synthetic construct
  misc_feature 1..23: note = Probe
  source 1..23: mol_type = other DNA
gctccagtggcgcaatcggttag

SEQ ID NO: 10557 - DNA, 20 bp, synthetic construct
  misc_feature 1..20: note = Probe
  source 1..20: mol_type = other DNA
gctccgaggtgattttcata

SEQ ID NO: 10558 - DNA, 18 bp, synthetic construct
  misc_feature 1..18: note = Probe
  source 1..18: mol_type = other DNA
gctccgtggcgcaatgga

SEQ ID NO: 10559 - DNA, 24 bp, synthetic construct
  misc_feature 1..24: note = Probe
  source 1..24: mol_type = other DNA
gctcgttggtctaggggtatgatt

SEQ ID NO: 10560 - DNA, 18 bp, synthetic construct
  misc_feature 1..18: note = Probe
  source 1..18: mol_type = other DNA
gctctgtggcgcaatgga

SEQ ID NO: 10561 - DNA, 19 bp, synthetic construct
  misc_feature 1..19: note = Probe
  source 1..19: mol_type = other DNA
gctgagtgaagcattggac

SEQ ID NO: 10562 - DNA, 22 bp, synthetic construct
  misc_feature 1..22: note = Probe
  source 1..22: mol_type = other DNA
gctgagtgaagcattggactgt

SEQ ID NO: 10563 - DNA, 23 bp, synthetic construct
  misc_feature 1..23: note = Probe
  source 1..23: mol_type = other DNA
gctgagtgaagcattggactgta

SEQ ID NO: 10564 - DNA, 24 bp, synthetic construct
  misc_feature 1..24: note = Probe
  source 1..24: mol_type = other DNA
gctgagtgaagcattggactgtaa

SEQ ID NO: 10565 - DNA, 24 bp, synthetic construct
  misc_feature 1..24: note = Probe
  source 1..24: mol_type = other DNA
gctggtgtagtggtatcatgcaag

SEQ ID NO: 10566 - DNA, 27 bp, synthetic construct
  misc_feature 1..27: note = Probe
  source 1..27: mol_type = other DNA
gctggtgtagtggtatcatgcaagatt

SEQ ID NO: 10567 - DNA, 28 bp, synthetic construct
  misc_feature 1..28: note = Probe
  source 1..28: mol_type = other DNA
gctggtgtagtggtatcatgcaagattc

SEQ ID NO: 10568 - DNA, 17 bp, synthetic construct
  misc_feature 1..17: note = Probe
  source 1..17: mol_type = other DNA
gctgtaggaatactttt

SEQ ID NO: 10569 - DNA, 24 bp, synthetic construct
  misc_feature 1..24: note = Probe
  source 1..24: mol_type = other DNA
gctgtgatggccgagtggttaagg

SEQ ID NO: 10570 - DNA, 30 bp, synthetic construct
  misc_feature 1..30: note = Probe
  source 1..30: mol_type = other DNA
gctgtgatggccgagtggttaaggcgttgg

SEQ ID NO: 10571 - DNA, 30 bp, synthetic construct
  misc_feature 1..30: note = Probe
  source 1..30: mol_type = other DNA
gctgtgatggccgagtggttaaggtgttgg

SEQ ID NO: 10572 - DNA, 15 bp, synthetic construct
  misc_feature 1..15: note = Probe
  source 1..15: mol_type = other DNA
gcttctgtagtgtag

SEQ ID NO: 10573 - DNA, 18 bp, synthetic construct
  misc_feature 1..18: note = Probe
  source 1..18: mol_type = other DNA
gcttctgtagtgtagtgg

SEQ ID NO: 10574 - DNA, 19 bp, synthetic construct
  misc_feature 1..19: note = Probe
  source 1..19: mol_type = other DNA
gcttctgtagtgtagtggt

SEQ ID NO: 10575 - DNA, 22 bp, synthetic construct
  misc_feature 1..22: note = Probe
  source 1..22: mol_type = other DNA
gcttctgtagtgtagtggttat

SEQ ID NO: 10576 - DNA, 24 bp, synthetic construct
  misc_feature 1..24: note = Probe
  source 1..24: mol_type = other DNA
gcttctgtagtgtagtggttatca

SEQ ID NO: 10577 - DNA, 25 bp, synthetic construct
  misc_feature 1..25: note = Probe
  source 1..25: mol_type = other DNA
gcttctgtagtgtagtggttatcac

SEQ ID NO: 10578 - DNA, 26 bp, synthetic construct
  misc_feature 1..26: note = Probe
  source 1..26: mol_type = other DNA
gcttctgtagtgtagtggttatcacg

SEQ ID NO: 10579 - DNA, 28 bp, synthetic construct
  misc_feature 1..28: note = Probe
  source 1..28: mol_type = other DNA
gcttctgtagtgtagtggttatcacgtt

SEQ ID NO: 10580 - DNA, 29 bp, synthetic construct
  misc_feature 1..29: note = Probe
  source 1..29: mol_type = other DNA
gcttctgtagtgtagtggttatcacgttc

SEQ ID NO: 10581 - DNA, 25 bp, synthetic construct
  misc_feature 1..25: note = Probe
  source 1..25: mol_type = other DNA
gctttgcacgtatgaggccccgggt

SEQ ID NO: 10582 - DNA, 25 bp, synthetic construct
  misc_feature 1..25: note = Probe
  source 1..25: mol_type = other DNA
gctttgcatgtatgaggccccgggt

SEQ ID NO: 10583 - DNA, 22 bp, synthetic construct
  misc_feature 1..22: note = Probe
  source 1..22: mol_type = other DNA
ggaaagtgcacttggacgaacc

SEQ ID NO: 10584 - DNA, 15 bp, synthetic construct
  misc_feature 1..15: note = Probe
  source 1..15: mol_type = other DNA
ggaatgtcagctttt

SEQ ID NO: 10585 - DNA, 15 bp, synthetic construct
  misc_feature 1..15: note = Probe
  source 1..15: mol_type = other DNA
ggactatgagaatcg

SEQ ID NO: 10586 - DNA, 17 bp, synthetic construct
  misc_feature 1..17: note = Probe
  source 1..17: mol_type = other DNA
ggactatgagaatcgaa

SEQ ID NO: 10587 - DNA, 18 bp, synthetic construct
  misc_feature 1..18: note = Probe
  source 1..18: mol_type = other DNA
ggactatgagaatcgaac

SEQ ID NO: 10588 - DNA, 19 bp, synthetic construct
  misc_feature 1..19: note = Probe
  source 1..19: mol_type = other DNA
ggactatgagaatcgaacc

SEQ ID NO: 10589 - DNA, 20 bp, synthetic construct
  misc_feature 1..20: note = Probe
  source 1..20: mol_type = other DNA
ggactatgagaatcgaaccc

SEQ ID NO: 10590 - DNA, 21 bp, synthetic construct
  misc_feature 1..21: note = Probe
  source 1..21: mol_type = other DNA
ggactatgagaatcgaaccca

SEQ ID NO: 10591 - DNA, 22 bp, synthetic construct
  misc_feature 1..22: note = Probe
  source 1..22: mol_type = other DNA
ggactatgagaatcgaacccat

SEQ ID NO: 10592 - DNA, 23 bp, synthetic construct
  misc_feature 1..23: note = Probe
  source 1..23: mol_type = other DNA
ggactatgagaatcgaacccatc

SEQ ID NO: 10593 - DNA, 24 bp, synthetic construct
  misc_feature 1..24: note = Probe
  source 1..24: mol_type = other DNA
ggactatgagaatcgaacccatcc

SEQ ID NO: 10594 - DNA, 25 bp, synthetic construct
  misc_feature 1..25: note = Probe
  source 1..25: mol_type = other DNA
ggactatgagaatcgaacccatccc

SEQ ID NO: 10595 - DNA, 26 bp, synthetic construct
  misc_feature 1..26: note = Probe
  source 1..26: mol_type = other DNA
ggactatgagaatcgaacccatccct

SEQ ID NO: 10596 - DNA, 27 bp, synthetic construct
  misc_feature 1..27: note = Probe
  source 1..27: mol_type = other DNA
ggactatgagaatcgaacccatccctg

SEQ ID NO: 10597 - DNA, 28 bp, synthetic construct
  misc_feature 1..28: note = Probe
  source 1..28: mol_type = other DNA
ggactatgagaatcgaacccatccctga

SEQ ID NO: 10598 - DNA, 29 bp, synthetic construct
  misc_feature 1..29: note = Probe
  source 1..29: mol_type = other DNA
ggactatgagaatcgaacccatccctgag

SEQ ID NO: 10599 - DNA, 16 bp, synthetic construct
  misc_feature 1..16: note = Probe
  source 1..16: mol_type = other DNA
ggactctgaatccagc

SEQ ID NO: 10600 - DNA, 17 bp, synthetic construct
  misc_feature 1..17: note = Probe
  source 1..17: mol_type = other DNA
ggactctgaatccagcg

SEQ ID NO: 10601 - DNA, 20 bp, synthetic construct
  misc_feature 1..20: note = Probe
  source 1..20: mol_type = other DNA
ggactctgaatccagcgatc

SEQ ID NO: 10602 - DNA, 21 bp, synthetic construct
  misc_feature 1..21: note = Probe
  source 1..21: mol_type = other DNA
ggactctgaatccagcgatcc

SEQ ID NO: 10603 - DNA, 22 bp, synthetic construct
  misc_feature 1..22: note = Probe
  source 1..22: mol_type = other DNA
ggactctgaatccagcgatccg

SEQ ID NO: 10604 - DNA, 23 bp, synthetic construct
  misc_feature 1..23: note = Probe
  source 1..23: mol_type = other DNA
ggactctgaatccagcgatccga

SEQ ID NO: 10605 - DNA, 24 bp, synthetic construct
  misc_feature 1..24: note = Probe
  source 1..24: mol_type = other DNA
ggactctgaatccagcgatccgag

SEQ ID NO: 10606 - DNA, 29 bp, synthetic construct
  misc_feature 1..29: note = Probe
  source 1..29: mol_type = other DNA
ggagaccggggttcgattccccgacgggg

SEQ ID NO: 10607 - DNA, 23 bp, synthetic construct
  misc_feature 1..23: note = Probe
  source 1..23: mol_type = other DNA
ggagatgaaaacctttttccaag

SEQ ID NO: 10608 - DNA, 19 bp, synthetic construct
  misc_feature 1..19: note = Probe
  source 1..19: mol_type = other DNA
ggagatttcaacttaactt

SEQ ID NO: 10609 - DNA, 20 bp, synthetic construct
  misc_feature 1..20: note = Probe
  source 1..20: mol_type = other DNA
ggagatttcaacttaacttg

SEQ ID NO: 10610 - DNA, 23 bp, synthetic construct
  misc_feature 1..23: note = Probe
  source 1..23: mol_type = other DNA
ggagatttcaacttaacttgacc

SEQ ID NO: 10611 - DNA, 24 bp, synthetic construct
  misc_feature 1..24: note = Probe
  source 1..24: mol_type = other DNA
ggagatttcaacttaacttgaccg

SEQ ID NO: 10612 - DNA, 25 bp, synthetic construct
  misc_feature 1..25: note = Probe
  source 1..25: mol_type = other DNA
ggagatttcaacttaacttgaccgc

SEQ ID NO: 10613 - DNA, 26 bp, synthetic construct
  misc_feature 1..26: note = Probe
  source 1..26: mol_type = other DNA
ggagatttcaacttaacttgaccgct

SEQ ID NO: 10614 - DNA, 27 bp, synthetic construct
  misc_feature 1..27: note = Probe
  source 1..27: mol_type = other DNA
ggagatttcaacttaacttgaccgctc

SEQ ID NO: 10615 - DNA, 28 bp, synthetic construct
  misc_feature 1..28: note = Probe
  source 1..28: mol_type = other DNA
ggagatttcaacttaacttgaccgctct

SEQ ID NO: 10616 - DNA, 29 bp, synthetic construct
  misc_feature 1..29: note = Probe
  source 1..29: mol_type = other DNA
ggagatttcaacttaacttgaccgctctg

SEQ ID NO: 10617 - DNA, 17 bp, synthetic construct
  misc_feature 1..17: note = Probe
  source 1..17: mol_type = other DNA
ggagctggggattgtgg

SEQ ID NO: 10618 - DNA, 19 bp, synthetic construct
  misc_feature 1..19: note = Probe
  source 1..19: mol_type = other DNA
ggagctggggattgtgggt

SEQ ID NO: 10619 - DNA, 23 bp, synthetic construct
  misc_feature 1..23: note = Probe
  source 1..23: mol_type = other DNA
ggagttaaagactttttctctga

SEQ ID NO: 10620 - DNA, 24 bp, synthetic construct
  misc_feature 1..24: note = Probe
  source 1..24: mol_type = other DNA
ggagttaaagactttttctctgat

SEQ ID NO: 10621 - DNA, 21 bp, synthetic construct
  misc_feature 1..21: note = Probe
  source 1..21: mol_type = other DNA
ggataacagctatccattggt

SEQ ID NO: 10622 - DNA, 22 bp, synthetic construct
  misc_feature 1..22: note = Probe
  source 1..22: mol_type = other DNA
ggataacagctatccattggtc

SEQ ID NO: 10623 - DNA, 24 bp, synthetic construct
  misc_feature 1..24: note = Probe
  source 1..24: mol_type = other DNA
ggataacagctatccattggtctt

SEQ ID NO: 10624 - DNA, 21 bp, synthetic construct
  misc_feature 1..21: note = Probe
  source 1..21: mol_type = other DNA
ggatagctcagtcggtagagc

SEQ ID NO: 10625 - DNA, 22 bp, synthetic construct
  misc_feature 1..22: note = Probe
  source 1..22: mol_type = other DNA
ggattggtggtccagtggtaga

SEQ ID NO: 10626 - DNA, 27 bp, synthetic construct
  misc_feature 1..27: note = Probe
  source 1..27: mol_type = other DNA
ggattggtggtccagtggtagaattct

SEQ ID NO: 10627 - DNA, 28 bp, synthetic construct
  misc_feature 1..28: note = Probe
  source 1..28: mol_type = other DNA
ggattggtggtccagtggtagaattctc

SEQ ID NO: 10628 - DNA, 18 bp, synthetic construct
  misc_feature 1..18: note = Probe
  source 1..18: mol_type = other DNA
ggcagagcatttgactgc

SEQ ID NO: 10629 - DNA, 18 bp, synthetic construct
  misc_feature 1..18: note = Probe
  source 1..18: mol_type = other DNA
ggccagtggcgcaatgga

SEQ ID NO: 10630 - DNA, 19 bp, synthetic construct
  misc_feature 1..19: note = Probe
  source 1..19: mol_type = other DNA
ggccccatggtgtaatggt

SEQ ID NO: 10631 - DNA, 30 bp, synthetic construct
  misc_feature 1..30: note = Probe
  source 1..30: mol_type = other DNA
ggccccatggtgtaatggtcagcactctgg

SEQ ID NO: 10632 - DNA, 23 bp, synthetic construct
  misc_feature 1..23: note = Probe
  source 1..23: mol_type = other DNA
ggccccatggtgtaatggttagc

SEQ ID NO: 10633 - DNA, 29 bp, synthetic construct
  misc_feature 1..29: note = Probe
  source 1..29: mol_type = other DNA
ggccccatggtgtaatggttagcactctg

SEQ ID NO: 10634 - DNA, 19 bp, synthetic construct
  misc_feature 1..19: note = Probe
  source 1..19: mol_type = other DNA
ggccctatagctcaggggt

SEQ ID NO: 10635 - DNA, 30 bp, synthetic construct; identical to SEQ ID NO: 1267
  misc_feature 1..30: note = Probe
  source 1..30: mol_type = other DNA

SEQ ID NO: 10636 - DNA, 19 bp, synthetic construct
  misc_feature 1..19: note = Probe
  source 1..19: mol_type = other DNA
ggccctgtggcttagctgg

SEQ ID NO: 10637 - DNA, 20 bp, synthetic construct
  misc_feature 1..20: note = Probe
  source 1..20: mol_type = other DNA
ggccctgtggcttagctggt

SEQ ID NO: 10638 - DNA, 27 bp, synthetic construct
  misc_feature 1..27: note = Probe
  source 1..27: mol_type = other DNA
ggccgagcggtctaaggcgctgcgttc

SEQ ID NO: 10639 - DNA, 15 bp, synthetic construct
  misc_feature 1..15: note = Probe
  source 1..15: mol_type = other DNA
ggccgcgtggcctaa

SEQ ID NO: 10640 - DNA, 21 bp, synthetic construct
  misc_feature 1..21: note = Probe
  source 1..21: mol_type = other DNA
ggccgcgtggcctaatggata

SEQ ID NO: 10641 - DNA, 22 bp, synthetic construct
  misc_feature 1..22: note = Probe
  source 1..22: mol_type = other DNA
ggccgcgtggcctaatggataa

SEQ ID NO: 10642 - DNA, 23 bp, synthetic construct
  misc_feature 1..23: note = Probe
  source 1..23: mol_type = other DNA
ggccgcgtggcctaatggataag

SEQ ID NO: 10643 - DNA, 26 bp, synthetic construct
  misc_feature 1..26: note = Probe
  source 1..26: mol_type = other DNA
ggccgcgtggcctaatggataaggcg

SEQ ID NO: 10644 - DNA, 27 bp, synthetic construct
  misc_feature 1..27: note = Probe
  source 1..27: mol_type = other DNA
ggccgcgtggcctaatggataaggcgt

SEQ ID NO: 10645 - DNA, 28 bp, synthetic construct
  misc_feature 1..28: note = Probe
  source 1..28: mol_type = other DNA
ggccgcgtggcctaatggataaggcgtc

SEQ ID NO: 10646 - DNA, 29 bp, synthetic construct
  misc_feature 1..29: note = Probe
  source 1..29: mol_type = other DNA
ggccgcgtggcctaatggataaggcgtct

SEQ ID NO: 10647 - DNA, 15 bp, synthetic construct
  misc_feature 1..15: note = Probe
  source 1..15: mol_type = other DNA
ggccggttagctcag

SEQ ID NO: 10648 - DNA, 19 bp, synthetic construct
  misc_feature 1..19: note = Probe
  source 1..19: mol_type = other DNA
ggccggttagctcagtcgg

SEQ ID NO: 10649 - DNA, 18 bp, synthetic construct
  misc_feature 1..18: note = Probe
  source 1..18: mol_type = other DNA
ggccggttagctcagttg

SEQ ID NO: 10650 - DNA, 19 bp, synthetic construct
  misc_feature 1..19: note = Probe
  source 1..19: mol_type = other DNA
ggccggttagctcagttgg

SEQ ID NO: 10651 - DNA, 20 bp, synthetic construct
  misc_feature 1..20: note = Probe
  source 1..20: mol_type = other DNA
ggccggttagctcagttggt

SEQ ID NO: 10652 - DNA, 26 bp, synthetic construct
  misc_feature 1..26: note = Probe
  source 1..26: mol_type = other DNA
ggccggttagctcagttggtaagagc

SEQ ID NO: 10653 - DNA, 24 bp, synthetic construct
  misc_feature 1..24: note = Probe
  source 1..24: mol_type = other DNA
ggccggttagctcagttggtcaga

SEQ ID NO: 10654 - DNA, 26 bp, synthetic construct
  misc_feature 1..26: note = Probe
  source 1..26: mol_type = other DNA
ggccggttagctcagttggtcagagc

SEQ ID NO: 10655 - DNA, 24 bp, synthetic construct
  misc_feature 1..24: note = Probe
  source 1..24: mol_type = other DNA
ggccggttagctcagttggttaga

SEQ ID NO: 10656 - DNA, 26 bp, synthetic construct
  misc_feature 1..26: note = Probe
  source 1..26: mol_type = other DNA
ggccggttagctcagttggttagagc

SEQ ID NO: 10657 - DNA, 30 bp, synthetic construct
  misc_feature 1..30: note = Probe
  source 1..30: mol_type = other DNA
ggccggttagctcagttggttagagcgtgg

SEQ ID NO: 10658 - DNA, 19 bp, synthetic construct
  misc_feature 1..19: note = Probe
  source 1..19: mol_type = other DNA
ggccgtgtggcctaatgga

SEQ ID NO: 10659 - DNA, 24 bp, synthetic construct
  misc_feature 1..24: note = Probe
  source 1..24: mol_type = other DNA
ggcctcctaagccagggattgtgg

SEQ ID NO: 10660 - DNA, 18 bp, synthetic construct
  misc_feature 1..18: note = Probe
  source 1..18: mol_type = other DNA
ggcctcgtggcgcaacgg

SEQ ID NO: 10661 - DNA, 19 bp, synthetic construct
  misc_feature 1..19: note = Probe
  source 1..19: mol_type = other DNA
ggcctcgtggcgcaacggt

SEQ ID NO: 10662 - DNA, 22 bp, synthetic construct
  misc_feature 1..22: note = Probe
  source 1..22: mol_type = other DNA
ggcctcgtggcgcaacggtagc

SEQ ID NO: 10663 - DNA, 24 bp, synthetic construct
  misc_feature 1..24: note = Probe
  source 1..24: mol_type = other DNA
ggcctcgtggcgcaacggtagcgc

SEQ ID NO: 10664 - DNA, 29 bp, synthetic construct
  misc_feature 1..29: note = Probe
  source 1..29: mol_type = other DNA
ggcctcgtggcgcaacggtagcgcgtctg

SEQ ID NO: 10665 - DNA, 23 bp, synthetic construct
  misc_feature 1..23: note = Probe
  source 1..23: mol_type = other DNA
ggcgcagcggaagcgtgctgggc

SEQ ID NO: 10666 - DNA, 19 bp, synthetic construct
  misc_feature 1..19: note = Probe
  source 1..19: mol_type = other DNA
ggcgccgtggcttagttgg

SEQ ID NO: 10667 - DNA, 26 bp, synthetic construct
  misc_feature 1..26: note = Probe
  source 1..26: mol_type = other DNA
ggcgccgtggcttagttggttaaagc

SEQ ID NO: 10668 - DNA, 15 bp, synthetic construct
  misc_feature 1..15: note = Probe
  source 1..15: mol_type = other DNA
ggcgcggtggccaag

SEQ ID NO: 10669 - DNA, 16 bp, synthetic construct
  misc_feature 1..16: note = Probe
  source 1..16: mol_type = other DNA
ggcgcggtggccaagt

SEQ ID NO: 10670 - DNA, 17 bp, synthetic construct
  misc_feature 1..17: note = Probe
  source 1..17: mol_type = other DNA
ggcgcggtggccaagtg

SEQ ID NO: 10671 - DNA, 18 bp, synthetic construct
  misc_feature 1..18: note = Probe
  source 1..18: mol_type = other DNA
ggcgcggtggccaagtgg

SEQ ID NO: 10672 - DNA, 19 bp, synthetic construct
  misc_feature 1..19: note = Probe
  source 1..19: mol_type = other DNA
ggcgcggtggccaagtggt

SEQ ID NO: 10673 - DNA, 20 bp, synthetic construct
  misc_feature 1..20: note = Probe
  source 1..20: mol_type = other DNA
ggcgcggtggccaagtggta

SEQ ID NO: 10674 - DNA, 21 bp, synthetic construct
  misc_feature 1..21: note = Probe
  source 1..21: mol_type = other DNA
ggcgcggtggccaagtggtaa

SEQ ID NO: 10675 - DNA, 25 bp, synthetic construct
  misc_feature 1..25: note = Probe
  source 1..25: mol_type = other DNA
ggcgcggtggccaagtggtaaggcg

SEQ ID NO: 10676 - DNA, 26 bp, synthetic construct
  misc_feature 1..26: note = Probe
  source 1..26: mol_type = other DNA
ggcgcggtggccaagtggtaaggcgt

SEQ ID NO: 10677 - DNA, 27 bp, synthetic construct
  misc_feature 1..27: note = Probe
  source 1..27: mol_type = other DNA
ggcgcggtggccaagtggtaaggcgtc

SEQ ID NO: 10678 - DNA, 28 bp, synthetic construct
  misc_feature 1..28: note = Probe
  source 1..28: mol_type = other DNA
ggcgcggtggccaagtggtaaggcgtcg

SEQ ID NO: 10679 - DNA, 29 bp, synthetic construct
  misc_feature 1..29: note = Probe
  source 1..29: mol_type = other DNA
ggcgcggtggccaagtggtaaggcgtcgg

SEQ ID NO: 10680 - DNA, 30 bp, synthetic construct
  misc_feature 1..30: note = Probe
  source 1..30: mol_type = other DNA
ggcgcggtggccaagtggtaaggcgtcggt

SEQ ID NO: 10681 - DNA, 23 bp, synthetic construct
  misc_feature 1..23: note = Probe
  source 1..23: mol_type = other DNA
ggcggcccgggttcgactcccgg

SEQ ID NO: 10682 - DNA, 24 bp, synthetic construct
  misc_feature 1..24: note = Probe
  source 1..24: mol_type = other DNA
ggcggcccgggttcgactcccggt

SEQ ID NO: 10683 - DNA, 28 bp, synthetic construct
  misc_feature 1..28: note = Probe
  source 1..28: mol_type = other DNA
ggcggcccgggttcgactcccggtgtgg

SEQ ID NO: 10684 - DNA, 29 bp, synthetic construct
  misc_feature 1..29: note = Probe
  source 1..29: mol_type = other DNA
ggcggcccgggttcgactcccggtgtggg

SEQ ID NO: 10685 - DNA, 18 bp, synthetic construct
  misc_feature 1..18: note = Probe
  source 1..18: mol_type = other DNA
ggcgtgattcataccttt

SEQ ID NO: 10686 - DNA, 19 bp, synthetic construct
  misc_feature 1..19: note = Probe
  source 1..19: mol_type = other DNA
ggcgtgattcatacctttt

SEQ ID NO: 10687 - DNA, 29 bp, synthetic construct
  misc_feature 1..29: note = Probe
  source 1..29: mol_type = other DNA
ggctagctcagtcggtagagcatgagact

SEQ ID NO: 10688 - DNA, 17 bp, synthetic construct
  misc_feature 1..17: note = Probe
  source 1..17: mol_type = other DNA
ggctccagtctcttcgg

SEQ ID NO: 10689 - DNA, 21 bp, synthetic construct
  misc_feature 1..21: note = Probe
  source 1..21: mol_type = other DNA
ggctccagtctcttcggaggc

SEQ ID NO: 10690 - DNA, 24 bp, synthetic construct
  misc_feature 1..24: note = Probe
  source 1..24: mol_type = other DNA
ggctccagtctcttcggaggcgtg

SEQ ID NO: 10691 - DNA, 18 bp, synthetic construct
  misc_feature 1..18: note = Probe
  source 1..18: mol_type = other DNA
ggctccagtctcttcggg

SEQ ID NO: 10692 - DNA, 21 bp, synthetic construct
  misc_feature 1..21: note = Probe
  source 1..21: mol_type = other DNA
ggctccagtctcttcgggggc

SEQ ID NO: 10693 - DNA, 25 bp, synthetic construct
  misc_feature 1..25: note = Probe
  source 1..25: mol_type = other DNA
ggctccagtctcttcgggggcgtgg

SEQ ID NO: 10694 - DNA, 18 bp, synthetic construct
  misc_feature 1..18: note = Probe
  source 1..18: mol_type = other DNA
ggctccatagctcagggg

SEQ ID NO: 10695 - DNA, 19 bp, synthetic construct
  misc_feature 1..19: note = Probe
  source 1..19: mol_type = other DNA
ggctccatagctcaggggt

SEQ ID NO: 10696 - DNA, 30 bp, synthetic construct
  misc_feature 1..30: note = Probe
  source 1..30: mol_type = other DNA
ggctccatagctcaggggttagagcactgg

SEQ ID NO: 10697 - DNA, 15 bp, synthetic construct
  misc_feature 1..15: note = Probe
  source 1..15: mol_type = other DNA
ggctccgtggcgcaa

SEQ ID NO: 10698 - DNA, 16 bp, synthetic construct
  misc_feature 1..16: note = Probe
  source 1..16: mol_type = other DNA
ggctccgtggcgcaat

SEQ ID NO: 10699 - DNA, 17 bp, synthetic construct
  misc_feature 1..17: note = Probe
  source 1..17: mol_type = other DNA
ggctccgtggcgcaatg

SEQ ID NO: 10700 - DNA, 20 bp, synthetic construct
  misc_feature 1..20: note = Probe
  source 1..20: mol_type = other DNA
ggctccgtggcgcaatggat

SEQ ID NO: 10701 - DNA, 23 bp, synthetic construct
  misc_feature 1..23: note = Probe
  source 1..23: mol_type = other DNA
ggctccgtggcgcaatggatagc

SEQ ID NO: 10702 - DNA, 25 bp, synthetic construct
  misc_feature 1..25: note = Probe
  source 1..25: mol_type = other DNA
ggctccgtggcgcaatggatagcgc

SEQ ID NO: 10703 - DNA, 26 bp, synthetic construct
  misc_feature 1..26: note = Probe
  source 1..26: mol_type = other DNA
ggctccgtggcgcaatggatagcgca

SEQ ID NO: 10704 - DNA, 30 bp, synthetic construct
  misc_feature 1..30: note = Probe
  source 1..30: mol_type = other DNA
ggctccgtggcgcaatggatagcgcattgg

SEQ ID NO: 10705 - DNA, 19 bp, synthetic construct
  misc_feature 1..19: note = Probe
  source 1..19: mol_type = other DNA
ggctccgtggcttagctgg

SEQ ID NO: 10706 - DNA, 20 bp, synthetic construct
  misc_feature 1..20: note = Probe
  source 1..20: mol_type = other DNA
ggctccgtggcttagctggt

SEQ ID NO: 10707 - DNA, 26 bp, synthetic construct
  misc_feature 1..26: note = Probe
  source 1..26: mol_type = other DNA
ggctccgtggcttagctggttaaagc

SEQ ID NO: 10708 - DNA, 23 bp, synthetic construct
  misc_feature 1..23: note = Probe
  source 1..23: mol_type = other DNA
ggctcgaaggacttcgtctgtaa

SEQ ID NO: 10709 - DNA, 15 bp, synthetic construct
  misc_feature 1..15: note = Probe
  source 1..15: mol_type = other DNA
ggctcgttggtctag

SEQ ID NO: 10710 - DNA, 16 bp, synthetic construct
  misc_feature 1..16: note = Probe
  source 1..16: mol_type = other DNA
ggctcgttggtctagg

SEQ ID NO: 10711 - DNA, 17 bp, synthetic construct
  misc_feature 1..17: note = Probe
  source 1..17: mol_type = other DNA
ggctcgttggtctaggg

SEQ ID NO: 10712 - DNA, 18 bp, synthetic construct
  misc_feature 1..18: note = Probe
  source 1..18: mol_type = other DNA
ggctcgttggtctagggg

SEQ ID NO: 10713 - DNA, 19 bp, synthetic construct
  misc_feature 1..19: note = Probe
  source 1..19: mol_type = other DNA
ggctcgttggtctaggggt

SEQ ID NO: 10714 - DNA, 20 bp, synthetic construct
  misc_feature 1..20: note = Probe
  source 1..20: mol_type = other DNA
ggctcgttggtctaggggta

SEQ ID NO: 10715 - DNA, 21 bp, synthetic construct
  misc_feature 1..21: note = Probe
  source 1..21: mol_type = other DNA
ggctcgttggtctaggggtat

SEQ ID NO: 10716 - DNA, 22 bp, synthetic construct
  misc_feature 1..22: note = Probe
  source 1..22: mol_type = other DNA
ggctcgttggtctaggggtatg

SEQ ID NO: 10717 - DNA, 23 bp, synthetic construct
  misc_feature 1..23: note = Probe
  source 1..23: mol_type = other DNA
ggctcgttggtctaggggtatga

SEQ ID NO: 10718 - DNA, 24 bp, synthetic construct
  misc_feature 1..24: note = Probe
  source 1..24: mol_type = other DNA
ggctcgttggtctaggggtatgat

SEQ ID NO: 10719 - DNA, 25 bp, synthetic construct
  misc_feature 1..25: note = Probe
  source 1..25: mol_type = other DNA
ggctcgttggtctaggggtatgatt

SEQ ID NO: 10720 - DNA, 26 bp, synthetic construct
  misc_feature 1..26: note = Probe
  source 1..26: mol_type = other DNA
ggctcgttggtctaggggtatgattc

SEQ ID NO: 10721 - DNA, 27 bp, synthetic construct
  misc_feature 1..27: note = Probe
  source 1..27: mol_type = other DNA
ggctcgttggtctaggggtatgattct

SEQ ID NO: 10722 - DNA, 28 bp, synthetic construct
  misc_feature 1..28: note = Probe
  source 1..28: mol_type = other DNA
ggctcgttggtctaggggtatgattctc

SEQ ID NO: 10723 - DNA, 29 bp, synthetic construct
  misc_feature 1..29: note = Probe
  source 1..29: mol_type = other DNA
ggctcgttggtctaggggtatgattctcg

SEQ ID NO: 10724 - DNA, 30 bp, synthetic construct; identical to SEQ ID NO: 6496
  misc_feature 1..30: note = Probe
  source 1..30: mol_type = other DNA

SEQ ID NO: 10725 - DNA, 30 bp, synthetic construct
  misc_feature 1..30: note = Probe
  source 1..30: mol_type = other DNA
ggctcgttggtctagtggtatgattctcgc

SEQ ID NO: 10726 - DNA, 16 bp, synthetic construct
  misc_feature 1..16: note = Probe
  source 1..16: mol_type = other DNA
ggctctgtggcgcaat

SEQ ID NO: 10727 - DNA, 17 bp, synthetic construct
  misc_feature 1..17: note = Probe
  source 1..17: mol_type = other DNA
ggctctgtggcgcaatg

SEQ ID NO: 10728 - DNA, 18 bp, synthetic construct
  misc_feature 1..18: note = Probe
  source 1..18: mol_type = other DNA
ggctctgtggcgcaatgg

SEQ ID NO: 10729 - DNA, 19 bp, synthetic construct
  misc_feature 1..19: note = Probe
  source 1..19: mol_type = other DNA
ggctctgtggcgcaatgga

SEQ ID NO: 10730 - DNA, 20 bp, synthetic construct
  misc_feature 1..20: note = Probe
  source 1..20: mol_type = other DNA
ggctctgtggcgcaatggat

SEQ ID NO: 10731 - DNA, 23 bp, synthetic construct
  misc_feature 1..23: note = Probe
  source 1..23: mol_type = other DNA
ggctctgtggcgcaatggatagc

SEQ ID NO: 10732 - DNA, 25 bp, synthetic construct
  misc_feature 1..25: note = Probe
  source 1..25: mol_type = other DNA
ggctctgtggcgcaatggatagcgc

SEQ ID NO: 10733 - DNA, 26 bp, synthetic construct
  misc_feature 1..26: note = Probe
  source 1..26: mol_type = other DNA
ggctctgtggcgcaatggatagcgca

SEQ ID NO: 10734 - DNA, 30 bp, synthetic construct
  misc_feature 1..30: note = Probe
  source 1..30: mol_type = other DNA
ggctctgtggcgcaatggatagcgcattgg

SEQ ID NO: 10735 - DNA, 23 bp, synthetic construct
  misc_feature 1..23: note = Probe
  source 1..23: mol_type = other DNA
ggctgagtgaagcattggactgt

SEQ ID NO: 10736 - DNA, 24 bp, synthetic construct
  misc_feature 1..24: note = Probe
  source 1..24: mol_type = other DNA
ggctgagtgaagcattggactgta

SEQ ID NO: 10737 - DNA, 20 bp, synthetic construct
  misc_feature 1..20: note = Probe
  source 1..20: mol_type = other DNA
ggctggttagctcagttggt

SEQ ID NO: 10738 - DNA, 17 bp, synthetic construct
  misc_feature 1..17: note = Probe
  source 1..17: mol_type = other DNA
ggctgtaggaatacttt

SEQ ID NO: 10739 - DNA, 18 bp, synthetic construct
  misc_feature 1..18: note = Probe
  source 1..18: mol_type = other DNA
ggctgtaggaatactttt

SEQ ID NO: 10740 - DNA, 24 bp, synthetic construct
  misc_feature 1..24: note = Probe
  source 1..24: mol_type = other DNA
ggctgtatagctcagtggtagagc

SEQ ID NO: 10741 - DNA, 29 bp, synthetic construct
  misc_feature 1..29: note = Probe
  source 1..29: mol_type = other DNA
ggctgtatagctcagtggtagagcatttg

SEQ ID NO: 10742 - DNA, 30 bp, synthetic construct; identical to SEQ ID NO: 1315
  misc_feature 1..30: note = Probe
  source 1..30: mol_type = other DNA

SEQ ID NO: 10743 - DNA, 18 bp, synthetic construct
  misc_feature 1..18: note = Probe
  source 1..18: mol_type = other DNA
gggatgtagctcagtggt

SEQ ID NO: 10744 - DNA, 21 bp, synthetic construct
  misc_feature 1..21: note = Probe
  source 1..21: mol_type = other DNA
gggatgtagctcagtggtaga

SEQ ID NO: 10745 - DNA, 15 bp, synthetic construct
  misc_feature 1..15: note = Probe
  source 1..15: mol_type = other DNA
gggattgtgggttcg

SEQ ID NO: 10746 - DNA, 19 bp, synthetic construct
  misc_feature 1..19: note = Probe
  source 1..19: mol_type = other DNA
gggattgtgggttcgagtc

SEQ ID NO: 10747 - DNA, 21 bp, synthetic construct
  misc_feature 1..21: note = Probe
  source 1..21: mol_type = other DNA
gggattgtgggttcgagtccc

SEQ ID NO: 10748 - DNA, 24 bp, synthetic construct
  misc_feature 1..24: note = Probe
  source 1..24: mol_type = other DNA
gggattgtgggttcgagtcccatc

SEQ ID NO: 10749 - DNA, 19 bp, synthetic construct
  misc_feature 1..19: note = Probe
  source 1..19: mol_type = other DNA
gggcagagcatttgactgc

SEQ ID NO: 10750 - DNA, 15 bp, synthetic construct
  misc_feature 1..15: note = Probe
  source 1..15: mol_type = other DNA
gggccagtggcgcaa

SEQ ID NO: 10751 - DNA, 16 bp, synthetic construct
  misc_feature 1..16: note = Probe
  source 1..16: mol_type = other DNA
gggccagtggcgcaat

SEQ ID NO: 10752 - DNA, 17 bp, synthetic construct
  misc_feature 1..17: note = Probe
  source 1..17: mol_type = other DNA
gggccagtggcgcaatg

SEQ ID NO: 10753 - DNA, 18 bp, synthetic construct
  misc_feature 1..18: note = Probe
  source 1..18: mol_type = other DNA
gggccagtggcgcaatgg

SEQ ID NO: 10754 - DNA, 19 bp, synthetic construct
  misc_feature 1..19: note = Probe
  source 1..19: mol_type = other DNA
gggccagtggcgcaatgga

SEQ ID NO: 10755 - DNA, 20 bp, synthetic construct
  misc_feature 1..20: note = Probe
  source 1..20: mol_type = other DNA
gggccagtggcgcaatggat

SEQ ID NO: 10756 - DNA, 21 bp, synthetic construct
  misc_feature 1..21: note = Probe
  source 1..21: mol_type = other DNA
gggccagtggcgcaatggata

SEQ ID NO: 10757 - DNA, 23 bp, synthetic construct
  misc_feature 1..23: note = Probe
  source 1..23: mol_type = other DNA
gggccagtggcgcaatggataac

SEQ ID NO: 10758 - DNA, 24 bp, synthetic construct
  misc_feature 1..24: note = Probe
  source 1..24: mol_type = other DNA
gggccagtggcgcaatggataacg

SEQ ID NO: 10759 - DNA, 25 bp, synthetic construct
  misc_feature 1..25: note = Probe
  source 1..25: mol_type = other DNA
gggccagtggcgcaatggataacgc

SEQ ID NO: 10760 - DNA, 29 bp, synthetic construct
  misc_feature 1..29: note = Probe
  source 1..29: mol_type = other DNA
gggccagtggcgcaatggataacgcgtct

SEQ ID NO: 10761 - DNA, 30 bp, synthetic construct
  misc_feature 1..30: note = Probe
  source 1..30: mol_type = other DNA
gggccagtggcgcaatggataacgcgtctg

SEQ ID NO: 10762 - DNA, 29 bp, synthetic construct
  misc_feature 1..29: note = Probe
  source 1..29: mol_type = other DNA
gggcgtatagctcaggggtagagcatttg

SEQ ID NO: 10763 - DNA, 27 bp, synthetic construct
  misc_feature 1..27: note = Probe
  source 1..27: mol_type = other DNA
gggcttagcttaattaaagtggctgat

SEQ ID NO: 10764 - DNA, 19 bp, synthetic construct
  misc_feature 1..19: note = Probe
  source 1..19: mol_type = other DNA
ggggaattagctcaaatgg

SEQ ID NO: 10765 - DNA, 20 bp, synthetic construct
  misc_feature 1..20: note = Probe
  source 1..20: mol_type = other DNA
ggggaattagctcaaatggt

SEQ ID NO: 10766 - DNA, 21 bp, synthetic construct
  misc_feature 1..21: note = Probe
  source 1..21: mol_type = other DNA
ggggaattagctcaaatggta

SEQ ID NO: 10767 - DNA, 23 bp, synthetic construct
  misc_feature 1..23: note = Probe
  source 1..23: mol_type = other DNA
ggggaattagctcaaatggtaga

SEQ ID NO: 10768 - DNA, 24 bp, synthetic construct
  misc_feature 1..24: note = Probe
  source 1..24: mol_type = other DNA
ggggaattagctcaaatggtagag

SEQ ID NO: 10769 - DNA, 30 bp, synthetic construct
  misc_feature 1..30: note = Probe
  source 1..30: mol_type = other DNA
ggggaattagctcaaatggtagagcgctcg

SEQ ID NO: 10770 - DNA, 15 bp, synthetic construct
  misc_feature 1..15: note = Probe
  source 1..15: mol_type = other DNA
ggggatgtagctcag

SEQ ID NO: 10771 - DNA, 16 bp, synthetic construct
  misc_feature 1..16: note = Probe
  source 1..16: mol_type = other DNA
ggggatgtagctcagt

SEQ ID NO: 10772 - DNA, 17 bp, synthetic construct
  misc_feature 1..17: note = Probe
  source 1..17: mol_type = other DNA
ggggatgtagctcagtg

SEQ ID NO: 10773 - DNA, 25 bp, synthetic construct
  misc_feature 1..25: note = Probe
  source 1..25: mol_type = other DNA
ggggatgtagctcagtggtagagcg

SEQ ID NO: 10774 - DNA, 26 bp, synthetic construct
  misc_feature 1..26: note = Probe
  source 1..26: mol_type = other DNA
ggggatgtagctcagtggtagagcgc

SEQ ID NO: 10775 - DNA, 27 bp, synthetic construct
  misc_feature 1..27: note = Probe
  source 1..27: mol_type = other DNA
ggggatgtagctcagtggtagagcgca

SEQ ID NO: 10776 - DNA, 30 bp, synthetic construct; identical to SEQ ID NO: 1335
  misc_feature 1..30: note = Probe
  source 1..30: mol_type = other DNA

SEQ ID NO: 10777 - DNA, 28 bp, synthetic construct
  misc_feature 1..28: note = Probe
  source 1..28: mol_type = other DNA
ggggatgtagctcagtggtagagcgcgc

SEQ ID NO: 10778 - DNA, 29 bp, synthetic construct
  misc_feature 1..29: note = Probe
  source 1..29: mol_type = other DNA
ggggatgtagctcagtggtagagcgcgcg

SEQ ID NO: 10779 - DNA, 30 bp, synthetic construct
  misc_feature 1..30: note = Probe
  source 1..30: mol_type = other DNA
ggggatgtagctcagtggtagagcgcgcgc

SEQ ID NO: 10780 - DNA, 15 bp, synthetic construct
  misc_feature 1..15: note = Probe
  source 1..15: mol_type = other DNA
ggggcacaataattt

SEQ ID NO: 10781 - DNA, 19 bp, synthetic construct
  misc_feature 1..19: note = Probe
  source 1..19: mol_type = other DNA
ggggcagagcatttgactg

SEQ ID NO: 10782 - DNA, 20 bp, synthetic construct
  misc_feature 1..20: note = Probe
  source 1..20: mol_type = other DNA
ggggcagagcatttgactgc

SEQ ID NO: 10783 - DNA, 23 bp, synthetic construct
  misc_feature 1..23: note = Probe
  source 1..23: mol_type = other DNA
ggggcgtgggttcgaatcccacc

SEQ ID NO: 10784 - DNA, 16 bp, synthetic construct
  misc_feature 1..16: note = Probe
  source 1..16: mol_type = other DNA
gggggattagctcaaa

SEQ ID NO: 10785 - DNA, 19 bp, synthetic construct
  misc_feature 1..19: note = Probe
  source 1..19: mol_type = other DNA
gggggattagctcaaatgg

SEQ ID NO: 10786 - DNA, 21 bp, synthetic construct
  misc_feature 1..21: note = Probe
  source 1..21: mol_type = other DNA
gggggattagctcaaatggta

SEQ ID NO: 10787 - DNA, 22 bp, synthetic construct
  misc_feature 1..22: note = Probe
  source 1..22: mol_type = other DNA
gggggattagctcaaatggtag

SEQ ID NO: 10788 - DNA, 23 bp, synthetic construct
  misc_feature 1..23: note = Probe
  source 1..23: mol_type = other DNA
gggggattagctcaaatggtaga

SEQ ID NO: 10789 - DNA, 24 bp, synthetic construct
  misc_feature 1..24: note = Probe
  source 1..24: mol_type = other DNA
gggggattagctcaaatggtagag

SEQ ID NO: 10790 - DNA, 26 bp, synthetic construct
  misc_feature 1..26: note = Probe
  source 1..26: mol_type = other DNA
gggggattagctcaaatggtagagcg

SEQ ID NO: 10791 - DNA, 30 bp, synthetic construct
  misc_feature 1..30: note = Probe
  source 1..30: mol_type = other DNA
gggggattagctcaaatggtagagcgctcg

SEQ ID NO: 10792 - DNA, 19 bp, synthetic construct
  misc_feature 1..19: note = Probe
  source 1..19: mol_type = other DNA
gggggcagagcatttgact

SEQ ID NO: 10793 - DNA, 20 bp, synthetic construct
  misc_feature 1..20: note = Probe
  source 1..20: mol_type = other DNA
gggggcagagcatttgactg

SEQ ID NO: 10794 - DNA, 21 bp, synthetic construct
  misc_feature 1..21: note = Probe
  source 1..21: mol_type = other DNA
gggggcagagcatttgactgc

SEQ ID NO: 10795 - DNA, 19 bp, synthetic construct
  misc_feature 1..19: note = Probe
  source 1..19: mol_type = other DNA
gggggcatagctcagtggt

SEQ ID NO: 10796 - DNA, 29 bp, synthetic construct
  misc_feature 1..29: note = Probe
  source 1..29: mol_type = other DNA
gggggcatagctcagtggtagagcatttg

SEQ ID NO: 10797 - DNA, 24 bp, synthetic construct
  misc_feature 1..24: note = Probe
  source 1..24: mol_type = other DNA
gggggcgtgggttcgaatcccacc

SEQ ID NO: 10798 - DNA, 29 bp, synthetic construct
  misc_feature 1..29: note = Probe
  source 1..29: mol_type = other DNA
gggggtatagctcacaggtagagcatttg

SEQ ID NO: 10799 - DNA, 15 bp, synthetic construct
  misc_feature 1..15: note = Probe
  source 1..15: mol_type = other DNA
gggggtatagctcag

SEQ ID NO: 10800 - DNA, 18 bp, synthetic construct
  misc_feature 1..18: note = Probe
  source 1..18: mol_type = other DNA
gggggtatagctcagggg

SEQ ID NO: 10801 - DNA, 22 bp, synthetic construct
  misc_feature 1..22: note = Probe
  source 1..22: mol_type = other DNA
gggggtatagctcaggggtaga

SEQ ID NO: 10802 - DNA, 24 bp, synthetic construct
  misc_feature 1..24: note = Probe
  source 1..24: mol_type = other DNA
gggggtatagctcaggggtagagc

SEQ ID NO: 10803 - DNA, 25 bp, synthetic construct
  misc_feature 1..25: note = Probe
  source 1..25: mol_type = other DNA
gggggtatagctcaggggtagagca

SEQ ID NO: 10804 - DNA, 28 bp, synthetic construct
  misc_feature 1..28: note = Probe
  source 1..28: mol_type = other DNA
gggggtatagctcaggggtagagcattt

SEQ ID NO: 10805 - DNA, 16 bp, synthetic construct
  misc_feature 1..16: note = Probe
  source 1..16: mol_type = other DNA
gggggtatagctcagt

SEQ ID NO: 10806 - DNA, 17 bp, synthetic construct
  misc_feature 1..17: note = Probe
  source 1..17: mol_type = other DNA
gggggtatagctcagtg

SEQ ID NO: 10807 - DNA, 18 bp, synthetic construct
  misc_feature 1..18: note = Probe
  source 1..18: mol_type = other DNA
gggggtatagctcagtgg

SEQ ID NO: 10808 - DNA, 19 bp, synthetic construct
  misc_feature 1..19: note = Probe
  source 1..19: mol_type = other DNA
gggggtatagctcagtggg

SEQ ID NO: 10809 - DNA, 25 bp, synthetic construct
  misc_feature 1..25: note = Probe
  source 1..25: mol_type = other DNA
gggggtatagctcagtgggtagagc

SEQ ID NO: 10810 - DNA, 30 bp, synthetic construct
  misc_feature 1..30: note = Probe
  source 1..30: mol_type = other DNA
gggggtatagctcagtgggtagagcatttg

SEQ ID NO: 10811 - DNA, 19 bp, synthetic construct
  misc_feature 1..19: note = Probe
  source 1..19: mol_type = other DNA
gggggtatagctcagtggt

SEQ ID NO: 10812 - DNA, 20 bp, synthetic construct
  misc_feature 1..20: note = Probe
  source 1..20: mol_type = other DNA
gggggtatagctcagtggta

SEQ ID NO: 10813 - DNA, 21 bp, synthetic construct
  misc_feature 1..21: note = Probe
  source 1..21: mol_type = other DNA
gggggtatagctcagtggtag

SEQ ID NO: 10814 - DNA, 22 bp, synthetic construct
  misc_feature 1..22: note = Probe
  source 1..22: mol_type = other DNA
gggggtatagctcagtggtaga

SEQ ID NO: 10815 - DNA, 23 bp, synthetic construct
  misc_feature 1..23: note = Probe
  source 1..23: mol_type = other DNA
gggggtatagctcagtggtagag

SEQ ID NO: 10816 - DNA, 24 bp, synthetic construct
  misc_feature 1..24: note = Probe
  source 1..24: mol_type = other DNA
gggggtatagctcagtggtagagc

SEQ ID NO: 10817 - DNA, 25 bp, synthetic construct
  misc_feature 1..25: note = Probe
  source 1..25: mol_type = other DNA
gggggtatagctcagtggtagagca

SEQ ID NO: 10818 - DNA, 26 bp, synthetic construct
  misc_feature 1..26: note = Probe
  source 1..26: mol_type = other DNA
gggggtatagctcagtggtagagcat

SEQ ID NO: 10819 - DNA, 27 bp, synthetic construct
  misc_feature 1..27: note = Probe
  source 1..27: mol_type = other DNA
gggggtatagctcagtggtagagcatt

SEQ ID NO: 10820 - DNA, 28 bp, synthetic construct
  misc_feature 1..28: note = Probe
  source 1..28: mol_type = other DNA
gggggtatagctcagtggtagagcattt

SEQ ID NO: 10821 - DNA, 29 bp, synthetic construct
  misc_feature 1..29: note = Probe
  source 1..29: mol_type = other DNA
gggggtatagctcagtggtagagcatttg

SEQ ID NO: 10822 - DNA, 29 bp, synthetic construct
  misc_feature 1..29: note = Probe
  source 1..29: mol_type = other DNA
gggggtatagcttagcggtagagcatttg

SEQ ID NO: 10823 - DNA, 29 bp, synthetic construct
  misc_feature 1..29: note = Probe
  source 1..29: mol_type = other DNA
gggggtatagcttaggggtagagcatttg

SEQ ID NO: 10824 - DNA, 15 bp, synthetic construct
  misc_feature 1..15: note = Probe
  source 1..15: mol_type = other DNA
gggggtgtagctcag

SEQ ID NO: 10825 - DNA, 16 bp, synthetic construct
  misc_feature 1..16: note = Probe
  source 1..16: mol_type = other DNA
gggggtgtagctcagt

SEQ ID NO: 10826 - DNA, 17 bp, synthetic construct
  misc_feature 1..17: note = Probe
  source 1..17: mol_type = other DNA
gggggtgtagctcagtg

SEQ ID NO: 10827 - DNA, 18 bp, synthetic construct
  misc_feature 1..18: note = Probe
  source 1..18: mol_type = other DNA
gggggtgtagctcagtgg

SEQ ID NO: 10828 - DNA, 21 bp, synthetic construct
  misc_feature 1..21: note = Probe
  source 1..21: mol_type = other DNA
gggggtgtagctcagtggtag

SEQ ID NO: 10829 - DNA, 23 bp, synthetic construct
  misc_feature 1..23: note = Probe
  source 1..23: mol_type = other DNA
gggggtgtagctcagtggtagag

SEQ ID NO: 10830 - DNA, 25 bp, synthetic construct
  misc_feature 1..25: note = Probe
  source 1..25: mol_type = other DNA
gggggtgtagctcagtggtagagca

SEQ ID NO: 10831 - DNA, 29 bp, synthetic construct
  misc_feature 1..29: note = Probe
  source 1..29: mol_type = other DNA
gggggtgtagctcagtggtagagcatttg

SEQ ID NO: 10832 - DNA, 27 bp, synthetic construct
  misc_feature 1..27: note = Probe
  source 1..27: mol_type = other DNA
gggggtgtagctcagtggtagagcgcg

SEQ ID NO: 10833 - DNA, 30 bp, synthetic construct; identical to SEQ ID NO: 1367
  misc_feature 1..30: note = Probe
  source 1..30: mol_type = other DNA

SEQ ID NO: 10834 - DNA, 19 bp, synthetic construct
  misc_feature 1..19: note = Probe
  source 1..19: mol_type = other DNA
ggggtagagcatttgactg

SEQ ID NO: 10835 - DNA, 20 bp, synthetic construct
  misc_feature 1..20: note = Probe
  source 1..20: mol_type = other DNA
ggggtagagcatttgactgc

SEQ ID NO: 10836 - DNA, 30 bp, synthetic construct
  misc_feature 1..30: note = Probe
  source 1..30: mol_type = other DNA
ggggtatagctcagtggtagagcatttgac

SEQ ID NO: 10837 - DNA, 16 bp, synthetic construct
  misc_feature 1..16: note = Probe
  source 1..16: mol_type = other DNA
ggggtatgattctcgc

SEQ ID NO: 10838 - DNA, 17 bp, synthetic construct
  misc_feature 1..17: note = Probe
  source 1..17: mol_type = other DNA
ggggtatgattctcgct

SEQ ID NO: 10839 - DNA, 18 bp, synthetic construct
  misc_feature 1..18: note = Probe
  source 1..18: mol_type = other DNA
ggggtatgattctcgctt

SEQ ID NO: 10840 - DNA, 19 bp, synthetic construct
  misc_feature 1..19: note = Probe
  source 1..19: mol_type = other DNA
ggggtatgattctcgctta

SEQ ID NO: 10841 - DNA, 19 bp, synthetic construct
  misc_feature 1..19: note = Probe
  source 1..19: mol_type = other DNA
ggggtatgattctcgcttc

SEQ ID NO: 10842 - DNA, 19 bp, synthetic construct
  misc_feature 1..19: note = Probe
  source 1..19: mol_type = other DNA
ggggtatgattctcgcttt

SEQ ID NO: 10843 - DNA, 16 bp, synthetic construct
  misc_feature 1..16: note = Probe
  source 1..16: mol_type = other DNA
ggggtatgattctcgg

SEQ ID NO: 10844 - DNA, 17 bp, synthetic construct
  misc_feature 1..17: note = Probe
  source 1..17: mol_type = other DNA
ggggtatgattctcggt

SEQ ID NO: 10845 - DNA, 18 bp, synthetic construct
  misc_feature 1..18: note = Probe
  source 1..18: mol_type = other DNA
ggggtatgattctcggtt

SEQ ID NO: 10846 - DNA, 19 bp, synthetic construct
  misc_feature 1..19: note = Probe
  source 1..19: mol_type = other DNA
ggggtatgattctcggttt

SEQ ID NO: 10847 - DNA, 18 bp, synthetic construct
  misc_feature 1..18: note = Probe
  source 1..18: mol_type = other DNA
ggggtcagcggctatttt

SEQ ID NO: 10848 - DNA, 21 bp, synthetic construct
  misc_feature 1..21: note = Probe
  source 1..21: mol_type = other DNA
ggggttaggcctctttttacc

SEQ ID NO: 10849 - DNA, 22 bp, synthetic construct
  misc_feature 1..22: note = Probe
  source 1..22: mol_type = other DNA
ggggttaggcctctttttacca

SEQ ID NO: 10850 - DNA, 23 bp, synthetic construct
  misc_feature 1..23: note = Probe
  source 1..23: mol_type = other DNA
ggggttaggcctctttttaccag

SEQ ID NO: 10851 - DNA, 24 bp, synthetic construct
  misc_feature 1..24: note = Probe
  source 1..24: mol_type = other DNA
ggggttaggcctctttttaccagc

SEQ ID NO: 10852 - DNA, 20 bp, synthetic construct
  misc_feature 1..20: note = Probe
  source 1..20: mol_type = other DNA
ggggttttgcagtccttagc

SEQ ID NO: 10853 - DNA, 19 bp, synthetic construct
  misc_feature 1..19: note = Probe
  source 1..19: mol_type = other DNA
gggtagagcatttgactgc

SEQ ID NO: 10854 - DNA, 30 bp, synthetic construct; identical to SEQ ID NO: 6643
  misc_feature 1..30: note = Probe
  source 1..30: mol_type = other DNA

SEQ ID NO: 10855 - DNA, 17 bp, synthetic construct
  misc_feature 1..17: note = Probe
  source 1..17: mol_type = other DNA
gggtatgattctcgctt

SEQ ID NO: 10856 - DNA, 15 bp, synthetic construct
  misc_feature 1..15: note = Probe
  source 1..15: mol_type = other DNA
gggtatgattctcgg

SEQ ID NO: 10857 - DNA, 28 bp, synthetic construct
  misc_feature 1..28: note = Probe
  source 1..28: mol_type = other DNA
gggtccagggttcaagtccctgttcggg

SEQ ID NO: 10858 - DNA, 30 bp, synthetic construct
  misc_feature 1..30: note = Probe
  source 1..30: mol_type = other DNA
gggtccagggttcaagtccctgttcgggcg

SEQ ID NO: 10859 - DNA, 20 bp, synthetic construct
  misc_feature 1..20: note = Probe
  source 1..20: mol_type = other DNA
gggtcgtgggttcgagcccc

SEQ ID NO: 10860 - DNA, 23 bp, synthetic construct
  misc_feature 1..23: note = Probe
  source 1..23: mol_type = other DNA
gggtcgtgggttcgagccccacg

SEQ ID NO: 10861 - DNA, 30 bp, synthetic construct
  misc_feature 1..30: note = Probe
  source 1..30: mol_type = other DNA
gggtcgtgggttcgagccccacgttgggcg

SEQ ID NO: 10862 - DNA, 20 bp, synthetic construct
  misc_feature 1..20: note = Probe
  source 1..20: mol_type = other DNA
gggtgcgagaggtcccgggt

SEQ ID NO: 10863 - DNA, 28 bp, synthetic construct
  misc_feature 1..28: note = Probe
  source 1..28: mol_type = other DNA
gggtggttcagtggtagaattctcgcct

SEQ ID NO: 10864 - DNA, 20 bp, synthetic construct
  misc_feature 1..20: note = Probe
  source 1..20: mol_type = other DNA
gggttcaagtccctgttcgg

SEQ ID NO: 10865 - DNA, 23 bp, synthetic construct
  misc_feature 1..23: note = Probe
  source 1..23: mol_type = other DNA
gggttcaagtccctgttcgggcg

SEQ ID NO: 10866 - DNA, 24 bp, synthetic construct
  misc_feature 1..24: note = Probe
  source 1..24: mol_type = other DNA
gggttcaattcccggtcagggaac

SEQ ID NO: 10867 - DNA, 26 bp, synthetic construct
  misc_feature 1..26: note = Probe
  source 1..26: mol_type = other DNA
gggttcaattcccggtcagggaacca

SEQ ID NO: 10868 - DNA, 23 bp, synthetic construct
  misc_feature 1..23: note = Probe
  source 1..23: mol_type = other DNA
gggttcgaatcccatcctcgtcg

SEQ ID NO: 10869 - DNA, 24 bp, synthetic construct
  misc_feature 1..24: note = Probe
  source 1..24: mol_type = other DNA
gggttcgaatcccatcctcgtcgc

SEQ ID NO: 10870 - DNA, 24 bp, synthetic construct
  misc_feature 1..24: note = Probe
  source 1..24: mol_type = other DNA
gggttcgactcccggtgtgggaac

SEQ ID NO: 10871 - DNA, 24 bp, synthetic construct
  misc_feature 1..24: note = Probe
  source 1..24: mol_type = other DNA
gggttcgattccccgacggggaga

SEQ ID NO: 10872 - DNA, 25 bp, synthetic construct
  misc_feature 1..25: note = Probe
  source 1..25: mol_type = other DNA
gggttcgattccccgacggggagac

SEQ ID NO: 10873 - DNA, 24 bp, synthetic construct
  misc_feature 1..24: note = Probe
  source 1..24: mol_type = other DNA
gggttcgattccccgacggggagg

SEQ ID NO: 10874 - DNA, 25 bp, synthetic construct
  misc_feature 1..25: note = Probe
  source 1..25: mol_type = other DNA
gggttcgattccccgacggggaggc

SEQ ID NO: 10875 - DNA, 26 bp, synthetic construct
  misc_feature 1..26: note = Probe
  source 1..26: mol_type = other DNA
gggttcgattccccgacggggaggca

SEQ ID NO: 10876 - DNA, 23 bp, synthetic construct
  misc_feature 1..23: note = Probe
  source 1..23: mol_type = other DNA
gggttcgattcccggtcagggaa

SEQ ID NO: 10877 - DNA, 24 bp, synthetic construct
  misc_feature 1..24: note = Probe
  source 1..24: mol_type = other DNA
gggttcgattcccggtcagggaaa

SEQ ID NO: 10878 - DNA, 24 bp, synthetic construct
  misc_feature 1..24: note = Probe
  source 1..24: mol_type = other DNA
gggttcgattcccggtcagggaag

SEQ ID NO: 10879 - DNA, 24 bp, synthetic construct
  misc_feature 1..24: note = Probe
  source 1..24: mol_type = other DNA
gggttcgattcccggtcagggaat

SEQ ID NO: 10880 - DNA, 24 bp, synthetic construct
  misc_feature 1..24: note = Probe
  source 1..24: mol_type = other DNA
gggttcgattcccggtcatggaac

SEQ ID NO: 10881 - DNA, 26 bp, synthetic construct
  misc_feature 1..26: note = Probe
  source 1..26: mol_type = other DNA
gggttcgattcccggtcatggaacca

SEQ ID NO: 10882 - DNA, 15 bp, synthetic construct
  misc_feature 1..15: note = Probe
  source 1..15: mol_type = other DNA
gggttgctgtctttt

SEQ ID NO: 10883 - DNA, 19 bp, synthetic construct
  misc_feature 1..19: note = Probe
  source 1..19: mol_type = other DNA
gggttttgcagtccttagc

SEQ ID NO: 10884 - DNA, 15 bp, synthetic construct
  misc_feature 1..15: note = Probe
  source 1..15: mol_type = other DNA
ggtaaaatggctgag

SEQ ID NO: 10885 - DNA, 16 bp, synthetic construct
  misc_feature 1..16: note = Probe
  source 1..16: mol_type = other DNA
ggtaaaatggctgagt

SEQ ID NO: 10886 - DNA, 17 bp, synthetic construct
  misc_feature 1..17: note = Probe
  source 1..17: mol_type = other DNA
ggtaaaatggctgagtg

SEQ ID NO: 10887 - DNA, 19 bp, synthetic construct
  misc_feature 1..19: note = Probe
  source 1..19: mol_type = other DNA
ggtaaaatggctgagtgaa

SEQ ID NO: 10888 - DNA, 20 bp, synthetic construct
  misc_feature 1..20: note = Probe
  source 1..20: mol_type = other DNA
ggtaaaatggctgagtgaag

SEQ ID NO: 10889 - DNA, 21 bp, synthetic construct
  misc_feature 1..21: note = Probe
  source 1..21: mol_type = other DNA
ggtaaaatggctgagtgaagc

SEQ ID NO: 10890 - DNA, 22 bp, synthetic construct
  misc_feature 1..22: note = Probe
  source 1..22: mol_type = other DNA
ggtaaaatggctgagtgaagca

SEQ ID NO: 10891 - DNA, 23 bp, synthetic construct
  misc_feature 1..23: note = Probe
  source 1..23: mol_type = other DNA
ggtaaaatggctgagtgaagcat

SEQ ID NO: 10892 - DNA, 24 bp, synthetic construct
  misc_feature 1..24: note = Probe
  source 1..24: mol_type = other DNA
ggtaaaatggctgagtgaagcatt

SEQ ID NO: 10893 - DNA, 25 bp, synthetic construct
  misc_feature 1..25: note = Probe
  source 1..25: mol_type = other DNA
ggtaaaatggctgagtgaagcattg

SEQ ID NO: 10894 - DNA, 26 bp, synthetic construct
  misc_feature 1..26: note = Probe
  source 1..26: mol_type = other DNA
ggtaaaatggctgagtgaagcattgg

SEQ ID NO: 10895 - DNA, 27 bp, synthetic construct
  misc_feature 1..27: note = Probe
  source 1..27: mol_type = other DNA
ggtaaaatggctgagtgaagcattgga

SEQ ID NO: 10896 - DNA, 28 bp, synthetic construct
  misc_feature 1..28: note = Probe
  source 1..28: mol_type = other DNA
ggtaaaatggctgagtgaagcattggac

SEQ ID NO: 10897 - DNA, 29 bp, synthetic construct
  misc_feature 1..29: note = Probe
  source 1..29: mol_type = other DNA
ggtaaaatggctgagtgaagcattggact

SEQ ID NO: 10898 - DNA, 30 bp, synthetic construct; identical to SEQ ID NO: 6688
  misc_feature 1..30: note = Probe
  source 1..30: mol_type = other DNA

SEQ ID NO: 10899 - DNA, 15 bp, synthetic construct
  misc_feature 1..15: note = Probe
  source 1..15: mol_type = other DNA
ggtagaattctcgcc

SEQ ID NO: 10900 - DNA, 16 bp, synthetic construct
  misc_feature 1..16: note = Probe
  source 1..16: mol_type = other DNA
ggtagaattctcgcct

SEQ ID NO: 10901 - DNA, 17 bp, synthetic construct
  misc_feature 1..17: note = Probe
  source 1..17: mol_type = other DNA
ggtagaattctcgcctg

SEQ ID NO: 10902 - DNA, 18 bp, synthetic construct
  misc_feature 1..18: note = Probe
  source 1..18: mol_type = other DNA
ggtagaattctcgcctgc

SEQ ID NO: 10903 - DNA, 19 bp, synthetic construct
  misc_feature 1..19: note = Probe
  source 1..19: mol_type = other DNA
ggtagaattctcgcctgcc

SEQ ID NO: 10904 - DNA, 18 bp, synthetic construct
  misc_feature 1..18: note = Probe
  source 1..18: mol_type = other DNA
ggtagagcatttgactgc

SEQ ID NO: 10905 - DNA, 20 bp, synthetic construct
  misc_feature 1..20: note = Probe
  source 1..20: mol_type = other DNA
ggtagagcggaggactgtag

SEQ ID NO: 10906 - DNA, 15 bp, synthetic construct
  misc_feature 1..15: note = Probe
  source 1..15: mol_type = other DNA
ggtagcgtggccgag

SEQ ID NO: 10907 - DNA, 27 bp, synthetic construct
  misc_feature 1..27: note = Probe
  source 1..27: mol_type = other DNA
ggtagcgtggccgagcggtctaaggcg

SEQ ID NO: 10908 - DNA, 28 bp, synthetic construct
  misc_feature 1..28: note = Probe
  source 1..28: mol_type = other DNA
ggtagcgtggccgagcggtctaaggcgc

SEQ ID NO: 10909 - DNA, 16 bp, synthetic construct
  misc_feature 1..16: note = Probe
  source 1..16: mol_type = other DNA
ggtagcgtggccgagt

SEQ ID NO: 10910 - DNA, 18 bp, synthetic construct
  misc_feature 1..18: note = Probe
  source 1..18: mol_type = other DNA
ggtagcgtggccgagtgg

SEQ ID NO: 10911 - DNA, 19 bp, synthetic construct
  misc_feature 1..19: note = Probe
  source 1..19: mol_type = other DNA
ggtagcgtggccgagtggt

SEQ ID NO: 10912 - DNA, 20 bp, synthetic construct
  misc_feature 1..20: note = Probe
  source 1..20: mol_type = other DNA
ggtagcgtggccgagtggtc

SEQ ID NO: 10913 - DNA, 21 bp, synthetic construct
  misc_feature 1..21: note = Probe
  source 1..21: mol_type = other DNA
ggtagcgtggccgagtggtct

SEQ ID NO: 10914 - DNA, 23 bp, synthetic construct
  misc_feature 1..23: note = Probe
  source 1..23: mol_type = other DNA
ggtagcgtggccgagtggtctaa

SEQ ID NO: 10915 - DNA, 27 bp, synthetic construct
  misc_feature 1..27: note = Probe
  source 1..27: mol_type = other DNA
ggtagcgtggccgagtggtctaaggcg

SEQ ID NO: 10916 - DNA, 28 bp, synthetic construct
  misc_feature 1..28: note = Probe
  source 1..28: mol_type = other DNA
ggtagcgtggccgagtggtctaaggcgc

SEQ ID NO: 10917 - DNA, 29 bp, synthetic construct
  misc_feature 1..29: note = Probe
  source 1..29: mol_type = other DNA
ggtagcgtggccgagtggtctaaggcgct

SEQ ID NO: 10918 - DNA, 30 bp, synthetic construct
  misc_feature 1..30: note = Probe
  source 1..30: mol_type = other DNA
ggtagcgtggccgagtggtctaaggcgctg

SEQ ID NO: 10919 - DNA, 19 bp, synthetic construct
  misc_feature 1..19: note = Probe
  source 1..19: mol_type = other DNA
ggtagggtggccgagcggt

SEQ ID NO: 10920 - DNA, 29 bp, synthetic construct
  misc_feature 1..29: note = Probe
  source 1..29: mol_type = other DNA
ggtagggtggccgagcggtctaaggcact

SEQ ID NO: 10921 - DNA, 30 bp, synthetic construct
  misc_feature 1..30: note = Probe
  source 1..30: mol_type = other DNA
ggtagggtggccgagcggtctaaggcactg

SEQ ID NO: 10922 - DNA, 15 bp, synthetic construct
  misc_feature 1..15: note = Probe
  source 1..15: mol_type = other DNA
ggtagtgtggccgag

SEQ ID NO: 10923 - DNA, 16 bp, synthetic construct
  misc_feature 1..16: note = Probe
  source 1..16: mol_type = other DNA
ggtagtgtggccgagc

SEQ ID NO: 10924 - DNA, 18 bp, synthetic construct
  misc_feature 1..18: note = Probe
  source 1..18: mol_type = other DNA
ggtagtgtggccgagcgg

SEQ ID NO: 10925 - DNA, 19 bp, synthetic construct
  misc_feature 1..19: note = Probe
  source 1..19: mol_type = other DNA
ggtagtgtggccgagcggt

SEQ ID NO: 10926 - DNA, 20 bp, synthetic construct
  misc_feature 1..20: note = Probe
  source 1..20: mol_type = other DNA
ggtagtgtggccgagcggtc

SEQ ID NO: 10927 - DNA, 21 bp, synthetic construct
  misc_feature 1..21: note = Probe
  source 1..21: mol_type = other DNA
ggtagtgtggccgagcggtct

SEQ ID NO: 10928 - DNA, 22 bp, synthetic construct
  misc_feature 1..22: note = Probe
  source 1..22: mol_type = other DNA
ggtagtgtggccgagcggtcta

SEQ ID NO: 10929 - DNA, 24 bp, synthetic construct
  misc_feature 1..24: note = Probe
  source 1..24: mol_type = other DNA
ggtagtgtggccgagcggtctaag

SEQ ID NO: 10930 - DNA, 27 bp, synthetic construct
  misc_feature 1..27: note = Probe
  source 1..27: mol_type = other DNA
ggtagtgtggccgagcggtctaaggcg

SEQ ID NO: 10931 - DNA, 29 bp, synthetic construct
  misc_feature 1..29: note = Probe
  source 1..29: mol_type = other DNA
ggtagtgtggccgagcggtctaaggcgct

SEQ ID NO: 10932 - DNA, 29 bp, synthetic construct
  misc_feature 1..29: note = Probe
  source 1..29: mol_type = other DNA
ggtatagctcagtggtagagcatttgact

SEQ ID NO: 10933 - DNA, 30 bp, synthetic construct; identical to SEQ ID NO: 6722
  misc_feature 1..30: note = Probe
  source 1..30: mol_type = other DNA

SEQ ID NO: 10934 - DNA, 15 bp, synthetic construct
  misc_feature 1..15: note = Probe
  source 1..15: mol_type = other DNA
ggtcccatggtgtaa

SEQ ID NO: 10935 - DNA, 16 bp, synthetic construct
  misc_feature 1..16: note = Probe
  source 1..16: mol_type = other DNA
ggtcccatggtgtaat

SEQ ID NO: 10936 - DNA, 17 bp, synthetic construct
  misc_feature 1..17: note = Probe
  source 1..17: mol_type = other DNA
ggtcccatggtgtaatg

SEQ ID NO: 10937 - DNA, 18 bp, synthetic construct
  misc_feature 1..18: note = Probe
  source 1..18: mol_type = other DNA
ggtcccatggtgtaatgg

SEQ ID NO: 10938 - DNA, 20 bp, synthetic construct
  misc_feature 1..20: note = Probe
  source 1..20: mol_type = other DNA
ggtcccatggtgtaatggtt

SEQ ID NO: 10939 - DNA, 22 bp, synthetic construct
  misc_feature 1..22: note = Probe
  source 1..22: mol_type = other DNA
ggtcccatggtgtaatggttag

SEQ ID NO: 10940 - DNA, 24 bp, synthetic construct
  misc_feature 1..24: note = Probe
  source 1..24: mol_type = other DNA
ggtcccatggtgtaatggttagca

SEQ ID NO: 10941 - DNA, 25 bp, synthetic construct
  misc_feature 1..25: note = Probe
  source 1..25: mol_type = other DNA
ggtcccatggtgtaatggttagcac

SEQ ID NO: 10942 - DNA, 26 bp, synthetic construct
  misc_feature 1..26: note = Probe
  source 1..26: mol_type = other DNA
ggtcccatggtgtaatggttagcact

SEQ ID NO: 10943 - DNA, 27 bp, synthetic construct
  misc_feature 1..27: note = Probe
  source 1..27: mol_type = other DNA
ggtcccatggtgtaatggttagcactc

SEQ ID NO: 10944 - DNA, 28 bp, synthetic construct
  misc_feature 1..28: note = Probe
  source 1..28: mol_type = other DNA
ggtcccatggtgtaatggttagcactct

SEQ ID NO: 10945 - DNA, 30 bp, synthetic construct
  misc_feature 1..30: note = Probe
  source 1..30: mol_type = other DNA
ggtccccggttcgaaaccgggcggaaacac

SEQ ID NO: 10946 - DNA, 22 bp, synthetic construct
  misc_feature 1..22: note = Probe
  source 1..22: mol_type = other DNA
ggtcccgggttcaaatcccgga

SEQ ID NO: 10947 - DNA, 22 bp, synthetic construct
  misc_feature 1..22: note = Probe
  source 1..22: mol_type = other DNA
ggtcccgggttcgatccccggc

SEQ ID NO: 10948 - DNA, 22 bp, synthetic construct
  misc_feature 1..22: note = Probe
  source 1..22: mol_type = other DNA
ggtcctgggttcgagccccagt

SEQ ID NO: 10949 - DNA, 26 bp, synthetic construct
  misc_feature 1..26: note = Probe
  source 1..26: mol_type = other DNA
ggtcgatggatcgaaaccatcctctg

SEQ ID NO: 10950 - DNA, 19 bp, synthetic construct
  misc_feature 1..19: note = Probe
  source 1..19: mol_type = other DNA
ggtcgcgggttcgatcccc

SEQ ID NO: 10951 - DNA, 21 bp, synthetic construct
  misc_feature 1..21: note = Probe
  source 1..21: mol_type = other DNA
ggtcgcgggttcgatccccgt

SEQ ID NO: 10952 - DNA, 22 bp, synthetic construct
  misc_feature 1..22: note = Probe
  source 1..22: mol_type = other DNA
ggtcgcgggttcgatccccgta

SEQ ID NO: 10953 - DNA, 26 bp, synthetic construct
  misc_feature 1..26: note = Probe
  source 1..26: mol_type = other DNA
ggtcgcgggttcgatccccgtacggg

SEQ ID NO: 10954 - DNA, 20 bp, synthetic construct
  misc_feature 1..20: note = Probe
  source 1..20: mol_type = other DNA
ggtcgctggttcgattccgg

SEQ ID NO: 10955 - DNA, 21 bp, synthetic construct
  misc_feature 1..21: note = Probe
  source 1..21: mol_type = other DNA
ggtcgctggttcgattccggc

SEQ ID NO: 10956 - DNA, 19 bp, synthetic construct
  misc_feature 1..19: note = Probe
  source 1..19: mol_type = other DNA
ggtcgtgggttcgagcccc

SEQ ID NO: 10957 - DNA, 15 bp, synthetic construct
  misc_feature 1..15: note = Probe
  source 1..15: mol_type = other DNA
ggtcgtggttgtagt

SEQ ID NO: 10958 - DNA, 16 bp, synthetic construct
  misc_feature 1..16: note = Probe
  source 1..16: mol_type = other DNA
ggtcgtggttgtagtc

SEQ ID NO: 10959 - DNA, 17 bp, synthetic construct
  misc_feature 1..17: note = Probe
  source 1..17: mol_type = other DNA
ggtcgtggttgtagtcc

SEQ ID NO: 10960 - DNA, 18 bp, synthetic construct
  misc_feature 1..18: note = Probe
  source 1..18: mol_type = other DNA
ggtcgtggttgtagtccg

SEQ ID NO: 10961 - DNA, 20 bp, synthetic construct
  misc_feature 1..20: note = Probe
  source 1..20: mol_type = other DNA
ggtcgtggttgtagtccgtg

SEQ ID NO: 10962 - DNA, 23 bp, synthetic construct
  misc_feature 1..23: note = Probe
  source 1..23: mol_type = other DNA
ggtcgtggttgtagtccgtgcga

SEQ ID NO: 10963 - DNA, 24 bp, synthetic construct
  misc_feature 1..24: note = Probe
  source 1..24: mol_type = other DNA
ggtcgtggttgtagtccgtgcgag

SEQ ID NO: 10964 - DNA, 26 bp, synthetic construct
  misc_feature 1..26: note = Probe
  source 1..26: mol_type = other DNA
ggtcgtggttgtagtccgtgcgagaa

SEQ ID NO: 10965 - DNA, 28 bp, synthetic construct
  misc_feature 1..28: note = Probe
  source 1..28: mol_type = other DNA
ggtcgtggttgtagtccgtgcgagaata

SEQ ID NO: 10966 - DNA, 29 bp, synthetic construct
  misc_feature 1..29: note = Probe
  source 1..29: mol_type = other DNA
ggtcgtggttgtagtccgtgcgagaataa

SEQ ID NO: 10967 - DNA, 19 bp, synthetic construct
  misc_feature 1..19: note = Probe
  source 1..19: mol_type = other DNA
ggtctaaggcgctgcgttc

SEQ ID NO: 10968 - DNA, 18 bp, synthetic construct
  misc_feature 1..18: note = Probe
  source 1..18: mol_type = other DNA
ggtctagtggttaggatt

SEQ ID NO: 10969 - DNA, 20 bp, synthetic construct
  misc_feature 1..20: note = Probe
  source 1..20: mol_type = other DNA
ggtctagtggttaggattcg

SEQ ID NO: 10970 - DNA, 21 bp, synthetic construct
  misc_feature 1..21: note = Probe
  source 1..21: mol_type = other DNA
ggtctagtggttaggattcgg

SEQ ID NO: 10971 - DNA, 23 bp, synthetic construct
  misc_feature 1..23: note = Probe
  source 1..23: mol_type = other DNA
ggtctagtggttaggattcggcg

SEQ ID NO: 10972 - DNA, 24 bp, synthetic construct
  misc_feature 1..24: note = Probe
  source 1..24: mol_type = other DNA
ggtctagtggttaggattcggcgc

SEQ ID NO: 10973 - DNA, 25 bp, synthetic construct
  misc_feature 1..25: note = Probe
  source 1..25: mol_type = other DNA
ggtctagtggttaggattcggcgct

SEQ ID NO: 10974 - DNA, 26 bp, synthetic construct
  misc_feature 1..26: note = Probe
  source 1..26: mol_type = other DNA
ggtctagtggttaggattcggcgctc

SEQ ID NO: 10975 - DNA, 17 bp, synthetic construct
  misc_feature 1..17: note = Probe
  source 1..17: mol_type = other DNA
ggtctccggatggaggc

SEQ ID NO: 10976 - DNA, 17 bp, synthetic construct
  misc_feature 1..17: note = Probe
  source 1..17: mol_type = other DNA
ggtgagcactctggact

SEQ ID NO: 10977 - DNA, 18 bp, synthetic construct
  misc_feature 1..18: note = Probe
  source 1..18: mol_type = other DNA
ggtgagtatccccgcctg

SEQ ID NO: 10978 - DNA, 19 bp, synthetic construct
  misc_feature 1..19: note = Probe
  source 1..19: mol_type = other DNA
ggtgagtatccccgcctgt

SEQ ID NO: 10979 - DNA, 20 bp, synthetic construct
  misc_feature 1..20: note = Probe
  source 1..20: mol_type = other DNA
ggtgagtatccccgcctgtc

SEQ ID NO: 10980 - DNA, 24 bp, synthetic construct
  misc_feature 1..24: note = Probe
  source 1..24: mol_type = other DNA
ggtgcagtggtagaattctcgcct

SEQ ID NO: 10981 - DNA, 26 bp, synthetic construct
  misc_feature 1..26: note = Probe
  source 1..26: mol_type = other DNA
ggtggagttaaagactttttctctga

SEQ ID NO: 10982 - DNA, 27 bp, synthetic construct
  misc_feature 1..27: note = Probe
  source 1..27: mol_type = other DNA
ggtggagttaaagactttttctctgat

SEQ ID NO: 10983 - DNA, 19 bp, synthetic construct
  misc_feature 1..19: note = Probe
  source 1..19: mol_type = other DNA
ggtggccgagtggttaagg

SEQ ID NO: 10984 - DNA, 19 bp, synthetic construct
  misc_feature 1..19: note = Probe
  source 1..19: mol_type = other DNA
ggtggtagagcatttgact

SEQ ID NO: 10985 - DNA, 20 bp, synthetic construct
  misc_feature 1..20: note = Probe
  source 1..20: mol_type = other DNA
ggtggtagagcatttgactg

SEQ ID NO: 10986 - DNA, 21 bp, synthetic construct
  misc_feature 1..21: note = Probe
  source 1..21: mol_type = other DNA
ggtggtagagcatttgactgc

SEQ ID NO: 10987 - DNA, 15 bp, synthetic construct
  misc_feature 1..15: note = Probe
  source 1..15: mol_type = other DNA
ggtggtctagtggtt

SEQ ID NO: 10988 - DNA, 23 bp, synthetic construct
  misc_feature 1..23: note = Probe
  source 1..23: mol_type = other DNA
ggtggtctagtggttaggattcg

SEQ ID NO: 10989 - DNA, 24 bp, synthetic construct
  misc_feature 1..24: note = Probe
  source 1..24: mol_type = other DNA
ggtggtctagtggttaggattcgg

SEQ ID NO: 10990 - DNA, 25 bp, synthetic construct
  misc_feature 1..25: note = Probe
  source 1..25: mol_type = other DNA
ggtggtctagtggttaggattcggc

SEQ ID NO: 10991 - DNA, 26 bp, synthetic construct
  misc_feature 1..26: note = Probe
  source 1..26: mol_type = other DNA
ggtggtctagtggttaggattcggcg

SEQ ID NO: 10992 - DNA, 27 bp, synthetic construct
  misc_feature 1..27: note = Probe
  source 1..27: mol_type = other DNA
ggtggtctagtggttaggattcggcgc

SEQ ID NO: 10993 - DNA, 28 bp, synthetic construct
  misc_feature 1..28: note = Probe
  source 1..28: mol_type = other DNA
ggtggtctagtggttaggattcggcgct

SEQ ID NO: 10994 - DNA, 29 bp, synthetic construct
  misc_feature 1..29: note = Probe
  source 1..29: mol_type = other DNA
ggtggtctagtggttaggattcggcgctc

SEQ ID NO: 10995 - DNA, 17 bp, synthetic construct
  misc_feature 1..17: note = Probe
  source 1..17: mol_type = other DNA
ggtggttcagtggtaga

SEQ ID NO: 10996 - DNA, 18 bp, synthetic construct
  misc_feature 1..18: note = Probe
  source 1..18: mol_type = other DNA
ggtggttcagtggtagaa

SEQ ID NO: 10997 - DNA, 19 bp, synthetic construct
  misc_feature 1..19: note = Probe
  source 1..19: mol_type = other DNA
ggtggttcagtggtagaat

SEQ ID NO: 10998 - DNA, 20 bp, synthetic construct
  misc_feature 1..20: note = Probe
  source 1..20: mol_type = other DNA
ggtggttcagtggtagaatt

SEQ ID NO: 10999 - DNA, 22 bp, synthetic construct
  misc_feature 1..22: note = Probe
  source 1..22: mol_type = other DNA
ggtggttcagtggtagaattct

SEQ ID NO: 11000 - DNA, 23 bp, synthetic construct
  misc_feature 1..23: note = Probe
  source 1..23: mol_type = other DNA
ggtggttcagtggtagaattctc

SEQ ID NO: 11001 - DNA, 24 bp, synthetic construct
  misc_feature 1..24: note = Probe
  source 1..24: mol_type = other DNA
ggtggttcagtggtagaattctcg

SEQ ID NO: 11002 - DNA, 25 bp, synthetic construct
  misc_feature 1..25: note = Probe
  source 1..25: mol_type = other DNA
ggtggttcagtggtagaattctcgc

SEQ ID NO: 11003 - DNA, 26 bp, synthetic construct
  misc_feature 1..26: note = Probe
  source 1..26: mol_type = other DNA
ggtggttcagtggtagaattctcgcc

SEQ ID NO: 11004 - DNA, 27 bp, synthetic construct
  misc_feature 1..27: note = Probe
  source 1..27: mol_type = other DNA
ggtggttcagtggtagaattctcgcct

SEQ ID NO: 11005 - DNA, 28 bp, synthetic construct
  misc_feature 1..28: note = Probe
  source 1..28: mol_type = other DNA
ggtggttcagtggtagaattctcgcctg

SEQ ID NO: 11006 - DNA, 29 bp, synthetic construct
  misc_feature 1..29: note = Probe
  source 1..29: mol_type = other DNA
ggtggttcagtggtagaattctcgcctgc

SEQ ID NO: 11007 - DNA, 30 bp, synthetic construct; identical to SEQ ID NO: 6787
  misc_feature 1..30: note = Probe
  source 1..30: mol_type = other DNA

SEQ ID NO: 11008 - DNA, 21 bp, synthetic construct
  misc_feature 1..21: note = Probe
  source 1..21: mol_type = other DNA
ggtgtaatggttagcactctg

SEQ ID NO: 11009 - DNA, 22 bp, synthetic construct
  misc_feature 1..22: note = Probe
  source 1..22: mol_type = other DNA
ggtgtaatggttagcactctgg

SEQ ID NO: 11010 - DNA, 23 bp, synthetic construct
  misc_feature 1..23: note = Probe
  source 1..23: mol_type = other DNA
ggtgtaatggttagcactctgga

SEQ ID NO: 11011 - DNA, 24 bp, synthetic construct
  misc_feature 1..24: note = Probe
  source 1..24: mol_type = other DNA
ggtgtaatggttagcactctggac

SEQ ID NO: 11012 - DNA, 25 bp, synthetic construct
  misc_feature 1..25: note = Probe
  source 1..25: mol_type = other DNA
ggtgtaatggttagcactctggact

SEQ ID NO: 11013 - DNA, 26 bp, synthetic construct
  misc_feature 1..26: note = Probe
  source 1..26: mol_type = other DNA
ggtgtaatggttagcactctggactc

SEQ ID NO: 11014 - DNA, 27 bp, synthetic construct
  misc_feature 1..27: note = Probe
  source 1..27: mol_type = other DNA
ggtgtaatggttagcactctggactct

SEQ ID NO: 11015 - DNA, 29 bp, synthetic construct
  misc_feature 1..29: note = Probe
  source 1..29: mol_type = other DNA
ggtgtaatggttagcactctggactctga

SEQ ID NO: 11016 - DNA, 21 bp, synthetic construct
  misc_feature 1..21: note = Probe
  source 1..21: mol_type = other DNA
ggtgtagtggtatcatgcaag

SEQ ID NO: 11017 - DNA, 25 bp, synthetic construct
  misc_feature 1..25: note = Probe
  source 1..25: mol_type = other DNA
ggtgtagtggtatcatgcaagattc

SEQ ID NO: 11018 - DNA, 18 bp, synthetic construct
  misc_feature 1..18: note = Probe
  source 1..18: mol_type = other DNA
ggtgttaatcttggcttt

SEQ ID NO: 11019 - DNA, 15 bp, synthetic construct
  misc_feature 1..15: note = Probe
  source 1..15: mol_type = other DNA
ggttagcactctgga

SEQ ID NO: 11020 - DNA, 16 bp, synthetic construct
  misc_feature 1..16: note = Probe
  source 1..16: mol_type = other DNA
ggttagcactctggac

SEQ ID NO: 11021 - DNA, 17 bp, synthetic construct
  misc_feature 1..17: note = Probe
  source 1..17: mol_type = other DNA
ggttagcactctggact

SEQ ID NO: 11022 - DNA, 18 bp, synthetic construct
  misc_feature 1..18: note = Probe
  source 1..18: mol_type = other DNA
ggttagcactctggactc

SEQ ID NO: 11023 - DNA, 19 bp, synthetic construct
  misc_feature 1..19: note = Probe
  source 1..19: mol_type = other DNA
ggttagcactctggactct

SEQ ID NO: 11024 - DNA, 20 bp, synthetic construct
  misc_feature 1..20: note = Probe
  source 1..20: mol_type = other DNA
ggttagcactctggactctg

SEQ ID NO: 11025 - DNA, 21 bp, synthetic construct
  misc_feature 1..21: note = Probe
  source 1..21: mol_type = other DNA
ggttagcactctggactctga

SEQ ID NO: 11026 - DNA, 22 bp, synthetic construct
  misc_feature 1..22: note = Probe
  source 1..22: mol_type = other DNA
ggttagcactctggactctgaa

SEQ ID NO: 11027 - DNA, 23 bp, synthetic construct
  misc_feature 1..23: note = Probe
  source 1..23: mol_type = other DNA
ggttagcactctggactctgaat

SEQ ID NO: 11028 - DNA, 25 bp, synthetic construct
  misc_feature 1..25: note = Probe
  source 1..25: mol_type = other DNA
ggttagcactctggactctgaatcc

SEQ ID NO: 11029 - DNA, 28 bp, synthetic construct
  misc_feature 1..28: note = Probe
  source 1..28: mol_type = other DNA
ggttagcactctggactctgaatccagc

SEQ ID NO: 11030 - DNA, 18 bp, synthetic construct
  misc_feature 1..18: note = Probe
  source 1..18: mol_type = other DNA
ggttagcactctggactt

SEQ ID NO: 11031 - DNA, 19 bp, synthetic construct
  misc_feature 1..19: note = Probe
  source 1..19: mol_type = other DNA
ggttagcactctggacttt

SEQ ID NO: 11032 - DNA, 20 bp, synthetic construct
  misc_feature 1..20: note = Probe
  source 1..20: mol_type = other DNA
ggttagcactctggactttg

SEQ ID NO: 11033 - DNA, 21 bp, synthetic construct
  misc_feature 1..21: note = Probe
  source 1..21: mol_type = other DNA
ggttagcactctggactttga

SEQ ID NO: 11034 - DNA, 22 bp, synthetic construct
  misc_feature 1..22: note = Probe
  source 1..22: mol_type = other DNA
ggttagcactctggactttgaa

SEQ ID NO: 11035 - DNA, 23 bp, synthetic construct
  misc_feature 1..23: note = Probe
  source 1..23: mol_type = other DNA
ggttagcactctggactttgaat

SEQ ID NO: 11036 - DNA, 24 bp, synthetic construct
  misc_feature 1..24: note = Probe
  source 1..24: mol_type = other DNA
ggttagcactctggactttgaatc

SEQ ID NO: 11037 - DNA, 17 bp, synthetic construct
  misc_feature 1..17: note = Probe
  source 1..17: mol_type = other DNA
ggttaggattcctggtt

SEQ ID NO: 11038 - DNA, 18 bp, synthetic construct
  misc_feature 1..18: note = Probe
  source 1..18: mol_type = other DNA
ggttaggattcctggttt

SEQ ID NO: 11039 - DNA, 19 bp, synthetic construct
  misc_feature 1..19: note = Probe
  source 1..19: mol_type = other DNA
ggttaggattcctggtttt

SEQ ID NO: 11040 - DNA, 16 bp, synthetic construct
  misc_feature 1..16: note = Probe
  source 1..16: mol_type = other DNA
ggttaggattcggcgc

SEQ ID NO: 11041 - DNA, 17 bp, synthetic construct
  misc_feature 1..17: note = Probe
  source 1..17: mol_type = other DNA
ggttaggattcggcgct

SEQ ID NO: 11042 - DNA, 18 bp, synthetic construct
  misc_feature 1..18: note = Probe
  source 1..18: mol_type = other DNA
ggttaggattcggcgctc

SEQ ID NO: 11043 - DNA, 19 bp, synthetic construct
  misc_feature 1..19: note = Probe
  source 1..19: mol_type = other DNA
ggttaggattcggcgctct

SEQ ID NO: 11044 - DNA, 20 bp, synthetic construct
  misc_feature 1..20: note = Probe
  source 1..20: mol_type = other DNA
ggttaggattcggcgctctc

SEQ ID NO: 11045 - DNA, 15 bp, synthetic construct
  misc_feature 1..15: note = Probe
  source 1..15: mol_type = other DNA
ggttagtactctgcg

SEQ ID NO: 11046 - DNA, 20 bp, synthetic construct
  misc_feature 1..20: note = Probe
  source 1..20: mol_type = other DNA
ggttagtactctgcgttgtg

SEQ ID NO: 11047 - DNA, 21 bp, synthetic construct
  misc_feature 1..21: note = Probe
  source 1..21: mol_type = other DNA
ggttagtactctgcgttgtgg

SEQ ID NO: 11048 - DNA, 22 bp, synthetic construct
  misc_feature 1..22: note = Probe
  source 1..22: mol_type = other DNA
ggttagtactctgcgttgtggc

SEQ ID NO: 11049 - DNA, 23 bp, synthetic construct
  misc_feature 1..23: note = Probe
  source 1..23: mol_type = other DNA
ggttagtactctgcgttgtggcc

SEQ ID NO: 11050 - DNA, 24 bp, synthetic construct
  misc_feature 1..24: note = Probe
  source 1..24: mol_type = other DNA
ggttagtactctgcgttgtggccg

SEQ ID NO: 11051 - DNA, 19 bp, synthetic construct
  misc_feature 1..19: note = Probe
  source 1..19: mol_type = other DNA
ggttcaaatcccggacgag

SEQ ID NO: 11052 - DNA, 25 bp, synthetic construct
  misc_feature 1..25: note = Probe
  source 1..25: mol_type = other DNA
ggttcaatccccggcacctccacca

SEQ ID NO: 11053 - DNA, 23 bp, synthetic construct
  misc_feature 1..23: note = Probe
  source 1..23: mol_type = other DNA
ggttcaattcccggtcagggaac

SEQ ID NO: 11054 - DNA, 24 bp, synthetic construct
  misc_feature 1..24: note = Probe
  source 1..24: mol_type = other DNA
ggttcaattcccggtcagggaacc

SEQ ID NO: 11055 - DNA, 25 bp, synthetic construct
  misc_feature 1..25: note = Probe
  source 1..25: mol_type = other DNA
ggttcaattcccggtcagggaacca

SEQ ID NO: 11056 - DNA, 15 bp, synthetic construct
  misc_feature 1..15: note = Probe
  source 1..15: mol_type = other DNA
ggttcagtggtagaa

SEQ ID NO: 11057 - DNA, 17 bp, synthetic construct
  misc_feature 1..17: note = Probe
  source 1..17: mol_type = other DNA
ggttcagtggtagaatt

SEQ ID NO: 11058 - DNA, 19 bp, synthetic construct
  misc_feature 1..19: note = Probe
  source 1..19: mol_type = other DNA
ggttcagtggtagaattct

SEQ ID NO: 11059 - DNA, 20 bp, synthetic construct
  misc_feature 1..20: note = Probe
  source 1..20: mol_type = other DNA
ggttcagtggtagaattctc

SEQ ID NO: 11060 - DNA, 21 bp, synthetic construct
  misc_feature 1..21: note = Probe
  source 1..21: mol_type = other DNA
ggttcagtggtagaattctcg

SEQ ID NO: 11061 - DNA, 22 bp, synthetic construct
  misc_feature 1..22: note = Probe
  source 1..22: mol_type = other DNA
ggttcagtggtagaattctcgc

SEQ ID NO: 11062 - DNA, 23 bp, synthetic construct
  misc_feature 1..23: note = Probe
  source 1..23: mol_type = other DNA
ggttcagtggtagaattctcgcc

SEQ ID NO: 11063 - DNA, 24 bp, synthetic construct
  misc_feature 1..24: note = Probe
  source 1..24: mol_type = other DNA
ggttcagtggtagaattctcgcct

SEQ ID NO: 11064 - DNA, 25 bp, synthetic construct
  misc_feature 1..25: note = Probe
  source 1..25: mol_type = other DNA
ggttcagtggtagaattctcgcctg

SEQ ID NO: 11065 - DNA, 26 bp, synthetic construct
  misc_feature 1..26: note = Probe
  source 1..26: mol_type = other DNA
ggttcagtggtagaattctcgcctgc

SEQ ID NO: 11066 - DNA, 27 bp, synthetic construct
  misc_feature 1..27: note = Probe
  source 1..27: mol_type = other DNA
ggttcagtggtagaattctcgcctgcc

SEQ ID NO: 11067 - DNA, 15 bp, synthetic construct
  misc_feature 1..15: note = Probe
  source 1..15: mol_type = other DNA
ggttccatagtgtag

SEQ ID NO: 11068 - DNA, 16 bp, synthetic construct
  misc_feature 1..16: note = Probe
  source 1..16: mol_type = other DNA
ggttccatagtgtagc

SEQ ID NO: 11069 - DNA, 18 bp, synthetic construct
  misc_feature 1..18: note = Probe
  source 1..18: mol_type = other DNA
ggttccatagtgtagcgg

SEQ ID NO: 11070 - DNA, 22 bp, synthetic construct
  misc_feature 1..22: note = Probe
  source 1..22: mol_type = other DNA
ggttccatagtgtagcggttat

SEQ ID NO: 11071 - DNA, 23 bp, synthetic construct
  misc_feature 1..23: note = Probe
  source 1..23: mol_type = other DNA
ggttccatagtgtagcggttatc

SEQ ID NO: 11072 - DNA, 25 bp, synthetic construct
  misc_feature 1..25: note = Probe
  source 1..25: mol_type = other DNA
ggttccatagtgtagcggttatcac

SEQ ID NO: 11073 - DNA, 26 bp, synthetic construct
  misc_feature 1..26: note = Probe
  source 1..26: mol_type = other DNA
ggttccatagtgtagcggttatcacg

SEQ ID NO: 11074 - DNA, 28 bp, synthetic construct
  misc_feature 1..28: note = Probe
  source 1..28: mol_type = other DNA
ggttccatagtgtagcggttatcacgtc

SEQ ID NO: 11075 - DNA, 29 bp, synthetic construct
  misc_feature 1..29: note = Probe
  source 1..29: mol_type = other DNA
ggttccatagtgtagcggttatcacgtct

SEQ ID NO: 11076 - DNA, 16 bp, synthetic construct
  misc_feature 1..16: note = Probe
  source 1..16: mol_type = other DNA
ggttccatagtgtagt

SEQ ID NO: 11077 - DNA, 17 bp, synthetic construct
  misc_feature 1..17: note = Probe
  source 1..17: mol_type = other DNA
ggttccatagtgtagtg

SEQ ID NO: 11078 - DNA, 18 bp, synthetic construct
  misc_feature 1..18: note = Probe
  source 1..18: mol_type = other DNA
ggttccatagtgtagtgg

SEQ ID NO: 11079 - DNA, 19 bp, synthetic construct
  misc_feature 1..19: note = Probe
  source 1..19: mol_type = other DNA
ggttccatagtgtagtggt

SEQ ID NO: 11080 - DNA, 20 bp, synthetic construct
  misc_feature 1..20: note = Probe
  source 1..20: mol_type = other DNA
ggttccatagtgtagtggtt

SEQ ID NO: 11081 - DNA, 22 bp, synthetic construct
  misc_feature 1..22: note = Probe
  source 1..22: mol_type = other DNA
ggttccatagtgtagtggttat

SEQ ID NO: 11082 - DNA, 24 bp, synthetic construct
  misc_feature 1..24: note = Probe
  source 1..24: mol_type = other DNA
ggttccatagtgtagtggttatca

SEQ ID NO: 11083 - DNA, 25 bp, synthetic construct
  misc_feature 1..25: note = Probe
  source 1..25: mol_type = other DNA
ggttccatagtgtagtggttatcac

SEQ ID NO: 11084 - DNA, 26 bp, synthetic construct
  misc_feature 1..26: note = Probe
  source 1..26: mol_type = other DNA
ggttccatagtgtagtggttatcaca

SEQ ID NO: 11085 - DNA, 30 bp, synthetic construct
  misc_feature 1..30: note = Probe
  source 1..30: mol_type = other DNA
ggttccatagtgtagtggttatcacatctg

SEQ ID NO: 11086 - DNA, 29 bp, synthetic construct
  misc_feature 1..29: note = Probe
  source 1..29: mol_type = other DNA
ggttccatagtgtagtggttatcacgtct

SEQ ID NO: 11087 - DNA, 15 bp, synthetic construct
  misc_feature 1..15: note = Probe
  source 1..15: mol_type = other DNA
ggttccatggtgtaa

SEQ ID NO: 11088 - DNA, 16 bp, synthetic construct
  misc_feature 1..16: note = Probe
  source 1..16: mol_type = other DNA
ggttccatggtgtaat

SEQ ID NO: 11089 - DNA, 17 bp, synthetic construct
  misc_feature 1..17: note = Probe
  source 1..17: mol_type = other DNA
ggttccatggtgtaatg

SEQ ID NO: 11090 - DNA, 18 bp, synthetic construct
  misc_feature 1..18: note = Probe
  source 1..18: mol_type = other DNA
ggttccatggtgtaatgg

SEQ ID NO: 11091 - DNA, 19 bp, synthetic construct
  misc_feature 1..19: note = Probe
  source 1..19: mol_type = other DNA
ggttccatggtgtaatggt

SEQ ID NO: 11092 - DNA, 30 bp, synthetic construct
  misc_feature 1..30: note = Probe
  source 1..30: mol_type = other DNA
ggttccatggtgtaatggtaagcaccctgg

SEQ ID NO: 11093 - DNA, 30 bp, synthetic construct
  misc_feature 1..30: note = Probe
  source 1..30: mol_type = other DNA
ggttccatggtgtaatggtaagcactctgg

SEQ ID NO: 11094 - DNA, 29 bp, synthetic construct
  misc_feature 1..29: note = Probe
  source 1..29: mol_type = other DNA
ggttccatggtgtaatggtgagcactctg

SEQ ID NO: 11095 - DNA, 30 bp, synthetic construct
  misc_feature 1..30: note = Probe
  source 1..30: mol_type = other DNA
ggttccatggtgtaatggtgagcactctgg

SEQ ID NO: 11096 - DNA, 20 bp, synthetic construct
  misc_feature 1..20: note = Probe
  source 1..20: mol_type = other DNA
ggttccatggtgtaatggtt

SEQ ID NO: 11097 - DNA, 21 bp, synthetic construct
  misc_feature 1..21: note = Probe
  source 1..21: mol_type = other DNA
ggttccatggtgtaatggtta

SEQ ID NO: 11098 - DNA, 22 bp, synthetic construct
  misc_feature 1..22: note = Probe
  source 1..22: mol_type = other DNA
ggttccatggtgtaatggttag

SEQ ID NO: 11099 - DNA, 23 bp, synthetic construct
  misc_feature 1..23: note = Probe
  source 1..23: mol_type = other DNA
ggttccatggtgtaatggttagc

SEQ ID NO: 11100 - DNA, 24 bp, synthetic construct
  misc_feature 1..24: note = Probe
  source 1..24: mol_type = other DNA
ggttccatggtgtaatggttagca

SEQ ID NO: 11101 - DNA, 25 bp, synthetic construct
  misc_feature 1..25: note = Probe
  source 1..25: mol_type = other DNA
ggttccatggtgtaatggttagcac

SEQ ID NO: 11102 - DNA, 26 bp, synthetic construct
  misc_feature 1..26: note = Probe
  source 1..26: mol_type = other DNA
ggttccatggtgtaatggttagcact

SEQ ID NO: 11103 - DNA, 27 bp, synthetic construct
  misc_feature 1..27: note = Probe
  source 1..27: mol_type = other DNA
ggttccatggtgtaatggttagcactc

SEQ ID NO: 11104 - DNA, 28 bp, synthetic construct
  misc_feature 1..28: note = Probe
  source 1..28: mol_type = other DNA
ggttccatggtgtaatggttagcactct

SEQ ID NO: 11105 - DNA, 29 bp, synthetic construct
  misc_feature 1..29: note = Probe
  source 1..29: mol_type = other DNA
ggttccatggtgtaatggttagcactctg

SEQ ID NO: 11106 - DNA, 22 bp, synthetic construct
  misc_feature 1..22: note = Probe
  source 1..22: mol_type = other DNA
ggttccgggttcgagtcccggc

SEQ ID NO: 11107 - DNA, 22 bp, synthetic construct
  misc_feature 1..22: note = Probe
  source 1..22: mol_type = other DNA
ggttcgaatcccaccagagtcg

SEQ ID NO: 11108 - DNA, 23 bp, synthetic construct
  misc_feature 1..23: note = Probe
  source 1..23: mol_type = other DNA
ggttcgaatcccatcctcgtcgc

SEQ ID NO: 11109 - DNA, 23 bp, synthetic construct
  misc_feature 1..23: note = Probe
  source 1..23: mol_type = other DNA
ggttcgactcccggtatgggaac

SEQ ID NO: 11110 - DNA, 21 bp, synthetic construct
  misc_feature 1..21: note = Probe
  source 1..21: mol_type = other DNA
ggttcgactcccggtgtggga

SEQ ID NO: 11111 - DNA, 22 bp, synthetic construct
  misc_feature 1..22: note = Probe
  source 1..22: mol_type = other DNA
ggttcgactcccggtgtgggaa

SEQ ID NO: 11112 - DNA, 22 bp, synthetic construct
  misc_feature 1..22: note = Probe
  source 1..22: mol_type = other DNA
ggttcgactcctggctggctcg

SEQ ID NO: 11113 - DNA, 23 bp, synthetic construct
  misc_feature 1..23: note = Probe
  source 1..23: mol_type = other DNA
ggttcgactcctggctggctcgc

SEQ ID NO: 11114 - DNA, 20 bp, synthetic construct
  misc_feature 1..20: note = Probe
  source 1..20: mol_type = other DNA
ggttcgagccccacgttggg

SEQ ID NO: 11115 - DNA, 23 bp, synthetic construct
  misc_feature 1..23: note = Probe
  source 1..23: mol_type = other DNA
ggttcgagccccacgttgggcgc

SEQ ID NO: 11116 - DNA, 22 bp, synthetic construct
  misc_feature 1..22: note = Probe
  source 1..22: mol_type = other DNA
ggttcgagtcccaccagagtcg

SEQ ID NO: 11117 - DNA, 23 bp, synthetic construct
  misc_feature 1..23: note = Probe
  source 1..23: mol_type = other DNA
ggttcgagtcccatctgggtcgc

SEQ ID NO: 11118 - DNA, 19 bp, synthetic construct
  misc_feature 1..19: note = Probe
  source 1..19: mol_type = other DNA
ggttcgagtcccggcggag

SEQ ID NO: 11119 - DNA, 18 bp, synthetic construct
  misc_feature 1..18: note = Probe
  source 1..18: mol_type = other DNA
ggttcgattccccgacgg

SEQ ID NO: 11120 - DNA, 19 bp, synthetic construct
  misc_feature 1..19: note = Probe
  source 1..19: mol_type = other DNA
ggttcgattccccgacggg

SEQ ID NO: 11121 - DNA, 23 bp, synthetic construct
  misc_feature 1..23: note = Probe
  source 1..23: mol_type = other DNA
ggttcgattccccgacggggaga

SEQ ID NO: 11122 - DNA, 24 bp, synthetic construct
  misc_feature 1..24: note = Probe
  source 1..24: mol_type = other DNA
ggttcgattccccgacggggagac

SEQ ID NO: 11123 - DNA, 23 bp, synthetic construct
  misc_feature 1..23: note = Probe
  source 1..23: mol_type = other DNA
ggttcgattccccgacggggagg

SEQ ID NO: 11124 - DNA, 24 bp, synthetic construct
  misc_feature 1..24: note = Probe
  source 1..24: mol_type = other DNA
ggttcgattccccgacggggaggc

SEQ ID NO: 11125 - DNA, 25 bp, synthetic construct
  misc_feature 1..25: note = Probe
  source 1..25: mol_type = other DNA
ggttcgattccccgacggggaggca

SEQ ID NO: 11126 - DNA, 19 bp, synthetic construct
  misc_feature 1..19: note = Probe
  source 1..19: mol_type = other DNA
ggttcgattcccggtcagg

SEQ ID NO: 11127 - DNA, 20 bp, synthetic construct
  misc_feature 1..20: note = Probe
  source 1..20: mol_type = other DNA
ggttcgattcccggtcaggg

SEQ ID NO: 11128 - DNA, 21 bp, synthetic construct
  misc_feature 1..21: note = Probe
  source 1..21: mol_type = other DNA
ggttcgattcccggtcaggga

SEQ ID NO: 11129 - DNA, 22 bp, synthetic construct
  misc_feature 1..22: note = Probe
  source 1..22: mol_type = other DNA
ggttcgattcccggtcagggaa

SEQ ID NO: 11130 - DNA, 23 bp, synthetic construct
  misc_feature 1..23: note = Probe
  source 1..23: mol_type = other DNA
ggttcgattcccggtcagggaaa

SEQ ID NO: 11131 - DNA, 23 bp, synthetic construct
  misc_feature 1..23: note = Probe
  source 1..23: mol_type = other DNA
ggttcgattcccggtcagggaag

SEQ ID NO: 11132 - DNA, 24 bp, synthetic construct
  misc_feature 1..24: note = Probe
  source 1..24: mol_type = other DNA
ggttcgattcccggtcagggaagc

SEQ ID NO: 11133 - DNA, 23 bp, synthetic construct
  misc_feature 1..23: note = Probe
  source 1..23: mol_type = other DNA
ggttcgattcccggtcagggaat

SEQ ID NO: 11134 - DNA, 23 bp, synthetic construct
  misc_feature 1..23: note = Probe
  source 1..23: mol_type = other DNA
ggttcgattcccggtcatggaac

SEQ ID NO: 11135 - DNA, 24 bp, synthetic construct
  misc_feature 1..24: note = Probe
  source 1..24: mol_type = other DNA
ggttcgattcccggtcatggaacc

SEQ ID NO: 11136 - DNA, 25 bp, synthetic construct
  misc_feature 1..25: note = Probe
  source 1..25: mol_type = other DNA
ggttcgattcccggtcatggaacca

SEQ ID NO: 11137 - DNA, 23 bp, synthetic construct
  misc_feature 1..23: note = Probe
  source 1..23: mol_type = other DNA
ggttcgattcctggtcagggaac

SEQ ID NO: 11138 - DNA, 24 bp, synthetic construct
  misc_feature 1..24: note = Probe
  source 1..24: mol_type = other DNA
ggttcgattcctggtcagggaacc

SEQ ID NO: 11139 - DNA, 25 bp, synthetic construct
  misc_feature 1..25: note = Probe
  source 1..25: mol_type = other DNA
ggttcgattcctggtcagggaacca

SEQ ID NO: 11140 - DNA, 24 bp, synthetic construct
  misc_feature 1..24: note = Probe
  source 1..24: mol_type = other DNA
ggttgcgtgttcaagtcacgtcgg

SEQ ID NO: 11141 - DNA, 15 bp, synthetic construct
  misc_feature 1..15: note = Probe
  source 1..15: mol_type = other DNA
ggttgctgtcttttt

SEQ ID NO: 11142 - DNA, 29 bp, synthetic construct
  misc_feature 1..29: note = Probe
  source 1..29: mol_type = other DNA
ggttggtggttcgagcccacccagggacg

SEQ ID NO: 11143 - DNA, 30 bp, synthetic construct
  misc_feature 1..30: note = Probe
  source 1..30: mol_type = other DNA
ggttggtggttcgagcccacccagggacgc

SEQ ID NO: 11144 - DNA, 22 bp, synthetic construct
  misc_feature 1..22: note = Probe
  source 1..22: mol_type = other DNA
ggttgtagtccgtgcgagaata

SEQ ID NO: 11145 - DNA, 18 bp, synthetic construct
  misc_feature 1..18: note = Probe
  source 1..18: mol_type = other DNA
ggttttgcagtccttagc

SEQ ID NO: 11146 - DNA, 29 bp, synthetic construct
  misc_feature 1..29: note = Probe
  source 1..29: mol_type = other DNA
ggtttttcatatcattggtcgtggttgta

SEQ ID NO: 11147 - DNA, 30 bp, synthetic construct
  misc_feature 1..30: note = Probe
  source 1..30: mol_type = other DNA
ggtttttcatatcattggtcgtggttgtag

SEQ ID NO: 11148 - DNA, 30 bp, synthetic construct
  misc_feature 1..30: note = Probe
  source 1..30: mol_type = other DNA
gtaaaatggctgagtgaagcattggactgt

SEQ ID NO: 11149 - DNA, 17 bp, synthetic construct
  misc_feature 1..17: note = Probe
  source 1..17: mol_type = other DNA
gtaaaccaggggtcgcg

SEQ ID NO: 11150 - DNA, 18 bp, synthetic construct
  misc_feature 1..18: note = Probe
  source 1..18: mol_type = other DNA
gtaaaccaggggtcgcga

SEQ ID NO: 11151 - DNA, 19 bp, synthetic construct
  misc_feature 1..19: note = Probe
  source 1..19: mol_type = other DNA
gtaaaccaggggtcgcgag

SEQ ID NO: 11152 - DNA, 20 bp, synthetic construct
  misc_feature 1..20: note = Probe
  source 1..20: mol_type = other DNA
gtaaaccaggggtcgcgagt

SEQ ID NO: 11153 - DNA, 30 bp, synthetic construct
  misc_feature 1..30: note = Probe
  source 1..30: mol_type = other DNA
gtaaatatagtttaaccaaaacatcagatt

SEQ ID NO: 11154 - DNA, 22 bp, synthetic construct
  misc_feature 1..22: note = Probe
  source 1..22: mol_type = other DNA
gtaatggtgagcactctggact

SEQ ID NO: 11155 - DNA, 15 bp, synthetic construct
  misc_feature 1..15: note = Probe
  source 1..15: mol_type = other DNA
gtaatggttagcact

SEQ ID NO: 11156 - DNA, 17 bp, synthetic construct
  misc_feature 1..17: note = Probe
  source 1..17: mol_type = other DNA
gtaatggttagcactct

SEQ ID NO: 11157 - DNA, 18 bp, synthetic construct
  misc_feature 1..18: note = Probe
  source 1..18: mol_type = other DNA
gtaatggttagcactctg

SEQ ID NO: 11158 - DNA, 19 bp, synthetic construct
  misc_feature 1..19: note = Probe
  source 1..19: mol_type = other DNA
gtaatggttagcactctgg

SEQ ID NO: 11159 - DNA, 20 bp, synthetic construct
  misc_feature 1..20: note = Probe
  source 1..20: mol_type = other DNA
gtaatggttagcactctgga

SEQ ID NO: 11160 - DNA, 21 bp, synthetic construct
  misc_feature 1..21: note = Probe
  source 1..21: mol_type = other DNA
gtaatggttagcactctggac

SEQ ID NO: 11161 - DNA, 22 bp, synthetic construct
  misc_feature 1..22: note = Probe
  source 1..22: mol_type = other DNA
gtaatggttagcactctggact

SEQ ID NO: 11162 - DNA, 23 bp, synthetic construct
  misc_feature 1..23: note = Probe
  source 1..23: mol_type = other DNA
gtaatggttagcactctggactc

SEQ ID NO: 11163 - DNA, 24 bp, synthetic construct
  misc_feature 1..24: note = Probe
  source 1..24: mol_type = other DNA
gtaatggttagcactctggactct

SEQ ID NO: 11164 - DNA, 25 bp, synthetic construct
  misc_feature 1..25: note = Probe
  source 1..25: mol_type = other DNA
gtaatggttagcactctggactctg

SEQ ID NO: 11165 - DNA, 23 bp, synthetic construct
  misc_feature 1..23: note = Probe
  source 1..23: mol_type = other DNA
gtaatggttagcactctggactt

SEQ ID NO: 11166 - DNA, 22 bp, synthetic construct
  misc_feature 1..22: note = Probe
  source 1..22: mol_type = other DNA
gtaatggttagcactctgggct

SEQ ID NO: 11167 - DNA, 23 bp, synthetic construct
  misc_feature 1..23: note = Probe
  source 1..23: mol_type = other DNA
gtaatggttagcactctgggctt

SEQ ID NO: 11168 - DNA, 15 bp, synthetic construct
  misc_feature 1..15: note = Probe
  source 1..15: mol_type = other DNA
gtagaattctcgcct

SEQ ID NO: 11169 - DNA, 16 bp, synthetic construct
  misc_feature 1..16: note = Probe
  source 1..16: mol_type = other DNA
gtagaattctcgcctg

SEQ ID NO: 11170 - DNA, 17 bp, synthetic construct
  misc_feature 1..17: note = Probe
  source 1..17: mol_type = other DNA
gtagaattctcgcctgc

SEQ ID NO: 11171 - DNA, 18 bp, synthetic construct
  misc_feature 1..18: note = Probe
  source 1..18: mol_type = other DNA
gtagaattctcgcctgcc

SEQ ID NO: 11172 - DNA, 30 bp, synthetic construct
  misc_feature 1..30: note = Probe
  source 1..30: mol_type = other DNA
gtagaattctcgcctgccacgcgggaggcc

SEQ ID NO: 11173 - DNA, 20 bp, synthetic construct
  misc_feature 1..20: note = Probe
  source 1..20: mol_type = other DNA
gtagcgtggccgagcggtct

SEQ ID NO: 11174 - DNA, 25 bp, synthetic construct
  misc_feature 1..25: note = Probe
  source 1..25: mol_type = other DNA
gtagcgtggccgagcggtctaaggc

SEQ ID NO: 11175 - DNA, 26 bp, synthetic construct
  misc_feature 1..26: note = Probe
  source 1..26: mol_type = other DNA
gtagctcagtggtagagcatttgact

SEQ ID NO: 11176 - DNA, 22 bp, synthetic construct
  misc_feature 1..22: note = Probe
  source 1..22: mol_type = other DNA
gtagtataaactaatacaccag

SEQ ID NO: 11177 - DNA, 15 bp, synthetic construct
  misc_feature 1..15: note = Probe
  source 1..15: mol_type = other DNA
gtagtcgtggccgag

SEQ ID NO: 11178 - DNA, 16 bp, synthetic construct
  misc_feature 1..16: note = Probe
  source 1..16: mol_type = other DNA
gtagtcgtggccgagt

SEQ ID NO: 11179 - DNA, 17 bp, synthetic construct
  misc_feature 1..17: note = Probe
  source 1..17: mol_type = other DNA
gtagtcgtggccgagtg

SEQ ID NO: 11180 - DNA, 21 bp, synthetic construct
  misc_feature 1..21: note = Probe
  source 1..21: mol_type = other DNA
gtagtcgtggccgagtggtta

SEQ ID NO: 11181 - DNA, 26 bp, synthetic construct
  misc_feature 1..26: note = Probe
  source 1..26: mol_type = other DNA
gtagtcgtggccgagtggttaaggcg

SEQ ID NO: 11182 - DNA, 27 bp, synthetic construct
  misc_feature 1..27: note = Probe
  source 1..27: mol_type = other DNA
gtagtcgtggccgagtggttaaggcga

SEQ ID NO: 11183 - DNA, 29 bp, synthetic construct
  misc_feature 1..29: note = Probe
  source 1..29: mol_type = other DNA
gtagtcgtggccgagtggttaaggcgatg

SEQ ID NO: 11184 - DNA, 30 bp, synthetic construct
  misc_feature 1..30: note = Probe
  source 1..30: mol_type = other DNA
gtagtcgtggccgagtggttaaggcgatgg

SEQ ID NO: 11185 - DNA, 25 bp, synthetic construct
  misc_feature 1..25: note = Probe
  source 1..25: mol_type = other DNA
gtagtcgtggccgagtggttaaggt

SEQ ID NO: 11186 - DNA, 21 bp, synthetic construct
  misc_feature 1..21: note = Probe
  source 1..21: mol_type = other DNA
gtagtggtatcatgcaagatt

SEQ ID NO: 11187 - DNA, 22 bp, synthetic construct
  misc_feature 1..22: note = Probe
  source 1..22: mol_type = other DNA
gtagtggtatcatgcaagattc

SEQ ID NO: 11188 - DNA, 21 bp, synthetic construct
  misc_feature 1..21: note = Probe
  source 1..21: mol_type = other DNA
gtagtggttatcacgttcgcc

SEQ ID NO: 11189 - DNA, 22 bp, synthetic construct
  misc_feature 1..22: note = Probe
  source 1..22: mol_type = other DNA
gtagtggttatcacgttcgcct

SEQ ID NO: 11190 - DNA, 26 bp, synthetic construct
  misc_feature 1..26: note = Probe
  source 1..26: mol_type = other DNA
gtagtgtagtggttatcacgttcgcc

SEQ ID NO: 11191 - DNA, 28 bp, synthetic construct
  misc_feature 1..28: note = Probe
  source 1..28: mol_type = other DNA
gtatagctcagtggtagagcatttgact

SEQ ID NO: 11192 - DNA, 29 bp, synthetic construct
  misc_feature 1..29: note = Probe
  source 1..29: mol_type = other DNA
gtatagctcagtggtagagcatttgactg

SEQ ID NO: 11193 - DNA, 30 bp, synthetic construct; identical to SEQ ID NO: 6922
  misc_feature 1..30: note = Probe
  source 1..30: mol_type = other DNA

SEQ ID NO: 11194 - DNA, 23 bp, synthetic construct
  misc_feature 1..23: note = Probe
  source 1..23: mol_type = other DNA
gtatagtggtgagtatccccgcc

SEQ ID NO: 11195 - DNA, 20 bp, synthetic construct
  misc_feature 1..20: note = Probe
  source 1..20: mol_type = other DNA
gtatagtggttagtactctg

SEQ ID NO: 11196 - DNA, 22 bp, synthetic construct
  misc_feature 1..22: note = Probe
  source 1..22: mol_type = other DNA
gtatagtggttagtactctgcg

SEQ ID NO: 11197 - DNA, 23 bp, synthetic construct
  misc_feature 1..23: note = Probe
  source 1..23: mol_type = other DNA
gtatagtggttagtactctgcgt

SEQ ID NO: 11198 - DNA, 24 bp, synthetic construct
  misc_feature 1..24: note = Probe
  source 1..24: mol_type = other DNA
gtatagtggttagtactctgcgtt

SEQ ID NO: 11199 - DNA, 25 bp, synthetic construct
  misc_feature 1..25: note = Probe
  source 1..25: mol_type = other DNA
gtatagtggttagtactctgcgttg

SEQ ID NO: 11200 - DNA, 26 bp, synthetic construct
  misc_feature 1..26: note = Probe
  source 1..26: mol_type = other DNA
gtatagtggttagtactctgcgttgt

SEQ ID NO: 11201 - DNA, 28 bp, synthetic construct
  misc_feature 1..28: note = Probe
  source 1..28: mol_type = other DNA
gtatgaggccccgggttcaatccccggc

SEQ ID NO: 11202 - DNA, 28 bp, synthetic construct
  misc_feature 1..28: note = Probe
  source 1..28: mol_type = other DNA
gtatgaggccccgggttcgatccccggc

SEQ ID NO: 11203 - DNA, 24 bp, synthetic construct
  misc_feature 1..24: note = Probe
  source 1..24: mol_type = other DNA
gtcacggtggccgagtggttaagg

SEQ ID NO: 11204 - DNA, 30 bp, synthetic construct
  misc_feature 1..30: note = Probe
  source 1..30: mol_type = other DNA
gtcacggtggccgagtggttaaggcgttgg

SEQ ID NO: 11205 - DNA, 15 bp, synthetic construct
  misc_feature 1..15: note = Probe
  source 1..15: mol_type = other DNA
gtcaggatggccgag

SEQ ID NO: 11206 - DNA, 16 bp, synthetic construct
  misc_feature 1..16: note = Probe
  source 1..16: mol_type = other DNA
gtcaggatggccgagc

SEQ ID NO: 11207 - DNA, 17 bp, synthetic construct
  misc_feature 1..17: note = Probe
  source 1..17: mol_type = other DNA
gtcaggatggccgagcg

SEQ ID NO: 11208 - DNA, 18 bp, synthetic construct
  misc_feature 1..18: note = Probe
  source 1..18: mol_type = other DNA
gtcaggatggccgagcgg

SEQ ID NO: 11209 - DNA, 19 bp, synthetic construct
  misc_feature 1..19: note = Probe
  source 1..19: mol_type = other DNA
gtcaggatggccgagcggt

SEQ ID NO: 11210 - DNA, 20 bp, synthetic construct
  misc_feature 1..20: note = Probe
  source 1..20: mol_type = other DNA
gtcaggatggccgagcggtc

SEQ ID NO: 11211 - DNA, 21 bp, synthetic construct
  misc_feature 1..21: note = Probe
  source 1..21: mol_type = other DNA
gtcaggatggccgagcggtct

SEQ ID NO: 11212 - DNA, 22 bp, synthetic construct
  misc_feature 1..22: note = Probe
  source 1..22: mol_type = other DNA
gtcaggatggccgagcggtcta

SEQ ID NO: 11213 - DNA, 23 bp, synthetic construct
  misc_feature 1..23: note = Probe
  source 1..23: mol_type = other DNA
gtcaggatggccgagcggtctaa

SEQ ID NO: 11214 - DNA, 24 bp, synthetic construct
  misc_feature 1..24: note = Probe
  source 1..24: mol_type = other DNA
gtcaggatggccgagcggtctaag

SEQ ID NO: 11215 - DNA, 25 bp, synthetic construct
  misc_feature 1..25: note = Probe
  source 1..25: mol_type = other DNA
gtcaggatggccgagcggtctaagg

SEQ ID NO: 11216 - DNA, 26 bp, synthetic construct
  misc_feature 1..26: note = Probe
  source 1..26: mol_type = other DNA
gtcaggatggccgagcggtctaaggc

SEQ ID NO: 11217 - DNA, 27 bp, synthetic construct
  misc_feature 1..27: note = Probe
  source 1..27: mol_type = other DNA
gtcaggatggccgagcggtctaaggcg

SEQ ID NO: 11218 - DNA, 28 bp, synthetic construct
  misc_feature 1..28: note = Probe
  source 1..28: mol_type = other DNA
gtcaggatggccgagcggtctaaggcgc

SEQ ID NO: 11219 - DNA, 29 bp, synthetic construct
  misc_feature 1..29: note = Probe
  source 1..29: mol_type = other DNA
gtcaggatggccgagcggtctaaggcgct

SEQ ID NO: 11220 - DNA, 30 bp, synthetic construct
  misc_feature 1..30: note = Probe
  source 1..30: mol_type = other DNA
gtcaggatggccgagcggtctaaggcgctg

SEQ ID NO: 11221 - DNA, 20 bp, synthetic construct
  misc_feature 1..20: note = Probe
  source 1..20: mol_type = other DNA
gtcaggatggccgagtggtc

SEQ ID NO: 11222 - DNA, 21 bp, synthetic construct
  misc_feature 1..21: note = Probe
  source 1..21: mol_type = other DNA
gtcaggatggccgagtggtct

SEQ ID NO: 11223 - DNA, 25 bp, synthetic construct
  misc_feature 1..25: note = Probe
  source 1..25: mol_type = other DNA
gtcaggatggccgagtggtctaagg

SEQ ID NO: 11224 - DNA, 26 bp, synthetic construct
  misc_feature 1..26: note = Probe
  source 1..26: mol_type = other DNA
gtcaggatggccgagtggtctaaggc

SEQ ID NO: 11225 - DNA, 27 bp, synthetic construct
  misc_feature 1..27: note = Probe
  source 1..27: mol_type = other DNA
gtcaggatggccgagtggtctaaggcg

SEQ ID NO: 11226 - DNA, 29 bp, synthetic construct
  misc_feature 1..29: note = Probe
  source 1..29: mol_type = other DNA
gtcaggatggccgagtggtctaaggcgcc

SEQ ID NO: 11227 - DNA, 20 bp, synthetic construct
  misc_feature 1..20: note = Probe
  source 1..20: mol_type = other DNA
gtcccgggttcaaatcccgg

SEQ ID NO: 11228 - DNA, 21 bp, synthetic construct
  misc_feature 1..21: note = Probe
  source 1..21: mol_type = other DNA
gtcccgggttcaaatcccgga

SEQ ID NO: 11229 - DNA, 19 bp, synthetic construct
  misc_feature 1..19: note = Probe
  source 1..19: mol_type = other DNA
gtccctggttcgatcccgg

SEQ ID NO: 11230 - DNA, 17 bp, synthetic construct
  misc_feature 1..17: note = Probe
  source 1..17: mol_type = other DNA
gtccttgtagtataaac

SEQ ID NO: 11231 - DNA, 18 bp, synthetic construct
  misc_feature 1..18: note = Probe
  source 1..18: mol_type = other DNA
gtccttgtagtataaact

SEQ ID NO: 11232 - DNA, 19 bp, synthetic construct
  misc_feature 1..19: note = Probe
  source 1..19: mol_type = other DNA
gtccttgtagtataaacta

SEQ ID NO: 11233 - DNA, 21 bp, synthetic construct
  misc_feature 1..21: note = Probe
  source 1..21: mol_type = other DNA
gtccttgtagtataaactaat

SEQ ID NO: 11234 - DNA, 22 bp, synthetic construct
  misc_feature 1..22: note = Probe
  source 1..22: mol_type = other DNA
gtccttgtagtataaactaata

SEQ ID NO: 11235 - DNA, 23 bp, synthetic construct
  misc_feature 1..23: note = Probe
  source 1..23: mol_type = other DNA
gtccttgtagtataaactaatac

SEQ ID NO: 11236 - DNA, 24 bp, synthetic construct
  misc_feature 1..24: note = Probe
  source 1..24: mol_type = other DNA
gtccttgtagtataaactaataca

SEQ ID NO: 11237 - DNA, 25 bp, synthetic construct
  misc_feature 1..25: note = Probe
  source 1..25: mol_type = other DNA
gtccttgtagtataaactaatacac

SEQ ID NO: 11238 - DNA, 26 bp, synthetic construct
  misc_feature 1..26: note = Probe
  source 1..26: mol_type = other DNA
gtccttgtagtataaactaatacacc

SEQ ID NO: 11239 - DNA, 27 bp, synthetic construct
  misc_feature 1..27: note = Probe
  source 1..27: mol_type = other DNA
gtccttgtagtataaactaatacacca

SEQ ID NO: 11240 - DNA, 29 bp, synthetic construct
  misc_feature 1..29: note = Probe
  source 1..29: mol_type = other DNA
gtccttgtagtataaactaatacaccagt

SEQ ID NO: 11241 - DNA, 30 bp, synthetic construct; identical to SEQ ID NO: 1487
  misc_feature 1..30: note = Probe
  source 1..30: mol_type = other DNA

SEQ ID NO: 11242 - DNA, 18 bp, synthetic construct
  misc_feature 1..18: note = Probe
  source 1..18: mol_type = other DNA
gtcgcgtgagattagttt

SEQ ID NO: 11243 - DNA, 19 bp, synthetic construct
  misc_feature 1..19: note = Probe
  source 1..19: mol_type = other DNA
gtcgcgtgagattagtttt

SEQ ID NO: 11244 - DNA, 19 bp, synthetic construct
  misc_feature 1..19: note = Probe
  source 1..19: mol_type = other DNA
gtcgctggttcgaatccgg

SEQ ID NO: 11245 - DNA, 19 bp, synthetic construct
  misc_feature 1..19: note = Probe
  source 1..19: mol_type = other DNA
gtcgctggttcgattccgg

SEQ ID NO: 11246 - DNA, 17 bp, synthetic construct
  misc_feature 1..17: note = Probe
  source 1..17: mol_type = other DNA
gtcggtagagcatcaga

SEQ ID NO: 11247 - DNA, 15 bp, synthetic construct
  misc_feature 1..15: note = Probe
  source 1..15: mol_type = other DNA
gtcggtagagcatga

SEQ ID NO: 11248 - DNA, 18 bp, synthetic construct
  misc_feature 1..18: note = Probe
  source 1..18: mol_type = other DNA
gtcggtagagcatgagac

SEQ ID NO: 11249 - DNA, 19 bp, synthetic construct
  misc_feature 1..19: note = Probe
  source 1..19: mol_type = other DNA
gtcggtagagcatgagact

SEQ ID NO: 11250 - DNA, 21 bp, synthetic construct
  misc_feature 1..21: note = Probe
  source 1..21: mol_type = other DNA
gtcgtggccgagtggttaagg

SEQ ID NO: 11251 - DNA, 15 bp, synthetic construct
  misc_feature 1..15: note = Probe
  source 1..15: mol_type = other DNA
gtcgtggttgtagtc

SEQ ID NO: 11252 - DNA, 16 bp, synthetic construct
  misc_feature 1..16: note = Probe
  source 1..16: mol_type = other DNA
gtcgtggttgtagtcc

SEQ ID NO: 11253 - DNA, 17 bp, synthetic construct
  misc_feature 1..17: note = Probe
  source 1..17: mol_type = other DNA
gtcgtggttgtagtccg

SEQ ID NO: 11254 - DNA, 19 bp, synthetic construct
  misc_feature 1..19: note = Probe
  source 1..19: mol_type = other DNA
gtcgtggttgtagtccgtg

SEQ ID NO: 11255 - DNA, 20 bp, synthetic construct
  misc_feature 1..20: note = Probe
  source 1..20: mol_type = other DNA
gtcgtggttgtagtccgtgc

SEQ ID NO: 11256 - DNA, 22 bp, synthetic construct
  misc_feature 1..22: note = Probe
  source 1..22: mol_type = other DNA
gtcgtggttgtagtccgtgcga

SEQ ID NO: 11257 - DNA, 25 bp, synthetic construct
  misc_feature 1..25: note = Probe
  source 1..25: mol_type = other DNA
gtcgtggttgtagtccgtgcgagaa

SEQ ID NO: 11258 - DNA, 27 bp, synthetic construct
  misc_feature 1..27: note = Probe
  source 1..27: mol_type = other DNA
gtcgtggttgtagtccgtgcgagaata

SEQ ID NO: 11259 - DNA, 28 bp, synthetic construct
  misc_feature 1..28: note = Probe
  source 1..28: mol_type = other DNA
gtcgtggttgtagtccgtgcgagaataa

SEQ ID NO: 11260 - DNA, 22 bp, synthetic construct
  misc_feature 1..22: note = Probe
  source 1..22: mol_type = other DNA
gtctagcggttaggattcctgg

SEQ ID NO: 11261 - DNA, 23 bp, synthetic construct
  misc_feature 1..23: note = Probe
  source 1..23: mol_type = other DNA
gtctagtggttaggattcggcgc

SEQ ID NO: 11262 - DNA, 24 bp, synthetic construct
  misc_feature 1..24: note = Probe
  source 1..24: mol_type = other DNA
gtctagtggttaggattcggcgct

SEQ ID NO: 11263 - DNA, 16 bp, synthetic construct
  misc_feature 1..16: note = Probe
  source 1..16: mol_type = other DNA
gtctctgtggcgcaat

SEQ ID NO: 11264 - DNA, 17 bp, synthetic construct
  misc_feature 1..17: note = Probe
  source 1..17: mol_type = other DNA
gtctctgtggcgcaatc

SEQ ID NO: 11265 - DNA, 18 bp, synthetic construct
  misc_feature 1..18: note = Probe
  source 1..18: mol_type = other DNA
gtctctgtggcgcaatcg

SEQ ID NO: 11266 - DNA, 20 bp, synthetic construct
  misc_feature 1..20: note = Probe
  source 1..20: mol_type = other DNA
gtctctgtggcgcaatcggc

SEQ ID NO: 11267 - DNA, 21 bp, synthetic construct
  misc_feature 1..21: note = Probe
  source 1..21: mol_type = other DNA
gtctctgtggcgcaatcggtt

SEQ ID NO: 11268 - DNA, 30 bp, synthetic construct
  misc_feature 1..30: note = Probe
  source 1..30: mol_type = other DNA
gtctctgtggcgcaatcggttagcgcattc

SEQ ID NO: 11269 - DNA, 30 bp, synthetic construct
  misc_feature 1..30: note = Probe
  source 1..30: mol_type = other DNA
gtctctgtggcgcaatcggttagcgcgttc

SEQ ID NO: 11270 - DNA, 18 bp, synthetic construct
  misc_feature 1..18: note = Probe
  source 1..18: mol_type = other DNA
gtctctgtggcgcaatgg

SEQ ID NO: 11271 - DNA, 19 bp, synthetic construct
  misc_feature 1..19: note = Probe
  source 1..19: mol_type = other DNA
gtctctgtggcgcaatgga

SEQ ID NO: 11272 - DNA, 19 bp, synthetic construct
  misc_feature 1..19: note = Probe
  source 1..19: mol_type = other DNA
gtctctgtggcgccatcgg

SEQ ID NO: 11273 - DNA, 20 bp, synthetic construct
  misc_feature 1..20: note = Probe
  source 1..20: mol_type = other DNA
gtctctgtggcgccatcggt

SEQ ID NO: 11274 - DNA, 17 bp, synthetic construct
  misc_feature 1..17: note = Probe
  source 1..17: mol_type = other DNA
gtgaagcattggactgt

SEQ ID NO: 11275 - DNA, 18 bp, synthetic construct
  misc_feature 1..18: note = Probe
  source 1..18: mol_type = other DNA
gtgaagcattggactgta

SEQ ID NO: 11276 - DNA, 19 bp, synthetic construct
  misc_feature 1..19: note = Probe
  source 1..19: mol_type = other DNA
gtgaagcattggactgtaa

SEQ ID NO: 11277 - DNA, 20 bp, synthetic construct
  misc_feature 1..20: note = Probe
  source 1..20: mol_type = other DNA
gtgaagcattggactgtaaa

SEQ ID NO: 11278 - DNA, 19 bp, synthetic construct
  misc_feature 1..19: note = Probe
  source 1..19: mol_type = other DNA
gtgagtatccccgcctgtc

SEQ ID NO: 11279 - DNA, 15 bp, synthetic construct
  misc_feature 1..15: note = Probe
  source 1..15: mol_type = other DNA
gtgatcgtatagtgg

SEQ ID NO: 11280 - DNA, 16 bp, synthetic construct
  misc_feature 1..16: note = Probe
  source 1..16: mol_type = other DNA
gtgatcgtatagtggt

SEQ ID NO: 11281 - DNA, 17 bp, synthetic construct
  misc_feature 1..17: note = Probe
  source 1..17: mol_type = other DNA
gtgatcgtatagtggtt

SEQ ID NO: 11282 - DNA, 18 bp, synthetic construct
  misc_feature 1..18: note = Probe
  source 1..18: mol_type = other DNA
gtgatcgtatagtggtta

SEQ ID NO: 11283 - DNA, 19 bp, synthetic construct
  misc_feature 1..19: note = Probe
  source 1..19: mol_type = other DNA
gtgatcgtatagtggttag

SEQ ID NO: 11284 - DNA, 20 bp, synthetic construct
  misc_feature 1..20: note = Probe
  source 1..20: mol_type = other DNA
gtgatcgtatagtggttagt

SEQ ID NO: 11285 - DNA, 21 bp, synthetic construct
  misc_feature 1..21: note = Probe
  source 1..21: mol_type = other DNA
gtgatcgtatagtggttagta

SEQ ID NO: 11286 - DNA, 22 bp, synthetic construct
  misc_feature 1..22: note = Probe
  source 1..22: mol_type = other DNA
gtgatcgtatagtggttagtac

SEQ ID NO: 11287 - DNA, 23 bp, synthetic construct
  misc_feature 1..23: note = Probe
  source 1..23: mol_type = other DNA
gtgatcgtatagtggttagtact

SEQ ID NO: 11288 - DNA, 24 bp, synthetic construct
  misc_feature 1..24: note = Probe
  source 1..24: mol_type = other DNA
gtgatcgtatagtggttagtactc

SEQ ID NO: 11289 - DNA, 25 bp, synthetic construct
  misc_feature 1..25: note = Probe
  source 1..25: mol_type = other DNA
gtgatcgtatagtggttagtactct

SEQ ID NO: 11290 - DNA, 26 bp, synthetic construct
  misc_feature 1..26: note = Probe
  source 1..26: mol_type = other DNA
gtgatcgtatagtggttagtactctg

SEQ ID NO: 11291 - DNA, 27 bp, synthetic construct
  misc_feature 1..27: note = Probe
  source 1..27: mol_type = other DNA
gtgatcgtatagtggttagtactctgc

SEQ ID NO: 11292 - DNA, 28 bp, synthetic construct
  misc_feature 1..28: note = Probe
  source 1..28: mol_type = other DNA
gtgatcgtatagtggttagtactctgcg

SEQ ID NO: 11293 - DNA, 29 bp, synthetic construct
  misc_feature 1..29: note = Probe
  source 1..29: mol_type = other DNA
gtgatcgtatagtggttagtactctgcgt

SEQ ID NO: 11294 - DNA, 23 bp, synthetic construct
  misc_feature 1..23: note = Probe
  source 1..23: mol_type = other DNA
gtgcagtggtagaattctcgcct

SEQ ID NO: 11295 - DNA, 25 bp, synthetic construct
  misc_feature 1..25: note = Probe
  source 1..25: mol_type = other DNA
gtgcagtggtagaattctcgcctcc

SEQ ID NO: 11296 - DNA, 26 bp, synthetic construct
  misc_feature 1..26: note = Probe
  source 1..26: mol_type = other DNA
gtggagttaaagactttttctctgat

SEQ ID NO: 11297 - DNA, 25 bp, synthetic construct
  misc_feature 1..25: note = Probe
  source 1..25: mol_type = other DNA
gtggcgcagcggaagcgtgctgggc

SEQ ID NO: 11298 - DNA, 19 bp, synthetic construct
  misc_feature 1..19: note = Probe
  source 1..19: mol_type = other DNA
gtgggtagagcatttgact

SEQ ID NO: 11299 - DNA, 20 bp, synthetic construct
  misc_feature 1..20: note = Probe
  source 1..20: mol_type = other DNA
gtgggtagagcatttgactg

SEQ ID NO: 11300 - DNA, 21 bp, synthetic construct
  misc_feature 1..21: note = Probe
  source 1..21: mol_type = other DNA
gtgggtagagcatttgactgc

SEQ ID NO: 11301 - DNA, 22 bp, synthetic construct
  misc_feature 1..22: note = Probe
  source 1..22: mol_type = other DNA
gtgggttcgaaccccactcctg

SEQ ID NO: 11302 - DNA, 23 bp, synthetic construct
  misc_feature 1..23: note = Probe
  source 1..23: mol_type = other DNA
gtgggttcgaaccccactcctgg

SEQ ID NO: 11303 - DNA, 23 bp, synthetic construct
  misc_feature 1..23: note = Probe
  source 1..23: mol_type = other DNA
gtgggttcgaaccccacttctgg

SEQ ID NO: 11304 - DNA, 22 bp, synthetic construct
  misc_feature 1..22: note = Probe
  source 1..22: mol_type = other DNA
gtgggttcgaatcccactcctg

SEQ ID NO: 11305 - DNA, 24 bp, synthetic construct
  misc_feature 1..24: note = Probe
  source 1..24: mol_type = other DNA
gtgggttcgaatcccactcctgac

SEQ ID NO: 11306 - DNA, 25 bp, synthetic construct
  misc_feature 1..25: note = Probe
  source 1..25: mol_type = other DNA
gtgggttcgaatcccactcctgaca

SEQ ID NO: 11307 - DNA, 22 bp, synthetic construct
  misc_feature 1..22: note = Probe
  source 1..22: mol_type = other DNA
gtgggttcgaatcccacttctg

SEQ ID NO: 11308 - DNA, 23 bp, synthetic construct
  misc_feature 1..23: note = Probe
  source 1..23: mol_type = other DNA
gtgggttcgaatcccacttctga

SEQ ID NO: 11309 - DNA, 24 bp, synthetic construct
  misc_feature 1..24: note = Probe
  source 1..24: mol_type = other DNA
gtgggttcgaatcccacttctgac

SEQ ID NO: 11310 - DNA, 25 bp, synthetic construct
  misc_feature 1..25: note = Probe
  source 1..25: mol_type = other DNA
gtgggttcgaatcccacttctgaca

SEQ ID NO: 11311 - DNA, 26 bp, synthetic construct
  misc_feature 1..26: note = Probe
  source 1..26: mol_type = other DNA
gtgggttcgaatcccacttctgacac

SEQ ID NO: 11312 - DNA, 27 bp, synthetic construct
  misc_feature 1..27: note = Probe
  source 1..27: mol_type = other DNA
gtgggttcgaatcccacttctgacaca

SEQ ID NO: 11313 - DNA, 28 bp, synthetic construct
  misc_feature 1..28: note = Probe
  source 1..28: mol_type = other DNA
gtgggttcgaatcccacttctgacacaa

SEQ ID NO: 11314 - DNA, 30 bp, synthetic construct
  misc_feature 1..30: note = Probe
  source 1..30: mol_type = other DNA
gtgggttcgaatcccacttctgacacattc

SEQ ID NO: 11315 - DNA, 26 bp, synthetic construct
  misc_feature 1..26: note = Probe
  source 1..26: mol_type = other DNA
gtgggttcgaatcccatcctcgtcgc

SEQ ID NO: 11316 - DNA, 15 bp, synthetic construct
  misc_feature 1..15: note = Probe
  source 1..15: mol_type = other DNA
gtggtagaattctcg

SEQ ID NO: 11317 - DNA, 16 bp, synthetic construct
  misc_feature 1..16: note = Probe
  source 1..16: mol_type = other DNA
gtggtagaattctcgc

SEQ ID NO: 11318 - DNA, 17 bp, synthetic construct
  misc_feature 1..17: note = Probe
  source 1..17: mol_type = other DNA
gtggtagaattctcgcc

SEQ ID NO: 11319 - DNA, 18 bp, synthetic construct
  misc_feature 1..18: note = Probe
  source 1..18: mol_type = other DNA
gtggtagaattctcgcct

SEQ ID NO: 11320 - DNA, 19 bp, synthetic construct
  misc_feature 1..19: note = Probe
  source 1..19: mol_type = other DNA
gtggtagaattctcgcctg

SEQ ID NO: 11321 - DNA, 20 bp, synthetic construct
  misc_feature 1..20: note = Probe
  source 1..20: mol_type = other DNA
gtggtagaattctcgcctgc

SEQ ID NO: 11322 - DNA, 21 bp, synthetic construct
  misc_feature 1..21: note = Probe
  source 1..21: mol_type = other DNA
gtggtagaattctcgcctgcc

SEQ ID NO: 11323 - DNA, 18 bp, synthetic construct
  misc_feature 1..18: note = Probe
  source 1..18: mol_type = other DNA
gtggtagagcatttgact

SEQ ID NO: 11324 - DNA, 19 bp, synthetic construct
  misc_feature 1..19: note = Probe
  source 1..19: mol_type = other DNA
gtggtagagcatttgactg

SEQ ID NO: 11325 - DNA, 20 bp, synthetic construct
  misc_feature 1..20: note = Probe
  source 1..20: mol_type = other DNA
gtggtagagcatttgactgc

SEQ ID NO: 11326 - DNA, 18 bp, synthetic construct
  misc_feature 1..18: note = Probe
  source 1..18: mol_type = other DNA
gtggtatcatgcaagatt

SEQ ID NO: 11327 - DNA, 19 bp, synthetic construct
  misc_feature 1..19: note = Probe
  source 1..19: mol_type = other DNA
gtggtatcatgcaagattc

SEQ ID NO: 11328 - DNA, 22 bp, synthetic construct
  misc_feature 1..22: note = Probe
  source 1..22: mol_type = other DNA
gtggtctagtggttaggattcg

SEQ ID NO: 11329 - DNA, 23 bp, synthetic construct
  misc_feature 1..23: note = Probe
  source 1..23: mol_type = other DNA
gtggtctagtggttaggattcgg

SEQ ID NO: 11330 - DNA, 25 bp, synthetic construct
  misc_feature 1..25: note = Probe
  source 1..25: mol_type = other DNA
gtggtctagtggttaggattcggcg

SEQ ID NO: 11331 - DNA, 26 bp, synthetic construct
  misc_feature 1..26: note = Probe
  source 1..26: mol_type = other DNA
gtggtctagtggttaggattcggcgc

SEQ ID NO: 11332 - DNA, 27 bp, synthetic construct
  misc_feature 1..27: note = Probe
  source 1..27: mol_type = other DNA
gtggtctagtggttaggattcggcgct

SEQ ID NO: 11333 - DNA, 18 bp, synthetic construct
  misc_feature 1..18: note = Probe
  source 1..18: mol_type = other DNA
gtggtgagtatccccgcc

SEQ ID NO: 11334 - DNA, 19 bp, synthetic construct
  misc_feature 1..19: note = Probe
  source 1..19: mol_type = other DNA
gtggtgagtatccccgcct

SEQ ID NO: 11335 - DNA, 20 bp, synthetic construct
  misc_feature 1..20: note = Probe
  source 1..20: mol_type = other DNA
gtggtgagtatccccgcctg

SEQ ID NO: 11336 - DNA, 29 bp, synthetic construct
  misc_feature 1..29: note = Probe
  source 1..29: mol_type = other DNA
gtggtgagtatccccgcctgtcacgcggg

SEQ ID NO: 11337 - DNA, 19 bp, synthetic construct
  misc_feature 1..19: note = Probe
  source 1..19: mol_type = other DNA
gtggttagcactctgtgtt

SEQ ID NO: 11338 - DNA, 15 bp, synthetic construct
  misc_feature 1..15: note = Probe
  source 1..15: mol_type = other DNA
gtggttaggattcgg

SEQ ID NO: 11339 - DNA, 17 bp, synthetic construct
  misc_feature 1..17: note = Probe
  source 1..17: mol_type = other DNA
gtggttaggattcggcg

SEQ ID NO: 11340 - DNA, 20 bp, synthetic construct
  misc_feature 1..20: note = Probe
  source 1..20: mol_type = other DNA
gtggttaggattcggcgctc

SEQ ID NO: 11341 - DNA, 21 bp, synthetic construct
  misc_feature 1..21: note = Probe
  source 1..21: mol_type = other DNA
gtggttaggattcggcgctct

SEQ ID NO: 11342 - DNA, 22 bp, synthetic construct
  misc_feature 1..22: note = Probe
  source 1..22: mol_type = other DNA
gtggttaggattcggcgctctc

SEQ ID NO: 11343 - DNA, 15 bp, synthetic construct
  misc_feature 1..15: note = Probe
  source 1..15: mol_type = other DNA
gtggttagtactctg

SEQ ID NO: 11344 - DNA, 16 bp, synthetic construct
  misc_feature 1..16: note = Probe
  source 1..16: mol_type = other DNA
gtggttagtactctgc

SEQ ID NO: 11345 - DNA, 17 bp, synthetic construct
  misc_feature 1..17: note = Probe
  source 1..17: mol_type = other DNA
gtggttagtactctgcg

SEQ ID NO: 11346 - DNA, 19 bp, synthetic construct
  misc_feature 1..19: note = Probe
  source 1..19: mol_type = other DNA
gtggttagtactctgcgct

SEQ ID NO: 11347 - DNA, 20 bp, synthetic construct
  misc_feature 1..20: note = Probe
  source 1..20: mol_type = other DNA
gtggttagtactctgcgctg

SEQ ID NO: 11348 - DNA, 21 bp, synthetic construct
  misc_feature 1..21: note = Probe
  source 1..21: mol_type = other DNA
gtggttagtactctgcgctgt

SEQ ID NO: 11349 - DNA, 23 bp, synthetic construct
  misc_feature 1..23: note = Probe
  source 1..23: mol_type = other DNA
gtggttagtactctgcgttgtgg

SEQ ID NO: 11350 - DNA, 24 bp, synthetic construct
  misc_feature 1..24: note = Probe
  source 1..24: mol_type = other DNA
gtggttagtactctgcgttgtggc

SEQ ID NO: 11351 - DNA, 25 bp, synthetic construct
  misc_feature 1..25: note = Probe
  source 1..25: mol_type = other DNA
gtggttagtactctgcgttgtggcc

SEQ ID NO: 11352 - DNA, 21 bp, synthetic construct
  misc_feature 1..21: note = Probe
  source 1..21: mol_type = other DNA
gtggttagtatccccgcctgt

SEQ ID NO: 11353 - DNA, 22 bp, synthetic construct
  misc_feature 1..22: note = Probe
  source 1..22: mol_type = other DNA
gtggttagtatccccgcctgtc

SEQ ID NO: 11354 - DNA, 19 bp, synthetic construct
  misc_feature 1..19: note = Probe
  source 1..19: mol_type = other DNA
gtggttatcacgttcgcct

SEQ ID NO: 11355 - DNA, 21 bp, synthetic construct
  misc_feature 1..21: note = Probe
  source 1..21: mol_type = other DNA
gtggttcagtggtagaattct

SEQ ID NO: 11356 - DNA, 22 bp, synthetic construct
  misc_feature 1..22: note = Probe
  source 1..22: mol_type = other DNA
gtggttcagtggtagaattctc

SEQ ID NO: 11357 - DNA, 23 bp, synthetic construct
  misc_feature 1..23: note = Probe
  source 1..23: mol_type = other DNA
gtggttcagtggtagaattctcg

SEQ ID NO: 11358 - DNA, 24 bp, synthetic construct
  misc_feature 1..24: note = Probe
  source 1..24: mol_type = other DNA
gtggttcagtggtagaattctcgc

SEQ ID NO: 11359 - DNA, 25 bp, synthetic construct
  misc_feature 1..25: note = Probe
  source 1..25: mol_type = other DNA
gtggttcagtggtagaattctcgcc

SEQ ID NO: 11360 - DNA, 26 bp, synthetic construct
  misc_feature 1..26: note = Probe
  source 1..26: mol_type = other DNA
gtggttcagtggtagaattctcgcct

SEQ ID NO: 11361 - DNA, 27 bp, synthetic construct
  misc_feature 1..27: note = Probe
  source 1..27: mol_type = other DNA
gtggttcagtggtagaattctcgcctg

SEQ ID NO: 11362 - DNA, 28 bp, synthetic construct
  misc_feature 1..28: note = Probe
  source 1..28: mol_type = other DNA
gtggttcagtggtagaattctcgcctgc

SEQ ID NO: 11363 - DNA, 17 bp, synthetic construct
  misc_feature 1..17: note = Probe
  source 1..17: mol_type = other DNA
gtggttgtagtccgtgc

SEQ ID NO: 11364 - DNA, 18 bp, synthetic construct
  misc_feature 1..18: note = Probe
  source 1..18: mol_type = other DNA
gtggttgtagtccgtgcg

SEQ ID NO: 11365 - DNA, 19 bp, synthetic construct
  misc_feature 1..19: note = Probe
  source 1..19: mol_type = other DNA
gtggttgtagtccgtgcga

SEQ ID NO: 11366 - DNA, 20 bp, synthetic construct
  misc_feature 1..20: note = Probe
  source 1..20: mol_type = other DNA
gtggttgtagtccgtgcgag

SEQ ID NO: 11367 - DNA, 21 bp, synthetic construct
  misc_feature 1..21: note = Probe
  source 1..21: mol_type = other DNA
gtggttgtagtccgtgcgaga

SEQ ID NO: 11368 - DNA, 23 bp, synthetic construct
  misc_feature 1..23: note = Probe
  source 1..23: mol_type = other DNA
gtggttgtagtccgtgcgagaat

SEQ ID NO: 11369 - DNA, 24 bp, synthetic construct
  misc_feature 1..24: note = Probe
  source 1..24: mol_type = other DNA
gtggttgtagtccgtgcgagaata

SEQ ID NO: 11370 - DNA, 25 bp, synthetic construct
  misc_feature 1..25: note = Probe
  source 1..25: mol_type = other DNA
gtggttgtagtccgtgcgagaataa

SEQ ID NO: 11371 - DNA, 24 bp, synthetic construct
  misc_feature 1..24: note = Probe
  source 1..24: mol_type = other DNA
gtgtaatggtgagcactctggact

SEQ ID NO: 11372 - DNA, 17 bp, synthetic construct
  misc_feature 1..17: note = Probe
  source 1..17: mol_type = other DNA
gtgtaatggttagcact

SEQ ID NO: 11373 - DNA, 18 bp, synthetic construct
  misc_feature 1..18: note = Probe
  source 1..18: mol_type = other DNA
gtgtaatggttagcactc

SEQ ID NO: 11374 - DNA, 19 bp, synthetic construct
  misc_feature 1..19: note = Probe
  source 1..19: mol_type = other DNA
gtgtaatggttagcactct

SEQ ID NO: 11375 - DNA, 20 bp, synthetic construct
  misc_feature 1..20: note = Probe
  source 1..20: mol_type = other DNA
gtgtaatggttagcactctg

SEQ ID NO: 11376 - DNA, 21 bp, synthetic construct
  misc_feature 1..21: note = Probe
  source 1..21: mol_type = other DNA
gtgtaatggttagcactctgg

SEQ ID NO: 11377 - DNA, 22 bp, synthetic construct
  misc_feature 1..22: note = Probe
  source 1..22: mol_type = other DNA
gtgtaatggttagcactctgga

SEQ ID NO: 11378 - DNA, 23 bp, synthetic construct
  misc_feature 1..23: note = Probe
  source 1..23: mol_type = other DNA
gtgtaatggttagcactctggac

SEQ ID NO: 11379 - DNA, 24 bp, synthetic construct
  misc_feature 1..24: note = Probe
  source 1..24: mol_type = other DNA
gtgtaatggttagcactctggact

SEQ ID NO: 11380 - DNA, 25 bp, synthetic construct
  misc_feature 1..25: note = Probe
  source 1..25: mol_type = other DNA
gtgtaatggttagcactctggactc

SEQ ID NO: 11381 - DNA, 26 bp, synthetic construct
  misc_feature 1..26: note = Probe
  source 1..26: mol_type = other DNA
gtgtaatggttagcactctggactct

SEQ ID NO: 11382 - DNA, 27 bp, synthetic construct
  misc_feature 1..27: note = Probe
  source 1..27: mol_type = other DNA
gtgtaatggttagcactctggactctg

SEQ ID NO: 11383 - DNA, 28 bp, synthetic construct
  misc_feature 1..28: note = Probe
  source 1..28: mol_type = other DNA
gtgtaatggttagcactctggactctga

SEQ ID NO: 11384 - DNA, 25 bp, synthetic construct
  misc_feature 1..25: note = Probe
  source 1..25: mol_type = other DNA
gtgtaatggttagcactctggactt

SEQ ID NO: 11385 - DNA, 26 bp, synthetic construct
  misc_feature 1..26: note = Probe
  source 1..26: mol_type = other DNA
gtgtaatggttagcactctggacttt

SEQ ID NO: 11386 - DNA, 24 bp, synthetic construct
  misc_feature 1..24: note = Probe
  source 1..24: mol_type = other DNA
gtgtaatggttagcactctgggct

SEQ ID NO: 11387 - DNA, 25 bp, synthetic construct
  misc_feature 1..25: note = Probe
  source 1..25: mol_type = other DNA
gtgtaatggttagcactctgggctt

SEQ ID NO: 11388 - DNA, 25 bp, synthetic construct
  misc_feature 1..25: note = Probe
  source 1..25: mol_type = other DNA
gtgtactggaaagtgcacttggacg

SEQ ID NO: 11389 - DNA, 23 bp, synthetic construct
  misc_feature 1..23: note = Probe
  source 1..23: mol_type = other DNA
gtgtagtggttatcacgttcgcc

SEQ ID NO: 11390 - DNA, 24 bp, synthetic construct
  misc_feature 1..24: note = Probe
  source 1..24: mol_type = other DNA
gtgtagtggttatcacgttcgcct

SEQ ID NO: 11391 - DNA, 25 bp, synthetic construct
  misc_feature 1..25: note = Probe
  source 1..25: mol_type = other DNA
gtgtagtggttatcacgttcgcctc

SEQ ID NO: 11392 - DNA, 19 bp, synthetic construct
  misc_feature 1..19: note = Probe
  source 1..19: mol_type = other DNA
gttaaagactttttctctg

SEQ ID NO: 11393 - DNA, 21 bp, synthetic construct
  misc_feature 1..21: note = Probe
  source 1..21: mol_type = other DNA
gttaaagactttttctctgat

SEQ ID NO: 11394 - DNA, 19 bp, synthetic construct
  misc_feature 1..19: note = Probe
  source 1..19: mol_type = other DNA
gttaaagattaagagaacc

SEQ ID NO: 11395 - DNA, 23 bp, synthetic construct
  misc_feature 1..23: note = Probe
  source 1..23: mol_type = other DNA
gttaactaagtgtttgtgggttt

SEQ ID NO: 11396 - DNA, 15 bp, synthetic construct
  misc_feature 1..15: note = Probe
  source 1..15: mol_type = other DNA
gttaagatggcagag

SEQ ID NO: 11397 - DNA, 16 bp, synthetic construct
  misc_feature 1..16: note = Probe
  source 1..16: mol_type = other DNA
gttaagatggcagagc

SEQ ID NO: 11398 - DNA, 17 bp, synthetic construct
  misc_feature 1..17: note = Probe
  source 1..17: mol_type = other DNA
gttaagatggcagagcc

SEQ ID NO: 11399 - DNA, 18 bp, synthetic construct
  misc_feature 1..18: note = Probe
  source 1..18: mol_type = other DNA
gttaagatggcagagccc

SEQ ID NO: 11400 - DNA, 19 bp, synthetic construct
  misc_feature 1..19: note = Probe
  source 1..19: mol_type = other DNA
gttaagatggcagagcccg

SEQ ID NO: 11401 - DNA, 20 bp, synthetic construct
  misc_feature 1..20: note = Probe
  source 1..20: mol_type = other DNA
gttaagatggcagagcccgg

SEQ ID NO: 11402 - DNA, 21 bp, synthetic construct
  misc_feature 1..21: note = Probe
  source 1..21: mol_type = other DNA
gttaagatggcagagcccggc

SEQ ID NO: 11403 - DNA, 26 bp, synthetic construct
  misc_feature 1..26: note = Probe
  source 1..26: mol_type = other DNA
gttaagatggcagagcccggtaatcg

SEQ ID NO: 11404 - DNA, 27 bp, synthetic construct
  misc_feature 1..27: note = Probe
  source 1..27: mol_type = other DNA
gttaagatggcagagcccggtaatcgc

SEQ ID NO: 11405 - DNA, 28 bp, synthetic construct
  misc_feature 1..28: note = Probe
  source 1..28: mol_type = other DNA
gttaagatggcagagcccggtaatcgca

SEQ ID NO: 11406 - DNA, 16 bp, synthetic construct
  misc_feature 1..16: note = Probe
  source 1..16: mol_type = other DNA
gttagcactctggact

SEQ ID NO: 11407 - DNA, 17 bp, synthetic construct
  misc_feature 1..17: note = Probe
  source 1..17: mol_type = other DNA
gttagcactctggactc

SEQ ID NO: 11408 - DNA, 20 bp, synthetic construct
  misc_feature 1..20: note = Probe
  source 1..20: mol_type = other DNA
gttagcactctggactctga

SEQ ID NO: 11409 - DNA, 21 bp, synthetic construct
  misc_feature 1..21: note = Probe
  source 1..21: mol_type = other DNA
gttagcactctggactctgaa

SEQ ID NO: 11410 - DNA, 23 bp, synthetic construct
  misc_feature 1..23: note = Probe
  source 1..23: mol_type = other DNA
gttagcactctggactctgaatc

SEQ ID NO: 11411 - DNA, 24 bp, synthetic construct
  misc_feature 1..24: note = Probe
  source 1..24: mol_type = other DNA
gttagcactctggactctgaatcc

SEQ ID NO: 11412 - DNA, 27 bp, synthetic construct
  misc_feature 1..27: note = Probe
  source 1..27: mol_type = other DNA
gttagcactctggactctgaatccagc

SEQ ID NO: 11413 - DNA, 16 bp, synthetic construct
  misc_feature 1..16: note = Probe
  source 1..16: mol_type = other DNA
gttaggattcggcgct

SEQ ID NO: 11414 - DNA, 16 bp, synthetic construct
  misc_feature 1..16: note = Probe
  source 1..16: mol_type = other DNA
gttagtactctgcgtt

SEQ ID NO: 11415 - DNA, 18 bp, synthetic construct
  misc_feature 1..18: note = Probe
  source 1..18: mol_type = other DNA
gttagtactctgcgttgt

SEQ ID NO: 11416 - DNA, 19 bp, synthetic construct
  misc_feature 1..19: note = Probe
  source 1..19: mol_type = other DNA
gttagtactctgcgttgtg

SEQ ID NO: 11417 - DNA, 21 bp, synthetic construct
  misc_feature 1..21: note = Probe
  source 1..21: mol_type = other DNA
gttagtactctgcgttgtggc

SEQ ID NO: 11418 - DNA, 15 bp, synthetic construct
  misc_feature 1..15: note = Probe
  source 1..15: mol_type = other DNA
gttatgaaatggttt

SEQ ID NO: 11419 - DNA, 24 bp, synthetic construct
  misc_feature 1..24: note = Probe
  source 1..24: mol_type = other DNA
gttcaaatcccggacgagcccaca

SEQ ID NO: 11420 - DNA, 24 bp, synthetic construct
  misc_feature 1..24: note = Probe
  source 1..24: mol_type = other DNA
gttcaaatcccggacgagccccct

SEQ ID NO: 11421 - DNA, 24 bp, synthetic construct
  misc_feature 1..24: note = Probe
  source 1..24: mol_type = other DNA
gttcaaatcccggacgagccctca

SEQ ID NO: 11422 - DNA, 22 bp, synthetic construct
  misc_feature 1..22: note = Probe
  source 1..22: mol_type = other DNA
gttcaaatccgggtgccccctc

SEQ ID NO: 11423 - DNA, 24 bp, synthetic construct
  misc_feature 1..24: note = Probe
  source 1..24: mol_type = other DNA
gttcaaatccgggtgccccctcaa

SEQ ID NO: 11424 - DNA, 24 bp, synthetic construct
  misc_feature 1..24: note = Probe
  source 1..24: mol_type = other DNA
gttcaaatctcggtggaacctgca

SEQ ID NO: 11425 - DNA, 21 bp, synthetic construct
  misc_feature 1..21: note = Probe
  source 1..21: mol_type = other DNA
gttcaagtcacgtcggggtca

SEQ ID NO: 11426 - DNA, 19 bp, synthetic construct
  misc_feature 1..19: note = Probe
  source 1..19: mol_type = other DNA
gttcaagtccctgttcggg

SEQ ID NO: 11427 - DNA, 21 bp, synthetic construct
  misc_feature 1..21: note = Probe
  source 1..21: mol_type = other DNA
gttcaagtccctgttcgggcg

SEQ ID NO: 11428 - DNA, 24 bp, synthetic construct
  misc_feature 1..24: note = Probe
  source 1..24: mol_type = other DNA
gttcaagtccctgttcgggcggca

SEQ ID NO: 11429 - DNA, 24 bp, synthetic construct
  misc_feature 1..24: note = Probe
  source 1..24: mol_type = other DNA
gttcaatccccggcacctccacca

SEQ ID NO: 11430 - DNA, 23 bp, synthetic construct
  misc_feature 1..23: note = Probe
  source 1..23: mol_type = other DNA
gttcaattcccggtcagggaacc

SEQ ID NO: 11431 - DNA, 24 bp, synthetic construct
  misc_feature 1..24: note = Probe
  source 1..24: mol_type = other DNA
gttcaattcccggtcagggaacca

SEQ ID NO: 11432 - DNA, 15 bp, synthetic construct
  misc_feature 1..15: note = Probe
  source 1..15: mol_type = other DNA
gttcaggtcgcagtc

SEQ ID NO: 11433 - DNA, 18 bp, synthetic construct
  misc_feature 1..18: note = Probe
  source 1..18: mol_type = other DNA
gttcaggtcgcagtctcc

SEQ ID NO: 11434 - DNA, 19 bp, synthetic construct
  misc_feature 1..19: note = Probe
  source 1..19: mol_type = other DNA
gttcaggtcgcagtctccc

SEQ ID NO: 11435 - DNA, 22 bp, synthetic construct
  misc_feature 1..22: note = Probe
  source 1..22: mol_type = other DNA
gttcaggtcgcagtctcccctg

SEQ ID NO: 11436 - DNA, 15 bp, synthetic construct
  misc_feature 1..15: note = Probe
  source 1..15: mol_type = other DNA
gttcagtggtagaat

SEQ ID NO: 11437 - DNA, 16 bp, synthetic construct
  misc_feature 1..16: note = Probe
  source 1..16: mol_type = other DNA
gttcagtggtagaatt

SEQ ID NO: 11438 - DNA, 17 bp, synthetic construct
  misc_feature 1..17: note = Probe
  source 1..17: mol_type = other DNA
gttcagtggtagaattc

SEQ ID NO: 11439 - DNA, 18 bp, synthetic construct
  misc_feature 1..18: note = Probe
  source 1..18: mol_type = other DNA
gttcagtggtagaattct

SEQ ID NO: 11440 - DNA, 19 bp, synthetic construct
  misc_feature 1..19: note = Probe
  source 1..19: mol_type = other DNA
gttcagtggtagaattctc

SEQ ID NO: 11441 - DNA, 20 bp, synthetic construct
  misc_feature 1..20: note = Probe
  source 1..20: mol_type = other DNA
gttcagtggtagaattctcg

SEQ ID NO: 11442 - DNA, 21 bp, synthetic construct
  misc_feature 1..21: note = Probe
  source 1..21: mol_type = other DNA
gttcagtggtagaattctcgc

SEQ ID NO: 11443 - DNA, 22 bp, synthetic construct
  misc_feature 1..22: note = Probe
  source 1..22: mol_type = other DNA
gttcagtggtagaattctcgcc

SEQ ID NO: 11444 - DNA, 23 bp, synthetic construct
  misc_feature 1..23: note = Probe
  source 1..23: mol_type = other DNA
gttcagtggtagaattctcgcct

SEQ ID NO: 11445 - DNA, 24 bp, synthetic construct
  misc_feature 1..24: note = Probe
  source 1..24: mol_type = other DNA
gttcagtggtagaattctcgcctc

SEQ ID NO: 11446 - DNA, 25 bp, synthetic construct
  misc_feature 1..25: note = Probe
  source 1..25: mol_type = other DNA
gttcagtggtagaattctcgcctca

SEQ ID NO: 11447 - DNA, 25 bp, synthetic construct
  misc_feature 1..25: note = Probe
  source 1..25: mol_type = other DNA
gttcagtggtagaattctcgcctcc

SEQ ID NO: 11448 - DNA, 24 bp, synthetic construct
  misc_feature 1..24: note = Probe
  source 1..24: mol_type = other DNA
gttcagtggtagaattctcgcctg

SEQ ID NO: 11449 - DNA, 25 bp, synthetic construct
  misc_feature 1..25: note = Probe
  source 1..25: mol_type = other DNA
gttcagtggtagaattctcgcctgc

SEQ ID NO: 11450 - DNA, 26 bp, synthetic construct
  misc_feature 1..26: note = Probe
  source 1..26: mol_type = other DNA
gttcagtggtagaattctcgcctgcc

SEQ ID NO: 11451 - DNA, 24 bp, synthetic construct
  misc_feature 1..24: note = Probe
  source 1..24: mol_type = other DNA
gttcagtggtagaattctcgcctt

SEQ ID NO: 11452 - DNA, 25 bp, synthetic construct
  misc_feature 1..25: note = Probe
  source 1..25: mol_type = other DNA
gttcagtggtagaattctcgccttt

SEQ ID NO: 11453 - DNA, 23 bp, synthetic construct
  misc_feature 1..23: note = Probe
  source 1..23: mol_type = other DNA
gttcagtggtagaattcttgcct

SEQ ID NO: 11454 - DNA, 28 bp, synthetic construct
  misc_feature 1..28: note = Probe
  source 1..28: mol_type = other DNA
gttccatggtgtaatggttagcactctg

SEQ ID NO: 11455 - DNA, 29 bp, synthetic construct
  misc_feature 1..29: note = Probe
  source 1..29: mol_type = other DNA
gttccatggtgtaatggttagcactctgg

SEQ ID NO: 11456 - DNA, 21 bp, synthetic construct
  misc_feature 1..21: note = Probe
  source 1..21: mol_type = other DNA
gttccgggttcgagtcccggc

SEQ ID NO: 11457 - DNA, 24 bp, synthetic construct
  misc_feature 1..24: note = Probe
  source 1..24: mol_type = other DNA
gttcgaatcccagcggtgcctcaa

SEQ ID NO: 11458 - DNA, 24 bp, synthetic construct
  misc_feature 1..24: note = Probe
  source 1..24: mol_type = other DNA
gttcgaatcccagcggtgcctccg

SEQ ID NO: 11459 - DNA, 21 bp, synthetic construct
  misc_feature 1..21: note = Probe
  source 1..21: mol_type = other DNA
gttcgaatcccatcctcgtcg

SEQ ID NO: 11460 - DNA, 22 bp, synthetic construct
  misc_feature 1..22: note = Probe
  source 1..22: mol_type = other DNA
gttcgaatcccatcctcgtcgc

SEQ ID NO: 11461 - DNA, 19 bp, synthetic construct
  misc_feature 1..19: note = Probe
  source 1..19: mol_type = other DNA
gttcgaatccgagtcacgg

SEQ ID NO: 11462 - DNA, 24 bp, synthetic construct
  misc_feature 1..24: note = Probe
  source 1..24: mol_type = other DNA
gttcgaatccggctcgaaggacga

SEQ ID NO: 11463 - DNA, 24 bp, synthetic construct
  misc_feature 1..24: note = Probe
  source 1..24: mol_type = other DNA
gttcgaatcctgccgactacggca

SEQ ID NO: 11464 - DNA, 22 bp, synthetic construct
  misc_feature 1..22: note = Probe
  source 1..22: mol_type = other DNA
gttcgactcccggtatgggaac

SEQ ID NO: 11465 - DNA, 24 bp, synthetic construct
  misc_feature 1..24: note = Probe
  source 1..24: mol_type = other DNA
gttcgactcccggtatgggaacaa

SEQ ID NO: 11466 - DNA, 20 bp, synthetic construct
  misc_feature 1..20: note = Probe
  source 1..20: mol_type = other DNA
gttcgactcccggtgtggga

SEQ ID NO: 11467 - DNA, 21 bp, synthetic construct
  misc_feature 1..21: note = Probe
  source 1..21: mol_type = other DNA
gttcgactcccggtgtgggaa

SEQ ID NO: 11468 - DNA, 23 bp, synthetic construct
  misc_feature 1..23: note = Probe
  source 1..23: mol_type = other DNA
gttcgactcccggtgtgggaacg

SEQ ID NO: 11469 - DNA, 20 bp, synthetic construct
  misc_feature 1..20: note = Probe
  source 1..20: mol_type = other DNA
gttcgactcctggctggctc

SEQ ID NO: 11470 - DNA, 22 bp, synthetic construct
  misc_feature 1..22: note = Probe
  source 1..22: mol_type = other DNA
gttcgactcctggctggctcgc

SEQ ID NO: 11471 - DNA, 24 bp, synthetic construct
  misc_feature 1..24: note = Probe
  source 1..24: mol_type = other DNA
gttcgagcccacccagggacgcct

SEQ ID NO: 11472 - DNA, 24 bp, synthetic construct
  misc_feature 1..24: note = Probe
  source 1..24: mol_type = other DNA
gttcgagcccacccagggacgcta

SEQ ID NO: 11473 - DNA, 19 bp, synthetic construct
  misc_feature 1..19: note = Probe
  source 1..19: mol_type = other DNA
gttcgagccccacgttggg

SEQ ID NO: 11474 - DNA, 21 bp, synthetic construct
  misc_feature 1..21: note = Probe
  source 1..21: mol_type = other DNA
gttcgagccccacgttgggcg

SEQ ID NO: 11475 - DNA, 22 bp, synthetic construct
  misc_feature 1..22: note = Probe
  source 1..22: mol_type = other DNA
gttcgagccccacgttgggcgc

SEQ ID NO: 11476 - DNA, 24 bp, synthetic construct
  misc_feature 1..24: note = Probe
  source 1..24: mol_type = other DNA
gttcgagccccacgttgggcggca

SEQ ID NO: 11477 - DNA, 19 bp, synthetic construct
  misc_feature 1..19: note = Probe
  source 1..19: mol_type = other DNA
gttcgagtcccatctgggg

SEQ ID NO: 11478 - DNA, 21 bp, synthetic construct
  misc_feature 1..21: note = Probe
  source 1..21: mol_type = other DNA
gttcgagtcccatctggggtg

SEQ ID NO: 11479 - DNA, 19 bp, synthetic construct
  misc_feature 1..19: note = Probe
  source 1..19: mol_type = other DNA
gttcgatcccgggtttcgg

SEQ ID NO: 11480 - DNA, 21 bp, synthetic construct
  misc_feature 1..21: note = Probe
  source 1..21: mol_type = other DNA
gttcgatcctcacacggggca

SEQ ID NO: 11481 - DNA, 15 bp, synthetic construct
  misc_feature 1..15: note = Probe
  source 1..15: mol_type = other DNA
gttcgattccccgac

SEQ ID NO: 11482 - DNA, 18 bp, synthetic construct
  misc_feature 1..18: note = Probe
  source 1..18: mol_type = other DNA
gttcgattccccgacggg

SEQ ID NO: 11483 - DNA, 19 bp, synthetic construct
  misc_feature 1..19: note = Probe
  source 1..19: mol_type = other DNA
gttcgattccccgacgggg

SEQ ID NO: 11484 - DNA, 20 bp, synthetic construct
  misc_feature 1..20: note = Probe
  source 1..20: mol_type = other DNA
gttcgattccccgacgggga

SEQ ID NO: 11485 - DNA, 21 bp, synthetic construct
  misc_feature 1..21: note = Probe
  source 1..21: mol_type = other DNA
gttcgattccccgacggggag

SEQ ID NO: 11486 - DNA, 22 bp, synthetic construct
  misc_feature 1..22: note = Probe
  source 1..22: mol_type = other DNA
gttcgattccccgacggggaga

SEQ ID NO: 11487 - DNA, 23 bp, synthetic construct
  misc_feature 1..23: note = Probe
  source 1..23: mol_type = other DNA
gttcgattccccgacggggagac

SEQ ID NO: 11488 - DNA, 22 bp, synthetic construct
  misc_feature 1..22: note = Probe
  source 1..22: mol_type = other DNA
gttcgattccccgacggggagg

SEQ ID NO: 11489 - DNA, 23 bp, synthetic construct
  misc_feature 1..23: note = Probe
  source 1..23: mol_type = other DNA
gttcgattccccgacggggaggc

SEQ ID NO: 11490 - DNA, 24 bp, synthetic construct
  misc_feature 1..24: note = Probe
  source 1..24: mol_type = other DNA
gttcgattccccgacggggaggca

SEQ ID NO: 11491 - DNA, 24 bp, synthetic construct
  misc_feature 1..24: note = Probe
  source 1..24: mol_type = other DNA
gttcgattcccggccaatgcacga

SEQ ID NO: 11492 - DNA, 24 bp, synthetic construct
  misc_feature 1..24: note = Probe
  source 1..24: mol_type = other DNA
gttcgattcccggccaatgcagca

SEQ ID NO: 11493 - DNA, 15 bp, synthetic construct
  misc_feature 1..15: note = Probe
  source 1..15: mol_type = other DNA
gttcgattcccggtc

SEQ ID NO: 11494 - DNA, 18 bp, synthetic construct
  misc_feature 1..18: note = Probe
  source 1..18: mol_type = other DNA
gttcgattcccggtcagg

SEQ ID NO: 11495 - DNA, 19 bp, synthetic construct
  misc_feature 1..19: note = Probe
  source 1..19: mol_type = other DNA
gttcgattcccggtcaggg

SEQ ID NO: 11496 - DNA, 20 bp, synthetic construct
  misc_feature 1..20: note = Probe
  source 1..20: mol_type = other DNA
gttcgattcccggtcaggga

SEQ ID NO: 11497 - DNA, 21 bp, synthetic construct
  misc_feature 1..21: note = Probe
  source 1..21: mol_type = other DNA
gttcgattcccggtcagggaa

SEQ ID NO: 11498 - DNA, 23 bp, synthetic construct
  misc_feature 1..23: note = Probe
  source 1..23: mol_type = other DNA
gttcgattcccggtcagggaaca

SEQ ID NO: 11499 - DNA, 24 bp, synthetic construct
  misc_feature 1..24: note = Probe
  source 1..24: mol_type = other DNA
gttcgattcccggtcagggaacaa

SEQ ID NO: 11500 - DNA, 23 bp, synthetic construct
  misc_feature 1..23: note = Probe
  source 1..23: mol_type = other DNA
gttcgattcccggtcagggaagc

SEQ ID NO: 11501 - DNA, 23 bp, synthetic construct
  misc_feature 1..23: note = Probe
  source 1..23: mol_type = other DNA
gttcgattcccggtcatggaacc

SEQ ID NO: 11502 - DNA, 24 bp, synthetic construct
  misc_feature 1..24: note = Probe
  source 1..24: mol_type = other DNA
gttcgattcccggtcatggaacca

SEQ ID NO: 11503 - DNA, 20 bp, synthetic construct
  misc_feature 1..20: note = Probe
  source 1..20: mol_type = other DNA
gttcgattccggctcgaagg

SEQ ID NO: 11504 - DNA, 22 bp, synthetic construct
  misc_feature 1..22: note = Probe
  source 1..22: mol_type = other DNA
gttcgattccggctcgaaggac

SEQ ID NO: 11505 - DNA, 23 bp, synthetic construct
  misc_feature 1..23: note = Probe
  source 1..23: mol_type = other DNA
gttcgattcctggtcagggaacc

SEQ ID NO: 11506 - DNA, 24 bp, synthetic construct
  misc_feature 1..24: note = Probe
  source 1..24: mol_type = other DNA
gttcgattcctggtcagggaacca

SEQ ID NO: 11507 - DNA, 18 bp, synthetic construct
  misc_feature 1..18: note = Probe
  source 1..18: mol_type = other DNA
gttcttgtagttgaaata

SEQ ID NO: 11508 - DNA, 19 bp, synthetic construct
  misc_feature 1..19: note = Probe
  source 1..19: mol_type = other DNA
gttcttgtagttgaaatac

SEQ ID NO: 11509 - DNA, 20 bp, synthetic construct
  misc_feature 1..20: note = Probe
  source 1..20: mol_type = other DNA
gttcttgtagttgaaataca

SEQ ID NO: 11510 - DNA, 21 bp, synthetic construct
  misc_feature 1..21: note = Probe
  source 1..21: mol_type = other DNA
gttcttgtagttgaaatacaa

SEQ ID NO: 11511 - DNA, 22 bp, synthetic construct
  misc_feature 1..22: note = Probe
  source 1..22: mol_type = other DNA
gttcttgtagttgaaatacaac

SEQ ID NO: 11512 - DNA, 23 bp, synthetic construct
  misc_feature 1..23: note = Probe
  source 1..23: mol_type = other DNA
gttcttgtagttgaaatacaacg

SEQ ID NO: 11513 - DNA, 24 bp, synthetic construct
  misc_feature 1..24: note = Probe
  source 1..24: mol_type = other DNA
gttcttgtagttgaaatacaacga

SEQ ID NO: 11514 - DNA, 25 bp, synthetic construct
  misc_feature 1..25: note = Probe
  source 1..25: mol_type = other DNA
gttcttgtagttgaaatacaacgat

SEQ ID NO: 11515 - DNA, 26 bp, synthetic construct
  misc_feature 1..26: note = Probe
  source 1..26: mol_type = other DNA
gttcttgtagttgaaatacaacgatg

SEQ ID NO: 11516 - DNA, 27 bp, synthetic construct
  misc_feature 1..27: note = Probe
  source 1..27: mol_type = other DNA
gttcttgtagttgaaatacaacgatgg

SEQ ID NO: 11517 - DNA, 28 bp, synthetic construct
  misc_feature 1..28: note = Probe
  source 1..28: mol_type = other DNA
gttcttgtagttgaaatacaacgatggt

SEQ ID NO: 11518 - DNA, 29 bp, synthetic construct
  misc_feature 1..29: note = Probe
  source 1..29: mol_type = other DNA
gttcttgtagttgaaatacaacgatggtt

SEQ ID NO: 11519 - DNA, 30 bp, synthetic construct; identical to SEQ ID NO: 7195
  misc_feature 1..30: note = Probe
  source 1..30: mol_type = other DNA

SEQ ID NO: 11520 - DNA, 23 bp, synthetic construct
  misc_feature 1..23: note = Probe
  source 1..23: mol_type = other DNA
gttggtagagcggaggactgtag

SEQ ID NO: 11521 - DNA, 20 bp, synthetic construct
  misc_feature 1..20: note = Probe
  source 1..20: mol_type = other DNA
gttggtctaggggtatgatt

SEQ ID NO: 11522 - DNA, 25 bp, synthetic construct
  misc_feature 1..25: note = Probe
  source 1..25: mol_type = other DNA
gttggtctaggggtatgattctcgc

SEQ ID NO: 11523 - DNA, 27 bp, synthetic construct
  misc_feature 1..27: note = Probe
  source 1..27: mol_type = other DNA
gttggtctaggggtatgattctcgctt

SEQ ID NO: 11524 - DNA, 21 bp, synthetic construct
  misc_feature 1..21: note = Probe
  source 1..21: mol_type = other DNA
gttggtggtatagtggtgagc

SEQ ID NO: 11525 - DNA, 21 bp, synthetic construct
  misc_feature 1..21: note = Probe
  source 1..21: mol_type = other DNA
gttgtagtccgtgcgagaata

SEQ ID NO: 11526 - DNA, 30 bp, synthetic construct
  misc_feature 1..30: note = Probe
  source 1..30: mol_type = other DNA
gtttaaccaaaacatcagattgtgaatctg

SEQ ID NO: 11527 - DNA, 16 bp, synthetic construct
  misc_feature 1..16: note = Probe
  source 1..16: mol_type = other DNA
gtttagacgggctcac

SEQ ID NO: 11528 - DNA, 30 bp, synthetic construct
  misc_feature 1..30: note = Probe
  source 1..30: mol_type = other DNA
gtttagacgggctcacatcaccccataaac

SEQ ID NO: 11529 - DNA, 23 bp, synthetic construct
  misc_feature 1..23: note = Probe
  source 1..23: mol_type = other DNA
gtttagtggtagaattctcgcct

SEQ ID NO: 11530 - DNA, 25 bp, synthetic construct
  misc_feature 1..25: note = Probe
  source 1..25: mol_type = other DNA
gtttagtggtagaattctcgcctcc

SEQ ID NO: 11531 - DNA, 16 bp, synthetic construct
  misc_feature 1..16: note = Probe
  source 1..16: mol_type = other DNA
gtttatgtagcttacc

SEQ ID NO: 11532 - DNA, 17 bp, synthetic construct
  misc_feature 1..17: note = Probe
  source 1..17: mol_type = other DNA
gtttatgtagcttacct

SEQ ID NO: 11533 - DNA, 21 bp, synthetic construct
  misc_feature 1..21: note = Probe
  source 1..21: mol_type = other DNA
gtttatgtagcttacctcctc

SEQ ID NO: 11534 - DNA, 22 bp, synthetic construct
  misc_feature 1..22: note = Probe
  source 1..22: mol_type = other DNA
gtttatgtagcttacctcctca

SEQ ID NO: 11535 - DNA, 23 bp, synthetic construct
  misc_feature 1..23: note = Probe
  source 1..23: mol_type = other DNA
gtttatgtagcttacctcctcaa

SEQ ID NO: 11536 - DNA, 24 bp, synthetic construct
  misc_feature 1..24: note = Probe
  source 1..24: mol_type = other DNA
gtttatgtagcttacctcctcaaa

SEQ ID NO: 11537 - DNA, 26 bp, synthetic construct
  misc_feature 1..26: note = Probe
  source 1..26: mol_type = other DNA
gtttatgtagcttacctcctcaaagc

SEQ ID NO: 11538 - DNA, 27 bp, synthetic construct
  misc_feature 1..27: note = Probe
  source 1..27: mol_type = other DNA
gtttatgtagcttacctcctcaaagca

SEQ ID NO: 11539 - DNA, 29 bp, synthetic construct
  misc_feature 1..29: note = Probe
  source 1..29: mol_type = other DNA
gtttatgtagcttacctcctcaaagcaat

SEQ ID NO: 11540 - DNA, 20 bp, synthetic construct
  misc_feature 1..20: note = Probe
  source 1..20: mol_type = other DNA
gtttccgtagtggagtggtt

SEQ ID NO: 11541 - DNA, 22 bp, synthetic construct
  misc_feature 1..22: note = Probe
  source 1..22: mol_type = other DNA
gtttccgtagtggagtggttat

SEQ ID NO: 11542 - DNA, 23 bp, synthetic construct
  misc_feature 1..23: note = Probe
  source 1..23: mol_type = other DNA
gtttccgtagtggagtggttatc

SEQ ID NO: 11543 - DNA, 30 bp, synthetic construct
  misc_feature 1..30: note = Probe
  source 1..30: mol_type = other DNA
gtttccgtagtggagtggttatcacgttcg

SEQ ID NO: 11544 - DNA, 15 bp, synthetic construct
  misc_feature 1..15: note = Probe
  source 1..15: mol_type = other DNA
gtttccgtagtgtag

SEQ ID NO: 11545 - DNA, 16 bp, synthetic construct
  misc_feature 1..16: note = Probe
  source 1..16: mol_type = other DNA
gtttccgtagtgtagc

SEQ ID NO: 11546 - DNA, 17 bp, synthetic construct
  misc_feature 1..17: note = Probe
  source 1..17: mol_type = other DNA
gtttccgtagtgtagcg

SEQ ID NO: 11547 - DNA, 18 bp, synthetic construct
  misc_feature 1..18: note = Probe
  source 1..18: mol_type = other DNA
gtttccgtagtgtagcgg

SEQ ID NO: 11548 - DNA, 19 bp, synthetic construct
  misc_feature 1..19: note = Probe
  source 1..19: mol_type = other DNA
gtttccgtagtgtagcggt

SEQ ID NO: 11549 - DNA, 20 bp, synthetic construct
  misc_feature 1..20: note = Probe
  source 1..20: mol_type = other DNA
gtttccgtagtgtagcggtt

SEQ ID NO: 11550 - DNA, 22 bp, synthetic construct
  misc_feature 1..22: note = Probe
  source 1..22: mol_type = other DNA
gtttccgtagtgtagcggttat

SEQ ID NO: 11551 - DNA, 23 bp, synthetic construct
  misc_feature 1..23: note = Probe
  source 1..23: mol_type = other DNA
gtttccgtagtgtagcggttatc

SEQ ID NO: 11552 - DNA, 25 bp, synthetic construct
  misc_feature 1..25: note = Probe
  source 1..25: mol_type = other DNA
gtttccgtagtgtagcggttatcac

SEQ ID NO: 11553 - DNA, 26 bp, synthetic construct
  misc_feature 1..26: note = Probe
  source 1..26: mol_type = other DNA
gtttccgtagtgtagcggttatcaca

SEQ ID NO: 11554 - DNA, 28 bp, synthetic construct
  misc_feature 1..28: note = Probe
  source 1..28: mol_type = other DNA
gtttccgtagtgtagcggttatcacatt

SEQ ID NO: 11555 - DNA, 29 bp, synthetic construct
  misc_feature 1..29: note = Probe
  source 1..29: mol_type = other DNA
gtttccgtagtgtagcggttatcacattc

SEQ ID NO: 11556 - DNA, 16 bp, synthetic construct
  misc_feature 1..16: note = Probe
  source 1..16: mol_type = other DNA
gtttccgtagtgtagt

SEQ ID NO: 11557 - DNA, 17 bp, synthetic construct
  misc_feature 1..17: note = Probe
  source 1..17: mol_type = other DNA
gtttccgtagtgtagtg

SEQ ID NO: 11558 - DNA, 18 bp, synthetic construct
  misc_feature 1..18: note = Probe
  source 1..18: mol_type = other DNA
gtttccgtagtgtagtgg

SEQ ID NO: 11559 - DNA, 19 bp, synthetic construct
  misc_feature 1..19: note = Probe
  source 1..19: mol_type = other DNA
gtttccgtagtgtagtggt

SEQ ID NO: 11560 - DNA, 21 bp, synthetic construct
  misc_feature 1..21: note = Probe
  source 1..21: mol_type = other DNA
gtttccgtagtgtagtggtca

SEQ ID NO: 11561 - DNA, 22 bp, synthetic construct
  misc_feature 1..22: note = Probe
  source 1..22: mol_type = other DNA
gtttccgtagtgtagtggtcat

SEQ ID NO: 11562 - DNA, 24 bp, synthetic construct
  misc_feature 1..24: note = Probe
  source 1..24: mol_type = other DNA
gtttccgtagtgtagtggtcatca

SEQ ID NO: 11563 - DNA, 25 bp, synthetic construct
  misc_feature 1..25: note = Probe
  source 1..25: mol_type = other DNA
gtttccgtagtgtagtggtcatcac

SEQ ID NO: 11564 - DNA, 26 bp, synthetic construct
  misc_feature 1..26: note = Probe
  source 1..26: mol_type = other DNA
gtttccgtagtgtagtggtcatcacg

SEQ ID NO: 11565 - DNA, 27 bp, synthetic construct
  misc_feature 1..27: note = Probe
  source 1..27: mol_type = other DNA
gtttccgtagtgtagtggtcatcacgt

SEQ ID NO: 11566 - DNA, 28 bp, synthetic construct
  misc_feature 1..28: note = Probe
  source 1..28: mol_type = other DNA
gtttccgtagtgtagtggtcatcacgtt

SEQ ID NO: 11567 - DNA, 29 bp, synthetic construct
  misc_feature 1..29: note = Probe
  source 1..29: mol_type = other DNA
gtttccgtagtgtagtggtcatcacgttc

SEQ ID NO: 11568 - DNA, 20 bp, synthetic construct
  misc_feature 1..20: note = Probe
  source 1..20: mol_type = other DNA
gtttccgtagtgtagtggtt

SEQ ID NO: 11569 - DNA, 21 bp, synthetic construct
  misc_feature 1..21: note = Probe
  source 1..21: mol_type = other DNA
gtttccgtagtgtagtggtta

SEQ ID NO: 11570 - DNA, 22 bp, synthetic construct
  misc_feature 1..22: note = Probe
  source 1..22: mol_type = other DNA
gtttccgtagtgtagtggttat

SEQ ID NO: 11571 - DNA, 23 bp, synthetic construct
  misc_feature 1..23: note = Probe
  source 1..23: mol_type = other DNA
gtttccgtagtgtagtggttatc

SEQ ID NO: 11572 - DNA, 24 bp, synthetic construct
  misc_feature 1..24: note = Probe
  source 1..24: mol_type = other DNA
gtttccgtagtgtagtggttatca

SEQ ID NO: 11573 - DNA, 25 bp, synthetic construct
  misc_feature 1..25: note = Probe
  source 1..25: mol_type = other DNA
gtttccgtagtgtagtggttatcac

SEQ ID NO: 11574 - DNA, 26 bp, synthetic construct
  misc_feature 1..26: note = Probe
  source 1..26: mol_type = other DNA
gtttccgtagtgtagtggttatcacg

SEQ ID NO: 11575 - DNA, 27 bp, synthetic construct
  misc_feature 1..27: note = Probe
  source 1..27: mol_type = other DNA
gtttccgtagtgtagtggttatcacgt

SEQ ID NO: 11576 - DNA, 28 bp, synthetic construct
  misc_feature 1..28: note = Probe
  source 1..28: mol_type = other DNA
gtttccgtagtgtagtggttatcacgtt

SEQ ID NO: 11577 - DNA, 29 bp, synthetic construct
  misc_feature 1..29: note = Probe
  source 1..29: mol_type = other DNA
gtttccgtagtgtagtggttatcacgttc

SEQ ID NO: 11578 - DNA, 30 bp, synthetic construct; identical to SEQ ID NO: 7273
  misc_feature 1..30: note = Probe
  source 1..30: mol_type = other DNA

SEQ ID NO: 11579 - DNA, 30 bp, synthetic construct
  misc_feature 1..30: note = Probe
  source 1..30: mol_type = other DNA
gtttccgtagtgtagtggttatcacgtttg

SEQ ID NO: 11580 - DNA, 25 bp, synthetic construct
  misc_feature 1..25: note = Probe
  source 1..25: mol_type = other DNA
gtttccgtagtgtagtggttattat

SEQ ID NO: 11581 - DNA, 20 bp, synthetic construct
  misc_feature 1..20: note = Probe
  source 1..20: mol_type = other DNA
gtttccgtggtgtagtggtt

SEQ ID NO: 11582 - DNA, 26 bp, synthetic construct
  misc_feature 1..26: note = Probe
  source 1..26: mol_type = other DNA
gtttccgtggtgtagtggttatcaca

SEQ ID NO: 11583 - DNA, 30 bp, synthetic construct
  misc_feature 1..30: note = Probe
  source 1..30: mol_type = other DNA
gtttccgtggtgtagtggttatcacattcg

SEQ ID NO: 11584 - DNA, 22 bp, synthetic construct
  misc_feature 1..22: note = Probe
  source 1..22: mol_type = other DNA
gtttgtgggtttaagtcccatt

SEQ ID NO: 11585 - DNA, 28 bp, synthetic construct
  misc_feature 1..28: note = Probe
  source 1..28: mol_type = other DNA
gtttttcatatcattggtcgtggttgta

SEQ ID NO: 11586 - DNA, 29 bp, synthetic construct
  misc_feature 1..29: note = Probe
  source 1..29: mol_type = other DNA
gtttttcatatcattggtcgtggttgtag

SEQ ID NO: 11587 - DNA, 30 bp, synthetic construct
  misc_feature 1..30: note = Probe
  source 1..30: mol_type = other DNA
gtttttcatatcattggtcgtggttgtagt

SEQ ID NO: 11588 - DNA, 29 bp, synthetic construct
  misc_feature 1..29: note = Probe
  source 1..29: mol_type = other DNA
taaaatggctgagtgaagcattggactgt

SEQ ID NO: 11589 - DNA, 18 bp, synthetic construct
  misc_feature 1..18: note = Probe
  source 1..18: mol_type = other DNA
taaagactttttctctga

SEQ ID NO: 11590 - DNA, 19 bp, synthetic construct
  misc_feature 1..19: note = Probe
  source 1..19: mol_type = other DNA
taaagactttttctctgat

SEQ ID NO: 11591 - DNA, 30 bp, synthetic construct
  misc_feature 1..30: note = Probe
  source 1..30: mol_type = other DNA
taaagattaagagaaccaacacctctttac

SEQ ID NO: 11592 - DNA, 21 bp, synthetic construct
  misc_feature 1..21: note = Probe
  source 1..21: mol_type = other DNA
taacaacatggctttctcaac

SEQ ID NO: 11593 - DNA, 18 bp, synthetic construct
  misc_feature 1..18: note = Probe
  source 1..18: mol_type = other DNA
taacagctaaggactgca

SEQ ID NO: 11594 - DNA, 19 bp, synthetic construct
  misc_feature 1..19: note = Probe
  source 1..19: mol_type = other DNA
taacagctaaggactgcaa

SEQ ID NO: 11595 - DNA, 20 bp, synthetic construct
  misc_feature 1..20: note = Probe
  source 1..20: mol_type = other DNA
taacagctaaggactgcaaa

SEQ ID NO: 11596 - DNA, 21 bp, synthetic construct
  misc_feature 1..21: note = Probe
  source 1..21: mol_type = other DNA
taacagctaaggactgcaaaa

SEQ ID NO: 11597 - DNA, 22 bp, synthetic construct
  misc_feature 1..22: note = Probe
  source 1..22: mol_type = other DNA
taacagctaaggactgcaaaac

SEQ ID NO: 11598 - DNA, 23 bp, synthetic construct
  misc_feature 1..23: note = Probe
  source 1..23: mol_type = other DNA
taacagctaaggactgcaaaacc

SEQ ID NO: 11599 - DNA, 24 bp, synthetic construct
  misc_feature 1..24: note = Probe
  source 1..24: mol_type = other DNA
taacagctaaggactgcaaaaccc

SEQ ID NO: 11600 - DNA, 25 bp, synthetic construct
  misc_feature 1..25: note = Probe
  source 1..25: mol_type = other DNA
taacagctaaggactgcaaaacccc

SEQ ID NO: 11601 - DNA, 26 bp, synthetic construct
  misc_feature 1..26: note = Probe
  source 1..26: mol_type = other DNA
taacagctaaggactgcaaaacccca

SEQ ID NO: 11602 - DNA, 27 bp, synthetic construct
  misc_feature 1..27: note = Probe
  source 1..27: mol_type = other DNA
taacagctaaggactgcaaaaccccac

SEQ ID NO: 11603 - DNA, 28 bp, synthetic construct
  misc_feature 1..28: note = Probe
  source 1..28: mol_type = other DNA
taacagctaaggactgcaaaaccccact

SEQ ID NO: 11604 - DNA, 29 bp, synthetic construct
  misc_feature 1..29: note = Probe
  source 1..29: mol_type = other DNA
taacagctaaggactgcaaaaccccactc

SEQ ID NO: 11605 - DNA, 30 bp, synthetic construct
  misc_feature 1..30: note = Probe
  source 1..30: mol_type = other DNA
taacagctaaggactgcaaaaccccactct

SEQ ID NO: 11606 - DNA, 18 bp, synthetic construct
  misc_feature 1..18: note = Probe
  source 1..18: mol_type = other DNA
taacagctatccattggt

SEQ ID NO: 11607 - DNA, 21 bp, synthetic construct
  misc_feature 1..21: note = Probe
  source 1..21: mol_type = other DNA
taaccaaaacatcagattgtg

SEQ ID NO: 11608 - DNA, 29 bp, synthetic construct
  misc_feature 1..29: note = Probe
  source 1..29: mol_type = other DNA
taaccaaaacatcagattgtgaatctgac

SEQ ID NO: 11609 - DNA, 15 bp, synthetic construct
  misc_feature 1..15: note = Probe
  source 1..15: mol_type = other DNA
taacccagaggtcga

SEQ ID NO: 11610 - DNA, 17 bp, synthetic construct
  misc_feature 1..17: note = Probe
  source 1..17: mol_type = other DNA
taacccagaggtcgatg

SEQ ID NO: 11611 - DNA, 18 bp, synthetic construct
  misc_feature 1..18: note = Probe
  source 1..18: mol_type = other DNA
taacccagaggtcgatgg

SEQ ID NO: 11612 - DNA, 19 bp, synthetic construct
  misc_feature 1..19: note = Probe
  source 1..19: mol_type = other DNA
taacccagaggtcgatgga

SEQ ID NO: 11613 - DNA, 20 bp, synthetic construct
  misc_feature 1..20: note = Probe
  source 1..20: mol_type = other DNA
taacccagaggtcgatggat

SEQ ID NO: 11614 - DNA, 21 bp, synthetic construct
  misc_feature 1..21: note = Probe
  source 1..21: mol_type = other DNA
taacccagaggtcgatggatc

SEQ ID NO: 11615 - DNA, 24 bp, synthetic construct
  misc_feature 1..24: note = Probe
  source 1..24: mol_type = other DNA
taacccagaggtcgatggatcgaa

SEQ ID NO: 11616 - DNA, 25 bp, synthetic construct
  misc_feature 1..25: note = Probe
  source 1..25: mol_type = other DNA
taacccagaggtcgatggatcgaaa

SEQ ID NO: 11617 - DNA, 26 bp, synthetic construct
  misc_feature 1..26: note = Probe
  source 1..26: mol_type = other DNA
taacccagaggtcgatggatcgaaac

SEQ ID NO: 11618 - DNA, 27 bp, synthetic construct
  misc_feature 1..27: note = Probe
  source 1..27: mol_type = other DNA
taacccagaggtcgatggatcgaaacc

SEQ ID NO: 11619 - DNA, 28 bp, synthetic construct
  misc_feature 1..28: note = Probe
  source 1..28: mol_type = other DNA
taacccagaggtcgatggatcgaaacca

SEQ ID NO: 11620 - DNA, 21 bp, synthetic construct
  misc_feature 1..21: note = Probe
  source 1..21: mol_type = other DNA
taacgccaaggtcgcgggttc

SEQ ID NO: 11621 - DNA, 22 bp, synthetic construct
  misc_feature 1..22: note = Probe
  source 1..22: mol_type = other DNA
taacgccaaggtcgcgggttcg

SEQ ID NO: 11622 - DNA, 23 bp, synthetic construct
  misc_feature 1..23: note = Probe
  source 1..23: mol_type = other DNA
taacgccaaggtcgcgggttcga

SEQ ID NO: 11623 - DNA, 24 bp, synthetic construct
  misc_feature 1..24: note = Probe
  source 1..24: mol_type = other DNA
taacgccaaggtcgcgggttcgat

SEQ ID NO: 11624 - DNA, 25 bp, synthetic construct
  misc_feature 1..25: note = Probe
  source 1..25: mol_type = other DNA
taacgccaaggtcgcgggttcgatc

SEQ ID NO: 11625 - DNA, 15 bp, synthetic construct
  misc_feature 1..15: note = Probe
  source 1..15: mol_type = other DNA
taacttgaccgctct

SEQ ID NO: 11626 - DNA, 16 bp, synthetic construct
  misc_feature 1..16: note = Probe
  source 1..16: mol_type = other DNA
taacttgaccgctctg

SEQ ID NO: 11627 - DNA, 17 bp, synthetic construct
  misc_feature 1..17: note = Probe
  source 1..17: mol_type = other DNA
taacttgaccgctctga

SEQ ID NO: 11628 - DNA, 18 bp, synthetic construct
  misc_feature 1..18: note = Probe
  source 1..18: mol_type = other DNA
taacttgaccgctctgag

SEQ ID NO: 11629 - DNA, 19 bp, synthetic construct
  misc_feature 1..19: note = Probe
  source 1..19: mol_type = other DNA
taacttgaccgctctgagc

SEQ ID NO: 11630 - DNA, 20 bp, synthetic construct
  misc_feature 1..20: note = Probe
  source 1..20: mol_type = other DNA
taacttgaccgctctgagct

SEQ ID NO: 11631 - DNA, 17 bp, synthetic construct
  misc_feature 1..17: note = Probe
  source 1..17: mol_type = other DNA
taagccagggattgtgg

SEQ ID NO: 11632 - DNA, 18 bp, synthetic construct
  misc_feature 1..18: note = Probe
  source 1..18: mol_type = other DNA
taagccagggattgtggg

SEQ ID NO: 11633 - DNA, 22 bp, synthetic construct
  misc_feature 1..22: note = Probe
  source 1..22: mol_type = other DNA
taagccagggattgtgggttcg

SEQ ID NO: 11634 - DNA, 23 bp, synthetic construct
  misc_feature 1..23: note = Probe
  source 1..23: mol_type = other DNA
taagccagggattgtgggttcga

SEQ ID NO: 11635 - DNA, 20 bp, synthetic construct
  misc_feature 1..20: note = Probe
  source 1..20: mol_type = other DNA
taataacgccaaggtcgcgg

SEQ ID NO: 11636 - DNA, 22 bp, synthetic construct
  misc_feature 1..22: note = Probe
  source 1..22: mol_type = other DNA
taataacgccaaggtcgcgggt

SEQ ID NO: 11637 - DNA, 19 bp, synthetic construct
  misc_feature 1..19: note = Probe
  source 1..19: mol_type = other DNA
taatctgaaggtcctgagt

SEQ ID NO: 11638 - DNA, 21 bp, synthetic construct
  misc_feature 1..21: note = Probe
  source 1..21: mol_type = other DNA
taatggataaggcatcagcct

SEQ ID NO: 11639 - DNA, 21 bp, synthetic construct
  misc_feature 1..21: note = Probe
  source 1..21: mol_type = other DNA
taatggtgagcactctggact

SEQ ID NO: 11640 - DNA, 29 bp, synthetic construct
  misc_feature 1..29: note = Probe
  source 1..29: mol_type = other DNA
taatggtggagttaaagactttttctctg

SEQ ID NO: 11641 - DNA, 15 bp, synthetic construct
  misc_feature 1..15: note = Probe
  source 1..15: mol_type = other DNA
taatggttagcactc

SEQ ID NO: 11642 - DNA, 16 bp, synthetic construct
  misc_feature 1..16: note = Probe
  source 1..16: mol_type = other DNA
taatggttagcactct

SEQ ID NO: 11643 - DNA, 17 bp, synthetic construct
  misc_feature 1..17: note = Probe
  source 1..17: mol_type = other DNA
taatggttagcactctg

SEQ ID NO: 11644 - DNA, 18 bp, synthetic construct
  misc_feature 1..18: note = Probe
  source 1..18: mol_type = other DNA
taatggttagcactctgg

SEQ ID NO: 11645 - DNA, 19 bp, synthetic construct
  misc_feature 1..19: note = Probe
  source 1..19: mol_type = other DNA
taatggttagcactctgga

SEQ ID NO: 11646 - DNA, 20 bp, synthetic construct
  misc_feature 1..20: note = Probe
  source 1..20: mol_type = other DNA
taatggttagcactctggac

SEQ ID NO: 11647 - DNA, 21 bp, synthetic construct
  misc_feature 1..21: note = Probe
  source 1..21: mol_type = other DNA
taatggttagcactctggact

SEQ ID NO: 11648 - DNA, 22 bp, synthetic construct
  misc_feature 1..22: note = Probe
  source 1..22: mol_type = other DNA
taatggttagcactctggactc

SEQ ID NO: 11649 - DNA, 23 bp, synthetic construct
  misc_feature 1..23: note = Probe
  source 1..23: mol_type = other DNA
taatggttagcactctggactct

SEQ ID NO: 11650 - DNA, 24 bp, synthetic construct
  misc_feature 1..24: note = Probe
  source 1..24: mol_type = other DNA
taatggttagcactctggactctg

SEQ ID NO: 11651 - DNA, 25 bp, synthetic construct
  misc_feature 1..25: note = Probe
  source 1..25: mol_type = other DNA
taatggttagcactctggactctga

SEQ ID NO: 11652 - DNA, 22 bp, synthetic construct
  misc_feature 1..22: note = Probe
  source 1..22: mol_type = other DNA
taatggttagcactctggactt

SEQ ID NO: 11653 - DNA, 23 bp, synthetic construct
  misc_feature 1..23: note = Probe
  source 1..23: mol_type = other DNA
taatggttagcactctggacttt

SEQ ID NO: 11654 - DNA, 24 bp, synthetic construct
  misc_feature 1..24: note = Probe
  source 1..24: mol_type = other DNA
taatggttagcactctggactttg

SEQ ID NO: 11655 - DNA, 25 bp, synthetic construct
  misc_feature 1..25: note = Probe
  source 1..25: mol_type = other DNA
taatggttagcactctggactttga

SEQ ID NO: 11656 - DNA, 21 bp, synthetic construct
  misc_feature 1..21: note = Probe
  source 1..21: mol_type = other DNA
taatggttagcactctgggct

SEQ ID NO: 11657 - DNA, 22 bp, synthetic construct
  misc_feature 1..22: note = Probe
  source 1..22: mol_type = other DNA
taatggttagcactctgggctt

SEQ ID NO: 11658 - DNA, 30 bp, synthetic construct; identical to SEQ ID NO: 7487
  misc_feature 1..30: note = Probe
  source 1..30: mol_type = other DNA

SEQ ID NO: 11659 - DNA, 26 bp, synthetic construct
  misc_feature 1..26: note = Probe
  source 1..26: mol_type = other DNA
tactggaaagtgcacttggacgaacc

SEQ ID NO: 11660 - DNA, 16 bp, synthetic construct
  misc_feature 1..16: note = Probe
  source 1..16: mol_type = other DNA
tagaattctcgcctgc

SEQ ID NO: 11661 - DNA, 17 bp, synthetic construct
  misc_feature 1..17: note = Probe
  source 1..17: mol_type = other DNA
tagaattctcgcctgcc

SEQ ID NO: 11662 - DNA, 19 bp, synthetic construct
  misc_feature 1..19: note = Probe
  source 1..19: mol_type = other DNA
tagaattctcgcctgccac

SEQ ID NO: 11663 - DNA, 18 bp, synthetic construct
  misc_feature 1..18: note = Probe
  source 1..18: mol_type = other DNA
tagagcggaggactgtag

SEQ ID NO: 11664 - DNA, 15 bp, synthetic construct
  misc_feature 1..15: note = Probe
  source 1..15: mol_type = other DNA
tagattgaagccagt

SEQ ID NO: 11665 - DNA, 16 bp, synthetic construct
  misc_feature 1..16: note = Probe
  source 1..16: mol_type = other DNA
tagattgaagccagtt

SEQ ID NO: 11666 - DNA, 22 bp, synthetic construct
  misc_feature 1..22: note = Probe
  source 1..22: mol_type = other DNA
tagattgaagccagttgattag

SEQ ID NO: 11667 - DNA, 23 bp, synthetic construct
  misc_feature 1..23: note = Probe
  source 1..23: mol_type = other DNA
tagattgaagccagttgattagg

SEQ ID NO: 11668 - DNA, 24 bp, synthetic construct
  misc_feature 1..24: note = Probe
  source 1..24: mol_type = other DNA
tagattgaagccagttgattaggg

SEQ ID NO: 11669 - DNA, 25 bp, synthetic construct
  misc_feature 1..25: note = Probe
  source 1..25: mol_type = other DNA
tagattgaagccagttgattagggt

SEQ ID NO: 11670 - DNA, 26 bp, synthetic construct
  misc_feature 1..26: note = Probe
  source 1..26: mol_type = other DNA
tagattgaagccagttgattagggtg

SEQ ID NO: 11671 - DNA, 28 bp, synthetic construct
  misc_feature 1..28: note = Probe
  source 1..28: mol_type = other DNA
tagattgaagccagttgattagggtgct

SEQ ID NO: 11672 - DNA, 29 bp, synthetic construct
  misc_feature 1..29: note = Probe
  source 1..29: mol_type = other DNA
tagattgaagccagttgattagggtgctt

SEQ ID NO: 11673 - DNA, 15 bp, synthetic construct
  misc_feature 1..15: note = Probe
  source 1..15: mol_type = other DNA
tagcactctggactc

SEQ ID NO: 11674 - DNA, 17 bp, synthetic construct
  misc_feature 1..17: note = Probe
  source 1..17: mol_type = other DNA
tagcactctggactctg

SEQ ID NO: 11675 - DNA, 18 bp, synthetic construct
  misc_feature 1..18: note = Probe
  source 1..18: mol_type = other DNA
tagcactctggactctga

SEQ ID NO: 11676 - DNA, 19 bp, synthetic construct
  misc_feature 1..19: note = Probe
  source 1..19: mol_type = other DNA
tagcactctggactctgaa

SEQ ID NO: 11677 - DNA, 21 bp, synthetic construct
  misc_feature 1..21: note = Probe
  source 1..21: mol_type = other DNA
tagcactctggactctgaatc

SEQ ID NO: 11678 - DNA, 22 bp, synthetic construct
  misc_feature 1..22: note = Probe
  source 1..22: mol_type = other DNA
tagcactctggactctgaatcc

SEQ ID NO: 11679 - DNA, 23 bp, synthetic construct
  misc_feature 1..23: note = Probe
  source 1..23: mol_type = other DNA
tagcactctggactctgaatcca

SEQ ID NO: 11680 - DNA, 24 bp, synthetic construct
  misc_feature 1..24: note = Probe
  source 1..24: mol_type = other DNA
tagcactctggactctgaatccag

SEQ ID NO: 11681 - DNA, 25 bp, synthetic construct
  misc_feature 1..25: note = Probe
  source 1..25: mol_type = other DNA
tagcactctggactctgaatccagc

SEQ ID NO: 11682 - DNA, 21 bp, synthetic construct
  misc_feature 1..21: note = Probe
  source 1..21: mol_type = other DNA
tagcactctggactttgaatc

SEQ ID NO: 11683 - DNA, 22 bp, synthetic construct
  misc_feature 1..22: note = Probe
  source 1..22: mol_type = other DNA
tagcactctggactttgaatcc

SEQ ID NO: 11684 - DNA, 21 bp, synthetic construct
  misc_feature 1..21: note = Probe
  source 1..21: mol_type = other DNA
tagccgtaaggcggctgtttt

SEQ ID NO: 11685 - DNA, 20 bp, synthetic construct
  misc_feature 1..20: note = Probe
  source 1..20: mol_type = other DNA
tagcgcgttcggctgttaac

SEQ ID NO: 11686 - DNA, 21 bp, synthetic construct
  misc_feature 1..21: note = Probe
  source 1..21: mol_type = other DNA
tagcgcgttcggctgttaacc

SEQ ID NO: 11687 - DNA, 29 bp, synthetic construct
  misc_feature 1..29: note = Probe
  source 1..29: mol_type = other DNA
tagcgggatcgatgcccgcatcctccact

SEQ ID NO: 11688 - DNA, 19 bp, synthetic construct
  misc_feature 1..19: note = Probe
  source 1..19: mol_type = other DNA
tagcggttaggattcctgg

SEQ ID NO: 11689 - DNA, 21 bp, synthetic construct
  misc_feature 1..21: note = Probe
  source 1..21: mol_type = other DNA
tagcggttaggattcctggtt

SEQ ID NO: 11690 - DNA, 22 bp, synthetic construct
  misc_feature 1..22: note = Probe
  source 1..22: mol_type = other DNA
tagcggttaggattcctggttt

SEQ ID NO: 11691 - DNA, 23 bp, synthetic construct
  misc_feature 1..23: note = Probe
  source 1..23: mol_type = other DNA
tagcggttaggattcctggtttt

SEQ ID NO: 11692 - DNA, 29 bp, synthetic construct
  misc_feature 1..29: note = Probe
  source 1..29: mol_type = other DNA
tagcgtggccgagcggtctaaggcgctgg

SEQ ID NO: 11693 - DNA, 25 bp, synthetic construct
  misc_feature 1..25: note = Probe
  source 1..25: mol_type = other DNA
tagctcaggggtagagcatttgact

SEQ ID NO: 11694 - DNA, 26 bp, synthetic construct
  misc_feature 1..26: note = Probe
  source 1..26: mol_type = other DNA
tagctcaggggtagagcatttgactg

SEQ ID NO: 11695 - DNA, 26 bp, synthetic construct
  misc_feature 1..26: note = Probe
  source 1..26: mol_type = other DNA
tagctcagtgggtagagcatttgact

SEQ ID NO: 11696 - DNA, 25 bp, synthetic construct
  misc_feature 1..25: note = Probe
  source 1..25: mol_type = other DNA
tagctcagtggtagagcatttgact

SEQ ID NO: 11697 - DNA, 26 bp, synthetic construct
  misc_feature 1..26: note = Probe
  source 1..26: mol_type = other DNA
tagctcagtggtagagcatttgactg

SEQ ID NO: 11698 - DNA, 27 bp, synthetic construct
  misc_feature 1..27: note = Probe
  source 1..27: mol_type = other DNA
tagctcagtggtagagcatttgactgc

SEQ ID NO: 11699 - DNA, 26 bp, synthetic construct
  misc_feature 1..26: note = Probe
  source 1..26: mol_type = other DNA
taggagatttcaacttaacttgaccg

SEQ ID NO: 11700 - DNA, 30 bp, synthetic construct
  misc_feature 1..30: note = Probe
  source 1..30: mol_type = other DNA
taggagatttcaacttaacttgaccgctct

SEQ ID NO: 11701 - DNA, 16 bp, synthetic construct
  misc_feature 1..16: note = Probe
  source 1..16: mol_type = other DNA
taggatggggtgtgat

SEQ ID NO: 11702 - DNA, 19 bp, synthetic construct
  misc_feature 1..19: note = Probe
  source 1..19: mol_type = other DNA
taggatggggtgtgatagg

SEQ ID NO: 11703 - DNA, 21 bp, synthetic construct
  misc_feature 1..21: note = Probe
  source 1..21: mol_type = other DNA
taggatggggtgtgataggtg

SEQ ID NO: 11704 - DNA, 22 bp, synthetic construct
  misc_feature 1..22: note = Probe
  source 1..22: mol_type = other DNA
taggatggggtgtgataggtgg

SEQ ID NO: 11705 - DNA, 23 bp, synthetic construct
  misc_feature 1..23: note = Probe
  source 1..23: mol_type = other DNA
taggatggggtgtgataggtggc

SEQ ID NO: 11706 - DNA, 29 bp, synthetic construct
  misc_feature 1..29: note = Probe
  source 1..29: mol_type = other DNA
taggatggggtgtgataggtggcacggag

SEQ ID NO: 11707 - DNA, 19 bp, synthetic construct
  misc_feature 1..19: note = Probe
  source 1..19: mol_type = other DNA
taggctccagtctcttcgg

SEQ ID NO: 11708 - DNA, 20 bp, synthetic construct
  misc_feature 1..20: note = Probe
  source 1..20: mol_type = other DNA
taggctccagtctcttcggg

SEQ ID NO: 11709 - DNA, 20 bp, synthetic construct
  misc_feature 1..20: note = Probe
  source 1..20: mol_type = other DNA
taggggtatgattctcgctt

SEQ ID NO: 11710 - DNA, 21 bp, synthetic construct
  misc_feature 1..21: note = Probe
  source 1..21: mol_type = other DNA
taggggtatgattctcgcttc

SEQ ID NO: 11711 - DNA, 18 bp, synthetic construct
  misc_feature 1..18: note = Probe
  source 1..18: mol_type = other DNA
taggggtatgattctcgg

SEQ ID NO: 11712 - DNA, 22 bp, synthetic construct
  misc_feature 1..22: note = Probe
  source 1..22: mol_type = other DNA
tagggtgcgagaggtcccgggt

SEQ ID NO: 11713 - DNA, 23 bp, synthetic construct
  misc_feature 1..23: note = Probe
  source 1..23: mol_type = other DNA
taggtcgctggttcgaatccggc

SEQ ID NO: 11714 - DNA, 23 bp, synthetic construct
  misc_feature 1..23: note = Probe
  source 1..23: mol_type = other DNA
taggtcgctggttcgattccggc

SEQ ID NO: 11715 - DNA, 30 bp, synthetic construct
  misc_feature 1..30: note = Probe
  source 1..30: mol_type = other DNA
taggtcgctggttcgattccggctcgaagg

SEQ ID NO: 11716 - DNA, 20 bp, synthetic construct
  misc_feature 1..20: note = Probe
  source 1..20: mol_type = other DNA
taggttcgactcctggctgg

SEQ ID NO: 11717 - DNA, 23 bp, synthetic construct
  misc_feature 1..23: note = Probe
  source 1..23: mol_type = other DNA
tagtcgtggccgagtggttaagg

SEQ ID NO: 11718 - DNA, 24 bp, synthetic construct
  misc_feature 1..24: note = Probe
  source 1..24: mol_type = other DNA
tagtcgtggccgagtggttaaggc

SEQ ID NO: 11719 - DNA, 20 bp, synthetic construct
  misc_feature 1..20: note = Probe
  source 1..20: mol_type = other DNA
tagtggtagaattctcgcct

SEQ ID NO: 11720 - DNA, 20 bp, synthetic construct
  misc_feature 1..20: note = Probe
  source 1..20: mol_type = other DNA
tagtggtatcatgcaagatt

SEQ ID NO: 11721 - DNA, 21 bp, synthetic construct
  misc_feature 1..21: note = Probe
  source 1..21: mol_type = other DNA
tagtggtatcatgcaagattc

SEQ ID NO: 11722 - DNA, 19 bp, synthetic construct
  misc_feature 1..19: note = Probe
  source 1..19: mol_type = other DNA
tagtggtgagtatccccgc

SEQ ID NO: 11723 - DNA, 17 bp, synthetic construct
  misc_feature 1..17: note = Probe
  source 1..17: mol_type = other DNA
tagtggttaggattcgg

SEQ ID NO: 11724 - DNA, 18 bp, synthetic construct
  misc_feature 1..18: note = Probe
  source 1..18: mol_type = other DNA
tagtggttaggattcggc

SEQ ID NO: 11725 - DNA, 22 bp, synthetic construct
  misc_feature 1..22: note = Probe
  source 1..22: mol_type = other DNA
tagtggttaggattcggcgctc

SEQ ID NO: 11726 - DNA, 23 bp, synthetic construct
  misc_feature 1..23: note = Probe
  source 1..23: mol_type = other DNA
tagtggttaggattcggcgctct

SEQ ID NO: 11727 - DNA, 24 bp, synthetic construct
  misc_feature 1..24: note = Probe
  source 1..24: mol_type = other DNA
tagtggttaggattcggcgctctc

SEQ ID NO: 11728 - DNA, 15 bp, synthetic construct
  misc_feature 1..15: note = Probe
  source 1..15: mol_type = other DNA
tagtggttagtactc

SEQ ID NO: 11729 - DNA, 16 bp, synthetic construct
  misc_feature 1..16: note = Probe
  source 1..16: mol_type = other DNA
tagtggttagtactct

SEQ ID NO: 11730 - DNA, 17 bp, synthetic construct
  misc_feature 1..17: note = Probe
  source 1..17: mol_type = other DNA
tagtggttagtactctg

SEQ ID NO: 11731 - DNA, 18 bp, synthetic construct
  misc_feature 1..18: note = Probe
  source 1..18: mol_type = other DNA
tagtggttagtactctgc

SEQ ID NO: 11732 - DNA, 20 bp, synthetic construct
  misc_feature 1..20: note = Probe
  source 1..20: mol_type = other DNA
tagtggttagtactctgcgc

SEQ ID NO: 11733 - DNA, 21 bp, synthetic construct
  misc_feature 1..21: note = Probe
  source 1..21: mol_type = other DNA
tagtggttagtactctgcgct

SEQ ID NO: 11734 - DNA, 22 bp, synthetic construct
  misc_feature 1..22: note = Probe
  source 1..22: mol_type = other DNA
tagtggttagtactctgcgctg

SEQ ID NO: 11735 - DNA, 23 bp, synthetic construct
  misc_feature 1..23: note = Probe
  source 1..23: mol_type = other DNA
tagtggttagtactctgcgctgt

SEQ ID NO: 11736 - DNA, 24 bp, synthetic construct
  misc_feature 1..24: note = Probe
  source 1..24: mol_type = other DNA
tagtggttagtactctgcgttgtg

SEQ ID NO: 11737 - DNA, 25 bp, synthetic construct
  misc_feature 1..25: note = Probe
  source 1..25: mol_type = other DNA
tagtggttagtactctgcgttgtgg

SEQ ID NO: 11738 - DNA, 26 bp, synthetic construct
  misc_feature 1..26: note = Probe
  source 1..26: mol_type = other DNA
tagtggttagtactctgcgttgtggc

SEQ ID NO: 11739 - DNA, 27 bp, synthetic construct
  misc_feature 1..27: note = Probe
  source 1..27: mol_type = other DNA
tagtggttagtactctgcgttgtggcc

SEQ ID NO: 11740 - DNA, 21 bp, synthetic construct
  misc_feature 1..21: note = Probe
  source 1..21: mol_type = other DNA
tagtggttatcacgttcgcct

SEQ ID NO: 11741 - DNA, 27 bp, synthetic construct
  misc_feature 1..27: note = Probe
  source 1..27: mol_type = other DNA
tatagctcagtggtagagcatttgact

SEQ ID NO: 11742 - DNA, 28 bp, synthetic construct
  misc_feature 1..28: note = Probe
  source 1..28: mol_type = other DNA
tatagctcagtggtagagcatttgactg

SEQ ID NO: 11743 - DNA, 29 bp, synthetic construct
  misc_feature 1..29: note = Probe
  source 1..29: mol_type = other DNA
tatagctcagtggtagagcatttgactgc

SEQ ID NO: 11744 - DNA, 19 bp, synthetic construct
  misc_feature 1..19: note = Probe
  source 1..19: mol_type = other DNA
tatagtggttagtactctg

SEQ ID NO: 11745 - DNA, 20 bp, synthetic construct
  misc_feature 1..20: note = Probe
  source 1..20: mol_type = other DNA
tatagtggttagtactctgc

SEQ ID NO: 11746 - DNA, 21 bp, synthetic construct
  misc_feature 1..21: note = Probe
  source 1..21: mol_type = other DNA
tatagtggttagtactctgcg

SEQ ID NO: 11747 - DNA, 25 bp, synthetic construct
  misc_feature 1..25: note = Probe
  source 1..25: mol_type = other DNA
tatagtggttagtactctgcgttgt

SEQ ID NO: 11748 - DNA, 18 bp, synthetic construct
  misc_feature 1..18: note = Probe
  source 1..18: mol_type = other DNA
tatcattggtcgtggttg

SEQ ID NO: 11749 - DNA, 19 bp, synthetic construct
  misc_feature 1..19: note = Probe
  source 1..19: mol_type = other DNA
tatcattggtcgtggttgt

SEQ ID NO: 11750 - DNA, 20 bp, synthetic construct
  misc_feature 1..20: note = Probe
  source 1..20: mol_type = other DNA
tatcattggtcgtggttgta

SEQ ID NO: 11751 - DNA, 21 bp, synthetic construct
  misc_feature 1..21: note = Probe
  source 1..21: mol_type = other DNA
tatcattggtcgtggttgtag

SEQ ID NO: 11752 - DNA, 25 bp, synthetic construct
  misc_feature 1..25: note = Probe
  source 1..25: mol_type = other DNA
tatcattggtcgtggttgtagtccg

SEQ ID NO: 11753 - DNA, 27 bp, synthetic construct
  misc_feature 1..27: note = Probe
  source 1..27: mol_type = other DNA
tatcattggtcgtggttgtagtccgtg

SEQ ID NO: 11754 - DNA, 28 bp, synthetic construct
  misc_feature 1..28: note = Probe
  source 1..28: mol_type = other DNA
tatcattggtcgtggttgtagtccgtgc

SEQ ID NO: 11755 - DNA, 19 bp, synthetic construct
  misc_feature 1..19: note = Probe
  source 1..19: mol_type = other DNA
tatgataatcatatttacc

SEQ ID NO: 11756 - DNA, 22 bp, synthetic construct
  misc_feature 1..22: note = Probe
  source 1..22: mol_type = other DNA
tatgataatcatatttaccaaa

SEQ ID NO: 11757 - DNA, 24 bp, synthetic construct
  misc_feature 1..24: note = Probe
  source 1..24: mol_type = other DNA
tcaaaggttccgggttcgagtccc

SEQ ID NO: 11758 - DNA, 26 bp, synthetic construct
  misc_feature 1..26: note = Probe
  source 1..26: mol_type = other DNA
tcaaaggttccgggttcgagtcccgg

SEQ ID NO: 11759 - DNA, 28 bp, synthetic construct
  misc_feature 1..28: note = Probe
  source 1..28: mol_type = other DNA
tcaaaggttccgggttcgagtcccggcg

SEQ ID NO: 11760 - DNA, 29 bp, synthetic construct
  misc_feature 1..29: note = Probe
  source 1..29: mol_type = other DNA
tcaaaggttccgggttcgagtcccggcgg

SEQ ID NO: 11761 - DNA, 29 bp, synthetic construct
  misc_feature 1..29: note = Probe
  source 1..29: mol_type = other DNA
tcaaaggttgtgggttcgaatcccaccag

SEQ ID NO: 11762 - DNA, 29 bp, synthetic construct
  misc_feature 1..29: note = Probe
  source 1..29: mol_type = other DNA
tcaaaggttgtgggttcgagtcccaccag

SEQ ID NO: 11763 - DNA, 22 bp, synthetic construct
  misc_feature 1..22: note = Probe
  source 1..22: mol_type = other DNA
tcaaatcacgtcggggtcaaca

SEQ ID NO: 11764 - DNA, 22 bp, synthetic construct
  misc_feature 1..22: note = Probe
  source 1..22: mol_type = other DNA
tcaaatcccggacgagcccaca

SEQ ID NO: 11765 - DNA, 21 bp, synthetic construct
  misc_feature 1..21: note = Probe
  source 1..21: mol_type = other DNA
tcaaatcccggacgagccccc

SEQ ID NO: 11766 - DNA, 22 bp, synthetic construct
  misc_feature 1..22: note = Probe
  source 1..22: mol_type = other DNA
tcaaatcccggacgagccccct

SEQ ID NO: 11767 - DNA, 22 bp, synthetic construct
  misc_feature 1..22: note = Probe
  source 1..22: mol_type = other DNA
tcaaatcccggacgagccctca

SEQ ID NO: 11768 - DNA, 22 bp, synthetic construct
  misc_feature 1..22: note = Probe
  source 1..22: mol_type = other DNA
tcaaatccgggtgccccctcaa

SEQ ID NO: 11769 - DNA, 22 bp, synthetic construct
  misc_feature 1..22: note = Probe
  source 1..22: mol_type = other DNA
tcaaatctcggtggaacctgca

SEQ ID NO: 11770 - DNA, 20 bp, synthetic construct
  misc_feature 1..20: note = Probe
  source 1..20: mol_type = other DNA
tcaaatctcggtgggacctc

SEQ ID NO: 11771 - DNA, 20 bp, synthetic construct
  misc_feature 1..20: note = Probe
  source 1..20: mol_type = other DNA
tcaacttaacttgaccgctc

SEQ ID NO: 11772 - DNA, 22 bp, synthetic construct
  misc_feature 1..22: note = Probe
  source 1..22: mol_type = other DNA
tcaacttaacttgaccgctctg

SEQ ID NO: 11773 - DNA, 23 bp, synthetic construct
  misc_feature 1..23: note = Probe
  source 1..23: mol_type = other DNA
tcaacttaacttgaccgctctga

SEQ ID NO: 11774 - DNA, 24 bp, synthetic construct
  misc_feature 1..24: note = Probe
  source 1..24: mol_type = other DNA
tcaacttaacttgaccgctctgag

SEQ ID NO: 11775 - DNA, 25 bp, synthetic construct
  misc_feature 1..25: note = Probe
  source 1..25: mol_type = other DNA
tcaacttaacttgaccgctctgagc

SEQ ID NO: 11776 - DNA, 22 bp, synthetic construct
  misc_feature 1..22: note = Probe
  source 1..22: mol_type = other DNA
tcaagtccctgttcgggcggca

SEQ ID NO: 11777 - DNA, 21 bp, synthetic construct
  misc_feature 1..21: note = Probe
  source 1..21: mol_type = other DNA
tcaatccccggcacctccacc

SEQ ID NO: 11778 - DNA, 19 bp, synthetic construct
  misc_feature 1..19: note = Probe
  source 1..19: mol_type = other DNA
tcaatggtagaattctcgc

SEQ ID NO: 11779 - DNA, 21 bp, synthetic construct
  misc_feature 1..21: note = Probe
  source 1..21: mol_type = other DNA
tcaatggtagaattctcgcct

SEQ ID NO: 11780 - DNA, 30 bp, synthetic construct
  misc_feature 1..30: note = Probe
  source 1..30: mol_type = other DNA
tcaccgccgcggcccgggttcgattcccgg

SEQ ID NO: 11781 - DNA, 30 bp, synthetic construct
  misc_feature 1..30: note = Probe
  source 1..30: mol_type = other DNA
tcagaagattgagggttcgagtcccttcgt

SEQ ID NO: 11782 - DNA, 30 bp, synthetic construct
  misc_feature 1..30: note = Probe
  source 1..30: mol_type = other DNA
tcagaagattgcaggttcgagtcctgccgc

SEQ ID NO: 11783 - DNA, 21 bp, synthetic construct
  misc_feature 1..21: note = Probe
  source 1..21: mol_type = other DNA
tcagaaggctgcgtgttcgaa

SEQ ID NO: 11784 - DNA, 23 bp, synthetic construct
  misc_feature 1..23: note = Probe
  source 1..23: mol_type = other DNA
tcagaaggctgcgtgttcgaatc

SEQ ID NO: 11785 - DNA, 30 bp, synthetic construct
  misc_feature 1..30: note = Probe
  source 1..30: mol_type = other DNA
tcagaaggttgcgtgttcaaatcacgtcgg

SEQ ID NO: 11786 - DNA, 30 bp, synthetic construct
  misc_feature 1..30: note = Probe
  source 1..30: mol_type = other DNA
tcagaaggttgcgtgttcaagtcacgtcgg

SEQ ID NO: 11787 - DNA, 19 bp, synthetic construct
  misc_feature 1..19: note = Probe
  source 1..19: mol_type = other DNA
tcagattgtgaatctgaca

SEQ ID NO: 11788 - DNA, 20 bp, synthetic construct
  misc_feature 1..20: note = Probe
  source 1..20: mol_type = other DNA
tcagggtcgtgggttcgagc

SEQ ID NO: 11789 - DNA, 17 bp, synthetic construct
  misc_feature 1..17: note = Probe
  source 1..17: mol_type = other DNA
tcagtcggtagagcatc

SEQ ID NO: 11790 - DNA, 18 bp, synthetic construct
  misc_feature 1..18: note = Probe
  source 1..18: mol_type = other DNA
tcagtcggtagagcatca

SEQ ID NO: 11791 - DNA, 19 bp, synthetic construct
  misc_feature 1..19: note = Probe
  source 1..19: mol_type = other DNA
tcagtcggtagagcatcag

SEQ ID NO: 11792 - DNA, 22 bp, synthetic construct
  misc_feature 1..22: note = Probe
  source 1..22: mol_type = other DNA
tcagtcggtagagcatcagact

SEQ ID NO: 11793 - DNA, 24 bp, synthetic construct
  misc_feature 1..24: note = Probe
  source 1..24: mol_type = other DNA
tcagtcggtagagcatcagacttt

SEQ ID NO: 11794 - DNA, 25 bp, synthetic construct
  misc_feature 1..25: note = Probe
  source 1..25: mol_type = other DNA
tcagtcggtagagcatcagactttt

SEQ ID NO: 11795 - DNA, 17 bp, synthetic construct
  misc_feature 1..17: note = Probe
  source 1..17: mol_type = other DNA
tcagtcggtagagcatg

SEQ ID NO: 11796 - DNA, 18 bp, synthetic construct
  misc_feature 1..18: note = Probe
  source 1..18: mol_type = other DNA
tcagtcggtagagcatga

SEQ ID NO: 11797 - DNA, 19 bp, synthetic construct
  misc_feature 1..19: note = Probe
  source 1..19: mol_type = other DNA
tcagtcggtagagcatgag

SEQ ID NO: 11798 - DNA, 20 bp, synthetic construct
  misc_feature 1..20: note = Probe
  source 1..20: mol_type = other DNA
tcagtcggtagagcatgaga

SEQ ID NO: 11799 - DNA, 21 bp, synthetic construct
  misc_feature 1..21: note = Probe
  source 1..21: mol_type = other DNA
tcagtcggtagagcatgagac

SEQ ID NO: 11800 - DNA, 22 bp, synthetic construct
  misc_feature 1..22: note = Probe
  source 1..22: mol_type = other DNA
tcagtcggtagagcatgagact

SEQ ID NO: 11801 - DNA, 19 bp, synthetic construct
  misc_feature 1..19: note = Probe
  source 1..19: mol_type = other DNA
tcagtcggtagagcatggg

SEQ ID NO: 11802 - DNA, 20 bp, synthetic construct
  misc_feature 1..20: note = Probe
  source 1..20: mol_type = other DNA
tcagtcggtagagcatggga

SEQ ID NO: 11803 - DNA, 15 bp, synthetic construct
  misc_feature 1..15: note = Probe
  source 1..15: mol_type = other DNA
tcagtggtagaattc

SEQ ID NO: 11804 - DNA, 16 bp, synthetic construct
  misc_feature 1..16: note = Probe
  source 1..16: mol_type = other DNA
tcagtggtagaattct

SEQ ID NO: 11805 - DNA, 17 bp, synthetic construct
  misc_feature 1..17: note = Probe
  source 1..17: mol_type = other DNA
tcagtggtagaattctc

SEQ ID NO: 11806 - DNA, 18 bp, synthetic construct
  misc_feature 1..18: note = Probe
  source 1..18: mol_type = other DNA
tcagtggtagaattctcg

SEQ ID NO: 11807 - DNA, 19 bp, synthetic construct
  misc_feature 1..19: note = Probe
  source 1..19: mol_type = other DNA
tcagtggtagaattctcgc

SEQ ID NO: 11808 - DNA, 20 bp, synthetic construct
  misc_feature 1..20: note = Probe
  source 1..20: mol_type = other DNA
tcagtggtagaattctcgcc

SEQ ID NO: 11809 - DNA, 21 bp, synthetic construct
  misc_feature 1..21: note = Probe
  source 1..21: mol_type = other DNA
tcagtggtagaattctcgcct

SEQ ID NO: 11810 - DNA, 23 bp, synthetic construct
  misc_feature 1..23: note = Probe
  source 1..23: mol_type = other DNA
tcagtggtagaattctcgcctcc

SEQ ID NO: 11811 - DNA, 22 bp, synthetic construct
  misc_feature 1..22: note = Probe
  source 1..22: mol_type = other DNA
tcagtggtagaattctcgcctg

SEQ ID NO: 11812 - DNA, 23 bp, synthetic construct
  misc_feature 1..23: note = Probe
  source 1..23: mol_type = other DNA
tcagtggtagaattctcgcctgc

SEQ ID NO: 11813 - DNA, 24 bp, synthetic construct
  misc_feature 1..24: note = Probe
  source 1..24: mol_type = other DNA
tcagtggtagaattctcgcctgcc

SEQ ID NO: 11814 - DNA, 21 bp, synthetic construct
  misc_feature 1..21: note = Probe
  source 1..21: mol_type = other DNA
tcagtggtagagcatttgact

SEQ ID NO: 11815 - DNA, 22 bp, synthetic construct
  misc_feature 1..22: note = Probe
  source 1..22: mol_type = other DNA
tcagtggtagagcatttgactg

SEQ ID NO: 11816 - DNA, 23 bp, synthetic construct
  misc_feature 1..23: note = Probe
  source 1..23: mol_type = other DNA
tcagtggtagagcatttgactgc

SEQ ID NO: 11817 - DNA, 30 bp, synthetic construct
  misc_feature 1..30: note = Probe
  source 1..30: mol_type = other DNA
tcatatcattggtcgtggttgtagtccgtg

SEQ ID NO: 11818 - DNA, 17 bp, synthetic construct
  misc_feature 1..17: note = Probe
  source 1..17: mol_type = other DNA
tcattggtcgtggttgt

SEQ ID NO: 11819 - DNA, 18 bp, synthetic construct
  misc_feature 1..18: note = Probe
  source 1..18: mol_type = other DNA
tcattggtcgtggttgta

SEQ ID NO: 11820 - DNA, 19 bp, synthetic construct
  misc_feature 1..19: note = Probe
  source 1..19: mol_type = other DNA
tcattggtcgtggttgtag

SEQ ID NO: 11821 - DNA, 20 bp, synthetic construct
  misc_feature 1..20: note = Probe
  source 1..20: mol_type = other DNA
tcattggtcgtggttgtagt

SEQ ID NO: 11822 - DNA, 22 bp, synthetic construct
  misc_feature 1..22: note = Probe
  source 1..22: mol_type = other DNA
tcattggtcgtggttgtagtcc

SEQ ID NO: 11823 - DNA, 23 bp, synthetic construct
  misc_feature 1..23: note = Probe
  source 1..23: mol_type = other DNA
tcattggtcgtggttgtagtccg

SEQ ID NO: 11824 - DNA, 25 bp, synthetic construct
  misc_feature 1..25: note = Probe
  source 1..25: mol_type = other DNA
tcattggtcgtggttgtagtccgtg

SEQ ID NO: 11825 - DNA, 26 bp, synthetic construct
  misc_feature 1..26: note = Probe
  source 1..26: mol_type = other DNA
tcattggtcgtggttgtagtccgtgc

SEQ ID NO: 11826 - DNA, 27 bp, synthetic construct
  misc_feature 1..27: note = Probe
  source 1..27: mol_type = other DNA
tcattggtcgtggttgtagtccgtgcg

SEQ ID NO: 11827 - DNA, 29 bp, synthetic construct
  misc_feature 1..29: note = Probe
  source 1..29: mol_type = other DNA
tccagcgatccgagttcaaatctcggtgg

SEQ ID NO: 11828 - DNA, 29 bp, synthetic construct
  misc_feature 1..29: note = Probe
  source 1..29: mol_type = other DNA
tccagggttcaagtccctgttcgggcggc

SEQ ID NO: 11829 - DNA, 29 bp, synthetic construct
  misc_feature 1..29: note = Probe
  source 1..29: mol_type = other DNA
tccagggttcaagtccctgttcgggcgtc

SEQ ID NO: 11830 - DNA, 26 bp, synthetic construct
  misc_feature 1..26: note = Probe
  source 1..26: mol_type = other DNA
tccatggtgtaatggttagcactctg

SEQ ID NO: 11831 - DNA, 30 bp, synthetic construct
  misc_feature 1..30: note = Probe
  source 1..30: mol_type = other DNA
tccatggtgtaatggttagcactctggact

SEQ ID NO: 11832 - DNA, 21 bp, synthetic construct
  misc_feature 1..21: note = Probe
  source 1..21: mol_type = other DNA
tccattggggtttccccgcgc

SEQ ID NO: 11833 - DNA, 25 bp, synthetic construct
  misc_feature 1..25: note = Probe
  source 1..25: mol_type = other DNA
tccattggggtttccccgcgcaggt

SEQ ID NO: 11834 - DNA, 15 bp, synthetic construct
  misc_feature 1..15: note = Probe
  source 1..15: mol_type = other DNA
tcccacatggtctag

SEQ ID NO: 11835 - DNA, 16 bp, synthetic construct
  misc_feature 1..16: note = Probe
  source 1..16: mol_type = other DNA
tcccacatggtctagc

SEQ ID NO: 11836 - DNA, 17 bp, synthetic construct
  misc_feature 1..17: note = Probe
  source 1..17: mol_type = other DNA
tcccacatggtctagcg

SEQ ID NO: 11837 - DNA, 21 bp, synthetic construct
  misc_feature 1..21: note = Probe
  source 1..21: mol_type = other DNA
tcccacatggtctagcggtta

SEQ ID NO: 11838 - DNA, 16 bp, synthetic construct
  misc_feature 1..16: note = Probe
  source 1..16: mol_type = other DNA
tcccatatggtctagc

SEQ ID NO: 11839 - DNA, 17 bp, synthetic construct
  misc_feature 1..17: note = Probe
  source 1..17: mol_type = other DNA
tcccatatggtctagcg

SEQ ID NO: 11840 - DNA, 18 bp, synthetic construct
  misc_feature 1..18: note = Probe
  source 1..18: mol_type = other DNA
tcccatatggtctagcgg

SEQ ID NO: 11841 - DNA, 19 bp, synthetic construct
  misc_feature 1..19: note = Probe
  source 1..19: mol_type = other DNA
tcccatatggtctagcggt

SEQ ID NO: 11842 - DNA, 20 bp, synthetic construct
  misc_feature 1..20: note = Probe
  source 1..20: mol_type = other DNA
tcccatatggtctagcggtt

SEQ ID NO: 11843 - DNA, 21 bp, synthetic construct
  misc_feature 1..21: note = Probe
  source 1..21: mol_type = other DNA
tcccatatggtctagcggtta

SEQ ID NO: 11844 - DNA, 24 bp, synthetic construct
  misc_feature 1..24: note = Probe
  source 1..24: mol_type = other DNA
tcccatatggtctagcggttagga

SEQ ID NO: 11845 - DNA, 25 bp, synthetic construct
  misc_feature 1..25: note = Probe
  source 1..25: mol_type = other DNA
tcccatatggtctagcggttaggat

SEQ ID NO: 11846 - DNA, 27 bp, synthetic construct
  misc_feature 1..27: note = Probe
  source 1..27: mol_type = other DNA
tcccatatggtctagcggttaggattc

SEQ ID NO: 11847 - DNA, 28 bp, synthetic construct
  misc_feature 1..28: note = Probe
  source 1..28: mol_type = other DNA
tcccatatggtctagcggttaggattcc

SEQ ID NO: 11848 - DNA, 29 bp, synthetic construct
  misc_feature 1..29: note = Probe
  source 1..29: mol_type = other DNA
tcccatatggtctagcggttaggattcct

SEQ ID NO: 11849 - DNA, 26 bp, synthetic construct
  misc_feature 1..26: note = Probe
  source 1..26: mol_type = other DNA
tccccgcctgtcacgcgggagaccgg

SEQ ID NO: 11850 - DNA, 15 bp, synthetic construct
  misc_feature 1..15: note = Probe
  source 1..15: mol_type = other DNA
tccccggcacctcca

SEQ ID NO: 11851 - DNA, 16 bp, synthetic construct
  misc_feature 1..16: note = Probe
  source 1..16: mol_type = other DNA
tccccggcacctccac

SEQ ID NO: 11852 - DNA, 19 bp, synthetic construct
  misc_feature 1..19: note = Probe
  source 1..19: mol_type = other DNA
tccccggcacctccaccag

SEQ ID NO: 11853 - DNA, 20 bp, synthetic construct
  misc_feature 1..20: note = Probe
  source 1..20: mol_type = other DNA
tccccggcacctccaccagt

SEQ ID NO: 11854 - DNA, 21 bp, synthetic construct
  misc_feature 1..21: note = Probe
  source 1..21: mol_type = other DNA
tccccggcacctccaccagtt

SEQ ID NO: 11855 - DNA, 29 bp, synthetic construct
  misc_feature 1..29: note = Probe
  source 1..29: mol_type = other DNA
tccccggttcgaaaccgggcggaaacacc

SEQ ID NO: 11856 - DNA, 15 bp, synthetic construct
  misc_feature 1..15: note = Probe
  source 1..15: mol_type = other DNA
tcccgccttttttcc

SEQ ID NO: 11857 - DNA, 16 bp, synthetic construct
  misc_feature 1..16: note = Probe
  source 1..16: mol_type = other DNA
tcccgccttttttccc

SEQ ID NO: 11858 - DNA, 17 bp, synthetic construct
  misc_feature 1..17: note = Probe
  source 1..17: mol_type = other DNA
tcccgccttttttcccg

SEQ ID NO: 11859 - DNA, 19 bp, synthetic construct
  misc_feature 1..19: note = Probe
  source 1..19: mol_type = other DNA
tcccgccttttttcccggc

SEQ ID NO: 11860 - DNA, 20 bp, synthetic construct
  misc_feature 1..20: note = Probe
  source 1..20: mol_type = other DNA
tcccgccttttttcccggcg

SEQ ID NO: 11861 - DNA, 22 bp, synthetic construct
  misc_feature 1..22: note = Probe
  source 1..22: mol_type = other DNA
tcccgccttttttcccggcggc

SEQ ID NO: 11862 - DNA, 23 bp, synthetic construct
  misc_feature 1..23: note = Probe
  source 1..23: mol_type = other DNA
tcccgccttttttcccggcggcg

SEQ ID NO: 11863 - DNA, 24 bp, synthetic construct
  misc_feature 1..24: note = Probe
  source 1..24: mol_type = other DNA
tcccgccttttttcccggcggcgg

SEQ ID NO: 11864 - DNA, 25 bp, synthetic construct
  misc_feature 1..25: note = Probe
  source 1..25: mol_type = other DNA
tcccgccttttttcccggcggcggg

SEQ ID NO: 11865 - DNA, 28 bp, synthetic construct
  misc_feature 1..28: note = Probe
  source 1..28: mol_type = other DNA
tcccgccttttttcccggcggcgggaga

SEQ ID NO: 11866 - DNA, 29 bp, synthetic construct
  misc_feature 1..29: note = Probe
  source 1..29: mol_type = other DNA
tcccgggttcaaatcccggacgagccccc

SEQ ID NO: 11867 - DNA, 29 bp, synthetic construct
  misc_feature 1..29: note = Probe
  source 1..29: mol_type = other DNA
tcccgggttcaatccccggcacctccacc

SEQ ID NO: 11868 - DNA, 17 bp, synthetic construct
  misc_feature 1..17: note = Probe
  source 1..17: mol_type = other DNA
tcccggtcagggaacca

SEQ ID NO: 11869 - DNA, 15 bp, synthetic construct
  misc_feature 1..15: note = Probe
  source 1..15: mol_type = other DNA
tccctggtctagtgg

SEQ ID NO: 11870 - DNA, 16 bp, synthetic construct
  misc_feature 1..16: note = Probe
  source 1..16: mol_type = other DNA
tccctggtctagtggt

SEQ ID NO: 11871 - DNA, 17 bp, synthetic construct
  misc_feature 1..17: note = Probe
  source 1..17: mol_type = other DNA
tccctggtctagtggtt

SEQ ID NO: 11872 - DNA, 18 bp, synthetic construct
  misc_feature 1..18: note = Probe
  source 1..18: mol_type = other DNA
tccctggtctagtggtta

SEQ ID NO: 11873 - DNA, 19 bp, synthetic construct
  misc_feature 1..19: note = Probe
  source 1..19: mol_type = other DNA
tccctggtctagtggttag

SEQ ID NO: 11874 - DNA, 21 bp, synthetic construct
  misc_feature 1..21: note = Probe
  source 1..21: mol_type = other DNA
tccctggtctagtggttagga

SEQ ID NO: 11875 - DNA, 22 bp, synthetic construct
  misc_feature 1..22: note = Probe
  source 1..22: mol_type = other DNA
tccctggtctagtggttaggat

SEQ ID NO: 11876 - DNA, 24 bp, synthetic construct
  misc_feature 1..24: note = Probe
  source 1..24: mol_type = other DNA
tccctggtctagtggttaggattt

SEQ ID NO: 11877 - DNA, 15 bp, synthetic construct
  misc_feature 1..15: note = Probe
  source 1..15: mol_type = other DNA
tccctggtggtctag

SEQ ID NO: 11878 - DNA, 16 bp, synthetic construct
  misc_feature 1..16: note = Probe
  source 1..16: mol_type = other DNA
tccctggtggtctagt

SEQ ID NO: 11879 - DNA, 17 bp, synthetic construct
  misc_feature 1..17: note = Probe
  source 1..17: mol_type = other DNA
tccctggtggtctagtg

SEQ ID NO: 11880 - DNA, 18 bp, synthetic construct
  misc_feature 1..18: note = Probe
  source 1..18: mol_type = other DNA
tccctggtggtctagtgg

SEQ ID NO: 11881 - DNA, 19 bp, synthetic construct
  misc_feature 1..19: note = Probe
  source 1..19: mol_type = other DNA
tccctggtggtctagtggc

SEQ ID NO: 11882 - DNA, 20 bp, synthetic construct
  misc_feature 1..20: note = Probe
  source 1..20: mol_type = other DNA
tccctggtggtctagtggct

SEQ ID NO: 11883 - DNA, 21 bp, synthetic construct
  misc_feature 1..21: note = Probe
  source 1..21: mol_type = other DNA
tccctggtggtctagtggcta

SEQ ID NO: 11884 - DNA, 23 bp, synthetic construct
  misc_feature 1..23: note = Probe
  source 1..23: mol_type = other DNA
tccctggtggtctagtggctagg

SEQ ID NO: 11885 - DNA, 28 bp, synthetic construct
  misc_feature 1..28: note = Probe
  source 1..28: mol_type = other DNA
tccctggtggtctagtggctaggattcg

SEQ ID NO: 11886 - DNA, 29 bp, synthetic construct
  misc_feature 1..29: note = Probe
  source 1..29: mol_type = other DNA
tccctggtggtctagtggctaggattcgg

SEQ ID NO: 11887 - DNA, 30 bp, synthetic construct; identical to SEQ ID NO: 7856
  misc_feature 1..30: note = Probe
  source 1..30: mol_type = other DNA

SEQ ID NO: 11888 - DNA, 19 bp, synthetic construct
  misc_feature 1..19: note = Probe
  source 1..19: mol_type = other DNA
tccctggtggtctagtggt

SEQ ID NO: 11889 - DNA, 20 bp, synthetic construct
  misc_feature 1..20: note = Probe
  source 1..20: mol_type = other DNA
tccctggtggtctagtggtt

SEQ ID NO: 11890 - DNA, 21 bp, synthetic construct
  misc_feature 1..21: note = Probe
  source 1..21: mol_type = other DNA
tccctggtggtctagtggtta

SEQ ID NO: 11891 - DNA, 22 bp, synthetic construct
  misc_feature 1..22: note = Probe
  source 1..22: mol_type = other DNA
tccctggtggtctagtggttag

SEQ ID NO: 11892 - DNA, 23 bp, synthetic construct
  misc_feature 1..23: note = Probe
  source 1..23: mol_type = other DNA
tccctggtggtctagtggttagg

SEQ ID NO: 11893 - DNA, 24 bp, synthetic construct
  misc_feature 1..24: note = Probe
  source 1..24: mol_type = other DNA
tccctggtggtctagtggttagga

SEQ ID NO: 11894 - DNA, 25 bp, synthetic construct
  misc_feature 1..25: note = Probe
  source 1..25: mol_type = other DNA
tccctggtggtctagtggttaggat

SEQ ID NO: 11895 - DNA, 26 bp, synthetic construct
  misc_feature 1..26: note = Probe
  source 1..26: mol_type = other DNA
tccctggtggtctagtggttaggatt

SEQ ID NO: 11896 - DNA, 27 bp, synthetic construct
  misc_feature 1..27: note = Probe
  source 1..27: mol_type = other DNA
tccctggtggtctagtggttaggattc

SEQ ID NO: 11897 - DNA, 28 bp, synthetic construct
  misc_feature 1..28: note = Probe
  source 1..28: mol_type = other DNA
tccctggtggtctagtggttaggattcg

SEQ ID NO: 11898 - DNA, 29 bp, synthetic construct
  misc_feature 1..29: note = Probe
  source 1..29: mol_type = other DNA
tccctggtggtctagtggttaggattcgg

SEQ ID NO: 11899 - DNA, 30 bp, synthetic construct; identical to SEQ ID NO: 7870
  misc_feature 1..30: note = Probe
  source 1..30: mol_type = other DNA

SEQ ID NO: 11900 - DNA, 29 bp, synthetic construct
  misc_feature 1..29: note = Probe
  source 1..29: mol_type = other DNA
tccctggttcgatcccgggtttcggcact

SEQ ID NO: 11901 - DNA, 29 bp, synthetic construct
  misc_feature 1..29: note = Probe
  source 1..29: mol_type = other DNA
tccctggttcgatcccgggtttcggcagc

SEQ ID NO: 11902 - DNA, 19 bp, synthetic construct
  misc_feature 1..19: note = Probe
  source 1..19: mol_type = other DNA
tccggatggaggcgtgggt

SEQ ID NO: 11903 - DNA, 15 bp, synthetic construct
  misc_feature 1..15: note = Probe
  source 1..15: mol_type = other DNA
tccggctcgaaggac

SEQ ID NO: 11904 - DNA, 16 bp, synthetic construct
  misc_feature 1..16: note = Probe
  source 1..16: mol_type = other DNA
tccggctcgaaggacg

SEQ ID NO: 11905 - DNA, 17 bp, synthetic construct
  misc_feature 1..17: note = Probe
  source 1..17: mol_type = other DNA
tccggctcgaaggacga

SEQ ID NO: 11906 - DNA, 18 bp, synthetic construct
  misc_feature 1..18: note = Probe
  source 1..18: mol_type = other DNA
tccggctcgaaggacgaa

SEQ ID NO: 11907 - DNA, 19 bp, synthetic construct
  misc_feature 1..19: note = Probe
  source 1..19: mol_type = other DNA
tccggctcgaaggacgaaa

SEQ ID NO: 11908 - DNA, 20 bp, synthetic construct
  misc_feature 1..20: note = Probe
  source 1..20: mol_type = other DNA
tccggctcgaaggacgaaag

SEQ ID NO: 11909 - DNA, 16 bp, synthetic construct
  misc_feature 1..16: note = Probe
  source 1..16: mol_type = other DNA
tccggctcgaaggact

SEQ ID NO: 11910 - DNA, 16 bp, synthetic construct
  misc_feature 1..16: note = Probe
  source 1..16: mol_type = other DNA
tccgggtgccccctca

SEQ ID NO: 11911 - DNA, 17 bp, synthetic construct
  misc_feature 1..17: note = Probe
  source 1..17: mol_type = other DNA
tccgggtgccccctcaa

SEQ ID NO: 11912 - DNA, 16 bp, synthetic construct
  misc_feature 1..16: note = Probe
  source 1..16: mol_type = other DNA
tccgggtgccccctcg

SEQ ID NO: 11913 - DNA, 16 bp, synthetic construct
  misc_feature 1..16: note = Probe
  source 1..16: mol_type = other DNA
tccgggtgccccctct

SEQ ID NO: 11914 - DNA, 17 bp, synthetic construct
  misc_feature 1..17: note = Probe
  source 1..17: mol_type = other DNA
tccgtagtgtagtggtc

SEQ ID NO: 11915 - DNA, 28 bp, synthetic construct
  misc_feature 1..28: note = Probe
  source 1..28: mol_type = other DNA
tccgtggtggtctagtggctaggattcg

SEQ ID NO: 11916 - DNA, 29 bp, synthetic construct
  misc_feature 1..29: note = Probe
  source 1..29: mol_type = other DNA
tccgtggtggtctagtggctaggattcgg

SEQ ID NO: 11917 - DNA, 30 bp, synthetic construct
  misc_feature 1..30: note = Probe
  source 1..30: mol_type = other DNA
tccgtggtggtctagtggctaggattcggc

SEQ ID NO: 11918 - DNA, 20 bp, synthetic construct
  misc_feature 1..20: note = Probe
  source 1..20: mol_type = other DNA
tcctaagccagggattgtgg

SEQ ID NO: 11919 - DNA, 21 bp, synthetic construct
  misc_feature 1..21: note = Probe
  source 1..21: mol_type = other DNA
tcctaagccagggattgtggg

SEQ ID NO: 11920 - DNA, 22 bp, synthetic construct
  misc_feature 1..22: note = Probe
  source 1..22: mol_type = other DNA
tcctaagccagggattgtgggt

SEQ ID NO: 11921 - DNA, 15 bp, synthetic construct
  misc_feature 1..15: note = Probe
  source 1..15: mol_type = other DNA
tcctcgttagtatag

SEQ ID NO: 11922 - DNA, 16 bp, synthetic construct
  misc_feature 1..16: note = Probe
  source 1..16: mol_type = other DNA
tcctcgttagtatagt

SEQ ID NO: 11923 - DNA, 17 bp, synthetic construct
  misc_feature 1..17: note = Probe
  source 1..17: mol_type = other DNA
tcctcgttagtatagtg

SEQ ID NO: 11924 - DNA, 18 bp, synthetic construct
  misc_feature 1..18: note = Probe
  source 1..18: mol_type = other DNA
tcctcgttagtatagtgg

SEQ ID NO: 11925 - DNA, 19 bp, synthetic construct
  misc_feature 1..19: note = Probe
  source 1..19: mol_type = other DNA
tcctcgttagtatagtggt

SEQ ID NO: 11926 - DNA, 20 bp, synthetic construct
  misc_feature 1..20: note = Probe
  source 1..20: mol_type = other DNA
tcctcgttagtatagtggtg

SEQ ID NO: 11927 - DNA, 22 bp, synthetic construct
  misc_feature 1..22: note = Probe
  source 1..22: mol_type = other DNA
tcctcgttagtatagtggtgag

SEQ ID NO: 11928 - DNA, 26 bp, synthetic construct
  misc_feature 1..26: note = Probe
  source 1..26: mol_type = other DNA
tcctcgttagtatagtggtgagtatc

SEQ ID NO: 11929 - DNA, 27 bp, synthetic construct
  misc_feature 1..27: note = Probe
  source 1..27: mol_type = other DNA
tcctcgttagtatagtggtgagtatcc

SEQ ID NO: 11930 - DNA, 28 bp, synthetic construct
  misc_feature 1..28: note = Probe
  source 1..28: mol_type = other DNA
tcctcgttagtatagtggtgagtatccc

SEQ ID NO: 11931 - DNA, 29 bp, synthetic construct
  misc_feature 1..29: note = Probe
  source 1..29: mol_type = other DNA
tcctcgttagtatagtggtgagtatcccc

SEQ ID NO: 11932 - DNA, 30 bp, synthetic construct; identical to SEQ ID NO: 1701
  misc_feature 1..30: note = Probe
  source 1..30: mol_type = other DNA

SEQ ID NO: 11933 - DNA, 30 bp, synthetic construct
  misc_feature 1..30: note = Probe
  source 1..30: mol_type = other DNA
tcctcgttagtatagtggttagtatccccg

SEQ ID NO: 11934 - DNA, 29 bp, synthetic construct
  misc_feature 1..29: note = Probe
  source 1..29: mol_type = other DNA
tcctgagttcgaacctcagagggggcagc

SEQ ID NO: 11935 - DNA, 29 bp, synthetic construct
  misc_feature 1..29: note = Probe
  source 1..29: mol_type = other DNA
tcctgggttcgagccccagtggaaccacg

SEQ ID NO: 11936 - DNA, 21 bp, synthetic construct
  misc_feature 1..21: note = Probe
  source 1..21: mol_type = other DNA
tcgaaaccatcctctgctatc

SEQ ID NO: 11937 - DNA, 15 bp, synthetic construct
  misc_feature 1..15: note = Probe
  source 1..15: mol_type = other DNA
tcgaaaccgggcgga

SEQ ID NO: 11938 - DNA, 16 bp, synthetic construct
  misc_feature 1..16: note = Probe
  source 1..16: mol_type = other DNA
tcgaaaccgggcggaa

SEQ ID NO: 11939 - DNA, 17 bp, synthetic construct
  misc_feature 1..17: note = Probe
  source 1..17: mol_type = other DNA
tcgaaaccgggcggaaa

SEQ ID NO: 11940 - DNA, 19 bp, synthetic construct
  misc_feature 1..19: note = Probe
  source 1..19: mol_type = other DNA
tcgaaaccgggcggaaaca

SEQ ID NO: 11941 - DNA, 20 bp, synthetic construct
  misc_feature 1..20: note = Probe
  source 1..20: mol_type = other DNA
tcgaaaccgggcggaaacac

SEQ ID NO: 11942 - DNA, 21 bp, synthetic construct
  misc_feature 1..21: note = Probe
  source 1..21: mol_type = other DNA
tcgaaaccgggcggaaacacc

SEQ ID NO: 11943 - DNA, 22 bp, synthetic construct
  misc_feature 1..22: note = Probe
  source 1..22: mol_type = other DNA
tcgaaaccgggcggaaacacct

SEQ ID NO: 11944 - DNA, 20 bp, synthetic construct
  misc_feature 1..20: note = Probe
  source 1..20: mol_type = other DNA
tcgaatcccaccgctgccac

SEQ ID NO: 11945 - DNA, 19 bp, synthetic construct
  misc_feature 1..19: note = Probe
  source 1..19: mol_type = other DNA
tcgaatcccactcctgaca

SEQ ID NO: 11946 - DNA, 20 bp, synthetic construct
  misc_feature 1..20: note = Probe
  source 1..20: mol_type = other DNA
tcgaatcccacttctgacac

SEQ ID NO: 11947 - DNA, 21 bp, synthetic construct
  misc_feature 1..21: note = Probe
  source 1..21: mol_type = other DNA
tcgaatcccacttctgacaca

SEQ ID NO: 11948 - DNA, 22 bp, synthetic construct
  misc_feature 1..22: note = Probe
  source 1..22: mol_type = other DNA
tcgaatcccacttctgacacaa

SEQ ID NO: 11949 - DNA, 22 bp, synthetic construct
  misc_feature 1..22: note = Probe
  source 1..22: mol_type = other DNA
tcgaatcccagcggtgcctcaa

SEQ ID NO: 11950 - DNA, 21 bp, synthetic construct
  misc_feature 1..21: note = Probe
  source 1..21: mol_type = other DNA
tcgaatcccagcggtgcctcc

SEQ ID NO: 11951 - DNA, 22 bp, synthetic construct
  misc_feature 1..22: note = Probe
  source 1..22: mol_type = other DNA
tcgaatcccagcggtgcctccg

SEQ ID NO: 11952 - DNA, 19 bp, synthetic construct
  misc_feature 1..19: note = Probe
  source 1..19: mol_type = other DNA
tcgaatcccatcctcgtcg

SEQ ID NO: 11953 - DNA, 20 bp, synthetic construct
  misc_feature 1..20: note = Probe
  source 1..20: mol_type = other DNA
tcgaatcccatcctcgtcgc

SEQ ID NO: 11954 - DNA, 21 bp, synthetic construct
  misc_feature 1..21: note = Probe
  source 1..21: mol_type = other DNA
tcgaatcccatcctcgtcgct

SEQ ID NO: 11955 - DNA, 21 bp, synthetic construct
  misc_feature 1..21: note = Probe
  source 1..21: mol_type = other DNA
tcgaatcccatcctcgtcggc

SEQ ID NO: 11956 - DNA, 20 bp, synthetic construct
  misc_feature 1..20: note = Probe
  source 1..20: mol_type = other DNA
tcgaatccggctcgaaggac

SEQ ID NO: 11957 - DNA, 21 bp, synthetic construct
  misc_feature 1..21: note = Probe
  source 1..21: mol_type = other DNA
tcgaatccggctcgaaggacg

SEQ ID NO: 11958 - DNA, 22 bp, synthetic construct
  misc_feature 1..22: note = Probe
  source 1..22: mol_type = other DNA
tcgaatccggctcgaaggacga

SEQ ID NO: 11959 - DNA, 22 bp, synthetic construct
  misc_feature 1..22: note = Probe
  source 1..22: mol_type = other DNA
tcgaatcctgccgactacggca

SEQ ID NO: 11960 - DNA, 22 bp, synthetic construct
  misc_feature 1..22: note = Probe
  source 1..22: mol_type = other DNA
tcgaatcctgccgactacgtca

SEQ ID NO: 11961 - DNA, 22 bp, synthetic construct
  misc_feature 1..22: note = Probe
  source 1..22: mol_type = other DNA
tcgaatcctgctcacagcgtca

SEQ ID NO: 11962 - DNA, 20 bp, synthetic construct
  misc_feature 1..20: note = Probe
  source 1..20: mol_type = other DNA
tcgactcctggctggctcgc

SEQ ID NO: 11963 - DNA, 21 bp, synthetic construct
  misc_feature 1..21: note = Probe
  source 1..21: mol_type = other DNA
tcgagaggggctgtgctcgca

SEQ ID NO: 11964 - DNA, 24 bp, synthetic construct
  misc_feature 1..24: note = Probe
  source 1..24: mol_type = other DNA
tcgagaggggctgtgctcgcaagg

SEQ ID NO: 11965 - DNA, 30 bp, synthetic construct
  misc_feature 1..30: note = Probe
  source 1..30: mol_type = other DNA
tcgagaggggctgtgctcgcaaggtttctt

SEQ ID NO: 11966 - DNA, 20 bp, synthetic construct
  misc_feature 1..20: note = Probe
  source 1..20: mol_type = other DNA
tcgagtcccatctgggtcgc

SEQ ID NO: 11967 - DNA, 29 bp, synthetic construct
  misc_feature 1..29: note = Probe
  source 1..29: mol_type = other DNA
tcgatggatcgaaaccatcctctgctatc

SEQ ID NO: 11968 - DNA, 20 bp, synthetic construct
  misc_feature 1..20: note = Probe
  source 1..20: mol_type = other DNA
tcgattccccgacggggaga

SEQ ID NO: 11969 - DNA, 20 bp, synthetic construct
  misc_feature 1..20: note = Probe
  source 1..20: mol_type = other DNA
tcgattccccgacggggagg

SEQ ID NO: 11970 - DNA, 22 bp, synthetic construct
  misc_feature 1..22: note = Probe
  source 1..22: mol_type = other DNA
tcgattccccgacggggaggca

SEQ ID NO: 11971 - DNA, 22 bp, synthetic construct
  misc_feature 1..22: note = Probe
  source 1..22: mol_type = other DNA
tcgattcccggccaatgcacga

SEQ ID NO: 11972 - DNA, 22 bp, synthetic construct
  misc_feature 1..22: note = Probe
  source 1..22: mol_type = other DNA
tcgattcccggccaatgcagca

SEQ ID NO: 11973 - DNA, 22 bp, synthetic construct
  misc_feature 1..22: note = Probe
  source 1..22: mol_type = other DNA
tcgattcccggcccatgcagca

SEQ ID NO: 11974 - DNA, 19 bp, synthetic construct
  misc_feature 1..19: note = Probe
  source 1..19: mol_type = other DNA
tcgattccggctcgaagga

SEQ ID NO: 11975 - DNA, 20 bp, synthetic construct
  misc_feature 1..20: note = Probe
  source 1..20: mol_type = other DNA
tcgattccggctcgaaggac

SEQ ID NO: 11976 - DNA, 21 bp, synthetic construct
  misc_feature 1..21: note = Probe
  source 1..21: mol_type = other DNA
tcgattccggctcgaaggact

SEQ ID NO: 11977 - DNA, 21 bp, synthetic construct
  misc_feature 1..21: note = Probe
  source 1..21: mol_type = other DNA
tcgattccggctcgaaggagc

SEQ ID NO: 11978 - DNA, 19 bp, synthetic construct
  misc_feature 1..19: note = Probe
  source 1..19: mol_type = other DNA
tcgattccttccttttttg

SEQ ID NO: 11979 - DNA, 20 bp, synthetic construct
  misc_feature 1..20: note = Probe
  source 1..20: mol_type = other DNA
tcgattccttccttttttgt

SEQ ID NO: 11980 - DNA, 21 bp, synthetic construct
  misc_feature 1..21: note = Probe
  source 1..21: mol_type = other DNA
tcgattccttccttttttgtc

SEQ ID NO: 11981 - DNA, 22 bp, synthetic construct
  misc_feature 1..22: note = Probe
  source 1..22: mol_type = other DNA
tcgcctgccacgcgggaggccc

SEQ ID NO: 11982 - DNA, 29 bp, synthetic construct
  misc_feature 1..29: note = Probe
  source 1..29: mol_type = other DNA
tcgcgggttcgatccccgtacgggccaac

SEQ ID NO: 11983 - DNA, 29 bp, synthetic construct
  misc_feature 1..29: note = Probe
  source 1..29: mol_type = other DNA
tcgcgggttcgatccccgtacgggccaca

SEQ ID NO: 11984 - DNA, 29 bp, synthetic construct
  misc_feature 1..29: note = Probe
  source 1..29: mol_type = other DNA
tcgcgggttcgatccccgtacgggccacg

SEQ ID NO: 11985 - DNA, 29 bp, synthetic construct
  misc_feature 1..29: note = Probe
  source 1..29: mol_type = other DNA
tcgcgggttcgatccccgtacgggccact

SEQ ID NO: 11986 - DNA, 29 bp, synthetic construct
  misc_feature 1..29: note = Probe
  source 1..29: mol_type = other DNA
tcgctggttcgaatccggctcgaaggacg

SEQ ID NO: 11987 - DNA, 27 bp, synthetic construct
  misc_feature 1..27: note = Probe
  source 1..27: mol_type = other DNA
tcgctggttcgattccggctcgaagga

SEQ ID NO: 11988 - DNA, 28 bp, synthetic construct
  misc_feature 1..28: note = Probe
  source 1..28: mol_type = other DNA
tcgctggttcgattccggctcgaaggac

SEQ ID NO: 11989 - DNA, 29 bp, synthetic construct
  misc_feature 1..29: note = Probe
  source 1..29: mol_type = other DNA
tcgctggttcgattccggctcgaaggact

SEQ ID NO: 11990 - DNA, 29 bp, synthetic construct
  misc_feature 1..29: note = Probe
  source 1..29: mol_type = other DNA
tcgctggttcgattccggctcgaaggagc

SEQ ID NO: 11991 - DNA, 21 bp, synthetic construct
  misc_feature 1..21: note = Probe
  source 1..21: mol_type = other DNA
tcgggcgggagtggtggcttt

SEQ ID NO: 11992 - DNA, 22 bp, synthetic construct
  misc_feature 1..22: note = Probe
  source 1..22: mol_type = other DNA
tcgggcgggagtggtggctttt

SEQ ID NO: 11993 - DNA, 22 bp, synthetic construct
  misc_feature 1..22: note = Probe
  source 1..22: mol_type = other DNA
tcgggtgcgagaggtcccgggt

SEQ ID NO: 11994 - DNA, 17 bp, synthetic construct
  misc_feature 1..17: note = Probe
  source 1..17: mol_type = other DNA
tcggtagagcatcagac

SEQ ID NO: 11995 - DNA, 17 bp, synthetic construct
  misc_feature 1..17: note = Probe
  source 1..17: mol_type = other DNA
tcggtagagcatgagac

SEQ ID NO: 11996 - DNA, 18 bp, synthetic construct
  misc_feature 1..18: note = Probe
  source 1..18: mol_type = other DNA
tcggtagagcatgagact

SEQ ID NO: 11997 - DNA, 17 bp, synthetic construct
  misc_feature 1..17: note = Probe
  source 1..17: mol_type = other DNA
tcggtagagcatgggac

SEQ ID NO: 11998 - DNA, 22 bp, synthetic construct
  misc_feature 1..22: note = Probe
  source 1..22: mol_type = other DNA
tcgtaaaccgaagatcgcgggt

SEQ ID NO: 11999 - DNA, 19 bp, synthetic construct
  misc_feature 1..19: note = Probe
  source 1..19: mol_type = other DNA
tcgtatagtggttagtact

SEQ ID NO: 12000 - DNA, 20 bp, synthetic construct
  misc_feature 1..20: note = Probe
  source 1..20: mol_type = other DNA
tcgtatagtggttagtactc

SEQ ID NO: 12001 - DNA, 21 bp, synthetic construct
  misc_feature 1..21: note = Probe
  source 1..21: mol_type = other DNA
tcgtatagtggttagtactct

SEQ ID NO: 12002 - DNA, 22 bp, synthetic construct
  misc_feature 1..22: note = Probe
  source 1..22: mol_type = other DNA
tcgtatagtggttagtactctg

SEQ ID NO: 12003 - DNA, 23 bp, synthetic construct
  misc_feature 1..23: note = Probe
  source 1..23: mol_type = other DNA
tcgtatagtggttagtactctgc

SEQ ID NO: 12004 - DNA, 25 bp, synthetic construct
  misc_feature 1..25: note = Probe
  source 1..25: mol_type = other DNA
tcgtatagtggttagtactctgcgt

SEQ ID NO: 12005 - DNA, 28 bp, synthetic construct
  misc_feature 1..28: note = Probe
  source 1..28: mol_type = other DNA
tcgtatagtggttagtactctgcgttgt

SEQ ID NO: 12006 - DNA, 16 bp, synthetic construct
  misc_feature 1..16: note = Probe
  source 1..16: mol_type = other DNA
tcgtggctactgtttt

SEQ ID NO: 12007 - DNA, 19 bp, synthetic construct
  misc_feature 1..19: note = Probe
  source 1..19: mol_type = other DNA
tcgtggttgtagtccgtgc

SEQ ID NO: 12008 - DNA, 21 bp, synthetic construct
  misc_feature 1..21: note = Probe
  source 1..21: mol_type = other DNA
tcgtggttgtagtccgtgcga

SEQ ID NO: 12009 - DNA, 23 bp, synthetic construct
  misc_feature 1..23: note = Probe
  source 1..23: mol_type = other DNA
tcgtggttgtagtccgtgcgaga

SEQ ID NO: 12010 - DNA, 26 bp, synthetic construct
  misc_feature 1..26: note = Probe
  source 1..26: mol_type = other DNA
tcgtggttgtagtccgtgcgagaata

SEQ ID NO: 12011 - DNA, 15 bp, synthetic construct
  misc_feature 1..15: note = Probe
  source 1..15: mol_type = other DNA
tcgttggtctagggg

SEQ ID NO: 12012 - DNA, 22 bp, synthetic construct
  misc_feature 1..22: note = Probe
  source 1..22: mol_type = other DNA
tcgttggtctaggggtatgatt

SEQ ID NO: 12013 - DNA, 27 bp, synthetic construct
  misc_feature 1..27: note = Probe
  source 1..27: mol_type = other DNA
tcgttggtctaggggtatgattctcgc

SEQ ID NO: 12014 - DNA, 21 bp, synthetic construct
  misc_feature 1..21: note = Probe
  source 1..21: mol_type = other DNA
tctagcggttaggattcctgg

SEQ ID NO: 12015 - DNA, 20 bp, synthetic construct
  misc_feature 1..20: note = Probe
  source 1..20: mol_type = other DNA
tctaggggtatgattctcgg

SEQ ID NO: 12016 - DNA, 30 bp, synthetic construct
  misc_feature 1..30: note = Probe
  source 1..30: mol_type = other DNA
tctcagggtcgtgggttcgagccccacgtt

SEQ ID NO: 12017 - DNA, 19 bp, synthetic construct
  misc_feature 1..19: note = Probe
  source 1..19: mol_type = other DNA
tctccggatggaggcgtgg

SEQ ID NO: 12018 - DNA, 19 bp, synthetic construct
  misc_feature 1..19: note = Probe
  source 1..19: mol_type = other DNA
tctcggtggaacctgcatt

SEQ ID NO: 12019 - DNA, 30 bp, synthetic construct
  misc_feature 1..30: note = Probe
  source 1..30: mol_type = other DNA
tctgaaggtcgtgagttcgagcctcacacg

SEQ ID NO: 12020 - DNA, 30 bp, synthetic construct
  misc_feature 1..30: note = Probe
  source 1..30: mol_type = other DNA
tctgaaggtcgtgagttcgatcctcacacg

SEQ ID NO: 12021 - DNA, 15 bp, synthetic construct
  misc_feature 1..15: note = Probe
  source 1..15: mol_type = other DNA
tctgacacatacttt

SEQ ID NO: 12022 - DNA, 16 bp, synthetic construct
  misc_feature 1..16: note = Probe
  source 1..16: mol_type = other DNA
tctgacacatactttt

SEQ ID NO: 12023 - DNA, 16 bp, synthetic construct
  misc_feature 1..16: note = Probe
  source 1..16: mol_type = other DNA
tctgacacattcgttt

SEQ ID NO: 12024 - DNA, 17 bp, synthetic construct
  misc_feature 1..17: note = Probe
  source 1..17: mol_type = other DNA
tctgacacattcgtttt

SEQ ID NO: 12025 - DNA, 22 bp, synthetic construct
  misc_feature 1..22: note = Probe
  source 1..22: mol_type = other DNA
tctgacagagctcaattacttt

SEQ ID NO: 12026 - DNA, 19 bp, synthetic construct
  misc_feature 1..19: note = Probe
  source 1..19: mol_type = other DNA
tctgacttcggatcagaag

SEQ ID NO: 12027 - DNA, 30 bp, synthetic construct
  misc_feature 1..30: note = Probe
  source 1..30: mol_type = other DNA
tctgagggtccagggttcaagtccctgttc

SEQ ID NO: 12028 - DNA, 29 bp, synthetic construct
  misc_feature 1..29: note = Probe
  source 1..29: mol_type = other DNA
tctgagggtccagggttcatgtccctgtt

SEQ ID NO: 12029 - DNA, 30 bp, synthetic construct
  misc_feature 1..30: note = Probe
  source 1..30: mol_type = other DNA
tctgagggtccagggttcatgtccctgttc

SEQ ID NO: 12030 - DNA, 15 bp, synthetic construct
  misc_feature 1..15: note = Probe
  source 1..15: mol_type = other DNA
tctggactctgaatc

SEQ ID NO: 12031 - DNA, 16 bp, synthetic construct
  misc_feature 1..16: note = Probe
  source 1..16: mol_type = other DNA
tctggactctgaatcc

SEQ ID NO: 12032 - DNA, 17 bp, synthetic construct
  misc_feature 1..17: note = Probe
  source 1..17: mol_type = other DNA
tctggactctgaatcca

SEQ ID NO: 12033 - DNA, 19 bp, synthetic construct
  misc_feature 1..19: note = Probe
  source 1..19: mol_type = other DNA
tctggactctgaatccagc

SEQ ID NO: 12034 - DNA, 20 bp, synthetic construct
  misc_feature 1..20: note = Probe
  source 1..20: mol_type = other DNA
tctggactctgaatccagcg

SEQ ID NO: 12035 - DNA, 26 bp, synthetic construct
  misc_feature 1..26: note = Probe
  source 1..26: mol_type = other DNA
tctggactctgaatccagcgatccga

SEQ ID NO: 12036 - DNA, 27 bp, synthetic construct
  misc_feature 1..27: note = Probe
  source 1..27: mol_type = other DNA
tctggactctgaatccagcgatccgag

SEQ ID NO: 12037 - DNA, 28 bp, synthetic construct
  misc_feature 1..28: note = Probe
  source 1..28: mol_type = other DNA
tctggactctgaatccagcgatccgagt

SEQ ID NO: 12038 - DNA, 15 bp, synthetic construct
  misc_feature 1..15: note = Probe
  source 1..15: mol_type = other DNA
tctggactttgaatc

SEQ ID NO: 12039 - DNA, 17 bp, synthetic construct
  misc_feature 1..17: note = Probe
  source 1..17: mol_type = other DNA
tctgtagtgtagtggtt

SEQ ID NO: 12040 - DNA, 22 bp, synthetic construct
  misc_feature 1..22: note = Probe
  source 1..22: mol_type = other DNA
tcttgcgacccgggttcgattc

SEQ ID NO: 12041 - DNA, 30 bp, synthetic construct
  misc_feature 1..30: note = Probe
  source 1..30: mol_type = other DNA
tcttgcgacccgggttcgattcccgggcgg

SEQ ID NO: 12042 - DNA, 26 bp, synthetic construct
  misc_feature 1..26: note = Probe
  source 1..26: mol_type = other DNA
tctttggccttttcgagatactgttt

SEQ ID NO: 12043 - DNA, 27 bp, synthetic construct
  misc_feature 1..27: note = Probe
  source 1..27: mol_type = other DNA
tctttggccttttcgagatactgtttt

SEQ ID NO: 12044 - DNA, 17 bp, synthetic construct
  misc_feature 1..17: note = Probe
  source 1..17: mol_type = other DNA
tgaagcattggactgta

SEQ ID NO: 12045 - DNA, 18 bp, synthetic construct
  misc_feature 1..18: note = Probe
  source 1..18: mol_type = other DNA
tgaagcattggactgtaa

SEQ ID NO: 12046 - DNA, 22 bp, synthetic construct
  misc_feature 1..22: note = Probe
  source 1..22: mol_type = other DNA
tgaagcattggactgtaaatct

SEQ ID NO: 12047 - DNA, 30 bp, synthetic construct; identical to SEQ ID NO: 1734
  misc_feature 1..30: note = Probe
  source 1..30: mol_type = other DNA

SEQ ID NO: 12048 - DNA, 30 bp, synthetic construct
  misc_feature 1..30: note = Probe
  source 1..30: mol_type = other DNA
tgagggtccagggttcaagtccctgttcgg

SEQ ID NO: 12049 - DNA, 18 bp, synthetic construct
  misc_feature 1..18: note = Probe
  source 1..18: mol_type = other DNA
tgagtgaagcattggact

SEQ ID NO: 12050 - DNA, 19 bp, synthetic construct
  misc_feature 1..19: note = Probe
  source 1..19: mol_type = other DNA
tgagtgaagcattggactg

SEQ ID NO: 12051 - DNA, 20 bp, synthetic construct
  misc_feature 1..20: note = Probe
  source 1..20: mol_type = other DNA
tgagtgaagcattggactgt

SEQ ID NO: 12052 - DNA, 21 bp, synthetic construct
  misc_feature 1..21: note = Probe
  source 1..21: mol_type = other DNA
tgagtgaagcattggactgta

SEQ ID NO: 12053 - DNA, 22 bp, synthetic construct
  misc_feature 1..22: note = Probe
  source 1..22: mol_type = other DNA
tgagtgaagcattggactgtaa

SEQ ID NO: 12054 - DNA, 23 bp, synthetic construct
  misc_feature 1..23: note = Probe
  source 1..23: mol_type = other DNA
tgagtgaagcattggactgtaaa

SEQ ID NO: 12055 - DNA, 25 bp, synthetic construct
  misc_feature 1..25: note = Probe
  source 1..25: mol_type = other DNA
tgagtgaagcattggactgtaaatc

SEQ ID NO: 12056 - DNA, 20 bp, synthetic construct
  misc_feature 1..20: note = Probe
  source 1..20: mol_type = other DNA
tgataacaccaaggtcgcgg

SEQ ID NO: 12057 - DNA, 15 bp, synthetic construct
  misc_feature 1..15: note = Probe
  source 1..15: mol_type = other DNA
tgatcgtatagtggt

SEQ ID NO: 12058 - DNA, 17 bp, synthetic construct
  misc_feature 1..17: note = Probe
  source 1..17: mol_type = other DNA
tgatcgtatagtggtta

SEQ ID NO: 12059 - DNA, 18 bp, synthetic construct
  misc_feature 1..18: note = Probe
  source 1..18: mol_type = other DNA
tgatcgtatagtggttag

SEQ ID NO: 12060 - DNA, 19 bp, synthetic construct
  misc_feature 1..19: note = Probe
  source 1..19: mol_type = other DNA
tgatcgtatagtggttagt

SEQ ID NO: 12061 - DNA, 20 bp, synthetic construct
  misc_feature 1..20: note = Probe
  source 1..20: mol_type = other DNA
tgatcgtatagtggttagta

SEQ ID NO: 12062 - DNA, 22 bp, synthetic construct
  misc_feature 1..22: note = Probe
  source 1..22: mol_type = other DNA
tgatcgtatagtggttagtact

SEQ ID NO: 12063 - DNA, 23 bp, synthetic construct
  misc_feature 1..23: note = Probe
  source 1..23: mol_type = other DNA
tgatcgtatagtggttagtactc

SEQ ID NO: 12064 - DNA, 24 bp, synthetic construct
  misc_feature 1..24: note = Probe
  source 1..24: mol_type = other DNA
tgatcgtatagtggttagtactct

SEQ ID NO: 12065 - DNA, 25 bp, synthetic construct
  misc_feature 1..25: note = Probe
  source 1..25: mol_type = other DNA
tgatcgtatagtggttagtactctg

SEQ ID NO: 12066 - DNA, 26 bp, synthetic construct
  misc_feature 1..26: note = Probe
  source 1..26: mol_type = other DNA
tgatcgtatagtggttagtactctgc

SEQ ID NO: 12067 - DNA, 27 bp, synthetic construct
  misc_feature 1..27: note = Probe
  source 1..27: mol_type = other DNA
tgatcgtatagtggttagtactctgcg

SEQ ID NO: 12068 - DNA, 28 bp, synthetic construct
  misc_feature 1..28: note = Probe
  source 1..28: mol_type = other DNA
tgatcgtatagtggttagtactctgcgt

SEQ ID NO: 12069 - DNA, 30 bp, synthetic construct
  misc_feature 1..30: note = Probe
  source 1..30: mol_type = other DNA
tgcatgggtggttcagtggtagaattctcg

SEQ ID NO: 12070 - DNA, 24 bp, synthetic construct
  misc_feature 1..24: note = Probe
  source 1..24: mol_type = other DNA
tgcccccatgtctaacaacatggc

SEQ ID NO: 12071 - DNA, 25 bp, synthetic construct
  misc_feature 1..25: note = Probe
  source 1..25: mol_type = other DNA
tgcccccatgtctaacaacatggct

SEQ ID NO: 12072 - DNA, 30 bp, synthetic construct; identical to SEQ ID NO: 8103
  misc_feature 1..30: note = Probe
  source 1..30: mol_type = other DNA

SEQ ID NO: 12073 - DNA, 17 bp, synthetic construct
  misc_feature 1..17: note = Probe
  source 1..17: mol_type = other DNA
tgcccgcatcctccact

SEQ ID NO: 12074 - DNA, 15 bp, synthetic construct
  misc_feature 1..15: note = Probe
  source 1..15: mol_type = other DNA
tgccgtgatcgtata

SEQ ID NO: 12075 - DNA, 16 bp, synthetic construct
  misc_feature 1..16: note = Probe
  source 1..16: mol_type = other DNA
tgccgtgatcgtatag

SEQ ID NO: 12076 - DNA, 17 bp, synthetic construct
  misc_feature 1..17: note = Probe
  source 1..17: mol_type = other DNA
tgccgtgatcgtatagt

SEQ ID NO: 12077 - DNA, 18 bp, synthetic construct
  misc_feature 1..18: note = Probe
  source 1..18: mol_type = other DNA
tgccgtgatcgtatagtg

SEQ ID NO: 12078 - DNA, 19 bp, synthetic construct
  misc_feature 1..19: note = Probe
  source 1..19: mol_type = other DNA
tgccgtgatcgtatagtgg

SEQ ID NO: 12079 - DNA, 20 bp, synthetic construct
  misc_feature 1..20: note = Probe
  source 1..20: mol_type = other DNA
tgccgtgatcgtatagtggt

SEQ ID NO: 12080 - DNA, 21 bp, synthetic construct
  misc_feature 1..21: note = Probe
  source 1..21: mol_type = other DNA
tgccgtgatcgtatagtggtt

SEQ ID NO: 12081 - DNA, 22 bp, synthetic construct
  misc_feature 1..22: note = Probe
  source 1..22: mol_type = other DNA
tgccgtgatcgtatagtggtta

SEQ ID NO: 12082 - DNA, 23 bp, synthetic construct
  misc_feature 1..23: note = Probe
  source 1..23: mol_type = other DNA
tgccgtgatcgtatagtggttag

SEQ ID NO: 12083 - DNA, 24 bp, synthetic construct
  misc_feature 1..24: note = Probe
  source 1..24: mol_type = other DNA
tgccgtgatcgtatagtggttagt

SEQ ID NO: 12084 - DNA, 25 bp, synthetic construct
  misc_feature 1..25: note = Probe
  source 1..25: mol_type = other DNA
tgccgtgatcgtatagtggttagta

SEQ ID NO: 12085 - DNA, 26 bp, synthetic construct
  misc_feature 1..26: note = Probe
  source 1..26: mol_type = other DNA
tgccgtgatcgtatagtggttagtac

SEQ ID NO: 12086 - DNA, 27 bp, synthetic construct
  misc_feature 1..27: note = Probe
  source 1..27: mol_type = other DNA
tgccgtgatcgtatagtggttagtact

SEQ ID NO: 12087 - DNA, 28 bp, synthetic construct
  misc_feature 1..28: note = Probe
  source 1..28: mol_type = other DNA
tgccgtgatcgtatagtggttagtactc

SEQ ID NO: 12088 - DNA, 29 bp, synthetic construct
  misc_feature 1..29: note = Probe
  source 1..29: mol_type = other DNA
tgccgtgatcgtatagtggttagtactct

SEQ ID NO: 12089 - DNA, 30 bp, synthetic construct
  misc_feature 1..30: note = Probe
  source 1..30: mol_type = other DNA
tgccgtgatcgtatagtggttagtactctg

SEQ ID NO: 12090 - DNA, 22 bp, synthetic construct
  misc_feature 1..22: note = Probe
  source 1..22: mol_type = other DNA
tgccttccaagcagttgacccg

SEQ ID NO: 12091 - DNA, 30 bp, synthetic construct
  misc_feature 1..30: note = Probe
  source 1..30: mol_type = other DNA
tgcgagaggtcccgggttcaaatcccggac

SEQ ID NO: 12092 - DNA, 17 bp, synthetic construct
  misc_feature 1..17: note = Probe
  source 1..17: mol_type = other DNA
tgctaatccattgtgct

SEQ ID NO: 12093 - DNA, 21 bp, synthetic construct
  misc_feature 1..21: note = Probe
  source 1..21: mol_type = other DNA
tgctaatccattgtgctctgc

SEQ ID NO: 12094 - DNA, 21 bp, synthetic construct
  misc_feature 1..21: note = Probe
  source 1..21: mol_type = other DNA
tgctaatccattgtgctttgc

SEQ ID NO: 12095 - DNA, 17 bp, synthetic construct
  misc_feature 1..17: note = Probe
  source 1..17: mol_type = other DNA
tggactctgaatccagc

SEQ ID NO: 12096 - DNA, 25 bp, synthetic construct
  misc_feature 1..25: note = Probe
  source 1..25: mol_type = other DNA
tggactctgaatccagcgatccgag

SEQ ID NO: 12097 - DNA, 26 bp, synthetic construct
  misc_feature 1..26: note = Probe
  source 1..26: mol_type = other DNA
tggactctgaatccagcgatccgagt

SEQ ID NO: 12098 - DNA, 22 bp, synthetic construct
  misc_feature 1..22: note = Probe
  source 1..22: mol_type = other DNA
tggaggcgtgggttcgaatccc

SEQ ID NO: 12099 - DNA, 25 bp, synthetic construct
  misc_feature 1..25: note = Probe
  source 1..25: mol_type = other DNA
tggagttaaagactttttctctgat

SEQ ID NO: 12100 - DNA, 22 bp, synthetic construct
  misc_feature 1..22: note = Probe
  source 1..22: mol_type = other DNA
tggataacgcgtctgactacgg

SEQ ID NO: 12101 - DNA, 23 bp, synthetic construct
  misc_feature 1..23: note = Probe
  source 1..23: mol_type = other DNA
tggataacgcgtctgactacgga

SEQ ID NO: 12102 - DNA, 20 bp, synthetic construct
  misc_feature 1..20: note = Probe
  source 1..20: mol_type = other DNA
tggataaggcgtctgacttc

SEQ ID NO: 12103 - DNA, 24 bp, synthetic construct
  misc_feature 1..24: note = Probe
  source 1..24: mol_type = other DNA
tggataaggcgtctgacttcggat

SEQ ID NO: 12104 - DNA, 25 bp, synthetic construct
  misc_feature 1..25: note = Probe
  source 1..25: mol_type = other DNA
tggataaggcgtctgacttcggatc

SEQ ID NO: 12105 - DNA, 21 bp, synthetic construct
  misc_feature 1..21: note = Probe
  source 1..21: mol_type = other DNA
tggccgcagcaacctcggttc

SEQ ID NO: 12106 - DNA, 22 bp, synthetic construct
  misc_feature 1..22: note = Probe
  source 1..22: mol_type = other DNA
tggccgcagcaacctcggttcg

SEQ ID NO: 12107 - DNA, 23 bp, synthetic construct
  misc_feature 1..23: note = Probe
  source 1..23: mol_type = other DNA
tggccgcagcaacctcggttcga

SEQ ID NO: 12108 - DNA, 25 bp, synthetic construct
  misc_feature 1..25: note = Probe
  source 1..25: mol_type = other DNA
tggcctcctaagccagggattgtgg

SEQ ID NO: 12109 - DNA, 24 bp, synthetic construct
  misc_feature 1..24: note = Probe
  source 1..24: mol_type = other DNA
tggcgcagcggaagcgtgctgggc

SEQ ID NO: 12110 - DNA, 24 bp, synthetic construct
  misc_feature 1..24: note = Probe
  source 1..24: mol_type = other DNA
tggctgagtgaagcattggactgt

SEQ ID NO: 12111 - DNA, 25 bp, synthetic construct
  misc_feature 1..25: note = Probe
  source 1..25: mol_type = other DNA
tggctgagtgaagcattggactgta

SEQ ID NO: 12112 - DNA, 26 bp, synthetic construct
  misc_feature 1..26: note = Probe
  source 1..26: mol_type = other DNA
tggctgagtgaagcattggactgtaa

SEQ ID NO: 12113 - DNA, 19 bp, synthetic construct
  misc_feature 1..19: note = Probe
  source 1..19: mol_type = other DNA
tggggtggcctgtgacttt

SEQ ID NO: 12114 - DNA, 20 bp, synthetic construct
  misc_feature 1..20: note = Probe
  source 1..20: mol_type = other DNA
tggggtggcctgtgactttt

SEQ ID NO: 12115 - DNA, 21 bp, synthetic construct
  misc_feature 1..21: note = Probe
  source 1..21: mol_type = other DNA
tgggtccgagaggtcccgggt

SEQ ID NO: 12116 - DNA, 21 bp, synthetic construct
  misc_feature 1..21: note = Probe
  source 1..21: mol_type = other DNA
tgggtcgcgtgagattagttt

SEQ ID NO: 12117 - DNA, 22 bp, synthetic construct
  misc_feature 1..22: note = Probe
  source 1..22: mol_type = other DNA
tgggtcgcgtgagattagtttt

SEQ ID NO: 12118 - DNA, 21 bp, synthetic construct
  misc_feature 1..21: note = Probe
  source 1..21: mol_type = other DNA
tgggtgcgagaggtcccgggt

SEQ ID NO: 12119 - DNA, 20 bp, synthetic construct
  misc_feature 1..20: note = Probe
  source 1..20: mol_type = other DNA
tgggtggttcagtggtagaa

SEQ ID NO: 12120 - DNA, 21 bp, synthetic construct
  misc_feature 1..21: note = Probe
  source 1..21: mol_type = other DNA
tgggtggttcagtggtagaat

SEQ ID NO: 12121 - DNA, 24 bp, synthetic construct
  misc_feature 1..24: note = Probe
  source 1..24: mol_type = other DNA
tgggtggttcagtggtagaattct

SEQ ID NO: 12122 - DNA, 25 bp, synthetic construct
  misc_feature 1..25: note = Probe
  source 1..25: mol_type = other DNA
tgggtggttcagtggtagaattctc

SEQ ID NO: 12123 - DNA, 26 bp, synthetic construct
  misc_feature 1..26: note = Probe
  source 1..26: mol_type = other DNA
tgggtggttcagtggtagaattctcg

SEQ ID NO: 12124 - DNA, 27 bp, synthetic construct
  misc_feature 1..27: note = Probe
  source 1..27: mol_type = other DNA
tgggtggttcagtggtagaattctcgc

SEQ ID NO: 12125 - DNA, 28 bp, synthetic construct
  misc_feature 1..28: note = Probe
  source 1..28: mol_type = other DNA
tgggtggttcagtggtagaattctcgcc

SEQ ID NO: 12126 - DNA, 30 bp, synthetic construct; identical to SEQ ID NO: 1765
  misc_feature 1..30: note = Probe
  source 1..30: mol_type = other DNA

SEQ ID NO: 12127 - DNA, 24 bp, synthetic construct
  misc_feature 1..24: note = Probe
  source 1..24: mol_type = other DNA
tgggttcgaatcccatcctcgtcg

SEQ ID NO: 12128 - DNA, 25 bp, synthetic construct
  misc_feature 1..25: note = Probe
  source 1..25: mol_type = other DNA
tgggttcgaatcccatcctcgtcgc

SEQ ID NO: 12129 - DNA, 21 bp, synthetic construct
  misc_feature 1..21: note = Probe
  source 1..21: mol_type = other DNA
tgggtttaagtcccattggtc

SEQ ID NO: 12130 - DNA, 24 bp, synthetic construct
  misc_feature 1..24: note = Probe
  source 1..24: mol_type = other DNA
tgggtttaagtcccattggtctag

SEQ ID NO: 12131 - DNA, 25 bp, synthetic construct
  misc_feature 1..25: note = Probe
  source 1..25: mol_type = other DNA
tgggtttaagtcccattggtctagt

SEQ ID NO: 12132 - DNA, 15 bp, synthetic construct
  misc_feature 1..15: note = Probe
  source 1..15: mol_type = other DNA
tggtagaattctcgc

SEQ ID NO: 12133 - DNA, 16 bp, synthetic construct
  misc_feature 1..16: note = Probe
  source 1..16: mol_type = other DNA
tggtagaattctcgcc

SEQ ID NO: 12134 - DNA, 17 bp, synthetic construct
  misc_feature 1..17: note = Probe
  source 1..17: mol_type = other DNA
tggtagaattctcgcct

SEQ ID NO: 12135 - DNA, 18 bp, synthetic construct
  misc_feature 1..18: note = Probe
  source 1..18: mol_type = other DNA
tggtagaattctcgcctg

SEQ ID NO: 12136 - DNA, 19 bp, synthetic construct
  misc_feature 1..19: note = Probe
  source 1..19: mol_type = other DNA
tggtagaattctcgcctgc

SEQ ID NO: 12137 - DNA, 20 bp, synthetic construct
  misc_feature 1..20: note = Probe
  source 1..20: mol_type = other DNA
tggtagaattctcgcctgcc

SEQ ID NO: 12138 - DNA, 22 bp, synthetic construct
  misc_feature 1..22: note = Probe
  source 1..22: mol_type = other DNA
tggtagaattctcgcctgccac

SEQ ID NO: 12139 - DNA, 23 bp, synthetic construct
  misc_feature 1..23: note = Probe
  source 1..23: mol_type = other DNA
tggtagaattctcgcctgccacg

SEQ ID NO: 12140 - DNA, 24 bp, synthetic construct
  misc_feature 1..24: note = Probe
  source 1..24: mol_type = other DNA
tggtagaattctcgcctgccacgc

SEQ ID NO: 12141 - DNA, 30 bp, synthetic construct
  misc_feature 1..30: note = Probe
  source 1..30: mol_type = other DNA
tggtagaattctcgcctgccacgcgggagg

SEQ ID NO: 12142 - DNA, 15 bp, synthetic construct
  misc_feature 1..15: note = Probe
  source 1..15: mol_type = other DNA
tggtagagcgcgtgc

SEQ ID NO: 12143 - DNA, 15 bp, synthetic construct
  misc_feature 1..15: note = Probe
  source 1..15: mol_type = other DNA
tggtagagcgctcgc

SEQ ID NO: 12144 - DNA, 20 bp, synthetic construct
  misc_feature 1..20: note = Probe
  source 1..20: mol_type = other DNA
tggtagagcggaggactgta

SEQ ID NO: 12145 - DNA, 21 bp, synthetic construct
  misc_feature 1..21: note = Probe
  source 1..21: mol_type = other DNA
tggtagagcggaggactgtag

SEQ ID NO: 12146 - DNA, 15 bp, synthetic construct
  misc_feature 1..15: note = Probe
  source 1..15: mol_type = other DNA
tggtcgtggttgtag

SEQ ID NO: 12147 - DNA, 16 bp, synthetic construct
  misc_feature 1..16: note = Probe
  source 1..16: mol_type = other DNA
tggtcgtggttgtagt

SEQ ID NO: 12148 - DNA, 17 bp, synthetic construct
  misc_feature 1..17: note = Probe
  source 1..17: mol_type = other DNA
tggtcgtggttgtagtc

SEQ ID NO: 12149 - DNA, 18 bp, synthetic construct
  misc_feature 1..18: note = Probe
  source 1..18: mol_type = other DNA
tggtcgtggttgtagtcc

SEQ ID NO: 12150 - DNA, 20 bp, synthetic construct
  misc_feature 1..20: note = Probe
  source 1..20: mol_type = other DNA
tggtcgtggttgtagtccgt

SEQ ID NO: 12151 - DNA, 24 bp, synthetic construct
  misc_feature 1..24: note = Probe
  source 1..24: mol_type = other DNA
tggtcgtggttgtagtccgtgcga

SEQ ID NO: 12152 - DNA, 25 bp, synthetic construct
  misc_feature 1..25: note = Probe
  source 1..25: mol_type = other DNA
tggtcgtggttgtagtccgtgcgag

SEQ ID NO: 12153 - DNA, 26 bp, synthetic construct
  misc_feature 1..26: note = Probe
  source 1..26: mol_type = other DNA
tggtcgtggttgtagtccgtgcgaga

SEQ ID NO: 12154 - DNA, 27 bp, synthetic construct
  misc_feature 1..27: note = Probe
  source 1..27: mol_type = other DNA
tggtcgtggttgtagtccgtgcgagaa

SEQ ID NO: 12155 - DNA, 28 bp, synthetic construct
  misc_feature 1..28: note = Probe
  source 1..28: mol_type = other DNA
tggtcgtggttgtagtccgtgcgagaat

SEQ ID NO: 12156 - DNA, 30 bp, synthetic construct
  misc_feature 1..30: note = Probe
  source 1..30: mol_type = other DNA
tggtcgtggttgtagtccgtgcgagaataa

SEQ ID NO: 12157 - DNA, 17 bp, synthetic construct
  misc_feature 1..17: note = Probe
  source 1..17: mol_type = other DNA
tggtctaaggcgctgga

SEQ ID NO: 12158 - DNA, 21 bp, synthetic construct
  misc_feature 1..21: note = Probe
  source 1..21: mol_type = other DNA
tggtctagcggttaggattcc

SEQ ID NO: 12159 - DNA, 23 bp, synthetic construct
  misc_feature 1..23: note = Probe
  source 1..23: mol_type = other DNA
tggtctaggggtatgattctcgc

SEQ ID NO: 12160 - DNA, 24 bp, synthetic construct
  misc_feature 1..24: note = Probe
  source 1..24: mol_type = other DNA
tggtctaggggtatgattctcgct

SEQ ID NO: 12161 - DNA, 23 bp, synthetic construct
  misc_feature 1..23: note = Probe
  source 1..23: mol_type = other DNA
tggtctaggggtatgattctcgg

SEQ ID NO: 12162 - DNA, 24 bp, synthetic construct
  misc_feature 1..24: note = Probe
  source 1..24: mol_type = other DNA
tggtctaggggtatgattctcggt

SEQ ID NO: 12163 - DNA, 22 bp, synthetic construct
  misc_feature 1..22: note = Probe
  source 1..22: mol_type = other DNA
tggtctagtggttaggattcgg

SEQ ID NO: 12164 - DNA, 24 bp, synthetic construct
  misc_feature 1..24: note = Probe
  source 1..24: mol_type = other DNA
tggtctagtggttaggattcggcg

SEQ ID NO: 12165 - DNA, 25 bp, synthetic construct
  misc_feature 1..25: note = Probe
  source 1..25: mol_type = other DNA
tggtctagtggttaggattcggcgc

SEQ ID NO: 12166 - DNA, 26 bp, synthetic construct
  misc_feature 1..26: note = Probe
  source 1..26: mol_type = other DNA
tggtctagtggttaggattcggcgct

SEQ ID NO: 12167 - DNA, 29 bp, synthetic construct
  misc_feature 1..29: note = Probe
  source 1..29: mol_type = other DNA
tggtctagtggttaggattcggcgctctc

SEQ ID NO: 12168 - DNA, 16 bp, synthetic construct
  misc_feature 1..16: note = Probe
  source 1..16: mol_type = other DNA
tggtgagtatccccgc

SEQ ID NO: 12169 - DNA, 28 bp, synthetic construct
  misc_feature 1..28: note = Probe
  source 1..28: mol_type = other DNA
tggtggagttaaagactttttctctgat

SEQ ID NO: 12170 - DNA, 28 bp, synthetic construct
  misc_feature 1..28: note = Probe
  source 1..28: mol_type = other DNA
tggtggtctagtggttaggattcggcgc

SEQ ID NO: 12171 - DNA, 23 bp, synthetic construct
  misc_feature 1..23: note = Probe
  source 1..23: mol_type = other DNA
tggtggttcagtggtagaattct

SEQ ID NO: 12172 - DNA, 24 bp, synthetic construct
  misc_feature 1..24: note = Probe
  source 1..24: mol_type = other DNA
tggtggttcagtggtagaattctc

SEQ ID NO: 12173 - DNA, 25 bp, synthetic construct
  misc_feature 1..25: note = Probe
  source 1..25: mol_type = other DNA
tggtggttcagtggtagaattctcg

SEQ ID NO: 12174 - DNA, 26 bp, synthetic construct
  misc_feature 1..26: note = Probe
  source 1..26: mol_type = other DNA
tggtggttcagtggtagaattctcgc

SEQ ID NO: 12175 - DNA, 27 bp, synthetic construct
  misc_feature 1..27: note = Probe
  source 1..27: mol_type = other DNA
tggtggttcagtggtagaattctcgcc

SEQ ID NO: 12176 - DNA, 28 bp, synthetic construct
  misc_feature 1..28: note = Probe
  source 1..28: mol_type = other DNA
tggtggttcagtggtagaattctcgcct

SEQ ID NO: 12177 - DNA, 30 bp, synthetic construct; identical to SEQ ID NO: 8196
  misc_feature 1..30: note = Probe
  source 1..30: mol_type = other DNA

SEQ ID NO: 12178 - DNA, 26 bp, synthetic construct
  misc_feature 1..26: note = Probe
  source 1..26: mol_type = other DNA
tggtgtaatggtgagcactctggact

SEQ ID NO: 12179 - DNA, 19 bp, synthetic construct
  misc_feature 1..19: note = Probe
  source 1..19: mol_type = other DNA
tggtgtaatggttagcact

SEQ ID NO: 12180 - DNA, 22 bp, synthetic construct
  misc_feature 1..22: note = Probe
  source 1..22: mol_type = other DNA
tggtgtaatggttagcactctg

SEQ ID NO: 12181 - DNA, 23 bp, synthetic construct
  misc_feature 1..23: note = Probe
  source 1..23: mol_type = other DNA
tggtgtaatggttagcactctgg

SEQ ID NO: 12182 - DNA, 24 bp, synthetic construct
  misc_feature 1..24: note = Probe
  source 1..24: mol_type = other DNA
tggtgtaatggttagcactctgga

SEQ ID NO: 12183 - DNA, 25 bp, synthetic construct
  misc_feature 1..25: note = Probe
  source 1..25: mol_type = other DNA
tggtgtaatggttagcactctggac

SEQ ID NO: 12184 - DNA, 26 bp, synthetic construct
  misc_feature 1..26: note = Probe
  source 1..26: mol_type = other DNA
tggtgtaatggttagcactctggact

SEQ ID NO: 12185 - DNA, 27 bp, synthetic construct
  misc_feature 1..27: note = Probe
  source 1..27: mol_type = other DNA
tggtgtaatggttagcactctggactc

SEQ ID NO: 12186 - DNA, 28 bp, synthetic construct
  misc_feature 1..28: note = Probe
  source 1..28: mol_type = other DNA
tggtgtaatggttagcactctggactct

SEQ ID NO: 12187 - DNA, 29 bp, synthetic construct
  misc_feature 1..29: note = Probe
  source 1..29: mol_type = other DNA
tggtgtaatggttagcactctggactctg

SEQ ID NO: 12188 - DNA, 27 bp, synthetic construct
  misc_feature 1..27: note = Probe
  source 1..27: mol_type = other DNA
tggtgtaatggttagcactctggactt

SEQ ID NO: 12189 - DNA, 29 bp, synthetic construct
  misc_feature 1..29: note = Probe
  source 1..29: mol_type = other DNA
tggtgtaatggttagcactctggactttg

SEQ ID NO: 12190 - DNA, 15 bp, synthetic construct
  misc_feature 1..15: note = Probe
  source 1..15: mol_type = other DNA
tggttagcactctgg

SEQ ID NO: 12191 - DNA, 16 bp, synthetic construct
  misc_feature 1..16: note = Probe
  source 1..16: mol_type = other DNA
tggttagcactctgga

SEQ ID NO: 12192 - DNA, 17 bp, synthetic construct
  misc_feature 1..17: note = Probe
  source 1..17: mol_type = other DNA
tggttagcactctggac

SEQ ID NO: 12193 - DNA, 18 bp, synthetic construct
  misc_feature 1..18: note = Probe
  source 1..18: mol_type = other DNA
tggttagcactctggact

SEQ ID NO: 12194 - DNA, 19 bp, synthetic construct
  misc_feature 1..19: note = Probe
  source 1..19: mol_type = other DNA
tggttagcactctggactc

SEQ ID NO: 12195 - DNA, 20 bp, synthetic construct
  misc_feature 1..20: note = Probe
  source 1..20: mol_type = other DNA
tggttagcactctggactct

SEQ ID NO: 12196 - DNA, 21 bp, synthetic construct
  misc_feature 1..21: note = Probe
  source 1..21: mol_type = other DNA
tggttagcactctggactctg

SEQ ID NO: 12197 - DNA, 22 bp, synthetic construct
  misc_feature 1..22: note = Probe
  source 1..22: mol_type = other DNA
tggttagcactctggactctga

SEQ ID NO: 12198 - DNA, 23 bp, synthetic construct
  misc_feature 1..23: note = Probe
  source 1..23: mol_type = other DNA
tggttagcactctggactctgaa

SEQ ID NO: 12199 - DNA, 24 bp, synthetic construct
  misc_feature 1..24: note = Probe
  source 1..24: mol_type = other DNA
tggttagcactctggactctgaat

SEQ ID NO: 12200 - DNA, 25 bp, synthetic construct
  misc_feature 1..25: note = Probe
  source 1..25: mol_type = other DNA
tggttagcactctggactctgaatc

SEQ ID NO: 12201 - DNA, 26 bp, synthetic construct
  misc_feature 1..26: note = Probe
  source 1..26: mol_type = other DNA
tggttagcactctggactctgaatcc

SEQ ID NO: 12202 - DNA, 27 bp, synthetic construct
  misc_feature 1..27: note = Probe
  source 1..27: mol_type = other DNA
tggttagcactctggactctgaatcca

SEQ ID NO: 12203 - DNA, 29 bp, synthetic construct
  misc_feature 1..29: note = Probe
  source 1..29: mol_type = other DNA
tggttagcactctggactctgaatccagc

SEQ ID NO: 12204 - DNA, 19 bp, synthetic construct
  misc_feature 1..19: note = Probe
  source 1..19: mol_type = other DNA
tggttagcactctggactt

SEQ ID NO: 12205 - DNA, 20 bp, synthetic construct
  misc_feature 1..20: note = Probe
  source 1..20: mol_type = other DNA
tggttagcactctggacttt

SEQ ID NO: 12206 - DNA, 21 bp, synthetic construct
  misc_feature 1..21: note = Probe
  source 1..21: mol_type = other DNA
tggttagcactctggactttg

SEQ ID NO: 12207 - DNA, 22 bp, synthetic construct
  misc_feature 1..22: note = Probe
  source 1..22: mol_type = other DNA
tggttagcactctggactttga

SEQ ID NO: 12208 - DNA, 17 bp, synthetic construct
  misc_feature 1..17: note = Probe
  source 1..17: mol_type = other DNA
tggttaggattcggcgc

SEQ ID NO: 12209 - DNA, 18 bp, synthetic construct
  misc_feature 1..18: note = Probe
  source 1..18: mol_type = other DNA
tggttaggattcggcgct

SEQ ID NO: 12210 - DNA, 19 bp, synthetic construct
  misc_feature 1..19: note = Probe
  source 1..19: mol_type = other DNA
tggttaggattcggcgctc

SEQ ID NO: 12211 - DNA, 21 bp, synthetic construct
  misc_feature 1..21: note = Probe
  source 1..21: mol_type = other DNA
tggttaggattcggcgctctc

SEQ ID NO: 12212 - DNA, 22 bp, synthetic construct
  misc_feature 1..22: note = Probe
  source 1..22: mol_type = other DNA
tggttaggattcggcgctctca

SEQ ID NO: 12213 - DNA, 23 bp, synthetic construct
  misc_feature 1..23: note = Probe
  source 1..23: mol_type = other DNA
tggttaggattcggcgctctcac

SEQ ID NO: 12214 - DNA, 24 bp, synthetic construct
  misc_feature 1..24: note = Probe
  source 1..24: mol_type = other DNA
tggttaggattcggcgctctcacc

SEQ ID NO: 12215 - DNA, 27 bp, synthetic construct
  misc_feature 1..27: note = Probe
  source 1..27: mol_type = other DNA
tggttaggattcggcgctctcaccgcc

SEQ ID NO: 12216 - DNA, 15 bp, synthetic construct
  misc_feature 1..15: note = Probe
  source 1..15: mol_type = other DNA
tggttagtactctgc

SEQ ID NO: 12217 - DNA, 16 bp, synthetic construct
  misc_feature 1..16: note = Probe
  source 1..16: mol_type = other DNA
tggttagtactctgcg

SEQ ID NO: 12218 - DNA, 19 bp, synthetic construct
  misc_feature 1..19: note = Probe
  source 1..19: mol_type = other DNA
tggttagtactctgcgctg

SEQ ID NO: 12219 - DNA, 21 bp, synthetic construct
  misc_feature 1..21: note = Probe
  source 1..21: mol_type = other DNA
tggttagtactctgcgttgtg

SEQ ID NO: 12220 - DNA, 22 bp, synthetic construct
  misc_feature 1..22: note = Probe
  source 1..22: mol_type = other DNA
tggttagtactctgcgttgtgg

SEQ ID NO: 12221 - DNA, 23 bp, synthetic construct
  misc_feature 1..23: note = Probe
  source 1..23: mol_type = other DNA
tggttagtactctgcgttgtggc

SEQ ID NO: 12222 - DNA, 24 bp, synthetic construct
  misc_feature 1..24: note = Probe
  source 1..24: mol_type = other DNA
tggttagtactctgcgttgtggcc

SEQ ID NO: 12223 - DNA, 25 bp, synthetic construct
  misc_feature 1..25: note = Probe
  source 1..25: mol_type = other DNA
tggttagtactctgcgttgtggccg

SEQ ID NO: 12224 - DNA, 26 bp, synthetic construct
  misc_feature 1..26: note = Probe
  source 1..26: mol_type = other DNA
tggttagtactctgcgttgtggccgc

SEQ ID NO: 12225 - DNA, 15 bp, synthetic construct
  misc_feature 1..15: note = Probe
  source 1..15: mol_type = other DNA
tggttcagtggtaga

SEQ ID NO: 12226 - DNA, 16 bp, synthetic construct
  misc_feature 1..16: note = Probe
  source 1..16: mol_type = other DNA
tggttcagtggtagaa

SEQ ID NO: 12227 - DNA, 20 bp, synthetic construct
  misc_feature 1..20: note = Probe
  source 1..20: mol_type = other DNA
tggttcagtggtagaattct

SEQ ID NO: 12228 - DNA, 21 bp, synthetic construct
  misc_feature 1..21: note = Probe
  source 1..21: mol_type = other DNA
tggttcagtggtagaattctc

SEQ ID NO: 12229 - DNA, 22 bp, synthetic construct
  misc_feature 1..22: note = Probe
  source 1..22: mol_type = other DNA
tggttcagtggtagaattctcg

SEQ ID NO: 12230 - DNA, 23 bp, synthetic construct
  misc_feature 1..23: note = Probe
  source 1..23: mol_type = other DNA
tggttcagtggtagaattctcgc

SEQ ID NO: 12231 - DNA, 24 bp, synthetic construct
  misc_feature 1..24: note = Probe
  source 1..24: mol_type = other DNA
tggttcagtggtagaattctcgcc

SEQ ID NO: 12232 - DNA, 25 bp, synthetic construct
  misc_feature 1..25: note = Probe
  source 1..25: mol_type = other DNA
tggttcagtggtagaattctcgcct

SEQ ID NO: 12233 - DNA, 26 bp, synthetic construct
  misc_feature 1..26: note = Probe
  source 1..26: mol_type = other DNA
tggttcagtggtagaattctcgcctg

SEQ ID NO: 12234 - DNA, 27 bp, synthetic construct
  misc_feature 1..27: note = Probe
  source 1..27: mol_type = other DNA
tggttcagtggtagaattctcgcctgc

SEQ ID NO: 12235 - DNA, 21 bp, synthetic construct
  misc_feature 1..21: note = Probe
  source 1..21: mol_type = other DNA
tggttcgatcccgggtttcgg

SEQ ID NO: 12236 - DNA, 22 bp, synthetic construct
  misc_feature 1..22: note = Probe
  source 1..22: mol_type = other DNA
tggttcgattccggctcgaagg

SEQ ID NO: 12237 - DNA, 24 bp, synthetic construct
  misc_feature 1..24: note = Probe
  source 1..24: mol_type = other DNA
tggttcgattccggctcgaaggac

SEQ ID NO: 12238 - DNA, 23 bp, synthetic construct
  misc_feature 1..23: note = Probe
  source 1..23: mol_type = other DNA
tggttgtagtccgtgcgagaata

SEQ ID NO: 12239 - DNA, 22 bp, synthetic construct
  misc_feature 1..22: note = Probe
  source 1..22: mol_type = other DNA
tggtttttcatatcattggtcg

SEQ ID NO: 12240 - DNA, 28 bp, synthetic construct
  misc_feature 1..28: note = Probe
  source 1..28: mol_type = other DNA
tggtttttcatatcattggtcgtggttg

SEQ ID NO: 12241 - DNA, 29 bp, synthetic construct
  misc_feature 1..29: note = Probe
  source 1..29: mol_type = other DNA
tggtttttcatatcattggtcgtggttgt

SEQ ID NO: 12242 - DNA, 28 bp, synthetic construct
  misc_feature 1..28: note = Probe
  source 1..28: mol_type = other DNA
tgtaaatatagtttaaccaaaacatcag

SEQ ID NO: 12243 - DNA, 19 bp, synthetic construct
  misc_feature 1..19: note = Probe
  source 1..19: mol_type = other DNA
tgtaatggttagcactctg

SEQ ID NO: 12244 - DNA, 20 bp, synthetic construct
  misc_feature 1..20: note = Probe
  source 1..20: mol_type = other DNA
tgtaatggttagcactctgg

SEQ ID NO: 12245 - DNA, 21 bp, synthetic construct
  misc_feature 1..21: note = Probe
  source 1..21: mol_type = other DNA
tgtaatggttagcactctgga

SEQ ID NO: 12246 - DNA, 22 bp, synthetic construct
  misc_feature 1..22: note = Probe
  source 1..22: mol_type = other DNA
tgtaatggttagcactctggac

SEQ ID NO: 12247 - DNA, 23 bp, synthetic construct
  misc_feature 1..23: note = Probe
  source 1..23: mol_type = other DNA
tgtaatggttagcactctggact

SEQ ID NO: 12248 - DNA, 24 bp, synthetic construct
  misc_feature 1..24: note = Probe
  source 1..24: mol_type = other DNA
tgtaatggttagcactctggactc

SEQ ID NO: 12249 - DNA, 25 bp, synthetic construct
  misc_feature 1..25: note = Probe
  source 1..25: mol_type = other DNA
tgtaatggttagcactctggactct

SEQ ID NO: 12250 - DNA, 27 bp, synthetic construct
  misc_feature 1..27: note = Probe
  source 1..27: mol_type = other DNA
tgtaatggttagcactctggactctga

SEQ ID NO: 12251 - DNA, 24 bp, synthetic construct
  misc_feature 1..24: note = Probe
  source 1..24: mol_type = other DNA
tgtaatggttagcactctggactt

SEQ ID NO: 12252 - DNA, 25 bp, synthetic construct
  misc_feature 1..25: note = Probe
  source 1..25: mol_type = other DNA
tgtaatggttagcactctggacttt

SEQ ID NO: 12253 - DNA, 19 bp, synthetic construct
  misc_feature 1..19: note = Probe
  source 1..19: mol_type = other DNA
tgtagtccgtgcgagaata

SEQ ID NO: 12254 - DNA, 19 bp, synthetic construct
  misc_feature 1..19: note = Probe
  source 1..19: mol_type = other DNA
tgtagtcgtggccgagtgg

SEQ ID NO: 12255 - DNA, 20 bp, synthetic construct
  misc_feature 1..20: note = Probe
  source 1..20: mol_type = other DNA
tgtgaatctgacaacagagg

SEQ ID NO: 12256 - DNA, 23 bp, synthetic construct
  misc_feature 1..23: note = Probe
  source 1..23: mol_type = other DNA
tgtgaatctgacaacagaggctt

SEQ ID NO: 12257 - DNA, 22 bp, synthetic construct
  misc_feature 1..22: note = Probe
  source 1..22: mol_type = other DNA
tgtgctccggagttacctcgtt

SEQ ID NO: 12258 - DNA, 23 bp, synthetic construct
  misc_feature 1..23: note = Probe
  source 1..23: mol_type = other DNA
tgtgctccggagttacctcgttt

SEQ ID NO: 12259 - DNA, 24 bp, synthetic construct
  misc_feature 1..24: note = Probe
  source 1..24: mol_type = other DNA
tgtgctccggagttacctcgtttt

SEQ ID NO: 12260 - DNA, 26 bp, synthetic construct
  misc_feature 1..26: note = Probe
  source 1..26: mol_type = other DNA
tgtgggtttaagtcccattggtctag

SEQ ID NO: 12261 - DNA, 15 bp, synthetic construct
  misc_feature 1..15: note = Probe
  source 1..15: mol_type = other DNA
tgtttagacgggctc

SEQ ID NO: 12262 - DNA, 17 bp, synthetic construct
  misc_feature 1..17: note = Probe
  source 1..17: mol_type = other DNA
tgtttagacgggctcac

SEQ ID NO: 12263 - DNA, 19 bp, synthetic construct
  misc_feature 1..19: note = Probe
  source 1..19: mol_type = other DNA
tgtttagacgggctcacat

SEQ ID NO: 12264 - DNA, 19 bp, synthetic construct
  misc_feature 1..19: note = Probe
  source 1..19: mol_type = other DNA
ttaaagactttttctctga

SEQ ID NO: 12265 - DNA, 20 bp, synthetic construct
  misc_feature 1..20: note = Probe
  source 1..20: mol_type = other DNA
ttaaagactttttctctgat

SEQ ID NO: 12266 - DNA, 22 bp, synthetic construct
  misc_feature 1..22: note = Probe
  source 1..22: mol_type = other DNA
ttaaccgaaaggttggtggttc

SEQ ID NO: 12267 - DNA, 23 bp, synthetic construct
  misc_feature 1..23: note = Probe
  source 1..23: mol_type = other DNA
ttaaccgaaaggttggtggttcg

SEQ ID NO: 12268 - DNA, 24 bp, synthetic construct
  misc_feature 1..24: note = Probe
  source 1..24: mol_type = other DNA
ttaaccgaaaggttggtggttcga

SEQ ID NO: 12269 - DNA, 15 bp, synthetic construct
  misc_feature 1..15: note = Probe
  source 1..15: mol_type = other DNA
ttaacttgaccgctc

SEQ ID NO: 12270 - DNA, 16 bp, synthetic construct
  misc_feature 1..16: note = Probe
  source 1..16: mol_type = other DNA
ttaacttgaccgctct

SEQ ID NO: 12271 - DNA, 17 bp, synthetic construct
  misc_feature 1..17: note = Probe
  source 1..17: mol_type = other DNA
ttaacttgaccgctctg

SEQ ID NO: 12272 - DNA, 18 bp, synthetic construct
  misc_feature 1..18: note = Probe
  source 1..18: mol_type = other DNA
ttaacttgaccgctctga

SEQ ID NO: 12273 - DNA, 19 bp, synthetic construct
  misc_feature 1..19: note = Probe
  source 1..19: mol_type = other DNA
ttaacttgaccgctctgag

SEQ ID NO: 12274 - DNA, 20 bp, synthetic construct
  misc_feature 1..20: note = Probe
  source 1..20: mol_type = other DNA
ttaacttgaccgctctgagc

SEQ ID NO: 12275 - DNA, 21 bp, synthetic construct
  misc_feature 1..21: note = Probe
  source 1..21: mol_type = other DNA
ttaacttgaccgctctgagct

SEQ ID NO: 12276 - DNA, 30 bp, synthetic construct
  misc_feature 1..30: note = Probe
  source 1..30: mol_type = other DNA
ttaagagaaccaacacctctttacagtgaa

SEQ ID NO: 12277 - DNA, 21 bp, synthetic construct
  misc_feature 1..21: note = Probe
  source 1..21: mol_type = other DNA
ttaaggctccagtctcttcgg

SEQ ID NO: 12278 - DNA, 22 bp, synthetic construct
  misc_feature 1..22: note = Probe
  source 1..22: mol_type = other DNA
ttaaggctccagtctcttcggg

SEQ ID NO: 12279 - DNA, 18 bp, synthetic construct
  misc_feature 1..18: note = Probe
  source 1..18: mol_type = other DNA
ttaatctcagggtcgtgg

SEQ ID NO: 12280 - DNA, 29 bp, synthetic construct
  misc_feature 1..29: note = Probe
  source 1..29: mol_type = other DNA
ttacacttaggagatttcaacttaacttg

SEQ ID NO: 12281 - DNA, 15 bp, synthetic construct
  misc_feature 1..15: note = Probe
  source 1..15: mol_type = other DNA
ttagcactctggact

SEQ ID NO: 12282 - DNA, 16 bp, synthetic construct
  misc_feature 1..16: note = Probe
  source 1..16: mol_type = other DNA
ttagcactctggactc

SEQ ID NO: 12283 - DNA, 17 bp, synthetic construct
  misc_feature 1..17: note = Probe
  source 1..17: mol_type = other DNA
ttagcactctggactct

SEQ ID NO: 12284 - DNA, 18 bp, synthetic construct
  misc_feature 1..18: note = Probe
  source 1..18: mol_type = other DNA
ttagcactctggactctg

SEQ ID NO: 12285 - DNA, 19 bp, synthetic construct
  misc_feature 1..19: note = Probe
  source 1..19: mol_type = other DNA
ttagcactctggactctga

SEQ ID NO: 12286 - DNA, 20 bp, synthetic construct
  misc_feature 1..20: note = Probe
  source 1..20: mol_type = other DNA
ttagcactctggactctgaa

SEQ ID NO: 12287 - DNA, 24 bp, synthetic construct
  misc_feature 1..24: note = Probe
  source 1..24: mol_type = other DNA
ttagcactctggactctgaatcca

SEQ ID NO: 12288 - DNA, 26 bp, synthetic construct
  misc_feature 1..26: note = Probe
  source 1..26: mol_type = other DNA
ttagcactctggactctgaatccagc

SEQ ID NO: 12289 - DNA, 27 bp, synthetic construct
  misc_feature 1..27: note = Probe
  source 1..27: mol_type = other DNA
ttagcactctggactctgaatccagcg

SEQ ID NO: 12290 - DNA, 18 bp, synthetic construct
  misc_feature 1..18: note = Probe
  source 1..18: mol_type = other DNA
ttagcactctggactttg

SEQ ID NO: 12291 - DNA, 19 bp, synthetic construct
  misc_feature 1..19: note = Probe
  source 1..19: mol_type = other DNA
ttagcactctggactttga

SEQ ID NO: 12292 - DNA, 20 bp, synthetic construct
  misc_feature 1..20: note = Probe
  source 1..20: mol_type = other DNA
ttagcactctggactttgaa

SEQ ID NO: 12293 - DNA, 21 bp, synthetic construct
  misc_feature 1..21: note = Probe
  source 1..21: mol_type = other DNA
ttagcactctggactttgaat

SEQ ID NO: 12294 - DNA, 22 bp, synthetic construct
  misc_feature 1..22: note = Probe
  source 1..22: mol_type = other DNA
ttagcactctggactttgaatc

SEQ ID NO: 12295 - DNA, 23 bp, synthetic construct
  misc_feature 1..23: note = Probe
  source 1..23: mol_type = other DNA
ttagcactctggactttgaatcc

SEQ ID NO: 12296 - DNA, 26 bp, synthetic construct
  misc_feature 1..26: note = Probe
  source 1..26: mol_type = other DNA
ttaggagatttcaacttaacttgacc

SEQ ID NO: 12297 - DNA, 27 bp, synthetic construct
  misc_feature 1..27: note = Probe
  source 1..27: mol_type = other DNA
ttaggagatttcaacttaacttgaccg

SEQ ID NO: 12298 - DNA, 29 bp, synthetic construct
  misc_feature 1..29: note = Probe
  source 1..29: mol_type = other DNA
ttaggagatttcaacttaacttgaccgct

SEQ ID NO: 12299 - DNA, 30 bp, synthetic construct; identical to SEQ ID NO: 8367
  misc_feature 1..30: note = Probe
  source 1..30: mol_type = other DNA

SEQ ID NO: 12300 - DNA, 23 bp, synthetic construct
  misc_feature 1..23: note = Probe
  source 1..23: mol_type = other DNA
ttaggatgcgagaggtcccgggt

SEQ ID NO: 12301 - DNA, 19 bp, synthetic construct
  misc_feature 1..19: note = Probe
  source 1..19: mol_type = other DNA
ttagggtgcgagaggtccc

SEQ ID NO: 12302 - DNA, 20 bp, synthetic construct
  misc_feature 1..20: note = Probe
  source 1..20: mol_type = other DNA
ttagggtgcgagaggtcccg

SEQ ID NO: 12303 - DNA, 21 bp, synthetic construct
  misc_feature 1..21: note = Probe
  source 1..21: mol_type = other DNA
ttagggtgcgagaggtcccgg

SEQ ID NO: 12304 - DNA, 22 bp, synthetic construct
  misc_feature 1..22: note = Probe
  source 1..22: mol_type = other DNA
ttagggtgcgagaggtcccggg

SEQ ID NO: 12305 - DNA, 23 bp, synthetic construct
  misc_feature 1..23: note = Probe
  source 1..23: mol_type = other DNA
ttagggtgcgagaggtcccgggt

SEQ ID NO: 12306 - DNA, 24 bp, synthetic construct
  misc_feature 1..24: note = Probe
  source 1..24: mol_type = other DNA
ttagggtgcgagaggtcccgggtt

SEQ ID NO: 12307 - DNA, 30 bp, synthetic construct
  misc_feature 1..30: note = Probe
  source 1..30: mol_type = other DNA
ttaggtcgctggttcgattccggctcgaag

SEQ ID NO: 12308 - DNA, 16 bp, synthetic construct
  misc_feature 1..16: note = Probe
  source 1..16: mol_type = other DNA
ttagtactctgcgttg

SEQ ID NO: 12309 - DNA, 17 bp, synthetic construct
  misc_feature 1..17: note = Probe
  source 1..17: mol_type = other DNA
ttagtactctgcgttgt

SEQ ID NO: 12310 - DNA, 20 bp, synthetic construct
  misc_feature 1..20: note = Probe
  source 1..20: mol_type = other DNA
ttagtactctgcgttgtggc

SEQ ID NO: 12311 - DNA, 21 bp, synthetic construct
  misc_feature 1..21: note = Probe
  source 1..21: mol_type = other DNA
ttagtactctgcgttgtggcc

SEQ ID NO: 12312 - DNA, 22 bp, synthetic construct
  misc_feature 1..22: note = Probe
  source 1..22: mol_type = other DNA
ttagtactctgcgttgtggccg

SEQ ID NO: 12313 - DNA, 23 bp, synthetic construct
  misc_feature 1..23: note = Probe
  source 1..23: mol_type = other DNA
ttagtactctgcgttgtggccgc

SEQ ID NO: 12314 - DNA, 21 bp, synthetic construct
  misc_feature 1..21: note = Probe
  source 1..21: mol_type = other DNA
ttagtggtagaattctcgcct

SEQ ID NO: 12315 - DNA, 29 bp, synthetic construct
  misc_feature 1..29: note = Probe
  source 1..29: mol_type = other DNA
ttcaaaggttccgggttcgagtcccggcg

SEQ ID NO: 12316 - DNA, 30 bp, synthetic construct
  misc_feature 1..30: note = Probe
  source 1..30: mol_type = other DNA
ttcaaaggttccgggttcgagtcccggcgg

SEQ ID NO: 12317 - DNA, 30 bp, synthetic construct
  misc_feature 1..30: note = Probe
  source 1..30: mol_type = other DNA
ttcaaaggttgtgggttcgaatcccaccag

SEQ ID NO: 12318 - DNA, 30 bp, synthetic construct
  misc_feature 1..30: note = Probe
  source 1..30: mol_type = other DNA
ttcaaaggttgtgggttcgagtcccaccag

SEQ ID NO: 12319 - DNA, 17 bp, synthetic construct
  misc_feature 1..17: note = Probe
  source 1..17: mol_type = other DNA
ttcaaatcccggacgag

SEQ ID NO: 12320 - DNA, 23 bp, synthetic construct
  misc_feature 1..23: note = Probe
  source 1..23: mol_type = other DNA
ttcaaatctcggtggaacctgca

SEQ ID NO: 12321 - DNA, 18 bp, synthetic construct
  misc_feature 1..18: note = Probe
  source 1..18: mol_type = other DNA
ttcaacttaacttgaccg

SEQ ID NO: 12322 - DNA, 23 bp, synthetic construct
  misc_feature 1..23: note = Probe
  source 1..23: mol_type = other DNA
ttcaacttaacttgaccgctctg

SEQ ID NO: 12323 - DNA, 24 bp, synthetic construct
  misc_feature 1..24: note = Probe
  source 1..24: mol_type = other DNA
ttcaacttaacttgaccgctctga

SEQ ID NO: 12324 - DNA, 25 bp, synthetic construct
  misc_feature 1..25: note = Probe
  source 1..25: mol_type = other DNA
ttcaacttaacttgaccgctctgag

SEQ ID NO: 12325 - DNA, 26 bp, synthetic construct
  misc_feature 1..26: note = Probe
  source 1..26: mol_type = other DNA
ttcaacttaacttgaccgctctgagc

SEQ ID NO: 12326 - DNA, 23 bp, synthetic construct
  misc_feature 1..23: note = Probe
  source 1..23: mol_type = other DNA
ttcaatccccggcacctccacca

SEQ ID NO: 12327 - DNA, 23 bp, synthetic construct
  misc_feature 1..23: note = Probe
  source 1..23: mol_type = other DNA
ttcaattcccggtcagggaacca

SEQ ID NO: 12328 - DNA, 17 bp, synthetic construct
  misc_feature 1..17: note = Probe
  source 1..17: mol_type = other DNA
ttcaggtcgcagtctcc

SEQ ID NO: 12329 - DNA, 17 bp, synthetic construct
  misc_feature 1..17: note = Probe
  source 1..17: mol_type = other DNA
ttcagtggtagaattct

SEQ ID NO: 12330 - DNA, 18 bp, synthetic construct
  misc_feature 1..18: note = Probe
  source 1..18: mol_type = other DNA
ttcagtggtagaattctc

SEQ ID NO: 12331 - DNA, 19 bp, synthetic construct
  misc_feature 1..19: note = Probe
  source 1..19: mol_type = other DNA
ttcagtggtagaattctcg

SEQ ID NO: 12332 - DNA, 20 bp, synthetic construct
  misc_feature 1..20: note = Probe
  source 1..20: mol_type = other DNA
ttcagtggtagaattctcgc

SEQ ID NO: 12333 - DNA, 21 bp, synthetic construct
  misc_feature 1..21: note = Probe
  source 1..21: mol_type = other DNA
ttcagtggtagaattctcgcc

SEQ ID NO: 12334 - DNA, 22 bp, synthetic construct
  misc_feature 1..22: note = Probe
  source 1..22: mol_type = other DNA
ttcagtggtagaattctcgcct

SEQ ID NO: 12335 - DNA, 23 bp, synthetic construct
  misc_feature 1..23: note = Probe
  source 1..23: mol_type = other DNA
ttcagtggtagaattctcgcctg

SEQ ID NO: 12336 - DNA, 24 bp, synthetic construct
  misc_feature 1..24: note = Probe
  source 1..24: mol_type = other DNA
ttcagtggtagaattctcgcctgc

SEQ ID NO: 12337 - DNA, 30 bp, synthetic construct
  misc_feature 1..30: note = Probe
  source 1..30: mol_type = other DNA
ttcagttgatgcagagtggggttttgcagt

SEQ ID NO: 12338 - DNA, 30 bp, synthetic construct
  misc_feature 1..30: note = Probe
  source 1..30: mol_type = other DNA
ttcatatcattggtcgtggttgtagtccgt

SEQ ID NO: 12339 - DNA, 27 bp, synthetic construct
  misc_feature 1..27: note = Probe
  source 1..27: mol_type = other DNA
ttccatggtgtaatggttagcactctg

SEQ ID NO: 12340 - DNA, 30 bp, synthetic construct
  misc_feature 1..30: note = Probe
  source 1..30: mol_type = other DNA
ttccatggtgtaatggttagcactctggac

SEQ ID NO: 12341 - DNA, 23 bp, synthetic construct
  misc_feature 1..23: note = Probe
  source 1..23: mol_type = other DNA
ttcccatatggtctagcggttag

SEQ ID NO: 12342 - DNA, 18 bp, synthetic construct
  misc_feature 1..18: note = Probe
  source 1..18: mol_type = other DNA
ttccccgacggggaggca

SEQ ID NO: 12343 - DNA, 18 bp, synthetic construct
  misc_feature 1..18: note = Probe
  source 1..18: mol_type = other DNA
ttcccggtcagggaacca

SEQ ID NO: 12344 - DNA, 30 bp, synthetic construct
  misc_feature 1..30: note = Probe
  source 1..30: mol_type = other DNA
ttccctggtggtctagtggttaggattcgg

SEQ ID NO: 12345 - DNA, 15 bp, synthetic construct
  misc_feature 1..15: note = Probe
  source 1..15: mol_type = other DNA
ttccggctcgaagga

SEQ ID NO: 12346 - DNA, 16 bp, synthetic construct
  misc_feature 1..16: note = Probe
  source 1..16: mol_type = other DNA
ttccggctcgaaggac

SEQ ID NO: 12347 - DNA, 17 bp, synthetic construct
  misc_feature 1..17: note = Probe
  source 1..17: mol_type = other DNA
ttccggctcgaaggact

SEQ ID NO: 12348 - DNA, 18 bp, synthetic construct
  misc_feature 1..18: note = Probe
  source 1..18: mol_type = other DNA
ttccggctcgaaggactt

SEQ ID NO: 12349 - DNA, 17 bp, synthetic construct
  misc_feature 1..17: note = Probe
  source 1..17: mol_type = other DNA
ttccggctcgaaggaga

SEQ ID NO: 12350 - DNA, 17 bp, synthetic construct
  misc_feature 1..17: note = Probe
  source 1..17: mol_type = other DNA
ttccggctcgaaggagc

SEQ ID NO: 12351 - DNA, 17 bp, synthetic construct
  misc_feature 1..17: note = Probe
  source 1..17: mol_type = other DNA
ttccgtgggtttgtttt

SEQ ID NO: 12352 - DNA, 18 bp, synthetic construct
  misc_feature 1..18: note = Probe
  source 1..18: mol_type = other DNA
ttccgtgggtttgttttt

SEQ ID NO: 12353 - DNA, 21 bp, synthetic construct
  misc_feature 1..21: note = Probe
  source 1..21: mol_type = other DNA
ttcgaaaccgggcggaaacac

SEQ ID NO: 12354 - DNA, 22 bp, synthetic construct
  misc_feature 1..22: note = Probe
  source 1..22: mol_type = other DNA
ttcgaaaccgggcggaaacacc

SEQ ID NO: 12355 - DNA, 23 bp, synthetic construct
  misc_feature 1..23: note = Probe
  source 1..23: mol_type = other DNA
ttcgaaaccgggcggaaacacct

SEQ ID NO: 12356 - DNA, 21 bp, synthetic construct
  misc_feature 1..21: note = Probe
  source 1..21: mol_type = other DNA
ttcgactcctggctggctcgc

SEQ ID NO: 12357 - DNA, 21 bp, synthetic construct
  misc_feature 1..21: note = Probe
  source 1..21: mol_type = other DNA
ttcgatcccgggtttcggcac

SEQ ID NO: 12358 - DNA, 21 bp, synthetic construct
  misc_feature 1..21: note = Probe
  source 1..21: mol_type = other DNA
ttcgattccccgacggggaga

SEQ ID NO: 12359 - DNA, 21 bp, synthetic construct
  misc_feature 1..21: note = Probe
  source 1..21: mol_type = other DNA
ttcgattccccgacggggagg

SEQ ID NO: 12360 - DNA, 23 bp, synthetic construct
  misc_feature 1..23: note = Probe
  source 1..23: mol_type = other DNA
ttcgattccccgacggggaggca

SEQ ID NO: 12361 - DNA, 23 bp, synthetic construct
  misc_feature 1..23: note = Probe
  source 1..23: mol_type = other DNA
ttcgattcccggtcagggaacaa

SEQ ID NO: 12362 - DNA, 23 bp, synthetic construct
  misc_feature 1..23: note = Probe
  source 1..23: mol_type = other DNA
ttcgattcccggtcatggaacca

SEQ ID NO: 12363 - DNA, 21 bp, synthetic construct
  misc_feature 1..21: note = Probe
  source 1..21: mol_type = other DNA
ttcgattccggctcgaaggac

SEQ ID NO: 12364 - DNA, 23 bp, synthetic construct
  misc_feature 1..23: note = Probe
  source 1..23: mol_type = other DNA
ttcgattcctggtcagggaacca

SEQ ID NO: 12365 - DNA, 19 bp, synthetic construct
  misc_feature 1..19: note = Probe
  source 1..19: mol_type = other DNA
ttcgggtgcgagaggtccc

SEQ ID NO: 12366 - DNA, 20 bp, synthetic construct
  misc_feature 1..20: note = Probe
  source 1..20: mol_type = other DNA
ttcgggtgcgagaggtcccg

SEQ ID NO: 12367 - DNA, 21 bp, synthetic construct
  misc_feature 1..21: note = Probe
  source 1..21: mol_type = other DNA
ttcgggtgcgagaggtcccgg

SEQ ID NO: 12368 - DNA, 22 bp, synthetic construct
  misc_feature 1..22: note = Probe
  source 1..22: mol_type = other DNA
ttcgggtgcgagaggtcccggg

SEQ ID NO: 12369 - DNA, 23 bp, synthetic construct
  misc_feature 1..23: note = Probe
  source 1..23: mol_type = other DNA
ttcgggtgcgagaggtcccgggt

SEQ ID NO: 12370 - DNA, 24 bp, synthetic construct
  misc_feature 1..24: note = Probe
  source 1..24: mol_type = other DNA
ttcgggtgcgagaggtcccgggtt

SEQ ID NO: 12371 - DNA, 15 bp, synthetic construct
  misc_feature 1..15: note = Probe
  source 1..15: mol_type = other DNA
ttcgtctgtaatttt

SEQ ID NO: 12372 - DNA, 15 bp, synthetic construct
  misc_feature 1..15: note = Probe
  source 1..15: mol_type = other DNA
ttctcgcctgccacg

SEQ ID NO: 12373 - DNA, 17 bp, synthetic construct
  misc_feature 1..17: note = Probe
  source 1..17: mol_type = other DNA
ttctgacacattcgttt

SEQ ID NO: 12374 - DNA, 30 bp, synthetic construct
  misc_feature 1..30: note = Probe
  source 1..30: mol_type = other DNA
ttcttgcgacccgggttcgattcccgggcg

SEQ ID NO: 12375 - DNA, 17 bp, synthetic construct
  misc_feature 1..17: note = Probe
  source 1..17: mol_type = other DNA
ttgccatgttaacgttt

SEQ ID NO: 12376 - DNA, 18 bp, synthetic construct
  misc_feature 1..18: note = Probe
  source 1..18: mol_type = other DNA
ttgccatgttaacgtttt

SEQ ID NO: 12377 - DNA, 22 bp, synthetic construct
  misc_feature 1..22: note = Probe
  source 1..22: mol_type = other DNA
ttgcgtgttcaagtcacgtcgg

SEQ ID NO: 12378 - DNA, 26 bp, synthetic construct
  misc_feature 1..26: note = Probe
  source 1..26: mol_type = other DNA
ttggcctcctaagccagggattgtgg

SEQ ID NO: 12379 - DNA, 18 bp, synthetic construct
  misc_feature 1..18: note = Probe
  source 1..18: mol_type = other DNA
ttgggtccgagaggtccc

SEQ ID NO: 12380 - DNA, 21 bp, synthetic construct
  misc_feature 1..21: note = Probe
  source 1..21: mol_type = other DNA
ttgggtccgagaggtcccggg

SEQ ID NO: 12381 - DNA, 23 bp, synthetic construct
  misc_feature 1..23: note = Probe
  source 1..23: mol_type = other DNA
ttgggtgcgagaggtcccgggtt

SEQ ID NO: 12382 - DNA, 21 bp, synthetic construct
  misc_feature 1..21: note = Probe
  source 1..21: mol_type = other DNA
ttgggtgctaatggtggagtt

SEQ ID NO: 12383 - DNA, 22 bp, synthetic construct
  misc_feature 1..22: note = Probe
  source 1..22: mol_type = other DNA
ttgggtgctaatggtggagtta

SEQ ID NO: 12384 - DNA, 22 bp, synthetic construct
  misc_feature 1..22: note = Probe
  source 1..22: mol_type = other DNA
ttggtagagcggaggactgtag

SEQ ID NO: 12385 - DNA, 15 bp, synthetic construct
  misc_feature 1..15: note = Probe
  source 1..15: mol_type = other DNA
ttggtcgtggttgta

SEQ ID NO: 12386 - DNA, 16 bp, synthetic construct
  misc_feature 1..16: note = Probe
  source 1..16: mol_type = other DNA
ttggtcgtggttgtag

SEQ ID NO: 12387 - DNA, 17 bp, synthetic construct
  misc_feature 1..17: note = Probe
  source 1..17: mol_type = other DNA
ttggtcgtggttgtagt

SEQ ID NO: 12388 - DNA, 28 bp, synthetic construct
  misc_feature 1..28: note = Probe
  source 1..28: mol_type = other DNA
ttggtcgtggttgtagtccgtgcgagaa

SEQ ID NO: 12389 - DNA, 24 bp, synthetic construct
  misc_feature 1..24: note = Probe
  source 1..24: mol_type = other DNA
ttggtctaggggtatgattctcgc

SEQ ID NO: 12390 - DNA, 18 bp, synthetic construct
  misc_feature 1..18: note = Probe
  source 1..18: mol_type = other DNA
ttggtggttcagtggtag

SEQ ID NO: 12391 - DNA, 19 bp, synthetic construct
  misc_feature 1..19: note = Probe
  source 1..19: mol_type = other DNA
ttggtggttcagtggtaga

SEQ ID NO: 12392 - DNA, 20 bp, synthetic construct
  misc_feature 1..20: note = Probe
  source 1..20: mol_type = other DNA
ttggtggttcagtggtagaa

SEQ ID NO: 12393 - DNA, 21 bp, synthetic construct
  misc_feature 1..21: note = Probe
  source 1..21: mol_type = other DNA
ttggtggttcagtggtagaat

SEQ ID NO: 12394 - DNA, 22 bp, synthetic construct
  misc_feature 1..22: note = Probe
  source 1..22: mol_type = other DNA
ttggtggttcagtggtagaatt

SEQ ID NO: 12395 - DNA, 23 bp, synthetic construct
  misc_feature 1..23: note = Probe
  source 1..23: mol_type = other DNA
ttggtggttcagtggtagaattc

SEQ ID NO: 12396 - DNA, 24 bp, synthetic construct
  misc_feature 1..24: note = Probe
  source 1..24: mol_type = other DNA
ttggtggttcagtggtagaattct

SEQ ID NO: 12397 - DNA, 25 bp, synthetic construct
  misc_feature 1..25: note = Probe
  source 1..25: mol_type = other DNA
ttggtggttcagtggtagaattctc

SEQ ID NO: 12398 - DNA, 26 bp, synthetic construct
  misc_feature 1..26: note = Probe
  source 1..26: mol_type = other DNA
ttggtggttcagtggtagaattctcg

SEQ ID NO: 12399 - DNA, 27 bp, synthetic construct
  misc_feature 1..27: note = Probe
  source 1..27: mol_type = other DNA
ttggtggttcagtggtagaattctcgc

SEQ ID NO: 12400 - DNA, 28 bp, synthetic construct
  misc_feature 1..28: note = Probe
  source 1..28: mol_type = other DNA
ttggtggttcagtggtagaattctcgcc

SEQ ID NO: 12401 - DNA, 29 bp, synthetic construct
  misc_feature 1..29: note = Probe
  source 1..29: mol_type = other DNA
ttggtggttcagtggtagaattctcgcct

SEQ ID NO: 12402 - DNA, 30 bp, synthetic construct; identical to SEQ ID NO: 8491
  misc_feature 1..30: note = Probe
  source 1..30: mol_type = other DNA

SEQ ID NO: 12403 - DNA, 29 bp, synthetic construct
  misc_feature 1..29: note = Probe
  source 1..29: mol_type = other DNA
ttggtggttcgagcccacccagggacgcc

SEQ ID NO: 12404 - DNA, 19 bp, synthetic construct
  misc_feature 1..19: note = Probe
  source 1..19: mol_type = other DNA
ttgtaaaccaggggtcgcg

SEQ ID NO: 12405 - DNA, 22 bp, synthetic construct
  misc_feature 1..22: note = Probe
  source 1..22: mol_type = other DNA
ttgtaaaccaggggtcgcgagt

SEQ ID NO: 12406 - DNA, 20 bp, synthetic construct
  misc_feature 1..20: note = Probe
  source 1..20: mol_type = other DNA
ttgtagtccgtgcgagaata

SEQ ID NO: 12407 - DNA, 15 bp, synthetic construct
  misc_feature 1..15: note = Probe
  source 1..15: mol_type = other DNA
ttgtgaatctgacaa

SEQ ID NO: 12408 - DNA, 16 bp, synthetic construct
  misc_feature 1..16: note = Probe
  source 1..16: mol_type = other DNA
ttgtgaatctgacaac

SEQ ID NO: 12409 - DNA, 17 bp, synthetic construct
  misc_feature 1..17: note = Probe
  source 1..17: mol_type = other DNA
ttgtgaatctgacaaca

SEQ ID NO: 12410 - DNA, 18 bp, synthetic construct
  misc_feature 1..18: note = Probe
  source 1..18: mol_type = other DNA
ttgtgaatctgacaacag

SEQ ID NO: 12411 - DNA, 19 bp, synthetic construct
  misc_feature 1..19: note = Probe
  source 1..19: mol_type = other DNA
ttgtgaatctgacaacaga

SEQ ID NO: 12412 - DNA, 20 bp, synthetic construct
  misc_feature 1..20: note = Probe
  source 1..20: mol_type = other DNA
ttgtgaatctgacaacagag

SEQ ID NO: 12413 - DNA, 21 bp, synthetic construct
  misc_feature 1..21: note = Probe
  source 1..21: mol_type = other DNA
ttgtgaatctgacaacagagg

SEQ ID NO: 12414 - DNA, 22 bp, synthetic construct
  misc_feature 1..22: note = Probe
  source 1..22: mol_type = other DNA
ttgtgaatctgacaacagaggc

SEQ ID NO: 12415 - DNA, 23 bp, synthetic construct
  misc_feature 1..23: note = Probe
  source 1..23: mol_type = other DNA
ttgtgaatctgacaacagaggct

SEQ ID NO: 12416 - DNA, 24 bp, synthetic construct
  misc_feature 1..24: note = Probe
  source 1..24: mol_type = other DNA
ttgtgaatctgacaacagaggctt

SEQ ID NO: 12417 - DNA, 25 bp, synthetic construct
  misc_feature 1..25: note = Probe
  source 1..25: mol_type = other DNA
ttgtgaatctgacaacagaggctta

SEQ ID NO: 12418 - DNA, 27 bp, synthetic construct
  misc_feature 1..27: note = Probe
  source 1..27: mol_type = other DNA
ttgtgaatctgacaacagaggcttacg

SEQ ID NO: 12419 - DNA, 30 bp, synthetic construct
  misc_feature 1..30: note = Probe
  source 1..30: mol_type = other DNA
ttgtgaatctgacaacagaggcttacgacc

SEQ ID NO: 12420 - DNA, 23 bp, synthetic construct
  misc_feature 1..23: note = Probe
  source 1..23: mol_type = other DNA
ttgtgaggacaatggcacggcaa

SEQ ID NO: 12421 - DNA, 24 bp, synthetic construct
  misc_feature 1..24: note = Probe
  source 1..24: mol_type = other DNA
ttgtgaggacaatggcacggcaag

SEQ ID NO: 12422 - DNA, 25 bp, synthetic construct
  misc_feature 1..25: note = Probe
  source 1..25: mol_type = other DNA
ttgtgaggacaatggcacggcaagg

SEQ ID NO: 12423 - DNA, 30 bp, synthetic construct
  misc_feature 1..30: note = Probe
  source 1..30: mol_type = other DNA
ttgtgaggacaatggcacggcaaggggagt

SEQ ID NO: 12424 - DNA, 22 bp, synthetic construct
  misc_feature 1..22: note = Probe
  source 1..22: mol_type = other DNA
ttgtggccgcagcaacctcggt

SEQ ID NO: 12425 - DNA, 20 bp, synthetic construct
  misc_feature 1..20: note = Probe
  source 1..20: mol_type = other DNA
ttgtgggaacaatggcacgg

SEQ ID NO: 12426 - DNA, 21 bp, synthetic construct
  misc_feature 1..21: note = Probe
  source 1..21: mol_type = other DNA
ttgtgggaacaatggcacggc

SEQ ID NO: 12427 - DNA, 22 bp, synthetic construct
  misc_feature 1..22: note = Probe
  source 1..22: mol_type = other DNA
ttgtgggaacaatggcacggca

SEQ ID NO: 12428 - DNA, 23 bp, synthetic construct
  misc_feature 1..23: note = Probe
  source 1..23: mol_type = other DNA
ttgtgggaacaatggcacggcaa

SEQ ID NO: 12429 - DNA, 24 bp, synthetic construct
  misc_feature 1..24: note = Probe
  source 1..24: mol_type = other DNA
ttgtgggaacaatggcacggcaag

SEQ ID NO: 12430 - DNA, 25 bp, synthetic construct
  misc_feature 1..25: note = Probe
  source 1..25: mol_type = other DNA
ttgtgggaacaatggcacggcaagg

SEQ ID NO: 12431 - DNA, 30 bp, synthetic construct
  misc_feature 1..30: note = Probe
  source 1..30: mol_type = other DNA
ttgtgggaacaatggcacggcaaggggctc

SEQ ID NO: 12432 - DNA, 23 bp, synthetic construct
  misc_feature 1..23: note = Probe
  source 1..23: mol_type = other DNA
ttgtggtccagtggtagaattct

SEQ ID NO: 12433 - DNA, 24 bp, synthetic construct
  misc_feature 1..24: note = Probe
  source 1..24: mol_type = other DNA
ttgtggtccagtggtagaattctc

SEQ ID NO: 12434 - DNA, 15 bp, synthetic construct
  misc_feature 1..15: note = Probe
  source 1..15: mol_type = other DNA
tttagacgggctcac

SEQ ID NO: 12435 - DNA, 21 bp, synthetic construct
  misc_feature 1..21: note = Probe
  source 1..21: mol_type = other DNA
tttaggctccagtctcttcgg

SEQ ID NO: 12436 - DNA, 22 bp, synthetic construct
  misc_feature 1..22: note = Probe
  source 1..22: mol_type = other DNA
tttaggctccagtctcttcggg

SEQ ID NO: 12437 - DNA, 18 bp, synthetic construct
  misc_feature 1..18: note = Probe
  source 1..18: mol_type = other DNA
tttcaacttaacttgacc

SEQ ID NO: 12438 - DNA, 19 bp, synthetic construct
  misc_feature 1..19: note = Probe
  source 1..19: mol_type = other DNA
tttcaacttaacttgaccg

SEQ ID NO: 12439 - DNA, 22 bp, synthetic construct
  misc_feature 1..22: note = Probe
  source 1..22: mol_type = other DNA
tttcaacttaacttgaccgctc

SEQ ID NO: 12440 - DNA, 24 bp, synthetic construct
  misc_feature 1..24: note = Probe
  source 1..24: mol_type = other DNA
tttcaacttaacttgaccgctctg

SEQ ID NO: 12441 - DNA, 25 bp, synthetic construct
  misc_feature 1..25: note = Probe
  source 1..25: mol_type = other DNA
tttcaacttaacttgaccgctctga

SEQ ID NO: 12442 - DNA, 26 bp, synthetic construct
  misc_feature 1..26: note = Probe
  source 1..26: mol_type = other DNA
tttcaacttaacttgaccgctctgag

SEQ ID NO: 12443 - DNA, 27 bp, synthetic construct
  misc_feature 1..27: note = Probe
  source 1..27: mol_type = other DNA
tttcaacttaacttgaccgctctgagc

SEQ ID NO: 12444 - DNA, 19 bp, synthetic construct
  misc_feature 1..19: note = Probe
  source 1..19: mol_type = other DNA
tttccgtagtgtagtggtc

SEQ ID NO: 12445 - DNA, 19 bp, synthetic construct
  misc_feature 1..19: note = Probe
  source 1..19: mol_type = other DNA
tttgcatgtatgaggcccc

SEQ ID NO: 12446 - DNA, 23 bp, synthetic construct
  misc_feature 1..23: note = Probe
  source 1..23: mol_type = other DNA
tttgcatgtatgaggccccgggt

SEQ ID NO: 12447 - DNA, 19 bp, synthetic construct
  misc_feature 1..19: note = Probe
  source 1..19: mol_type = other DNA
tttgggtccgagaggtccc

SEQ ID NO: 12448 - DNA, 20 bp, synthetic construct
  misc_feature 1..20: note = Probe
  source 1..20: mol_type = other DNA
tttgggtccgagaggtcccg

SEQ ID NO: 12449 - DNA, 21 bp, synthetic construct
  misc_feature 1..21: note = Probe
  source 1..21: mol_type = other DNA
tttgggtccgagaggtcccgg

SEQ ID NO: 12450 - DNA, 23 bp, synthetic construct
  misc_feature 1..23: note = Probe
  source 1..23: mol_type = other DNA
tttgggtccgagaggtcccgggt

SEQ ID NO: 12451 - DNA, 19 bp, synthetic construct
  misc_feature 1..19: note = Probe
  source 1..19: mol_type = other DNA
tttgggtgcgagaggtccc

SEQ ID NO: 12452 - DNA, 20 bp, synthetic construct
  misc_feature 1..20: note = Probe
  source 1..20: mol_type = other DNA
tttgggtgcgagaggtcccg

SEQ ID NO: 12453 - DNA, 21 bp, synthetic construct
  misc_feature 1..21: note = Probe
  source 1..21: mol_type = other DNA
tttgggtgcgagaggtcccgg

SEQ ID NO: 12454 - DNA, 22 bp, synthetic construct
  misc_feature 1..22: note = Probe
  source 1..22: mol_type = other DNA
tttgggtgcgagaggtcccggg

SEQ ID NO: 12455 - DNA, 23 bp, synthetic construct
  misc_feature 1..23: note = Probe
  source 1..23: mol_type = other DNA
tttgggtgcgagaggtcccgggt

SEQ ID NO: 12456 - DNA, 24 bp, synthetic construct
  misc_feature 1..24: note = Probe
  source 1..24: mol_type = other DNA
tttgggtgcgagaggtcccgggtt

SEQ ID NO: 12457 - DNA, 24 bp, synthetic construct
  misc_feature 1..24: note = Probe
  source 1..24: mol_type = other DNA
tttgtggtccagtggtagaattct

SEQ ID NO: 12458 - DNA, 30 bp, synthetic construct
  misc_feature 1..30: note = Probe
  source 1..30: mol_type = other DNA
ttttcatatcattggtcgtggttgtagtcc

SEQ ID NO: 12459 - DNA, 30 bp, synthetic construct
  misc_feature 1..30: note = Probe
  source 1..30: mol_type = other DNA
tttttcatatcattggtcgtggttgtagtc

SEQ ID NO: 12460 - DNA, 16 bp, synthetic construct
  misc_feature 1..16: note = Probe
  source 1..16: mol_type = other DNA
tttttcccggcggcgg

SEQ ID NO: 12461 - DNA, 17 bp, synthetic construct
  misc_feature 1..17: note = Probe
  source 1..17: mol_type = other DNA
ttttttcccggcggcgg

SEQ ID NO: 12462 - DNA, 50 bp, synthetic construct; identical to SEQ ID NO: 4
  misc_feature 1..50: note = Probe
  source 1..50: mol_type = other DNA

SEQ ID NO: 12463 - DNA, 50 bp, synthetic construct; identical to SEQ ID NO: 14
  misc_feature 1..50: note = Probe
  source 1..50: mol_type = other DNA

SEQ ID NO: 12464 - DNA, 28 bp, synthetic construct
  misc_feature 1..28: note = Probe
  source 1..28: mol_type = other DNA
aaagacaggggttaggcctctttttacc

SEQ ID NO: 12465 - DNA, 28 bp, synthetic construct
  misc_feature 1..28: note = Probe
  source 1..28: mol_type = other DNA
aaagcaatacactgaaaatgtttagacg

SEQ ID NO: 12466 - DNA, 36 bp, synthetic construct; identical to SEQ ID NO: 21
  misc_feature 1..36: note = Probe
  source 1..36: mol_type = other DNA

SEQ ID NO: 12467 - DNA, 44 bp, synthetic construct; identical to SEQ ID NO: 22
  misc_feature 1..44: note = Probe
  source 1..44: mol_type = other DNA

SEQ ID NO: 12468 - DNA, 49 bp, synthetic construct; identical to SEQ ID NO: 24
  misc_feature 1..49: note = Probe
  source 1..49: mol_type = other DNA

SEQ ID NO: 12469 - DNA, 50 bp, synthetic construct; identical to SEQ ID NO: 25
  misc_feature 1..50: note = Probe
  source 1..50: mol_type = other DNA

SEQ ID NO: 12470 - DNA, 30 bp, synthetic construct
  misc_feature 1..30: note = Probe
  source 1..30: mol_type = other DNA
aaaggttggtggttcgagcccacccaggga

SEQ ID NO: 12471 - DNA, 34 bp, synthetic construct; identical to SEQ ID NO: 33
  misc_feature 1..34: note = Probe
  source 1..34: mol_type = other DNA

SEQ ID NO: 12472 - DNA, 35 bp, synthetic construct; identical to SEQ ID NO: 34
  misc_feature 1..35: note = Probe
  source 1..35: mol_type = other DNA

SEQ ID NO: 12473 - DNA, 41 bp, synthetic construct; identical to SEQ ID NO: 37
  misc_feature 1..41: note = Probe
  source 1..41: mol_type = other DNA

SEQ ID NO: 12474 - DNA, 33 bp, synthetic construct; identical to SEQ ID NO: 2047
  misc_feature 1..33: note = Probe
  source 1..33: mol_type = other DNA

SEQ ID NO: 12475 - DNA, 50 bp, synthetic construct; identical to SEQ ID NO: 42
  misc_feature 1..50: note = Probe
  source 1..50: mol_type = other DNA

SEQ ID NO: 12476 - DNA, 50 bp, synthetic construct; identical to SEQ ID NO: 47
  misc_feature 1..50: note = Probe
  source 1..50: mol_type = other DNA

SEQ ID NO: 12477 - DNA, 17 bp, synthetic construct
  misc_feature 1..17: note = Probe
  source 1..17: mol_type = other DNA
aaccggagatgaaaacc

SEQ ID NO: 12478 - DNA, 20 bp, synthetic construct
  misc_feature 1..20: note = Probe
  source 1..20: mol_type = other DNA
aaccggagatgaaaaccttt

SEQ ID NO: 12479 - DNA, 27 bp, synthetic construct
  misc_feature 1..27: note = Probe
  source 1..27: mol_type = other DNA
aaccggagatgaaaacctttttccaag

SEQ ID NO: 12480 - DNA, 29 bp, synthetic construct
  misc_feature 1..29: note = Probe
  source 1..29: mol_type = other DNA
aaccggagatgaaaacctttttccaagga

SEQ ID NO: 12481 - DNA, 31 bp, synthetic construct; identical to SEQ ID NO: 53
  misc_feature 1..31: note = Probe
  source 1..31: mol_type = other DNA

SEQ ID NO: 12482 - DNA, 16 bp, synthetic construct
  misc_feature 1..16: note = Probe
  source 1..16: mol_type = other DNA
aaccgggcggaaacac

SEQ ID NO: 12483 - DNA, 17 bp, synthetic construct
  misc_feature 1..17: note = Probe
  source 1..17: mol_type = other DNA
aaccgggcggaaacacc

SEQ ID NO: 12484 - DNA, 36 bp, synthetic construct; identical to SEQ ID NO: 56
  misc_feature 1..36: note = Probe
  source 1..36: mol_type = other DNA

SEQ ID NO: 12485 - DNA, 29 bp, synthetic construct
  misc_feature 1..29: note = Probe
  source 1..29: mol_type = other DNA
aactagttttgacaacattcaaaaaagag

SEQ ID NO: 12486 - DNA, 40 bp, synthetic construct
  misc_feature 1..40: note = Probe
  source 1..40: mol_type = other DNA
aacttagcattaaccttttaagttaaagattaagagaacc

SEQ ID NO: 12487 - DNA, 41 bp, synthetic construct
  misc_feature 1..41: note = Probe
  source 1..41: mol_type = other DNA
aacttagcattaaccttttaagttaaagattaagagaacca

SEQ ID NO: 12488 - DNA, 19 bp, synthetic construct
  misc_feature 1..19: note = Probe
  source 1..19: mol_type = other DNA
aactttacagtcagaggtt

SEQ ID NO: 12489 - DNA, 31 bp, synthetic construct; identical to SEQ ID NO: 65
  misc_feature 1..31: note = Probe
  source 1..31: mol_type = other DNA

SEQ ID NO: 12490 - DNA, 33 bp, synthetic construct; identical to SEQ ID NO: 2225
  misc_feature 1..33: note = Probe
  source 1..33: mol_type = other DNA

SEQ ID NO: 12491 - DNA, 28 bp, synthetic construct
  misc_feature 1..28: note = Probe
  source 1..28: mol_type = other DNA
aagacaggggttaggcctctttttacca

SEQ ID NO: 12492 - DNA, 27 bp, synthetic construct
  misc_feature 1..27: note = Probe
  source 1..27: mol_type = other DNA
aagcaatacactgaaaatgtttagacg

SEQ ID NO: 12493 - DNA, 17 bp, synthetic construct
  misc_feature 1..17: note = Probe
  source 1..17: mol_type = other DNA
aagctcacaagaactgc

SEQ ID NO: 12494 - DNA, 18 bp, synthetic construct
  misc_feature 1..18: note = Probe
  source 1..18: mol_type = other DNA
aagctcacaagaactgct

SEQ ID NO: 12495 - DNA, 50 bp, synthetic construct; identical to SEQ ID NO: 84
  misc_feature 1..50: note = Probe
  source 1..50: mol_type = other DNA

SEQ ID NO: 12496 - DNA, 29 bp, synthetic construct
  misc_feature 1..29: note = Probe
  source 1..29: mol_type = other DNA
aaggttggtggttcgagcccacccaggga

SEQ ID NO: 12497 - DNA, 30 bp, synthetic construct; identical to SEQ ID NO: 2390
  misc_feature 1..30: note = Probe
  source 1..30: mol_type = other DNA

SEQ ID NO: 12498 - DNA, 31 bp, synthetic construct; identical to SEQ ID NO: 86
  misc_feature 1..31: note = Probe
  source 1..31: mol_type = other DNA

SEQ ID NO: 12499 - DNA, 32 bp, synthetic construct; identical to SEQ ID NO: 2391
  misc_feature 1..32: note = Probe
  source 1..32: mol_type = other DNA

SEQ ID NO: 12500 - DNA, 33 bp, synthetic construct; identical to SEQ ID NO: 2392
  misc_feature 1..33: note = Probe
  source 1..33: mol_type = other DNA

SEQ ID NO: 12501 - DNA, 20 bp, synthetic construct
  misc_feature 1..20: note = Probe
  source 1..20: mol_type = other DNA
aatccagcgatccgagttca

SEQ ID NO: 12502 - DNA, 36 bp, synthetic construct; identical to SEQ ID NO: 93
  misc_feature 1..36: note = Probe
  source 1..36: mol_type = other DNA

SEQ ID NO: 12503 - DNA, 33 bp, synthetic construct; identical to SEQ ID NO: 2439
  misc_feature 1..33: note = Probe
  source 1..33: mol_type = other DNA

SEQ ID NO: 12504 - DNA, 35 bp, synthetic construct; identical to SEQ ID NO: 94
  misc_feature 1..35: note = Probe
  source 1..35: mol_type = other DNA

SEQ ID NO: 12505 - DNA, 36 bp, synthetic construct; identical to SEQ ID NO: 95
  misc_feature 1..36: note = Probe
  source 1..36: mol_type = other DNA

SEQ ID NO: 12506 - DNA, 37 bp, synthetic construct; identical to SEQ ID NO: 96
  misc_feature 1..37: note = Probe
  source 1..37: mol_type = other DNA

SEQ ID NO: 12507 - DNA, 19 bp, synthetic construct
  misc_feature 1..19: note = Probe
  source 1..19: mol_type = other DNA
aatccccggcacctccacc

SEQ ID NO: 12508 - DNA, 20 bp, synthetic construct
  misc_feature 1..20: note = Probe
  source 1..20: mol_type = other DNA
aatccccggcacctccacca

SEQ ID NO: 12509 - DNA, 17 bp, synthetic construct
  misc_feature 1..17: note = Probe
  source 1..17: mol_type = other DNA
aatccgggtgccccctc

SEQ ID NO: 12510 - DNA, 16 bp, synthetic construct
  misc_feature 1..16: note = Probe
  source 1..16: mol_type = other DNA
aatcgcataaaactta

SEQ ID NO: 12511 - DNA, 30 bp, synthetic construct; identical to SEQ ID NO: 2459
  misc_feature 1..30: note = Probe
  source 1..30: mol_type = other DNA

SEQ ID NO: 12512 - DNA, 30 bp, synthetic construct; identical to SEQ ID NO: 106
  misc_feature 1..30: note = Probe
  source 1..30: mol_type = other DNA

SEQ ID NO: 12513 - DNA, 36 bp, synthetic construct; identical to SEQ ID NO: 111
  misc_feature 1..36: note = Probe
  source 1..36: mol_type = other DNA

SEQ ID NO: 12514 - DNA, 50 bp, synthetic construct; identical to SEQ ID NO: 113
  misc_feature 1..50: note = Probe
  source 1..50: mol_type = other DNA

SEQ ID NO: 12515 - DNA, 30 bp, synthetic construct
  misc_feature 1..30: note = Probe
  source 1..30: mol_type = other DNA
acaagaactgctaactcatgcccccatgtc

SEQ ID NO: 12516 - DNA, 31 bp, synthetic construct; identical to SEQ ID NO: 2584
  misc_feature 1..31: note = Probe
  source 1..31: mol_type = other DNA

SEQ ID NO: 12517 - DNA, 35 bp, synthetic construct
  misc_feature 1..35: note = Probe
  source 1..35: mol_type = other DNA
acaagaactgctaactcatgcccccatgtctaaca

SEQ ID NO: 12518 - DNA, 38 bp, synthetic construct
  misc_feature 1..38: note = Probe
  source 1..38: mol_type = other DNA
acaagaactgctaactcatgcccccatgtctaacaaca

SEQ ID NO: 12519 - DNA, 49 bp, synthetic construct; identical to SEQ ID NO: 2587
  misc_feature 1..49: note = Probe
  source 1..49: mol_type = other DNA

SEQ ID NO: 12520 - DNA, 50 bp, synthetic construct; identical to SEQ ID NO: 124
  misc_feature 1..50: note = Probe
  source 1..50: mol_type = other DNA

SEQ ID NO: 12521 - DNA, 20 bp, synthetic construct
  misc_feature 1..20: note = Probe
  source 1..20: mol_type = other DNA
acacgcagaaggtcctgggt

SEQ ID NO: 12522 - DNA, 36 bp, synthetic construct
  misc_feature 1..36: note = Probe
  source 1..36: mol_type = other DNA
acacgcagaaggtcctgggttcgagccccagtggaa

SEQ ID NO: 12523 - DNA, 38 bp, synthetic construct
  misc_feature 1..38: note = Probe
  source 1..38: mol_type = other DNA
acacgcagaaggtcctgggttcgagccccagtggaacc

SEQ ID NO: 12524 - DNA, 39 bp, synthetic construct
  misc_feature 1..39: note = Probe
  source 1..39: mol_type = other DNA
acacgcagaaggtcctgggttcgagccccagtggaacca

SEQ ID NO: 12525 - DNA, 40 bp, synthetic construct
  misc_feature 1..40: note = Probe
  source 1..40: mol_type = other DNA
acacgcagaaggtcctgggttcgagccccagtggaaccac

SEQ ID NO: 12526 - DNA, 18 bp, synthetic construct
  misc_feature 1..18: note = Probe
  source 1..18: mol_type = other DNA
acacgcgaaaggtccccg

SEQ ID NO: 12527 - DNA, 19 bp, synthetic construct
  misc_feature 1..19: note = Probe
  source 1..19: mol_type = other DNA
acacgcgaaaggtccccgg

SEQ ID NO: 12528 - DNA, 20 bp, synthetic construct
  misc_feature 1..20: note = Probe
  source 1..20: mol_type = other DNA
acacgcgaaaggtccccggt

SEQ ID NO: 12529 - DNA, 21 bp, synthetic construct
  misc_feature 1..21: note = Probe
  source 1..21: mol_type = other DNA
acacgcgaaaggtccccggtt

SEQ ID NO: 12530 - DNA, 35 bp, synthetic construct
  misc_feature 1..35: note = Probe
  source 1..35: mol_type = other DNA
acacgcgaaaggtccccggttcgaaaccgggcgga

SEQ ID NO: 12531 - DNA, 36 bp, synthetic construct
  misc_feature 1..36: note = Probe
  source 1..36: mol_type = other DNA
acacgcgaaaggtccccggttcgaaaccgggcggaa

SEQ ID NO: 12532 - DNA, 18 bp, synthetic construct
  misc_feature 1..18: note = Probe
  source 1..18: mol_type = other DNA
acagaccaagagccttca

SEQ ID NO: 12533 - DNA, 37 bp, synthetic construct
  misc_feature 1..37: note = Probe
  source 1..37: mol_type = other DNA
acagaccaagagccttcaaagccctcagtaagttgca

SEQ ID NO: 12534 - DNA, 50 bp, synthetic construct; identical to SEQ ID NO: 129
  misc_feature 1..50: note = Probe
  source 1..50: mol_type = other DNA

SEQ ID NO: 12535 - DNA, 18 bp, synthetic construct
  misc_feature 1..18: note = Probe
  source 1..18: mol_type = other DNA
acatatgtccgcgtgggt

SEQ ID NO: 12536 - DNA, 50 bp, synthetic construct; identical to SEQ ID NO: 138
  misc_feature 1..50: note = Probe
  source 1..50: mol_type = other DNA

SEQ ID NO: 12537 - DNA, 16 bp, synthetic construct
  misc_feature 1..16: note = Probe
  source 1..16: mol_type = other DNA
accaggatggccgagt

SEQ ID NO: 12538 - DNA, 17 bp, synthetic construct
  misc_feature 1..17: note = Probe
  source 1..17: mol_type = other DNA
accaggatggccgagtg

SEQ ID NO: 12539 - DNA, 20 bp, synthetic construct
  misc_feature 1..20: note = Probe
  source 1..20: mol_type = other DNA
accaggatggccgagtggtt

SEQ ID NO: 12540 - DNA, 23 bp, synthetic construct
  misc_feature 1..23: note = Probe
  source 1..23: mol_type = other DNA
accaggatggccgagtggttaag

SEQ ID NO: 12541 - DNA, 36 bp, synthetic construct
  misc_feature 1..36: note = Probe
  source 1..36: mol_type = other DNA
accaggggtcgcgagttcaaatctcgctggggcctc

SEQ ID NO: 12542 - DNA, 32 bp, synthetic construct
  misc_feature 1..32: note = Probe
  source 1..32: mol_type = other DNA
acccaggcggcccgggttcgactcccggtgtg

SEQ ID NO: 12543 - DNA, 33 bp, synthetic construct; identical to SEQ ID NO: 2763
  misc_feature 1..33: note = Probe
  source 1..33: mol_type = other DNA

SEQ ID NO: 12544 - DNA, 34 bp, synthetic construct
  misc_feature 1..34: note = Probe
  source 1..34: mol_type = other DNA
acccaggcggcccgggttcgactcccggtgtggg

SEQ ID NO: 12545 - DNA, 35 bp, synthetic construct; identical to SEQ ID NO: 149
  misc_feature 1..35: note = Probe
  source 1..35: mol_type = other DNA

SEQ ID NO: 12546 - DNA, 36 bp, synthetic construct; identical to SEQ ID NO: 150
  misc_feature 1..36: note = Probe
  source 1..36: mol_type = other DNA

SEQ ID NO: 12547 - DNA, 37 bp, synthetic construct; identical to SEQ ID NO: 151
  misc_feature 1..37: note = Probe
  source 1..37: mol_type = other DNA

SEQ ID NO: 12548 - DNA, 32 bp, synthetic construct
  misc_feature 1..32: note = Probe
  source 1..32: mol_type = other DNA
acccaggtggcccgggttcgactcccggtatg

SEQ ID NO: 12549 - DNA, 33 bp, synthetic construct
  misc_feature 1..33: note = Probe
  source 1..33: mol_type = other DNA
acccaggtggcccgggttcgactcccggtatgg

SEQ ID NO: 12550 - DNA, 37 bp, synthetic construct; identical to SEQ ID NO: 152
  misc_feature 1..37: note = Probe
  source 1..37: mol_type = other DNA

SEQ ID NO: 12551 - DNA, 32 bp, synthetic construct; identical to SEQ ID NO: 153
  misc_feature 1..32: note = Probe
  source 1..32: mol_type = other DNA

SEQ ID NO: 12552 - DNA, 33 bp, synthetic construct; identical to SEQ ID NO: 154
  misc_feature 1..33: note = Probe
  source 1..33: mol_type = other DNA

SEQ ID NO: 12553 - DNA, 34 bp, synthetic construct; identical to SEQ ID NO: 155
  misc_feature 1..34: note = Probe
  source 1..34: mol_type = other DNA

SEQ ID NO: 12554 - DNA, 35 bp, synthetic construct; identical to SEQ ID NO: 156
  misc_feature 1..35: note = Probe
  source 1..35: mol_type = other DNA

SEQ ID NO: 12555 - DNA, 34 bp, synthetic construct; identical to SEQ ID NO: 157
  misc_feature 1..34: note = Probe
  source 1..34: mol_type = other DNA

SEQ ID NO: 12556 - DNA, 16 bp, synthetic construct
  misc_feature 1..16: note = Probe
  source 1..16: mol_type = other DNA
accgaagatcacgggt

SEQ ID NO: 12557 - DNA, 33 bp, synthetic construct
  misc_feature 1..33: note = Probe
  source 1..33: mol_type = other DNA
accgccgcggcccgggttcgattcccggtcagg

SEQ ID NO: 12558 - DNA, 35 bp, synthetic construct
  misc_feature 1..35: note = Probe
  source 1..35: mol_type = other DNA
accgccgcggcccgggttcgattcccggtcaggga

SEQ ID NO: 12559 - DNA, 36 bp, synthetic construct
  misc_feature 1..36: note = Probe
  source 1..36: mol_type = other DNA
accgccgcggcccgggttcgattcccggtcagggaa

SEQ ID NO: 12560 - DNA, 16 bp, synthetic construct
  misc_feature 1..16: note = Probe
  source 1..16: mol_type = other DNA
accggagatgaaaacc

SEQ ID NO: 12561 - DNA, 17 bp, synthetic construct
  misc_feature 1..17: note = Probe
  source 1..17: mol_type = other DNA
accggagatgaaaacct

SEQ ID NO: 12562 - DNA, 19 bp, synthetic construct
  misc_feature 1..19: note = Probe
  source 1..19: mol_type = other DNA
accggagatgaaaaccttt

SEQ ID NO: 12563 - DNA, 22 bp, synthetic construct
  misc_feature 1..22: note = Probe
  source 1..22: mol_type = other DNA
accggagatgaaaacctttttc

SEQ ID NO: 12564 - DNA, 23 bp, synthetic construct
  misc_feature 1..23: note = Probe
  source 1..23: mol_type = other DNA
accggagatgaaaacctttttcc

SEQ ID NO: 12565 - DNA, 26 bp, synthetic construct
  misc_feature 1..26: note = Probe
  source 1..26: mol_type = other DNA
accggagatgaaaacctttttccaag

SEQ ID NO: 12566 - DNA, 27 bp, synthetic construct
  misc_feature 1..27: note = Probe
  source 1..27: mol_type = other DNA
accggagatgaaaacctttttccaagg

SEQ ID NO: 12567 - DNA, 28 bp, synthetic construct
  misc_feature 1..28: note = Probe
  source 1..28: mol_type = other DNA
accggagatgaaaacctttttccaagga

SEQ ID NO: 12568 - DNA, 29 bp, synthetic construct
  misc_feature 1..29: note = Probe
  source 1..29: mol_type = other DNA
accggagatgaaaacctttttccaaggac

SEQ ID NO: 12569 - DNA, 30 bp, synthetic construct; identical to SEQ ID NO: 165
  misc_feature 1..30: note = Probe
  source 1..30: mol_type = other DNA

SEQ ID NO: 12570 - DNA, 16 bp, synthetic construct
  misc_feature 1..16: note = Probe
  source 1..16: mol_type = other DNA
accgggcggaaacacc

SEQ ID NO: 12571 - DNA, 24 bp, synthetic construct
  misc_feature 1..24: note = Probe
  source 1..24: mol_type = other DNA
accggggttcgattccccgacggg

SEQ ID NO: 12572 - DNA, 18 bp, synthetic construct
  misc_feature 1..18: note = Probe
  source 1..18: mol_type = other DNA
acgcagaaggtcctgggt

SEQ ID NO: 12573 - DNA, 31 bp, synthetic construct
  misc_feature 1..31: note = Probe
  source 1..31: mol_type = other DNA
acgcagaaggtcctgggttcgagccccagtg

SEQ ID NO: 12574 - DNA, 34 bp, synthetic construct
  misc_feature 1..34: note = Probe
  source 1..34: mol_type = other DNA
acgcagaaggtcctgggttcgagccccagtggaa

SEQ ID NO: 12575 - DNA, 35 bp, synthetic construct
  misc_feature 1..35: note = Probe
  source 1..35: mol_type = other DNA
acgcagaaggtcctgggttcgagccccagtggaac

SEQ ID NO: 12576 - DNA, 36 bp, synthetic construct; identical to SEQ ID NO: 2844
  misc_feature 1..36: note = Probe
  source 1..36: mol_type = other DNA

SEQ ID NO: 12577 - DNA, 37 bp, synthetic construct; identical to SEQ ID NO: 166
  misc_feature 1..37: note = Probe
  source 1..37: mol_type = other DNA

SEQ ID NO: 12578 - DNA, 38 bp, synthetic construct; identical to SEQ ID NO: 167
  misc_feature 1..38: note = Probe
  source 1..38: mol_type = other DNA

SEQ ID NO: 12579 - DNA, 17 bp, synthetic construct
  misc_feature 1..17: note = Probe
  source 1..17: mol_type = other DNA
acgccaaggtcgcgggt

SEQ ID NO: 12580 - DNA, 16 bp, synthetic construct
  misc_feature 1..16: note = Probe
  source 1..16: mol_type = other DNA
acgcgaaaggtccccg

SEQ ID NO: 12581 - DNA, 17 bp, synthetic construct
  misc_feature 1..17: note = Probe
  source 1..17: mol_type = other DNA
acgcgaaaggtccccgg

SEQ ID NO: 12582 - DNA, 18 bp, synthetic construct
  misc_feature 1..18: note = Probe
  source 1..18: mol_type = other DNA
acgcgaaaggtccccggt

SEQ ID NO: 12583 - DNA, 19 bp, synthetic construct
  misc_feature 1..19: note = Probe
  source 1..19: mol_type = other DNA
acgcgaaaggtccccggtt

SEQ ID NO: 12584 - DNA, 20 bp, synthetic construct
  misc_feature 1..20: note = Probe
  source 1..20: mol_type = other DNA
acgcgaaaggtccccggttc

SEQ ID NO: 12585 - DNA, 34 bp, synthetic construct
  misc_feature 1..34: note = Probe
  source 1..34: mol_type = other DNA
acgcgaaaggtccccggttcgaaaccgggcggaa

SEQ ID NO: 12586 - DNA, 17 bp, synthetic construct
  misc_feature 1..17: note = Probe
  source 1..17: mol_type = other DNA
acgcgggagaccggggt

SEQ ID NO: 12587 - DNA, 18 bp, synthetic construct
  misc_feature 1..18: note = Probe
  source 1..18: mol_type = other DNA
acgcgggagaccggggtt

SEQ ID NO: 12588 - DNA, 30 bp, synthetic construct
  misc_feature 1..30: note = Probe
  source 1..30: mol_type = other DNA
acgcgggagaccggggttcaattccccgac

SEQ ID NO: 12589 - DNA, 31 bp, synthetic construct; identical to SEQ ID NO: 176
  misc_feature 1..31: note = Probe
  source 1..31: mol_type = other DNA

SEQ ID NO: 12590 - DNA, 32 bp, synthetic construct; identical to SEQ ID NO: 177
  misc_feature 1..32: note = Probe
  source 1..32: mol_type = other DNA

SEQ ID NO: 12591 - DNA, 33 bp, synthetic construct; identical to SEQ ID NO: 178
  misc_feature 1..33: note = Probe
  source 1..33: mol_type = other DNA

SEQ ID NO: 12592 - DNA, 34 bp, synthetic construct; identical to SEQ ID NO: 179
  misc_feature 1..34: note = Probe
  source 1..34: mol_type = other DNA

SEQ ID NO: 12593 - DNA, 35 bp, synthetic construct
  misc_feature 1..35: note = Probe
  source 1..35: mol_type = other DNA
acgcgggagaccggggttcaattccccgacgggga

SEQ ID NO: 12594 - DNA, 36 bp, synthetic construct; identical to SEQ ID NO: 180
  misc_feature 1..36: note = Probe
  source 1..36: mol_type = other DNA

SEQ ID NO: 12595 - DNA, 23 bp, synthetic construct
  misc_feature 1..23: note = Probe
  source 1..23: mol_type = other DNA
acgcgggagaccggggttcgatt

SEQ ID NO: 12596 - DNA, 29 bp, synthetic construct
  misc_feature 1..29: note = Probe
  source 1..29: mol_type = other DNA
acgcgggagaccggggttcgattccccga

SEQ ID NO: 12597 - DNA, 30 bp, synthetic construct; identical to SEQ ID NO: 182
  misc_feature 1..30: note = Probe
  source 1..30: mol_type = other DNA

SEQ ID NO: 12598 - DNA, 31 bp, synthetic construct; identical to SEQ ID NO: 183
  misc_feature 1..31: note = Probe
  source 1..31: mol_type = other DNA

SEQ ID NO: 12599 - DNA, 32 bp, synthetic construct; identical to SEQ ID NO: 184
  misc_feature 1..32: note = Probe
  source 1..32: mol_type = other DNA

SEQ ID NO: 12600 - DNA, 33 bp, synthetic construct; identical to SEQ ID NO: 185
  misc_feature 1..33: note = Probe
  source 1..33: mol_type = other DNA

SEQ ID NO: 12601 - DNA, 34 bp, synthetic construct; identical to SEQ ID NO: 186
  misc_feature 1..34: note = Probe
  source 1..34: mol_type = other DNA

SEQ ID NO: 12602 - DNA, 35 bp, synthetic construct; identical to SEQ ID NO: 187
  misc_feature 1..35: note = Probe
  source 1..35: mol_type = other DNA

SEQ ID NO: 12603 - DNA, 36 bp, synthetic construct; identical to SEQ ID NO: 188
  misc_feature 1..36: note = Probe
  source 1..36: mol_type = other DNA

SEQ ID NO: 12604 - DNA, 17 bp, synthetic construct
  misc_feature 1..17: note = Probe
  source 1..17: mol_type = other DNA
acgcgggaggcccgggt

SEQ ID NO: 12605 - DNA, 18 bp, synthetic construct
  misc_feature 1..18: note = Probe
  source 1..18: mol_type = other DNA
acgcgggaggcccgggtt

SEQ ID NO: 12606 - DNA, 20 bp, synthetic construct
  misc_feature 1..20: note = Probe
  source 1..20: mol_type = other DNA
acgcgggaggcccgggttcg

SEQ ID NO: 12607 - DNA, 36 bp, synthetic construct; identical to SEQ ID NO: 2880
  misc_feature 1..36: note = Probe
  source 1..36: mol_type = other DNA

SEQ ID NO: 12608 - DNA, 33 bp, synthetic construct
  misc_feature 1..33: note = Probe
  source 1..33: mol_type = other DNA
acgcgggaggcccgggttcgattcccggcccat

SEQ ID NO: 12609 - DNA, 34 bp, synthetic construct; identical to SEQ ID NO: 2884
  misc_feature 1..34: note = Probe
  source 1..34: mol_type = other DNA

SEQ ID NO: 12610 - DNA, 19 bp, synthetic construct
  misc_feature 1..19: note = Probe
  source 1..19: mol_type = other DNA
acgcgggaggcccgggttt

SEQ ID NO: 12611 - DNA, 29 bp, synthetic construct
  misc_feature 1..29: note = Probe
  source 1..29: mol_type = other DNA
actaagtgtttgtgggtttaagtcccatt

SEQ ID NO: 12612 - DNA, 31 bp, synthetic construct
  misc_feature 1..31: note = Probe
  source 1..31: mol_type = other DNA
actaagtgtttgtgggtttaagtcccattgg

SEQ ID NO: 12613 - DNA, 33 bp, synthetic construct; identical to SEQ ID NO: 191
  misc_feature 1..33: note = Probe
  source 1..33: mol_type = other DNA

SEQ ID NO: 12614 - DNA, 34 bp, synthetic construct; identical to SEQ ID NO: 192
  misc_feature 1..34: note = Probe
  source 1..34: mol_type = other DNA

SEQ ID NO: 12615 - DNA, 35 bp, synthetic construct; identical to SEQ ID NO: 193
  misc_feature 1..35: note = Probe
  source 1..35: mol_type = other DNA

SEQ ID NO: 12616 - DNA, 36 bp, synthetic construct; identical to SEQ ID NO: 2894
  misc_feature 1..36: note = Probe
  source 1..36: mol_type = other DNA

SEQ ID NO: 12617 - DNA, 28 bp, synthetic construct
  misc_feature 1..28: note = Probe
  source 1..28: mol_type = other DNA
actagttttgacaacattcaaaaaagag

SEQ ID NO: 12618 - DNA, 16 bp, synthetic construct
  misc_feature 1..16: note = Probe
  source 1..16: mol_type = other DNA
actcccggtgtgggaa

SEQ ID NO: 12619 - DNA, 17 bp, synthetic construct
  misc_feature 1..17: note = Probe
  source 1..17: mol_type = other DNA
actcccggtgtgggaac

SEQ ID NO: 12620 - DNA, 28 bp, synthetic construct
  misc_feature 1..28: note = Probe
  source 1..28: mol_type = other DNA
actcttttagtataaatagtaccgttaa

SEQ ID NO: 12621 - DNA, 32 bp, synthetic construct; identical to SEQ ID NO: 195
  misc_feature 1..32: note = Probe
  source 1..32: mol_type = other DNA

SEQ ID NO: 12622 - DNA, 33 bp, synthetic construct; identical to SEQ ID NO: 196
  misc_feature 1..33: note = Probe
  source 1..33: mol_type = other DNA

SEQ ID NO: 12623 - DNA, 34 bp, synthetic construct; identical to SEQ ID NO: 197
  misc_feature 1..34: note = Probe
  source 1..34: mol_type = other DNA

SEQ ID NO: 12624 - DNA, 50 bp, synthetic construct; identical to SEQ ID NO: 199
  misc_feature 1..50: note = Probe
  source 1..50: mol_type = other DNA

SEQ ID NO: 12625 - DNA, 39 bp, synthetic construct
  misc_feature 1..39: note = Probe
  source 1..39: mol_type = other DNA
acttagcattaaccttttaagttaaagattaagagaacc

SEQ ID NO: 12626 - DNA, 40 bp, synthetic construct
  misc_feature 1..40: note = Probe
  source 1..40: mol_type = other DNA
acttagcattaaccttttaagttaaagattaagagaacca

SEQ ID NO: 12627 - DNA, 39 bp, synthetic construct; identical to SEQ ID NO: 205
  misc_feature 1..39: note = Probe
  source 1..39: mol_type = other DNA

SEQ ID NO: 12628 - DNA, 31 bp, synthetic construct; identical to SEQ ID NO: 210
  misc_feature 1..31: note = Probe
  source 1..31: mol_type = other DNA

SEQ ID NO: 12629 - DNA, 32 bp, synthetic construct; identical to SEQ ID NO: 211
  misc_feature 1..32: note = Probe
  source 1..32: mol_type = other DNA

SEQ ID NO: 12630 - DNA, 34 bp, synthetic construct; identical to SEQ ID NO: 212
  misc_feature 1..34: note = Probe
  source 1..34: mol_type = other DNA

SEQ ID NO: 12631 - DNA, 50 bp, synthetic construct; identical to SEQ ID NO: 216
  misc_feature 1..50: note = Probe
  source 1..50: mol_type = other DNA

SEQ ID NO: 12632 - DNA, 27 bp, synthetic construct
  misc_feature 1..27: note = Probe
  source 1..27: mol_type = other DNA
agaactgctaactcatgcccccatgtc

SEQ ID NO: 12633 - DNA, 28 bp, synthetic construct
  misc_feature 1..28: note = Probe
  source 1..28: mol_type = other DNA
agaactgctaactcatgcccccatgtct

SEQ ID NO: 12634 - DNA, 32 bp, synthetic construct; identical to SEQ ID NO: 3066
  misc_feature 1..32: note = Probe
  source 1..32: mol_type = other DNA

SEQ ID NO: 12635 - DNA, 35 bp, synthetic construct
  misc_feature 1..35: note = Probe
  source 1..35: mol_type = other DNA
agaactgctaactcatgcccccatgtctaacaaca

SEQ ID NO: 12636 - DNA, 44 bp, synthetic construct; identical to SEQ ID NO: 222
  misc_feature 1..44: note = Probe
  source 1..44: mol_type = other DNA

SEQ ID NO: 12637 - DNA, 31 bp, synthetic construct; identical to SEQ ID NO: 225
  misc_feature 1..31: note = Probe
  source 1..31: mol_type = other DNA

SEQ ID NO: 12638 - DNA, 31 bp, synthetic construct; identical to SEQ ID NO: 226
  misc_feature 1..31: note = Probe
  source 1..31: mol_type = other DNA

SEQ ID NO: 12639 - DNA, 31 bp, synthetic construct; identical to SEQ ID NO: 230
  misc_feature 1..31: note = Probe
  source 1..31: mol_type = other DNA

SEQ ID NO: 12640 - DNA, 30 bp, synthetic construct
  misc_feature 1..30: note = Probe
  source 1..30: mol_type = other DNA
agaaggtcctgggttcgagccccagtggaa

SEQ ID NO: 12641 - DNA, 31 bp, synthetic construct
  misc_feature 1..31: note = Probe
  source 1..31: mol_type = other DNA
agaaggtcctgggttcgagccccagtggaac

SEQ ID NO: 12642 - DNA, 32 bp, synthetic construct; identical to SEQ ID NO: 3093
  misc_feature 1..32: note = Probe
  source 1..32: mol_type = other DNA

SEQ ID NO: 12643 - DNA, 33 bp, synthetic construct; identical to SEQ ID NO: 3094
  misc_feature 1..33: note = Probe
  source 1..33: mol_type = other DNA

SEQ ID NO: 12644 - DNA, 34 bp, synthetic construct; identical to SEQ ID NO: 232
  misc_feature 1..34: note = Probe
  source 1..34: mol_type = other DNA

SEQ ID NO: 12645 - DNA, 50 bp, synthetic construct; identical to SEQ ID NO: 235
  misc_feature 1..50: note = Probe
  source 1..50: mol_type = other DNA

SEQ ID NO: 12646 - DNA, 19 bp, synthetic construct
  misc_feature 1..19: note = Probe
  source 1..19: mol_type = other DNA
agaattctcgcctgccacg

SEQ ID NO: 12647 - DNA, 20 bp, synthetic construct
  misc_feature 1..20: note = Probe
  source 1..20: mol_type = other DNA
agaattctcgcctgccacgc

SEQ ID NO: 12648 - DNA, 35 bp, synthetic construct; identical to SEQ ID NO: 237
  misc_feature 1..35: note = Probe
  source 1..35: mol_type = other DNA

SEQ ID NO: 12649 - DNA, 22 bp, synthetic construct
  misc_feature 1..22: note = Probe
  source 1..22: mol_type = other DNA
agaccggggttcaattccccga

SEQ ID NO: 12650 - DNA, 23 bp, synthetic construct
  misc_feature 1..23: note = Probe
  source 1..23: mol_type = other DNA
agaccggggttcaattccccgac

SEQ ID NO: 12651 - DNA, 24 bp, synthetic construct
  misc_feature 1..24: note = Probe
  source 1..24: mol_type = other DNA
agaccggggttcaattccccgacg

SEQ ID NO: 12652 - DNA, 29 bp, synthetic construct
  misc_feature 1..29: note = Probe
  source 1..29: mol_type = other DNA
agaccggggttcaattccccgacggggag

SEQ ID NO: 12653 - DNA, 16 bp, synthetic construct
  misc_feature 1..16: note = Probe
  source 1..16: mol_type = other DNA
agaccggggttcgatt

SEQ ID NO: 12654 - DNA, 22 bp, synthetic construct
  misc_feature 1..22: note = Probe
  source 1..22: mol_type = other DNA
agaccggggttcgattccccga

SEQ ID NO: 12655 - DNA, 23 bp, synthetic construct
  misc_feature 1..23: note = Probe
  source 1..23: mol_type = other DNA
agaccggggttcgattccccgac

SEQ ID NO: 12656 - DNA, 24 bp, synthetic construct
  misc_feature 1..24: note = Probe
  source 1..24: mol_type = other DNA
agaccggggttcgattccccgacg

SEQ ID NO: 12657 - DNA, 25 bp, synthetic construct
  misc_feature 1..25: note = Probe
  source 1..25: mol_type = other DNA
agaccggggttcgattccccgacgg

SEQ ID NO: 12658 - DNA, 26 bp, synthetic construct
  misc_feature 1..26: note = Probe
  source 1..26: mol_type = other DNA
agaccggggttcgattccccgacggg

SEQ ID NO: 12659 - DNA, 28 bp, synthetic construct
  misc_feature 1..28: note = Probe
  source 1..28: mol_type = other DNA
agaccggggttcgattccccgacgggga

SEQ ID NO: 12660 - DNA, 29 bp, synthetic construct
  misc_feature 1..29: note = Probe
  source 1..29: mol_type = other DNA
agaccggggttcgattccccgacggggag

SEQ ID NO: 12661 - DNA, 19 bp, synthetic construct
  misc_feature 1..19: note = Probe
  source 1..19: mol_type = other DNA
agagcccggtaatcgcata

SEQ ID NO: 12662 - DNA, 26 bp, synthetic construct
  misc_feature 1..26: note = Probe
  source 1..26: mol_type = other DNA
agagcccggtaatcgcataaaactta

SEQ ID NO: 12663 - DNA, 28 bp, synthetic construct
  misc_feature 1..28: note = Probe
  source 1..28: mol_type = other DNA
agagtaaataataggagcttaaaccccc

SEQ ID NO: 12664 - DNA, 31 bp, synthetic construct; identical to SEQ ID NO: 252
  misc_feature 1..31: note = Probe
  source 1..31: mol_type = other DNA

SEQ ID NO: 12665 - DNA, 36 bp, synthetic construct; identical to SEQ ID NO: 255
  misc_feature 1..36: note = Probe
  source 1..36: mol_type = other DNA

SEQ ID NO: 12666 - DNA, 37 bp, synthetic construct; identical to SEQ ID NO: 256
  misc_feature 1..37: note = Probe
  source 1..37: mol_type = other DNA

SEQ ID NO: 12667 - DNA, 29 bp, synthetic construct
  misc_feature 1..29: note = Probe
  source 1..29: mol_type = other DNA
agagtggcgcagcggaagcgtgctgggcc

SEQ ID NO: 12668 - DNA, 30 bp, synthetic construct
  misc_feature 1..30: note = Probe
  source 1..30: mol_type = other DNA
agagtggcgcagcggaagcgtgctgggccc

SEQ ID NO: 12669 - DNA, 31 bp, synthetic construct; identical to SEQ ID NO: 3161
  misc_feature 1..31: note = Probe
  source 1..31: mol_type = other DNA

SEQ ID NO: 12670 - DNA, 28 bp, synthetic construct
  misc_feature 1..28: note = Probe
  source 1..28: mol_type = other DNA
agattctaggttcgactcctggctggct

SEQ ID NO: 12671 - DNA, 28 bp, synthetic construct
  misc_feature 1..28: note = Probe
  source 1..28: mol_type = other DNA
agattgagggttcgagtcccttcgtggt

SEQ ID NO: 12672 - DNA, 35 bp, synthetic construct; identical to SEQ ID NO: 3196
  misc_feature 1..35: note = Probe
  source 1..35: mol_type = other DNA

SEQ ID NO: 12673 - DNA, 29 bp, synthetic construct
  misc_feature 1..29: note = Probe
  source 1..29: mol_type = other DNA
agcactctggactttgaatccagcgatcc

SEQ ID NO: 12674 - DNA, 30 bp, synthetic construct
  misc_feature 1..30: note = Probe
  source 1..30: mol_type = other DNA
agcactctggactttgaatccagcgatccg

SEQ ID NO: 12675 - DNA, 33 bp, synthetic construct
  misc_feature 1..33: note = Probe
  source 1..33: mol_type = other DNA
agcactctggactttgaatccagcgatccgagt

SEQ ID NO: 12676 - DNA, 29 bp, synthetic construct
  misc_feature 1..29: note = Probe
  source 1..29: mol_type = other DNA
agcagagtggcgcagcggaagcgtgctgg

SEQ ID NO: 12677 - DNA, 31 bp, synthetic construct; identical to SEQ ID NO: 275
  misc_feature 1..31: note = Probe
  source 1..31: mol_type = other DNA

SEQ ID NO: 12678 - DNA, 32 bp, synthetic construct; identical to SEQ ID NO: 276
  misc_feature 1..32: note = Probe
  source 1..32: mol_type = other DNA

SEQ ID NO: 12679 - DNA, 33 bp, synthetic construct; identical to SEQ ID NO: 277
  misc_feature 1..33: note = Probe
  source 1..33: mol_type = other DNA

SEQ ID NO: 12680 - DNA, 34 bp, synthetic construct; identical to SEQ ID NO: 278
  misc_feature 1..34: note = Probe
  source 1..34: mol_type = other DNA

SEQ ID NO: 12681 - DNA, 35 bp, synthetic construct; identical to SEQ ID NO: 279
  misc_feature 1..35: note = Probe
  source 1..35: mol_type = other DNA

SEQ ID NO: 12682 - DNA, 36 bp, synthetic construct
  misc_feature 1..36: note = Probe
  source 1..36: mol_type = other DNA
agcagagtggcgcagcggaagcgtgctgggcccata

SEQ ID NO: 12683 - DNA, 17 bp, synthetic construct
  misc_feature 1..17: note = Probe
  source 1..17: mol_type = other DNA
agcagttgacccgggtt

SEQ ID NO: 12684 - DNA, 29 bp, synthetic construct
  misc_feature 1..29: note = Probe
  source 1..29: mol_type = other DNA
agcatagctgccttccaagcagttgaccc

SEQ ID NO: 12685 - DNA, 30 bp, synthetic construct; identical to SEQ ID NO: 3263
  misc_feature 1..30: note = Probe
  source 1..30: mol_type = other DNA

SEQ ID NO: 12686 - DNA, 31 bp, synthetic construct
  misc_feature 1..31: note = Probe
  source 1..31: mol_type = other DNA
agcatagctgccttccaagcagttgacccgg

SEQ ID NO: 12687 - DNA, 27 bp, synthetic construct
  misc_feature 1..27: note = Probe
  source 1..27: mol_type = other DNA
agcattaaccttttaagttaaagatta

SEQ ID NO: 12688 - DNA, 33 bp, synthetic construct
  misc_feature 1..33: note = Probe
  source 1..33: mol_type = other DNA
agcattaaccttttaagttaaagattaagagaa

SEQ ID NO: 12689 - DNA, 34 bp, synthetic construct
  misc_feature 1..34: note = Probe
  source 1..34: mol_type = other DNA
agcattaaccttttaagttaaagattaagagaac

SEQ ID NO: 12690 - DNA, 35 bp, synthetic construct; identical to SEQ ID NO: 280
  misc_feature 1..35: note = Probe
  source 1..35: mol_type = other DNA

SEQ ID NO: 12691 - DNA, 36 bp, synthetic construct; identical to SEQ ID NO: 281
  misc_feature 1..36: note = Probe
  source 1..36: mol_type = other DNA

SEQ ID NO: 12692 - DNA, 37 bp, synthetic construct; identical to SEQ ID NO: 282
  misc_feature 1..37: note = Probe
  source 1..37: mol_type = other DNA

SEQ ID NO: 12693 - DNA, 50 bp, synthetic construct; identical to SEQ ID NO: 285
  misc_feature 1..50: note = Probe
  source 1..50: mol_type = other DNA

SEQ ID NO: 12694 - DNA, 17 bp, synthetic construct
  misc_feature 1..17: note = Probe
  source 1..17: mol_type = other DNA
agccagggattgtgggt

SEQ ID NO: 12695 - DNA, 34 bp, synthetic construct; identical to SEQ ID NO: 287
  misc_feature 1..34: note = Probe
  source 1..34: mol_type = other DNA

SEQ ID NO: 12696 - DNA, 17 bp, synthetic construct
  misc_feature 1..17: note = Probe
  source 1..17: mol_type = other DNA
agcccggtaatcgcata

SEQ ID NO: 12697 - DNA, 24 bp, synthetic construct
  misc_feature 1..24: note = Probe
  source 1..24: mol_type = other DNA
agcccggtaatcgcataaaactta

SEQ ID NO: 12698 - DNA, 29 bp, synthetic construct
  misc_feature 1..29: note = Probe
  source 1..29: mol_type = other DNA
agcccggtaatcgcataaaacttaaaact

SEQ ID NO: 12699 - DNA, 18 bp, synthetic construct
  misc_feature 1..18: note = Probe
  source 1..18: mol_type = other DNA
agccctcagtaagttgca

SEQ ID NO: 12700 - DNA, 19 bp, synthetic construct
  misc_feature 1..19: note = Probe
  source 1..19: mol_type = other DNA
agcggaagcgtgctgggcc

SEQ ID NO: 12701 - DNA, 36 bp, synthetic construct
  misc_feature 1..36: note = Probe
  source 1..36: mol_type = other DNA
agcggttaggattcctggttttcacccaggcggccc

SEQ ID NO: 12702 - DNA, 30 bp, synthetic construct; identical to SEQ ID NO: 301
  misc_feature 1..30: note = Probe
  source 1..30: mol_type = other DNA

SEQ ID NO: 12703 - DNA, 50 bp, synthetic construct; identical to SEQ ID NO: 303
  misc_feature 1..50: note = Probe
  source 1..50: mol_type = other DNA

SEQ ID NO: 12704 - DNA, 16 bp, synthetic construct
  misc_feature 1..16: note = Probe
  source 1..16: mol_type = other DNA
agctcacaagaactgc

SEQ ID NO: 12705 - DNA, 17 bp, synthetic construct
  misc_feature 1..17: note = Probe
  source 1..17: mol_type = other DNA
agctcacaagaactgct

SEQ ID NO: 12706 - DNA, 27 bp, synthetic construct
  misc_feature 1..27: note = Probe
  source 1..27: mol_type = other DNA
agctcagtcggtagagcatcagacttt

SEQ ID NO: 12707 - DNA, 28 bp, synthetic construct
  misc_feature 1..28: note = Probe
  source 1..28: mol_type = other DNA
agctcagtcggtagagcatcagactttt

SEQ ID NO: 12708 - DNA, 29 bp, synthetic construct
  misc_feature 1..29: note = Probe
  source 1..29: mol_type = other DNA
agctcagtcggtagagcatcagactttta

SEQ ID NO: 12709 - DNA, 24 bp, synthetic construct
  misc_feature 1..24: note = Probe
  source 1..24: mol_type = other DNA
agctcagtcggtagagcatgggac

SEQ ID NO: 12710 - DNA, 25 bp, synthetic construct
  misc_feature 1..25: note = Probe
  source 1..25: mol_type = other DNA
agctcagtcggtagagcatgggact

SEQ ID NO: 12711 - DNA, 26 bp, synthetic construct
  misc_feature 1..26: note = Probe
  source 1..26: mol_type = other DNA
agctcagtcggtagagcatgggactc

SEQ ID NO: 12712 - DNA, 27 bp, synthetic construct
  misc_feature 1..27: note = Probe
  source 1..27: mol_type = other DNA
agctcagtcggtagagcatgggactct

SEQ ID NO: 12713 - DNA, 23 bp, synthetic construct
  misc_feature 1..23: note = Probe
  source 1..23: mol_type = other DNA
agctccgaggtgattttcatatt

SEQ ID NO: 12714 - DNA, 29 bp, synthetic construct
  misc_feature 1..29: note = Probe
  source 1..29: mol_type = other DNA
agctccgaggtgattttcatattgaattg

SEQ ID NO: 12715 - DNA, 30 bp, synthetic construct; identical to SEQ ID NO: 314
  misc_feature 1..30: note = Probe
  source 1..30: mol_type = other DNA

SEQ ID NO: 12716 - DNA, 31 bp, synthetic construct; identical to SEQ ID NO: 315
  misc_feature 1..31: note = Probe
  source 1..31: mol_type = other DNA

SEQ ID NO: 12717 - DNA, 34 bp, synthetic construct
  misc_feature 1..34: note = Probe
  source 1..34: mol_type = other DNA
agctggggattgtgggttcgagtcccatctgggt

SEQ ID NO: 12718 - DNA, 41 bp, synthetic construct
  misc_feature 1..41: note = Probe
  source 1..41: mol_type = other DNA
agctgttaactaagtgtttgtgggtttaagtcccattggtc

SEQ ID NO: 12719 - DNA, 42 bp, synthetic construct
  misc_feature 1..42: note = Probe
  source 1..42: mol_type = other DNA
agctgttaactaagtgtttgtgggtttaagtcccattggtct

SEQ ID NO: 12720 - DNA, 17 bp, synthetic construct
  misc_feature 1..17: note = Probe
  source 1..17: mol_type = other DNA
agctttggggggttcga

SEQ ID NO: 12721 - DNA, 21 bp, synthetic construct
  misc_feature 1..21: note = Probe
  source 1..21: mol_type = other DNA
aggatggccgagtggtctaag

SEQ ID NO: 12722 - DNA, 29 bp, synthetic construct
  misc_feature 1..29: note = Probe
  source 1..29: mol_type = other DNA
aggattcctggttttcacccaggcggccc

SEQ ID NO: 12723 - DNA, 29 bp, synthetic construct
  misc_feature 1..29: note = Probe
  source 1..29: mol_type = other DNA
aggattcctggttttcacccaggtggccc

SEQ ID NO: 12724 - DNA, 29 bp, synthetic construct
  misc_feature 1..29: note = Probe
  source 1..29: mol_type = other DNA
aggattcggcgctctcaccgccgcggccc

SEQ ID NO: 12725 - DNA, 29 bp, synthetic construct
  misc_feature 1..29: note = Probe
  source 1..29: mol_type = other DNA
aggattcggcgctttcaccgccgcggccc

SEQ ID NO: 12726 - DNA, 23 bp, synthetic construct
  misc_feature 1..23: note = Probe
  source 1..23: mol_type = other DNA
aggccccgggttcaatccccggc

SEQ ID NO: 12727 - DNA, 24 bp, synthetic construct
  misc_feature 1..24: note = Probe
  source 1..24: mol_type = other DNA
aggccccgggttcaatccccggca

SEQ ID NO: 12728 - DNA, 28 bp, synthetic construct
  misc_feature 1..28: note = Probe
  source 1..28: mol_type = other DNA
aggcggcccgggttcgactcccggtgtg

SEQ ID NO: 12729 - DNA, 29 bp, synthetic construct
  misc_feature 1..29: note = Probe
  source 1..29: mol_type = other DNA
aggcggcccgggttcgactcccggtgtgg

SEQ ID NO: 12730 - DNA, 30 bp, synthetic construct; identical to SEQ ID NO: 3426
  misc_feature 1..30: note = Probe
  source 1..30: mol_type = other DNA

SEQ ID NO: 12731 - DNA, 31 bp, synthetic construct; identical to SEQ ID NO: 325
  misc_feature 1..31: note = Probe
  source 1..31: mol_type = other DNA

SEQ ID NO: 12732 - DNA, 32 bp, synthetic construct; identical to SEQ ID NO: 326
  misc_feature 1..32: note = Probe
  source 1..32: mol_type = other DNA

SEQ ID NO: 12733 - DNA, 33 bp, synthetic construct; identical to SEQ ID NO: 327
  misc_feature 1..33: note = Probe
  source 1..33: mol_type = other DNA

SEQ ID NO: 12734 - DNA, 23 bp, synthetic construct
  misc_feature 1..23: note = Probe
  source 1..23: mol_type = other DNA
aggcttacgaccccttatttacc

SEQ ID NO: 12735 - DNA, 17 bp, synthetic construct
  misc_feature 1..17: note = Probe
  source 1..17: mol_type = other DNA
aggggtatgattctcgg

SEQ ID NO: 12736 - DNA, 18 bp, synthetic construct
  misc_feature 1..18: note = Probe
  source 1..18: mol_type = other DNA
aggggtatgattctcggt

SEQ ID NO: 12737 - DNA, 29 bp, synthetic construct
  misc_feature 1..29: note = Probe
  source 1..29: mol_type = other DNA
agggtcgtgggttcgagccccacgttggg

SEQ ID NO: 12738 - DNA, 29 bp, synthetic construct
  misc_feature 1..29: note = Probe
  source 1..29: mol_type = other DNA
aggtggcccgggttcgactcccggtatgg

SEQ ID NO: 12739 - DNA, 31 bp, synthetic construct
  misc_feature 1..31: note = Probe
  source 1..31: mol_type = other DNA
aggtggcccgggttcgactcccggtatggga

SEQ ID NO: 12740 - DNA, 32 bp, synthetic construct; identical to SEQ ID NO: 3488
  misc_feature 1..32: note = Probe
  source 1..32: mol_type = other DNA

SEQ ID NO: 12741 - DNA, 33 bp, synthetic construct; identical to SEQ ID NO: 3489
  misc_feature 1..33: note = Probe
  source 1..33: mol_type = other DNA

SEQ ID NO: 12742 - DNA, 34 bp, synthetic construct; identical to SEQ ID NO: 3537
  misc_feature 1..34: note = Probe
  source 1..34: mol_type = other DNA

SEQ ID NO: 12743 - DNA, 35 bp, synthetic construct
  misc_feature 1..35: note = Probe
  source 1..35: mol_type = other DNA
agtaccgttaacttccaattaactagttttgacaa

SEQ ID NO: 12744 - DNA, 28 bp, synthetic construct
  misc_feature 1..28: note = Probe
  source 1..28: mol_type = other DNA
agtatccccgcctgtcacgcgggagacc

SEQ ID NO: 12745 - DNA, 30 bp, synthetic construct
  misc_feature 1..30: note = Probe
  source 1..30: mol_type = other DNA
agtatccccgcctgtcacgcgggagaccgg

SEQ ID NO: 12746 - DNA, 16 bp, synthetic construct
  misc_feature 1..16: note = Probe
  source 1..16: mol_type = other DNA
agtcggtagagcatca

SEQ ID NO: 12747 - DNA, 17 bp, synthetic construct
  misc_feature 1..17: note = Probe
  source 1..17: mol_type = other DNA
agtcggtagagcatcag

SEQ ID NO: 12748 - DNA, 18 bp, synthetic construct
  misc_feature 1..18: note = Probe
  source 1..18: mol_type = other DNA
agtcggtagagcatcaga

SEQ ID NO: 12749 - DNA, 19 bp, synthetic construct
  misc_feature 1..19: note = Probe
  source 1..19: mol_type = other DNA
agtcggtagagcatcagac

SEQ ID NO: 12750 - DNA, 21 bp, synthetic construct
  misc_feature 1..21: note = Probe
  source 1..21: mol_type = other DNA
agtcggtagagcatcagactt

SEQ ID NO: 12751 - DNA, 22 bp, synthetic construct
  misc_feature 1..22: note = Probe
  source 1..22: mol_type = other DNA
agtcggtagagcatcagacttt

SEQ ID NO: 12752 - DNA, 18 bp, synthetic construct
  misc_feature 1..18: note = Probe
  source 1..18: mol_type = other DNA
agtcggtagagcatggga

SEQ ID NO: 12753 - DNA, 19 bp, synthetic construct
  misc_feature 1..19: note = Probe
  source 1..19: mol_type = other DNA
agtcggtagagcatgggac

SEQ ID NO: 12754 - DNA, 26 bp, synthetic construct
  misc_feature 1..26: note = Probe
  source 1..26: mol_type = other DNA
agtctcataatctgaaggtcgtgagt

SEQ ID NO: 12755 - DNA, 18 bp, synthetic construct
  misc_feature 1..18: note = Probe
  source 1..18: mol_type = other DNA
agtggctaggattcggcg

SEQ ID NO: 12756 - DNA, 36 bp, synthetic construct
  misc_feature 1..36: note = Probe
  source 1..36: mol_type = other DNA
agtggctaggattcggcgctttcaccgccgcggccc

SEQ ID NO: 12757 - DNA, 17 bp, synthetic construct
  misc_feature 1..17: note = Probe
  source 1..17: mol_type = other DNA
agtggtatgattctcgc

SEQ ID NO: 12758 - DNA, 41 bp, synthetic construct
  misc_feature 1..41: note = Probe
  source 1..41: mol_type = other DNA
agtggtgagcatagctgccttccaagcagttgacccgggtt

SEQ ID NO: 12759 - DNA, 19 bp, synthetic construct
  misc_feature 1..19: note = Probe
  source 1..19: mol_type = other DNA
agtggtgagtatccccgcc

SEQ ID NO: 12760 - DNA, 22 bp, synthetic construct
  misc_feature 1..22: note = Probe
  source 1..22: mol_type = other DNA
agtggtgagtatccccgcctgt

SEQ ID NO: 12761 - DNA, 23 bp, synthetic construct
  misc_feature 1..23: note = Probe
  source 1..23: mol_type = other DNA
agtggtgagtatccccgcctgtc

SEQ ID NO: 12762 - DNA, 24 bp, synthetic construct
  misc_feature 1..24: note = Probe
  source 1..24: mol_type = other DNA
agtggtgagtatccccgcctgtca

SEQ ID NO: 12763 - DNA, 25 bp, synthetic construct
  misc_feature 1..25: note = Probe
  source 1..25: mol_type = other DNA
agtggtgagtatccccgcctgtcac

SEQ ID NO: 12764 - DNA, 26 bp, synthetic construct
  misc_feature 1..26: note = Probe
  source 1..26: mol_type = other DNA
agtggtgagtatccccgcctgtcacg

SEQ ID NO: 12765 - DNA, 36 bp, synthetic construct
  misc_feature 1..36: note = Probe
  source 1..36: mol_type = other DNA
agtggtgagtatccccgcctgtcacgcgggagaccg

SEQ ID NO: 12766 - DNA, 37 bp, synthetic construct
  misc_feature 1..37: note = Probe
  source 1..37: mol_type = other DNA
agtggtgagtatccccgcctgtcacgcgggagaccgg

SEQ ID NO: 12767 - DNA, 40 bp, synthetic construct
  misc_feature 1..40: note = Probe
  source 1..40: mol_type = other DNA
agtggtgagtatccccgcctgtcacgcgggagaccggggt

SEQ ID NO: 12768 - DNA, 36 bp, synthetic construct
  misc_feature 1..36: note = Probe
  source 1..36: mol_type = other DNA
agtggttagcatagctgccttccaagcagttgaccc

SEQ ID NO: 12769 - DNA, 40 bp, synthetic construct
  misc_feature 1..40: note = Probe
  source 1..40: mol_type = other DNA
agtggttagcatagctgccttccaagcagttgacccgggt

SEQ ID NO: 12770 - DNA, 41 bp, synthetic construct
  misc_feature 1..41: note = Probe
  source 1..41: mol_type = other DNA
agtggttagcatagctgccttccaagcagttgacccgggtt

SEQ ID NO: 12771 - DNA, 18 bp, synthetic construct
  misc_feature 1..18: note = Probe
  source 1..18: mol_type = other DNA
agtggttaggattcggcg

SEQ ID NO: 12772 - DNA, 19 bp, synthetic construct
  misc_feature 1..19: note = Probe
  source 1..19: mol_type = other DNA
agtggttaggattcggcgc

SEQ ID NO: 12773 - DNA, 20 bp, synthetic construct
  misc_feature 1..20: note = Probe
  source 1..20: mol_type = other DNA
agtggttaggattcggcgct

SEQ ID NO: 12774 - DNA, 21 bp, synthetic construct
  misc_feature 1..21: note = Probe
  source 1..21: mol_type = other DNA
agtggttaggattcggcgctc

SEQ ID NO: 12775 - DNA, 24 bp, synthetic construct
  misc_feature 1..24: note = Probe
  source 1..24: mol_type = other DNA
agtggttaggattcggcgctctca

SEQ ID NO: 12776 - DNA, 35 bp, synthetic construct
  misc_feature 1..35: note = Probe
  source 1..35: mol_type = other DNA
agtggttaggattcggcgctctcaccgccgcggcc

SEQ ID NO: 12777 - DNA, 36 bp, synthetic construct; identical to SEQ ID NO: 361
  misc_feature 1..36: note = Probe
  source 1..36: mol_type = other DNA

SEQ ID NO: 12778 - DNA, 37 bp, synthetic construct
  misc_feature 1..37: note = Probe
  source 1..37: mol_type = other DNA
agtggttaggattcggcgctctcaccgccgcggcccg

SEQ ID NO: 12779 - DNA, 40 bp, synthetic construct
  misc_feature 1..40: note = Probe
  source 1..40: mol_type = other DNA
agtggttaggattcggcgctctcaccgccgcggcccgggt

SEQ ID NO: 12780 - DNA, 18 bp, synthetic construct
  misc_feature 1..18: note = Probe
  source 1..18: mol_type = other DNA
agtggttagtactctgcg

SEQ ID NO: 12781 - DNA, 19 bp, synthetic construct
  misc_feature 1..19: note = Probe
  source 1..19: mol_type = other DNA
agtggttagtactctgcgt

SEQ ID NO: 12782 - DNA, 17 bp, synthetic construct
  misc_feature 1..17: note = Probe
  source 1..17: mol_type = other DNA
agtggttagtatccccg

SEQ ID NO: 12783 - DNA, 18 bp, synthetic construct
  misc_feature 1..18: note = Probe
  source 1..18: mol_type = other DNA
agtggttagtatccccgc

SEQ ID NO: 12784 - DNA, 19 bp, synthetic construct
  misc_feature 1..19: note = Probe
  source 1..19: mol_type = other DNA
agtggttagtatccccgcc

SEQ ID NO: 12785 - DNA, 29 bp, synthetic construct
  misc_feature 1..29: note = Probe
  source 1..29: mol_type = other DNA
agtgtttgtgggtttaagtcccattggtc

SEQ ID NO: 12786 - DNA, 30 bp, synthetic construct; identical to SEQ ID NO: 3599
  misc_feature 1..30: note = Probe
  source 1..30: mol_type = other DNA

SEQ ID NO: 12787 - DNA, 31 bp, synthetic construct; identical to SEQ ID NO: 3600
  misc_feature 1..31: note = Probe
  source 1..31: mol_type = other DNA

SEQ ID NO: 12788 - DNA, 30 bp, synthetic construct
  misc_feature 1..30: note = Probe
  source 1..30: mol_type = other DNA
agttgatgcagagtggggttttgcagtcct

SEQ ID NO: 12789 - DNA, 31 bp, synthetic construct
  misc_feature 1..31: note = Probe
  source 1..31: mol_type = other DNA
agttgatgcagagtggggttttgcagtcctt

SEQ ID NO: 12790 - DNA, 32 bp, synthetic construct; identical to SEQ ID NO: 3614
  misc_feature 1..32: note = Probe
  source 1..32: mol_type = other DNA

SEQ ID NO: 12791 - DNA, 50 bp, synthetic construct; identical to SEQ ID NO: 365
  misc_feature 1..50: note = Probe
  source 1..50: mol_type = other DNA

SEQ ID NO: 12792 - DNA, 23 bp, synthetic construct
  misc_feature 1..23: note = Probe
  source 1..23: mol_type = other DNA
ataacccagaggtcgatggatcg

SEQ ID NO: 12793 - DNA, 20 bp, synthetic construct
  misc_feature 1..20: note = Probe
  source 1..20: mol_type = other DNA
ataacgccaaggtcgcgggt

SEQ ID NO: 12794 - DNA, 37 bp, synthetic construct
  misc_feature 1..37: note = Probe
  source 1..37: mol_type = other DNA
ataccccgaaaatgttggttatacccttcccgtacta

SEQ ID NO: 12795 - DNA, 27 bp, synthetic construct
  misc_feature 1..27: note = Probe
  source 1..27: mol_type = other DNA
atagctcagtcggtagagcatcagact

SEQ ID NO: 12796 - DNA, 29 bp, synthetic construct
  misc_feature 1..29: note = Probe
  source 1..29: mol_type = other DNA
atagctcagtcggtagagcatcagacttt

SEQ ID NO: 12797 - DNA, 30 bp, synthetic construct
  misc_feature 1..30: note = Probe
  source 1..30: mol_type = other DNA
atagctcagtcggtagagcatcagactttt

SEQ ID NO: 12798 - DNA, 31 bp, synthetic construct
  misc_feature 1..31: note = Probe
  source 1..31: mol_type = other DNA
atagctcagtcggtagagcatcagactttta

SEQ ID NO: 12799 - DNA, 33 bp, synthetic construct
  misc_feature 1..33: note = Probe
  source 1..33: mol_type = other DNA
atatcattggtcgtggttgtagtccgtgcgaga

SEQ ID NO: 12800 - DNA, 34 bp, synthetic construct
  misc_feature 1..34: note = Probe
  source 1..34: mol_type = other DNA
atatcattggtcgtggttgtagtccgtgcgagaa

SEQ ID NO: 12801 - DNA, 35 bp, synthetic construct
  misc_feature 1..35: note = Probe
  source 1..35: mol_type = other DNA
atatcattggtcgtggttgtagtccgtgcgagaat

SEQ ID NO: 12802 - DNA, 36 bp, synthetic construct; identical to SEQ ID NO: 372
  misc_feature 1..36: note = Probe
  source 1..36: mol_type = other DNA

SEQ ID NO: 12803 - DNA, 34 bp, synthetic construct; identical to SEQ ID NO: 374
  misc_feature 1..34: note = Probe
  source 1..34: mol_type = other DNA

SEQ ID NO: 12804 - DNA, 34 bp, synthetic construct; identical to SEQ ID NO: 375
  misc_feature 1..34: note = Probe
  source 1..34: mol_type = other DNA

SEQ ID NO: 12805 - DNA, 36 bp, synthetic construct
  misc_feature 1..36: note = Probe
  source 1..36: mol_type = other DNA
atcagaagattctaggttcgactcctggctggctcg

SEQ ID NO: 12806 - DNA, 34 bp, synthetic construct
  misc_feature 1..34: note = Probe
  source 1..34: mol_type = other DNA
atcagaagattgagggttcgagtcccttcgtggt

SEQ ID NO: 12807 - DNA, 34 bp, synthetic construct
  misc_feature 1..34: note = Probe
  source 1..34: mol_type = other DNA
atcagaagattgcaggttcgagtcctgccgcggt

SEQ ID NO: 12808 - DNA, 34 bp, synthetic construct
  misc_feature 1..34: note = Probe
  source 1..34: mol_type = other DNA
atcattggtcgtggttgtagtccgtgcgagaata

SEQ ID NO: 12809 - DNA, 16 bp, synthetic construct
  misc_feature 1..16: note = Probe
  source 1..16: mol_type = other DNA
atccagcgatccgagt

SEQ ID NO: 12810 - DNA, 35 bp, synthetic construct; identical to SEQ ID NO: 379
  misc_feature 1..35: note = Probe
  source 1..35: mol_type = other DNA

SEQ ID NO: 12811 - DNA, 16 bp, synthetic construct
  misc_feature 1..16: note = Probe
  source 1..16: mol_type = other DNA
atcccaccgctgccac

SEQ ID NO: 12812 - DNA, 17 bp, synthetic construct
  misc_feature 1..17: note = Probe
  source 1..17: mol_type = other DNA
atcccagcggtgcctcc

SEQ ID NO: 12813 - DNA, 16 bp, synthetic construct
  misc_feature 1..16: note = Probe
  source 1..16: mol_type = other DNA
atccccggcacctcca

SEQ ID NO: 12814 - DNA, 17 bp, synthetic construct
  misc_feature 1..17: note = Probe
  source 1..17: mol_type = other DNA
atccccggcacctccac

SEQ ID NO: 12815 - DNA, 18 bp, synthetic construct
  misc_feature 1..18: note = Probe
  source 1..18: mol_type = other DNA
atccccggcacctccacc

SEQ ID NO: 12816 - DNA, 19 bp, synthetic construct
  misc_feature 1..19: note = Probe
  source 1..19: mol_type = other DNA
atccccggcacctccacca

SEQ ID NO: 12817 - DNA, 16 bp, synthetic construct
  misc_feature 1..16: note = Probe
  source 1..16: mol_type = other DNA
atccccggcatctcca

SEQ ID NO: 12818 - DNA, 16 bp, synthetic construct
  misc_feature 1..16: note = Probe
  source 1..16: mol_type = other DNA
atccgggtgccccctc

SEQ ID NO: 12819 - DNA, 28 bp, synthetic construct
  misc_feature 1..28: note = Probe
  source 1..28: mol_type = other DNA
atcgcataaaacttaaaactttacagtc

SEQ ID NO: 12820 - DNA, 29 bp, synthetic construct
  misc_feature 1..29: note = Probe
  source 1..29: mol_type = other DNA
atcgcataaaacttaaaactttacagtca

SEQ ID NO: 12821 - DNA, 32 bp, synthetic construct; identical to SEQ ID NO: 386
  misc_feature 1..32: note = Probe
  source 1..32: mol_type = other DNA

SEQ ID NO: 12822 - DNA, 33 bp, synthetic construct; identical to SEQ ID NO: 387
  misc_feature 1..33: note = Probe
  source 1..33: mol_type = other DNA

SEQ ID NO: 12823 - DNA, 30 bp, synthetic construct
  misc_feature 1..30: note = Probe
  source 1..30: mol_type = other DNA
atgattctcgctttgggtgcgagaggtccc

SEQ ID NO: 12824 - DNA, 29 bp, synthetic construct
  misc_feature 1..29: note = Probe
  source 1..29: mol_type = other DNA
atgggtggttcagtggtagaattctcgcc

SEQ ID NO: 12825 - DNA, 30 bp, synthetic construct; identical to SEQ ID NO: 403
  misc_feature 1..30: note = Probe
  source 1..30: mol_type = other DNA

SEQ ID NO: 12826 - DNA, 31 bp, synthetic construct; identical to SEQ ID NO: 404
  misc_feature 1..31: note = Probe
  source 1..31: mol_type = other DNA

SEQ ID NO: 12827 - DNA, 32 bp, synthetic construct; identical to SEQ ID NO: 405
  misc_feature 1..32: note = Probe
  source 1..32: mol_type = other DNA

SEQ ID NO: 12828 - DNA, 33 bp, synthetic construct; identical to SEQ ID NO: 406
  misc_feature 1..33: note = Probe
  source 1..33: mol_type = other DNA

SEQ ID NO: 12829 - DNA, 16 bp, synthetic construct
  misc_feature 1..16: note = Probe
  source 1..16: mol_type = other DNA
atggtagagcgctcgc

SEQ ID NO: 12830 - DNA, 28 bp, synthetic construct
  misc_feature 1..28: note = Probe
  source 1..28: mol_type = other DNA
atggtggagttaaagactttttctctga

SEQ ID NO: 12831 - DNA, 38 bp, synthetic construct
  misc_feature 1..38: note = Probe
  source 1..38: mol_type = other DNA
atggttagcactctggactttgaatccagcgatccgag

SEQ ID NO: 12832 - DNA, 16 bp, synthetic construct
  misc_feature 1..16: note = Probe
  source 1..16: mol_type = other DNA
atgtttagacgggctc

SEQ ID NO: 12833 - DNA, 17 bp, synthetic construct
  misc_feature 1..17: note = Probe
  source 1..17: mol_type = other DNA
atgtttagacgggctca

SEQ ID NO: 12834 - DNA, 18 bp, synthetic construct
  misc_feature 1..18: note = Probe
  source 1..18: mol_type = other DNA
atgtttagacgggctcac

SEQ ID NO: 12835 - DNA, 19 bp, synthetic construct
  misc_feature 1..19: note = Probe
  source 1..19: mol_type = other DNA
atgtttagacgggctcaca

SEQ ID NO: 12836 - DNA, 20 bp, synthetic construct
  misc_feature 1..20: note = Probe
  source 1..20: mol_type = other DNA
atgtttagacgggctcacat

SEQ ID NO: 12837 - DNA, 27 bp, synthetic construct
  misc_feature 1..27: note = Probe
  source 1..27: mol_type = other DNA
atgtttagacgggctcacatcacccca

SEQ ID NO: 12838 - DNA, 32 bp, synthetic construct
  misc_feature 1..32: note = Probe
  source 1..32: mol_type = other DNA
attaactagttttgacaacattcaaaaaagag

SEQ ID NO: 12839 - DNA, 19 bp, synthetic construct
  misc_feature 1..19: note = Probe
  source 1..19: mol_type = other DNA
attcccggtcagggaacca

SEQ ID NO: 12840 - DNA, 37 bp, synthetic construct; identical to SEQ ID NO: 3894
  misc_feature 1..37: note = Probe
  source 1..37: mol_type = other DNA

SEQ ID NO: 12841 - DNA, 25 bp, synthetic construct
  misc_feature 1..25: note = Probe
  source 1..25: mol_type = other DNA
attggtcgtggttgtagtccgtgcg

SEQ ID NO: 12842 - DNA, 27 bp, synthetic construct
  misc_feature 1..27: note = Probe
  source 1..27: mol_type = other DNA
attggtcgtggttgtagtccgtgcgag

SEQ ID NO: 12843 - DNA, 28 bp, synthetic construct
  misc_feature 1..28: note = Probe
  source 1..28: mol_type = other DNA
attggtcgtggttgtagtccgtgcgaga

SEQ ID NO: 12844 - DNA, 29 bp, synthetic construct
  misc_feature 1..29: note = Probe
  source 1..29: mol_type = other DNA
attggtcgtggttgtagtccgtgcgagaa

SEQ ID NO: 12845 - DNA, 31 bp, synthetic construct; identical to SEQ ID NO: 426
  misc_feature 1..31: note = Probe
  source 1..31: mol_type = other DNA

SEQ ID NO: 12846 - DNA, 32 bp, synthetic construct; identical to SEQ ID NO: 3924
  misc_feature 1..32: note = Probe
  source 1..32: mol_type = other DNA

SEQ ID NO: 12847 - DNA, 33 bp, synthetic construct; identical to SEQ ID NO: 3925
  misc_feature 1..33: note = Probe
  source 1..33: mol_type = other DNA

SEQ ID NO: 12848 - DNA, 45 bp, synthetic construct; identical to SEQ ID NO: 435
  misc_feature 1..45: note = Probe
  source 1..45: mol_type = other DNA

SEQ ID NO: 12849 - DNA, 50 bp, synthetic construct; identical to SEQ ID NO: 437
  misc_feature 1..50: note = Probe
  source 1..50: mol_type = other DNA

SEQ ID NO: 12850 - DNA, 29 bp, synthetic construct
  misc_feature 1..29: note = Probe
  source 1..29: mol_type = other DNA
caaagcaatacactgaaaatgtttagacg

SEQ ID NO: 12851 - DNA, 33 bp, synthetic construct
  misc_feature 1..33: note = Probe
  source 1..33: mol_type = other DNA
caaagcaatacactgaaaatgtttagacgggct

SEQ ID NO: 12852 - DNA, 35 bp, synthetic construct; identical to SEQ ID NO: 438
  misc_feature 1..35: note = Probe
  source 1..35: mol_type = other DNA

SEQ ID NO: 12853 - DNA, 37 bp, synthetic construct; identical to SEQ ID NO: 439
  misc_feature 1..37: note = Probe
  source 1..37: mol_type = other DNA

SEQ ID NO: 12854 - DNA, 50 bp, synthetic construct; identical to SEQ ID NO: 442
  misc_feature 1..50: note = Probe
  source 1..50: mol_type = other DNA

SEQ ID NO: 12855 - DNA, 50 bp, synthetic construct; identical to SEQ ID NO: 447
  misc_feature 1..50: note = Probe
  source 1..50: mol_type = other DNA

SEQ ID NO: 12856 - DNA, 31 bp, synthetic construct
  misc_feature 1..31: note = Probe
  source 1..31: mol_type = other DNA
caaaggttccgggttcgagtcccggcggagt

SEQ ID NO: 12857 - DNA, 30 bp, synthetic construct
  misc_feature 1..30: note = Probe
  source 1..30: mol_type = other DNA
caagaactgctaactcatgcccccatgtct

SEQ ID NO: 12858 - DNA, 34 bp, synthetic construct
  misc_feature 1..34: note = Probe
  source 1..34: mol_type = other DNA
caagaactgctaactcatgcccccatgtctaaca

SEQ ID NO: 12859 - DNA, 37 bp, synthetic construct
  misc_feature 1..37: note = Probe
  source 1..37: mol_type = other DNA
caagaactgctaactcatgcccccatgtctaacaaca

SEQ ID NO: 12860 - DNA, 46 bp, synthetic construct; identical to SEQ ID NO: 452
  misc_feature 1..46: note = Probe
  source 1..46: mol_type = other DNA

SEQ ID NO: 12861 - DNA, 20 bp, synthetic construct
  misc_feature 1..20: note = Probe
  source 1..20: mol_type = other DNA
caatccccggcacctccacc

SEQ ID NO: 12862 - DNA, 21 bp, synthetic construct
  misc_feature 1..21: note = Probe
  source 1..21: mol_type = other DNA
caatccccggcacctccacca

SEQ ID NO: 12863 - DNA, 19 bp, synthetic construct
  misc_feature 1..19: note = Probe
  source 1..19: mol_type = other DNA
cacgcgaaaggtccccggt

SEQ ID NO: 12864 - DNA, 16 bp, synthetic construct
  misc_feature 1..16: note = Probe
  source 1..16: mol_type = other DNA
cacgcgggagaccggg

SEQ ID NO: 12865 - DNA, 34 bp, synthetic construct; identical to SEQ ID NO: 4128
  misc_feature 1..34: note = Probe
  source 1..34: mol_type = other DNA

SEQ ID NO: 12866 - DNA, 33 bp, synthetic construct; identical to SEQ ID NO: 482
  misc_feature 1..33: note = Probe
  source 1..33: mol_type = other DNA

SEQ ID NO: 12867 - DNA, 34 bp, synthetic construct; identical to SEQ ID NO: 483
  misc_feature 1..34: note = Probe
  source 1..34: mol_type = other DNA

SEQ ID NO: 12868 - DNA, 35 bp, synthetic construct; identical to SEQ ID NO: 484
  misc_feature 1..35: note = Probe
  source 1..35: mol_type = other DNA

SEQ ID NO: 12869 - DNA, 37 bp, synthetic construct; identical to SEQ ID NO: 486
  misc_feature 1..37: note = Probe
  source 1..37: mol_type = other DNA

SEQ ID NO: 12870 - DNA, 27 bp, synthetic construct
  misc_feature 1..27: note = Probe
  source 1..27: mol_type = other DNA
cactgtaaagctaacttagcattaacc

SEQ ID NO: 12871 - DNA, 28 bp, synthetic construct
  misc_feature 1..28: note = Probe
  source 1..28: mol_type = other DNA
cactgtaaagctaacttagcattaacct

SEQ ID NO: 12872 - DNA, 30 bp, synthetic construct; identical to SEQ ID NO: 493
  misc_feature 1..30: note = Probe
  source 1..30: mol_type = other DNA

SEQ ID NO: 12873 - DNA, 50 bp, synthetic construct; identical to SEQ ID NO: 502
  misc_feature 1..50: note = Probe
  source 1..50: mol_type = other DNA

SEQ ID NO: 12874 - DNA, 32 bp, synthetic construct; identical to SEQ ID NO: 504
  misc_feature 1..32: note = Probe
  source 1..32: mol_type = other DNA

SEQ ID NO: 12875 - DNA, 32 bp, synthetic construct; identical to SEQ ID NO: 505
  misc_feature 1..32: note = Probe
  source 1..32: mol_type = other DNA

SEQ ID NO: 12876 - DNA, 32 bp, synthetic construct; identical to SEQ ID NO: 511
  misc_feature 1..32: note = Probe
  source 1..32: mol_type = other DNA

SEQ ID NO: 12877 - DNA, 32 bp, synthetic construct; identical to SEQ ID NO: 4220
  misc_feature 1..32: note = Probe
  source 1..32: mol_type = other DNA

SEQ ID NO: 12878 - DNA, 35 bp, synthetic construct
  misc_feature 1..35: note = Probe
  source 1..35: mol_type = other DNA
cagaaggtcctgggttcgagccccagtggaaccac

SEQ ID NO: 12879 - DNA, 17 bp, synthetic construct
  misc_feature 1..17: note = Probe
  source 1..17: mol_type = other DNA
cagaccaagagccttca

SEQ ID NO: 12880 - DNA, 36 bp, synthetic construct; identical to SEQ ID NO: 513
  misc_feature 1..36: note = Probe
  source 1..36: mol_type = other DNA

SEQ ID NO: 12881 - DNA, 24 bp, synthetic construct
  misc_feature 1..24: note = Probe
  source 1..24: mol_type = other DNA
cagagaatagtttaaattagaatc

SEQ ID NO: 12882 - DNA, 30 bp, synthetic construct; identical to SEQ ID NO: 519
  misc_feature 1..30: note = Probe
  source 1..30: mol_type = other DNA

SEQ ID NO: 12883 - DNA, 30 bp, synthetic construct
  misc_feature 1..30: note = Probe
  source 1..30: mol_type = other DNA
cagagtggcgcagcggaagcgtgctgggcc

SEQ ID NO: 12884 - DNA, 31 bp, synthetic construct; identical to SEQ ID NO: 4247
  misc_feature 1..31: note = Probe
  source 1..31: mol_type = other DNA

SEQ ID NO: 12885 - DNA, 32 bp, synthetic construct; identical to SEQ ID NO: 527
  misc_feature 1..32: note = Probe
  source 1..32: mol_type = other DNA

SEQ ID NO: 12886 - DNA, 35 bp, synthetic construct
  misc_feature 1..35: note = Probe
  source 1..35: mol_type = other DNA
cagattgtgaatctgacaacagaggcttacgaccc

SEQ ID NO: 12887 - DNA, 29 bp, synthetic construct
  misc_feature 1..29: note = Probe
  source 1..29: mol_type = other DNA
caggcggcccgggttcgactcccggtgtg

SEQ ID NO: 12888 - DNA, 30 bp, synthetic construct; identical to SEQ ID NO: 9562
  misc_feature 1..30: note = Probe
  source 1..30: mol_type = other DNA

SEQ ID NO: 12889 - DNA, 31 bp, synthetic construct
  misc_feature 1..31: note = Probe
  source 1..31: mol_type = other DNA
caggcggcccgggttcgactcccggtgtggg

SEQ ID NO: 12890 - DNA, 33 bp, synthetic construct; identical to SEQ ID NO: 4339
  misc_feature 1..33: note = Probe
  source 1..33: mol_type = other DNA

SEQ ID NO: 12891 - DNA, 34 bp, synthetic construct; identical to SEQ ID NO: 533
  misc_feature 1..34: note = Probe
  source 1..34: mol_type = other DNA

SEQ ID NO: 12892 - DNA, 26 bp, synthetic construct
  misc_feature 1..26: note = Probe
  source 1..26: mol_type = other DNA
cagggatgggttcgattctcatagtc

SEQ ID NO: 12893 - DNA, 27 bp, synthetic construct
  misc_feature 1..27: note = Probe
  source 1..27: mol_type = other DNA
cagggatgggttcgattctcatagtcc

SEQ ID NO: 12894 - DNA, 28 bp, synthetic construct
  misc_feature 1..28: note = Probe
  source 1..28: mol_type = other DNA
cagggatgggttcgattctcatagtcct

SEQ ID NO: 12895 - DNA, 30 bp, synthetic construct; identical to SEQ ID NO: 534
  misc_feature 1..30: note = Probe
  source 1..30: mol_type = other DNA

SEQ ID NO: 12896 - DNA, 32 bp, synthetic construct; identical to SEQ ID NO: 4353
  misc_feature 1..32: note = Probe
  source 1..32: mol_type = other DNA

SEQ ID NO: 12897 - DNA, 34 bp, synthetic construct
  misc_feature 1..34: note = Probe
  source 1..34: mol_type = other DNA
caggtggcccgggttcgactcccggtatgggaac

SEQ ID NO: 12898 - DNA, 16 bp, synthetic construct
  misc_feature 1..16: note = Probe
  source 1..16: mol_type = other DNA
cagtcggtagagcatc

SEQ ID NO: 12899 - DNA, 27 bp, synthetic construct
  misc_feature 1..27: note = Probe
  source 1..27: mol_type = other DNA
cagtctcataatctgaaggtcgtgagt

SEQ ID NO: 12900 - DNA, 50 bp, synthetic construct; identical to SEQ ID NO: 538
  misc_feature 1..50: note = Probe
  source 1..50: mol_type = other DNA

SEQ ID NO: 12901 - DNA, 21 bp, synthetic construct
  misc_feature 1..21: note = Probe
  source 1..21: mol_type = other DNA
cataatctgaaggtcgtgagt

SEQ ID NO: 12902 - DNA, 31 bp, synthetic construct; identical to SEQ ID NO: 4442
  misc_feature 1..31: note = Probe
  source 1..31: mol_type = other DNA

SEQ ID NO: 12903 - DNA, 32 bp, synthetic construct; identical to SEQ ID NO: 4443
  misc_feature 1..32: note = Probe
  source 1..32: mol_type = other DNA

SEQ ID NO: 12904 - DNA, 20 bp, synthetic construct
  misc_feature 1..20: note = Probe
  source 1..20: mol_type = other DNA
cattggggtttccccgcgca

SEQ ID NO: 12905 - DNA, 22 bp, synthetic construct
  misc_feature 1..22: note = Probe
  source 1..22: mol_type = other DNA
cattggggtttccccgcgcagg

SEQ ID NO: 12906 - DNA, 23 bp, synthetic construct
  misc_feature 1..23: note = Probe
  source 1..23: mol_type = other DNA
cattggggtttccccgcgcaggt

SEQ ID NO: 12907 - DNA, 24 bp, synthetic construct
  misc_feature 1..24: note = Probe
  source 1..24: mol_type = other DNA
cattggggtttccccgcgcaggtt

SEQ ID NO: 12908 - DNA, 32 bp, synthetic construct; identical to SEQ ID NO: 548
  misc_feature 1..32: note = Probe
  source 1..32: mol_type = other DNA

SEQ ID NO: 12909 - DNA, 46 bp, synthetic construct; identical to SEQ ID NO: 558
  misc_feature 1..46: note = Probe
  source 1..46: mol_type = other DNA

SEQ ID NO: 12910 - DNA, 27 bp, synthetic construct
  misc_feature 1..27: note = Probe
  source 1..27: mol_type = other DNA
ccacatggtctagcggttaggattcct

SEQ ID NO: 12911 - DNA, 28 bp, synthetic construct
  misc_feature 1..28: note = Probe
  source 1..28: mol_type = other DNA
ccacatggtctagcggttaggattcctg

SEQ ID NO: 12912 - DNA, 29 bp, synthetic construct
  misc_feature 1..29: note = Probe
  source 1..29: mol_type = other DNA
ccacatggtctagcggttaggattcctgg

SEQ ID NO: 12913 - DNA, 31 bp, synthetic construct; identical to SEQ ID NO: 563
  misc_feature 1..31: note = Probe
  source 1..31: mol_type = other DNA

SEQ ID NO: 12914 - DNA, 32 bp, synthetic construct; identical to SEQ ID NO: 564
  misc_feature 1..32: note = Probe
  source 1..32: mol_type = other DNA

SEQ ID NO: 12915 - DNA, 33 bp, synthetic construct; identical to SEQ ID NO: 565
  misc_feature 1..33: note = Probe
  source 1..33: mol_type = other DNA

SEQ ID NO: 12916 - DNA, 34 bp, synthetic construct; identical to SEQ ID NO: 566
  misc_feature 1..34: note = Probe
  source 1..34: mol_type = other DNA

SEQ ID NO: 12917 - DNA, 35 bp, synthetic construct; identical to SEQ ID NO: 567
  misc_feature 1..35: note = Probe
  source 1..35: mol_type = other DNA

SEQ ID NO: 12918 - DNA, 19 bp, synthetic construct
  misc_feature 1..19: note = Probe
  source 1..19: mol_type = other DNA
ccacgcgggaggcccgggt

SEQ ID NO: 12919 - DNA, 20 bp, synthetic construct
  misc_feature 1..20: note = Probe
  source 1..20: mol_type = other DNA
ccacgcgggaggcccgggtt

SEQ ID NO: 12920 - DNA, 21 bp, synthetic construct
  misc_feature 1..21: note = Probe
  source 1..21: mol_type = other DNA
ccacgcgggaggcccgggttt

SEQ ID NO: 12921 - DNA, 17 bp, synthetic construct
  misc_feature 1..17: note = Probe
  source 1..17: mol_type = other DNA
ccagcgatccgagttca

SEQ ID NO: 12922 - DNA, 31 bp, synthetic construct; identical to SEQ ID NO: 4561
  misc_feature 1..31: note = Probe
  source 1..31: mol_type = other DNA

SEQ ID NO: 12923 - DNA, 34 bp, synthetic construct; identical to SEQ ID NO: 4562
  misc_feature 1..34: note = Probe
  source 1..34: mol_type = other DNA

SEQ ID NO: 12924 - DNA, 35 bp, synthetic construct; identical to SEQ ID NO: 572
  misc_feature 1..35: note = Probe
  source 1..35: mol_type = other DNA

SEQ ID NO: 12925 - DNA, 31 bp, synthetic construct; identical to SEQ ID NO: 4569
  misc_feature 1..31: note = Probe
  source 1..31: mol_type = other DNA

SEQ ID NO: 12926 - DNA, 33 bp, synthetic construct
  misc_feature 1..33: note = Probe
  source 1..33: mol_type = other DNA
ccaggtggcccgggttcgactcccggtatggga

SEQ ID NO: 12927 - DNA, 35 bp, synthetic construct
  misc_feature 1..35: note = Probe
  source 1..35: mol_type = other DNA
ccaggtggcccgggttcgactcccggtatgggaac

SEQ ID NO: 12928 - DNA, 50 bp, synthetic construct; identical to SEQ ID NO: 4574
  misc_feature 1..50: note = Probe
  source 1..50: mol_type = other DNA

SEQ ID NO: 12929 - DNA, 27 bp, synthetic construct
  misc_feature 1..27: note = Probe
  source 1..27: mol_type = other DNA
ccatagtgtagtggttatcacgtctgc

SEQ ID NO: 12930 - DNA, 32 bp, synthetic construct; identical to SEQ ID NO: 575
  misc_feature 1..32: note = Probe
  source 1..32: mol_type = other DNA

SEQ ID NO: 12931 - DNA, 33 bp, synthetic construct; identical to SEQ ID NO: 576
  misc_feature 1..33: note = Probe
  source 1..33: mol_type = other DNA

SEQ ID NO: 12932 - DNA, 24 bp, synthetic construct
  misc_feature 1..24: note = Probe
  source 1..24: mol_type = other DNA
ccattggggtttccccgcgcaggt

SEQ ID NO: 12933 - DNA, 28 bp, synthetic construct
  misc_feature 1..28: note = Probe
  source 1..28: mol_type = other DNA
cccacatggtctagcggttaggattcct

SEQ ID NO: 12934 - DNA, 32 bp, synthetic construct; identical to SEQ ID NO: 580
  misc_feature 1..32: note = Probe
  source 1..32: mol_type = other DNA

SEQ ID NO: 12935 - DNA, 33 bp, synthetic construct; identical to SEQ ID NO: 581
  misc_feature 1..33: note = Probe
  source 1..33: mol_type = other DNA

SEQ ID NO: 12936 - DNA, 34 bp, synthetic construct; identical to SEQ ID NO: 582
  misc_feature 1..34: note = Probe
  source 1..34: mol_type = other DNA

SEQ ID NO: 12937 - DNA, 35 bp, synthetic construct; identical to SEQ ID NO: 583
  misc_feature 1..35: note = Probe
  source 1..35: mol_type = other DNA

SEQ ID NO: 12938 - DNA, 31 bp, synthetic construct
  misc_feature 1..31: note = Probe
  source 1..31: mol_type = other DNA
cccaggcggcccgggttcgactcccggtgtg

SEQ ID NO: 12939 - DNA, 32 bp, synthetic construct; identical to SEQ ID NO: 585
  misc_feature 1..32: note = Probe
  source 1..32: mol_type = other DNA

SEQ ID NO: 12940 - DNA, 33 bp, synthetic construct
  misc_feature 1..33: note = Probe
  source 1..33: mol_type = other DNA
cccaggcggcccgggttcgactcccggtgtggg

SEQ ID NO: 12941 - DNA, 31 bp, synthetic construct
  misc_feature 1..31: note = Probe
  source 1..31: mol_type = other DNA
cccaggtggcccgggttcgactcccggtatg

SEQ ID NO: 12942 - DNA, 32 bp, synthetic construct
  misc_feature 1..32: note = Probe
  source 1..32: mol_type = other DNA
cccaggtggcccgggttcgactcccggtatgg

SEQ ID NO: 12943 - DNA, 19 bp, synthetic construct
  misc_feature 1..19: note = Probe
  source 1..19: mol_type = other DNA
cccataacccagaggtcga

SEQ ID NO: 12944 - DNA, 37 bp, synthetic construct
  misc_feature 1..37: note = Probe
  source 1..37: mol_type = other DNA
cccataccccgaaaatgttggttatacccttcccgta

SEQ ID NO: 12945 - DNA, 40 bp, synthetic construct
  misc_feature 1..40: note = Probe
  source 1..40: mol_type = other DNA
cccataccccgaaaatgttggttatacccttcccgtacta

SEQ ID NO: 12946 - DNA, 32 bp, synthetic construct; identical to SEQ ID NO: 590
  misc_feature 1..32: note = Probe
  source 1..32: mol_type = other DNA

SEQ ID NO: 12947 - DNA, 33 bp, synthetic construct; identical to SEQ ID NO: 4645
  misc_feature 1..33: note = Probe
  source 1..33: mol_type = other DNA

SEQ ID NO: 12948 - DNA, 34 bp, synthetic construct; identical to SEQ ID NO: 591
  misc_feature 1..34: note = Probe
  source 1..34: mol_type = other DNA

SEQ ID NO: 12949 - DNA, 31 bp, synthetic construct; identical to SEQ ID NO: 602
  misc_feature 1..31: note = Probe
  source 1..31: mol_type = other DNA

SEQ ID NO: 12950 - DNA, 32 bp, synthetic construct; identical to SEQ ID NO: 4701
  misc_feature 1..32: note = Probe
  source 1..32: mol_type = other DNA

SEQ ID NO: 12951 - DNA, 33 bp, synthetic construct; identical to SEQ ID NO: 603
  misc_feature 1..33: note = Probe
  source 1..33: mol_type = other DNA

SEQ ID NO: 12952 - DNA, 34 bp, synthetic construct; identical to SEQ ID NO: 604
  misc_feature 1..34: note = Probe
  source 1..34: mol_type = other DNA

SEQ ID NO: 12953 - DNA, 17 bp, synthetic construct
  misc_feature 1..17: note = Probe
  source 1..17: mol_type = other DNA
ccccggcacctccacca

SEQ ID NO: 12954 - DNA, 30 bp, synthetic construct; identical to SEQ ID NO: 611
  misc_feature 1..30: note = Probe
  source 1..30: mol_type = other DNA

SEQ ID NO: 12955 - DNA, 31 bp, synthetic construct; identical to SEQ ID NO: 612
  misc_feature 1..31: note = Probe
  source 1..31: mol_type = other DNA

SEQ ID NO: 12956 - DNA, 32 bp, synthetic construct; identical to SEQ ID NO: 613
  misc_feature 1..32: note = Probe
  source 1..32: mol_type = other DNA

SEQ ID NO: 12957 - DNA, 33 bp, synthetic construct; identical to SEQ ID NO: 614
  misc_feature 1..33: note = Probe
  source 1..33: mol_type = other DNA

SEQ ID NO: 12958 - DNA, 30 bp, synthetic construct; identical to SEQ ID NO: 615
  misc_feature 1..30: note = Probe
  source 1..30: mol_type = other DNA

SEQ ID NO: 12959 - DNA, 31 bp, synthetic construct; identical to SEQ ID NO: 616
  misc_feature 1..31: note = Probe
  source 1..31: mol_type = other DNA

SEQ ID NO: 12960 - DNA, 32 bp, synthetic construct; identical to SEQ ID NO: 617
  misc_feature 1..32: note = Probe
  source 1..32: mol_type = other DNA

SEQ ID NO: 12961 - DNA, 33 bp, synthetic construct; identical to SEQ ID NO: 618
  misc_feature 1..33: note = Probe
  source 1..33: mol_type = other DNA

SEQ ID NO: 12962 - DNA, 34 bp, synthetic construct; identical to SEQ ID NO: 619
  misc_feature 1..34: note = Probe
  source 1..34: mol_type = other DNA

SEQ ID NO: 12963 - DNA, 35 bp, synthetic construct; identical to SEQ ID NO: 620
  misc_feature 1..35: note = Probe
  source 1..35: mol_type = other DNA

SEQ ID NO: 12964 - DNA, 36 bp, synthetic construct
  misc_feature 1..36: note = Probe
  source 1..36: mol_type = other DNA
cccggatagctcagtcggtagagcatcagactttta

SEQ ID NO: 12965 - DNA, 25 bp, synthetic construct
  misc_feature 1..25: note = Probe
  source 1..25: mol_type = other DNA
cccggctagctcagtcggtagagca

SEQ ID NO: 12966 - DNA, 27 bp, synthetic construct
  misc_feature 1..27: note = Probe
  source 1..27: mol_type = other DNA
cccggctagctcagtcggtagagcatg

SEQ ID NO: 12967 - DNA, 28 bp, synthetic construct
  misc_feature 1..28: note = Probe
  source 1..28: mol_type = other DNA
cccggctagctcagtcggtagagcatga

SEQ ID NO: 12968 - DNA, 29 bp, synthetic construct
  misc_feature 1..29: note = Probe
  source 1..29: mol_type = other DNA
cccggctagctcagtcggtagagcatgag

SEQ ID NO: 12969 - DNA, 30 bp, synthetic construct; identical to SEQ ID NO: 4748
  misc_feature 1..30: note = Probe
  source 1..30: mol_type = other DNA

SEQ ID NO: 12970 - DNA, 31 bp, synthetic construct; identical to SEQ ID NO: 621
  misc_feature 1..31: note = Probe
  source 1..31: mol_type = other DNA

SEQ ID NO: 12971 - DNA, 32 bp, synthetic construct
  misc_feature 1..32: note = Probe
  source 1..32: mol_type = other DNA
cccggctagctcagtcggtagagcatgagacc

SEQ ID NO: 12972 - DNA, 32 bp, synthetic construct; identical to SEQ ID NO: 622
  misc_feature 1..32: note = Probe
  source 1..32: mol_type = other DNA

SEQ ID NO: 12973 - DNA, 33 bp, synthetic construct; identical to SEQ ID NO: 623
  misc_feature 1..33: note = Probe
  source 1..33: mol_type = other DNA

SEQ ID NO: 12974 - DNA, 35 bp, synthetic construct; identical to SEQ ID NO: 625
  misc_feature 1..35: note = Probe
  source 1..35: mol_type = other DNA

SEQ ID NO: 12975 - DNA, 28 bp, synthetic construct
  misc_feature 1..28: note = Probe
  source 1..28: mol_type = other DNA
cccggctagctcagtcggtagagcatgg

SEQ ID NO: 12976 - DNA, 29 bp, synthetic construct
  misc_feature 1..29: note = Probe
  source 1..29: mol_type = other DNA
cccggctagctcagtcggtagagcatggg

SEQ ID NO: 12977 - DNA, 30 bp, synthetic construct; identical to SEQ ID NO: 4750
  misc_feature 1..30: note = Probe
  source 1..30: mol_type = other DNA

SEQ ID NO: 12978 - DNA, 31 bp, synthetic construct; identical to SEQ ID NO: 626
  misc_feature 1..31: note = Probe
  source 1..31: mol_type = other DNA

SEQ ID NO: 12979 - DNA, 32 bp, synthetic construct; identical to SEQ ID NO: 627
  misc_feature 1..32: note = Probe
  source 1..32: mol_type = other DNA

SEQ ID NO: 12980 - DNA, 33 bp, synthetic construct; identical to SEQ ID NO: 628
  misc_feature 1..33: note = Probe
  source 1..33: mol_type = other DNA

SEQ ID NO: 12981 - DNA, 34 bp, synthetic construct; identical to SEQ ID NO: 629
  misc_feature 1..34: note = Probe
  source 1..34: mol_type = other DNA

SEQ ID NO: 12982 - DNA, 35 bp, synthetic construct; identical to SEQ ID NO: 630
  misc_feature 1..35: note = Probe
  source 1..35: mol_type = other DNA

SEQ ID NO: 12983 - DNA, 16 bp, synthetic construct
  misc_feature 1..16: note = Probe
  source 1..16: mol_type = other DNA
cccggtaatcgcataa

SEQ ID NO: 12984 - DNA, 16 bp, synthetic construct
  misc_feature 1..16: note = Probe
  source 1..16: mol_type = other DNA
ccctcagtaagttgca

SEQ ID NO: 12985 - DNA, 30 bp, synthetic construct
  misc_feature 1..30: note = Probe
  source 1..30: mol_type = other DNA
ccctggtggtctagtggctaggattcggcg

SEQ ID NO: 12986 - DNA, 32 bp, synthetic construct; identical to SEQ ID NO: 634
  misc_feature 1..32: note = Probe
  source 1..32: mol_type = other DNA

SEQ ID NO: 12987 - DNA, 33 bp, synthetic construct; identical to SEQ ID NO: 4764
  misc_feature 1..33: note = Probe
  source 1..33: mol_type = other DNA

SEQ ID NO: 12988 - DNA, 34 bp, synthetic construct; identical to SEQ ID NO: 635
  misc_feature 1..34: note = Probe
  source 1..34: mol_type = other DNA

SEQ ID NO: 12989 - DNA, 35 bp, synthetic construct; identical to SEQ ID NO: 636
  misc_feature 1..35: note = Probe
  source 1..35: mol_type = other DNA

SEQ ID NO: 12990 - DNA, 36 bp, synthetic construct
  misc_feature 1..36: note = Probe
  source 1..36: mol_type = other DNA
ccctggtggtctagtggctaggattcggcgctttca

SEQ ID NO: 12991 - DNA, 30 bp, synthetic construct; identical to SEQ ID NO: 637
  misc_feature 1..30: note = Probe
  source 1..30: mol_type = other DNA

SEQ ID NO: 12992 - DNA, 31 bp, synthetic construct; identical to SEQ ID NO: 638
  misc_feature 1..31: note = Probe
  source 1..31: mol_type = other DNA

SEQ ID NO: 12993 - DNA, 32 bp, synthetic construct; identical to SEQ ID NO: 639
  misc_feature 1..32: note = Probe
  source 1..32: mol_type = other DNA

SEQ ID NO: 12994 - DNA, 33 bp, synthetic construct; identical to SEQ ID NO: 640
  misc_feature 1..33: note = Probe
  source 1..33: mol_type = other DNA

SEQ ID NO: 12995 - DNA, 34 bp, synthetic construct; identical to SEQ ID NO: 641
  misc_feature 1..34: note = Probe
  source 1..34: mol_type = other DNA

SEQ ID NO: 12996 - DNA, 35 bp, synthetic construct; identical to SEQ ID NO: 642
  misc_feature 1..35: note = Probe
  source 1..35: mol_type = other DNA

SEQ ID NO: 12997 - DNA, 36 bp, synthetic construct; identical to SEQ ID NO: 643
  misc_feature 1..36: note = Probe
  source 1..36: mol_type = other DNA

SEQ ID NO: 12998 - DNA, 38 bp, synthetic construct
  misc_feature 1..38: note = Probe
  source 1..38: mol_type = other DNA
ccctggtggtctagtggttaggattcggcgctctcacc

SEQ ID NO: 12999 - DNA, 29 bp, synthetic construct
  misc_feature 1..29: note = Probe
  source 1..29: mol_type = other DNA
ccgaaaatgttggttatacccttcccgta

SEQ ID NO: 13000 - DNA, 30 bp, synthetic construct; identical to SEQ ID NO: 644
  misc_feature 1..30: note = Probe
  source 1..30: mol_type = other DNA

SEQ ID NO: 13001 - DNA, 31 bp, synthetic construct; identical to SEQ ID NO: 4782
  misc_feature 1..31: note = Probe
  source 1..31: mol_type = other DNA

SEQ ID NO: 13002 - DNA, 32 bp, synthetic construct
  misc_feature 1..32: note = Probe
  source 1..32: mol_type = other DNA
ccgaaaatgttggttatacccttcccgtacta

SEQ ID NO: 13003 - DNA, 33 bp, synthetic construct; identical to SEQ ID NO: 645
  misc_feature 1..33: note = Probe
  source 1..33: mol_type = other DNA

SEQ ID NO: 13004 - DNA, 37 bp, synthetic construct; identical to SEQ ID NO: 4785
  misc_feature 1..37: note = Probe
  source 1..37: mol_type = other DNA

SEQ ID NO: 13005 - DNA, 32 bp, synthetic construct
  misc_feature 1..32: note = Probe
  source 1..32: mol_type = other DNA
ccgccgcggcccgggttcgattcccggtcagg

SEQ ID NO: 13006 - DNA, 33 bp, synthetic construct
  misc_feature 1..33: note = Probe
  source 1..33: mol_type = other DNA
ccgccgcggcccgggttcgattcccggtcaggg

SEQ ID NO: 13007 - DNA, 34 bp, synthetic construct
  misc_feature 1..34: note = Probe
  source 1..34: mol_type = other DNA
ccgccgcggcccgggttcgattcccggtcaggga

SEQ ID NO: 13008 - DNA, 35 bp, synthetic construct
  misc_feature 1..35: note = Probe
  source 1..35: mol_type = other DNA
ccgccgcggcccgggttcgattcccggtcagggaa

SEQ ID NO: 13009 - DNA, 26 bp, synthetic construct
  misc_feature 1..26: note = Probe
  source 1..26: mol_type = other DNA
ccgcctgtcacgcgggagaccggggt

SEQ ID NO: 13010 - DNA, 17 bp, synthetic construct
  misc_feature 1..17: note = Probe
  source 1..17: mol_type = other DNA
ccgcggcccgggttcga

SEQ ID NO: 13011 - DNA, 29 bp, synthetic construct
  misc_feature 1..29: note = Probe
  source 1..29: mol_type = other DNA
ccgcggcccgggttcgattcccggtcagg

SEQ ID NO: 13012 - DNA, 31 bp, synthetic construct; identical to SEQ ID NO: 4807
  misc_feature 1..31: note = Probe
  source 1..31: mol_type = other DNA

SEQ ID NO: 13013 - DNA, 32 bp, synthetic construct; identical to SEQ ID NO: 4808
  misc_feature 1..32: note = Probe
  source 1..32: mol_type = other DNA

SEQ ID NO: 13014 - DNA, 19 bp, synthetic construct
  misc_feature 1..19: note = Probe
  source 1..19: mol_type = other DNA
ccgctggtgtagtggtatc

SEQ ID NO: 13015 - DNA, 22 bp, synthetic construct
  misc_feature 1..22: note = Probe
  source 1..22: mol_type = other DNA
ccgctggtgtagtggtatcatg

SEQ ID NO: 13016 - DNA, 23 bp, synthetic construct
  misc_feature 1..23: note = Probe
  source 1..23: mol_type = other DNA
ccgctggtgtagtggtatcatgc

SEQ ID NO: 13017 - DNA, 25 bp, synthetic construct
  misc_feature 1..25: note = Probe
  source 1..25: mol_type = other DNA
ccgctggtgtagtggtatcatgcaa

SEQ ID NO: 13018 - DNA, 26 bp, synthetic construct
  misc_feature 1..26: note = Probe
  source 1..26: mol_type = other DNA
ccgctggtgtagtggtatcatgcaag

SEQ ID NO: 13019 - DNA, 27 bp, synthetic construct
  misc_feature 1..27: note = Probe
  source 1..27: mol_type = other DNA
ccgctggtgtagtggtatcatgcaaga

SEQ ID NO: 13020 - DNA, 28 bp, synthetic construct
  misc_feature 1..28: note = Probe
  source 1..28: mol_type = other DNA
ccgctggtgtagtggtatcatgcaagat

SEQ ID NO: 13021 - DNA, 29 bp, synthetic construct
  misc_feature 1..29: note = Probe
  source 1..29: mol_type = other DNA
ccgctggtgtagtggtatcatgcaagatt

SEQ ID NO: 13022 - DNA, 30 bp, synthetic construct; identical to SEQ ID NO: 657
  misc_feature 1..30: note = Probe
  source 1..30: mol_type = other DNA

SEQ ID NO: 13023 - DNA, 31 bp, synthetic construct; identical to SEQ ID NO: 658
  misc_feature 1..31: note = Probe
  source 1..31: mol_type = other DNA

SEQ ID NO: 13024 - DNA, 32 bp, synthetic construct; identical to SEQ ID NO: 659
  misc_feature 1..32: note = Probe
  source 1..32: mol_type = other DNA

SEQ ID NO: 13025 - DNA, 33 bp, synthetic construct; identical to SEQ ID NO: 660
  misc_feature 1..33: note = Probe
  source 1..33: mol_type = other DNA

SEQ ID NO: 13026 - DNA, 34 bp, synthetic construct
  misc_feature 1..34: note = Probe
  source 1..34: mol_type = other DNA
ccgctggtgtagtggtatcatgcaagattcccat

SEQ ID NO: 13027 - DNA, 36 bp, synthetic construct
  misc_feature 1..36: note = Probe
  source 1..36: mol_type = other DNA
ccgctggtgtagtggtatcatgcaagattcccattc

SEQ ID NO: 13028 - DNA, 16 bp, synthetic construct
  misc_feature 1..16: note = Probe
  source 1..16: mol_type = other DNA
ccggagatgaaaacct

SEQ ID NO: 13029 - DNA, 17 bp, synthetic construct
  misc_feature 1..17: note = Probe
  source 1..17: mol_type = other DNA
ccggagatgaaaacctt

SEQ ID NO: 13030 - DNA, 22 bp, synthetic construct
  misc_feature 1..22: note = Probe
  source 1..22: mol_type = other DNA
ccggagatgaaaacctttttcc

SEQ ID NO: 13031 - DNA, 27 bp, synthetic construct
  misc_feature 1..27: note = Probe
  source 1..27: mol_type = other DNA
ccggagatgaaaacctttttccaagga

SEQ ID NO: 13032 - DNA, 28 bp, synthetic construct
  misc_feature 1..28: note = Probe
  source 1..28: mol_type = other DNA
ccggatagctcagtcggtagagcatcag

SEQ ID NO: 13033 - DNA, 29 bp, synthetic construct
  misc_feature 1..29: note = Probe
  source 1..29: mol_type = other DNA
ccggatagctcagtcggtagagcatcaga

SEQ ID NO: 13034 - DNA, 30 bp, synthetic construct; identical to SEQ ID NO: 668
  misc_feature 1..30: note = Probe
  source 1..30: mol_type = other DNA

SEQ ID NO: 13035 - DNA, 31 bp, synthetic construct; identical to SEQ ID NO: 669
  misc_feature 1..31: note = Probe
  source 1..31: mol_type = other DNA

SEQ ID NO: 13036 - DNA, 32 bp, synthetic construct; identical to SEQ ID NO: 670
  misc_feature 1..32: note = Probe
  source 1..32: mol_type = other DNA

SEQ ID NO: 13037 - DNA, 33 bp, synthetic construct; identical to SEQ ID NO: 671
  misc_feature 1..33: note = Probe
  source 1..33: mol_type = other DNA

SEQ ID NO: 13038 - DNA, 34 bp, synthetic construct; identical to SEQ ID NO: 672
  misc_feature 1..34: note = Probe
  source 1..34: mol_type = other DNA

SEQ ID NO: 13039 - DNA, 24 bp, synthetic construct
  misc_feature 1..24: note = Probe
  source 1..24: mol_type = other DNA
ccggctagctcagtcggtagagca

SEQ ID NO: 13040 - DNA, 27 bp, synthetic construct
  misc_feature 1..27: note = Probe
  source 1..27: mol_type = other DNA
ccggctagctcagtcggtagagcatga

SEQ ID NO: 13041 - DNA, 29 bp, synthetic construct
  misc_feature 1..29: note = Probe
  source 1..29: mol_type = other DNA
ccggctagctcagtcggtagagcatgaga

SEQ ID NO: 13042 - DNA, 30 bp, synthetic construct; identical to SEQ ID NO: 675
  misc_feature 1..30: note = Probe
  source 1..30: mol_type = other DNA

SEQ ID NO: 13043 - DNA, 31 bp, synthetic construct
  misc_feature 1..31: note = Probe
  source 1..31: mol_type = other DNA
ccggctagctcagtcggtagagcatgagacc

SEQ ID NO: 13044 - DNA, 31 bp, synthetic construct; identical to SEQ ID NO: 676
  misc_feature 1..31: note = Probe
  source 1..31: mol_type = other DNA

SEQ ID NO: 13045 - DNA, 32 bp, synthetic construct; identical to SEQ ID NO: 677
  misc_feature 1..32: note = Probe
  source 1..32: mol_type = other DNA

SEQ ID NO: 13046 - DNA, 27 bp, synthetic construct
  misc_feature 1..27: note = Probe
  source 1..27: mol_type = other DNA
ccggctagctcagtcggtagagcatgg

SEQ ID NO: 13047 - DNA, 28 bp, synthetic construct
  misc_feature 1..28: note = Probe
  source 1..28: mol_type = other DNA
ccggctagctcagtcggtagagcatggg

SEQ ID NO: 13048 - DNA, 29 bp, synthetic construct
  misc_feature 1..29: note = Probe
  source 1..29: mol_type = other DNA
ccggctagctcagtcggtagagcatggga

SEQ ID NO: 13049 - DNA, 30 bp, synthetic construct; identical to SEQ ID NO: 680
  misc_feature 1..30: note = Probe
  source 1..30: mol_type = other DNA

SEQ ID NO: 13050 - DNA, 31 bp, synthetic construct; identical to SEQ ID NO: 681
  misc_feature 1..31: note = Probe
  source 1..31: mol_type = other DNA

SEQ ID NO: 13051 - DNA, 32 bp, synthetic construct; identical to SEQ ID NO: 682
  misc_feature 1..32: note = Probe
  source 1..32: mol_type = other DNA

SEQ ID NO: 13052 - DNA, 24 bp, synthetic construct
  misc_feature 1..24: note = Probe
  source 1..24: mol_type = other DNA
ccgtagtgtagtggtcatcacgtt

SEQ ID NO: 13053 - DNA, 27 bp, synthetic construct
  misc_feature 1..27: note = Probe
  source 1..27: mol_type = other DNA
ccgtagtgtagtggtcatcacgttcgc

SEQ ID NO: 13054 - DNA, 28 bp, synthetic construct
  misc_feature 1..28: note = Probe
  source 1..28: mol_type = other DNA
ccgtagtgtagtggtcatcacgttcgcc

SEQ ID NO: 13055 - DNA, 29 bp, synthetic construct
  misc_feature 1..29: note = Probe
  source 1..29: mol_type = other DNA
ccgtgatcgtatagtggttagtactctgc

SEQ ID NO: 13056 - DNA, 34 bp, synthetic construct; identical to SEQ ID NO: 689
  misc_feature 1..34: note = Probe
  source 1..34: mol_type = other DNA

SEQ ID NO: 13057 - DNA, 35 bp, synthetic construct; identical to SEQ ID NO: 690
  misc_feature 1..35: note = Probe
  source 1..35: mol_type = other DNA

SEQ ID NO: 13058 - DNA, 24 bp, synthetic construct
  misc_feature 1..24: note = Probe
  source 1..24: mol_type = other DNA
cctcacacgcgaaaggtccccggt

SEQ ID NO: 13059 - DNA, 27 bp, synthetic construct
  misc_feature 1..27: note = Probe
  source 1..27: mol_type = other DNA
cctcgttagtatagtggtgagtatccc

SEQ ID NO: 13060 - DNA, 28 bp, synthetic construct
  misc_feature 1..28: note = Probe
  source 1..28: mol_type = other DNA
cctcgttagtatagtggtgagtatcccc

SEQ ID NO: 13061 - DNA, 34 bp, synthetic construct; identical to SEQ ID NO: 694
  misc_feature 1..34: note = Probe
  source 1..34: mol_type = other DNA

SEQ ID NO: 13062 - DNA, 35 bp, synthetic construct; identical to SEQ ID NO: 695
  misc_feature 1..35: note = Probe
  source 1..35: mol_type = other DNA

SEQ ID NO: 13063 - DNA, 23 bp, synthetic construct
  misc_feature 1..23: note = Probe
  source 1..23: mol_type = other DNA
cctgccacgcgggaggcccgggt

SEQ ID NO: 13064 - DNA, 24 bp, synthetic construct
  misc_feature 1..24: note = Probe
  source 1..24: mol_type = other DNA
cctgccacgcgggaggcccgggtt

SEQ ID NO: 13065 - DNA, 31 bp, synthetic construct; identical to SEQ ID NO: 4873
  misc_feature 1..31: note = Probe
  source 1..31: mol_type = other DNA

SEQ ID NO: 13066 - DNA, 32 bp, synthetic construct
  misc_feature 1..32: note = Probe
  source 1..32: mol_type = other DNA
cctggtggtctagtggctaggattcggcgctt

SEQ ID NO: 13067 - DNA, 33 bp, synthetic construct; identical to SEQ ID NO: 696
  misc_feature 1..33: note = Probe
  source 1..33: mol_type = other DNA

SEQ ID NO: 13068 - DNA, 34 bp, synthetic construct; identical to SEQ ID NO: 697
  misc_feature 1..34: note = Probe
  source 1..34: mol_type = other DNA

SEQ ID NO: 13069 - DNA, 29 bp, synthetic construct
  misc_feature 1..29: note = Probe
  source 1..29: mol_type = other DNA
cctggtggtctagtggttaggattcggcg

SEQ ID NO: 13070 - DNA, 30 bp, synthetic construct; identical to SEQ ID NO: 699
  misc_feature 1..30: note = Probe
  source 1..30: mol_type = other DNA

SEQ ID NO: 13071 - DNA, 31 bp, synthetic construct; identical to SEQ ID NO: 700
  misc_feature 1..31: note = Probe
  source 1..31: mol_type = other DNA

SEQ ID NO: 13072 - DNA, 32 bp, synthetic construct; identical to SEQ ID NO: 701
  misc_feature 1..32: note = Probe
  source 1..32: mol_type = other DNA

SEQ ID NO: 13073 - DNA, 33 bp, synthetic construct; identical to SEQ ID NO: 702
  misc_feature 1..33: note = Probe
  source 1..33: mol_type = other DNA

SEQ ID NO: 13074 - DNA, 34 bp, synthetic construct; identical to SEQ ID NO: 703
  misc_feature 1..34: note = Probe
  source 1..34: mol_type = other DNA

SEQ ID NO: 13075 - DNA, 35 bp, synthetic construct; identical to SEQ ID NO: 704
  misc_feature 1..35: note = Probe
  source 1..35: mol_type = other DNA

SEQ ID NO: 13076 - DNA, 23 bp, synthetic construct
  misc_feature 1..23: note = Probe
  source 1..23: mol_type = other DNA
cctgtcacgcgggagaccggggt

SEQ ID NO: 13077 - DNA, 24 bp, synthetic construct
  misc_feature 1..24: note = Probe
  source 1..24: mol_type = other DNA
cctgtcacgcgggagaccggggtt

SEQ ID NO: 13078 - DNA, 38 bp, synthetic construct
  misc_feature 1..38: note = Probe
  source 1..38: mol_type = other DNA
cctgtcacgcgggagaccggggttcaattccccgacgg

SEQ ID NO: 13079 - DNA, 39 bp, synthetic construct
  misc_feature 1..39: note = Probe
  source 1..39: mol_type = other DNA
cctgtcacgcgggagaccggggttcaattccccgacggg

SEQ ID NO: 13080 - DNA, 35 bp, synthetic construct
  misc_feature 1..35: note = Probe
  source 1..35: mol_type = other DNA
cctgtcacgcgggagaccggggttcgattccccga

SEQ ID NO: 13081 - DNA, 38 bp, synthetic construct
  misc_feature 1..38: note = Probe
  source 1..38: mol_type = other DNA
cctgtcacgcgggagaccggggttcgattccccgacgg

SEQ ID NO: 13082 - DNA, 39 bp, synthetic construct
  misc_feature 1..39: note = Probe
  source 1..39: mol_type = other DNA
cctgtcacgcgggagaccggggttcgattccccgacggg

SEQ ID NO: 13083 - DNA, 40 bp, synthetic construct
  misc_feature 1..40: note = Probe
  source 1..40: mol_type = other DNA
cctgtcacgcgggagaccggggttcgattccccgacgggg

SEQ ID NO: 13084 - DNA, 19 bp, synthetic construct
  misc_feature 1..19: note = Probe
  source 1..19: mol_type = other DNA
ccttccaagcagttgaccc

SEQ ID NO: 13085 - DNA, 23 bp, synthetic construct
  misc_feature 1..23: note = Probe
  source 1..23: mol_type = other DNA
ccttccaagcagttgacccgggt

SEQ ID NO: 13086 - DNA, 24 bp, synthetic construct
  misc_feature 1..24: note = Probe
  source 1..24: mol_type = other DNA
ccttccaagcagttgacccgggtt

SEQ ID NO: 13087 - DNA, 28 bp, synthetic construct
  misc_feature 1..28: note = Probe
  source 1..28: mol_type = other DNA
cgaaaatgttggttatacccttcccgta

SEQ ID NO: 13088 - DNA, 29 bp, synthetic construct
  misc_feature 1..29: note = Probe
  source 1..29: mol_type = other DNA
cgaaaatgttggttatacccttcccgtac

SEQ ID NO: 13089 - DNA, 30 bp, synthetic construct; identical to SEQ ID NO: 709
  misc_feature 1..30: note = Probe
  source 1..30: mol_type = other DNA

SEQ ID NO: 13090 - DNA, 31 bp, synthetic construct; identical to SEQ ID NO: 710
  misc_feature 1..31: note = Probe
  source 1..31: mol_type = other DNA

SEQ ID NO: 13091 - DNA, 31 bp, synthetic construct
  misc_feature 1..31: note = Probe
  source 1..31: mol_type = other DNA
cgaaaggttggtggttcgagcccacccaggg

SEQ ID NO: 13092 - DNA, 32 bp, synthetic construct; identical to SEQ ID NO: 711
  misc_feature 1..32: note = Probe
  source 1..32: mol_type = other DNA

SEQ ID NO: 13093 - DNA, 35 bp, synthetic construct
  misc_feature 1..35: note = Probe
  source 1..35: mol_type = other DNA
cgagaggtcccgggttcaaatcccggacgagcccc

SEQ ID NO: 13094 - DNA, 33 bp, synthetic construct
  misc_feature 1..33: note = Probe
  source 1..33: mol_type = other DNA
cgcagaaggtcctgggttcgagccccagtggaa

SEQ ID NO: 13095 - DNA, 34 bp, synthetic construct
  misc_feature 1..34: note = Probe
  source 1..34: mol_type = other DNA
cgcagaaggtcctgggttcgagccccagtggaac

SEQ ID NO: 13096 - DNA, 35 bp, synthetic construct
  misc_feature 1..35: note = Probe
  source 1..35: mol_type = other DNA
cgcagaaggtcctgggttcgagccccagtggaacc

SEQ ID NO: 13097 - DNA, 36 bp, synthetic construct
  misc_feature 1..36: note = Probe
  source 1..36: mol_type = other DNA
cgcagaaggtcctgggttcgagccccagtggaacca

SEQ ID NO: 13098 - DNA, 37 bp, synthetic construct
  misc_feature 1..37: note = Probe
  source 1..37: mol_type = other DNA
cgcagaaggtcctgggttcgagccccagtggaaccac

SEQ ID NO: 13099 - DNA, 23 bp, synthetic construct
  misc_feature 1..23: note = Probe
  source 1..23: mol_type = other DNA
cgcagcggaagcgtgctgggccc

SEQ ID NO: 13100 - DNA, 18 bp, synthetic construct
  misc_feature 1..18: note = Probe
  source 1..18: mol_type = other DNA
cgcataaaacttaaaact

SEQ ID NO: 13101 - DNA, 26 bp, synthetic construct
  misc_feature 1..26: note = Probe
  source 1..26: mol_type = other DNA
cgcataaaacttaaaactttacagtc

SEQ ID NO: 13102 - DNA, 27 bp, synthetic construct
  misc_feature 1..27: note = Probe
  source 1..27: mol_type = other DNA
cgcataaaacttaaaactttacagtca

SEQ ID NO: 13103 - DNA, 33 bp, synthetic construct
  misc_feature 1..33: note = Probe
  source 1..33: mol_type = other DNA
cgccgcggcccgggttcgattcccggtcaggga

SEQ ID NO: 13104 - DNA, 28 bp, synthetic construct
  misc_feature 1..28: note = Probe
  source 1..28: mol_type = other DNA
cgccgctggtgtagtggtatcatgcaag

SEQ ID NO: 13105 - DNA, 31 bp, synthetic construct; identical to SEQ ID NO: 722
  misc_feature 1..31: note = Probe
  source 1..31: mol_type = other DNA

SEQ ID NO: 13106 - DNA, 32 bp, synthetic construct; identical to SEQ ID NO: 723
  misc_feature 1..32: note = Probe
  source 1..32: mol_type = other DNA

SEQ ID NO: 13107 - DNA, 21 bp, synthetic construct
  misc_feature 1..21: note = Probe
  source 1..21: mol_type = other DNA
cgcctgccacgcgggaggccc

SEQ ID NO: 13108 - DNA, 23 bp, synthetic construct
  misc_feature 1..23: note = Probe
  source 1..23: mol_type = other DNA
cgcctgtcacgcgggagaccggg

SEQ ID NO: 13109 - DNA, 24 bp, synthetic construct
  misc_feature 1..24: note = Probe
  source 1..24: mol_type = other DNA
cgcctgtcacgcgggagaccgggg

SEQ ID NO: 13110 - DNA, 25 bp, synthetic construct
  misc_feature 1..25: note = Probe
  source 1..25: mol_type = other DNA
cgcctgtcacgcgggagaccggggt

SEQ ID NO: 13111 - DNA, 26 bp, synthetic construct
  misc_feature 1..26: note = Probe
  source 1..26: mol_type = other DNA
cgcctgtcacgcgggagaccggggtt

SEQ ID NO: 13112 - DNA, 40 bp, synthetic construct
  misc_feature 1..40: note = Probe
  source 1..40: mol_type = other DNA
cgcctgtcacgcgggagaccggggttcaattccccgacgg

SEQ ID NO: 13113 - DNA, 41 bp, synthetic construct
  misc_feature 1..41: note = Probe
  source 1..41: mol_type = other DNA
cgcctgtcacgcgggagaccggggttcaattccccgacggg

SEQ ID NO: 13114 - DNA, 42 bp, synthetic construct
  misc_feature 1..42: note = Probe
  source 1..42: mol_type = other DNA
cgcctgtcacgcgggagaccggggttcaattccccgacgggg

SEQ ID NO: 13115 - DNA, 31 bp, synthetic construct
  misc_feature 1..31: note = Probe
  source 1..31: mol_type = other DNA
cgcctgtcacgcgggagaccggggttcgatt

SEQ ID NO: 13116 - DNA, 37 bp, synthetic construct
  misc_feature 1..37: note = Probe
  source 1..37: mol_type = other DNA
cgcctgtcacgcgggagaccggggttcgattccccga

SEQ ID NO: 13117 - DNA, 39 bp, synthetic construct
  misc_feature 1..39: note = Probe
  source 1..39: mol_type = other DNA
cgcctgtcacgcgggagaccggggttcgattccccgacg

SEQ ID NO: 13118 - DNA, 40 bp, synthetic construct
  misc_feature 1..40: note = Probe
  source 1..40: mol_type = other DNA
cgcctgtcacgcgggagaccggggttcgattccccgacgg

SEQ ID NO: 13119 - DNA, 41 bp, synthetic construct; identical to SEQ ID NO: 725
  misc_feature 1..41: note = Probe
  source 1..41: mol_type = other DNA

SEQ ID NO: 13120 - DNA, 42 bp, synthetic construct
  misc_feature 1..42: note = Probe
  source 1..42: mol_type = other DNA
cgcctgtcacgcgggagaccggggttcgattccccgacgggg

SEQ ID NO: 13121 - DNA, 43 bp, synthetic construct
  misc_feature 1..43: note = Probe
  source 1..43: mol_type = other DNA
cgcctgtcacgcgggagaccggggttcgattccccgacgggga

SEQ ID NO: 13122 - DNA, 44 bp, synthetic construct; identical to SEQ ID NO: 5006
  misc_feature 1..44: note = Probe
  source 1..44: mol_type = other DNA

SEQ ID NO: 13123 - DNA, 17 bp, synthetic construct
  misc_feature 1..17: note = Probe
  source 1..17: mol_type = other DNA
cgcgaaaggtccccggt

SEQ ID NO: 13124 - DNA, 18 bp, synthetic construct
  misc_feature 1..18: note = Probe
  source 1..18: mol_type = other DNA
cgcgaaaggtccccggtt

SEQ ID NO: 13125 - DNA, 33 bp, synthetic construct
  misc_feature 1..33: note = Probe
  source 1..33: mol_type = other DNA
cgcgaaaggtccccggttcgaaaccgggcggaa

SEQ ID NO: 13126 - DNA, 16 bp, synthetic construct
  misc_feature 1..16: note = Probe
  source 1..16: mol_type = other DNA
cgcgggagaccggggt

SEQ ID NO: 13127 - DNA, 17 bp, synthetic construct
  misc_feature 1..17: note = Probe
  source 1..17: mol_type = other DNA
cgcgggagaccggggtt

SEQ ID NO: 13128 - DNA, 29 bp, synthetic construct
  misc_feature 1..29: note = Probe
  source 1..29: mol_type = other DNA
cgcgggagaccggggttcaattccccgac

SEQ ID NO: 13129 - DNA, 30 bp, synthetic construct
  misc_feature 1..30: note = Probe
  source 1..30: mol_type = other DNA
cgcgggagaccggggttcaattccccgacg

SEQ ID NO: 13130 - DNA, 31 bp, synthetic construct; identical to SEQ ID NO: 5024
  misc_feature 1..31: note = Probe
  source 1..31: mol_type = other DNA

SEQ ID NO: 13131 - DNA, 32 bp, synthetic construct; identical to SEQ ID NO: 727
  misc_feature 1..32: note = Probe
  source 1..32: mol_type = other DNA

SEQ ID NO: 13132 - DNA, 33 bp, synthetic construct
  misc_feature 1..33: note = Probe
  source 1..33: mol_type = other DNA
cgcgggagaccggggttcaattccccgacgggg

SEQ ID NO: 13133 - DNA, 34 bp, synthetic construct; identical to SEQ ID NO: 728
  misc_feature 1..34: note = Probe
  source 1..34: mol_type = other DNA

SEQ ID NO: 13134 - DNA, 35 bp, synthetic construct; identical to SEQ ID NO: 729
  misc_feature 1..35: note = Probe
  source 1..35: mol_type = other DNA

SEQ ID NO: 13135 - DNA, 20 bp, synthetic construct
  misc_feature 1..20: note = Probe
  source 1..20: mol_type = other DNA
cgcgggagaccggggttcga

SEQ ID NO: 13136 - DNA, 22 bp, synthetic construct
  misc_feature 1..22: note = Probe
  source 1..22: mol_type = other DNA
cgcgggagaccggggttcgatt

SEQ ID NO: 13137 - DNA, 32 bp, synthetic construct
  misc_feature 1..32: note = Probe
  source 1..32: mol_type = other DNA
cgcgggagaccggggttcgattccccaacggg

SEQ ID NO: 13138 - DNA, 28 bp, synthetic construct
  misc_feature 1..28: note = Probe
  source 1..28: mol_type = other DNA
cgcgggagaccggggttcgattccccga

SEQ ID NO: 13139 - DNA, 29 bp, synthetic construct
  misc_feature 1..29: note = Probe
  source 1..29: mol_type = other DNA
cgcgggagaccggggttcgattccccgac

SEQ ID NO: 13140 - DNA, 30 bp, synthetic construct; identical to SEQ ID NO: 730
  misc_feature 1..30: note = Probe
  source 1..30: mol_type = other DNA

SEQ ID NO: 13141 - DNA, 31 bp, synthetic construct; identical to SEQ ID NO: 731
  misc_feature 1..31: note = Probe
  source 1..31: mol_type = other DNA

SEQ ID NO: 13142 - DNA, 32 bp, synthetic construct; identical to SEQ ID NO: 732
  misc_feature 1..32: note = Probe
  source 1..32: mol_type = other DNA

SEQ ID NO: 13143 - DNA, 33 bp, synthetic construct; identical to SEQ ID NO: 733
  misc_feature 1..33: note = Probe
  source 1..33: mol_type = other DNA

SEQ ID NO: 13144 - DNA, 34 bp, synthetic construct; identical to SEQ ID NO: 734
  misc_feature 1..34: note = Probe
  source 1..34: mol_type = other DNA

SEQ ID NO: 13145 - DNA, 35 bp, synthetic construct; identical to SEQ ID NO: 735
  misc_feature 1..35: note = Probe
  source 1..35: mol_type = other DNA

SEQ ID NO: 13146 - DNA, 16 bp, synthetic construct
  misc_feature 1..16: note = Probe
  source 1..16: mol_type = other DNA
cgcgggaggcccgggt

SEQ ID NO: 13147 - DNA, 17 bp, synthetic construct
  misc_feature 1..17: note = Probe
  source 1..17: mol_type = other DNA
cgcgggaggcccgggtt

SEQ ID NO: 13148 - DNA, 19 bp, synthetic construct
  misc_feature 1..19: note = Probe
  source 1..19: mol_type = other DNA
cgcgggaggcccgggttcg

SEQ ID NO: 13149 - DNA, 35 bp, synthetic construct
  misc_feature 1..35: note = Probe
  source 1..35: mol_type = other DNA
cgcgggaggcccgggttcgattcccggccaatgca

SEQ ID NO: 13150 - DNA, 35 bp, synthetic construct
  misc_feature 1..35: note = Probe
  source 1..35: mol_type = other DNA
cgcgggaggcccgggttcgattcccggcccatgca

SEQ ID NO: 13151 - DNA, 29 bp, synthetic construct
  misc_feature 1..29: note = Probe
  source 1..29: mol_type = other DNA
cgctggtgtagtggtatcatgcaagattc

SEQ ID NO: 13152 - DNA, 16 bp, synthetic construct
  misc_feature 1..16: note = Probe
  source 1..16: mol_type = other DNA
cggaagcgtgctgggc

SEQ ID NO: 13153 - DNA, 17 bp, synthetic construct
  misc_feature 1..17: note = Probe
  source 1..17: mol_type = other DNA
cggaagcgtgctgggcc

SEQ ID NO: 13154 - DNA, 18 bp, synthetic construct
  misc_feature 1..18: note = Probe
  source 1..18: mol_type = other DNA
cggaagcgtgctgggccc

SEQ ID NO: 13155 - DNA, 23 bp, synthetic construct
  misc_feature 1..23: note = Probe
  source 1..23: mol_type = other DNA
cggaagcgtgctgggcccataac

SEQ ID NO: 13156 - DNA, 24 bp, synthetic construct
  misc_feature 1..24: note = Probe
  source 1..24: mol_type = other DNA
cggaagcgtgctgggcccataacc

SEQ ID NO: 13157 - DNA, 25 bp, synthetic construct
  misc_feature 1..25: note = Probe
  source 1..25: mol_type = other DNA
cggaagcgtgctgggcccataaccc

SEQ ID NO: 13158 - DNA, 32 bp, synthetic construct; identical to SEQ ID NO: 745
  misc_feature 1..32: note = Probe
  source 1..32: mol_type = other DNA

SEQ ID NO: 13159 - DNA, 33 bp, synthetic construct; identical to SEQ ID NO: 746
  misc_feature 1..33: note = Probe
  source 1..33: mol_type = other DNA

SEQ ID NO: 13160 - DNA, 34 bp, synthetic construct; identical to SEQ ID NO: 747
  misc_feature 1..34: note = Probe
  source 1..34: mol_type = other DNA

SEQ ID NO: 13161 - DNA, 35 bp, synthetic construct; identical to SEQ ID NO: 748
  misc_feature 1..35: note = Probe
  source 1..35: mol_type = other DNA

SEQ ID NO: 13162 - DNA, 36 bp, synthetic construct; identical to SEQ ID NO: 749
  misc_feature 1..36: note = Probe
  source 1..36: mol_type = other DNA

SEQ ID NO: 13163 - DNA, 37 bp, synthetic construct; identical to SEQ ID NO: 750
  misc_feature 1..37: note = Probe
  source 1..37: mol_type = other DNA

SEQ ID NO: 13164 - DNA, 38 bp, synthetic construct; identical to SEQ ID NO: 751
  misc_feature 1..38: note = Probe
  source 1..38: mol_type = other DNA

SEQ ID NO: 13165 - DNA, 39 bp, synthetic construct; identical to SEQ ID NO: 752
  misc_feature 1..39: note = Probe
  source 1..39: mol_type = other DNA

SEQ ID NO: 13166 - DNA, 41 bp, synthetic construct; identical to SEQ ID NO: 753
  misc_feature 1..41: note = Probe
  source 1..41: mol_type = other DNA

SEQ ID NO: 13167 - DNA, 22 bp, synthetic construct
  misc_feature 1..22: note = Probe
  source 1..22: mol_type = other DNA
cggagatgaaaacctttttcca

SEQ ID NO: 13168 - DNA, 24 bp, synthetic construct
  misc_feature 1..24: note = Probe
  source 1..24: mol_type = other DNA
cggagatgaaaacctttttccaag

SEQ ID NO: 13169 - DNA, 26 bp, synthetic construct
  misc_feature 1..26: note = Probe
  source 1..26: mol_type = other DNA
cggagatgaaaacctttttccaagga

SEQ ID NO: 13170 - DNA, 27 bp, synthetic construct
  misc_feature 1..27: note = Probe
  source 1..27: mol_type = other DNA
cggagatgaaaacctttttccaaggac

SEQ ID NO: 13171 - DNA, 28 bp, synthetic construct
  misc_feature 1..28: note = Probe
  source 1..28: mol_type = other DNA
cggagatgaaaacctttttccaaggaca

SEQ ID NO: 13172 - DNA, 26 bp, synthetic construct
  misc_feature 1..26: note = Probe
  source 1..26: mol_type = other DNA
cggatagctcagtcggtagagcatca

SEQ ID NO: 13173 - DNA, 27 bp, synthetic construct
  misc_feature 1..27: note = Probe
  source 1..27: mol_type = other DNA
cggatagctcagtcggtagagcatcag

SEQ ID NO: 13174 - DNA, 28 bp, synthetic construct
  misc_feature 1..28: note = Probe
  source 1..28: mol_type = other DNA
cggatagctcagtcggtagagcatcaga

SEQ ID NO: 13175 - DNA, 29 bp, synthetic construct
  misc_feature 1..29: note = Probe
  source 1..29: mol_type = other DNA
cggatagctcagtcggtagagcatcagac

SEQ ID NO: 13176 - DNA, 30 bp, synthetic construct; identical to SEQ ID NO: 762
  misc_feature 1..30: note = Probe
  source 1..30: mol_type = other DNA

SEQ ID NO: 13177 - DNA, 31 bp, synthetic construct; identical to SEQ ID NO: 763
  misc_feature 1..31: note = Probe
  source 1..31: mol_type = other DNA

SEQ ID NO: 13178 - DNA, 32 bp, synthetic construct; identical to SEQ ID NO: 764
  misc_feature 1..32: note = Probe
  source 1..32: mol_type = other DNA

SEQ ID NO: 13179 - DNA, 33 bp, synthetic construct; identical to SEQ ID NO: 765
  misc_feature 1..33: note = Probe
  source 1..33: mol_type = other DNA

SEQ ID NO: 13180 - DNA, 34 bp, synthetic construct
  misc_feature 1..34: note = Probe
  source 1..34: mol_type = other DNA
cggatagctcagtcggtagagcatcagactttta

SEQ ID NO: 13181 - DNA, 23 bp, synthetic construct
  misc_feature 1..23: note = Probe
  source 1..23: mol_type = other DNA
cggcccgggttcgactcccggtg

SEQ ID NO: 13182 - DNA, 17 bp, synthetic construct
  misc_feature 1..17: note = Probe
  source 1..17: mol_type = other DNA
cggctagctcagtcggt

SEQ ID NO: 13183 - DNA, 20 bp, synthetic construct
  misc_feature 1..20: note = Probe
  source 1..20: mol_type = other DNA
cggctagctcagtcggtaga

SEQ ID NO: 13184 - DNA, 25 bp, synthetic construct
  misc_feature 1..25: note = Probe
  source 1..25: mol_type = other DNA
cggctagctcagtcggtagagcatg

SEQ ID NO: 13185 - DNA, 26 bp, synthetic construct
  misc_feature 1..26: note = Probe
  source 1..26: mol_type = other DNA
cggctagctcagtcggtagagcatga

SEQ ID NO: 13186 - DNA, 27 bp, synthetic construct
  misc_feature 1..27: note = Probe
  source 1..27: mol_type = other DNA
cggctagctcagtcggtagagcatgag

SEQ ID NO: 13187 - DNA, 28 bp, synthetic construct
  misc_feature 1..28: note = Probe
  source 1..28: mol_type = other DNA
cggctagctcagtcggtagagcatgaga

SEQ ID NO: 13188 - DNA, 29 bp, synthetic construct
  misc_feature 1..29: note = Probe
  source 1..29: mol_type = other DNA
cggctagctcagtcggtagagcatgagac

SEQ ID NO: 13189 - DNA, 30 bp, synthetic construct
  misc_feature 1..30: note = Probe
  source 1..30: mol_type = other DNA
cggctagctcagtcggtagagcatgagacc

SEQ ID NO: 13190 - DNA, 31 bp, synthetic construct
  misc_feature 1..31: note = Probe
  source 1..31: mol_type = other DNA
cggctagctcagtcggtagagcatgagaccc

SEQ ID NO: 13191 - DNA, 30 bp, synthetic construct; identical to SEQ ID NO: 771
  misc_feature 1..30: note = Probe
  source 1..30: mol_type = other DNA

SEQ ID NO: 13192 - DNA, 31 bp, synthetic construct; identical to SEQ ID NO: 772
  misc_feature 1..31: note = Probe
  source 1..31: mol_type = other DNA

SEQ ID NO: 13193 - DNA, 32 bp, synthetic construct; identical to SEQ ID NO: 773
  misc_feature 1..32: note = Probe
  source 1..32: mol_type = other DNA

SEQ ID NO: 13194 - DNA, 26 bp, synthetic construct
  misc_feature 1..26: note = Probe
  source 1..26: mol_type = other DNA
cggctagctcagtcggtagagcatgg

SEQ ID NO: 13195 - DNA, 27 bp, synthetic construct
  misc_feature 1..27: note = Probe
  source 1..27: mol_type = other DNA
cggctagctcagtcggtagagcatggg

SEQ ID NO: 13196 - DNA, 28 bp, synthetic construct
  misc_feature 1..28: note = Probe
  source 1..28: mol_type = other DNA
cggctagctcagtcggtagagcatggga

SEQ ID NO: 13197 - DNA, 29 bp, synthetic construct
  misc_feature 1..29: note = Probe
  source 1..29: mol_type = other DNA
cggctagctcagtcggtagagcatgggac

SEQ ID NO: 13198 - DNA, 30 bp, synthetic construct; identical to SEQ ID NO: 778
  misc_feature 1..30: note = Probe
  source 1..30: mol_type = other DNA

SEQ ID NO: 13199 - DNA, 31 bp, synthetic construct; identical to SEQ ID NO: 779
  misc_feature 1..31: note = Probe
  source 1..31: mol_type = other DNA

SEQ ID NO: 13200 - DNA, 32 bp, synthetic construct; identical to SEQ ID NO: 780
  misc_feature 1..32: note = Probe
  source 1..32: mol_type = other DNA

SEQ ID NO: 13201 - DNA, 33 bp, synthetic construct; identical to SEQ ID NO: 781
  misc_feature 1..33: note = Probe
  source 1..33: mol_type = other DNA

SEQ ID NO: 13202 - DNA, 34 bp, synthetic construct
  misc_feature 1..34: note = Probe
  source 1..34: mol_type = other DNA
cggctagctcagtcggtagagcatgggactctta

SEQ ID NO: 13203 - DNA, 29 bp, synthetic construct
  misc_feature 1..29: note = Probe
  source 1..29: mol_type = other DNA
cgggagaccggggttcaattccccgacgg

SEQ ID NO: 13204 - DNA, 30 bp, synthetic construct
  misc_feature 1..30: note = Probe
  source 1..30: mol_type = other DNA
cgggagaccggggttcaattccccgacggg

SEQ ID NO: 13205 - DNA, 31 bp, synthetic construct
  misc_feature 1..31: note = Probe
  source 1..31: mol_type = other DNA
cgggagaccggggttcaattccccgacgggg

SEQ ID NO: 13206 - DNA, 32 bp, synthetic construct; identical to SEQ ID NO: 783
  misc_feature 1..32: note = Probe
  source 1..32: mol_type = other DNA

SEQ ID NO: 13207 - DNA, 33 bp, synthetic construct; identical to SEQ ID NO: 784
  misc_feature 1..33: note = Probe
  source 1..33: mol_type = other DNA

SEQ ID NO: 13208 - DNA, 26 bp, synthetic construct
  misc_feature 1..26: note = Probe
  source 1..26: mol_type = other DNA
cgggagaccggggttcgattccccga

SEQ ID NO: 13209 - DNA, 27 bp, synthetic construct
  misc_feature 1..27: note = Probe
  source 1..27: mol_type = other DNA
cgggagaccggggttcgattccccgac

SEQ ID NO: 13210 - DNA, 28 bp, synthetic construct
  misc_feature 1..28: note = Probe
  source 1..28: mol_type = other DNA
cgggagaccggggttcgattccccgacg

SEQ ID NO: 13211 - DNA, 29 bp, synthetic construct
  misc_feature 1..29: note = Probe
  source 1..29: mol_type = other DNA
cgggagaccggggttcgattccccgacgg

SEQ ID NO: 13212 - DNA, 30 bp, synthetic construct; identical to SEQ ID NO: 786
  misc_feature 1..30: note = Probe
  source 1..30: mol_type = other DNA

SEQ ID NO: 13213 - DNA, 31 bp, synthetic construct; identical to SEQ ID NO: 787
  misc_feature 1..31: note = Probe
  source 1..31: mol_type = other DNA

SEQ ID NO: 13214 - DNA, 32 bp, synthetic construct; identical to SEQ ID NO: 788
  misc_feature 1..32: note = Probe
  source 1..32: mol_type = other DNA

SEQ ID NO: 13215 - DNA, 33 bp, synthetic construct; identical to SEQ ID NO: 789
  misc_feature 1..33: note = Probe
  source 1..33: mol_type = other DNA

SEQ ID NO: 13216 - DNA, 16 bp, synthetic construct
  misc_feature 1..16: note = Probe
  source 1..16: mol_type = other DNA
cgggaggcccgggttt

SEQ ID NO: 13217 - DNA, 25 bp, synthetic construct
  misc_feature 1..25: note = Probe
  source 1..25: mol_type = other DNA
cggtaatcgcataaaacttaaaact

SEQ ID NO: 13218 - DNA, 34 bp, synthetic construct; identical to SEQ ID NO: 790
  misc_feature 1..34: note = Probe
  source 1..34: mol_type = other DNA

SEQ ID NO: 13219 - DNA, 16 bp, synthetic construct
  misc_feature 1..16: note = Probe
  source 1..16: mol_type = other DNA
cggtagagcatcagac

SEQ ID NO: 13220 - DNA, 34 bp, synthetic construct
  misc_feature 1..34: note = Probe
  source 1..34: mol_type = other DNA
cggttaggattcctggttttcacccaggcggccc

SEQ ID NO: 13221 - DNA, 34 bp, synthetic construct
  misc_feature 1..34: note = Probe
  source 1..34: mol_type = other DNA
cggttaggattcctggttttcacccaggtggccc

SEQ ID NO: 13222 - DNA, 16 bp, synthetic construct
  misc_feature 1..16: note = Probe
  source 1..16: mol_type = other DNA
cggttatcacgtctgc

SEQ ID NO: 13223 - DNA, 28 bp, synthetic construct
  misc_feature 1..28: note = Probe
  source 1..28: mol_type = other DNA
cgtgatcgtatagtggttagtactctgc

SEQ ID NO: 13224 - DNA, 32 bp, synthetic construct; identical to SEQ ID NO: 794
  misc_feature 1..32: note = Probe
  source 1..32: mol_type = other DNA

SEQ ID NO: 13225 - DNA, 33 bp, synthetic construct; identical to SEQ ID NO: 795
  misc_feature 1..33: note = Probe
  source 1..33: mol_type = other DNA

SEQ ID NO: 13226 - DNA, 34 bp, synthetic construct; identical to SEQ ID NO: 796
  misc_feature 1..34: note = Probe
  source 1..34: mol_type = other DNA

SEQ ID NO: 13227 - DNA, 29 bp, synthetic construct
  misc_feature 1..29: note = Probe
  source 1..29: mol_type = other DNA
cgttagtatagtggtgagtatccccgcct

SEQ ID NO: 13228 - DNA, 31 bp, synthetic construct
  misc_feature 1..31: note = Probe
  source 1..31: mol_type = other DNA
cgttagtatagtggtgagtatccccgcctgt

SEQ ID NO: 13229 - DNA, 32 bp, synthetic construct; identical to SEQ ID NO: 803
  misc_feature 1..32: note = Probe
  source 1..32: mol_type = other DNA

SEQ ID NO: 13230 - DNA, 19 bp, synthetic construct
  misc_feature 1..19: note = Probe
  source 1..19: mol_type = other DNA
cgttcaggtcgcagtctcc

SEQ ID NO: 13231 - DNA, 42 bp, synthetic construct
  misc_feature 1..42: note = Probe
  source 1..42: mol_type = other DNA
ctaacttagcattaaccttttaagttaaagattaagagaacc

SEQ ID NO: 13232 - DNA, 20 bp, synthetic construct
  misc_feature 1..20: note = Probe
  source 1..20: mol_type = other DNA
ctaagccagggattgtgggt

SEQ ID NO: 13233 - DNA, 32 bp, synthetic construct; identical to SEQ ID NO: 5170
  misc_feature 1..32: note = Probe
  source 1..32: mol_type = other DNA

SEQ ID NO: 13234 - DNA, 33 bp, synthetic construct; identical to SEQ ID NO: 5171
  misc_feature 1..33: note = Probe
  source 1..33: mol_type = other DNA

SEQ ID NO: 13235 - DNA, 34 bp, synthetic construct
  misc_feature 1..34: note = Probe
  source 1..34: mol_type = other DNA
ctaagtgtttgtgggtttaagtcccattggtcta

SEQ ID NO: 13236 - DNA, 18 bp, synthetic construct
  misc_feature 1..18: note = Probe
  source 1..18: mol_type = other DNA
ctaatggataaggcattg

SEQ ID NO: 13237 - DNA, 25 bp, synthetic construct
  misc_feature 1..25: note = Probe
  source 1..25: mol_type = other DNA
ctagctcagtcggtagagcatggga

SEQ ID NO: 13238 - DNA, 26 bp, synthetic construct
  misc_feature 1..26: note = Probe
  source 1..26: mol_type = other DNA
ctagctcagtcggtagagcatgggac

SEQ ID NO: 13239 - DNA, 27 bp, synthetic construct
  misc_feature 1..27: note = Probe
  source 1..27: mol_type = other DNA
ctagctcagtcggtagagcatgggact

SEQ ID NO: 13240 - DNA, 28 bp, synthetic construct
  misc_feature 1..28: note = Probe
  source 1..28: mol_type = other DNA
ctagctcagtcggtagagcatgggactc

SEQ ID NO: 13241 - DNA, 29 bp, synthetic construct
  misc_feature 1..29: note = Probe
  source 1..29: mol_type = other DNA
ctagctcagtcggtagagcatgggactct

SEQ ID NO: 13242 - DNA, 20 bp, synthetic construct
  misc_feature 1..20: note = Probe
  source 1..20: mol_type = other DNA
ctagtggttaggattcggcg

SEQ ID NO: 13243 - DNA, 22 bp, synthetic construct
  misc_feature 1..22: note = Probe
  source 1..22: mol_type = other DNA
ctagtggttaggattcggcgct

SEQ ID NO: 13244 - DNA, 38 bp, synthetic construct
  misc_feature 1..38: note = Probe
  source 1..38: mol_type = other DNA
ctagtggttaggattcggcgctctcaccgccgcggccc

SEQ ID NO: 13245 - DNA, 20 bp, synthetic construct
  misc_feature 1..20: note = Probe
  source 1..20: mol_type = other DNA
ctcacaagaactgctaactc

SEQ ID NO: 13246 - DNA, 50 bp, synthetic construct; identical to SEQ ID NO: 813
  misc_feature 1..50: note = Probe
  source 1..50: mol_type = other DNA

SEQ ID NO: 13247 - DNA, 23 bp, synthetic construct
  misc_feature 1..23: note = Probe
  source 1..23: mol_type = other DNA
ctcacacgcgaaaggtccccggt

SEQ ID NO: 13248 - DNA, 30 bp, synthetic construct
  misc_feature 1..30: note = Probe
  source 1..30: mol_type = other DNA
ctcagggatgggttcgattctcatagtcct

SEQ ID NO: 13249 - DNA, 32 bp, synthetic construct; identical to SEQ ID NO: 5222
  misc_feature 1..32: note = Probe
  source 1..32: mol_type = other DNA

SEQ ID NO: 13250 - DNA, 23 bp, synthetic construct
  misc_feature 1..23: note = Probe
  source 1..23: mol_type = other DNA
ctcagtcggtagagcatgggact

SEQ ID NO: 13251 - DNA, 24 bp, synthetic construct
  misc_feature 1..24: note = Probe
  source 1..24: mol_type = other DNA
ctcagtcggtagagcatgggactc

SEQ ID NO: 13252 - DNA, 23 bp, synthetic construct
  misc_feature 1..23: note = Probe
  source 1..23: mol_type = other DNA
ctcataatctgaaggtcgtgagt

SEQ ID NO: 13253 - DNA, 22 bp, synthetic construct
  misc_feature 1..22: note = Probe
  source 1..22: mol_type = other DNA
ctccagtctcttcggaggcgtg

SEQ ID NO: 13254 - DNA, 22 bp, synthetic construct
  misc_feature 1..22: note = Probe
  source 1..22: mol_type = other DNA
ctccagtctcttcgggggcgtg

SEQ ID NO: 13255 - DNA, 25 bp, synthetic construct
  misc_feature 1..25: note = Probe
  source 1..25: mol_type = other DNA
ctccagtctcttcgggggcgtgggt

SEQ ID NO: 13256 - DNA, 16 bp, synthetic construct
  misc_feature 1..16: note = Probe
  source 1..16: mol_type = other DNA
ctcccggtgtgggaac

SEQ ID NO: 13257 - DNA, 26 bp, synthetic construct
  misc_feature 1..26: note = Probe
  source 1..26: mol_type = other DNA
ctcgttagtatagtggtgagtatccc

SEQ ID NO: 13258 - DNA, 30 bp, synthetic construct
  misc_feature 1..30: note = Probe
  source 1..30: mol_type = other DNA
ctcgttagtatagtggtgagtatccccgcc

SEQ ID NO: 13259 - DNA, 31 bp, synthetic construct
  misc_feature 1..31: note = Probe
  source 1..31: mol_type = other DNA
ctcgttagtatagtggtgagtatccccgcct

SEQ ID NO: 13260 - DNA, 32 bp, synthetic construct
  misc_feature 1..32: note = Probe
  source 1..32: mol_type = other DNA
ctcgttagtatagtggtgagtatccccgcctg

SEQ ID NO: 13261 - DNA, 33 bp, synthetic construct; identical to SEQ ID NO: 819
  misc_feature 1..33: note = Probe
  source 1..33: mol_type = other DNA

SEQ ID NO: 13262 - DNA, 34 bp, synthetic construct; identical to SEQ ID NO: 820
  misc_feature 1..34: note = Probe
  source 1..34: mol_type = other DNA

SEQ ID NO: 13263 - DNA, 35 bp, synthetic construct; identical to SEQ ID NO: 821
  misc_feature 1..35: note = Probe
  source 1..35: mol_type = other DNA

SEQ ID NO: 13264 - DNA, 33 bp, synthetic construct; identical to SEQ ID NO: 5274
  misc_feature 1..33: note = Probe
  source 1..33: mol_type = other DNA

SEQ ID NO: 13265 - DNA, 16 bp, synthetic construct
  misc_feature 1..16: note = Probe
  source 1..16: mol_type = other DNA
ctgaatccagcgatcc

SEQ ID NO: 13266 - DNA, 19 bp, synthetic construct
  misc_feature 1..19: note = Probe
  source 1..19: mol_type = other DNA
ctgaatccagcgatccgag

SEQ ID NO: 13267 - DNA, 20 bp, synthetic construct
  misc_feature 1..20: note = Probe
  source 1..20: mol_type = other DNA
ctgaatccagcgatccgagt

SEQ ID NO: 13268 - DNA, 21 bp, synthetic construct
  misc_feature 1..21: note = Probe
  source 1..21: mol_type = other DNA
ctgaatccagcgatccgagtt

SEQ ID NO: 13269 - DNA, 22 bp, synthetic construct
  misc_feature 1..22: note = Probe
  source 1..22: mol_type = other DNA
ctgaatccagcgatccgagttc

SEQ ID NO: 13270 - DNA, 23 bp, synthetic construct
  misc_feature 1..23: note = Probe
  source 1..23: mol_type = other DNA
ctgaatccagcgatccgagttca

SEQ ID NO: 13271 - DNA, 32 bp, synthetic construct; identical to SEQ ID NO: 5303
  misc_feature 1..32: note = Probe
  source 1..32: mol_type = other DNA

SEQ ID NO: 13272 - DNA, 22 bp, synthetic construct
  misc_feature 1..22: note = Probe
  source 1..22: mol_type = other DNA
ctgccacgcgggaggcccgggt

SEQ ID NO: 13273 - DNA, 23 bp, synthetic construct
  misc_feature 1..23: note = Probe
  source 1..23: mol_type = other DNA
ctgccacgcgggaggcccgggtt

SEQ ID NO: 13274 - DNA, 32 bp, synthetic construct; identical to SEQ ID NO: 5327
  misc_feature 1..32: note = Probe
  source 1..32: mol_type = other DNA

SEQ ID NO: 13275 - DNA, 30 bp, synthetic construct
  misc_feature 1..30: note = Probe
  source 1..30: mol_type = other DNA
ctggtggtctagtggctaggattcggcgct

SEQ ID NO: 13276 - DNA, 32 bp, synthetic construct
  misc_feature 1..32: note = Probe
  source 1..32: mol_type = other DNA
ctggtggtctagtggctaggattcggcgcttt

SEQ ID NO: 13277 - DNA, 28 bp, synthetic construct
  misc_feature 1..28: note = Probe
  source 1..28: mol_type = other DNA
ctggtggtctagtggttaggattcggcg

SEQ ID NO: 13278 - DNA, 29 bp, synthetic construct
  misc_feature 1..29: note = Probe
  source 1..29: mol_type = other DNA
ctggtggtctagtggttaggattcggcgc

SEQ ID NO: 13279 - DNA, 30 bp, synthetic construct; identical to SEQ ID NO: 839
  misc_feature 1..30: note = Probe
  source 1..30: mol_type = other DNA

SEQ ID NO: 13280 - DNA, 31 bp, synthetic construct; identical to SEQ ID NO: 840
  misc_feature 1..31: note = Probe
  source 1..31: mol_type = other DNA

SEQ ID NO: 13281 - DNA, 32 bp, synthetic construct; identical to SEQ ID NO: 841
  misc_feature 1..32: note = Probe
  source 1..32: mol_type = other DNA

SEQ ID NO: 13282 - DNA, 33 bp, synthetic construct; identical to SEQ ID NO: 842
  misc_feature 1..33: note = Probe
  source 1..33: mol_type = other DNA

SEQ ID NO: 13283 - DNA, 34 bp, synthetic construct; identical to SEQ ID NO: 5330
  misc_feature 1..34: note = Probe
  source 1..34: mol_type = other DNA

SEQ ID NO: 13284 - DNA, 27 bp, synthetic construct
  misc_feature 1..27: note = Probe
  source 1..27: mol_type = other DNA
ctggtgtagtggtatcatgcaagattc

SEQ ID NO: 13285 - DNA, 19 bp, synthetic construct
  misc_feature 1..19: note = Probe
  source 1..19: mol_type = other DNA
ctgtcacgcgggagaccgg

SEQ ID NO: 13286 - DNA, 20 bp, synthetic construct
  misc_feature 1..20: note = Probe
  source 1..20: mol_type = other DNA
ctgtcacgcgggagaccggg

SEQ ID NO: 13287 - DNA, 21 bp, synthetic construct
  misc_feature 1..21: note = Probe
  source 1..21: mol_type = other DNA
ctgtcacgcgggagaccgggg

SEQ ID NO: 13288 - DNA, 22 bp, synthetic construct
  misc_feature 1..22: note = Probe
  source 1..22: mol_type = other DNA
ctgtcacgcgggagaccggggt

SEQ ID NO: 13289 - DNA, 23 bp, synthetic construct
  misc_feature 1..23: note = Probe
  source 1..23: mol_type = other DNA
ctgtcacgcgggagaccggggtt

SEQ ID NO: 13290 - DNA, 38 bp, synthetic construct
  misc_feature 1..38: note = Probe
  source 1..38: mol_type = other DNA
ctgtcacgcgggagaccggggttcaattccccgacggg

SEQ ID NO: 13291 - DNA, 39 bp, synthetic construct; identical to SEQ ID NO: 846
  misc_feature 1..39: note = Probe
  source 1..39: mol_type = other DNA

SEQ ID NO: 13292 - DNA, 34 bp, synthetic construct
  misc_feature 1..34: note = Probe
  source 1..34: mol_type = other DNA
ctgtcacgcgggagaccggggttcgattccccga

SEQ ID NO: 13293 - DNA, 37 bp, synthetic construct
  misc_feature 1..37: note = Probe
  source 1..37: mol_type = other DNA
ctgtcacgcgggagaccggggttcgattccccgacgg

SEQ ID NO: 13294 - DNA, 38 bp, synthetic construct
  misc_feature 1..38: note = Probe
  source 1..38: mol_type = other DNA
ctgtcacgcgggagaccggggttcgattccccgacggg

SEQ ID NO: 13295 - DNA, 39 bp, synthetic construct
  misc_feature 1..39: note = Probe
  source 1..39: mol_type = other DNA
ctgtcacgcgggagaccggggttcgattccccgacgggg

SEQ ID NO: 13296 - DNA, 19 bp, synthetic construct
  misc_feature 1..19: note = Probe
  source 1..19: mol_type = other DNA
ctgttaaccgaaaggttgg

SEQ ID NO: 13297 - DNA, 50 bp, synthetic construct; identical to SEQ ID NO: 850
  misc_feature 1..50: note = Probe
  source 1..50: mol_type = other DNA

SEQ ID NO: 13298 - DNA, 18 bp, synthetic construct
  misc_feature 1..18: note = Probe
  source 1..18: mol_type = other DNA
cttccaagcagttgaccc

SEQ ID NO: 13299 - DNA, 22 bp, synthetic construct
  misc_feature 1..22: note = Probe
  source 1..22: mol_type = other DNA
cttccaagcagttgacccgggt

SEQ ID NO: 13300 - DNA, 23 bp, synthetic construct
  misc_feature 1..23: note = Probe
  source 1..23: mol_type = other DNA
cttccaagcagttgacccgggtt

SEQ ID NO: 13301 - DNA, 21 bp, synthetic construct
  misc_feature 1..21: note = Probe
  source 1..21: mol_type = other DNA
ctttgaatccagcgatccgag

SEQ ID NO: 13302 - DNA, 22 bp, synthetic construct
  misc_feature 1..22: note = Probe
  source 1..22: mol_type = other DNA
ctttgaatccagcgatccgagt

SEQ ID NO: 13303 - DNA, 23 bp, synthetic construct
  misc_feature 1..23: note = Probe
  source 1..23: mol_type = other DNA
ctttgaatccagcgatccgagtt

SEQ ID NO: 13304 - DNA, 18 bp, synthetic construct
  misc_feature 1..18: note = Probe
  source 1..18: mol_type = other DNA
gaaaaagtcatggaggcc

SEQ ID NO: 13305 - DNA, 19 bp, synthetic construct
  misc_feature 1..19: note = Probe
  source 1..19: mol_type = other DNA
gaaaaagtcatggaggcca

SEQ ID NO: 13306 - DNA, 21 bp, synthetic construct
  misc_feature 1..21: note = Probe
  source 1..21: mol_type = other DNA
gaaaaagtcatggaggccatg

SEQ ID NO: 13307 - DNA, 27 bp, synthetic construct
  misc_feature 1..27: note = Probe
  source 1..27: mol_type = other DNA
gaaaaagtcatggaggccatggggttg

SEQ ID NO: 13308 - DNA, 28 bp, synthetic construct
  misc_feature 1..28: note = Probe
  source 1..28: mol_type = other DNA
gaaaaagtcatggaggccatggggttgg

SEQ ID NO: 13309 - DNA, 28 bp, synthetic construct
  misc_feature 1..28: note = Probe
  source 1..28: mol_type = other DNA
gaaaatgttggttatacccttcccgtac

SEQ ID NO: 13310 - DNA, 30 bp, synthetic construct
  misc_feature 1..30: note = Probe
  source 1..30: mol_type = other DNA
gaaaatgttggttatacccttcccgtacta

SEQ ID NO: 13311 - DNA, 31 bp, synthetic construct; identical to SEQ ID NO: 862
  misc_feature 1..31: note = Probe
  source 1..31: mol_type = other DNA

SEQ ID NO: 13312 - DNA, 17 bp, synthetic construct
  misc_feature 1..17: note = Probe
  source 1..17: mol_type = other DNA
gaaagctcacaagaact

SEQ ID NO: 13313 - DNA, 18 bp, synthetic construct
  misc_feature 1..18: note = Probe
  source 1..18: mol_type = other DNA
gaaagctcacaagaactg

SEQ ID NO: 13314 - DNA, 20 bp, synthetic construct
  misc_feature 1..20: note = Probe
  source 1..20: mol_type = other DNA
gaaagctcacaagaactgct

SEQ ID NO: 13315 - DNA, 24 bp, synthetic construct
  misc_feature 1..24: note = Probe
  source 1..24: mol_type = other DNA
gaaagctcacaagaactgctaact

SEQ ID NO: 13316 - DNA, 25 bp, synthetic construct
  misc_feature 1..25: note = Probe
  source 1..25: mol_type = other DNA
gaaagctcacaagaactgctaactc

SEQ ID NO: 13317 - DNA, 26 bp, synthetic construct
  misc_feature 1..26: note = Probe
  source 1..26: mol_type = other DNA
gaaagctcacaagaactgctaactca

SEQ ID NO: 13318 - DNA, 31 bp, synthetic construct; identical to SEQ ID NO: 880
  misc_feature 1..31: note = Probe
  source 1..31: mol_type = other DNA

SEQ ID NO: 13319 - DNA, 30 bp, synthetic construct; identical to SEQ ID NO: 882
  misc_feature 1..30: note = Probe
  source 1..30: mol_type = other DNA

SEQ ID NO: 13320 - DNA, 30 bp, synthetic construct; identical to SEQ ID NO: 883
  misc_feature 1..30: note = Probe
  source 1..30: mol_type = other DNA

SEQ ID NO: 13321 - DNA, 30 bp, synthetic construct; identical to SEQ ID NO: 890
  misc_feature 1..30: note = Probe
  source 1..30: mol_type = other DNA

SEQ ID NO: 13322 - DNA, 30 bp, synthetic construct; identical to SEQ ID NO: 5491
  misc_feature 1..30: note = Probe
  source 1..30: mol_type = other DNA

SEQ ID NO: 13323 - DNA, 32 bp, synthetic construct; identical to SEQ ID NO: 5509
  misc_feature 1..32: note = Probe
  source 1..32: mol_type = other DNA

SEQ ID NO: 13324 - DNA, 29 bp, synthetic construct
  misc_feature 1..29: note = Probe
  source 1..29: mol_type = other DNA
gaaggtcctgggttcgagccccagtggaa

SEQ ID NO: 13325 - DNA, 30 bp, synthetic construct; identical to SEQ ID NO: 5510
  misc_feature 1..30: note = Probe
  source 1..30: mol_type = other DNA

SEQ ID NO: 13326 - DNA, 31 bp, synthetic construct; identical to SEQ ID NO: 891
  misc_feature 1..31: note = Probe
  source 1..31: mol_type = other DNA

SEQ ID NO: 13327 - DNA, 32 bp, synthetic construct; identical to SEQ ID NO: 5511
  misc_feature 1..32: note = Probe
  source 1..32: mol_type = other DNA

SEQ ID NO: 13328 - DNA, 17 bp, synthetic construct
  misc_feature 1..17: note = Probe
  source 1..17: mol_type = other DNA
gaatccagcgatccgag

SEQ ID NO: 13329 - DNA, 19 bp, synthetic construct
  misc_feature 1..19: note = Probe
  source 1..19: mol_type = other DNA
gaatccagcgatccgagtt

SEQ ID NO: 13330 - DNA, 20 bp, synthetic construct
  misc_feature 1..20: note = Probe
  source 1..20: mol_type = other DNA
gaatccagcgatccgagttc

SEQ ID NO: 13331 - DNA, 37 bp, synthetic construct; identical to SEQ ID NO: 897
  misc_feature 1..37: note = Probe
  source 1..37: mol_type = other DNA

SEQ ID NO: 13332 - DNA, 37 bp, synthetic construct
  misc_feature 1..37: note = Probe
  source 1..37: mol_type = other DNA
gaatccagcgatccgagttcaaatctcggtgggacct

SEQ ID NO: 13333 - DNA, 38 bp, synthetic construct
  misc_feature 1..38: note = Probe
  source 1..38: mol_type = other DNA
gaatccagcgatccgagttcaaatctcggtgggacctc

SEQ ID NO: 13334 - DNA, 18 bp, synthetic construct
  misc_feature 1..18: note = Probe
  source 1..18: mol_type = other DNA
gaattctcgcctgccacg

SEQ ID NO: 13335 - DNA, 31 bp, synthetic construct; identical to SEQ ID NO: 903
  misc_feature 1..31: note = Probe
  source 1..31: mol_type = other DNA

SEQ ID NO: 13336 - DNA, 19 bp, synthetic construct
  misc_feature 1..19: note = Probe
  source 1..19: mol_type = other DNA
gacatatgtccgcgtgggt

SEQ ID NO: 13337 - DNA, 34 bp, synthetic construct; identical to SEQ ID NO: 5560
  misc_feature 1..34: note = Probe
  source 1..34: mol_type = other DNA

SEQ ID NO: 13338 - DNA, 19 bp, synthetic construct
  misc_feature 1..19: note = Probe
  source 1..19: mol_type = other DNA
gaccacgtggcctaatgga

SEQ ID NO: 13339 - DNA, 28 bp, synthetic construct
  misc_feature 1..28: note = Probe
  source 1..28: mol_type = other DNA
gacccagtggcctaatggataaggcatc

SEQ ID NO: 13340 - DNA, 29 bp, synthetic construct
  misc_feature 1..29: note = Probe
  source 1..29: mol_type = other DNA
gacccagtggcctaatggataaggcatca

SEQ ID NO: 13341 - DNA, 30 bp, synthetic construct; identical to SEQ ID NO: 8599
  misc_feature 1..30: note = Probe
  source 1..30: mol_type = other DNA

SEQ ID NO: 13342 - DNA, 31 bp, synthetic construct; identical to SEQ ID NO: 904
  misc_feature 1..31: note = Probe
  source 1..31: mol_type = other DNA

SEQ ID NO: 13343 - DNA, 32 bp, synthetic construct; identical to SEQ ID NO: 905
  misc_feature 1..32: note = Probe
  source 1..32: mol_type = other DNA

SEQ ID NO: 13344 - DNA, 33 bp, synthetic construct; identical to SEQ ID NO: 906
  misc_feature 1..33: note = Probe
  source 1..33: mol_type = other DNA

SEQ ID NO: 13345 - DNA, 34 bp, synthetic construct; identical to SEQ ID NO: 907
  misc_feature 1..34: note = Probe
  source 1..34: mol_type = other DNA

SEQ ID NO: 13346 - DNA, 35 bp, synthetic construct; identical to SEQ ID NO: 908
  misc_feature 1..35: note = Probe
  source 1..35: mol_type = other DNA

SEQ ID NO: 13347 - DNA, 36 bp, synthetic construct; identical to SEQ ID NO: 909
  misc_feature 1..36: note = Probe
  source 1..36: mol_type = other DNA

SEQ ID NO: 13348 - DNA, 25 bp, synthetic construct
  misc_feature 1..25: note = Probe
  source 1..25: mol_type = other DNA
gacccgggttcgattcccggccaac

SEQ ID NO: 13349 - DNA, 19 bp, synthetic construct
  misc_feature 1..19: note = Probe
  source 1..19: mol_type = other DNA
gaccgcgtggcctaatgga

SEQ ID NO: 13350 - DNA, 21 bp, synthetic construct
  misc_feature 1..21: note = Probe
  source 1..21: mol_type = other DNA
gaccggggttcgattccccga

SEQ ID NO: 13351 - DNA, 22 bp, synthetic construct
  misc_feature 1..22: note = Probe
  source 1..22: mol_type = other DNA
gaccggggttcgattccccgac

SEQ ID NO: 13352 - DNA, 24 bp, synthetic construct
  misc_feature 1..24: note = Probe
  source 1..24: mol_type = other DNA
gaccggggttcgattccccgacgg

SEQ ID NO: 13353 - DNA, 25 bp, synthetic construct
  misc_feature 1..25: note = Probe
  source 1..25: mol_type = other DNA
gaccggggttcgattccccgacggg

SEQ ID NO: 13354 - DNA, 27 bp, synthetic construct
  misc_feature 1..27: note = Probe
  source 1..27: mol_type = other DNA
gaccggggttcgattccccgacgggga

SEQ ID NO: 13355 - DNA, 28 bp, synthetic construct
  misc_feature 1..28: note = Probe
  source 1..28: mol_type = other DNA
gaccggggttcgattccccgacggggag

SEQ ID NO: 13356 - DNA, 18 bp, synthetic construct
  misc_feature 1..18: note = Probe
  source 1..18: mol_type = other DNA
gacctcgtggcgcaatgg

SEQ ID NO: 13357 - DNA, 18 bp, synthetic construct
  misc_feature 1..18: note = Probe
  source 1..18: mol_type = other DNA
gagaaagctcacaagaac

SEQ ID NO: 13358 - DNA, 19 bp, synthetic construct
  misc_feature 1..19: note = Probe
  source 1..19: mol_type = other DNA
gagaaagctcacaagaact

SEQ ID NO: 13359 - DNA, 20 bp, synthetic construct
  misc_feature 1..20: note = Probe
  source 1..20: mol_type = other DNA
gagaaagctcacaagaactg

SEQ ID NO: 13360 - DNA, 21 bp, synthetic construct
  misc_feature 1..21: note = Probe
  source 1..21: mol_type = other DNA
gagaaagctcacaagaactgc

SEQ ID NO: 13361 - DNA, 22 bp, synthetic construct
  misc_feature 1..22: note = Probe
  source 1..22: mol_type = other DNA
gagaaagctcacaagaactgct

SEQ ID NO: 13362 - DNA, 23 bp, synthetic construct
  misc_feature 1..23: note = Probe
  source 1..23: mol_type = other DNA
gagaaagctcacaagaactgcta

SEQ ID NO: 13363 - DNA, 24 bp, synthetic construct
  misc_feature 1..24: note = Probe
  source 1..24: mol_type = other DNA
gagaaagctcacaagaactgctaa

SEQ ID NO: 13364 - DNA, 25 bp, synthetic construct
  misc_feature 1..25: note = Probe
  source 1..25: mol_type = other DNA
gagaaagctcacaagaactgctaac

SEQ ID NO: 13365 - DNA, 26 bp, synthetic construct
  misc_feature 1..26: note = Probe
  source 1..26: mol_type = other DNA
gagaaagctcacaagaactgctaact

SEQ ID NO: 13366 - DNA, 27 bp, synthetic construct
  misc_feature 1..27: note = Probe
  source 1..27: mol_type = other DNA
gagaaagctcacaagaactgctaactc

SEQ ID NO: 13367 - DNA, 28 bp, synthetic construct
  misc_feature 1..28: note = Probe
  source 1..28: mol_type = other DNA
gagaaagctcacaagaactgctaactca

SEQ ID NO: 13368 - DNA, 29 bp, synthetic construct
  misc_feature 1..29: note = Probe
  source 1..29: mol_type = other DNA
gagaaagctcacaagaactgctaactcat

SEQ ID NO: 13369 - DNA, 30 bp, synthetic construct; identical to SEQ ID NO: 932
  misc_feature 1..30: note = Probe
  source 1..30: mol_type = other DNA

SEQ ID NO: 13370 - DNA, 31 bp, synthetic construct; identical to SEQ ID NO: 933
  misc_feature 1..31: note = Probe
  source 1..31: mol_type = other DNA

SEQ ID NO: 13371 - DNA, 32 bp, synthetic construct; identical to SEQ ID NO: 934
  misc_feature 1..32: note = Probe
  source 1..32: mol_type = other DNA

SEQ ID NO: 13372 - DNA, 33 bp, synthetic construct; identical to SEQ ID NO: 935
  misc_feature 1..33: note = Probe
  source 1..33: mol_type = other DNA

SEQ ID NO: 13373 - DNA, 34 bp, synthetic construct; identical to SEQ ID NO: 936
  misc_feature 1..34: note = Probe
  source 1..34: mol_type = other DNA

SEQ ID NO: 13374 - DNA, 35 bp, synthetic construct; identical to SEQ ID NO: 937
  misc_feature 1..35: note = Probe
  source 1..35: mol_type = other DNA

SEQ ID NO: 13375 - DNA, 36 bp, synthetic construct; identical to SEQ ID NO: 938
  misc_feature 1..36: note = Probe
  source 1..36: mol_type = other DNA

SEQ ID NO: 13376 - DNA, 37 bp, synthetic construct; identical to SEQ ID NO: 939
  misc_feature 1..37: note = Probe
  source 1..37: mol_type = other DNA

SEQ ID NO: 13377 - DNA, 38 bp, synthetic construct; identical to SEQ ID NO: 940
  misc_feature 1..38: note = Probe
  source 1..38: mol_type = other DNA

SEQ ID NO: 13378 - DNA, 39 bp, synthetic construct; identical to SEQ ID NO: 941
  misc_feature 1..39: note = Probe
  source 1..39: mol_type = other DNA

SEQ ID NO: 13379 - DNA, 40 bp, synthetic construct; identical to SEQ ID NO: 942
  misc_feature 1..40: note = Probe
  source 1..40: mol_type = other DNA

SEQ ID NO: 13380 - DNA, 41 bp, synthetic construct; identical to SEQ ID NO: 943
  misc_feature 1..41: note = Probe
  source 1..41: mol_type = other DNA

SEQ ID NO: 13381 - DNA, 42 bp, synthetic construct; identical to SEQ ID NO: 944
  misc_feature 1..42: note = Probe
  source 1..42: mol_type = other DNA

SEQ ID NO: 13382 - DNA, 43 bp, synthetic construct; identical to SEQ ID NO: 945
  misc_feature 1..43: note = Probe
  source 1..43: mol_type = other DNA

SEQ ID NO: 13383 - DNA, 44 bp, synthetic construct; identical to SEQ ID NO: 946
  misc_feature 1..44: note = Probe
  source 1..44: mol_type = other DNA

SEQ ID NO: 13384 - DNA, 45 bp, synthetic construct; identical to SEQ ID NO: 947
  misc_feature 1..45: note = Probe
  source 1..45: mol_type = other DNA

SEQ ID NO: 13385 - DNA, 46 bp, synthetic construct; identical to SEQ ID NO: 948
  misc_feature 1..46: note = Probe
  source 1..46: mol_type = other DNA

SEQ ID NO: 13386 - DNA, 50 bp, synthetic construct; identical to SEQ ID NO: 950
  misc_feature 1..50: note = Probe
  source 1..50: mol_type = other DNA

SEQ ID NO: 13387 - DNA, 24 bp, synthetic construct
  misc_feature 1..24: note = Probe
  source 1..24: mol_type = other DNA
gagaccggggttcaattccccgac

SEQ ID NO: 13388 - DNA, 23 bp, synthetic construct
  misc_feature 1..23: note = Probe
  source 1..23: mol_type = other DNA
gagaccggggttcgattccccga

SEQ ID NO: 13389 - DNA, 24 bp, synthetic construct
  misc_feature 1..24: note = Probe
  source 1..24: mol_type = other DNA
gagaccggggttcgattccccgac

SEQ ID NO: 13390 - DNA, 25 bp, synthetic construct
  misc_feature 1..25: note = Probe
  source 1..25: mol_type = other DNA
gagaccggggttcgattccccgacg

SEQ ID NO: 13391 - DNA, 26 bp, synthetic construct
  misc_feature 1..26: note = Probe
  source 1..26: mol_type = other DNA
gagaccggggttcgattccccgacgg

SEQ ID NO: 13392 - DNA, 27 bp, synthetic construct
  misc_feature 1..27: note = Probe
  source 1..27: mol_type = other DNA
gagaccggggttcgattccccgacggg

SEQ ID NO: 13393 - DNA, 28 bp, synthetic construct
  misc_feature 1..28: note = Probe
  source 1..28: mol_type = other DNA
gagaccggggttcgattccccgacgggg

SEQ ID NO: 13394 - DNA, 29 bp, synthetic construct
  misc_feature 1..29: note = Probe
  source 1..29: mol_type = other DNA
gagaccggggttcgattccccgacgggga

SEQ ID NO: 13395 - DNA, 30 bp, synthetic construct; identical to SEQ ID NO: 957
  misc_feature 1..30: note = Probe
  source 1..30: mol_type = other DNA

SEQ ID NO: 13396 - DNA, 17 bp, synthetic construct
  misc_feature 1..17: note = Probe
  source 1..17: mol_type = other DNA
gagaggtcccgggttca

SEQ ID NO: 13397 - DNA, 34 bp, synthetic construct
  misc_feature 1..34: note = Probe
  source 1..34: mol_type = other DNA
gagaggtcccgggttcaaatcccggacgagcccc

SEQ ID NO: 13398 - DNA, 30 bp, synthetic construct
  misc_feature 1..30: note = Probe
  source 1..30: mol_type = other DNA
gagcatagctgccttccaagcagttgaccc

SEQ ID NO: 13399 - DNA, 32 bp, synthetic construct
  misc_feature 1..32: note = Probe
  source 1..32: mol_type = other DNA
gagcatagctgccttccaagcagttgacccgg

SEQ ID NO: 13400 - DNA, 16 bp, synthetic construct
  misc_feature 1..16: note = Probe
  source 1..16: mol_type = other DNA
gagcccggtaatcgca

SEQ ID NO: 13401 - DNA, 18 bp, synthetic construct
  misc_feature 1..18: note = Probe
  source 1..18: mol_type = other DNA
gagcccggtaatcgcata

SEQ ID NO: 13402 - DNA, 19 bp, synthetic construct
  misc_feature 1..19: note = Probe
  source 1..19: mol_type = other DNA
gagcccggtaatcgcataa

SEQ ID NO: 13403 - DNA, 25 bp, synthetic construct
  misc_feature 1..25: note = Probe
  source 1..25: mol_type = other DNA
gagcccggtaatcgcataaaactta

SEQ ID NO: 13404 - DNA, 30 bp, synthetic construct; identical to SEQ ID NO: 960
  misc_feature 1..30: note = Probe
  source 1..30: mol_type = other DNA

SEQ ID NO: 13405 - DNA, 35 bp, synthetic construct; identical to SEQ ID NO: 5659
  misc_feature 1..35: note = Probe
  source 1..35: mol_type = other DNA

SEQ ID NO: 13406 - DNA, 38 bp, synthetic construct; identical to SEQ ID NO: 962
  misc_feature 1..38: note = Probe
  source 1..38: mol_type = other DNA

SEQ ID NO: 13407 - DNA, 39 bp, synthetic construct; identical to SEQ ID NO: 963
  misc_feature 1..39: note = Probe
  source 1..39: mol_type = other DNA

SEQ ID NO: 13408 - DNA, 42 bp, synthetic construct
  misc_feature 1..42: note = Probe
  source 1..42: mol_type = other DNA
gagcccggtaatcgcataaaacttaaaactttacagtcagag

SEQ ID NO: 13409 - DNA, 17 bp, synthetic construct
  misc_feature 1..17: note = Probe
  source 1..17: mol_type = other DNA
gagcttaaaccccctta

SEQ ID NO: 13410 - DNA, 19 bp, synthetic construct
  misc_feature 1..19: note = Probe
  source 1..19: mol_type = other DNA
gagcttaaacccccttatt

SEQ ID NO: 13411 - DNA, 20 bp, synthetic construct
  misc_feature 1..20: note = Probe
  source 1..20: mol_type = other DNA
gagcttaaacccccttattt

SEQ ID NO: 13412 - DNA, 21 bp, synthetic construct
  misc_feature 1..21: note = Probe
  source 1..21: mol_type = other DNA
gagcttaaacccccttatttc

SEQ ID NO: 13413 - DNA, 22 bp, synthetic construct
  misc_feature 1..22: note = Probe
  source 1..22: mol_type = other DNA
gagcttaaacccccttatttct

SEQ ID NO: 13414 - DNA, 23 bp, synthetic construct
  misc_feature 1..23: note = Probe
  source 1..23: mol_type = other DNA
gagcttaaacccccttatttcta

SEQ ID NO: 13415 - DNA, 16 bp, synthetic construct
  misc_feature 1..16: note = Probe
  source 1..16: mol_type = other DNA
gaggcttacgacccct

SEQ ID NO: 13416 - DNA, 24 bp, synthetic construct
  misc_feature 1..24: note = Probe
  source 1..24: mol_type = other DNA
gaggcttacgaccccttatttacc

SEQ ID NO: 13417 - DNA, 30 bp, synthetic construct; identical to SEQ ID NO: 10159
  misc_feature 1..30: note = Probe
  source 1..30: mol_type = other DNA

SEQ ID NO: 13418 - DNA, 17 bp, synthetic construct
  misc_feature 1..17: note = Probe
  source 1..17: mol_type = other DNA
gagtaaataataggagc

SEQ ID NO: 13419 - DNA, 35 bp, synthetic construct; identical to SEQ ID NO: 971
  misc_feature 1..35: note = Probe
  source 1..35: mol_type = other DNA

SEQ ID NO: 13420 - DNA, 36 bp, synthetic construct; identical to SEQ ID NO: 972
  misc_feature 1..36: note = Probe
  source 1..36: mol_type = other DNA

SEQ ID NO: 13421 - DNA, 29 bp, synthetic construct
  misc_feature 1..29: note = Probe
  source 1..29: mol_type = other DNA
gagtatccccgcctgtcacgcgggagacc

SEQ ID NO: 13422 - DNA, 31 bp, synthetic construct
  misc_feature 1..31: note = Probe
  source 1..31: mol_type = other DNA
gagtatccccgcctgtcacgcgggagaccgg

SEQ ID NO: 13423 - DNA, 17 bp, synthetic construct
  misc_feature 1..17: note = Probe
  source 1..17: mol_type = other DNA
gattcccattcttgcga

SEQ ID NO: 13424 - DNA, 27 bp, synthetic construct
  misc_feature 1..27: note = Probe
  source 1..27: mol_type = other DNA
gattcggcgctctcaccgccgcggccc

SEQ ID NO: 13425 - DNA, 27 bp, synthetic construct
  misc_feature 1..27: note = Probe
  source 1..27: mol_type = other DNA
gattcggcgctttcaccgccgcggccc

SEQ ID NO: 13426 - DNA, 27 bp, synthetic construct
  misc_feature 1..27: note = Probe
  source 1..27: mol_type = other DNA
gattgtgaatctgacaacagaggctta

SEQ ID NO: 13427 - DNA, 28 bp, synthetic construct
  misc_feature 1..28: note = Probe
  source 1..28: mol_type = other DNA
gattgtgaatctgacaacagaggcttac

SEQ ID NO: 13428 - DNA, 32 bp, synthetic construct; identical to SEQ ID NO: 5751
  misc_feature 1..32: note = Probe
  source 1..32: mol_type = other DNA

SEQ ID NO: 13429 - DNA, 33 bp, synthetic construct; identical to SEQ ID NO: 982
  misc_feature 1..33: note = Probe
  source 1..33: mol_type = other DNA

SEQ ID NO: 13430 - DNA, 34 bp, synthetic construct; identical to SEQ ID NO: 983
  misc_feature 1..34: note = Probe
  source 1..34: mol_type = other DNA

SEQ ID NO: 13431 - DNA, 29 bp, synthetic construct
  misc_feature 1..29: note = Probe
  source 1..29: mol_type = other DNA
gcacgaggccccgggttcaatccccggca

SEQ ID NO: 13432 - DNA, 31 bp, synthetic construct
  misc_feature 1..31: note = Probe
  source 1..31: mol_type = other DNA
gcacgaggccccgggttcaatccccggcacc

SEQ ID NO: 13433 - DNA, 35 bp, synthetic construct
  misc_feature 1..35: note = Probe
  source 1..35: mol_type = other DNA
gcacgaggccccgggttcaatccccggcacctcca

SEQ ID NO: 13434 - DNA, 16 bp, synthetic construct
  misc_feature 1..16: note = Probe
  source 1..16: mol_type = other DNA
gcacgaggtcctgggt

SEQ ID NO: 13435 - DNA, 28 bp, synthetic construct
  misc_feature 1..28: note = Probe
  source 1..28: mol_type = other DNA
gcactctggactttgaatccagcgatcc

SEQ ID NO: 13436 - DNA, 29 bp, synthetic construct
  misc_feature 1..29: note = Probe
  source 1..29: mol_type = other DNA
gcactctggactttgaatccagcgatccg

SEQ ID NO: 13437 - DNA, 32 bp, synthetic construct; identical to SEQ ID NO: 991
  misc_feature 1..32: note = Probe
  source 1..32: mol_type = other DNA

SEQ ID NO: 13438 - DNA, 32 bp, synthetic construct
  misc_feature 1..32: note = Probe
  source 1..32: mol_type = other DNA
gcagaaggtcctgggttcgagccccagtggaa

SEQ ID NO: 13439 - DNA, 33 bp, synthetic construct
  misc_feature 1..33: note = Probe
  source 1..33: mol_type = other DNA
gcagaaggtcctgggttcgagccccagtggaac

SEQ ID NO: 13440 - DNA, 34 bp, synthetic construct
  misc_feature 1..34: note = Probe
  source 1..34: mol_type = other DNA
gcagaaggtcctgggttcgagccccagtggaacc

SEQ ID NO: 13441 - DNA, 35 bp, synthetic construct; identical to SEQ ID NO: 992
  misc_feature 1..35: note = Probe
  source 1..35: mol_type = other DNA

SEQ ID NO: 13442 - DNA, 36 bp, synthetic construct; identical to SEQ ID NO: 993
  misc_feature 1..36: note = Probe
  source 1..36: mol_type = other DNA

SEQ ID NO: 13443 - DNA, 21 bp, synthetic construct
  misc_feature 1..21: note = Probe
  source 1..21: mol_type = other DNA
gcagagcccggtaatcgcata

SEQ ID NO: 13444 - DNA, 17 bp, synthetic construct
  misc_feature 1..17: note = Probe
  source 1..17: mol_type = other DNA
gcagcaacctcggttcg

SEQ ID NO: 13445 - DNA, 30 bp, synthetic construct; identical to SEQ ID NO: 10291
  misc_feature 1..30: note = Probe
  source 1..30: mol_type = other DNA

SEQ ID NO: 13446 - DNA, 31 bp, synthetic construct; identical to SEQ ID NO: 5838
  misc_feature 1..31: note = Probe
  source 1..31: mol_type = other DNA

SEQ ID NO: 13447 - DNA, 16 bp, synthetic construct
  misc_feature 1..16: note = Probe
  source 1..16: mol_type = other DNA
gcagcgatggccgagt

SEQ ID NO: 13448 - DNA, 20 bp, synthetic construct
  misc_feature 1..20: note = Probe
  source 1..20: mol_type = other DNA
gcagcgatggccgagtggtt

SEQ ID NO: 13449 - DNA, 21 bp, synthetic construct
  misc_feature 1..21: note = Probe
  source 1..21: mol_type = other DNA
gcagcgatggccgagtggtta

SEQ ID NO: 13450 - DNA, 23 bp, synthetic construct
  misc_feature 1..23: note = Probe
  source 1..23: mol_type = other DNA
gcagcgatggccgagtggttaag

SEQ ID NO: 13451 - DNA, 21 bp, synthetic construct
  misc_feature 1..21: note = Probe
  source 1..21: mol_type = other DNA
gcagcggaagcgtgctgggcc

SEQ ID NO: 13452 - DNA, 25 bp, synthetic construct
  misc_feature 1..25: note = Probe
  source 1..25: mol_type = other DNA
gcataaaacttaaaactttacagtc

SEQ ID NO: 13453 - DNA, 26 bp, synthetic construct
  misc_feature 1..26: note = Probe
  source 1..26: mol_type = other DNA
gcataaaacttaaaactttacagtca

SEQ ID NO: 13454 - DNA, 28 bp, synthetic construct
  misc_feature 1..28: note = Probe
  source 1..28: mol_type = other DNA
gcatagctgccttccaagcagttgaccc

SEQ ID NO: 13455 - DNA, 16 bp, synthetic construct
  misc_feature 1..16: note = Probe
  source 1..16: mol_type = other DNA
gcatgaggtcccgggt

SEQ ID NO: 13456 - DNA, 35 bp, synthetic construct
  misc_feature 1..35: note = Probe
  source 1..35: mol_type = other DNA
gcatgaggtcccgggttcgatccccagcatctcca

SEQ ID NO: 13457 - DNA, 28 bp, synthetic construct
  misc_feature 1..28: note = Probe
  source 1..28: mol_type = other DNA
gcatgggtggttcagtggtagaattctc

SEQ ID NO: 13458 - DNA, 29 bp, synthetic construct
  misc_feature 1..29: note = Probe
  source 1..29: mol_type = other DNA
gcatgggtggttcagtggtagaattctcg

SEQ ID NO: 13459 - DNA, 30 bp, synthetic construct; identical to SEQ ID NO: 1002
  misc_feature 1..30: note = Probe
  source 1..30: mol_type = other DNA

SEQ ID NO: 13460 - DNA, 31 bp, synthetic construct; identical to SEQ ID NO: 1003
  misc_feature 1..31: note = Probe
  source 1..31: mol_type = other DNA

SEQ ID NO: 13461 - DNA, 32 bp, synthetic construct; identical to SEQ ID NO: 1004
  misc_feature 1..32: note = Probe
  source 1..32: mol_type = other DNA

SEQ ID NO: 13462 - DNA, 33 bp, synthetic construct; identical to SEQ ID NO: 1005
  misc_feature 1..33: note = Probe
  source 1..33: mol_type = other DNA

SEQ ID NO: 13463 - DNA, 34 bp, synthetic construct; identical to SEQ ID NO: 1006
  misc_feature 1..34: note = Probe
  source 1..34: mol_type = other DNA

SEQ ID NO: 13464 - DNA, 35 bp, synthetic construct; identical to SEQ ID NO: 1007
  misc_feature 1..35: note = Probe
  source 1..35: mol_type = other DNA

SEQ ID NO: 13465 - DNA, 36 bp, synthetic construct; identical to SEQ ID NO: 1008
  misc_feature 1..36: note = Probe
  source 1..36: mol_type = other DNA

SEQ ID NO: 13466 - DNA, 38 bp, synthetic construct; identical to SEQ ID NO: 1009
  misc_feature 1..38: note = Probe
  source 1..38: mol_type = other DNA

SEQ ID NO: 13467 - DNA, 39 bp, synthetic construct; identical to SEQ ID NO: 5871
  misc_feature 1..39: note = Probe
  source 1..39: mol_type = other DNA

SEQ ID NO: 13468 - DNA, 40 bp, synthetic construct; identical to SEQ ID NO: 5872
  misc_feature 1..40: note = Probe
  source 1..40: mol_type = other DNA

SEQ ID NO: 13469 - DNA, 41 bp, synthetic construct
  misc_feature 1..41: note = Probe
  source 1..41: mol_type = other DNA
gcatgggtggttcagtggtagaattctcgcctgccacgcgg

SEQ ID NO: 13470 - DNA, 49 bp, synthetic construct; identical to SEQ ID NO: 5876
  misc_feature 1..49: note = Probe
  source 1..49: mol_type = other DNA

SEQ ID NO: 13471 - DNA, 50 bp, synthetic construct; identical to SEQ ID NO: 1010
  misc_feature 1..50: note = Probe
  source 1..50: mol_type = other DNA

SEQ ID NO: 13472 - DNA, 26 bp, synthetic construct
  misc_feature 1..26: note = Probe
  source 1..26: mol_type = other DNA
gcattaaccttttaagttaaagatta

SEQ ID NO: 13473 - DNA, 33 bp, synthetic construct; identical to SEQ ID NO: 5879
  misc_feature 1..33: note = Probe
  source 1..33: mol_type = other DNA

SEQ ID NO: 13474 - DNA, 34 bp, synthetic construct; identical to SEQ ID NO: 1011
  misc_feature 1..34: note = Probe
  source 1..34: mol_type = other DNA

SEQ ID NO: 13475 - DNA, 35 bp, synthetic construct
  misc_feature 1..35: note = Probe
  source 1..35: mol_type = other DNA
gcattaaccttttaagttaaagattaagagaacca

SEQ ID NO: 13476 - DNA, 50 bp, synthetic construct; identical to SEQ ID NO: 1012
  misc_feature 1..50: note = Probe
  source 1..50: mol_type = other DNA

SEQ ID NO: 13477 - DNA, 38 bp, synthetic construct
  misc_feature 1..38: note = Probe
  source 1..38: mol_type = other DNA
gcattggtggttcagtggtagaattctcgcctcccacg

SEQ ID NO: 13478 - DNA, 39 bp, synthetic construct; identical to SEQ ID NO: 5907
  misc_feature 1..39: note = Probe
  source 1..39: mol_type = other DNA

SEQ ID NO: 13479 - DNA, 40 bp, synthetic construct
  misc_feature 1..40: note = Probe
  source 1..40: mol_type = other DNA
gcattggtggttcagtggtagaattctcgcctcccacgcg

SEQ ID NO: 13480 - DNA, 38 bp, synthetic construct; identical to SEQ ID NO: 1014
  misc_feature 1..38: note = Probe
  source 1..38: mol_type = other DNA

SEQ ID NO: 13481 - DNA, 39 bp, synthetic construct; identical to SEQ ID NO: 1015
  misc_feature 1..39: note = Probe
  source 1..39: mol_type = other DNA

SEQ ID NO: 13482 - DNA, 40 bp, synthetic construct; identical to SEQ ID NO: 1016
  misc_feature 1..40: note = Probe
  source 1..40: mol_type = other DNA

SEQ ID NO: 13483 - DNA, 44 bp, synthetic construct; identical to SEQ ID NO: 1018
  misc_feature 1..44: note = Probe
  source 1..44: mol_type = other DNA

SEQ ID NO: 13484 - DNA, 49 bp, synthetic construct; identical to SEQ ID NO: 1019
  misc_feature 1..49: note = Probe
  source 1..49: mol_type = other DNA

SEQ ID NO: 13485 - DNA, 50 bp, synthetic construct; identical to SEQ ID NO: 1020
  misc_feature 1..50: note = Probe
  source 1..50: mol_type = other DNA

SEQ ID NO: 13486 - DNA, 16 bp, synthetic construct
  misc_feature 1..16: note = Probe
  source 1..16: mol_type = other DNA
gccacgcgggaggccc

SEQ ID NO: 13487 - DNA, 20 bp, synthetic construct
  misc_feature 1..20: note = Probe
  source 1..20: mol_type = other DNA
gccacgcgggaggcccgggt

SEQ ID NO: 13488 - DNA, 21 bp, synthetic construct
  misc_feature 1..21: note = Probe
  source 1..21: mol_type = other DNA
gccacgcgggaggcccgggtt

SEQ ID NO: 13489 - DNA, 50 bp, synthetic construct; identical to SEQ ID NO: 1024
  misc_feature 1..50: note = Probe
  source 1..50: mol_type = other DNA

SEQ ID NO: 13490 - DNA, 41 bp, synthetic construct
  misc_feature 1..41: note = Probe
  source 1..41: mol_type = other DNA
gcccataccccgaaaatgttggttatacccttcccgtacta

SEQ ID NO: 13491 - DNA, 19 bp, synthetic construct
  misc_feature 1..19: note = Probe
  source 1..19: mol_type = other DNA
gccccagtggcctaatgga

SEQ ID NO: 13492 - DNA, 36 bp, synthetic construct; identical to SEQ ID NO: 1025
  misc_feature 1..36: note = Probe
  source 1..36: mol_type = other DNA

SEQ ID NO: 13493 - DNA, 22 bp, synthetic construct
  misc_feature 1..22: note = Probe
  source 1..22: mol_type = other DNA
gccccgggttcaatccccggca

SEQ ID NO: 13494 - DNA, 25 bp, synthetic construct
  misc_feature 1..25: note = Probe
  source 1..25: mol_type = other DNA
gccccgggttcaatccccggcacct

SEQ ID NO: 13495 - DNA, 26 bp, synthetic construct
  misc_feature 1..26: note = Probe
  source 1..26: mol_type = other DNA
gccccgggttcaatccccggcacctc

SEQ ID NO: 13496 - DNA, 25 bp, synthetic construct
  misc_feature 1..25: note = Probe
  source 1..25: mol_type = other DNA
gccccgggttcgatccccggcatct

SEQ ID NO: 13497 - DNA, 18 bp, synthetic construct
  misc_feature 1..18: note = Probe
  source 1..18: mol_type = other DNA
gcccggatagctcagtcg

SEQ ID NO: 13498 - DNA, 19 bp, synthetic construct
  misc_feature 1..19: note = Probe
  source 1..19: mol_type = other DNA
gcccggatagctcagtcgg

SEQ ID NO: 13499 - DNA, 20 bp, synthetic construct
  misc_feature 1..20: note = Probe
  source 1..20: mol_type = other DNA
gcccggatagctcagtcggt

SEQ ID NO: 13500 - DNA, 21 bp, synthetic construct
  misc_feature 1..21: note = Probe
  source 1..21: mol_type = other DNA
gcccggatagctcagtcggta

SEQ ID NO: 13501 - DNA, 22 bp, synthetic construct
  misc_feature 1..22: note = Probe
  source 1..22: mol_type = other DNA
gcccggatagctcagtcggtag

SEQ ID NO: 13502 - DNA, 23 bp, synthetic construct
  misc_feature 1..23: note = Probe
  source 1..23: mol_type = other DNA
gcccggatagctcagtcggtaga

SEQ ID NO: 13503 - DNA, 24 bp, synthetic construct
  misc_feature 1..24: note = Probe
  source 1..24: mol_type = other DNA
gcccggatagctcagtcggtagag

SEQ ID NO: 13504 - DNA, 25 bp, synthetic construct
  misc_feature 1..25: note = Probe
  source 1..25: mol_type = other DNA
gcccggatagctcagtcggtagagc

SEQ ID NO: 13505 - DNA, 26 bp, synthetic construct
  misc_feature 1..26: note = Probe
  source 1..26: mol_type = other DNA
gcccggatagctcagtcggtagagca

SEQ ID NO: 13506 - DNA, 27 bp, synthetic construct
  misc_feature 1..27: note = Probe
  source 1..27: mol_type = other DNA
gcccggatagctcagtcggtagagcat

SEQ ID NO: 13507 - DNA, 28 bp, synthetic construct
  misc_feature 1..28: note = Probe
  source 1..28: mol_type = other DNA
gcccggatagctcagtcggtagagcatc

SEQ ID NO: 13508 - DNA, 29 bp, synthetic construct
  misc_feature 1..29: note = Probe
  source 1..29: mol_type = other DNA
gcccggatagctcagtcggtagagcatca

SEQ ID NO: 13509 - DNA, 30 bp, synthetic construct; identical to SEQ ID NO: 1038
  misc_feature 1..30: note = Probe
  source 1..30: mol_type = other DNA

SEQ ID NO: 13510 - DNA, 31 bp, synthetic construct; identical to SEQ ID NO: 1039
  misc_feature 1..31: note = Probe
  source 1..31: mol_type = other DNA

SEQ ID NO: 13511 - DNA, 32 bp, synthetic construct; identical to SEQ ID NO: 1040
  misc_feature 1..32: note = Probe
  source 1..32: mol_type = other DNA

SEQ ID NO: 13512 - DNA, 33 bp, synthetic construct; identical to SEQ ID NO: 1041
  misc_feature 1..33: note = Probe
  source 1..33: mol_type = other DNA

SEQ ID NO: 13513 - DNA, 34 bp, synthetic construct; identical to SEQ ID NO: 1042
  misc_feature 1..34: note = Probe
  source 1..34: mol_type = other DNA

SEQ ID NO: 13514 - DNA, 35 bp, synthetic construct; identical to SEQ ID NO: 1043
  misc_feature 1..35: note = Probe
  source 1..35: mol_type = other DNA

SEQ ID NO: 13515 - DNA, 36 bp, synthetic construct; identical to SEQ ID NO: 1044
  misc_feature 1..36: note = Probe
  source 1..36: mol_type = other DNA

SEQ ID NO: 13516 - DNA, 37 bp, synthetic construct; identical to SEQ ID NO: 1045
  misc_feature 1..37: note = Probe
  source 1..37: mol_type = other DNA

SEQ ID NO: 13517 - DNA, 40 bp, synthetic construct
  misc_feature 1..40: note = Probe
  source 1..40: mol_type = other DNA
gcccggatagctcagtcggtagagcatcagacttttaatc

SEQ ID NO: 13518 - DNA, 50 bp, synthetic construct; identical to SEQ ID NO: 1046
  misc_feature 1..50: note = Probe
  source 1..50: mol_type = other DNA

SEQ ID NO: 13519 - DNA, 16 bp, synthetic construct
  misc_feature 1..16: note = Probe
  source 1..16: mol_type = other DNA
gcccggctagctcagt

SEQ ID NO: 13520 - DNA, 17 bp, synthetic construct
  misc_feature 1..17: note = Probe
  source 1..17: mol_type = other DNA
gcccggctagctcagtc

SEQ ID NO: 13521 - DNA, 18 bp, synthetic construct
  misc_feature 1..18: note = Probe
  source 1..18: mol_type = other DNA
gcccggctagctcagtcg

SEQ ID NO: 13522 - DNA, 31 bp, synthetic construct; identical to SEQ ID NO: 1050
  misc_feature 1..31: note = Probe
  source 1..31: mol_type = other DNA

SEQ ID NO: 13523 - DNA, 33 bp, synthetic construct; identical to SEQ ID NO: 1051
  misc_feature 1..33: note = Probe
  source 1..33: mol_type = other DNA

SEQ ID NO: 13524 - DNA, 22 bp, synthetic construct
  misc_feature 1..22: note = Probe
  source 1..22: mol_type = other DNA
gcccggctagctcagtcggtag

SEQ ID NO: 13525 - DNA, 23 bp, synthetic construct
  misc_feature 1..23: note = Probe
  source 1..23: mol_type = other DNA
gcccggctagctcagtcggtaga

SEQ ID NO: 13526 - DNA, 24 bp, synthetic construct
  misc_feature 1..24: note = Probe
  source 1..24: mol_type = other DNA
gcccggctagctcagtcggtagag

SEQ ID NO: 13527 - DNA, 25 bp, synthetic construct
  misc_feature 1..25: note = Probe
  source 1..25: mol_type = other DNA
gcccggctagctcagtcggtagagc

SEQ ID NO: 13528 - DNA, 26 bp, synthetic construct
  misc_feature 1..26: note = Probe
  source 1..26: mol_type = other DNA
gcccggctagctcagtcggtagagca

SEQ ID NO: 13529 - DNA, 27 bp, synthetic construct
  misc_feature 1..27: note = Probe
  source 1..27: mol_type = other DNA
gcccggctagctcagtcggtagagcat

SEQ ID NO: 13530 - DNA, 28 bp, synthetic construct
  misc_feature 1..28: note = Probe
  source 1..28: mol_type = other DNA
gcccggctagctcagtcggtagagcatg

SEQ ID NO: 13531 - DNA, 29 bp, synthetic construct
  misc_feature 1..29: note = Probe
  source 1..29: mol_type = other DNA
gcccggctagctcagtcggtagagcatga

SEQ ID NO: 13532 - DNA, 30 bp, synthetic construct; identical to SEQ ID NO: 1062
  misc_feature 1..30: note = Probe
  source 1..30: mol_type = other DNA

SEQ ID NO: 13533 - DNA, 31 bp, synthetic construct; identical to SEQ ID NO: 1063
  misc_feature 1..31: note = Probe
  source 1..31: mol_type = other DNA

SEQ ID NO: 13534 - DNA, 32 bp, synthetic construct; identical to SEQ ID NO: 1064
  misc_feature 1..32: note = Probe
  source 1..32: mol_type = other DNA

SEQ ID NO: 13535 - DNA, 33 bp, synthetic construct; identical to SEQ ID NO: 1065
  misc_feature 1..33: note = Probe
  source 1..33: mol_type = other DNA

SEQ ID NO: 13536 - DNA, 34 bp, synthetic construct; identical to SEQ ID NO: 1066
  misc_feature 1..34: note = Probe
  source 1..34: mol_type = other DNA

SEQ ID NO: 13537 - DNA, 35 bp, synthetic construct; identical to SEQ ID NO: 1067
  misc_feature 1..35: note = Probe
  source 1..35: mol_type = other DNA

SEQ ID NO: 13538 - DNA, 36 bp, synthetic construct; identical to SEQ ID NO: 1068
  misc_feature 1..36: note = Probe
  source 1..36: mol_type = other DNA

SEQ ID NO: 13539 - DNA, 33 bp, synthetic construct; identical to SEQ ID NO: 1070
  misc_feature 1..33: note = Probe
  source 1..33: mol_type = other DNA

SEQ ID NO: 13540 - DNA, 34 bp, synthetic construct; identical to SEQ ID NO: 1071
  misc_feature 1..34: note = Probe
  source 1..34: mol_type = other DNA

SEQ ID NO: 13541 - DNA, 35 bp, synthetic construct; identical to SEQ ID NO: 1072
  misc_feature 1..35: note = Probe
  source 1..35: mol_type = other DNA

SEQ ID NO: 13542 - DNA, 36 bp, synthetic construct; identical to SEQ ID NO: 1073
  misc_feature 1..36: note = Probe
  source 1..36: mol_type = other DNA

SEQ ID NO: 13543 - DNA, 37 bp, synthetic construct; identical to SEQ ID NO: 1074
  misc_feature 1..37: note = Probe
  source 1..37: mol_type = other DNA

SEQ ID NO: 13544 - DNA, 38 bp, synthetic construct
  misc_feature 1..38: note = Probe
  source 1..38: mol_type = other DNA
gcccggctagctcagtcggtagagcatgagactcttaa

SEQ ID NO: 13545 - DNA, 39 bp, synthetic construct; identical to SEQ ID NO: 1075
  misc_feature 1..39: note = Probe
  source 1..39: mol_type = other DNA

SEQ ID NO: 13546 - DNA, 40 bp, synthetic construct; identical to SEQ ID NO: 1076
  misc_feature 1..40: note = Probe
  source 1..40: mol_type = other DNA

SEQ ID NO: 13547 - DNA, 41 bp, synthetic construct; identical to SEQ ID NO: 5997
  misc_feature 1..41: note = Probe
  source 1..41: mol_type = other DNA

SEQ ID NO: 13548 - DNA, 49 bp, synthetic construct; identical to SEQ ID NO: 5999
  misc_feature 1..49: note = Probe
  source 1..49: mol_type = other DNA

SEQ ID NO: 13549 - DNA, 50 bp, synthetic construct; identical to SEQ ID NO: 1078
  misc_feature 1..50: note = Probe
  source 1..50: mol_type = other DNA

SEQ ID NO: 13550 - DNA, 29 bp, synthetic construct
  misc_feature 1..29: note = Probe
  source 1..29: mol_type = other DNA
gcccggctagctcagtcggtagagcatgg

SEQ ID NO: 13551 - DNA, 30 bp, synthetic construct; identical to SEQ ID NO: 1080
  misc_feature 1..30: note = Probe
  source 1..30: mol_type = other DNA

SEQ ID NO: 13552 - DNA, 31 bp, synthetic construct; identical to SEQ ID NO: 1081
  misc_feature 1..31: note = Probe
  source 1..31: mol_type = other DNA

SEQ ID NO: 13553 - DNA, 32 bp, synthetic construct; identical to SEQ ID NO: 1082
  misc_feature 1..32: note = Probe
  source 1..32: mol_type = other DNA

SEQ ID NO: 13554 - DNA, 33 bp, synthetic construct; identical to SEQ ID NO: 1083
  misc_feature 1..33: note = Probe
  source 1..33: mol_type = other DNA

SEQ ID NO: 13555 - DNA, 34 bp, synthetic construct; identical to SEQ ID NO: 1084
  misc_feature 1..34: note = Probe
  source 1..34: mol_type = other DNA

SEQ ID NO: 13556 - DNA, 35 bp, synthetic construct; identical to SEQ ID NO: 1085
  misc_feature 1..35: note = Probe
  source 1..35: mol_type = other DNA

SEQ ID NO: 13557 - DNA, 36 bp, synthetic construct; identical to SEQ ID NO: 1086
  misc_feature 1..36: note = Probe
  source 1..36: mol_type = other DNA

SEQ ID NO: 13558 - DNA, 37 bp, synthetic construct; identical to SEQ ID NO: 1087
  misc_feature 1..37: note = Probe
  source 1..37: mol_type = other DNA

SEQ ID NO: 13559 - DNA, 38 bp, synthetic construct; identical to SEQ ID NO: 6000
  misc_feature 1..38: note = Probe
  source 1..38: mol_type = other DNA

SEQ ID NO: 13560 - DNA, 39 bp, synthetic construct; identical to SEQ ID NO: 6001
  misc_feature 1..39: note = Probe
  source 1..39: mol_type = other DNA

SEQ ID NO: 13561 - DNA, 40 bp, synthetic construct; identical to SEQ ID NO: 1088
  misc_feature 1..40: note = Probe
  source 1..40: mol_type = other DNA

SEQ ID NO: 13562 - DNA, 41 bp, synthetic construct; identical to SEQ ID NO: 6002
  misc_feature 1..41: note = Probe
  source 1..41: mol_type = other DNA

SEQ ID NO: 13563 - DNA, 42 bp, synthetic construct; identical to SEQ ID NO: 1089
  misc_feature 1..42: note = Probe
  source 1..42: mol_type = other DNA

SEQ ID NO: 13564 - DNA, 45 bp, synthetic construct; identical to SEQ ID NO: 1090
  misc_feature 1..45: note = Probe
  source 1..45: mol_type = other DNA

SEQ ID NO: 13565 - DNA, 49 bp, synthetic construct; identical to SEQ ID NO: 6006
  misc_feature 1..49: note = Probe
  source 1..49: mol_type = other DNA

SEQ ID NO: 13566 - DNA, 50 bp, synthetic construct; identical to SEQ ID NO: 1091
  misc_feature 1..50: note = Probe
  source 1..50: mol_type = other DNA

SEQ ID NO: 13567 - DNA, 16 bp, synthetic construct
  misc_feature 1..16: note = Probe
  source 1..16: mol_type = other DNA
gcccggtaatcgcata

SEQ ID NO: 13568 - DNA, 17 bp, synthetic construct
  misc_feature 1..17: note = Probe
  source 1..17: mol_type = other DNA
gccctcagtaagttgca

SEQ ID NO: 13569 - DNA, 31 bp, synthetic construct
  misc_feature 1..31: note = Probe
  source 1..31: mol_type = other DNA
gccgaggttgtgagttcgagcctcacctgga

SEQ ID NO: 13570 - DNA, 29 bp, synthetic construct
  misc_feature 1..29: note = Probe
  source 1..29: mol_type = other DNA
gccgcggcccgggttcgattcccggtcag

SEQ ID NO: 13571 - DNA, 30 bp, synthetic construct; identical to SEQ ID NO: 10395
  misc_feature 1..30: note = Probe
  source 1..30: mol_type = other DNA

SEQ ID NO: 13572 - DNA, 31 bp, synthetic construct
  misc_feature 1..31: note = Probe
  source 1..31: mol_type = other DNA
gccgcggcccgggttcgattcccggtcaggg

SEQ ID NO: 13573 - DNA, 32 bp, synthetic construct; identical to SEQ ID NO: 6021
  misc_feature 1..32: note = Probe
  source 1..32: mol_type = other DNA

SEQ ID NO: 13574 - DNA, 33 bp, synthetic construct; identical to SEQ ID NO: 6022
  misc_feature 1..33: note = Probe
  source 1..33: mol_type = other DNA

SEQ ID NO: 13575 - DNA, 20 bp, synthetic construct
  misc_feature 1..20: note = Probe
  source 1..20: mol_type = other DNA
gccgctggtgtagtggtatc

SEQ ID NO: 13576 - DNA, 25 bp, synthetic construct
  misc_feature 1..25: note = Probe
  source 1..25: mol_type = other DNA
gccgctggtgtagtggtatcatgca

SEQ ID NO: 13577 - DNA, 26 bp, synthetic construct
  misc_feature 1..26: note = Probe
  source 1..26: mol_type = other DNA
gccgctggtgtagtggtatcatgcaa

SEQ ID NO: 13578 - DNA, 27 bp, synthetic construct
  misc_feature 1..27: note = Probe
  source 1..27: mol_type = other DNA
gccgctggtgtagtggtatcatgcaag

SEQ ID NO: 13579 - DNA, 28 bp, synthetic construct
  misc_feature 1..28: note = Probe
  source 1..28: mol_type = other DNA
gccgctggtgtagtggtatcatgcaaga

SEQ ID NO: 13580 - DNA, 30 bp, synthetic construct; identical to SEQ ID NO: 1100
  misc_feature 1..30: note = Probe
  source 1..30: mol_type = other DNA

SEQ ID NO: 13581 - DNA, 31 bp, synthetic construct; identical to SEQ ID NO: 1101
  misc_feature 1..31: note = Probe
  source 1..31: mol_type = other DNA

SEQ ID NO: 13582 - DNA, 32 bp, synthetic construct; identical to SEQ ID NO: 1102
  misc_feature 1..32: note = Probe
  source 1..32: mol_type = other DNA

SEQ ID NO: 13583 - DNA, 33 bp, synthetic construct; identical to SEQ ID NO: 1103
  misc_feature 1..33: note = Probe
  source 1..33: mol_type = other DNA

SEQ ID NO: 13584 - DNA, 34 bp, synthetic construct; identical to SEQ ID NO: 1104
  misc_feature 1..34: note = Probe
  source 1..34: mol_type = other DNA

SEQ ID NO: 13585 - DNA, 30 bp, synthetic construct; identical to SEQ ID NO: 1105
  misc_feature 1..30: note = Probe
  source 1..30: mol_type = other DNA

SEQ ID NO: 13586 - DNA, 31 bp, synthetic construct; identical to SEQ ID NO: 1106
  misc_feature 1..31: note = Probe
  source 1..31: mol_type = other DNA

SEQ ID NO: 13587 - DNA, 33 bp, synthetic construct; identical to SEQ ID NO: 1108
  misc_feature 1..33: note = Probe
  source 1..33: mol_type = other DNA

SEQ ID NO: 13588 - DNA, 34 bp, synthetic construct; identical to SEQ ID NO: 1109
  misc_feature 1..34: note = Probe
  source 1..34: mol_type = other DNA

SEQ ID NO: 13589 - DNA, 35 bp, synthetic construct; identical to SEQ ID NO: 1110
  misc_feature 1..35: note = Probe
  source 1..35: mol_type = other DNA

SEQ ID NO: 13590 - DNA, 36 bp, synthetic construct; identical to SEQ ID NO: 1111
  misc_feature 1..36: note = Probe
  source 1..36: mol_type = other DNA

SEQ ID NO: 13591 - DNA, 39 bp, synthetic construct
  misc_feature 1..39: note = Probe
  source 1..39: mol_type = other DNA
gccgtgatcgtatagtggttagtactctgcgttgtggcc

SEQ ID NO: 13592 - DNA, 25 bp, synthetic construct
  misc_feature 1..25: note = Probe
  source 1..25: mol_type = other DNA
gcctcacacgcgaaaggtccccggt

SEQ ID NO: 13593 - DNA, 26 bp, synthetic construct
  misc_feature 1..26: note = Probe
  source 1..26: mol_type = other DNA
gcctcacacgcgaaaggtccccggtt

SEQ ID NO: 13594 - DNA, 32 bp, synthetic construct; identical to SEQ ID NO: 1112
  misc_feature 1..32: note = Probe
  source 1..32: mol_type = other DNA

SEQ ID NO: 13595 - DNA, 35 bp, synthetic construct; identical to SEQ ID NO: 1114
  misc_feature 1..35: note = Probe
  source 1..35: mol_type = other DNA

SEQ ID NO: 13596 - DNA, 24 bp, synthetic construct
  misc_feature 1..24: note = Probe
  source 1..24: mol_type = other DNA
gcctgccacgcgggaggcccgggt

SEQ ID NO: 13597 - DNA, 25 bp, synthetic construct
  misc_feature 1..25: note = Probe
  source 1..25: mol_type = other DNA
gcctgccacgcgggaggcccgggtt

SEQ ID NO: 13598 - DNA, 31 bp, synthetic construct; identical to SEQ ID NO: 1115
  misc_feature 1..31: note = Probe
  source 1..31: mol_type = other DNA

SEQ ID NO: 13599 - DNA, 32 bp, synthetic construct; identical to SEQ ID NO: 1116
  misc_feature 1..32: note = Probe
  source 1..32: mol_type = other DNA

SEQ ID NO: 13600 - DNA, 33 bp, synthetic construct; identical to SEQ ID NO: 1117
  misc_feature 1..33: note = Probe
  source 1..33: mol_type = other DNA

SEQ ID NO: 13601 - DNA, 34 bp, synthetic construct; identical to SEQ ID NO: 6054
  misc_feature 1..34: note = Probe
  source 1..34: mol_type = other DNA

SEQ ID NO: 13602 - DNA, 35 bp, synthetic construct; identical to SEQ ID NO: 1118
  misc_feature 1..35: note = Probe
  source 1..35: mol_type = other DNA

SEQ ID NO: 13603 - DNA, 36 bp, synthetic construct; identical to SEQ ID NO: 1119
  misc_feature 1..36: note = Probe
  source 1..36: mol_type = other DNA

SEQ ID NO: 13604 - DNA, 31 bp, synthetic construct; identical to SEQ ID NO: 1120
  misc_feature 1..31: note = Probe
  source 1..31: mol_type = other DNA

SEQ ID NO: 13605 - DNA, 32 bp, synthetic construct; identical to SEQ ID NO: 1121
  misc_feature 1..32: note = Probe
  source 1..32: mol_type = other DNA

SEQ ID NO: 13606 - DNA, 33 bp, synthetic construct; identical to SEQ ID NO: 1122
  misc_feature 1..33: note = Probe
  source 1..33: mol_type = other DNA

SEQ ID NO: 13607 - DNA, 34 bp, synthetic construct; identical to SEQ ID NO: 1123
  misc_feature 1..34: note = Probe
  source 1..34: mol_type = other DNA

SEQ ID NO: 13608 - DNA, 31 bp, synthetic construct; identical to SEQ ID NO: 1126
  misc_feature 1..31: note = Probe
  source 1..31: mol_type = other DNA

SEQ ID NO: 13609 - DNA, 32 bp, synthetic construct; identical to SEQ ID NO: 1127
  misc_feature 1..32: note = Probe
  source 1..32: mol_type = other DNA

SEQ ID NO: 13610 - DNA, 33 bp, synthetic construct; identical to SEQ ID NO: 1128
  misc_feature 1..33: note = Probe
  source 1..33: mol_type = other DNA

SEQ ID NO: 13611 - DNA, 34 bp, synthetic construct
  misc_feature 1..34: note = Probe
  source 1..34: mol_type = other DNA
gcctgggtagctcagtcggtagagcatcagactt

SEQ ID NO: 13612 - DNA, 22 bp, synthetic construct
  misc_feature 1..22: note = Probe
  source 1..22: mol_type = other DNA
gcctgtcacgcgggagaccggg

SEQ ID NO: 13613 - DNA, 24 bp, synthetic construct
  misc_feature 1..24: note = Probe
  source 1..24: mol_type = other DNA
gcctgtcacgcgggagaccggggt

SEQ ID NO: 13614 - DNA, 25 bp, synthetic construct
  misc_feature 1..25: note = Probe
  source 1..25: mol_type = other DNA
gcctgtcacgcgggagaccggggtt

SEQ ID NO: 13615 - DNA, 39 bp, synthetic construct
  misc_feature 1..39: note = Probe
  source 1..39: mol_type = other DNA
gcctgtcacgcgggagaccggggttcaattccccgacgg

SEQ ID NO: 13616 - DNA, 40 bp, synthetic construct
  misc_feature 1..40: note = Probe
  source 1..40: mol_type = other DNA
gcctgtcacgcgggagaccggggttcaattccccgacggg

SEQ ID NO: 13617 - DNA, 41 bp, synthetic construct
  misc_feature 1..41: note = Probe
  source 1..41: mol_type = other DNA
gcctgtcacgcgggagaccggggttcaattccccgacgggg

SEQ ID NO: 13618 - DNA, 36 bp, synthetic construct
  misc_feature 1..36: note = Probe
  source 1..36: mol_type = other DNA
gcctgtcacgcgggagaccggggttcgattccccga

SEQ ID NO: 13619 - DNA, 38 bp, synthetic construct
  misc_feature 1..38: note = Probe
  source 1..38: mol_type = other DNA
gcctgtcacgcgggagaccggggttcgattccccgacg

SEQ ID NO: 13620 - DNA, 39 bp, synthetic construct
  misc_feature 1..39: note = Probe
  source 1..39: mol_type = other DNA
gcctgtcacgcgggagaccggggttcgattccccgacgg

SEQ ID NO: 13621 - DNA, 40 bp, synthetic construct; identical to SEQ ID NO: 1131
  misc_feature 1..40: note = Probe
  source 1..40: mol_type = other DNA

SEQ ID NO: 13622 - DNA, 41 bp, synthetic construct
  misc_feature 1..41: note = Probe
  source 1..41: mol_type = other DNA
gcctgtcacgcgggagaccggggttcgattccccgacgggg

SEQ ID NO: 13623 - DNA, 43 bp, synthetic construct; identical to SEQ ID NO: 1132
  misc_feature 1..43: note = Probe
  source 1..43: mol_type = other DNA

SEQ ID NO: 13624 - DNA, 16 bp, synthetic construct
  misc_feature 1..16: note = Probe
  source 1..16: mol_type = other DNA
gcgaaaggtccccggt

SEQ ID NO: 13625 - DNA, 17 bp, synthetic construct
  misc_feature 1..17: note = Probe
  source 1..17: mol_type = other DNA
gcgaaaggtccccggtt

SEQ ID NO: 13626 - DNA, 36 bp, synthetic construct
  misc_feature 1..36: note = Probe
  source 1..36: mol_type = other DNA
gcgagaggtcccgggttcaaatcccggacgagcccc

SEQ ID NO: 13627 - DNA, 37 bp, synthetic construct
  misc_feature 1..37: note = Probe
  source 1..37: mol_type = other DNA
gcgagaggtcccgggttcaaatcccggacgagccccc

SEQ ID NO: 13628 - DNA, 16 bp, synthetic construct
  misc_feature 1..16: note = Probe
  source 1..16: mol_type = other DNA
gcgccgctggtgtagt

SEQ ID NO: 13629 - DNA, 17 bp, synthetic construct
  misc_feature 1..17: note = Probe
  source 1..17: mol_type = other DNA
gcgccgctggtgtagtg

SEQ ID NO: 13630 - DNA, 20 bp, synthetic construct
  misc_feature 1..20: note = Probe
  source 1..20: mol_type = other DNA
gcgccgctggtgtagtggta

SEQ ID NO: 13631 - DNA, 21 bp, synthetic construct
  misc_feature 1..21: note = Probe
  source 1..21: mol_type = other DNA
gcgccgctggtgtagtggtat

SEQ ID NO: 13632 - DNA, 22 bp, synthetic construct
  misc_feature 1..22: note = Probe
  source 1..22: mol_type = other DNA
gcgccgctggtgtagtggtatc

SEQ ID NO: 13633 - DNA, 23 bp, synthetic construct
  misc_feature 1..23: note = Probe
  source 1..23: mol_type = other DNA
gcgccgctggtgtagtggtatca

SEQ ID NO: 13634 - DNA, 25 bp, synthetic construct
  misc_feature 1..25: note = Probe
  source 1..25: mol_type = other DNA
gcgccgctggtgtagtggtatcatg

SEQ ID NO: 13635 - DNA, 26 bp, synthetic construct
  misc_feature 1..26: note = Probe
  source 1..26: mol_type = other DNA
gcgccgctggtgtagtggtatcatgc

SEQ ID NO: 13636 - DNA, 27 bp, synthetic construct
  misc_feature 1..27: note = Probe
  source 1..27: mol_type = other DNA
gcgccgctggtgtagtggtatcatgca

SEQ ID NO: 13637 - DNA, 28 bp, synthetic construct
  misc_feature 1..28: note = Probe
  source 1..28: mol_type = other DNA
gcgccgctggtgtagtggtatcatgcaa

SEQ ID NO: 13638 - DNA, 29 bp, synthetic construct
  misc_feature 1..29: note = Probe
  source 1..29: mol_type = other DNA
gcgccgctggtgtagtggtatcatgcaag

SEQ ID NO: 13639 - DNA, 30 bp, synthetic construct; identical to SEQ ID NO: 1149
  misc_feature 1..30: note = Probe
  source 1..30: mol_type = other DNA

SEQ ID NO: 13640 - DNA, 31 bp, synthetic construct; identical to SEQ ID NO: 1150
  misc_feature 1..31: note = Probe
  source 1..31: mol_type = other DNA

SEQ ID NO: 13641 - DNA, 32 bp, synthetic construct; identical to SEQ ID NO: 1151
  misc_feature 1..32: note = Probe
  source 1..32: mol_type = other DNA

SEQ ID NO: 13642 - DNA, 33 bp, synthetic construct; identical to SEQ ID NO: 1152
  misc_feature 1..33: note = Probe
  source 1..33: mol_type = other DNA

SEQ ID NO: 13643 - DNA, 34 bp, synthetic construct; identical to SEQ ID NO: 1153
  misc_feature 1..34: note = Probe
  source 1..34: mol_type = other DNA

SEQ ID NO: 13644 - DNA, 35 bp, synthetic construct; identical to SEQ ID NO: 1154
  misc_feature 1..35: note = Probe
  source 1..35: mol_type = other DNA

SEQ ID NO: 13645 - DNA, 36 bp, synthetic construct; identical to SEQ ID NO: 1155
  misc_feature 1..36: note = Probe
  source 1..36: mol_type = other DNA

SEQ ID NO: 13646 - DNA, 39 bp, synthetic construct; identical to SEQ ID NO: 1157
  misc_feature 1..39: note = Probe
  source 1..39: mol_type = other DNA

SEQ ID NO: 13647 - DNA, 40 bp, synthetic construct; identical to SEQ ID NO: 1158
  misc_feature 1..40: note = Probe
  source 1..40: mol_type = other DNA

SEQ ID NO: 13648 - DNA, 41 bp, synthetic construct; identical to SEQ ID NO: 1159
  misc_feature 1..41: note = Probe
  source 1..41: mol_type = other DNA

SEQ ID NO: 13649 - DNA, 44 bp, synthetic construct; identical to SEQ ID NO: 6092
  misc_feature 1..44: note = Probe
  source 1..44: mol_type = other DNA

SEQ ID NO: 13650 - DNA, 45 bp, synthetic construct; identical to SEQ ID NO: 6093
  misc_feature 1..45: note = Probe
  source 1..45: mol_type = other DNA

SEQ ID NO: 13651 - DNA, 46 bp, synthetic construct; identical to SEQ ID NO: 1160
  misc_feature 1..46: note = Probe
  source 1..46: mol_type = other DNA

SEQ ID NO: 13652 - DNA, 49 bp, synthetic construct; identical to SEQ ID NO: 6096
  misc_feature 1..49: note = Probe
  source 1..49: mol_type = other DNA

SEQ ID NO: 13653 - DNA, 50 bp, synthetic construct; identical to SEQ ID NO: 1161
  misc_feature 1..50: note = Probe
  source 1..50: mol_type = other DNA

SEQ ID NO: 13654 - DNA, 21 bp, synthetic construct
  misc_feature 1..21: note = Probe
  source 1..21: mol_type = other DNA
gcgctctcaccgccgcggccc

SEQ ID NO: 13655 - DNA, 17 bp, synthetic construct
  misc_feature 1..17: note = Probe
  source 1..17: mol_type = other DNA
gcggaagcgtgctgggc

SEQ ID NO: 13656 - DNA, 18 bp, synthetic construct
  misc_feature 1..18: note = Probe
  source 1..18: mol_type = other DNA
gcggaagcgtgctgggcc

SEQ ID NO: 13657 - DNA, 26 bp, synthetic construct
  misc_feature 1..26: note = Probe
  source 1..26: mol_type = other DNA
gcggaagcgtgctgggcccataaccc

SEQ ID NO: 13658 - DNA, 30 bp, synthetic construct
  misc_feature 1..30: note = Probe
  source 1..30: mol_type = other DNA
gcggcccgggttcgactcccggtgtgggaa

SEQ ID NO: 13659 - DNA, 31 bp, synthetic construct; identical to SEQ ID NO: 1165
  misc_feature 1..31: note = Probe
  source 1..31: mol_type = other DNA

SEQ ID NO: 13660 - DNA, 27 bp, synthetic construct
  misc_feature 1..27: note = Probe
  source 1..27: mol_type = other DNA
gcggcccgggttcgattcccggtcagg

SEQ ID NO: 13661 - DNA, 29 bp, synthetic construct
  misc_feature 1..29: note = Probe
  source 1..29: mol_type = other DNA
gcggcccgggttcgattcccggtcaggga

SEQ ID NO: 13662 - DNA, 30 bp, synthetic construct
  misc_feature 1..30: note = Probe
  source 1..30: mol_type = other DNA
gcggcccgggttcgattcccggtcagggaa

SEQ ID NO: 13663 - DNA, 30 bp, synthetic construct
  misc_feature 1..30: note = Probe
  source 1..30: mol_type = other DNA
gcgggagaccggggttcaattccccgacgg

SEQ ID NO: 13664 - DNA, 31 bp, synthetic construct; identical to SEQ ID NO: 6105
  misc_feature 1..31: note = Probe
  source 1..31: mol_type = other DNA

SEQ ID NO: 13665 - DNA, 32 bp, synthetic construct; identical to SEQ ID NO: 6106
  misc_feature 1..32: note = Probe
  source 1..32: mol_type = other DNA

SEQ ID NO: 13666 - DNA, 33 bp, synthetic construct; identical to SEQ ID NO: 6107
  misc_feature 1..33: note = Probe
  source 1..33: mol_type = other DNA

SEQ ID NO: 13667 - DNA, 34 bp, synthetic construct; identical to SEQ ID NO: 1167
  misc_feature 1..34: note = Probe
  source 1..34: mol_type = other DNA

SEQ ID NO: 13668 - DNA, 27 bp, synthetic construct
  misc_feature 1..27: note = Probe
  source 1..27: mol_type = other DNA
gcgggagaccggggttcgattccccga

SEQ ID NO: 13669 - DNA, 28 bp, synthetic construct
  misc_feature 1..28: note = Probe
  source 1..28: mol_type = other DNA
gcgggagaccggggttcgattccccgac

SEQ ID NO: 13670 - DNA, 29 bp, synthetic construct
  misc_feature 1..29: note = Probe
  source 1..29: mol_type = other DNA
gcgggagaccggggttcgattccccgacg

SEQ ID NO: 13671 - DNA, 30 bp, synthetic construct; identical to SEQ ID NO: 1169
  misc_feature 1..30: note = Probe
  source 1..30: mol_type = other DNA

SEQ ID NO: 13672 - DNA, 31 bp, synthetic construct; identical to SEQ ID NO: 1170
  misc_feature 1..31: note = Probe
  source 1..31: mol_type = other DNA

SEQ ID NO: 13673 - DNA, 32 bp, synthetic construct; identical to SEQ ID NO: 1171
  misc_feature 1..32: note = Probe
  source 1..32: mol_type = other DNA

SEQ ID NO: 13674 - DNA, 33 bp, synthetic construct; identical to SEQ ID NO: 1172
  misc_feature 1..33: note = Probe
  source 1..33: mol_type = other DNA

SEQ ID NO: 13675 - DNA, 34 bp, synthetic construct; identical to SEQ ID NO: 1173
  misc_feature 1..34: note = Probe
  source 1..34: mol_type = other DNA

SEQ ID NO: 13676 - DNA, 29 bp, synthetic construct
  misc_feature 1..29: note = Probe
  source 1..29: mol_type = other DNA
gcgtgctgggcccataacccagaggtcga

SEQ ID NO: 13677 - DNA, 27 bp, synthetic construct
  misc_feature 1..27: note = Probe
  source 1..27: mol_type = other DNA
gcgttggtggtatagtggtaagcatag

SEQ ID NO: 13678 - DNA, 28 bp, synthetic construct
  misc_feature 1..28: note = Probe
  source 1..28: mol_type = other DNA
gcgttggtggtatagtggtaagcatagc

SEQ ID NO: 13679 - DNA, 29 bp, synthetic construct
  misc_feature 1..29: note = Probe
  source 1..29: mol_type = other DNA
gcgttggtggtatagtggtaagcatagct

SEQ ID NO: 13680 - DNA, 30 bp, synthetic construct; identical to SEQ ID NO: 1183
  misc_feature 1..30: note = Probe
  source 1..30: mol_type = other DNA

SEQ ID NO: 13681 - DNA, 31 bp, synthetic construct; identical to SEQ ID NO: 1184
  misc_feature 1..31: note = Probe
  source 1..31: mol_type = other DNA

SEQ ID NO: 13682 - DNA, 32 bp, synthetic construct; identical to SEQ ID NO: 1185
  misc_feature 1..32: note = Probe
  source 1..32: mol_type = other DNA

SEQ ID NO: 13683 - DNA, 33 bp, synthetic construct; identical to SEQ ID NO: 1186
  misc_feature 1..33: note = Probe
  source 1..33: mol_type = other DNA

SEQ ID NO: 13684 - DNA, 34 bp, synthetic construct; identical to SEQ ID NO: 1187
  misc_feature 1..34: note = Probe
  source 1..34: mol_type = other DNA

SEQ ID NO: 13685 - DNA, 35 bp, synthetic construct; identical to SEQ ID NO: 1188
  misc_feature 1..35: note = Probe
  source 1..35: mol_type = other DNA

SEQ ID NO: 13686 - DNA, 36 bp, synthetic construct; identical to SEQ ID NO: 1189
  misc_feature 1..36: note = Probe
  source 1..36: mol_type = other DNA

SEQ ID NO: 13687 - DNA, 37 bp, synthetic construct; identical to SEQ ID NO: 1190
  misc_feature 1..37: note = Probe
  source 1..37: mol_type = other DNA

SEQ ID NO: 13688 - DNA, 40 bp, synthetic construct; identical to SEQ ID NO: 6137
  misc_feature 1..40: note = Probe
  source 1..40: mol_type = other DNA

SEQ ID NO: 13689 - DNA, 50 bp, synthetic construct; identical to SEQ ID NO: 1192
  misc_feature 1..50: note = Probe
  source 1..50: mol_type = other DNA

SEQ ID NO: 13690 - DNA, 39 bp, synthetic construct; identical to SEQ ID NO: 6158
  misc_feature 1..39: note = Probe
  source 1..39: mol_type = other DNA

SEQ ID NO: 13691 - DNA, 40 bp, synthetic construct; identical to SEQ ID NO: 1193
  misc_feature 1..40: note = Probe
  source 1..40: mol_type = other DNA

SEQ ID NO: 13692 - DNA, 41 bp, synthetic construct
  misc_feature 1..41: note = Probe
  source 1..41: mol_type = other DNA
gcgttggtggtatagtggtgagcatagctgccttccaagca

SEQ ID NO: 13693 - DNA, 43 bp, synthetic construct; identical to SEQ ID NO: 6159
  misc_feature 1..43: note = Probe
  source 1..43: mol_type = other DNA

SEQ ID NO: 13694 - DNA, 44 bp, synthetic construct; identical to SEQ ID NO: 1194
  misc_feature 1..44: note = Probe
  source 1..44: mol_type = other DNA

SEQ ID NO: 13695 - DNA, 48 bp, synthetic construct; identical to SEQ ID NO: 6163
  misc_feature 1..48: note = Probe
  source 1..48: mol_type = other DNA

SEQ ID NO: 13696 - DNA, 49 bp, synthetic construct; identical to SEQ ID NO: 6164
  misc_feature 1..49: note = Probe
  source 1..49: mol_type = other DNA

SEQ ID NO: 13697 - DNA, 50 bp, synthetic construct; identical to SEQ ID NO: 1195
  misc_feature 1..50: note = Probe
  source 1..50: mol_type = other DNA

SEQ ID NO: 13698 - DNA, 39 bp, synthetic construct; identical to SEQ ID NO: 6180
  misc_feature 1..39: note = Probe
  source 1..39: mol_type = other DNA

SEQ ID NO: 13699 - DNA, 40 bp, synthetic construct; identical to SEQ ID NO: 6181
  misc_feature 1..40: note = Probe
  source 1..40: mol_type = other DNA

SEQ ID NO: 13700 - DNA, 41 bp, synthetic construct
  misc_feature 1..41: note = Probe
  source 1..41: mol_type = other DNA
gcgttggtggtatagtggttagcatagctgccttccaagca

SEQ ID NO: 13701 - DNA, 44 bp, synthetic construct; identical to SEQ ID NO: 1196
  misc_feature 1..44: note = Probe
  source 1..44: mol_type = other DNA

SEQ ID NO: 13702 - DNA, 49 bp, synthetic construct; identical to SEQ ID NO: 6185
  misc_feature 1..49: note = Probe
  source 1..49: mol_type = other DNA

SEQ ID NO: 13703 - DNA, 50 bp, synthetic construct; identical to SEQ ID NO: 1197
  misc_feature 1..50: note = Probe
  source 1..50: mol_type = other DNA

SEQ ID NO: 13704 - DNA, 26 bp, synthetic construct
  misc_feature 1..26: note = Probe
  source 1..26: mol_type = other DNA
gctagctcagtcggtagagcatggga

SEQ ID NO: 13705 - DNA, 27 bp, synthetic construct
  misc_feature 1..27: note = Probe
  source 1..27: mol_type = other DNA
gctagctcagtcggtagagcatgggac

SEQ ID NO: 13706 - DNA, 28 bp, synthetic construct
  misc_feature 1..28: note = Probe
  source 1..28: mol_type = other DNA
gctagctcagtcggtagagcatgggact

SEQ ID NO: 13707 - DNA, 29 bp, synthetic construct
  misc_feature 1..29: note = Probe
  source 1..29: mol_type = other DNA
gctagctcagtcggtagagcatgggactc

SEQ ID NO: 13708 - DNA, 31 bp, synthetic construct; identical to SEQ ID NO: 1200
  misc_feature 1..31: note = Probe
  source 1..31: mol_type = other DNA

SEQ ID NO: 13709 - DNA, 46 bp, synthetic construct; identical to SEQ ID NO: 6267
  misc_feature 1..46: note = Probe
  source 1..46: mol_type = other DNA

SEQ ID NO: 13710 - DNA, 16 bp, synthetic construct
  misc_feature 1..16: note = Probe
  source 1..16: mol_type = other DNA
gctcacaagaactgct

SEQ ID NO: 13711 - DNA, 21 bp, synthetic construct
  misc_feature 1..21: note = Probe
  source 1..21: mol_type = other DNA
gctcacaagaactgctaactc

SEQ ID NO: 13712 - DNA, 26 bp, synthetic construct
  misc_feature 1..26: note = Probe
  source 1..26: mol_type = other DNA
gctcagtcggtagagcatcagacttt

SEQ ID NO: 13713 - DNA, 33 bp, synthetic construct; identical to SEQ ID NO: 6289
  misc_feature 1..33: note = Probe
  source 1..33: mol_type = other DNA

SEQ ID NO: 13714 - DNA, 24 bp, synthetic construct
  misc_feature 1..24: note = Probe
  source 1..24: mol_type = other DNA
gctggtgtagtggtatcatgcaag

SEQ ID NO: 13715 - DNA, 25 bp, synthetic construct
  misc_feature 1..25: note = Probe
  source 1..25: mol_type = other DNA
gctggtgtagtggtatcatgcaaga

SEQ ID NO: 13716 - DNA, 27 bp, synthetic construct
  misc_feature 1..27: note = Probe
  source 1..27: mol_type = other DNA
gctggtgtagtggtatcatgcaagatt

SEQ ID NO: 13717 - DNA, 28 bp, synthetic construct
  misc_feature 1..28: note = Probe
  source 1..28: mol_type = other DNA
gctggtgtagtggtatcatgcaagattc

SEQ ID NO: 13718 - DNA, 28 bp, synthetic construct
  misc_feature 1..28: note = Probe
  source 1..28: mol_type = other DNA
gcttctgtagtgtagtggttatcacgtt

SEQ ID NO: 13719 - DNA, 30 bp, synthetic construct; identical to SEQ ID NO: 8646
  misc_feature 1..30: note = Probe
  source 1..30: mol_type = other DNA

SEQ ID NO: 13720 - DNA, 31 bp, synthetic construct; identical to SEQ ID NO: 1213
  misc_feature 1..31: note = Probe
  source 1..31: mol_type = other DNA

SEQ ID NO: 13721 - DNA, 32 bp, synthetic construct; identical to SEQ ID NO: 1214
  misc_feature 1..32: note = Probe
  source 1..32: mol_type = other DNA

SEQ ID NO: 13722 - DNA, 33 bp, synthetic construct; identical to SEQ ID NO: 1215
  misc_feature 1..33: note = Probe
  source 1..33: mol_type = other DNA

SEQ ID NO: 13723 - DNA, 34 bp, synthetic construct; identical to SEQ ID NO: 1216
  misc_feature 1..34: note = Probe
  source 1..34: mol_type = other DNA

SEQ ID NO: 13724 - DNA, 35 bp, synthetic construct; identical to SEQ ID NO: 1217
  misc_feature 1..35: note = Probe
  source 1..35: mol_type = other DNA

SEQ ID NO: 13725 - DNA, 36 bp, synthetic construct; identical to SEQ ID NO: 1218
  misc_feature 1..36: note = Probe
  source 1..36: mol_type = other DNA

SEQ ID NO: 13726 - DNA, 37 bp, synthetic construct; identical to SEQ ID NO: 6324
  misc_feature 1..37: note = Probe
  source 1..37: mol_type = other DNA

SEQ ID NO: 13727 - DNA, 50 bp, synthetic construct; identical to SEQ ID NO: 1219
  misc_feature 1..50: note = Probe
  source 1..50: mol_type = other DNA

SEQ ID NO: 13728 - DNA, 17 bp, synthetic construct
  misc_feature 1..17: note = Probe
  source 1..17: mol_type = other DNA
ggaagcgtgctgggccc

SEQ ID NO: 13729 - DNA, 31 bp, synthetic construct; identical to SEQ ID NO: 1224
  misc_feature 1..31: note = Probe
  source 1..31: mol_type = other DNA

SEQ ID NO: 13730 - DNA, 32 bp, synthetic construct; identical to SEQ ID NO: 1225
  misc_feature 1..32: note = Probe
  source 1..32: mol_type = other DNA

SEQ ID NO: 13731 - DNA, 33 bp, synthetic construct; identical to SEQ ID NO: 1226
  misc_feature 1..33: note = Probe
  source 1..33: mol_type = other DNA

SEQ ID NO: 13732 - DNA, 38 bp, synthetic construct; identical to SEQ ID NO: 1230
  misc_feature 1..38: note = Probe
  source 1..38: mol_type = other DNA

SEQ ID NO: 13733 - DNA, 41 bp, synthetic construct; identical to SEQ ID NO: 6341
  misc_feature 1..41: note = Probe
  source 1..41: mol_type = other DNA

SEQ ID NO: 13734 - DNA, 42 bp, synthetic construct
  misc_feature 1..42: note = Probe
  source 1..42: mol_type = other DNA
ggactgtaaatctaaagacaggggttaggcctctttttacca

SEQ ID NO: 13735 - DNA, 25 bp, synthetic construct
  misc_feature 1..25: note = Probe
  source 1..25: mol_type = other DNA
ggagaccggggttcaattccccgac

SEQ ID NO: 13736 - DNA, 27 bp, synthetic construct
  misc_feature 1..27: note = Probe
  source 1..27: mol_type = other DNA
ggagaccggggttcaattccccgacgg

SEQ ID NO: 13737 - DNA, 28 bp, synthetic construct
  misc_feature 1..28: note = Probe
  source 1..28: mol_type = other DNA
ggagaccggggttcaattccccgacggg

SEQ ID NO: 13738 - DNA, 29 bp, synthetic construct
  misc_feature 1..29: note = Probe
  source 1..29: mol_type = other DNA
ggagaccggggttcaattccccgacgggg

SEQ ID NO: 13739 - DNA, 30 bp, synthetic construct; identical to SEQ ID NO: 1235
  misc_feature 1..30: note = Probe
  source 1..30: mol_type = other DNA

SEQ ID NO: 13740 - DNA, 31 bp, synthetic construct; identical to SEQ ID NO: 1236
  misc_feature 1..31: note = Probe
  source 1..31: mol_type = other DNA

SEQ ID NO: 13741 - DNA, 17 bp, synthetic construct
  misc_feature 1..17: note = Probe
  source 1..17: mol_type = other DNA
ggagaccggggttcgat

SEQ ID NO: 13742 - DNA, 24 bp, synthetic construct
  misc_feature 1..24: note = Probe
  source 1..24: mol_type = other DNA
ggagaccggggttcgattccccga

SEQ ID NO: 13743 - DNA, 25 bp, synthetic construct
  misc_feature 1..25: note = Probe
  source 1..25: mol_type = other DNA
ggagaccggggttcgattccccgac

SEQ ID NO: 13744 - DNA, 26 bp, synthetic construct
  misc_feature 1..26: note = Probe
  source 1..26: mol_type = other DNA
ggagaccggggttcgattccccgacg

SEQ ID NO: 13745 - DNA, 27 bp, synthetic construct
  misc_feature 1..27: note = Probe
  source 1..27: mol_type = other DNA
ggagaccggggttcgattccccgacgg

SEQ ID NO: 13746 - DNA, 28 bp, synthetic construct
  misc_feature 1..28: note = Probe
  source 1..28: mol_type = other DNA
ggagaccggggttcgattccccgacggg

SEQ ID NO: 13747 - DNA, 29 bp, synthetic construct
  misc_feature 1..29: note = Probe
  source 1..29: mol_type = other DNA
ggagaccggggttcgattccccgacgggg

SEQ ID NO: 13748 - DNA, 30 bp, synthetic construct; identical to SEQ ID NO: 1241
  misc_feature 1..30: note = Probe
  source 1..30: mol_type = other DNA

SEQ ID NO: 13749 - DNA, 31 bp, synthetic construct; identical to SEQ ID NO: 1242
  misc_feature 1..31: note = Probe
  source 1..31: mol_type = other DNA

SEQ ID NO: 13750 - DNA, 23 bp, synthetic construct
  misc_feature 1..23: note = Probe
  source 1..23: mol_type = other DNA
ggagatgaaaacctttttccaag

SEQ ID NO: 13751 - DNA, 25 bp, synthetic construct
  misc_feature 1..25: note = Probe
  source 1..25: mol_type = other DNA
ggagatgaaaacctttttccaagga

SEQ ID NO: 13752 - DNA, 27 bp, synthetic construct
  misc_feature 1..27: note = Probe
  source 1..27: mol_type = other DNA
ggagatgaaaacctttttccaaggaca

SEQ ID NO: 13753 - DNA, 16 bp, synthetic construct
  misc_feature 1..16: note = Probe
  source 1..16: mol_type = other DNA
ggagcttaaaccccct

SEQ ID NO: 13754 - DNA, 18 bp, synthetic construct
  misc_feature 1..18: note = Probe
  source 1..18: mol_type = other DNA
ggagcttaaaccccctta

SEQ ID NO: 13755 - DNA, 27 bp, synthetic construct
  misc_feature 1..27: note = Probe
  source 1..27: mol_type = other DNA
ggatagctcagtcggtagagcatcaga

SEQ ID NO: 13756 - DNA, 28 bp, synthetic construct
  misc_feature 1..28: note = Probe
  source 1..28: mol_type = other DNA
ggatagctcagtcggtagagcatcagac

SEQ ID NO: 13757 - DNA, 29 bp, synthetic construct
  misc_feature 1..29: note = Probe
  source 1..29: mol_type = other DNA
ggatagctcagtcggtagagcatcagact

SEQ ID NO: 13758 - DNA, 30 bp, synthetic construct; identical to SEQ ID NO: 6383
  misc_feature 1..30: note = Probe
  source 1..30: mol_type = other DNA

SEQ ID NO: 13759 - DNA, 31 bp, synthetic construct; identical to SEQ ID NO: 1252
  misc_feature 1..31: note = Probe
  source 1..31: mol_type = other DNA

SEQ ID NO: 13760 - DNA, 32 bp, synthetic construct; identical to SEQ ID NO: 1253
  misc_feature 1..32: note = Probe
  source 1..32: mol_type = other DNA

SEQ ID NO: 13761 - DNA, 28 bp, synthetic construct
  misc_feature 1..28: note = Probe
  source 1..28: mol_type = other DNA
ggattcctggttttcacccaggcggccc

SEQ ID NO: 13762 - DNA, 28 bp, synthetic construct
  misc_feature 1..28: note = Probe
  source 1..28: mol_type = other DNA
ggattcctggttttcacccaggtggccc

SEQ ID NO: 13763 - DNA, 23 bp, synthetic construct
  misc_feature 1..23: note = Probe
  source 1..23: mol_type = other DNA
ggattcggcgctctcaccgccgc

SEQ ID NO: 13764 - DNA, 24 bp, synthetic construct
  misc_feature 1..24: note = Probe
  source 1..24: mol_type = other DNA
ggattcggcgctctcaccgccgcg

SEQ ID NO: 13765 - DNA, 28 bp, synthetic construct
  misc_feature 1..28: note = Probe
  source 1..28: mol_type = other DNA
ggattcggcgctctcaccgccgcggccc

SEQ ID NO: 13766 - DNA, 29 bp, synthetic construct
  misc_feature 1..29: note = Probe
  source 1..29: mol_type = other DNA
ggattcggcgctctcaccgccgcggcccg

SEQ ID NO: 13767 - DNA, 28 bp, synthetic construct
  misc_feature 1..28: note = Probe
  source 1..28: mol_type = other DNA
ggattcggcgctttcaccgccgcggccc

SEQ ID NO: 13768 - DNA, 29 bp, synthetic construct
  misc_feature 1..29: note = Probe
  source 1..29: mol_type = other DNA
ggccccatggtgtaatggttagcactctg

SEQ ID NO: 13769 - DNA, 30 bp, synthetic construct; identical to SEQ ID NO: 8648
  misc_feature 1..30: note = Probe
  source 1..30: mol_type = other DNA

SEQ ID NO: 13770 - DNA, 33 bp, synthetic construct; identical to SEQ ID NO: 1263
  misc_feature 1..33: note = Probe
  source 1..33: mol_type = other DNA

SEQ ID NO: 13771 - DNA, 34 bp, synthetic construct
  misc_feature 1..34: note = Probe
  source 1..34: mol_type = other DNA
ggccccatggtgtaatggttagcactctggactt

SEQ ID NO: 13772 - DNA, 36 bp, synthetic construct; identical to SEQ ID NO: 1264
  misc_feature 1..36: note = Probe
  source 1..36: mol_type = other DNA

SEQ ID NO: 13773 - DNA, 37 bp, synthetic construct; identical to SEQ ID NO: 1265
  misc_feature 1..37: note = Probe
  source 1..37: mol_type = other DNA

SEQ ID NO: 13774 - DNA, 50 bp, synthetic construct; identical to SEQ ID NO: 6427
  misc_feature 1..50: note = Probe
  source 1..50: mol_type = other DNA

SEQ ID NO: 13775 - DNA, 23 bp, synthetic construct
  misc_feature 1..23: note = Probe
  source 1..23: mol_type = other DNA
ggccccgggttcaatccccggca

SEQ ID NO: 13776 - DNA, 29 bp, synthetic construct
  misc_feature 1..29: note = Probe
  source 1..29: mol_type = other DNA
ggccccgggttcaatccccggcacctcca

SEQ ID NO: 13777 - DNA, 23 bp, synthetic construct
  misc_feature 1..23: note = Probe
  source 1..23: mol_type = other DNA
ggccccgggttcgatccccggca

SEQ ID NO: 13778 - DNA, 26 bp, synthetic construct
  misc_feature 1..26: note = Probe
  source 1..26: mol_type = other DNA
ggccccgggttcgatccccggcatct

SEQ ID NO: 13779 - DNA, 28 bp, synthetic construct
  misc_feature 1..28: note = Probe
  source 1..28: mol_type = other DNA
ggccctatagctcaggggttagagcact

SEQ ID NO: 13780 - DNA, 30 bp, synthetic construct; identical to SEQ ID NO: 1267
  misc_feature 1..30: note = Probe
  source 1..30: mol_type = other DNA

SEQ ID NO: 13781 - DNA, 31 bp, synthetic construct; identical to SEQ ID NO: 1268
  misc_feature 1..31: note = Probe
  source 1..31: mol_type = other DNA

SEQ ID NO: 13782 - DNA, 19 bp, synthetic construct
  misc_feature 1..19: note = Probe
  source 1..19: mol_type = other DNA
ggccgcgtggcctaatgga

SEQ ID NO: 13783 - DNA, 27 bp, synthetic construct
  misc_feature 1..27: note = Probe
  source 1..27: mol_type = other DNA
ggcggcccgggttcgactcccggtgtg

SEQ ID NO: 13784 - DNA, 28 bp, synthetic construct
  misc_feature 1..28: note = Probe
  source 1..28: mol_type = other DNA
ggcggcccgggttcgactcccggtgtgg

SEQ ID NO: 13785 - DNA, 29 bp, synthetic construct
  misc_feature 1..29: note = Probe
  source 1..29: mol_type = other DNA
ggcggcccgggttcgactcccggtgtggg

SEQ ID NO: 13786 - DNA, 30 bp, synthetic construct; identical to SEQ ID NO: 1278
  misc_feature 1..30: note = Probe
  source 1..30: mol_type = other DNA

SEQ ID NO: 13787 - DNA, 31 bp, synthetic construct; identical to SEQ ID NO: 1279
  misc_feature 1..31: note = Probe
  source 1..31: mol_type = other DNA

SEQ ID NO: 13788 - DNA, 32 bp, synthetic construct; identical to SEQ ID NO: 1280
  misc_feature 1..32: note = Probe
  source 1..32: mol_type = other DNA

SEQ ID NO: 13789 - DNA, 18 bp, synthetic construct
  misc_feature 1..18: note = Probe
  source 1..18: mol_type = other DNA
ggctagctcagtcggtag

SEQ ID NO: 13790 - DNA, 19 bp, synthetic construct
  misc_feature 1..19: note = Probe
  source 1..19: mol_type = other DNA
ggctagctcagtcggtaga

SEQ ID NO: 13791 - DNA, 22 bp, synthetic construct
  misc_feature 1..22: note = Probe
  source 1..22: mol_type = other DNA
ggctagctcagtcggtagagca

SEQ ID NO: 13792 - DNA, 24 bp, synthetic construct
  misc_feature 1..24: note = Probe
  source 1..24: mol_type = other DNA
ggctagctcagtcggtagagcatg

SEQ ID NO: 13793 - DNA, 25 bp, synthetic construct
  misc_feature 1..25: note = Probe
  source 1..25: mol_type = other DNA
ggctagctcagtcggtagagcatga

SEQ ID NO: 13794 - DNA, 27 bp, synthetic construct
  misc_feature 1..27: note = Probe
  source 1..27: mol_type = other DNA
ggctagctcagtcggtagagcatgaga

SEQ ID NO: 13795 - DNA, 28 bp, synthetic construct
  misc_feature 1..28: note = Probe
  source 1..28: mol_type = other DNA
ggctagctcagtcggtagagcatgagac

SEQ ID NO: 13796 - DNA, 29 bp, synthetic construct
  misc_feature 1..29: note = Probe
  source 1..29: mol_type = other DNA
ggctagctcagtcggtagagcatgagact

SEQ ID NO: 13797 - DNA, 30 bp, synthetic construct; identical to SEQ ID NO: 1285
  misc_feature 1..30: note = Probe
  source 1..30: mol_type = other DNA

SEQ ID NO: 13798 - DNA, 31 bp, synthetic construct; identical to SEQ ID NO: 1286
  misc_feature 1..31: note = Probe
  source 1..31: mol_type = other DNA

SEQ ID NO: 13799 - DNA, 25 bp, synthetic construct
  misc_feature 1..25: note = Probe
  source 1..25: mol_type = other DNA
ggctagctcagtcggtagagcatgg

SEQ ID NO: 13800 - DNA, 26 bp, synthetic construct
  misc_feature 1..26: note = Probe
  source 1..26: mol_type = other DNA
ggctagctcagtcggtagagcatggg

SEQ ID NO: 13801 - DNA, 27 bp, synthetic construct
  misc_feature 1..27: note = Probe
  source 1..27: mol_type = other DNA
ggctagctcagtcggtagagcatggga

SEQ ID NO: 13802 - DNA, 28 bp, synthetic construct
  misc_feature 1..28: note = Probe
  source 1..28: mol_type = other DNA
ggctagctcagtcggtagagcatgggac

SEQ ID NO: 13803 - DNA, 29 bp, synthetic construct
  misc_feature 1..29: note = Probe
  source 1..29: mol_type = other DNA
ggctagctcagtcggtagagcatgggact

SEQ ID NO: 13804 - DNA, 30 bp, synthetic construct; identical to SEQ ID NO: 1292
  misc_feature 1..30: note = Probe
  source 1..30: mol_type = other DNA

SEQ ID NO: 13805 - DNA, 31 bp, synthetic construct; identical to SEQ ID NO: 1293
  misc_feature 1..31: note = Probe
  source 1..31: mol_type = other DNA

SEQ ID NO: 13806 - DNA, 32 bp, synthetic construct; identical to SEQ ID NO: 1294
  misc_feature 1..32: note = Probe
  source 1..32: mol_type = other DNA

SEQ ID NO: 13807 - DNA, 33 bp, synthetic construct; identical to SEQ ID NO: 1295
  misc_feature 1..33: note = Probe
  source 1..33: mol_type = other DNA

SEQ ID NO: 13808 - DNA, 26 bp, synthetic construct
  misc_feature 1..26: note = Probe
  source 1..26: mol_type = other DNA
ggctccatagctcagtggttagagca

SEQ ID NO: 13809 - DNA, 28 bp, synthetic construct
  misc_feature 1..28: note = Probe
  source 1..28: mol_type = other DNA
ggctccatagctcagtggttagagcact

SEQ ID NO: 13810 - DNA, 30 bp, synthetic construct
  misc_feature 1..30: note = Probe
  source 1..30: mol_type = other DNA
ggctccatagctcagtggttagagcactgg

SEQ ID NO: 13811 - DNA, 31 bp, synthetic construct; identical to SEQ ID NO: 1298
  misc_feature 1..31: note = Probe
  source 1..31: mol_type = other DNA

SEQ ID NO: 13812 - DNA, 32 bp, synthetic construct; identical to SEQ ID NO: 1299
  misc_feature 1..32: note = Probe
  source 1..32: mol_type = other DNA

SEQ ID NO: 13813 - DNA, 18 bp, synthetic construct
  misc_feature 1..18: note = Probe
  source 1..18: mol_type = other DNA
ggctccgtggcgcaatgg

SEQ ID NO: 13814 - DNA, 19 bp, synthetic construct
  misc_feature 1..19: note = Probe
  source 1..19: mol_type = other DNA
ggctccgtggcgcaatgga

SEQ ID NO: 13815 - DNA, 30 bp, synthetic construct; identical to SEQ ID NO: 10704
  misc_feature 1..30: note = Probe
  source 1..30: mol_type = other DNA

SEQ ID NO: 13816 - DNA, 33 bp, synthetic construct; identical to SEQ ID NO: 6492
  misc_feature 1..33: note = Probe
  source 1..33: mol_type = other DNA

SEQ ID NO: 13817 - DNA, 33 bp, synthetic construct; identical to SEQ ID NO: 1306
  misc_feature 1..33: note = Probe
  source 1..33: mol_type = other DNA

SEQ ID NO: 13818 - DNA, 16 bp, synthetic construct
  misc_feature 1..16: note = Probe
  source 1..16: mol_type = other DNA
ggcttacgacccctta

SEQ ID NO: 13819 - DNA, 26 bp, synthetic construct
  misc_feature 1..26: note = Probe
  source 1..26: mol_type = other DNA
gggagaccggggttcaattccccgac

SEQ ID NO: 13820 - DNA, 28 bp, synthetic construct
  misc_feature 1..28: note = Probe
  source 1..28: mol_type = other DNA
gggagaccggggttcaattccccgacgg

SEQ ID NO: 13821 - DNA, 29 bp, synthetic construct
  misc_feature 1..29: note = Probe
  source 1..29: mol_type = other DNA
gggagaccggggttcaattccccgacggg

SEQ ID NO: 13822 - DNA, 25 bp, synthetic construct
  misc_feature 1..25: note = Probe
  source 1..25: mol_type = other DNA
gggagaccggggttcgattccccga

SEQ ID NO: 13823 - DNA, 26 bp, synthetic construct
  misc_feature 1..26: note = Probe
  source 1..26: mol_type = other DNA
gggagaccggggttcgattccccgac

SEQ ID NO: 13824 - DNA, 27 bp, synthetic construct
  misc_feature 1..27: note = Probe
  source 1..27: mol_type = other DNA
gggagaccggggttcgattccccgacg

SEQ ID NO: 13825 - DNA, 28 bp, synthetic construct
  misc_feature 1..28: note = Probe
  source 1..28: mol_type = other DNA
gggagaccggggttcgattccccgacgg

SEQ ID NO: 13826 - DNA, 29 bp, synthetic construct
  misc_feature 1..29: note = Probe
  source 1..29: mol_type = other DNA
gggagaccggggttcgattccccgacggg

SEQ ID NO: 13827 - DNA, 30 bp, synthetic construct; identical to SEQ ID NO: 1315
  misc_feature 1..30: note = Probe
  source 1..30: mol_type = other DNA

SEQ ID NO: 13828 - DNA, 31 bp, synthetic construct; identical to SEQ ID NO: 1316
  misc_feature 1..31: note = Probe
  source 1..31: mol_type = other DNA

SEQ ID NO: 13829 - DNA, 32 bp, synthetic construct; identical to SEQ ID NO: 1317
  misc_feature 1..32: note = Probe
  source 1..32: mol_type = other DNA

SEQ ID NO: 13830 - DNA, 16 bp, synthetic construct
  misc_feature 1..16: note = Probe
  source 1..16: mol_type = other DNA
ggggatgtagctcagt

SEQ ID NO: 13831 - DNA, 17 bp, synthetic construct
  misc_feature 1..17: note = Probe
  source 1..17: mol_type = other DNA
ggggatgtagctcagtg

SEQ ID NO: 13832 - DNA, 18 bp, synthetic construct
  misc_feature 1..18: note = Probe
  source 1..18: mol_type = other DNA
ggggatgtagctcagtgg

SEQ ID NO: 13833 - DNA, 19 bp, synthetic construct
  misc_feature 1..19: note = Probe
  source 1..19: mol_type = other DNA
ggggatgtagctcagtggt

SEQ ID NO: 13834 - DNA, 20 bp, synthetic construct
  misc_feature 1..20: note = Probe
  source 1..20: mol_type = other DNA
ggggatgtagctcagtggta

SEQ ID NO: 13835 - DNA, 22 bp, synthetic construct
  misc_feature 1..22: note = Probe
  source 1..22: mol_type = other DNA
ggggatgtagctcagtggtaga

SEQ ID NO: 13836 - DNA, 24 bp, synthetic construct
  misc_feature 1..24: note = Probe
  source 1..24: mol_type = other DNA
ggggatgtagctcagtggtagagc

SEQ ID NO: 13837 - DNA, 30 bp, synthetic construct; identical to SEQ ID NO: 1335
  misc_feature 1..30: note = Probe
  source 1..30: mol_type = other DNA

SEQ ID NO: 13838 - DNA, 31 bp, synthetic construct; identical to SEQ ID NO: 1336
  misc_feature 1..31: note = Probe
  source 1..31: mol_type = other DNA

SEQ ID NO: 13839 - DNA, 32 bp, synthetic construct; identical to SEQ ID NO: 1337
  misc_feature 1..32: note = Probe
  source 1..32: mol_type = other DNA

SEQ ID NO: 13840 - DNA, 33 bp, synthetic construct; identical to SEQ ID NO: 1338
  misc_feature 1..33: note = Probe
  source 1..33: mol_type = other DNA

SEQ ID NO: 13841 - DNA, 19 bp, synthetic construct
  misc_feature 1..19: note = Probe
  source 1..19: mol_type = other DNA
gggggattagctcaaatgg

SEQ ID NO: 13842 - DNA, 20 bp, synthetic construct
  misc_feature 1..20: note = Probe
  source 1..20: mol_type = other DNA
gggggattagctcaaatggt

SEQ ID NO: 13843 - DNA, 21 bp, synthetic construct
  misc_feature 1..21: note = Probe
  source 1..21: mol_type = other DNA
gggggattagctcaaatggta

SEQ ID NO: 13844 - DNA, 22 bp, synthetic construct
  misc_feature 1..22: note = Probe
  source 1..22: mol_type = other DNA
gggggattagctcaaatggtag

SEQ ID NO: 13845 - DNA, 23 bp, synthetic construct
  misc_feature 1..23: note = Probe
  source 1..23: mol_type = other DNA
gggggattagctcaaatggtaga

SEQ ID NO: 13846 - DNA, 24 bp, synthetic construct
  misc_feature 1..24: note = Probe
  source 1..24: mol_type = other DNA
gggggattagctcaaatggtagag

SEQ ID NO: 13847 - DNA, 25 bp, synthetic construct
  misc_feature 1..25: note = Probe
  source 1..25: mol_type = other DNA
gggggattagctcaaatggtagagc

SEQ ID NO: 13848 - DNA, 32 bp, synthetic construct; identical to SEQ ID NO: 1351
  misc_feature 1..32: note = Probe
  source 1..32: mol_type = other DNA

SEQ ID NO: 13849 - DNA, 33 bp, synthetic construct; identical to SEQ ID NO: 1352
  misc_feature 1..33: note = Probe
  source 1..33: mol_type = other DNA

SEQ ID NO: 13850 - DNA, 34 bp, synthetic construct; identical to SEQ ID NO: 1353
  misc_feature 1..34: note = Probe
  source 1..34: mol_type = other DNA

SEQ ID NO: 13851 - DNA, 35 bp, synthetic construct; identical to SEQ ID NO: 1354
  misc_feature 1..35: note = Probe
  source 1..35: mol_type = other DNA

SEQ ID NO: 13852 - DNA, 32 bp, synthetic construct; identical to SEQ ID NO: 1355
  misc_feature 1..32: note = Probe
  source 1..32: mol_type = other DNA

SEQ ID NO: 13853 - DNA, 33 bp, synthetic construct; identical to SEQ ID NO: 1356
  misc_feature 1..33: note = Probe
  source 1..33: mol_type = other DNA

SEQ ID NO: 13854 - DNA, 34 bp, synthetic construct; identical to SEQ ID NO: 1357
  misc_feature 1..34: note = Probe
  source 1..34: mol_type = other DNA

SEQ ID NO: 13855 - DNA, 33 bp, synthetic construct; identical to SEQ ID NO: 6585
  misc_feature 1..33: note = Probe
  source 1..33: mol_type = other DNA

SEQ ID NO: 13856 - DNA, 34 bp, synthetic construct
  misc_feature 1..34: note = Probe
  source 1..34: mol_type = other DNA
gggggtatagctcaggtggtagagcatttgactg

SEQ ID NO: 13857 - DNA, 35 bp, synthetic construct; identical to SEQ ID NO: 6586
  misc_feature 1..35: note = Probe
  source 1..35: mol_type = other DNA

SEQ ID NO: 13858 - DNA, 36 bp, synthetic construct
  misc_feature 1..36: note = Probe
  source 1..36: mol_type = other DNA
gggggtatagctcaggtggtagagcatttgactgca

SEQ ID NO: 13859 - DNA, 26 bp, synthetic construct
  misc_feature 1..26: note = Probe
  source 1..26: mol_type = other DNA
gggggtatagctcagtgggtagagca

SEQ ID NO: 13860 - DNA, 33 bp, synthetic construct; identical to SEQ ID NO: 6590
  misc_feature 1..33: note = Probe
  source 1..33: mol_type = other DNA

SEQ ID NO: 13861 - DNA, 34 bp, synthetic construct
  misc_feature 1..34: note = Probe
  source 1..34: mol_type = other DNA
gggggtatagctcagtgggtagagcatttgactg

SEQ ID NO: 13862 - DNA, 35 bp, synthetic construct; identical to SEQ ID NO: 1358
  misc_feature 1..35: note = Probe
  source 1..35: mol_type = other DNA

SEQ ID NO: 13863 - DNA, 36 bp, synthetic construct
  misc_feature 1..36: note = Probe
  source 1..36: mol_type = other DNA
gggggtatagctcagtgggtagagcatttgactgca

SEQ ID NO: 13864 - DNA, 36 bp, synthetic construct
  misc_feature 1..36: note = Probe
  source 1..36: mol_type = other DNA
gggggtatagctcagtggtagagcatttgactgcag

SEQ ID NO: 13865 - DNA, 24 bp, synthetic construct
  misc_feature 1..24: note = Probe
  source 1..24: mol_type = other DNA
gggggtatagcttagcggtagagc

SEQ ID NO: 13866 - DNA, 25 bp, synthetic construct
  misc_feature 1..25: note = Probe
  source 1..25: mol_type = other DNA
gggggtatagcttagcggtagagca

SEQ ID NO: 13867 - DNA, 32 bp, synthetic construct; identical to SEQ ID NO: 1360
  misc_feature 1..32: note = Probe
  source 1..32: mol_type = other DNA

SEQ ID NO: 13868 - DNA, 33 bp, synthetic construct; identical to SEQ ID NO: 6605
  misc_feature 1..33: note = Probe
  source 1..33: mol_type = other DNA

SEQ ID NO: 13869 - DNA, 35 bp, synthetic construct
  misc_feature 1..35: note = Probe
  source 1..35: mol_type = other DNA
gggggtatagcttagcggtagagcatttgactgca

SEQ ID NO: 13870 - DNA, 19 bp, synthetic construct
  misc_feature 1..19: note = Probe
  source 1..19: mol_type = other DNA
gggggtgtagctcagtggt

SEQ ID NO: 13871 - DNA, 22 bp, synthetic construct
  misc_feature 1..22: note = Probe
  source 1..22: mol_type = other DNA
gggggtgtagctcagtggtaga

SEQ ID NO: 13872 - DNA, 34 bp, synthetic construct; identical to SEQ ID NO: 1366
  misc_feature 1..34: note = Probe
  source 1..34: mol_type = other DNA

SEQ ID NO: 13873 - DNA, 29 bp, synthetic construct
  misc_feature 1..29: note = Probe
  source 1..29: mol_type = other DNA
gggggtgtagctcagtggtagagcgcgtg

SEQ ID NO: 13874 - DNA, 30 bp, synthetic construct; identical to SEQ ID NO: 1367
  misc_feature 1..30: note = Probe
  source 1..30: mol_type = other DNA

SEQ ID NO: 13875 - DNA, 31 bp, synthetic construct; identical to SEQ ID NO: 1368
  misc_feature 1..31: note = Probe
  source 1..31: mol_type = other DNA

SEQ ID NO: 13876 - DNA, 32 bp, synthetic construct; identical to SEQ ID NO: 1369
  misc_feature 1..32: note = Probe
  source 1..32: mol_type = other DNA

SEQ ID NO: 13877 - DNA, 16 bp, synthetic construct
  misc_feature 1..16: note = Probe
  source 1..16: mol_type = other DNA
ggggtatgattctcgg

SEQ ID NO: 13878 - DNA, 17 bp, synthetic construct
  misc_feature 1..17: note = Probe
  source 1..17: mol_type = other DNA
ggggtatgattctcggt

SEQ ID NO: 13879 - DNA, 29 bp, synthetic construct
  misc_feature 1..29: note = Probe
  source 1..29: mol_type = other DNA
ggggtgtagctcagtggtagagcgcgtgc

SEQ ID NO: 13880 - DNA, 34 bp, synthetic construct
  misc_feature 1..34: note = Probe
  source 1..34: mol_type = other DNA
gggtatagctcagtgggtagagcatttgactgca

SEQ ID NO: 13881 - DNA, 34 bp, synthetic construct
  misc_feature 1..34: note = Probe
  source 1..34: mol_type = other DNA
gggtatgattctcgcttcgggtgcgagaggtccc

SEQ ID NO: 13882 - DNA, 16 bp, synthetic construct
  misc_feature 1..16: note = Probe
  source 1..16: mol_type = other DNA
gggtatgattctcggt

SEQ ID NO: 13883 - DNA, 16 bp, synthetic construct
  misc_feature 1..16: note = Probe
  source 1..16: mol_type = other DNA
gggtgcgagaggtccc

SEQ ID NO: 13884 - DNA, 29 bp, synthetic construct
  misc_feature 1..29: note = Probe
  source 1..29: mol_type = other DNA
gggtggttcagtggtagaattctcgcctg

SEQ ID NO: 13885 - DNA, 28 bp, synthetic construct
  misc_feature 1..28: note = Probe
  source 1..28: mol_type = other DNA
gggtgtagctcagtggtagagcgcgtgc

SEQ ID NO: 13886 - DNA, 18 bp, synthetic construct
  misc_feature 1..18: note = Probe
  source 1..18: mol_type = other DNA
gggtttccccgcgcaggt

SEQ ID NO: 13887 - DNA, 33 bp, synthetic construct
  misc_feature 1..33: note = Probe
  source 1..33: mol_type = other DNA
ggtaagcatagctgccttccaagcagttgaccc

SEQ ID NO: 13888 - DNA, 19 bp, synthetic construct
  misc_feature 1..19: note = Probe
  source 1..19: mol_type = other DNA
ggtaatcgcataaaactta

SEQ ID NO: 13889 - DNA, 24 bp, synthetic construct
  misc_feature 1..24: note = Probe
  source 1..24: mol_type = other DNA
ggtaatcgcataaaacttaaaact

SEQ ID NO: 13890 - DNA, 23 bp, synthetic construct
  misc_feature 1..23: note = Probe
  source 1..23: mol_type = other DNA
ggtagaattctcgcctgccacgc

SEQ ID NO: 13891 - DNA, 32 bp, synthetic construct; identical to SEQ ID NO: 6703
  misc_feature 1..32: note = Probe
  source 1..32: mol_type = other DNA

SEQ ID NO: 13892 - DNA, 16 bp, synthetic construct
  misc_feature 1..16: note = Probe
  source 1..16: mol_type = other DNA
ggtagagcatcagact

SEQ ID NO: 13893 - DNA, 37 bp, synthetic construct
  misc_feature 1..37: note = Probe
  source 1..37: mol_type = other DNA
ggtagagcatgagactcttaatctcagggtcgtgggt

SEQ ID NO: 13894 - DNA, 17 bp, synthetic construct
  misc_feature 1..17: note = Probe
  source 1..17: mol_type = other DNA
ggtagagcatgggactc

SEQ ID NO: 13895 - DNA, 37 bp, synthetic construct
  misc_feature 1..37: note = Probe
  source 1..37: mol_type = other DNA
ggtagagcatgggactcttaatcccagggtcgtgggt

SEQ ID NO: 13896 - DNA, 16 bp, synthetic construct
  misc_feature 1..16: note = Probe
  source 1..16: mol_type = other DNA
ggtagcgtggccgagc

SEQ ID NO: 13897 - DNA, 17 bp, synthetic construct
  misc_feature 1..17: note = Probe
  source 1..17: mol_type = other DNA
ggtagcgtggccgagcg

SEQ ID NO: 13898 - DNA, 18 bp, synthetic construct
  misc_feature 1..18: note = Probe
  source 1..18: mol_type = other DNA
ggtagcgtggccgagcgg

SEQ ID NO: 13899 - DNA, 19 bp, synthetic construct
  misc_feature 1..19: note = Probe
  source 1..19: mol_type = other DNA
ggtagcgtggccgagcggt

SEQ ID NO: 13900 - DNA, 20 bp, synthetic construct
  misc_feature 1..20: note = Probe
  source 1..20: mol_type = other DNA
ggtagcgtggccgagcggtc

SEQ ID NO: 13901 - DNA, 21 bp, synthetic construct
  misc_feature 1..21: note = Probe
  source 1..21: mol_type = other DNA
ggtagcgtggccgagcggtct

SEQ ID NO: 13902 - DNA, 22 bp, synthetic construct
  misc_feature 1..22: note = Probe
  source 1..22: mol_type = other DNA
ggtagcgtggccgagcggtcta

SEQ ID NO: 13903 - DNA, 23 bp, synthetic construct
  misc_feature 1..23: note = Probe
  source 1..23: mol_type = other DNA
ggtagcgtggccgagcggtctaa

SEQ ID NO: 13904 - DNA, 24 bp, synthetic construct
  misc_feature 1..24: note = Probe
  source 1..24: mol_type = other DNA
ggtagcgtggccgagcggtctaag

SEQ ID NO: 13905 - DNA, 25 bp, synthetic construct
  misc_feature 1..25: note = Probe
  source 1..25: mol_type = other DNA
ggtagcgtggccgagcggtctaagg

SEQ ID NO: 13906 - DNA, 16 bp, synthetic construct
  misc_feature 1..16: note = Probe
  source 1..16: mol_type = other DNA
ggtagcgtggccgagt

SEQ ID NO: 13907 - DNA, 17 bp, synthetic construct
  misc_feature 1..17: note = Probe
  source 1..17: mol_type = other DNA
ggtagcgtggccgagtg

SEQ ID NO: 13908 - DNA, 20 bp, synthetic construct
  misc_feature 1..20: note = Probe
  source 1..20: mol_type = other DNA
ggtagcgtggccgagtggtc

SEQ ID NO: 13909 - DNA, 22 bp, synthetic construct
  misc_feature 1..22: note = Probe
  source 1..22: mol_type = other DNA
ggtagcgtggccgagtggtcta

SEQ ID NO: 13910 - DNA, 23 bp, synthetic construct
  misc_feature 1..23: note = Probe
  source 1..23: mol_type = other DNA
ggtagcgtggccgagtggtctaa

SEQ ID NO: 13911 - DNA, 24 bp, synthetic construct
  misc_feature 1..24: note = Probe
  source 1..24: mol_type = other DNA
ggtagcgtggccgagtggtctaag

SEQ ID NO: 13912 - DNA, 25 bp, synthetic construct
  misc_feature 1..25: note = Probe
  source 1..25: mol_type = other DNA
ggtagcgtggccgagtggtctaagg

SEQ ID NO: 13913 - DNA, 35 bp, synthetic construct; identical to SEQ ID NO: 1405
  misc_feature 1..35: note = Probe
  source 1..35: mol_type = other DNA

SEQ ID NO: 13914 - DNA, 36 bp, synthetic construct
  misc_feature 1..36: note = Probe
  source 1..36: mol_type = other DNA
ggtagcgtggccgagtggtctaaggcgctggattta

SEQ ID NO: 13915 - DNA, 32 bp, synthetic construct
  misc_feature 1..32: note = Probe
  source 1..32: mol_type = other DNA
ggtatcatgcaagattcccattcttgcgaccc

SEQ ID NO: 13916 - DNA, 33 bp, synthetic construct; identical to SEQ ID NO: 6728
  misc_feature 1..33: note = Probe
  source 1..33: mol_type = other DNA

SEQ ID NO: 13917 - DNA, 33 bp, synthetic construct; identical to SEQ ID NO: 1407
  misc_feature 1..33: note = Probe
  source 1..33: mol_type = other DNA

SEQ ID NO: 13918 - DNA, 19 bp, synthetic construct
  misc_feature 1..19: note = Probe
  source 1..19: mol_type = other DNA
ggtcccatggtgtaatggt

SEQ ID NO: 13919 - DNA, 28 bp, synthetic construct
  misc_feature 1..28: note = Probe
  source 1..28: mol_type = other DNA
ggtcccatggtgtaatggttagcactct

SEQ ID NO: 13920 - DNA, 29 bp, synthetic construct
  misc_feature 1..29: note = Probe
  source 1..29: mol_type = other DNA
ggtcccatggtgtaatggttagcactctg

SEQ ID NO: 13921 - DNA, 30 bp, synthetic construct; identical to SEQ ID NO: 8706
  misc_feature 1..30: note = Probe
  source 1..30: mol_type = other DNA

SEQ ID NO: 13922 - DNA, 50 bp, synthetic construct; identical to SEQ ID NO: 1417
  misc_feature 1..50: note = Probe
  source 1..50: mol_type = other DNA

SEQ ID NO: 13923 - DNA, 26 bp, synthetic construct
  misc_feature 1..26: note = Probe
  source 1..26: mol_type = other DNA
ggtcctgggttcgagccccagtggaa

SEQ ID NO: 13924 - DNA, 22 bp, synthetic construct
  misc_feature 1..22: note = Probe
  source 1..22: mol_type = other DNA
ggtcgtggttgtagtccgtgcg

SEQ ID NO: 13925 - DNA, 25 bp, synthetic construct
  misc_feature 1..25: note = Probe
  source 1..25: mol_type = other DNA
ggtcgtggttgtagtccgtgcgaga

SEQ ID NO: 13926 - DNA, 26 bp, synthetic construct
  misc_feature 1..26: note = Probe
  source 1..26: mol_type = other DNA
ggtcgtggttgtagtccgtgcgagaa

SEQ ID NO: 13927 - DNA, 28 bp, synthetic construct
  misc_feature 1..28: note = Probe
  source 1..28: mol_type = other DNA
ggtcgtggttgtagtccgtgcgagaata

SEQ ID NO: 13928 - DNA, 23 bp, synthetic construct
  misc_feature 1..23: note = Probe
  source 1..23: mol_type = other DNA
ggtctagtggttaggattcggcg

SEQ ID NO: 13929 - DNA, 25 bp, synthetic construct
  misc_feature 1..25: note = Probe
  source 1..25: mol_type = other DNA
ggtctagtggttaggattcggcgct

SEQ ID NO: 13930 - DNA, 26 bp, synthetic construct
  misc_feature 1..26: note = Probe
  source 1..26: mol_type = other DNA
ggtctagtggttaggattcggcgctc

SEQ ID NO: 13931 - DNA, 33 bp, synthetic construct
  misc_feature 1..33: note = Probe
  source 1..33: mol_type = other DNA
ggtgagcatagctgccttccaagcagttgaccc

SEQ ID NO: 13932 - DNA, 16 bp, synthetic construct
  misc_feature 1..16: note = Probe
  source 1..16: mol_type = other DNA
ggtgagtatccccgcc

SEQ ID NO: 13933 - DNA, 20 bp, synthetic construct
  misc_feature 1..20: note = Probe
  source 1..20: mol_type = other DNA
ggtgagtatccccgcctgtc

SEQ ID NO: 13934 - DNA, 22 bp, synthetic construct
  misc_feature 1..22: note = Probe
  source 1..22: mol_type = other DNA
ggtgagtatccccgcctgtcac

SEQ ID NO: 13935 - DNA, 34 bp, synthetic construct
  misc_feature 1..34: note = Probe
  source 1..34: mol_type = other DNA
ggtgagtatccccgcctgtcacgcgggagaccgg

SEQ ID NO: 13936 - DNA, 37 bp, synthetic construct
  misc_feature 1..37: note = Probe
  source 1..37: mol_type = other DNA
ggtgagtatccccgcctgtcacgcgggagaccggggt

SEQ ID NO: 13937 - DNA, 26 bp, synthetic construct
  misc_feature 1..26: note = Probe
  source 1..26: mol_type = other DNA
ggtggagttaaagactttttctctga

SEQ ID NO: 13938 - DNA, 31 bp, synthetic construct
  misc_feature 1..31: note = Probe
  source 1..31: mol_type = other DNA
ggtggcccgggttcgactcccggtatgggaa

SEQ ID NO: 13939 - DNA, 32 bp, synthetic construct; identical to SEQ ID NO: 6779
  misc_feature 1..32: note = Probe
  source 1..32: mol_type = other DNA

SEQ ID NO: 13940 - DNA, 26 bp, synthetic construct
  misc_feature 1..26: note = Probe
  source 1..26: mol_type = other DNA
ggtggtctagtggttaggattcggcg

SEQ ID NO: 13941 - DNA, 28 bp, synthetic construct
  misc_feature 1..28: note = Probe
  source 1..28: mol_type = other DNA
ggtggtctagtggttaggattcggcgct

SEQ ID NO: 13942 - DNA, 29 bp, synthetic construct
  misc_feature 1..29: note = Probe
  source 1..29: mol_type = other DNA
ggtggtctagtggttaggattcggcgctc

SEQ ID NO: 13943 - DNA, 27 bp, synthetic construct
  misc_feature 1..27: note = Probe
  source 1..27: mol_type = other DNA
ggtgtagctcagtggtagagcgcgtgc

SEQ ID NO: 13944 - DNA, 22 bp, synthetic construct
  misc_feature 1..22: note = Probe
  source 1..22: mol_type = other DNA
ggtgtagtggtatcatgcaaga

SEQ ID NO: 13945 - DNA, 25 bp, synthetic construct
  misc_feature 1..25: note = Probe
  source 1..25: mol_type = other DNA
ggtgtagtggtatcatgcaagattc

SEQ ID NO: 13946 - DNA, 35 bp, synthetic construct
  misc_feature 1..35: note = Probe
  source 1..35: mol_type = other DNA
ggttagcactctggactctgaatccagcgatccga

SEQ ID NO: 13947 - DNA, 36 bp, synthetic construct
  misc_feature 1..36: note = Probe
  source 1..36: mol_type = other DNA
ggttagcactctggactctgaatccagcgatccgag

SEQ ID NO: 13948 - DNA, 35 bp, synthetic construct
  misc_feature 1..35: note = Probe
  source 1..35: mol_type = other DNA
ggttagcactctggactttgaatccagcgatccga

SEQ ID NO: 13949 - DNA, 36 bp, synthetic construct
  misc_feature 1..36: note = Probe
  source 1..36: mol_type = other DNA
ggttagcactctggactttgaatccagcgatccgag

SEQ ID NO: 13950 - DNA, 33 bp, synthetic construct
  misc_feature 1..33: note = Probe
  source 1..33: mol_type = other DNA
ggttagcatagctgccttccaagcagttgaccc

SEQ ID NO: 13951 - DNA, 16 bp, synthetic construct
  misc_feature 1..16: note = Probe
  source 1..16: mol_type = other DNA
ggttaggattcggcgc

SEQ ID NO: 13952 - DNA, 17 bp, synthetic construct
  misc_feature 1..17: note = Probe
  source 1..17: mol_type = other DNA
ggttaggattcggcgct

SEQ ID NO: 13953 - DNA, 16 bp, synthetic construct
  misc_feature 1..16: note = Probe
  source 1..16: mol_type = other DNA
ggttagtactctgcgt

SEQ ID NO: 13954 - DNA, 37 bp, synthetic construct
  misc_feature 1..37: note = Probe
  source 1..37: mol_type = other DNA
ggttatcacgttcgcctcacacgcgaaaggtccccgg

SEQ ID NO: 13955 - DNA, 25 bp, synthetic construct
  misc_feature 1..25: note = Probe
  source 1..25: mol_type = other DNA
ggttcaatccccggcacctccacca

SEQ ID NO: 13956 - DNA, 31 bp, synthetic construct
  misc_feature 1..31: note = Probe
  source 1..31: mol_type = other DNA
ggttcagtggtagaattctcgcctgccacgc

SEQ ID NO: 13957 - DNA, 40 bp, synthetic construct
  misc_feature 1..40: note = Probe
  source 1..40: mol_type = other DNA
ggttcagtggtagaattctcgcctgccacgcgggaggccc

SEQ ID NO: 13958 - DNA, 16 bp, synthetic construct
  misc_feature 1..16: note = Probe
  source 1..16: mol_type = other DNA
ggttccatagtgtagc

SEQ ID NO: 13959 - DNA, 17 bp, synthetic construct
  misc_feature 1..17: note = Probe
  source 1..17: mol_type = other DNA
ggttccatagtgtagcg

SEQ ID NO: 13960 - DNA, 19 bp, synthetic construct
  misc_feature 1..19: note = Probe
  source 1..19: mol_type = other DNA
ggttccatagtgtagcggt

SEQ ID NO: 13961 - DNA, 28 bp, synthetic construct
  misc_feature 1..28: note = Probe
  source 1..28: mol_type = other DNA
ggttccatagtgtagcggttatcacgtc

SEQ ID NO: 13962 - DNA, 29 bp, synthetic construct
  misc_feature 1..29: note = Probe
  source 1..29: mol_type = other DNA
ggttccatagtgtagcggttatcacgtct

SEQ ID NO: 13963 - DNA, 30 bp, synthetic construct; identical to SEQ ID NO: 8720
  misc_feature 1..30: note = Probe
  source 1..30: mol_type = other DNA

SEQ ID NO: 13964 - DNA, 31 bp, synthetic construct; identical to SEQ ID NO: 1432
  misc_feature 1..31: note = Probe
  source 1..31: mol_type = other DNA

SEQ ID NO: 13965 - DNA, 32 bp, synthetic construct; identical to SEQ ID NO: 1433
  misc_feature 1..32: note = Probe
  source 1..32: mol_type = other DNA

SEQ ID NO: 13966 - DNA, 33 bp, synthetic construct; identical to SEQ ID NO: 1434
  misc_feature 1..33: note = Probe
  source 1..33: mol_type = other DNA

SEQ ID NO: 13967 - DNA, 34 bp, synthetic construct; identical to SEQ ID NO: 1435
  misc_feature 1..34: note = Probe
  source 1..34: mol_type = other DNA

SEQ ID NO: 13968 - DNA, 37 bp, synthetic construct; identical to SEQ ID NO: 6811
  misc_feature 1..37: note = Probe
  source 1..37: mol_type = other DNA

SEQ ID NO: 13969 - DNA, 50 bp, synthetic construct; identical to SEQ ID NO: 6812
  misc_feature 1..50: note = Probe
  source 1..50: mol_type = other DNA

SEQ ID NO: 13970 - DNA, 23 bp, synthetic construct
  misc_feature 1..23: note = Probe
  source 1..23: mol_type = other DNA
ggttccatagtgtagtggttatc

SEQ ID NO: 13971 - DNA, 28 bp, synthetic construct
  misc_feature 1..28: note = Probe
  source 1..28: mol_type = other DNA
ggttccatagtgtagtggttatcacatc

SEQ ID NO: 13972 - DNA, 29 bp, synthetic construct
  misc_feature 1..29: note = Probe
  source 1..29: mol_type = other DNA
ggttccatagtgtagtggttatcacatct

SEQ ID NO: 13973 - DNA, 30 bp, synthetic construct; identical to SEQ ID NO: 11085
  misc_feature 1..30: note = Probe
  source 1..30: mol_type = other DNA

SEQ ID NO: 13974 - DNA, 31 bp, synthetic construct; identical to SEQ ID NO: 1443
  misc_feature 1..31: note = Probe
  source 1..31: mol_type = other DNA

SEQ ID NO: 13975 - DNA, 32 bp, synthetic construct; identical to SEQ ID NO: 1444
  misc_feature 1..32: note = Probe
  source 1..32: mol_type = other DNA

SEQ ID NO: 13976 - DNA, 33 bp, synthetic construct; identical to SEQ ID NO: 1445
  misc_feature 1..33: note = Probe
  source 1..33: mol_type = other DNA

SEQ ID NO: 13977 - DNA, 34 bp, synthetic construct; identical to SEQ ID NO: 1446
  misc_feature 1..34: note = Probe
  source 1..34: mol_type = other DNA

SEQ ID NO: 13978 - DNA, 35 bp, synthetic construct
  misc_feature 1..35: note = Probe
  source 1..35: mol_type = other DNA
ggttccatagtgtagtggttatcacatctgcttta

SEQ ID NO: 13979 - DNA, 36 bp, synthetic construct; identical to SEQ ID NO: 6816
  misc_feature 1..36: note = Probe
  source 1..36: mol_type = other DNA

SEQ ID NO: 13980 - DNA, 37 bp, synthetic construct
  misc_feature 1..37: note = Probe
  source 1..37: mol_type = other DNA
ggttccatagtgtagtggttatcacatctgctttaca

SEQ ID NO: 13981 - DNA, 50 bp, synthetic construct
  misc_feature 1..50: note = Probe
  source 1..50: mol_type = other DNA
ggttccatagtgtagtggttatcacatctgctttacacgcagaaggtcct

SEQ ID NO: 13982 - DNA, 26 bp, synthetic construct
  misc_feature 1..26: note = Probe
  source 1..26: mol_type = other DNA
ggttccatagtgtagtggttatcacg

SEQ ID NO: 13983 - DNA, 28 bp, synthetic construct
  misc_feature 1..28: note = Probe
  source 1..28: mol_type = other DNA
ggttccatagtgtagtggttatcacgtc

SEQ ID NO: 13984 - DNA, 29 bp, synthetic construct
  misc_feature 1..29: note = Probe
  source 1..29: mol_type = other DNA
ggttccatagtgtagtggttatcacgtct

SEQ ID NO: 13985 - DNA, 30 bp, synthetic construct; identical to SEQ ID NO: 1451
  misc_feature 1..30: note = Probe
  source 1..30: mol_type = other DNA

SEQ ID NO: 13986 - DNA, 31 bp, synthetic construct; identical to SEQ ID NO: 1452
  misc_feature 1..31: note = Probe
  source 1..31: mol_type = other DNA

SEQ ID NO: 13987 - DNA, 32 bp, synthetic construct; identical to SEQ ID NO: 1453
  misc_feature 1..32: note = Probe
  source 1..32: mol_type = other DNA

SEQ ID NO: 13988 - DNA, 33 bp, synthetic construct; identical to SEQ ID NO: 1454
  misc_feature 1..33: note = Probe
  source 1..33: mol_type = other DNA

SEQ ID NO: 13989 - DNA, 34 bp, synthetic construct; identical to SEQ ID NO: 1455
  misc_feature 1..34: note = Probe
  source 1..34: mol_type = other DNA

SEQ ID NO: 13990 - DNA, 35 bp, synthetic construct; identical to SEQ ID NO: 6817
  misc_feature 1..35: note = Probe
  source 1..35: mol_type = other DNA

SEQ ID NO: 13991 - DNA, 36 bp, synthetic construct; identical to SEQ ID NO: 1456
  misc_feature 1..36: note = Probe
  source 1..36: mol_type = other DNA

SEQ ID NO: 13992 - DNA, 37 bp, synthetic construct; identical to SEQ ID NO: 6818
  misc_feature 1..37: note = Probe
  source 1..37: mol_type = other DNA

SEQ ID NO: 13993 - DNA, 39 bp, synthetic construct; identical to SEQ ID NO: 6819
  misc_feature 1..39: note = Probe
  source 1..39: mol_type = other DNA

SEQ ID NO: 13994 - DNA, 40 bp, synthetic construct
  misc_feature 1..40: note = Probe
  source 1..40: mol_type = other DNA
ggttccatagtgtagtggttatcacgtctgctttacacgc

SEQ ID NO: 13995 - DNA, 50 bp, synthetic construct; identical to SEQ ID NO: 1457
  misc_feature 1..50: note = Probe
  source 1..50: mol_type = other DNA

SEQ ID NO: 13996 - DNA, 30 bp, synthetic construct; identical to SEQ ID NO: 6826
  misc_feature 1..30: note = Probe
  source 1..30: mol_type = other DNA

SEQ ID NO: 13997 - DNA, 33 bp, synthetic construct; identical to SEQ ID NO: 1458
  misc_feature 1..33: note = Probe
  source 1..33: mol_type = other DNA

SEQ ID NO: 13998 - DNA, 34 bp, synthetic construct; identical to SEQ ID NO: 1459
  misc_feature 1..34: note = Probe
  source 1..34: mol_type = other DNA

SEQ ID NO: 13999 - DNA, 36 bp, synthetic construct; identical to SEQ ID NO: 1460
  misc_feature 1..36: note = Probe
  source 1..36: mol_type = other DNA

SEQ ID NO: 14000 - DNA, 16 bp, synthetic construct
  misc_feature 1..16: note = Probe
  source 1..16: mol_type = other DNA
ggttcgattccccgac

SEQ ID NO: 14001 - DNA, 17 bp, synthetic construct
  misc_feature 1..17: note = Probe
  source 1..17: mol_type = other DNA
ggttcgattccccgacg

SEQ ID NO: 14002 - DNA, 18 bp, synthetic construct
  misc_feature 1..18: note = Probe
  source 1..18: mol_type = other DNA
ggttcgattccccgacgg

SEQ ID NO: 14003 - DNA, 19 bp, synthetic construct
  misc_feature 1..19: note = Probe
  source 1..19: mol_type = other DNA
ggttcgattccccgacggg

SEQ ID NO: 14004 - DNA, 22 bp, synthetic construct
  misc_feature 1..22: note = Probe
  source 1..22: mol_type = other DNA
ggttcgattccccgacggggag

SEQ ID NO: 14005 - DNA, 36 bp, synthetic construct
  misc_feature 1..36: note = Probe
  source 1..36: mol_type = other DNA
gtaaacaggagatcctgggttcgaatcccagcggtg

SEQ ID NO: 14006 - DNA, 18 bp, synthetic construct
  misc_feature 1..18: note = Probe
  source 1..18: mol_type = other DNA
gtaaaccaggggtcgcga

SEQ ID NO: 14007 - DNA, 20 bp, synthetic construct
  misc_feature 1..20: note = Probe
  source 1..20: mol_type = other DNA
gtaaaccaggggtcgcgagt

SEQ ID NO: 14008 - DNA, 21 bp, synthetic construct
  misc_feature 1..21: note = Probe
  source 1..21: mol_type = other DNA
gtaaaccaggggtcgcgagtt

SEQ ID NO: 14009 - DNA, 20 bp, synthetic construct
  misc_feature 1..20: note = Probe
  source 1..20: mol_type = other DNA
gtaaaccgaagatcgcgggt

SEQ ID NO: 14010 - DNA, 34 bp, synthetic construct; identical to SEQ ID NO: 1464
  misc_feature 1..34: note = Probe
  source 1..34: mol_type = other DNA

SEQ ID NO: 14011 - DNA, 33 bp, synthetic construct; identical to SEQ ID NO: 6913
  misc_feature 1..33: note = Probe
  source 1..33: mol_type = other DNA

SEQ ID NO: 14012 - DNA, 34 bp, synthetic construct
  misc_feature 1..34: note = Probe
  source 1..34: mol_type = other DNA
gtaccgttaacttccaattaactagttttgacaa

SEQ ID NO: 14013 - DNA, 36 bp, synthetic construct
  misc_feature 1..36: note = Probe
  source 1..36: mol_type = other DNA
gtagaattctcgcctgccacgcgggaggcccgggtt

SEQ ID NO: 14014 - DNA, 27 bp, synthetic construct
  misc_feature 1..27: note = Probe
  source 1..27: mol_type = other DNA
gtagctcagtggtagagcgcatgcttt

SEQ ID NO: 14015 - DNA, 16 bp, synthetic construct
  misc_feature 1..16: note = Probe
  source 1..16: mol_type = other DNA
gtagtcgtggccgagt

SEQ ID NO: 14016 - DNA, 23 bp, synthetic construct
  misc_feature 1..23: note = Probe
  source 1..23: mol_type = other DNA
gtagtcgtggccgagtggttaag

SEQ ID NO: 14017 - DNA, 35 bp, synthetic construct
  misc_feature 1..35: note = Probe
  source 1..35: mol_type = other DNA
gtatgaggccccgggttcgatccccggcatctcca

SEQ ID NO: 14018 - DNA, 35 bp, synthetic construct
  misc_feature 1..35: note = Probe
  source 1..35: mol_type = other DNA
gtatgattctcgcttcgggtgcgagaggtcccggg

SEQ ID NO: 14019 - DNA, 36 bp, synthetic construct
  misc_feature 1..36: note = Probe
  source 1..36: mol_type = other DNA
gtatgattctcgcttcgggtgcgagaggtcccgggt

SEQ ID NO: 14020 - DNA, 32 bp, synthetic construct; identical to SEQ ID NO: 1472
  misc_feature 1..32: note = Probe
  source 1..32: mol_type = other DNA

SEQ ID NO: 14021 - DNA, 35 bp, synthetic construct
  misc_feature 1..35: note = Probe
  source 1..35: mol_type = other DNA
gtatgattctcgctttgggtgcgagaggtcccggg

SEQ ID NO: 14022 - DNA, 36 bp, synthetic construct
  misc_feature 1..36: note = Probe
  source 1..36: mol_type = other DNA
gtatgattctcgctttgggtgcgagaggtcccgggt

SEQ ID NO: 14023 - DNA, 37 bp, synthetic construct
  misc_feature 1..37: note = Probe
  source 1..37: mol_type = other DNA
gtatgattctcgctttgggtgcgagaggtcccgggtt

SEQ ID NO: 14024 - DNA, 32 bp, synthetic construct; identical to SEQ ID NO: 1473
  misc_feature 1..32: note = Probe
  source 1..32: mol_type = other DNA

SEQ ID NO: 14025 - DNA, 20 bp, synthetic construct
  misc_feature 1..20: note = Probe
  source 1..20: mol_type = other DNA
gtcacgcgggagaccggggt

SEQ ID NO: 14026 - DNA, 21 bp, synthetic construct
  misc_feature 1..21: note = Probe
  source 1..21: mol_type = other DNA
gtcacgcgggagaccggggtt

SEQ ID NO: 14027 - DNA, 35 bp, synthetic construct
  misc_feature 1..35: note = Probe
  source 1..35: mol_type = other DNA
gtcacgcgggagaccggggttcaattccccgacgg

SEQ ID NO: 14028 - DNA, 36 bp, synthetic construct
  misc_feature 1..36: note = Probe
  source 1..36: mol_type = other DNA
gtcacgcgggagaccggggttcaattccccgacggg

SEQ ID NO: 14029 - DNA, 24 bp, synthetic construct
  misc_feature 1..24: note = Probe
  source 1..24: mol_type = other DNA
gtcacgcgggagaccggggttcga

SEQ ID NO: 14030 - DNA, 32 bp, synthetic construct
  misc_feature 1..32: note = Probe
  source 1..32: mol_type = other DNA
gtcacgcgggagaccggggttcgattccccga

SEQ ID NO: 14031 - DNA, 33 bp, synthetic construct
  misc_feature 1..33: note = Probe
  source 1..33: mol_type = other DNA
gtcacgcgggagaccggggttcgattccccgac

SEQ ID NO: 14032 - DNA, 34 bp, synthetic construct
  misc_feature 1..34: note = Probe
  source 1..34: mol_type = other DNA
gtcacgcgggagaccggggttcgattccccgacg

SEQ ID NO: 14033 - DNA, 35 bp, synthetic construct
  misc_feature 1..35: note = Probe
  source 1..35: mol_type = other DNA
gtcacgcgggagaccggggttcgattccccgacgg

SEQ ID NO: 14034 - DNA, 36 bp, synthetic construct
  misc_feature 1..36: note = Probe
  source 1..36: mol_type = other DNA
gtcacgcgggagaccggggttcgattccccgacggg

SEQ ID NO: 14035 - DNA, 37 bp, synthetic construct
  misc_feature 1..37: note = Probe
  source 1..37: mol_type = other DNA
gtcacgcgggagaccggggttcgattccccgacgggg

SEQ ID NO: 14036 - DNA, 16 bp, synthetic construct
  misc_feature 1..16: note = Probe
  source 1..16: mol_type = other DNA
gtcacggtggccgagt

SEQ ID NO: 14037 - DNA, 31 bp, synthetic construct; identical to SEQ ID NO: 6989
  misc_feature 1..31: note = Probe
  source 1..31: mol_type = other DNA

SEQ ID NO: 14038 - DNA, 35 bp, synthetic construct; identical to SEQ ID NO: 1480
  misc_feature 1..35: note = Probe
  source 1..35: mol_type = other DNA

SEQ ID NO: 14039 - DNA, 23 bp, synthetic construct
  misc_feature 1..23: note = Probe
  source 1..23: mol_type = other DNA
gtcaggatggccgagtggtctaa

SEQ ID NO: 14040 - DNA, 24 bp, synthetic construct
  misc_feature 1..24: note = Probe
  source 1..24: mol_type = other DNA
gtcaggatggccgagtggtctaag

SEQ ID NO: 14041 - DNA, 25 bp, synthetic construct
  misc_feature 1..25: note = Probe
  source 1..25: mol_type = other DNA
gtcaggatggccgagtggtctaagg

SEQ ID NO: 14042 - DNA, 30 bp, synthetic construct
  misc_feature 1..30: note = Probe
  source 1..30: mol_type = other DNA
gtcaggatggccgagtggtctaaggcgcca

SEQ ID NO: 14043 - DNA, 31 bp, synthetic construct
  misc_feature 1..31: note = Probe
  source 1..31: mol_type = other DNA
gtcaggatggccgagtggtctaaggcgccag

SEQ ID NO: 14044 - DNA, 32 bp, synthetic construct
  misc_feature 1..32: note = Probe
  source 1..32: mol_type = other DNA
gtcaggatggccgagtggtctaaggcgccaga

SEQ ID NO: 14045 - DNA, 17 bp, synthetic construct
  misc_feature 1..17: note = Probe
  source 1..17: mol_type = other DNA
gtccttgtagtataaac

SEQ ID NO: 14046 - DNA, 18 bp, synthetic construct
  misc_feature 1..18: note = Probe
  source 1..18: mol_type = other DNA
gtccttgtagtataaact

SEQ ID NO: 14047 - DNA, 19 bp, synthetic construct
  misc_feature 1..19: note = Probe
  source 1..19: mol_type = other DNA
gtccttgtagtataaacta

SEQ ID NO: 14048 - DNA, 26 bp, synthetic construct
  misc_feature 1..26: note = Probe
  source 1..26: mol_type = other DNA
gtccttgtagtataaactaatacacc

SEQ ID NO: 14049 - DNA, 27 bp, synthetic construct
  misc_feature 1..27: note = Probe
  source 1..27: mol_type = other DNA
gtccttgtagtataaactaatacacca

SEQ ID NO: 14050 - DNA, 28 bp, synthetic construct
  misc_feature 1..28: note = Probe
  source 1..28: mol_type = other DNA
gtccttgtagtataaactaatacaccag

SEQ ID NO: 14051 - DNA, 29 bp, synthetic construct
  misc_feature 1..29: note = Probe
  source 1..29: mol_type = other DNA
gtccttgtagtataaactaatacaccagt

SEQ ID NO: 14052 - DNA, 30 bp, synthetic construct; identical to SEQ ID NO: 1487
  misc_feature 1..30: note = Probe
  source 1..30: mol_type = other DNA

SEQ ID NO: 14053 - DNA, 31 bp, synthetic construct; identical to SEQ ID NO: 1488
  misc_feature 1..31: note = Probe
  source 1..31: mol_type = other DNA

SEQ ID NO: 14054 - DNA, 50 bp, synthetic construct; identical to SEQ ID NO: 1489
  misc_feature 1..50: note = Probe
  source 1..50: mol_type = other DNA

SEQ ID NO: 14055 - DNA, 17 bp, synthetic construct
  misc_feature 1..17: note = Probe
  source 1..17: mol_type = other DNA
gtcggtagagcatcaga

SEQ ID NO: 14056 - DNA, 18 bp, synthetic construct
  misc_feature 1..18: note = Probe
  source 1..18: mol_type = other DNA
gtcggtagagcatcagac

SEQ ID NO: 14057 - DNA, 40 bp, synthetic construct
  misc_feature 1..40: note = Probe
  source 1..40: mol_type = other DNA
gtcggtagagcatgagactcttaatctcagggtcgtgggt

SEQ ID NO: 14058 - DNA, 17 bp, synthetic construct
  misc_feature 1..17: note = Probe
  source 1..17: mol_type = other DNA
gtcggtagagcatggga

SEQ ID NO: 14059 - DNA, 18 bp, synthetic construct
  misc_feature 1..18: note = Probe
  source 1..18: mol_type = other DNA
gtcggtagagcatgggac

SEQ ID NO: 14060 - DNA, 19 bp, synthetic construct
  misc_feature 1..19: note = Probe
  source 1..19: mol_type = other DNA
gtcggtagagcatgggact

SEQ ID NO: 14061 - DNA, 20 bp, synthetic construct
  misc_feature 1..20: note = Probe
  source 1..20: mol_type = other DNA
gtcggtagagcatgggactc

SEQ ID NO: 14062 - DNA, 35 bp, synthetic construct; identical to SEQ ID NO: 1495
  misc_feature 1..35: note = Probe
  source 1..35: mol_type = other DNA

SEQ ID NO: 14063 - DNA, 40 bp, synthetic construct
  misc_feature 1..40: note = Probe
  source 1..40: mol_type = other DNA
gtcggtagagcatgggactcttaatcccagggtcgtgggt

SEQ ID NO: 14064 - DNA, 21 bp, synthetic construct
  misc_feature 1..21: note = Probe
  source 1..21: mol_type = other DNA
gtcgtggttgtagtccgtgcg

SEQ ID NO: 14065 - DNA, 24 bp, synthetic construct
  misc_feature 1..24: note = Probe
  source 1..24: mol_type = other DNA
gtcgtggttgtagtccgtgcgaga

SEQ ID NO: 14066 - DNA, 27 bp, synthetic construct
  misc_feature 1..27: note = Probe
  source 1..27: mol_type = other DNA
gtcgtggttgtagtccgtgcgagaata

SEQ ID NO: 14067 - DNA, 25 bp, synthetic construct
  misc_feature 1..25: note = Probe
  source 1..25: mol_type = other DNA
gtctagcggttaggattcctggttt

SEQ ID NO: 14068 - DNA, 22 bp, synthetic construct
  misc_feature 1..22: note = Probe
  source 1..22: mol_type = other DNA
gtctagtggttaggattcggcg

SEQ ID NO: 14069 - DNA, 24 bp, synthetic construct
  misc_feature 1..24: note = Probe
  source 1..24: mol_type = other DNA
gtctagtggttaggattcggcgct

SEQ ID NO: 14070 - DNA, 25 bp, synthetic construct
  misc_feature 1..25: note = Probe
  source 1..25: mol_type = other DNA
gtctagtggttaggattcggcgctc

SEQ ID NO: 14071 - DNA, 25 bp, synthetic construct
  misc_feature 1..25: note = Probe
  source 1..25: mol_type = other DNA
gtctcataatctgaaggtcgtgagt

SEQ ID NO: 14072 - DNA, 32 bp, synthetic construct
  misc_feature 1..32: note = Probe
  source 1..32: mol_type = other DNA
gtgagcatagctgccttccaagcagttgaccc

SEQ ID NO: 14073 - DNA, 33 bp, synthetic construct
  misc_feature 1..33: note = Probe
  source 1..33: mol_type = other DNA
gtgagcatagctgccttccaagcagttgacccg

SEQ ID NO: 14074 - DNA, 34 bp, synthetic construct
  misc_feature 1..34: note = Probe
  source 1..34: mol_type = other DNA
gtgagcatagctgccttccaagcagttgacccgg

SEQ ID NO: 14075 - DNA, 19 bp, synthetic construct
  misc_feature 1..19: note = Probe
  source 1..19: mol_type = other DNA
gtgagtatccccgcctgtc

SEQ ID NO: 14076 - DNA, 20 bp, synthetic construct
  misc_feature 1..20: note = Probe
  source 1..20: mol_type = other DNA
gtgagtatccccgcctgtca

SEQ ID NO: 14077 - DNA, 21 bp, synthetic construct
  misc_feature 1..21: note = Probe
  source 1..21: mol_type = other DNA
gtgagtatccccgcctgtcac

SEQ ID NO: 14078 - DNA, 31 bp, synthetic construct
  misc_feature 1..31: note = Probe
  source 1..31: mol_type = other DNA
gtgagtatccccgcctgtcacgcgggagacc

SEQ ID NO: 14079 - DNA, 33 bp, synthetic construct
  misc_feature 1..33: note = Probe
  source 1..33: mol_type = other DNA
gtgagtatccccgcctgtcacgcgggagaccgg

SEQ ID NO: 14080 - DNA, 29 bp, synthetic construct
  misc_feature 1..29: note = Probe
  source 1..29: mol_type = other DNA
gtgatcgtatagtggttagtactctgcgt

SEQ ID NO: 14081 - DNA, 30 bp, synthetic construct; identical to SEQ ID NO: 1505
  misc_feature 1..30: note = Probe
  source 1..30: mol_type = other DNA

SEQ ID NO: 14082 - DNA, 31 bp, synthetic construct; identical to SEQ ID NO: 1506
  misc_feature 1..31: note = Probe
  source 1..31: mol_type = other DNA

SEQ ID NO: 14083 - DNA, 32 bp, synthetic construct; identical to SEQ ID NO: 1507
  misc_feature 1..32: note = Probe
  source 1..32: mol_type = other DNA

SEQ ID NO: 14084 - DNA, 33 bp, synthetic construct; identical to SEQ ID NO: 1508
  misc_feature 1..33: note = Probe
  source 1..33: mol_type = other DNA

SEQ ID NO: 14085 - DNA, 29 bp, synthetic construct
  misc_feature 1..29: note = Probe
  source 1..29: mol_type = other DNA
gtgctgggcccataacccagaggtcgatg

SEQ ID NO: 14086 - DNA, 34 bp, synthetic construct
  misc_feature 1..34: note = Probe
  source 1..34: mol_type = other DNA
gtgctgggcccataacccagaggtcgatggatcg

SEQ ID NO: 14087 - DNA, 35 bp, synthetic construct
  misc_feature 1..35: note = Probe
  source 1..35: mol_type = other DNA
gtggctaggattcggcgctttcaccgccgcggccc

SEQ ID NO: 14088 - DNA, 16 bp, synthetic construct
  misc_feature 1..16: note = Probe
  source 1..16: mol_type = other DNA
gtggtagagcgcgtgc

SEQ ID NO: 14089 - DNA, 36 bp, synthetic construct
  misc_feature 1..36: note = Probe
  source 1..36: mol_type = other DNA
gtggtatcatgcaagattcccattcttgcgacccgg

SEQ ID NO: 14090 - DNA, 25 bp, synthetic construct
  misc_feature 1..25: note = Probe
  source 1..25: mol_type = other DNA
gtggtctagtggttaggattcggcg

SEQ ID NO: 14091 - DNA, 26 bp, synthetic construct
  misc_feature 1..26: note = Probe
  source 1..26: mol_type = other DNA
gtggtctagtggttaggattcggcgc

SEQ ID NO: 14092 - DNA, 27 bp, synthetic construct
  misc_feature 1..27: note = Probe
  source 1..27: mol_type = other DNA
gtggtctagtggttaggattcggcgct

SEQ ID NO: 14093 - DNA, 28 bp, synthetic construct
  misc_feature 1..28: note = Probe
  source 1..28: mol_type = other DNA
gtggtctagtggttaggattcggcgctc

SEQ ID NO: 14094 - DNA, 29 bp, synthetic construct
  misc_feature 1..29: note = Probe
  source 1..29: mol_type = other DNA
gtggtctagtggttaggattcggcgctct

SEQ ID NO: 14095 - DNA, 37 bp, synthetic construct
  misc_feature 1..37: note = Probe
  source 1..37: mol_type = other DNA
gtggtgagcatagctgccttccaagcagttgacccgg

SEQ ID NO: 14096 - DNA, 22 bp, synthetic construct
  misc_feature 1..22: note = Probe
  source 1..22: mol_type = other DNA
gtggtgagtatccccgcctgtc

SEQ ID NO: 14097 - DNA, 36 bp, synthetic construct
  misc_feature 1..36: note = Probe
  source 1..36: mol_type = other DNA
gtggtgagtatccccgcctgtcacgcgggagaccgg

SEQ ID NO: 14098 - DNA, 39 bp, synthetic construct
  misc_feature 1..39: note = Probe
  source 1..39: mol_type = other DNA
gtggtgagtatccccgcctgtcacgcgggagaccggggt

SEQ ID NO: 14099 - DNA, 37 bp, synthetic construct
  misc_feature 1..37: note = Probe
  source 1..37: mol_type = other DNA
gtggttagcatagctgccttccaagcagttgacccgg

SEQ ID NO: 14100 - DNA, 39 bp, synthetic construct
  misc_feature 1..39: note = Probe
  source 1..39: mol_type = other DNA
gtggttagcatagctgccttccaagcagttgacccgggt

SEQ ID NO: 14101 - DNA, 17 bp, synthetic construct
  misc_feature 1..17: note = Probe
  source 1..17: mol_type = other DNA
gtggttaggattcggcg

SEQ ID NO: 14102 - DNA, 18 bp, synthetic construct
  misc_feature 1..18: note = Probe
  source 1..18: mol_type = other DNA
gtggttaggattcggcgc

SEQ ID NO: 14103 - DNA, 19 bp, synthetic construct
  misc_feature 1..19: note = Probe
  source 1..19: mol_type = other DNA
gtggttaggattcggcgct

SEQ ID NO: 14104 - DNA, 20 bp, synthetic construct
  misc_feature 1..20: note = Probe
  source 1..20: mol_type = other DNA
gtggttaggattcggcgctc

SEQ ID NO: 14105 - DNA, 21 bp, synthetic construct
  misc_feature 1..21: note = Probe
  source 1..21: mol_type = other DNA
gtggttaggattcggcgctct

SEQ ID NO: 14106 - DNA, 25 bp, synthetic construct
  misc_feature 1..25: note = Probe
  source 1..25: mol_type = other DNA
gtggttaggattcggcgctctcacc

SEQ ID NO: 14107 - DNA, 35 bp, synthetic construct
  misc_feature 1..35: note = Probe
  source 1..35: mol_type = other DNA
gtggttaggattcggcgctctcaccgccgcggccc

SEQ ID NO: 14108 - DNA, 39 bp, synthetic construct
  misc_feature 1..39: note = Probe
  source 1..39: mol_type = other DNA
gtggttaggattcggcgctctcaccgccgcggcccgggt

SEQ ID NO: 14109 - DNA, 18 bp, synthetic construct
  misc_feature 1..18: note = Probe
  source 1..18: mol_type = other DNA
gtggttagtactctgcgt

SEQ ID NO: 14110 - DNA, 19 bp, synthetic construct
  misc_feature 1..19: note = Probe
  source 1..19: mol_type = other DNA
gtggttagtactctgcgtt

SEQ ID NO: 14111 - DNA, 20 bp, synthetic construct
  misc_feature 1..20: note = Probe
  source 1..20: mol_type = other DNA
gtggttagtactctgcgttg

SEQ ID NO: 14112 - DNA, 21 bp, synthetic construct
  misc_feature 1..21: note = Probe
  source 1..21: mol_type = other DNA
gtggttagtactctgcgttgt

SEQ ID NO: 14113 - DNA, 16 bp, synthetic construct
  misc_feature 1..16: note = Probe
  source 1..16: mol_type = other DNA
gtggttagtatccccg

SEQ ID NO: 14114 - DNA, 17 bp, synthetic construct
  misc_feature 1..17: note = Probe
  source 1..17: mol_type = other DNA
gtggttagtatccccgc

SEQ ID NO: 14115 - DNA, 40 bp, synthetic construct
  misc_feature 1..40: note = Probe
  source 1..40: mol_type = other DNA
gtggttatcacgttcgcctcacacgcgaaaggtccccggt

SEQ ID NO: 14116 - DNA, 28 bp, synthetic construct
  misc_feature 1..28: note = Probe
  source 1..28: mol_type = other DNA
gtgtttgtgggtttaagtcccattggtc

SEQ ID NO: 14117 - DNA, 29 bp, synthetic construct
  misc_feature 1..29: note = Probe
  source 1..29: mol_type = other DNA
gtgtttgtgggtttaagtcccattggtct

SEQ ID NO: 14118 - DNA, 30 bp, synthetic construct; identical to SEQ ID NO: 1519
  misc_feature 1..30: note = Probe
  source 1..30: mol_type = other DNA

SEQ ID NO: 14119 - DNA, 30 bp, synthetic construct; identical to SEQ ID NO: 1521
  misc_feature 1..30: note = Probe
  source 1..30: mol_type = other DNA

SEQ ID NO: 14120 - DNA, 37 bp, synthetic construct; identical to SEQ ID NO: 1523
  misc_feature 1..37: note = Probe
  source 1..37: mol_type = other DNA

SEQ ID NO: 14121 - DNA, 39 bp, synthetic construct; identical to SEQ ID NO: 7141
  misc_feature 1..39: note = Probe
  source 1..39: mol_type = other DNA

SEQ ID NO: 14122 - DNA, 32 bp, synthetic construct
  misc_feature 1..32: note = Probe
  source 1..32: mol_type = other DNA
gttagcatagctgccttccaagcagttgaccc

SEQ ID NO: 14123 - DNA, 24 bp, synthetic construct
  misc_feature 1..24: note = Probe
  source 1..24: mol_type = other DNA
gttcaatccccggcacctccacca

SEQ ID NO: 14124 - DNA, 30 bp, synthetic construct
  misc_feature 1..30: note = Probe
  source 1..30: mol_type = other DNA
gttccatagtgtagtggttatcacgtctgc

SEQ ID NO: 14125 - DNA, 16 bp, synthetic construct
  misc_feature 1..16: note = Probe
  source 1..16: mol_type = other DNA
gttcgattccccgacg

SEQ ID NO: 14126 - DNA, 17 bp, synthetic construct
  misc_feature 1..17: note = Probe
  source 1..17: mol_type = other DNA
gttcgattccccgacgg

SEQ ID NO: 14127 - DNA, 50 bp, synthetic construct; identical to SEQ ID NO: 1529
  misc_feature 1..50: note = Probe
  source 1..50: mol_type = other DNA

SEQ ID NO: 14128 - DNA, 29 bp, synthetic construct
  misc_feature 1..29: note = Probe
  source 1..29: mol_type = other DNA
gttgatgcagagtggggttttgcagtcct

SEQ ID NO: 14129 - DNA, 30 bp, synthetic construct
  misc_feature 1..30: note = Probe
  source 1..30: mol_type = other DNA
gttgatgcagagtggggttttgcagtcctt

SEQ ID NO: 14130 - DNA, 31 bp, synthetic construct; identical to SEQ ID NO: 7206
  misc_feature 1..31: note = Probe
  source 1..31: mol_type = other DNA

SEQ ID NO: 14131 - DNA, 19 bp, synthetic construct
  misc_feature 1..19: note = Probe
  source 1..19: mol_type = other DNA
gtttatgtagcttacctcc

SEQ ID NO: 14132 - DNA, 20 bp, synthetic construct
  misc_feature 1..20: note = Probe
  source 1..20: mol_type = other DNA
gtttatgtagcttacctcct

SEQ ID NO: 14133 - DNA, 30 bp, synthetic construct; identical to SEQ ID NO: 1536
  misc_feature 1..30: note = Probe
  source 1..30: mol_type = other DNA

SEQ ID NO: 14134 - DNA, 32 bp, synthetic construct; identical to SEQ ID NO: 7245
  misc_feature 1..32: note = Probe
  source 1..32: mol_type = other DNA

SEQ ID NO: 14135 - DNA, 33 bp, synthetic construct; identical to SEQ ID NO: 1537
  misc_feature 1..33: note = Probe
  source 1..33: mol_type = other DNA

SEQ ID NO: 14136 - DNA, 34 bp, synthetic construct; identical to SEQ ID NO: 1538
  misc_feature 1..34: note = Probe
  source 1..34: mol_type = other DNA

SEQ ID NO: 14137 - DNA, 35 bp, synthetic construct; identical to SEQ ID NO: 1539
  misc_feature 1..35: note = Probe
  source 1..35: mol_type = other DNA

SEQ ID NO: 14138 - DNA, 36 bp, synthetic construct; identical to SEQ ID NO: 1540
  misc_feature 1..36: note = Probe
  source 1..36: mol_type = other DNA

SEQ ID NO: 14139 - DNA, 37 bp, synthetic construct; identical to SEQ ID NO: 1541
  misc_feature 1..37: note = Probe
  source 1..37: mol_type = other DNA

SEQ ID NO: 14140 - DNA, 16 bp, synthetic construct
  misc_feature 1..16: note = Probe
  source 1..16: mol_type = other DNA
gtttccgtagtgtagc

SEQ ID NO: 14141 - DNA, 28 bp, synthetic construct
  misc_feature 1..28: note = Probe
  source 1..28: mol_type = other DNA
gtttccgtagtgtagcggttatcacatt

SEQ ID NO: 14142 - DNA, 29 bp, synthetic construct
  misc_feature 1..29: note = Probe
  source 1..29: mol_type = other DNA
gtttccgtagtgtagcggttatcacattc

SEQ ID NO: 14143 - DNA, 30 bp, synthetic construct; identical to SEQ ID NO: 8769
  misc_feature 1..30: note = Probe
  source 1..30: mol_type = other DNA

SEQ ID NO: 14144 - DNA, 31 bp, synthetic construct; identical to SEQ ID NO: 1547
  misc_feature 1..31: note = Probe
  source 1..31: mol_type = other DNA

SEQ ID NO: 14145 - DNA, 32 bp, synthetic construct; identical to SEQ ID NO: 1548
  misc_feature 1..32: note = Probe
  source 1..32: mol_type = other DNA

SEQ ID NO: 14146 - DNA, 33 bp, synthetic construct; identical to SEQ ID NO: 1549
  misc_feature 1..33: note = Probe
  source 1..33: mol_type = other DNA

SEQ ID NO: 14147 - DNA, 34 bp, synthetic construct; identical to SEQ ID NO: 1550
  misc_feature 1..34: note = Probe
  source 1..34: mol_type = other DNA

SEQ ID NO: 14148 - DNA, 35 bp, synthetic construct; identical to SEQ ID NO: 1551
  misc_feature 1..35: note = Probe
  source 1..35: mol_type = other DNA

SEQ ID NO: 14149 - DNA, 36 bp, synthetic construct; identical to SEQ ID NO: 1552
  misc_feature 1..36: note = Probe
  source 1..36: mol_type = other DNA

SEQ ID NO: 14150 - DNA, 50 bp, synthetic construct; identical to SEQ ID NO: 7255
  misc_feature 1..50: note = Probe
  source 1..50: mol_type = other DNA

SEQ ID NO: 14151 - DNA, 28 bp, synthetic construct
  misc_feature 1..28: note = Probe
  source 1..28: mol_type = other DNA
gtttccgtagtgtagtggtcatcacgtt

SEQ ID NO: 14152 - DNA, 29 bp, synthetic construct
  misc_feature 1..29: note = Probe
  source 1..29: mol_type = other DNA
gtttccgtagtgtagtggtcatcacgttc

SEQ ID NO: 14153 - DNA, 30 bp, synthetic construct; identical to SEQ ID NO: 8772
  misc_feature 1..30: note = Probe
  source 1..30: mol_type = other DNA

SEQ ID NO: 14154 - DNA, 31 bp, synthetic construct; identical to SEQ ID NO: 1559
  misc_feature 1..31: note = Probe
  source 1..31: mol_type = other DNA

SEQ ID NO: 14155 - DNA, 32 bp, synthetic construct; identical to SEQ ID NO: 1560
  misc_feature 1..32: note = Probe
  source 1..32: mol_type = other DNA

SEQ ID NO: 14156 - DNA, 33 bp, synthetic construct; identical to SEQ ID NO: 1561
  misc_feature 1..33: note = Probe
  source 1..33: mol_type = other DNA

SEQ ID NO: 14157 - DNA, 34 bp, synthetic construct; identical to SEQ ID NO: 7259
  misc_feature 1..34: note = Probe
  source 1..34: mol_type = other DNA

SEQ ID NO: 14158 - DNA, 34 bp, synthetic construct; identical to SEQ ID NO: 1562
  misc_feature 1..34: note = Probe
  source 1..34: mol_type = other DNA

SEQ ID NO: 14159 - DNA, 39 bp, synthetic construct
  misc_feature 1..39: note = Probe
  source 1..39: mol_type = other DNA
gtttccgtagtgtagtggttatcacgttcgcctcacacg

SEQ ID NO: 14160 - DNA, 40 bp, synthetic construct
  misc_feature 1..40: note = Probe
  source 1..40: mol_type = other DNA
gtttccgtagtgtagtggttatcacgttcgcctcacacgc

SEQ ID NO: 14161 - DNA, 49 bp, synthetic construct
  misc_feature 1..49: note = Probe
  source 1..49: mol_type = other DNA
gtttccgtagtgtagtggttatcacgttcgcctcacacgcgaaaggtcc

SEQ ID NO: 14162 - DNA, 50 bp, synthetic construct; identical to SEQ ID NO: 1564
  misc_feature 1..50: note = Probe
  source 1..50: mol_type = other DNA

SEQ ID NO: 14163 - DNA, 23 bp, synthetic construct
  misc_feature 1..23: note = Probe
  source 1..23: mol_type = other DNA
gtttccgtagtgtagtggttatt

SEQ ID NO: 14164 - DNA, 27 bp, synthetic construct
  misc_feature 1..27: note = Probe
  source 1..27: mol_type = other DNA
gtttgtgggtttaagtcccattggtct

SEQ ID NO: 14165 - DNA, 28 bp, synthetic construct
  misc_feature 1..28: note = Probe
  source 1..28: mol_type = other DNA
gtttgtgggtttaagtcccattggtcta

SEQ ID NO: 14166 - DNA, 32 bp, synthetic construct; identical to SEQ ID NO: 7457
  misc_feature 1..32: note = Probe
  source 1..32: mol_type = other DNA

SEQ ID NO: 14167 - DNA, 34 bp, synthetic construct
  misc_feature 1..34: note = Probe
  source 1..34: mol_type = other DNA
taccccgaaaatgttggttatacccttcccgtac

SEQ ID NO: 14168 - DNA, 35 bp, synthetic construct; identical to SEQ ID NO: 1576
  misc_feature 1..35: note = Probe
  source 1..35: mol_type = other DNA

SEQ ID NO: 14169 - DNA, 36 bp, synthetic construct; identical to SEQ ID NO: 1577
  misc_feature 1..36: note = Probe
  source 1..36: mol_type = other DNA

SEQ ID NO: 14170 - DNA, 18 bp, synthetic construct
  misc_feature 1..18: note = Probe
  source 1..18: mol_type = other DNA
tacctcctcaaagcaata

SEQ ID NO: 14171 - DNA, 20 bp, synthetic construct
  misc_feature 1..20: note = Probe
  source 1..20: mol_type = other DNA
tacctcctcaaagcaataca

SEQ ID NO: 14172 - DNA, 22 bp, synthetic construct
  misc_feature 1..22: note = Probe
  source 1..22: mol_type = other DNA
tacctcctcaaagcaatacact

SEQ ID NO: 14173 - DNA, 23 bp, synthetic construct
  misc_feature 1..23: note = Probe
  source 1..23: mol_type = other DNA
tacctcctcaaagcaatacactg

SEQ ID NO: 14174 - DNA, 20 bp, synthetic construct
  misc_feature 1..20: note = Probe
  source 1..20: mol_type = other DNA
tagaattctcgcctgccacg

SEQ ID NO: 14175 - DNA, 21 bp, synthetic construct
  misc_feature 1..21: note = Probe
  source 1..21: mol_type = other DNA
tagaattctcgcctgccacgc

SEQ ID NO: 14176 - DNA, 50 bp, synthetic construct; identical to SEQ ID NO: 1582
  misc_feature 1..50: note = Probe
  source 1..50: mol_type = other DNA

SEQ ID NO: 14177 - DNA, 34 bp, synthetic construct
  misc_feature 1..34: note = Probe
  source 1..34: mol_type = other DNA
tagcattaaccttttaagttaaagattaagagaa

SEQ ID NO: 14178 - DNA, 35 bp, synthetic construct
  misc_feature 1..35: note = Probe
  source 1..35: mol_type = other DNA
tagcattaaccttttaagttaaagattaagagaac

SEQ ID NO: 14179 - DNA, 36 bp, synthetic construct; identical to SEQ ID NO: 1584
  misc_feature 1..36: note = Probe
  source 1..36: mol_type = other DNA

SEQ ID NO: 14180 - DNA, 37 bp, synthetic construct; identical to SEQ ID NO: 7559
  misc_feature 1..37: note = Probe
  source 1..37: mol_type = other DNA

SEQ ID NO: 14181 - DNA, 27 bp, synthetic construct
  misc_feature 1..27: note = Probe
  source 1..27: mol_type = other DNA
tagctcagtcggtagagcatcagactt

SEQ ID NO: 14182 - DNA, 28 bp, synthetic construct
  misc_feature 1..28: note = Probe
  source 1..28: mol_type = other DNA
tagctcagtcggtagagcatcagacttt

SEQ ID NO: 14183 - DNA, 29 bp, synthetic construct
  misc_feature 1..29: note = Probe
  source 1..29: mol_type = other DNA
tagctcagtcggtagagcatcagactttt

SEQ ID NO: 14184 - DNA, 30 bp, synthetic construct
  misc_feature 1..30: note = Probe
  source 1..30: mol_type = other DNA
tagctcagtcggtagagcatcagactttta

SEQ ID NO: 14185 - DNA, 24 bp, synthetic construct
  misc_feature 1..24: note = Probe
  source 1..24: mol_type = other DNA
tagctcagtcggtagagcatggga

SEQ ID NO: 14186 - DNA, 25 bp, synthetic construct
  misc_feature 1..25: note = Probe
  source 1..25: mol_type = other DNA
tagctcagtcggtagagcatgggac

SEQ ID NO: 14187 - DNA, 26 bp, synthetic construct
  misc_feature 1..26: note = Probe
  source 1..26: mol_type = other DNA
tagctcagtcggtagagcatgggact

SEQ ID NO: 14188 - DNA, 27 bp, synthetic construct
  misc_feature 1..27: note = Probe
  source 1..27: mol_type = other DNA
tagctcagtcggtagagcatgggactc

SEQ ID NO: 14189 - DNA, 28 bp, synthetic construct
  misc_feature 1..28: note = Probe
  source 1..28: mol_type = other DNA
tagctcagtcggtagagcatgggactct

SEQ ID NO: 14190 - DNA, 29 bp, synthetic construct
  misc_feature 1..29: note = Probe
  source 1..29: mol_type = other DNA
tagctcagtcggtagagcatgggactctt

SEQ ID NO: 14191 - DNA, 21 bp, synthetic construct
  misc_feature 1..21: note = Probe
  source 1..21: mol_type = other DNA
taggatggggtgtgataggtg

SEQ ID NO: 14192 - DNA, 23 bp, synthetic construct
  misc_feature 1..23: note = Probe
  source 1..23: mol_type = other DNA
taggatggggtgtgataggtggc

SEQ ID NO: 14193 - DNA, 29 bp, synthetic construct
  misc_feature 1..29: note = Probe
  source 1..29: mol_type = other DNA
taggatggggtgtgataggtggcacggag

SEQ ID NO: 14194 - DNA, 30 bp, synthetic construct; identical to SEQ ID NO: 1592
  misc_feature 1..30: note = Probe
  source 1..30: mol_type = other DNA

SEQ ID NO: 14195 - DNA, 31 bp, synthetic construct; identical to SEQ ID NO: 7585
  misc_feature 1..31: note = Probe
  source 1..31: mol_type = other DNA

SEQ ID NO: 14196 - DNA, 32 bp, synthetic construct; identical to SEQ ID NO: 1593
  misc_feature 1..32: note = Probe
  source 1..32: mol_type = other DNA

SEQ ID NO: 14197 - DNA, 34 bp, synthetic construct; identical to SEQ ID NO: 7586
  misc_feature 1..34: note = Probe
  source 1..34: mol_type = other DNA

SEQ ID NO: 14198 - DNA, 35 bp, synthetic construct; identical to SEQ ID NO: 7587
  misc_feature 1..35: note = Probe
  source 1..35: mol_type = other DNA

SEQ ID NO: 14199 - DNA, 36 bp, synthetic construct; identical to SEQ ID NO: 1595
  misc_feature 1..36: note = Probe
  source 1..36: mol_type = other DNA

SEQ ID NO: 14200 - DNA, 18 bp, synthetic construct
  misc_feature 1..18: note = Probe
  source 1..18: mol_type = other DNA
taggggtatgattctcgg

SEQ ID NO: 14201 - DNA, 19 bp, synthetic construct
  misc_feature 1..19: note = Probe
  source 1..19: mol_type = other DNA
taggggtatgattctcggt

SEQ ID NO: 14202 - DNA, 37 bp, synthetic construct
  misc_feature 1..37: note = Probe
  source 1..37: mol_type = other DNA
tagtggctaggattcggcgctttcaccgccgcggccc

SEQ ID NO: 14203 - DNA, 19 bp, synthetic construct
  misc_feature 1..19: note = Probe
  source 1..19: mol_type = other DNA
tagtggtatgattctcgct

SEQ ID NO: 14204 - DNA, 37 bp, synthetic construct
  misc_feature 1..37: note = Probe
  source 1..37: mol_type = other DNA
tagtggtatgattctcgctttgggtgcgagaggtccc

SEQ ID NO: 14205 - DNA, 20 bp, synthetic construct
  misc_feature 1..20: note = Probe
  source 1..20: mol_type = other DNA
tagtggtgagtatccccgcc

SEQ ID NO: 14206 - DNA, 23 bp, synthetic construct
  misc_feature 1..23: note = Probe
  source 1..23: mol_type = other DNA
tagtggtgagtatccccgcctgt

SEQ ID NO: 14207 - DNA, 24 bp, synthetic construct
  misc_feature 1..24: note = Probe
  source 1..24: mol_type = other DNA
tagtggtgagtatccccgcctgtc

SEQ ID NO: 14208 - DNA, 25 bp, synthetic construct
  misc_feature 1..25: note = Probe
  source 1..25: mol_type = other DNA
tagtggtgagtatccccgcctgtca

SEQ ID NO: 14209 - DNA, 26 bp, synthetic construct
  misc_feature 1..26: note = Probe
  source 1..26: mol_type = other DNA
tagtggtgagtatccccgcctgtcac

SEQ ID NO: 14210 - DNA, 27 bp, synthetic construct
  misc_feature 1..27: note = Probe
  source 1..27: mol_type = other DNA
tagtggtgagtatccccgcctgtcacg

SEQ ID NO: 14211 - DNA, 28 bp, synthetic construct
  misc_feature 1..28: note = Probe
  source 1..28: mol_type = other DNA
tagtggtgagtatccccgcctgtcacgc

SEQ ID NO: 14212 - DNA, 36 bp, synthetic construct
  misc_feature 1..36: note = Probe
  source 1..36: mol_type = other DNA
tagtggtgagtatccccgcctgtcacgcgggagacc

SEQ ID NO: 14213 - DNA, 38 bp, synthetic construct
  misc_feature 1..38: note = Probe
  source 1..38: mol_type = other DNA
tagtggtgagtatccccgcctgtcacgcgggagaccgg

SEQ ID NO: 14214 - DNA, 19 bp, synthetic construct
  misc_feature 1..19: note = Probe
  source 1..19: mol_type = other DNA
tagtggttaggattcggcg

SEQ ID NO: 14215 - DNA, 20 bp, synthetic construct
  misc_feature 1..20: note = Probe
  source 1..20: mol_type = other DNA
tagtggttaggattcggcgc

SEQ ID NO: 14216 - DNA, 21 bp, synthetic construct
  misc_feature 1..21: note = Probe
  source 1..21: mol_type = other DNA
tagtggttaggattcggcgct

SEQ ID NO: 14217 - DNA, 22 bp, synthetic construct
  misc_feature 1..22: note = Probe
  source 1..22: mol_type = other DNA
tagtggttaggattcggcgctc

SEQ ID NO: 14218 - DNA, 23 bp, synthetic construct
  misc_feature 1..23: note = Probe
  source 1..23: mol_type = other DNA
tagtggttaggattcggcgctct

SEQ ID NO: 14219 - DNA, 25 bp, synthetic construct
  misc_feature 1..25: note = Probe
  source 1..25: mol_type = other DNA
tagtggttaggattcggcgctctca

SEQ ID NO: 14220 - DNA, 37 bp, synthetic construct
  misc_feature 1..37: note = Probe
  source 1..37: mol_type = other DNA
tagtggttaggattcggcgctctcaccgccgcggccc

SEQ ID NO: 14221 - DNA, 38 bp, synthetic construct
  misc_feature 1..38: note = Probe
  source 1..38: mol_type = other DNA
tagtggttaggattcggcgctctcaccgccgcggcccg

SEQ ID NO: 14222 - DNA, 19 bp, synthetic construct
  misc_feature 1..19: note = Probe
  source 1..19: mol_type = other DNA
tagtggttagtactctgcg

SEQ ID NO: 14223 - DNA, 16 bp, synthetic construct
  misc_feature 1..16: note = Probe
  source 1..16: mol_type = other DNA
tagtggttagtatccc

SEQ ID NO: 14224 - DNA, 17 bp, synthetic construct
  misc_feature 1..17: note = Probe
  source 1..17: mol_type = other DNA
tagtggttagtatcccc

SEQ ID NO: 14225 - DNA, 18 bp, synthetic construct
  misc_feature 1..18: note = Probe
  source 1..18: mol_type = other DNA
tagtggttagtatccccg

SEQ ID NO: 14226 - DNA, 19 bp, synthetic construct
  misc_feature 1..19: note = Probe
  source 1..19: mol_type = other DNA
tagtggttagtatccccgc

SEQ ID NO: 14227 - DNA, 26 bp, synthetic construct
  misc_feature 1..26: note = Probe
  source 1..26: mol_type = other DNA
tagtggttagtatccccgcctgtcac

SEQ ID NO: 14228 - DNA, 24 bp, synthetic construct
  misc_feature 1..24: note = Probe
  source 1..24: mol_type = other DNA
tagtgtagtggttatcacgtctgc

SEQ ID NO: 14229 - DNA, 22 bp, synthetic construct
  misc_feature 1..22: note = Probe
  source 1..22: mol_type = other DNA
tcaatccccggcacctccacca

SEQ ID NO: 14230 - DNA, 50 bp, synthetic construct; identical to SEQ ID NO: 1610
  misc_feature 1..50: note = Probe
  source 1..50: mol_type = other DNA

SEQ ID NO: 14231 - DNA, 22 bp, synthetic construct
  misc_feature 1..22: note = Probe
  source 1..22: mol_type = other DNA
tcacacgcgaaaggtccccggt

SEQ ID NO: 14232 - DNA, 19 bp, synthetic construct
  misc_feature 1..19: note = Probe
  source 1..19: mol_type = other DNA
tcacgcgggagaccggggt

SEQ ID NO: 14233 - DNA, 36 bp, synthetic construct; identical to SEQ ID NO: 1616
  misc_feature 1..36: note = Probe
  source 1..36: mol_type = other DNA

SEQ ID NO: 14234 - DNA, 34 bp, synthetic construct; identical to SEQ ID NO: 1620
  misc_feature 1..34: note = Probe
  source 1..34: mol_type = other DNA

SEQ ID NO: 14235 - DNA, 35 bp, synthetic construct; identical to SEQ ID NO: 1621
  misc_feature 1..35: note = Probe
  source 1..35: mol_type = other DNA

SEQ ID NO: 14236 - DNA, 36 bp, synthetic construct; identical to SEQ ID NO: 1622
  misc_feature 1..36: note = Probe
  source 1..36: mol_type = other DNA

SEQ ID NO: 14237 - DNA, 33 bp, synthetic construct; identical to SEQ ID NO: 1624
  misc_feature 1..33: note = Probe
  source 1..33: mol_type = other DNA

SEQ ID NO: 14238 - DNA, 29 bp, synthetic construct
  misc_feature 1..29: note = Probe
  source 1..29: mol_type = other DNA
tcagggatgggttcgattctcatagtcct

SEQ ID NO: 14239 - DNA, 38 bp, synthetic construct
  misc_feature 1..38: note = Probe
  source 1..38: mol_type = other DNA
tcatatcattggtcgtggttgtagtccgtgcgagaata

SEQ ID NO: 14240 - DNA, 33 bp, synthetic construct; identical to SEQ ID NO: 7770
  misc_feature 1..33: note = Probe
  source 1..33: mol_type = other DNA

SEQ ID NO: 14241 - DNA, 25 bp, synthetic construct
  misc_feature 1..25: note = Probe
  source 1..25: mol_type = other DNA
tccaatggggtctccccgcgcaggt

SEQ ID NO: 14242 - DNA, 22 bp, synthetic construct
  misc_feature 1..22: note = Probe
  source 1..22: mol_type = other DNA
tccaatggggtttccccgcaca

SEQ ID NO: 14243 - DNA, 23 bp, synthetic construct
  misc_feature 1..23: note = Probe
  source 1..23: mol_type = other DNA
tccaatggggtttccccgcacag

SEQ ID NO: 14244 - DNA, 24 bp, synthetic construct
  misc_feature 1..24: note = Probe
  source 1..24: mol_type = other DNA
tccaatggggtttccccgcacagg

SEQ ID NO: 14245 - DNA, 25 bp, synthetic construct
  misc_feature 1..25: note = Probe
  source 1..25: mol_type = other DNA
tccaatggggtttccccgcacaggt

SEQ ID NO: 14246 - DNA, 34 bp, synthetic construct; identical to SEQ ID NO: 1627
  misc_feature 1..34: note = Probe
  source 1..34: mol_type = other DNA

SEQ ID NO: 14247 - DNA, 34 bp, synthetic construct; identical to SEQ ID NO: 1628
  misc_feature 1..34: note = Probe
  source 1..34: mol_type = other DNA

SEQ ID NO: 14248 - DNA, 35 bp, synthetic construct; identical to SEQ ID NO: 7782
  misc_feature 1..35: note = Probe
  source 1..35: mol_type = other DNA

SEQ ID NO: 14249 - DNA, 28 bp, synthetic construct
  misc_feature 1..28: note = Probe
  source 1..28: mol_type = other DNA
tccatagtgtagtggttatcacgtctgc

SEQ ID NO: 14250 - DNA, 30 bp, synthetic construct
  misc_feature 1..30: note = Probe
  source 1..30: mol_type = other DNA
tccatagtgtagtggttatcacgtctgctt

SEQ ID NO: 14251 - DNA, 31 bp, synthetic construct
  misc_feature 1..31: note = Probe
  source 1..31: mol_type = other DNA
tccatagtgtagtggttatcacgtctgcttt

SEQ ID NO: 14252 - DNA, 25 bp, synthetic construct
  misc_feature 1..25: note = Probe
  source 1..25: mol_type = other DNA
tccattggggtctccccgcgcaggt

SEQ ID NO: 14253 - DNA, 20 bp, synthetic construct
  misc_feature 1..20: note = Probe
  source 1..20: mol_type = other DNA
tccattggggtttccccgcg

SEQ ID NO: 14254 - DNA, 21 bp, synthetic construct
  misc_feature 1..21: note = Probe
  source 1..21: mol_type = other DNA
tccattggggtttccccgcgc

SEQ ID NO: 14255 - DNA, 22 bp, synthetic construct
  misc_feature 1..22: note = Probe
  source 1..22: mol_type = other DNA
tccattggggtttccccgcgca

SEQ ID NO: 14256 - DNA, 23 bp, synthetic construct
  misc_feature 1..23: note = Probe
  source 1..23: mol_type = other DNA
tccattggggtttccccgcgcag

SEQ ID NO: 14257 - DNA, 24 bp, synthetic construct
  misc_feature 1..24: note = Probe
  source 1..24: mol_type = other DNA
tccattggggtttccccgcgcagg

SEQ ID NO: 14258 - DNA, 25 bp, synthetic construct
  misc_feature 1..25: note = Probe
  source 1..25: mol_type = other DNA
tccattggggtttccccgcgcaggt

SEQ ID NO: 14259 - DNA, 26 bp, synthetic construct
  misc_feature 1..26: note = Probe
  source 1..26: mol_type = other DNA
tccattggggtttccccgcgcaggtt

SEQ ID NO: 14260 - DNA, 28 bp, synthetic construct
  misc_feature 1..28: note = Probe
  source 1..28: mol_type = other DNA
tccattggggtttccccgcgcaggttcg

SEQ ID NO: 14261 - DNA, 19 bp, synthetic construct
  misc_feature 1..19: note = Probe
  source 1..19: mol_type = other DNA
tcccacatggtctagcggt

SEQ ID NO: 14262 - DNA, 23 bp, synthetic construct
  misc_feature 1..23: note = Probe
  source 1..23: mol_type = other DNA
tcccacatggtctagcggttagg

SEQ ID NO: 14263 - DNA, 26 bp, synthetic construct
  misc_feature 1..26: note = Probe
  source 1..26: mol_type = other DNA
tcccacatggtctagcggttaggatt

SEQ ID NO: 14264 - DNA, 27 bp, synthetic construct
  misc_feature 1..27: note = Probe
  source 1..27: mol_type = other DNA
tcccacatggtctagcggttaggattc

SEQ ID NO: 14265 - DNA, 28 bp, synthetic construct
  misc_feature 1..28: note = Probe
  source 1..28: mol_type = other DNA
tcccacatggtctagcggttaggattcc

SEQ ID NO: 14266 - DNA, 29 bp, synthetic construct
  misc_feature 1..29: note = Probe
  source 1..29: mol_type = other DNA
tcccacatggtctagcggttaggattcct

SEQ ID NO: 14267 - DNA, 30 bp, synthetic construct; identical to SEQ ID NO: 1643
  misc_feature 1..30: note = Probe
  source 1..30: mol_type = other DNA

SEQ ID NO: 14268 - DNA, 31 bp, synthetic construct; identical to SEQ ID NO: 1644
  misc_feature 1..31: note = Probe
  source 1..31: mol_type = other DNA

SEQ ID NO: 14269 - DNA, 32 bp, synthetic construct; identical to SEQ ID NO: 1645
  misc_feature 1..32: note = Probe
  source 1..32: mol_type = other DNA

SEQ ID NO: 14270 - DNA, 33 bp, synthetic construct; identical to SEQ ID NO: 1646
  misc_feature 1..33: note = Probe
  source 1..33: mol_type = other DNA

SEQ ID NO: 14271 - DNA, 34 bp, synthetic construct; identical to SEQ ID NO: 1647
  misc_feature 1..34: note = Probe
  source 1..34: mol_type = other DNA

SEQ ID NO: 14272 - DNA, 35 bp, synthetic construct; identical to SEQ ID NO: 1648
  misc_feature 1..35: note = Probe
  source 1..35: mol_type = other DNA

SEQ ID NO: 14273 - DNA, 36 bp, synthetic construct; identical to SEQ ID NO: 1649
  misc_feature 1..36: note = Probe
  source 1..36: mol_type = other DNA

SEQ ID NO: 14274 - DNA, 37 bp, synthetic construct; identical to SEQ ID NO: 1650
  misc_feature 1..37: note = Probe
  source 1..37: mol_type = other DNA

SEQ ID NO: 14275 - DNA, 39 bp, synthetic construct; identical to SEQ ID NO: 7795
  misc_feature 1..39: note = Probe
  source 1..39: mol_type = other DNA

SEQ ID NO: 14276 - DNA, 40 bp, synthetic construct; identical to SEQ ID NO: 1651
  misc_feature 1..40: note = Probe
  source 1..40: mol_type = other DNA

SEQ ID NO: 14277 - DNA, 41 bp, synthetic construct; identical to SEQ ID NO: 7796
  misc_feature 1..41: note = Probe
  source 1..41: mol_type = other DNA

SEQ ID NO: 14278 - DNA, 50 bp, synthetic construct; identical to SEQ ID NO: 7798
  misc_feature 1..50: note = Probe
  source 1..50: mol_type = other DNA

SEQ ID NO: 14279 - DNA, 17 bp, synthetic construct
  misc_feature 1..17: note = Probe
  source 1..17: mol_type = other DNA
tcccatatggtctagcg

SEQ ID NO: 14280 - DNA, 19 bp, synthetic construct
  misc_feature 1..19: note = Probe
  source 1..19: mol_type = other DNA
tcccatatggtctagcggt

SEQ ID NO: 14281 - DNA, 27 bp, synthetic construct
  misc_feature 1..27: note = Probe
  source 1..27: mol_type = other DNA
tcccatatggtctagcggttaggattc

SEQ ID NO: 14282 - DNA, 28 bp, synthetic construct
  misc_feature 1..28: note = Probe
  source 1..28: mol_type = other DNA
tcccatatggtctagcggttaggattcc

SEQ ID NO: 14283 - DNA, 29 bp, synthetic construct
  misc_feature 1..29: note = Probe
  source 1..29: mol_type = other DNA
tcccatatggtctagcggttaggattcct

SEQ ID NO: 14284 - DNA, 30 bp, synthetic construct; identical to SEQ ID NO: 1659
  misc_feature 1..30: note = Probe
  source 1..30: mol_type = other DNA

SEQ ID NO: 14285 - DNA, 31 bp, synthetic construct; identical to SEQ ID NO: 1660
  misc_feature 1..31: note = Probe
  source 1..31: mol_type = other DNA

SEQ ID NO: 14286 - DNA, 32 bp, synthetic construct; identical to SEQ ID NO: 1661
  misc_feature 1..32: note = Probe
  source 1..32: mol_type = other DNA

SEQ ID NO: 14287 - DNA, 33 bp, synthetic construct; identical to SEQ ID NO: 1662
  misc_feature 1..33: note = Probe
  source 1..33: mol_type = other DNA

SEQ ID NO: 14288 - DNA, 34 bp, synthetic construct; identical to SEQ ID NO: 1663
  misc_feature 1..34: note = Probe
  source 1..34: mol_type = other DNA

SEQ ID NO: 14289 - DNA, 35 bp, synthetic construct; identical to SEQ ID NO: 1664
  misc_feature 1..35: note = Probe
  source 1..35: mol_type = other DNA

SEQ ID NO: 14290 - DNA, 36 bp, synthetic construct; identical to SEQ ID NO: 1665
  misc_feature 1..36: note = Probe
  source 1..36: mol_type = other DNA

SEQ ID NO: 14291 - DNA, 37 bp, synthetic construct; identical to SEQ ID NO: 1666
  misc_feature 1..37: note = Probe
  source 1..37: mol_type = other DNA

SEQ ID NO: 14292 - DNA, 39 bp, synthetic construct; identical to SEQ ID NO: 7803
  misc_feature 1..39: note = Probe
  source 1..39: mol_type = other DNA

SEQ ID NO: 14293 - DNA, 40 bp, synthetic construct; identical to SEQ ID NO: 7804
  misc_feature 1..40: note = Probe
  source 1..40: mol_type = other DNA

SEQ ID NO: 14294 - DNA, 41 bp, synthetic construct
  misc_feature 1..41: note = Probe
  source 1..41: mol_type = other DNA
tcccatatggtctagcggttaggattcctggttttcaccca

SEQ ID NO: 14295 - DNA, 50 bp, synthetic construct; identical to SEQ ID NO: 7805
  misc_feature 1..50: note = Probe
  source 1..50: mol_type = other DNA

SEQ ID NO: 14296 - DNA, 16 bp, synthetic construct
  misc_feature 1..16: note = Probe
  source 1..16: mol_type = other DNA
tccccggcacctccac

SEQ ID NO: 14297 - DNA, 17 bp, synthetic construct
  misc_feature 1..17: note = Probe
  source 1..17: mol_type = other DNA
tccccggcacctccacc

SEQ ID NO: 14298 - DNA, 18 bp, synthetic construct
  misc_feature 1..18: note = Probe
  source 1..18: mol_type = other DNA
tccccggcacctccacca

SEQ ID NO: 14299 - DNA, 31 bp, synthetic construct; identical to SEQ ID NO: 1671
  misc_feature 1..31: note = Probe
  source 1..31: mol_type = other DNA

SEQ ID NO: 14300 - DNA, 32 bp, synthetic construct; identical to SEQ ID NO: 1672
  misc_feature 1..32: note = Probe
  source 1..32: mol_type = other DNA

SEQ ID NO: 14301 - DNA, 33 bp, synthetic construct; identical to SEQ ID NO: 1673
  misc_feature 1..33: note = Probe
  source 1..33: mol_type = other DNA

SEQ ID NO: 14302 - DNA, 34 bp, synthetic construct; identical to SEQ ID NO: 1674
  misc_feature 1..34: note = Probe
  source 1..34: mol_type = other DNA

SEQ ID NO: 14303 - DNA, 35 bp, synthetic construct; identical to SEQ ID NO: 1675
  misc_feature 1..35: note = Probe
  source 1..35: mol_type = other DNA

SEQ ID NO: 14304 - DNA, 36 bp, synthetic construct; identical to SEQ ID NO: 1676
  misc_feature 1..36: note = Probe
  source 1..36: mol_type = other DNA

SEQ ID NO: 14305 - DNA, 37 bp, synthetic construct; identical to SEQ ID NO: 1677
  misc_feature 1..37: note = Probe
  source 1..37: mol_type = other DNA

SEQ ID NO: 14306 - DNA, 39 bp, synthetic construct; identical to SEQ ID NO: 7857
  misc_feature 1..39: note = Probe
  source 1..39: mol_type = other DNA

SEQ ID NO: 14307 - DNA, 40 bp, synthetic construct
  misc_feature 1..40: note = Probe
  source 1..40: mol_type = other DNA
tccctggtggtctagtggctaggattcggcgctttcaccg

SEQ ID NO: 14308 - DNA, 31 bp, synthetic construct; identical to SEQ ID NO: 1679
  misc_feature 1..31: note = Probe
  source 1..31: mol_type = other DNA

SEQ ID NO: 14309 - DNA, 32 bp, synthetic construct; identical to SEQ ID NO: 1680
  misc_feature 1..32: note = Probe
  source 1..32: mol_type = other DNA

SEQ ID NO: 14310 - DNA, 33 bp, synthetic construct; identical to SEQ ID NO: 1681
  misc_feature 1..33: note = Probe
  source 1..33: mol_type = other DNA

SEQ ID NO: 14311 - DNA, 34 bp, synthetic construct; identical to SEQ ID NO: 1682
  misc_feature 1..34: note = Probe
  source 1..34: mol_type = other DNA

SEQ ID NO: 14312 - DNA, 35 bp, synthetic construct; identical to SEQ ID NO: 1683
  misc_feature 1..35: note = Probe
  source 1..35: mol_type = other DNA

SEQ ID NO: 14313 - DNA, 36 bp, synthetic construct; identical to SEQ ID NO: 1684
  misc_feature 1..36: note = Probe
  source 1..36: mol_type = other DNA

SEQ ID NO: 14314 - DNA, 37 bp, synthetic construct; identical to SEQ ID NO: 1685
  misc_feature 1..37: note = Probe
  source 1..37: mol_type = other DNA

SEQ ID NO: 14315 - DNA, 38 bp, synthetic construct; identical to SEQ ID NO: 1686
  misc_feature 1..38: note = Probe
  source 1..38: mol_type = other DNA

SEQ ID NO: 14316 - DNA, 39 bp, synthetic construct; identical to SEQ ID NO: 1687
  misc_feature 1..39: note = Probe
  source 1..39: mol_type = other DNA

SEQ ID NO: 14317 - DNA, 40 bp, synthetic construct; identical to SEQ ID NO: 1688
  misc_feature 1..40: note = Probe
  source 1..40: mol_type = other DNA

SEQ ID NO: 14318 - DNA, 49 bp, synthetic construct; identical to SEQ ID NO: 1690
  misc_feature 1..49: note = Probe
  source 1..49: mol_type = other DNA

SEQ ID NO: 14319 - DNA, 50 bp, synthetic construct; identical to SEQ ID NO: 1691
  misc_feature 1..50: note = Probe
  source 1..50: mol_type = other DNA

SEQ ID NO: 14320 - DNA, 25 bp, synthetic construct
  misc_feature 1..25: note = Probe
  source 1..25: mol_type = other DNA
tccgtagtgtagcggttatcacatt

SEQ ID NO: 14321 - DNA, 29 bp, synthetic construct
  misc_feature 1..29: note = Probe
  source 1..29: mol_type = other DNA
tccgtagtgtagcggttatcacattcgcc

SEQ ID NO: 14322 - DNA, 30 bp, synthetic construct; identical to SEQ ID NO: 7878
  misc_feature 1..30: note = Probe
  source 1..30: mol_type = other DNA

SEQ ID NO: 14323 - DNA, 31 bp, synthetic construct; identical to SEQ ID NO: 7879
  misc_feature 1..31: note = Probe
  source 1..31: mol_type = other DNA

SEQ ID NO: 14324 - DNA, 32 bp, synthetic construct; identical to SEQ ID NO: 7880
  misc_feature 1..32: note = Probe
  source 1..32: mol_type = other DNA

SEQ ID NO: 14325 - DNA, 25 bp, synthetic construct
  misc_feature 1..25: note = Probe
  source 1..25: mol_type = other DNA
tccgtagtgtagtggtcatcacgtt

SEQ ID NO: 14326 - DNA, 28 bp, synthetic construct
  misc_feature 1..28: note = Probe
  source 1..28: mol_type = other DNA
tccgtagtgtagtggtcatcacgttcgc

SEQ ID NO: 14327 - DNA, 29 bp, synthetic construct
  misc_feature 1..29: note = Probe
  source 1..29: mol_type = other DNA
tccgtagtgtagtggtcatcacgttcgcc

SEQ ID NO: 14328 - DNA, 30 bp, synthetic construct
  misc_feature 1..30: note = Probe
  source 1..30: mol_type = other DNA
tccgtagtgtagtggtcatcacgttcgcct

SEQ ID NO: 14329 - DNA, 31 bp, synthetic construct
  misc_feature 1..31: note = Probe
  source 1..31: mol_type = other DNA
tccgtagtgtagtggttatcacgttcgccta

SEQ ID NO: 14330 - DNA, 50 bp, synthetic construct; identical to SEQ ID NO: 7899
  misc_feature 1..50: note = Probe
  source 1..50: mol_type = other DNA

SEQ ID NO: 14331 - DNA, 26 bp, synthetic construct
  misc_feature 1..26: note = Probe
  source 1..26: mol_type = other DNA
tcctcgttagtatagtggtgagtatc

SEQ ID NO: 14332 - DNA, 27 bp, synthetic construct
  misc_feature 1..27: note = Probe
  source 1..27: mol_type = other DNA
tcctcgttagtatagtggtgagtatcc

SEQ ID NO: 14333 - DNA, 28 bp, synthetic construct
  misc_feature 1..28: note = Probe
  source 1..28: mol_type = other DNA
tcctcgttagtatagtggtgagtatccc

SEQ ID NO: 14334 - DNA, 29 bp, synthetic construct
  misc_feature 1..29: note = Probe
  source 1..29: mol_type = other DNA
tcctcgttagtatagtggtgagtatcccc

SEQ ID NO: 14335 - DNA, 30 bp, synthetic construct; identical to SEQ ID NO: 1701
  misc_feature 1..30: note = Probe
  source 1..30: mol_type = other DNA

SEQ ID NO: 14336 - DNA, 31 bp, synthetic construct; identical to SEQ ID NO: 1702
  misc_feature 1..31: note = Probe
  source 1..31: mol_type = other DNA

SEQ ID NO: 14337 - DNA, 32 bp, synthetic construct; identical to SEQ ID NO: 1703
  misc_feature 1..32: note = Probe
  source 1..32: mol_type = other DNA

SEQ ID NO: 14338 - DNA, 33 bp, synthetic construct; identical to SEQ ID NO: 1704
  misc_feature 1..33: note = Probe
  source 1..33: mol_type = other DNA

SEQ ID NO: 14339 - DNA, 34 bp, synthetic construct; identical to SEQ ID NO: 1705
  misc_feature 1..34: note = Probe
  source 1..34: mol_type = other DNA

SEQ ID NO: 14340 - DNA, 35 bp, synthetic construct; identical to SEQ ID NO: 1706
  misc_feature 1..35: note = Probe
  source 1..35: mol_type = other DNA

SEQ ID NO: 14341 - DNA, 36 bp, synthetic construct; identical to SEQ ID NO: 1707
  misc_feature 1..36: note = Probe
  source 1..36: mol_type = other DNA

SEQ ID NO: 14342 - DNA, 37 bp, synthetic construct; identical to SEQ ID NO: 1708
  misc_feature 1..37: note = Probe
  source 1..37: mol_type = other DNA

SEQ ID NO: 14343 - DNA, 39 bp, synthetic construct; identical to SEQ ID NO: 1710
  misc_feature 1..39: note = Probe
  source 1..39: mol_type = other DNA

SEQ ID NO: 14344 - DNA, 40 bp, synthetic construct; identical to SEQ ID NO: 7922
  misc_feature 1..40: note = Probe
  source 1..40: mol_type = other DNA

SEQ ID NO: 14345 - DNA, 41 bp, synthetic construct; identical to SEQ ID NO: 7923
  misc_feature 1..41: note = Probe
  source 1..41: mol_type = other DNA

SEQ ID NO: 14346 - DNA, 50 bp, synthetic construct; identical to SEQ ID NO: 1711
  misc_feature 1..50: note = Probe
  source 1..50: mol_type = other DNA

SEQ ID NO: 14347 - DNA, 28 bp, synthetic construct
  misc_feature 1..28: note = Probe
  source 1..28: mol_type = other DNA
tcctcgttagtatagtggttagtatccc

SEQ ID NO: 14348 - DNA, 29 bp, synthetic construct
  misc_feature 1..29: note = Probe
  source 1..29: mol_type = other DNA
tcctcgttagtatagtggttagtatcccc

SEQ ID NO: 14349 - DNA, 30 bp, synthetic construct; identical to SEQ ID NO: 11933
  misc_feature 1..30: note = Probe
  source 1..30: mol_type = other DNA

SEQ ID NO: 14350 - DNA, 34 bp, synthetic construct; identical to SEQ ID NO: 1716
  misc_feature 1..34: note = Probe
  source 1..34: mol_type = other DNA

SEQ ID NO: 14351 - DNA, 35 bp, synthetic construct; identical to SEQ ID NO: 1717
  misc_feature 1..35: note = Probe
  source 1..35: mol_type = other DNA

SEQ ID NO: 14352 - DNA, 36 bp, synthetic construct; identical to SEQ ID NO: 1718
  misc_feature 1..36: note = Probe
  source 1..36: mol_type = other DNA

SEQ ID NO: 14353 - DNA, 16 bp, synthetic construct
  misc_feature 1..16: note = Probe
  source 1..16: mol_type = other DNA
tccttaggtcgctggt

SEQ ID NO: 14354 - DNA, 17 bp, synthetic construct
  misc_feature 1..17: note = Probe
  source 1..17: mol_type = other DNA
tccttaggtcgctggtt

SEQ ID NO: 14355 - DNA, 16 bp, synthetic construct
  misc_feature 1..16: note = Probe
  source 1..16: mol_type = other DNA
tcgagccccagtggaa

SEQ ID NO: 14356 - DNA, 22 bp, synthetic construct
  misc_feature 1..22: note = Probe
  source 1..22: mol_type = other DNA
tcgcctgccacgcgggaggccc

SEQ ID NO: 14357 - DNA, 26 bp, synthetic construct
  misc_feature 1..26: note = Probe
  source 1..26: mol_type = other DNA
tcgcctgccacgcgggaggcccgggt

SEQ ID NO: 14358 - DNA, 27 bp, synthetic construct
  misc_feature 1..27: note = Probe
  source 1..27: mol_type = other DNA
tcgcctgccacgcgggaggcccgggtt

SEQ ID NO: 14359 - DNA, 18 bp, synthetic construct
  misc_feature 1..18: note = Probe
  source 1..18: mol_type = other DNA
tcgggtgcgagaggtccc

SEQ ID NO: 14360 - DNA, 22 bp, synthetic construct
  misc_feature 1..22: note = Probe
  source 1..22: mol_type = other DNA
tcgggtgcgagaggtcccgggt

SEQ ID NO: 14361 - DNA, 23 bp, synthetic construct
  misc_feature 1..23: note = Probe
  source 1..23: mol_type = other DNA
tcgggtgcgagaggtcccgggtt

SEQ ID NO: 14362 - DNA, 16 bp, synthetic construct
  misc_feature 1..16: note = Probe
  source 1..16: mol_type = other DNA
tcggtagagcatcaga

SEQ ID NO: 14363 - DNA, 17 bp, synthetic construct
  misc_feature 1..17: note = Probe
  source 1..17: mol_type = other DNA
tcggtagagcatcagac

SEQ ID NO: 14364 - DNA, 17 bp, synthetic construct
  misc_feature 1..17: note = Probe
  source 1..17: mol_type = other DNA
tcggtagagcatgggac

SEQ ID NO: 14365 - DNA, 22 bp, synthetic construct
  misc_feature 1..22: note = Probe
  source 1..22: mol_type = other DNA
tcgtaaaccgaagatcacgggt

SEQ ID NO: 14366 - DNA, 22 bp, synthetic construct
  misc_feature 1..22: note = Probe
  source 1..22: mol_type = other DNA
tcgtaaaccgaagatcgcgggt

SEQ ID NO: 14367 - DNA, 27 bp, synthetic construct
  misc_feature 1..27: note = Probe
  source 1..27: mol_type = other DNA
tcgttagtatagtggtgagtatccccg

SEQ ID NO: 14368 - DNA, 32 bp, synthetic construct
  misc_feature 1..32: note = Probe
  source 1..32: mol_type = other DNA
tcgttagtatagtggtgagtatccccgcctgt

SEQ ID NO: 14369 - DNA, 24 bp, synthetic construct
  misc_feature 1..24: note = Probe
  source 1..24: mol_type = other DNA
tctcataatctgaaggtcgtgagt

SEQ ID NO: 14370 - DNA, 33 bp, synthetic construct; identical to SEQ ID NO: 8013
  misc_feature 1..33: note = Probe
  source 1..33: mol_type = other DNA

SEQ ID NO: 14371 - DNA, 32 bp, synthetic construct
  misc_feature 1..32: note = Probe
  source 1..32: mol_type = other DNA
tctgtagtgtagtggttatcacgttcgcctca

SEQ ID NO: 14372 - DNA, 19 bp, synthetic construct
  misc_feature 1..19: note = Probe
  source 1..19: mol_type = other DNA
tgaatccagcgatccgagt

SEQ ID NO: 14373 - DNA, 20 bp, synthetic construct
  misc_feature 1..20: note = Probe
  source 1..20: mol_type = other DNA
tgaatccagcgatccgagtt

SEQ ID NO: 14374 - DNA, 32 bp, synthetic construct; identical to SEQ ID NO: 1736
  misc_feature 1..32: note = Probe
  source 1..32: mol_type = other DNA

SEQ ID NO: 14375 - DNA, 36 bp, synthetic construct; identical to SEQ ID NO: 1740
  misc_feature 1..36: note = Probe
  source 1..36: mol_type = other DNA

SEQ ID NO: 14376 - DNA, 38 bp, synthetic construct; identical to SEQ ID NO: 1742
  misc_feature 1..38: note = Probe
  source 1..38: mol_type = other DNA

SEQ ID NO: 14377 - DNA, 31 bp, synthetic construct; identical to SEQ ID NO: 8063
  misc_feature 1..31: note = Probe
  source 1..31: mol_type = other DNA

SEQ ID NO: 14378 - DNA, 29 bp, synthetic construct
  misc_feature 1..29: note = Probe
  source 1..29: mol_type = other DNA
tgaggccccgggttcgatccccggcatct

SEQ ID NO: 14379 - DNA, 31 bp, synthetic construct; identical to SEQ ID NO: 8065
  misc_feature 1..31: note = Probe
  source 1..31: mol_type = other DNA

SEQ ID NO: 14380 - DNA, 36 bp, synthetic construct
  misc_feature 1..36: note = Probe
  source 1..36: mol_type = other DNA
tgcacgaggccccgggttcaatccccggcacctcca

SEQ ID NO: 14381 - DNA, 17 bp, synthetic construct
  misc_feature 1..17: note = Probe
  source 1..17: mol_type = other DNA
tgccacgcgggaggccc

SEQ ID NO: 14382 - DNA, 21 bp, synthetic construct
  misc_feature 1..21: note = Probe
  source 1..21: mol_type = other DNA
tgccacgcgggaggcccgggt

SEQ ID NO: 14383 - DNA, 22 bp, synthetic construct
  misc_feature 1..22: note = Probe
  source 1..22: mol_type = other DNA
tgccacgcgggaggcccgggtt

SEQ ID NO: 14384 - DNA, 16 bp, synthetic construct
  misc_feature 1..16: note = Probe
  source 1..16: mol_type = other DNA
tgcccgcatcctccac

SEQ ID NO: 14385 - DNA, 33 bp, synthetic construct
  misc_feature 1..33: note = Probe
  source 1..33: mol_type = other DNA
tgcgagaggtcccgggttcaaatcccggacgag

SEQ ID NO: 14386 - DNA, 37 bp, synthetic construct
  misc_feature 1..37: note = Probe
  source 1..37: mol_type = other DNA
tgcgagaggtcccgggttcaaatcccggacgagcccc

SEQ ID NO: 14387 - DNA, 17 bp, synthetic construct
  misc_feature 1..17: note = Probe
  source 1..17: mol_type = other DNA
tgctaatccattgtgct

SEQ ID NO: 14388 - DNA, 17 bp, synthetic construct
  misc_feature 1..17: note = Probe
  source 1..17: mol_type = other DNA
tgctaatggtggagtta

SEQ ID NO: 14389 - DNA, 33 bp, synthetic construct; identical to SEQ ID NO: 1758
  misc_feature 1..33: note = Probe
  source 1..33: mol_type = other DNA

SEQ ID NO: 14390 - DNA, 26 bp, synthetic construct
  misc_feature 1..26: note = Probe
  source 1..26: mol_type = other DNA
tgggtggttcagtggtagaattctcg

SEQ ID NO: 14391 - DNA, 28 bp, synthetic construct
  misc_feature 1..28: note = Probe
  source 1..28: mol_type = other DNA
tgggtggttcagtggtagaattctcgcc

SEQ ID NO: 14392 - DNA, 29 bp, synthetic construct
  misc_feature 1..29: note = Probe
  source 1..29: mol_type = other DNA
tgggtggttcagtggtagaattctcgcct

SEQ ID NO: 14393 - DNA, 30 bp, synthetic construct; identical to SEQ ID NO: 1765
  misc_feature 1..30: note = Probe
  source 1..30: mol_type = other DNA

SEQ ID NO: 14394 - DNA, 31 bp, synthetic construct; identical to SEQ ID NO: 1766
  misc_feature 1..31: note = Probe
  source 1..31: mol_type = other DNA

SEQ ID NO: 14395 - DNA, 32 bp, synthetic construct; identical to SEQ ID NO: 1767
  misc_feature 1..32: note = Probe
  source 1..32: mol_type = other DNA

SEQ ID NO: 14396 - DNA, 23 bp, synthetic construct
  misc_feature 1..23: note = Probe
  source 1..23: mol_type = other DNA
tggtagaattctcgcctgccacg

SEQ ID NO: 14397 - DNA, 24 bp, synthetic construct
  misc_feature 1..24: note = Probe
  source 1..24: mol_type = other DNA
tggtagaattctcgcctgccacgc

SEQ ID NO: 14398 - DNA, 25 bp, synthetic construct
  misc_feature 1..25: note = Probe
  source 1..25: mol_type = other DNA
tggtagaattctcgcctgccacgcg

SEQ ID NO: 14399 - DNA, 33 bp, synthetic construct; identical to SEQ ID NO: 1768
  misc_feature 1..33: note = Probe
  source 1..33: mol_type = other DNA

SEQ ID NO: 14400 - DNA, 29 bp, synthetic construct
  misc_feature 1..29: note = Probe
  source 1..29: mol_type = other DNA
tggtcgtggttgtagtccgtgcgagaata

SEQ ID NO: 14401 - DNA, 17 bp, synthetic construct
  misc_feature 1..17: note = Probe
  source 1..17: mol_type = other DNA
tggtctaaggcgccaga

SEQ ID NO: 14402 - DNA, 20 bp, synthetic construct
  misc_feature 1..20: note = Probe
  source 1..20: mol_type = other DNA
tggtctaaggcgccagactc

SEQ ID NO: 14403 - DNA, 24 bp, synthetic construct
  misc_feature 1..24: note = Probe
  source 1..24: mol_type = other DNA
tggtctagtggttaggattcggcg

SEQ ID NO: 14404 - DNA, 26 bp, synthetic construct
  misc_feature 1..26: note = Probe
  source 1..26: mol_type = other DNA
tggtctagtggttaggattcggcgct

SEQ ID NO: 14405 - DNA, 27 bp, synthetic construct
  misc_feature 1..27: note = Probe
  source 1..27: mol_type = other DNA
tggtctagtggttaggattcggcgctc

SEQ ID NO: 14406 - DNA, 30 bp, synthetic construct
  misc_feature 1..30: note = Probe
  source 1..30: mol_type = other DNA
tggtctagtggttaggattcggcgctctca

SEQ ID NO: 14407 - DNA, 34 bp, synthetic construct
  misc_feature 1..34: note = Probe
  source 1..34: mol_type = other DNA
tggtgagcatagctgccttccaagcagttgaccc

SEQ ID NO: 14408 - DNA, 17 bp, synthetic construct
  misc_feature 1..17: note = Probe
  source 1..17: mol_type = other DNA
tggtgagtatccccgcc

SEQ ID NO: 14409 - DNA, 21 bp, synthetic construct
  misc_feature 1..21: note = Probe
  source 1..21: mol_type = other DNA
tggtgagtatccccgcctgtc

SEQ ID NO: 14410 - DNA, 22 bp, synthetic construct
  misc_feature 1..22: note = Probe
  source 1..22: mol_type = other DNA
tggtgagtatccccgcctgtca

SEQ ID NO: 14411 - DNA, 23 bp, synthetic construct
  misc_feature 1..23: note = Probe
  source 1..23: mol_type = other DNA
tggtgagtatccccgcctgtcac

SEQ ID NO: 14412 - DNA, 24 bp, synthetic construct
  misc_feature 1..24: note = Probe
  source 1..24: mol_type = other DNA
tggtgagtatccccgcctgtcacg

SEQ ID NO: 14413 - DNA, 25 bp, synthetic construct
  misc_feature 1..25: note = Probe
  source 1..25: mol_type = other DNA
tggtgagtatccccgcctgtcacgc

SEQ ID NO: 14414 - DNA, 34 bp, synthetic construct
  misc_feature 1..34: note = Probe
  source 1..34: mol_type = other DNA
tggtgagtatccccgcctgtcacgcgggagaccg

SEQ ID NO: 14415 - DNA, 35 bp, synthetic construct
  misc_feature 1..35: note = Probe
  source 1..35: mol_type = other DNA
tggtgagtatccccgcctgtcacgcgggagaccgg

SEQ ID NO: 14416 - DNA, 38 bp, synthetic construct
  misc_feature 1..38: note = Probe
  source 1..38: mol_type = other DNA
tggtgagtatccccgcctgtcacgcgggagaccggggt

SEQ ID NO: 14417 - DNA, 27 bp, synthetic construct
  misc_feature 1..27: note = Probe
  source 1..27: mol_type = other DNA
tggtggtctagtggttaggattcggcg

SEQ ID NO: 14418 - DNA, 29 bp, synthetic construct
  misc_feature 1..29: note = Probe
  source 1..29: mol_type = other DNA
tggtggtctagtggttaggattcggcgct

SEQ ID NO: 14419 - DNA, 30 bp, synthetic construct
  misc_feature 1..30: note = Probe
  source 1..30: mol_type = other DNA
tggtggtctagtggttaggattcggcgctc

SEQ ID NO: 14420 - DNA, 31 bp, synthetic construct; identical to SEQ ID NO: 1774
  misc_feature 1..31: note = Probe
  source 1..31: mol_type = other DNA

SEQ ID NO: 14421 - DNA, 32 bp, synthetic construct; identical to SEQ ID NO: 1775
  misc_feature 1..32: note = Probe
  source 1..32: mol_type = other DNA

SEQ ID NO: 14422 - DNA, 33 bp, synthetic construct; identical to SEQ ID NO: 8190
  misc_feature 1..33: note = Probe
  source 1..33: mol_type = other DNA

SEQ ID NO: 14423 - DNA, 23 bp, synthetic construct
  misc_feature 1..23: note = Probe
  source 1..23: mol_type = other DNA
tggtgtagtggtatcatgcaaga

SEQ ID NO: 14424 - DNA, 26 bp, synthetic construct
  misc_feature 1..26: note = Probe
  source 1..26: mol_type = other DNA
tggtgtagtggtatcatgcaagattc

SEQ ID NO: 14425 - DNA, 41 bp, synthetic construct
  misc_feature 1..41: note = Probe
  source 1..41: mol_type = other DNA
tggtgtagtggtatcatgcaagattcccattcttgcgaccc

SEQ ID NO: 14426 - DNA, 43 bp, synthetic construct
  misc_feature 1..43: note = Probe
  source 1..43: mol_type = other DNA
tggtgtagtggtatcatgcaagattcccattcttgcgacccgg

SEQ ID NO: 14427 - DNA, 34 bp, synthetic construct
  misc_feature 1..34: note = Probe
  source 1..34: mol_type = other DNA
tggttagcatagctgccttccaagcagttgaccc

SEQ ID NO: 14428 - DNA, 16 bp, synthetic construct
  misc_feature 1..16: note = Probe
  source 1..16: mol_type = other DNA
tggttaggattcggcg

SEQ ID NO: 14429 - DNA, 17 bp, synthetic construct
  misc_feature 1..17: note = Probe
  source 1..17: mol_type = other DNA
tggttaggattcggcgc

SEQ ID NO: 14430 - DNA, 18 bp, synthetic construct
  misc_feature 1..18: note = Probe
  source 1..18: mol_type = other DNA
tggttaggattcggcgct

SEQ ID NO: 14431 - DNA, 19 bp, synthetic construct
  misc_feature 1..19: note = Probe
  source 1..19: mol_type = other DNA
tggttaggattcggcgctc

SEQ ID NO: 14432 - DNA, 20 bp, synthetic construct
  misc_feature 1..20: note = Probe
  source 1..20: mol_type = other DNA
tggttaggattcggcgctct

SEQ ID NO: 14433 - DNA, 22 bp, synthetic construct
  misc_feature 1..22: note = Probe
  source 1..22: mol_type = other DNA
tggttaggattcggcgctctca

SEQ ID NO: 14434 - DNA, 23 bp, synthetic construct
  misc_feature 1..23: note = Probe
  source 1..23: mol_type = other DNA
tggttaggattcggcgctctcac

SEQ ID NO: 14435 - DNA, 24 bp, synthetic construct
  misc_feature 1..24: note = Probe
  source 1..24: mol_type = other DNA
tggttaggattcggcgctctcacc

SEQ ID NO: 14436 - DNA, 27 bp, synthetic construct
  misc_feature 1..27: note = Probe
  source 1..27: mol_type = other DNA
tggttaggattcggcgctctcaccgcc

SEQ ID NO: 14437 - DNA, 34 bp, synthetic construct
  misc_feature 1..34: note = Probe
  source 1..34: mol_type = other DNA
tggttaggattcggcgctctcaccgccgcggccc

SEQ ID NO: 14438 - DNA, 17 bp, synthetic construct
  misc_feature 1..17: note = Probe
  source 1..17: mol_type = other DNA
tggttagtactctgcgt

SEQ ID NO: 14439 - DNA, 18 bp, synthetic construct
  misc_feature 1..18: note = Probe
  source 1..18: mol_type = other DNA
tggttagtactctgcgtt

SEQ ID NO: 14440 - DNA, 16 bp, synthetic construct
  misc_feature 1..16: note = Probe
  source 1..16: mol_type = other DNA
tggttagtatccccgc

SEQ ID NO: 14441 - DNA, 21 bp, synthetic construct
  misc_feature 1..21: note = Probe
  source 1..21: mol_type = other DNA
tggttagtatccccgcctgtc

SEQ ID NO: 14442 - DNA, 23 bp, synthetic construct
  misc_feature 1..23: note = Probe
  source 1..23: mol_type = other DNA
tggttagtatccccgcctgtcac

SEQ ID NO: 14443 - DNA, 21 bp, synthetic construct
  misc_feature 1..21: note = Probe
  source 1..21: mol_type = other DNA
tggttgtagtccgtgcgagaa

SEQ ID NO: 14444 - DNA, 19 bp, synthetic construct
  misc_feature 1..19: note = Probe
  source 1..19: mol_type = other DNA
tgtcacgcgggagaccggg

SEQ ID NO: 14445 - DNA, 21 bp, synthetic construct
  misc_feature 1..21: note = Probe
  source 1..21: mol_type = other DNA
tgtcacgcgggagaccggggt

SEQ ID NO: 14446 - DNA, 22 bp, synthetic construct
  misc_feature 1..22: note = Probe
  source 1..22: mol_type = other DNA
tgtcacgcgggagaccggggtt

SEQ ID NO: 14447 - DNA, 36 bp, synthetic construct
  misc_feature 1..36: note = Probe
  source 1..36: mol_type = other DNA
tgtcacgcgggagaccggggttcaattccccgacgg

SEQ ID NO: 14448 - DNA, 37 bp, synthetic construct
  misc_feature 1..37: note = Probe
  source 1..37: mol_type = other DNA
tgtcacgcgggagaccggggttcaattccccgacggg

SEQ ID NO: 14449 - DNA, 40 bp, synthetic construct
  misc_feature 1..40: note = Probe
  source 1..40: mol_type = other DNA
tgtcacgcgggagaccggggttcaattccccgacggggag

SEQ ID NO: 14450 - DNA, 33 bp, synthetic construct
  misc_feature 1..33: note = Probe
  source 1..33: mol_type = other DNA
tgtcacgcgggagaccggggttcgattccccga

SEQ ID NO: 14451 - DNA, 34 bp, synthetic construct
  misc_feature 1..34: note = Probe
  source 1..34: mol_type = other DNA
tgtcacgcgggagaccggggttcgattccccgac

SEQ ID NO: 14452 - DNA, 35 bp, synthetic construct
  misc_feature 1..35: note = Probe
  source 1..35: mol_type = other DNA
tgtcacgcgggagaccggggttcgattccccgacg

SEQ ID NO: 14453 - DNA, 36 bp, synthetic construct
  misc_feature 1..36: note = Probe
  source 1..36: mol_type = other DNA
tgtcacgcgggagaccggggttcgattccccgacgg

SEQ ID NO: 14454 - DNA, 37 bp, synthetic construct
  misc_feature 1..37: note = Probe
  source 1..37: mol_type = other DNA
tgtcacgcgggagaccggggttcgattccccgacggg

SEQ ID NO: 14455 - DNA, 38 bp, synthetic construct
  misc_feature 1..38: note = Probe
  source 1..38: mol_type = other DNA
tgtcacgcgggagaccggggttcgattccccgacgggg

SEQ ID NO: 14456 - DNA, 40 bp, synthetic construct; identical to SEQ ID NO: 1782
  misc_feature 1..40: note = Probe
  source 1..40: mol_type = other DNA

SEQ ID NO: 14457 - DNA, 37 bp, synthetic construct; identical to SEQ ID NO: 8364
  misc_feature 1..37: note = Probe
  source 1..37: mol_type = other DNA

SEQ ID NO: 14458 - DNA, 38 bp, synthetic construct
  misc_feature 1..38: note = Probe
  source 1..38: mol_type = other DNA
ttagcattaaccttttaagttaaagattaagagaacca

SEQ ID NO: 14459 - DNA, 23 bp, synthetic construct
  misc_feature 1..23: note = Probe
  source 1..23: mol_type = other DNA
ttcaatccccggcacctccacca

SEQ ID NO: 14460 - DNA, 18 bp, synthetic construct
  misc_feature 1..18: note = Probe
  source 1..18: mol_type = other DNA
ttcaggtcgcagtctccc

SEQ ID NO: 14461 - DNA, 30 bp, synthetic construct; identical to SEQ ID NO: 12337
  misc_feature 1..30: note = Probe
  source 1..30: mol_type = other DNA

SEQ ID NO: 14462 - DNA, 31 bp, synthetic construct; identical to SEQ ID NO: 8393
  misc_feature 1..31: note = Probe
  source 1..31: mol_type = other DNA

SEQ ID NO: 14463 - DNA, 34 bp, synthetic construct; identical to SEQ ID NO: 8395
  misc_feature 1..34: note = Probe
  source 1..34: mol_type = other DNA

SEQ ID NO: 14464 - DNA, 35 bp, synthetic construct; identical to SEQ ID NO: 1796
  misc_feature 1..35: note = Probe
  source 1..35: mol_type = other DNA

SEQ ID NO: 14465 - DNA, 39 bp, synthetic construct
  misc_feature 1..39: note = Probe
  source 1..39: mol_type = other DNA
ttcatatcattggtcgtggttgtagtccgtgcgagaata

SEQ ID NO: 14466 - DNA, 17 bp, synthetic construct
  misc_feature 1..17: note = Probe
  source 1..17: mol_type = other DNA
ttccaagcagttgaccc

SEQ ID NO: 14467 - DNA, 29 bp, synthetic construct
  misc_feature 1..29: note = Probe
  source 1..29: mol_type = other DNA
ttccatagtgtagtggttatcacgtctgc

SEQ ID NO: 14468 - DNA, 18 bp, synthetic construct
  misc_feature 1..18: note = Probe
  source 1..18: mol_type = other DNA
ttcccattcttgcgaccc

SEQ ID NO: 14469 - DNA, 31 bp, synthetic construct
  misc_feature 1..31: note = Probe
  source 1..31: mol_type = other DNA
ttccgtagtgtagcggttatcacattcgcct

SEQ ID NO: 14470 - DNA, 16 bp, synthetic construct
  misc_feature 1..16: note = Probe
  source 1..16: mol_type = other DNA
ttcgactcccggtatg

SEQ ID NO: 14471 - DNA, 16 bp, synthetic construct
  misc_feature 1..16: note = Probe
  source 1..16: mol_type = other DNA
ttcgactcccggtgtg

SEQ ID NO: 14472 - DNA, 17 bp, synthetic construct
  misc_feature 1..17: note = Probe
  source 1..17: mol_type = other DNA
ttcgactcccggtgtgg

SEQ ID NO: 14473 - DNA, 16 bp, synthetic construct
  misc_feature 1..16: note = Probe
  source 1..16: mol_type = other DNA
ttcgattcccgggcgg

SEQ ID NO: 14474 - DNA, 16 bp, synthetic construct
  misc_feature 1..16: note = Probe
  source 1..16: mol_type = other DNA
ttctcgcctgccacgc

SEQ ID NO: 14475 - DNA, 22 bp, synthetic construct
  misc_feature 1..22: note = Probe
  source 1..22: mol_type = other DNA
ttgggtgcgagaggtcccgggt

SEQ ID NO: 14476 - DNA, 25 bp, synthetic construct
  misc_feature 1..25: note = Probe
  source 1..25: mol_type = other DNA
aaaacatcagattgtgaatctgaca

SEQ ID NO: 14477 - DNA, 27 bp, synthetic construct
  misc_feature 1..27: note = Probe
  source 1..27: mol_type = other DNA
aaaacatcagattgtgaatctgacaac

SEQ ID NO: 14478 - DNA, 28 bp, synthetic construct
  misc_feature 1..28: note = Probe
  source 1..28: mol_type = other DNA
aaaacatcagattgtgaatctgacaaca

SEQ ID NO: 14479 - DNA, 29 bp, synthetic construct
  misc_feature 1..29: note = Probe
  source 1..29: mol_type = other DNA
aaaacatcagattgtgaatctgacaacag

SEQ ID NO: 14480 - DNA, 36 bp, synthetic construct
  misc_feature 1..36: note = Probe
  source 1..36: mol_type = other DNA
aaaacatcagattgtgaatctgacaacagaggctta

SEQ ID NO: 14481 - DNA, 42 bp, synthetic construct
  misc_feature 1..42: note = Probe
  source 1..42: mol_type = other DNA
aaaacatcagattgtgaatctgacaacagaggcttacgaccc

SEQ ID NO: 14482 - DNA, 23 bp, synthetic construct
  misc_feature 1..23: note = Probe
  source 1..23: mol_type = other DNA
aaaacctttttccaaggacaaat

SEQ ID NO: 14483 - DNA, 28 bp, synthetic construct
  misc_feature 1..28: note = Probe
  source 1..28: mol_type = other DNA
aaaacgaatgatttcgactcattaaatt

SEQ ID NO: 14484 - DNA, 29 bp, synthetic construct
  misc_feature 1..29: note = Probe
  source 1..29: mol_type = other DNA
aaaacgaatgatttcgactcattaaatta

SEQ ID NO: 14485 - DNA, 32 bp, synthetic construct
  misc_feature 1..32: note = Probe
  source 1..32: mol_type = other DNA
aaaacgaatgatttcgactcattaaattatga

SEQ ID NO: 14486 - DNA, 42 bp, synthetic construct
  misc_feature 1..42: note = Probe
  source 1..42: mol_type = other DNA
aaaacgaatgatttcgactcattaaattatgataatcatatt

SEQ ID NO: 14487 - DNA, 44 bp, synthetic construct
  misc_feature 1..44: note = Probe
  source 1..44: mol_type = other DNA
aaaacgaatgatttcgactcattaaattatgataatcatattta

SEQ ID NO: 14488 - DNA, 46 bp, synthetic construct; identical to SEQ ID NO: 1816
  misc_feature 1..46: note = Probe
  source 1..46: mol_type = other DNA

SEQ ID NO: 14489 - DNA, 49 bp, synthetic construct; identical to SEQ ID NO: 1817
  misc_feature 1..49: note = Probe
  source 1..49: mol_type = other DNA

SEQ ID NO: 14490 - DNA, 50 bp, synthetic construct; identical to SEQ ID NO: 1818
  misc_feature 1..50: note = Probe
  source 1..50: mol_type = other DNA

SEQ ID NO: 14491 - DNA, 22 bp, synthetic construct
  misc_feature 1..22: note = Probe
  source 1..22: mol_type = other DNA
aaaacttaaaactttacagtca

SEQ ID NO: 14492 - DNA, 29 bp, synthetic construct
  misc_feature 1..29: note = Probe
  source 1..29: mol_type = other DNA
aaaacttaaaactttacagtcagaggttc

SEQ ID NO: 14493 - DNA, 30 bp, synthetic construct; identical to SEQ ID NO: 1821
  misc_feature 1..30: note = Probe
  source 1..30: mol_type = other DNA

SEQ ID NO: 14494 - DNA, 39 bp, synthetic construct; identical to SEQ ID NO: 6
  misc_feature 1..39: note = Probe
  source 1..39: mol_type = other DNA

SEQ ID NO: 14495 - DNA, 40 bp, synthetic construct; identical to SEQ ID NO: 7
  misc_feature 1..40: note = Probe
  source 1..40: mol_type = other DNA

SEQ ID NO: 14496 - DNA, 41 bp, synthetic construct; identical to SEQ ID NO: 1823
  misc_feature 1..41: note = Probe
  source 1..41: mol_type = other DNA

SEQ ID NO: 14497 - DNA, 42 bp, synthetic construct; identical to SEQ ID NO: 1824
  misc_feature 1..42: note = Probe
  source 1..42: mol_type = other DNA

SEQ ID NO: 14498 - DNA, 43 bp, synthetic construct; identical to SEQ ID NO: 1825
  misc_feature 1..43: note = Probe
  source 1..43: mol_type = other DNA

SEQ ID NO: 14499 - DNA, 44 bp, synthetic construct; identical to SEQ ID NO: 1826
  misc_feature 1..44: note = Probe
  source 1..44: mol_type = other DNA

SEQ ID NO: 14500 - DNA, 45 bp, synthetic construct; identical to SEQ ID NO: 1827
  misc_feature 1..45: note = Probe
  source 1..45: mol_type = other DNA

SEQ ID NO: 14501 - DNA, 50 bp, synthetic construct; identical to SEQ ID NO: 1830
  misc_feature 1..50: note = Probe
  source 1..50: mol_type = other DNA

SEQ ID NO: 14502 - DNA, 22 bp, synthetic construct
  misc_feature 1..22: note = Probe
  source 1..22: mol_type = other DNA
aaaactttacagtcagaggttc

SEQ ID NO: 14503 - DNA, 33 bp, synthetic construct; identical to SEQ ID NO: 9
  misc_feature 1..33: note = Probe
  source 1..33: mol_type = other DNA

SEQ ID NO: 14504 - DNA, 34 bp, synthetic construct; identical to SEQ ID NO: 1831
  misc_feature 1..34: note = Probe
  source 1..34: mol_type = other DNA

SEQ ID NO: 14505 - DNA, 36 bp, synthetic construct
  misc_feature 1..36: note = Probe
  source 1..36: mol_type = other DNA
aaaactttacagtcagaggttcaattcctcttctta

SEQ ID NO: 14506 - DNA, 38 bp, synthetic construct; identical to SEQ ID NO: 1833
  misc_feature 1..38: note = Probe
  source 1..38: mol_type = other DNA

SEQ ID NO: 14507 - DNA, 41 bp, synthetic construct; identical to SEQ ID NO: 1836
  misc_feature 1..41: note = Probe
  source 1..41: mol_type = other DNA

SEQ ID NO: 14508 - DNA, 42 bp, synthetic construct; identical to SEQ ID NO: 1837
  misc_feature 1..42: note = Probe
  source 1..42: mol_type = other DNA

SEQ ID NO: 14509 - DNA, 38 bp, synthetic construct
  misc_feature 1..38: note = Probe
  source 1..38: mol_type = other DNA
aaaatgtttagacgggctcacatcaccccataaacaaa

SEQ ID NO: 14510 - DNA, 39 bp, synthetic construct; identical to SEQ ID NO: 1841
  misc_feature 1..39: note = Probe
  source 1..39: mol_type = other DNA

SEQ ID NO: 14511 - DNA, 40 bp, synthetic construct; identical to SEQ ID NO: 1842
  misc_feature 1..40: note = Probe
  source 1..40: mol_type = other DNA

SEQ ID NO: 14512 - DNA, 41 bp, synthetic construct
  misc_feature 1..41: note = Probe
  source 1..41: mol_type = other DNA
aaaatgtttagacgggctcacatcaccccataaacaaatag

SEQ ID NO: 14513 - DNA, 24 bp, synthetic construct
  misc_feature 1..24: note = Probe
  source 1..24: mol_type = other DNA
aaaattttggtgcaactccaaata

SEQ ID NO: 14514 - DNA, 30 bp, synthetic construct
  misc_feature 1..30: note = Probe
  source 1..30: mol_type = other DNA
aaaattttggtgcaactccaaataaaagta

SEQ ID NO: 14515 - DNA, 30 bp, synthetic construct
  misc_feature 1..30: note = Probe
  source 1..30: mol_type = other DNA
aaacaaaacgaatgatttcgactcattaaa

SEQ ID NO: 14516 - DNA, 31 bp, synthetic construct
  misc_feature 1..31: note = Probe
  source 1..31: mol_type = other DNA
aaacaaaacgaatgatttcgactcattaaat

SEQ ID NO: 14517 - DNA, 50 bp, synthetic construct; identical to SEQ ID NO: 1846
  misc_feature 1..50: note = Probe
  source 1..50: mol_type = other DNA

SEQ ID NO: 14518 - DNA, 40 bp, synthetic construct; identical to SEQ ID NO: 1847
  misc_feature 1..40: note = Probe
  source 1..40: mol_type = other DNA

SEQ ID NO: 14519 - DNA, 24 bp, synthetic construct
  misc_feature 1..24: note = Probe
  source 1..24: mol_type = other DNA
aaacatcagattgtgaatctgaca

SEQ ID NO: 14520 - DNA, 26 bp, synthetic construct
  misc_feature 1..26: note = Probe
  source 1..26: mol_type = other DNA
aaacatcagattgtgaatctgacaac

SEQ ID NO: 14521 - DNA, 27 bp, synthetic construct
  misc_feature 1..27: note = Probe
  source 1..27: mol_type = other DNA
aaacatcagattgtgaatctgacaaca

SEQ ID NO: 14522 - DNA, 28 bp, synthetic construct
  misc_feature 1..28: note = Probe
  source 1..28: mol_type = other DNA
aaacatcagattgtgaatctgacaacag

SEQ ID NO: 14523 - DNA, 29 bp, synthetic construct
  misc_feature 1..29: note = Probe
  source 1..29: mol_type = other DNA
aaacatcagattgtgaatctgacaacaga

SEQ ID NO: 14524 - DNA, 30 bp, synthetic construct; identical to SEQ ID NO: 8867
  misc_feature 1..30: note = Probe
  source 1..30: mol_type = other DNA

SEQ ID NO: 14525 - DNA, 37 bp, synthetic construct
  misc_feature 1..37: note = Probe
  source 1..37: mol_type = other DNA
aaacatcagattgtgaatctgacaacagaggcttacg

SEQ ID NO: 14526 - DNA, 38 bp, synthetic construct
  misc_feature 1..38: note = Probe
  source 1..38: mol_type = other DNA
aaacatcagattgtgaatctgacaacagaggcttacga

SEQ ID NO: 14527 - DNA, 42 bp, synthetic construct
  misc_feature 1..42: note = Probe
  source 1..42: mol_type = other DNA
aaacatcagattgtgaatctgacaacagaggcttacgacccc

SEQ ID NO: 14528 - DNA, 45 bp, synthetic construct; identical to SEQ ID NO: 13
  misc_feature 1..45: note = Probe
  source 1..45: mol_type = other DNA

SEQ ID NO: 14529 - DNA, 40 bp, synthetic construct
  misc_feature 1..40: note = Probe
  source 1..40: mol_type = other DNA
aaaccaggggtcgcgagttcaaatctcgctggggcctcgg

SEQ ID NO: 14530 - DNA, 40 bp, synthetic construct; identical to SEQ ID NO: 1854
  misc_feature 1..40: note = Probe
  source 1..40: mol_type = other DNA

SEQ ID NO: 14531 - DNA, 16 bp, synthetic construct
  misc_feature 1..16: note = Probe
  source 1..16: mol_type = other DNA
aaaccatttcataact

SEQ ID NO: 14532 - DNA, 20 bp, synthetic construct
  misc_feature 1..20: note = Probe
  source 1..20: mol_type = other DNA
aaaccatttcataactttgt

SEQ ID NO: 14533 - DNA, 21 bp, synthetic construct
  misc_feature 1..21: note = Probe
  source 1..21: mol_type = other DNA
aaaccatttcataactttgtc

SEQ ID NO: 14534 - DNA, 24 bp, synthetic construct
  misc_feature 1..24: note = Probe
  source 1..24: mol_type = other DNA
aaaccatttcataactttgtcaaa

SEQ ID NO: 14535 - DNA, 25 bp, synthetic construct
  misc_feature 1..25: note = Probe
  source 1..25: mol_type = other DNA
aaaccatttcataactttgtcaaag

SEQ ID NO: 14536 - DNA, 26 bp, synthetic construct
  misc_feature 1..26: note = Probe
  source 1..26: mol_type = other DNA
aaaccatttcataactttgtcaaagt

SEQ ID NO: 14537 - DNA, 50 bp, synthetic construct; identical to SEQ ID NO: 1871
  misc_feature 1..50: note = Probe
  source 1..50: mol_type = other DNA

SEQ ID NO: 14538 - DNA, 15 bp, synthetic construct
  misc_feature 1..15: note = Probe
  source 1..15: mol_type = other DNA
aaacccactccacct

SEQ ID NO: 14539 - DNA, 17 bp, synthetic construct
  misc_feature 1..17: note = Probe
  source 1..17: mol_type = other DNA
aaacccccttatttcta

SEQ ID NO: 14540 - DNA, 20 bp, synthetic construct
  misc_feature 1..20: note = Probe
  source 1..20: mol_type = other DNA
aaacccccttatttctagga

SEQ ID NO: 14541 - DNA, 35 bp, synthetic construct; identical to SEQ ID NO: 1876
  misc_feature 1..35: note = Probe
  source 1..35: mol_type = other DNA

SEQ ID NO: 14542 - DNA, 19 bp, synthetic construct
  misc_feature 1..19: note = Probe
  source 1..19: mol_type = other DNA
aaaccgggcggaaacacct

SEQ ID NO: 14543 - DNA, 17 bp, synthetic construct
  misc_feature 1..17: note = Probe
  source 1..17: mol_type = other DNA
aaacctagccccaaacc

SEQ ID NO: 14544 - DNA, 18 bp, synthetic construct
  misc_feature 1..18: note = Probe
  source 1..18: mol_type = other DNA
aaacctagccccaaaccc

SEQ ID NO: 14545 - DNA, 19 bp, synthetic construct
  misc_feature 1..19: note = Probe
  source 1..19: mol_type = other DNA
aaacctagccccaaaccca

SEQ ID NO: 14546 - DNA, 24 bp, synthetic construct
  misc_feature 1..24: note = Probe
  source 1..24: mol_type = other DNA
aaacctagccccaaacccactcca

SEQ ID NO: 14547 - DNA, 26 bp, synthetic construct
  misc_feature 1..26: note = Probe
  source 1..26: mol_type = other DNA
aaacctagccccaaacccactccacc

SEQ ID NO: 14548 - DNA, 27 bp, synthetic construct
  misc_feature 1..27: note = Probe
  source 1..27: mol_type = other DNA
aaacctagccccaaacccactccacct

SEQ ID NO: 14549 - DNA, 19 bp, synthetic construct
  misc_feature 1..19: note = Probe
  source 1..19: mol_type = other DNA
aaacgaatgatttcgactc

SEQ ID NO: 14550 - DNA, 20 bp, synthetic construct
  misc_feature 1..20: note = Probe
  source 1..20: mol_type = other DNA
aaacgaatgatttcgactca

SEQ ID NO: 14551 - DNA, 33 bp, synthetic construct
  misc_feature 1..33: note = Probe
  source 1..33: mol_type = other DNA
aaacgaatgatttcgactcattaaattatgata

SEQ ID NO: 14552 - DNA, 45 bp, synthetic construct; identical to SEQ ID NO: 1883
  misc_feature 1..45: note = Probe
  source 1..45: mol_type = other DNA

SEQ ID NO: 14553 - DNA, 46 bp, synthetic construct
  misc_feature 1..46: note = Probe
  source 1..46: mol_type = other DNA
aaacgaatgatttcgactcattaaattatgataatcatatttacca

SEQ ID NO: 14554 - DNA, 49 bp, synthetic construct; identical to SEQ ID NO: 1884
  misc_feature 1..49: note = Probe
  source 1..49: mol_type = other DNA

SEQ ID NO: 14555 - DNA, 50 bp, synthetic construct; identical to SEQ ID NO: 1885
  misc_feature 1..50: note = Probe
  source 1..50: mol_type = other DNA

SEQ ID NO: 14556 - DNA, 25 bp, synthetic construct
  misc_feature 1..25: note = Probe
  source 1..25: mol_type = other DNA
aaactactttcttgattcaggtgtt

SEQ ID NO: 14557 - DNA, 31 bp, synthetic construct
  misc_feature 1..31: note = Probe
  source 1..31: mol_type = other DNA
aaacttaaaactttacagtcagaggttcaat

SEQ ID NO: 14558 - DNA, 39 bp, synthetic construct; identical to SEQ ID NO: 16
  misc_feature 1..39: note = Probe
  source 1..39: mol_type = other DNA

SEQ ID NO: 14559 - DNA, 40 bp, synthetic construct; identical to SEQ ID NO: 1886
  misc_feature 1..40: note = Probe
  source 1..40: mol_type = other DNA

SEQ ID NO: 14560 - DNA, 41 bp, synthetic construct; identical to SEQ ID NO: 1887
  misc_feature 1..41: note = Probe
  source 1..41: mol_type = other DNA

SEQ ID NO: 14561 - DNA, 50 bp, synthetic construct; identical to SEQ ID NO: 1890
  misc_feature 1..50: note = Probe
  source 1..50: mol_type = other DNA

SEQ ID NO: 14562 - DNA, 32 bp, synthetic construct; identical to SEQ ID NO: 17
  misc_feature 1..32: note = Probe
  source 1..32: mol_type = other DNA

SEQ ID NO: 14563 - DNA, 33 bp, synthetic construct; identical to SEQ ID NO: 1892
  misc_feature 1..33: note = Probe
  source 1..33: mol_type = other DNA

SEQ ID NO: 14564 - DNA, 34 bp, synthetic construct; identical to SEQ ID NO: 1893
  misc_feature 1..34: note = Probe
  source 1..34: mol_type = other DNA

SEQ ID NO: 14565 - DNA, 38 bp, synthetic construct; identical to SEQ ID NO: 1895
  misc_feature 1..38: note = Probe
  source 1..38: mol_type = other DNA

SEQ ID NO: 14566 - DNA, 39 bp, synthetic construct; identical to SEQ ID NO: 1896
  misc_feature 1..39: note = Probe
  source 1..39: mol_type = other DNA

SEQ ID NO: 14567 - DNA, 40 bp, synthetic construct; identical to SEQ ID NO: 1897
  misc_feature 1..40: note = Probe
  source 1..40: mol_type = other DNA

SEQ ID NO: 14568 - DNA, 41 bp, synthetic construct; identical to SEQ ID NO: 1898
  misc_feature 1..41: note = Probe
  source 1..41: mol_type = other DNA

SEQ ID NO: 14569 - DNA, 36 bp, synthetic construct
  misc_feature 1..36: note = Probe
  source 1..36: mol_type = other DNA
aaagaacagagaatagtttaaattagaatcttagct

SEQ ID NO: 14570 - DNA, 16 bp, synthetic construct
  misc_feature 1..16: note = Probe
  source 1..16: mol_type = other DNA
aaagacaccccccaca

SEQ ID NO: 14571 - DNA, 17 bp, synthetic construct
  misc_feature 1..17: note = Probe
  source 1..17: mol_type = other DNA
aaagacaccccccacag

SEQ ID NO: 14572 - DNA, 19 bp, synthetic construct
  misc_feature 1..19: note = Probe
  source 1..19: mol_type = other DNA
aaagacaccccccacagtt

SEQ ID NO: 14573 - DNA, 20 bp, synthetic construct
  misc_feature 1..20: note = Probe
  source 1..20: mol_type = other DNA
aaagacaccccccacagttt

SEQ ID NO: 14574 - DNA, 21 bp, synthetic construct
  misc_feature 1..21: note = Probe
  source 1..21: mol_type = other DNA
aaagacaccccccacagttta

SEQ ID NO: 14575 - DNA, 23 bp, synthetic construct
  misc_feature 1..23: note = Probe
  source 1..23: mol_type = other DNA
aaagacaccccccacagtttatg

SEQ ID NO: 14576 - DNA, 24 bp, synthetic construct
  misc_feature 1..24: note = Probe
  source 1..24: mol_type = other DNA
aaagacaccccccacagtttatgt

SEQ ID NO: 14577 - DNA, 25 bp, synthetic construct
  misc_feature 1..25: note = Probe
  source 1..25: mol_type = other DNA
aaagacaccccccacagtttatgta

SEQ ID NO: 14578 - DNA, 26 bp, synthetic construct
  misc_feature 1..26: note = Probe
  source 1..26: mol_type = other DNA
aaagacaccccccacagtttatgtag

SEQ ID NO: 14579 - DNA, 27 bp, synthetic construct
  misc_feature 1..27: note = Probe
  source 1..27: mol_type = other DNA
aaagacaccccccacagtttatgtagc

SEQ ID NO: 14580 - DNA, 28 bp, synthetic construct
  misc_feature 1..28: note = Probe
  source 1..28: mol_type = other DNA
aaagacaccccccacagtttatgtagct

SEQ ID NO: 14581 - DNA, 29 bp, synthetic construct
  misc_feature 1..29: note = Probe
  source 1..29: mol_type = other DNA
aaagacaccccccacagtttatgtagctt

SEQ ID NO: 14582 - DNA, 30 bp, synthetic construct; identical to SEQ ID NO: 1907
  misc_feature 1..30: note = Probe
  source 1..30: mol_type = other DNA

SEQ ID NO: 14583 - DNA, 31 bp, synthetic construct
  misc_feature 1..31: note = Probe
  source 1..31: mol_type = other DNA
aaagacaccccccacagtttatgtagcttac

SEQ ID NO: 14584 - DNA, 32 bp, synthetic construct; identical to SEQ ID NO: 1908
  misc_feature 1..32: note = Probe
  source 1..32: mol_type = other DNA

SEQ ID NO: 14585 - DNA, 33 bp, synthetic construct; identical to SEQ ID NO: 1909
  misc_feature 1..33: note = Probe
  source 1..33: mol_type = other DNA

SEQ ID NO: 14586 - DNA, 34 bp, synthetic construct
  misc_feature 1..34: note = Probe
  source 1..34: mol_type = other DNA
aaagacaccccccacagtttatgtagcttacctc

SEQ ID NO: 14587 - DNA, 35 bp, synthetic construct; identical to SEQ ID NO: 1910
  misc_feature 1..35: note = Probe
  source 1..35: mol_type = other DNA

SEQ ID NO: 14588 - DNA, 36 bp, synthetic construct; identical to SEQ ID NO: 1911
  misc_feature 1..36: note = Probe
  source 1..36: mol_type = other DNA

SEQ ID NO: 14589 - DNA, 37 bp, synthetic construct; identical to SEQ ID NO: 1912
  misc_feature 1..37: note = Probe
  source 1..37: mol_type = other DNA

SEQ ID NO: 14590 - DNA, 38 bp, synthetic construct; identical to SEQ ID NO: 1913
  misc_feature 1..38: note = Probe
  source 1..38: mol_type = other DNA

SEQ ID NO: 14591 - DNA, 39 bp, synthetic construct; identical to SEQ ID NO: 1914
  misc_feature 1..39: note = Probe
  source 1..39: mol_type = other DNA

SEQ ID NO: 14592 - DNA, 40 bp, synthetic construct
  misc_feature 1..40: note = Probe
  source 1..40: mol_type = other DNA
aaagacaccccccacagtttatgtagcttacctcctcaaa

SEQ ID NO: 14593 - DNA, 41 bp, synthetic construct
  misc_feature 1..41: note = Probe
  source 1..41: mol_type = other DNA
aaagacaccccccacagtttatgtagcttacctcctcaaag

SEQ ID NO: 14594 - DNA, 43 bp, synthetic construct; identical to SEQ ID NO: 1915
  misc_feature 1..43: note = Probe
  source 1..43: mol_type = other DNA

SEQ ID NO: 14595 - DNA, 44 bp, synthetic construct
  misc_feature 1..44: note = Probe
  source 1..44: mol_type = other DNA
aaagacaccccccacagtttatgtagcttacctcctcaaagcaa

SEQ ID NO: 14596 - DNA, 50 bp, synthetic construct; identical to SEQ ID NO: 1918
  misc_feature 1..50: note = Probe
  source 1..50: mol_type = other DNA

SEQ ID NO: 14597 - DNA, 23 bp, synthetic construct
  misc_feature 1..23: note = Probe
  source 1..23: mol_type = other DNA
aaagacaggggttaggcctcttt

SEQ ID NO: 14598 - DNA, 24 bp, synthetic construct
  misc_feature 1..24: note = Probe
  source 1..24: mol_type = other DNA
aaagacaggggttaggcctctttt

SEQ ID NO: 14599 - DNA, 25 bp, synthetic construct
  misc_feature 1..25: note = Probe
  source 1..25: mol_type = other DNA
aaagacaggggttaggcctcttttt

SEQ ID NO: 14600 - DNA, 26 bp, synthetic construct
  misc_feature 1..26: note = Probe
  source 1..26: mol_type = other DNA
aaagacaggggttaggcctcttttta

SEQ ID NO: 14601 - DNA, 29 bp, synthetic construct
  misc_feature 1..29: note = Probe
  source 1..29: mol_type = other DNA
aaagacaggggttaggcctctttttacca

SEQ ID NO: 14602 - DNA, 30 bp, synthetic construct
  misc_feature 1..30: note = Probe
  source 1..30: mol_type = other DNA
aaagacaggggttaggcctctttttaccag

SEQ ID NO: 14603 - DNA, 31 bp, synthetic construct; identical to SEQ ID NO: 1924
  misc_feature 1..31: note = Probe
  source 1..31: mol_type = other DNA

SEQ ID NO: 14604 - DNA, 32 bp, synthetic construct; identical to SEQ ID NO: 1925
  misc_feature 1..32: note = Probe
  source 1..32: mol_type = other DNA

SEQ ID NO: 14605 - DNA, 50 bp, synthetic construct
  misc_feature 1..50: note = Probe
  source 1..50: mol_type = other DNA
aaagagttactttgatagagtaaataataggagcttaaacccccttattt

SEQ ID NO: 14606 - DNA, 30 bp, synthetic construct
  misc_feature 1..30: note = Probe
  source 1..30: mol_type = other DNA
aaagattaagagaaccaacacctctttaca

SEQ ID NO: 14607 - DNA, 32 bp, synthetic construct
  misc_feature 1..32: note = Probe
  source 1..32: mol_type = other DNA
aaagattaagagaaccaacacctctttacagt

SEQ ID NO: 14608 - DNA, 33 bp, synthetic construct; identical to SEQ ID NO: 1926
  misc_feature 1..33: note = Probe
  source 1..33: mol_type = other DNA

SEQ ID NO: 14609 - DNA, 34 bp, synthetic construct; identical to SEQ ID NO: 1927
  misc_feature 1..34: note = Probe
  source 1..34: mol_type = other DNA

SEQ ID NO: 14610 - DNA, 35 bp, synthetic construct; identical to SEQ ID NO: 1928
  misc_feature 1..35: note = Probe
  source 1..35: mol_type = other DNA

SEQ ID NO: 14611 - DNA, 36 bp, synthetic construct; identical to SEQ ID NO: 1929
  misc_feature 1..36: note = Probe
  source 1..36: mol_type = other DNA

SEQ ID NO: 14612 - DNA, 37 bp, synthetic construct; identical to SEQ ID NO: 1930
  misc_feature 1..37: note = Probe
  source 1..37: mol_type = other DNA

SEQ ID NO: 14613 - DNA, 16 bp, synthetic construct
  misc_feature 1..16: note = Probe
  source 1..16: mol_type = other DNA
aaagcaatacactgaa

SEQ ID NO: 14614 - DNA, 29 bp, synthetic construct
  misc_feature 1..29: note = Probe
  source 1..29: mol_type = other DNA
aaagcaatacactgaaaatgtttagacgg

SEQ ID NO: 14615 - DNA, 32 bp, synthetic construct; identical to SEQ ID NO: 1934
  misc_feature 1..32: note = Probe
  source 1..32: mol_type = other DNA

SEQ ID NO: 14616 - DNA, 34 bp, synthetic construct; identical to SEQ ID NO: 20
  misc_feature 1..34: note = Probe
  source 1..34: mol_type = other DNA

SEQ ID NO: 14617 - DNA, 16 bp, synthetic construct
  misc_feature 1..16: note = Probe
  source 1..16: mol_type = other DNA
aaagcacccaacttac

SEQ ID NO: 14618 - DNA, 17 bp, synthetic construct
  misc_feature 1..17: note = Probe
  source 1..17: mol_type = other DNA
aaagcacccaacttaca

SEQ ID NO: 14619 - DNA, 20 bp, synthetic construct
  misc_feature 1..20: note = Probe
  source 1..20: mol_type = other DNA
aaagcacccaacttacactt

SEQ ID NO: 14620 - DNA, 24 bp, synthetic construct
  misc_feature 1..24: note = Probe
  source 1..24: mol_type = other DNA
aaagcacccaacttacacttagga

SEQ ID NO: 14621 - DNA, 26 bp, synthetic construct
  misc_feature 1..26: note = Probe
  source 1..26: mol_type = other DNA
aaagcacccaacttacacttaggaga

SEQ ID NO: 14622 - DNA, 27 bp, synthetic construct
  misc_feature 1..27: note = Probe
  source 1..27: mol_type = other DNA
aaagcacccaacttacacttaggagat

SEQ ID NO: 14623 - DNA, 28 bp, synthetic construct
  misc_feature 1..28: note = Probe
  source 1..28: mol_type = other DNA
aaagcacccaacttacacttaggagatt

SEQ ID NO: 14624 - DNA, 29 bp, synthetic construct
  misc_feature 1..29: note = Probe
  source 1..29: mol_type = other DNA
aaagcacccaacttacacttaggagattt

SEQ ID NO: 14625 - DNA, 30 bp, synthetic construct; identical to SEQ ID NO: 1953
  misc_feature 1..30: note = Probe
  source 1..30: mol_type = other DNA

SEQ ID NO: 14626 - DNA, 31 bp, synthetic construct; identical to SEQ ID NO: 1954
  misc_feature 1..31: note = Probe
  source 1..31: mol_type = other DNA

SEQ ID NO: 14627 - DNA, 33 bp, synthetic construct; identical to SEQ ID NO: 1955
  misc_feature 1..33: note = Probe
  source 1..33: mol_type = other DNA

SEQ ID NO: 14628 - DNA, 36 bp, synthetic construct
  misc_feature 1..36: note = Probe
  source 1..36: mol_type = other DNA
aaagcacccaacttacacttaggagatttcaactta

SEQ ID NO: 14629 - DNA, 50 bp, synthetic construct; identical to SEQ ID NO: 1962
  misc_feature 1..50: note = Probe
  source 1..50: mol_type = other DNA

SEQ ID NO: 14630 - DNA, 17 bp, synthetic construct
  misc_feature 1..17: note = Probe
  source 1..17: mol_type = other DNA
aaagctcacaagaactg

SEQ ID NO: 14631 - DNA, 23 bp, synthetic construct
  misc_feature 1..23: note = Probe
  source 1..23: mol_type = other DNA
aaagctcacaagaactgctaact

SEQ ID NO: 14632 - DNA, 24 bp, synthetic construct
  misc_feature 1..24: note = Probe
  source 1..24: mol_type = other DNA
aaagctcacaagaactgctaactc

SEQ ID NO: 14633 - DNA, 25 bp, synthetic construct
  misc_feature 1..25: note = Probe
  source 1..25: mol_type = other DNA
aaagctcacaagaactgctaactca

SEQ ID NO: 14634 - DNA, 27 bp, synthetic construct
  misc_feature 1..27: note = Probe
  source 1..27: mol_type = other DNA
aaagctcacaagaactgctaactcatg

SEQ ID NO: 14635 - DNA, 50 bp, synthetic construct; identical to SEQ ID NO: 32
  misc_feature 1..50: note = Probe
  source 1..50: mol_type = other DNA

SEQ ID NO: 14636 - DNA, 30 bp, synthetic construct
  misc_feature 1..30: note = Probe
  source 1..30: mol_type = other DNA
aaaggtccccggttcgaaaccgggcggaaa

SEQ ID NO: 14637 - DNA, 32 bp, synthetic construct
  misc_feature 1..32: note = Probe
  source 1..32: mol_type = other DNA
aaaggtccccggttcgaaaccgggcggaaaca

SEQ ID NO: 14638 - DNA, 35 bp, synthetic construct
  misc_feature 1..35: note = Probe
  source 1..35: mol_type = other DNA
aaaggtccccggttcgaaaccgggcggaaacacct

SEQ ID NO: 14639 - DNA, 35 bp, synthetic construct
  misc_feature 1..35: note = Probe
  source 1..35: mol_type = other DNA
aaaggtccccggttcgatcccgggcggaaacaggt

SEQ ID NO: 14640 - DNA, 30 bp, synthetic construct
  misc_feature 1..30: note = Probe
  source 1..30: mol_type = other DNA
aaaggtccctggttcgatcccgggtttcgg

SEQ ID NO: 14641 - DNA, 32 bp, synthetic construct
  misc_feature 1..32: note = Probe
  source 1..32: mol_type = other DNA
aaaggtccctggttcgatcccgggtttcggca

SEQ ID NO: 14642 - DNA, 35 bp, synthetic construct
  misc_feature 1..35: note = Probe
  source 1..35: mol_type = other DNA
aaaggtccctggttcgatcccgggtttcggcactt

SEQ ID NO: 14643 - DNA, 30 bp, synthetic construct
  misc_feature 1..30: note = Probe
  source 1..30: mol_type = other DNA
aaaggttccgggttcgagtcccggcggagt

SEQ ID NO: 14644 - DNA, 32 bp, synthetic construct
  misc_feature 1..32: note = Probe
  source 1..32: mol_type = other DNA
aaaggttggtggttcgagcccacccagggacg

SEQ ID NO: 14645 - DNA, 34 bp, synthetic construct
  misc_feature 1..34: note = Probe
  source 1..34: mol_type = other DNA
aaaggttggtggttcgagcccacccagggacgcc

SEQ ID NO: 14646 - DNA, 35 bp, synthetic construct
  misc_feature 1..35: note = Probe
  source 1..35: mol_type = other DNA
aaaggttggtggttcgagcccacccagggacgcct

SEQ ID NO: 14647 - DNA, 30 bp, synthetic construct
  misc_feature 1..30: note = Probe
  source 1..30: mol_type = other DNA
aaaggttggtggttcgatcccacccaggga

SEQ ID NO: 14648 - DNA, 34 bp, synthetic construct
  misc_feature 1..34: note = Probe
  source 1..34: mol_type = other DNA
aaagtaaggtcagctaaataagctatcgggccca

SEQ ID NO: 14649 - DNA, 36 bp, synthetic construct
  misc_feature 1..36: note = Probe
  source 1..36: mol_type = other DNA
aaagtaaggtcagctaaataagctatcgggcccata

SEQ ID NO: 14650 - DNA, 37 bp, synthetic construct
  misc_feature 1..37: note = Probe
  source 1..37: mol_type = other DNA
aaagtaaggtcagctaaataagctatcgggcccatac

SEQ ID NO: 14651 - DNA, 36 bp, synthetic construct
  misc_feature 1..36: note = Probe
  source 1..36: mol_type = other DNA
aaagtggggtttccgtagtgtagtggttatcacgtt

SEQ ID NO: 14652 - DNA, 30 bp, synthetic construct; identical to SEQ ID NO: 1972
  misc_feature 1..30: note = Probe
  source 1..30: mol_type = other DNA

SEQ ID NO: 14653 - DNA, 33 bp, synthetic construct
  misc_feature 1..33: note = Probe
  source 1..33: mol_type = other DNA
aaagttaaattataggctaaatcctatatatct

SEQ ID NO: 14654 - DNA, 19 bp, synthetic construct
  misc_feature 1..19: note = Probe
  source 1..19: mol_type = other DNA
aaataagctatcgggccca

SEQ ID NO: 14655 - DNA, 20 bp, synthetic construct
  misc_feature 1..20: note = Probe
  source 1..20: mol_type = other DNA
aaataagctatcgggcccat

SEQ ID NO: 14656 - DNA, 21 bp, synthetic construct
  misc_feature 1..21: note = Probe
  source 1..21: mol_type = other DNA
aaataagctatcgggcccata

SEQ ID NO: 14657 - DNA, 22 bp, synthetic construct
  misc_feature 1..22: note = Probe
  source 1..22: mol_type = other DNA
aaataagctatcgggcccatac

SEQ ID NO: 14658 - DNA, 24 bp, synthetic construct
  misc_feature 1..24: note = Probe
  source 1..24: mol_type = other DNA
aaataagctatcgggcccataccc

SEQ ID NO: 14659 - DNA, 25 bp, synthetic construct
  misc_feature 1..25: note = Probe
  source 1..25: mol_type = other DNA
aaataagctatcgggcccatacccc

SEQ ID NO: 14660 - DNA, 26 bp, synthetic construct
  misc_feature 1..26: note = Probe
  source 1..26: mol_type = other DNA
aaataagctatcgggcccataccccg

SEQ ID NO: 14661 - DNA, 27 bp, synthetic construct
  misc_feature 1..27: note = Probe
  source 1..27: mol_type = other DNA
aaataagctatcgggcccataccccga

SEQ ID NO: 14662 - DNA, 29 bp, synthetic construct
  misc_feature 1..29: note = Probe
  source 1..29: mol_type = other DNA
aaataagctatcgggcccataccccgaaa

SEQ ID NO: 14663 - DNA, 30 bp, synthetic construct; identical to SEQ ID NO: 1982
  misc_feature 1..30: note = Probe
  source 1..30: mol_type = other DNA

SEQ ID NO: 14664 - DNA, 31 bp, synthetic construct; identical to SEQ ID NO: 1983
  misc_feature 1..31: note = Probe
  source 1..31: mol_type = other DNA

SEQ ID NO: 14665 - DNA, 32 bp, synthetic construct; identical to SEQ ID NO: 1984
  misc_feature 1..32: note = Probe
  source 1..32: mol_type = other DNA

SEQ ID NO: 14666 - DNA, 33 bp, synthetic construct; identical to SEQ ID NO: 1985
  misc_feature 1..33: note = Probe
  source 1..33: mol_type = other DNA

SEQ ID NO: 14667 - DNA, 34 bp, synthetic construct
  misc_feature 1..34: note = Probe
  source 1..34: mol_type = other DNA
aaataagctatcgggcccataccccgaaaatgtt

SEQ ID NO: 14668 - DNA, 36 bp, synthetic construct; identical to SEQ ID NO: 1986
  misc_feature 1..36: note = Probe
  source 1..36: mol_type = other DNA

SEQ ID NO: 14669 - DNA, 37 bp, synthetic construct
  misc_feature 1..37: note = Probe
  source 1..37: mol_type = other DNA
aaataagctatcgggcccataccccgaaaatgttggt

SEQ ID NO: 14670 - DNA, 38 bp, synthetic construct
  misc_feature 1..38: note = Probe
  source 1..38: mol_type = other DNA
aaataagctatcgggcccataccccgaaaatgttggtt

SEQ ID NO: 14671 - DNA, 39 bp, synthetic construct; identical to SEQ ID NO: 1987
  misc_feature 1..39: note = Probe
  source 1..39: mol_type = other DNA

SEQ ID NO: 14672 - DNA, 25 bp, synthetic construct
  misc_feature 1..25: note = Probe
  source 1..25: mol_type = other DNA
aaataagggggtttaagctcctatt

SEQ ID NO: 14673 - DNA, 26 bp, synthetic construct
  misc_feature 1..26: note = Probe
  source 1..26: mol_type = other DNA
aaataagggggtttaagctcctatta

SEQ ID NO: 14674 - DNA, 33 bp, synthetic construct; identical to SEQ ID NO: 1990
  misc_feature 1..33: note = Probe
  source 1..33: mol_type = other DNA

SEQ ID NO: 14675 - DNA, 20 bp, synthetic construct
  misc_feature 1..20: note = Probe
  source 1..20: mol_type = other DNA
aaatcccggacgagccccct

SEQ ID NO: 14676 - DNA, 20 bp, synthetic construct
  misc_feature 1..20: note = Probe
  source 1..20: mol_type = other DNA
aaatccgggtgccccctcaa

SEQ ID NO: 14677 - DNA, 30 bp, synthetic construct; identical to SEQ ID NO: 1996
  misc_feature 1..30: note = Probe
  source 1..30: mol_type = other DNA

SEQ ID NO: 14678 - DNA, 31 bp, synthetic construct; identical to SEQ ID NO: 1997
  misc_feature 1..31: note = Probe
  source 1..31: mol_type = other DNA

SEQ ID NO: 14679 - DNA, 36 bp, synthetic construct; identical to SEQ ID NO: 2000
  misc_feature 1..36: note = Probe
  source 1..36: mol_type = other DNA

SEQ ID NO: 14680 - DNA, 37 bp, synthetic construct; identical to SEQ ID NO: 2001
  misc_feature 1..37: note = Probe
  source 1..37: mol_type = other DNA

SEQ ID NO: 14681 - DNA, 38 bp, synthetic construct; identical to SEQ ID NO: 2002
  misc_feature 1..38: note = Probe
  source 1..38: mol_type = other DNA

SEQ ID NO: 14682 - DNA, 39 bp, synthetic construct; identical to SEQ ID NO: 2003
  misc_feature 1..39: note = Probe
  source 1..39: mol_type = other DNA

SEQ ID NO: 14683 - DNA, 27 bp, synthetic construct
  misc_feature 1..27: note = Probe
  source 1..27: mol_type = other DNA
aaatgttggttatacccttcccgtact

SEQ ID NO: 14684 - DNA, 37 bp, synthetic construct
  misc_feature 1..37: note = Probe
  source 1..37: mol_type = other DNA
aaatgtttagacgggctcacatcaccccataaacaaa

SEQ ID NO: 14685 - DNA, 38 bp, synthetic construct
  misc_feature 1..38: note = Probe
  source 1..38: mol_type = other DNA
aaatgtttagacgggctcacatcaccccataaacaaat

SEQ ID NO: 14686 - DNA, 50 bp, synthetic construct; identical to SEQ ID NO: 36
  misc_feature 1..50: note = Probe
  source 1..50: mol_type = other DNA

SEQ ID NO: 14687 - DNA, 38 bp, synthetic construct; identical to SEQ ID NO: 2008
  misc_feature 1..38: note = Probe
  source 1..38: mol_type = other DNA

SEQ ID NO: 14688 - DNA, 39 bp, synthetic construct; identical to SEQ ID NO: 2009
  misc_feature 1..39: note = Probe
  source 1..39: mol_type = other DNA

SEQ ID NO: 14689 - DNA, 23 bp, synthetic construct
  misc_feature 1..23: note = Probe
  source 1..23: mol_type = other DNA
aaattttggtgcaactccaaata

SEQ ID NO: 14690 - DNA, 49 bp, synthetic construct; identical to SEQ ID NO: 2012
  misc_feature 1..49: note = Probe
  source 1..49: mol_type = other DNA

SEQ ID NO: 14691 - DNA, 50 bp, synthetic construct; identical to SEQ ID NO: 2013
  misc_feature 1..50: note = Probe
  source 1..50: mol_type = other DNA

SEQ ID NO: 14692 - DNA, 20 bp, synthetic construct
  misc_feature 1..20: note = Probe
  source 1..20: mol_type = other DNA
aacaacatggctttctcaac

SEQ ID NO: 14693 - DNA, 21 bp, synthetic construct
  misc_feature 1..21: note = Probe
  source 1..21: mol_type = other DNA
aacaacatggctttctcaact

SEQ ID NO: 14694 - DNA, 16 bp, synthetic construct
  misc_feature 1..16: note = Probe
  source 1..16: mol_type = other DNA
aacacaaagcacccaa

SEQ ID NO: 14695 - DNA, 17 bp, synthetic construct
  misc_feature 1..17: note = Probe
  source 1..17: mol_type = other DNA
aacacaaagcacccaac

SEQ ID NO: 14696 - DNA, 18 bp, synthetic construct
  misc_feature 1..18: note = Probe
  source 1..18: mol_type = other DNA
aacacaaagcacccaact

SEQ ID NO: 14697 - DNA, 20 bp, synthetic construct
  misc_feature 1..20: note = Probe
  source 1..20: mol_type = other DNA
aacacaaagcacccaactta

SEQ ID NO: 14698 - DNA, 22 bp, synthetic construct
  misc_feature 1..22: note = Probe
  source 1..22: mol_type = other DNA
aacacaaagcacccaacttaca

SEQ ID NO: 14699 - DNA, 24 bp, synthetic construct
  misc_feature 1..24: note = Probe
  source 1..24: mol_type = other DNA
aacacaaagcacccaacttacact

SEQ ID NO: 14700 - DNA, 25 bp, synthetic construct
  misc_feature 1..25: note = Probe
  source 1..25: mol_type = other DNA
aacacaaagcacccaacttacactt

SEQ ID NO: 14701 - DNA, 26 bp, synthetic construct
  misc_feature 1..26: note = Probe
  source 1..26: mol_type = other DNA
aacacaaagcacccaacttacactta

SEQ ID NO: 14702 - DNA, 30 bp, synthetic construct; identical to SEQ ID NO: 2027
  misc_feature 1..30: note = Probe
  source 1..30: mol_type = other DNA

SEQ ID NO: 14703 - DNA, 31 bp, synthetic construct; identical to SEQ ID NO: 2028
  misc_feature 1..31: note = Probe
  source 1..31: mol_type = other DNA

SEQ ID NO: 14704 - DNA, 33 bp, synthetic construct; identical to SEQ ID NO: 2030
  misc_feature 1..33: note = Probe
  source 1..33: mol_type = other DNA

SEQ ID NO: 14705 - DNA, 36 bp, synthetic construct; identical to SEQ ID NO: 2031
  misc_feature 1..36: note = Probe
  source 1..36: mol_type = other DNA

SEQ ID NO: 14706 - DNA, 50 bp, synthetic construct; identical to SEQ ID NO: 39
  misc_feature 1..50: note = Probe
  source 1..50: mol_type = other DNA

SEQ ID NO: 14707 - DNA, 16 bp, synthetic construct
  misc_feature 1..16: note = Probe
  source 1..16: mol_type = other DNA
aacacctctttacagt

SEQ ID NO: 14708 - DNA, 17 bp, synthetic construct
  misc_feature 1..17: note = Probe
  source 1..17: mol_type = other DNA
aacacctctttacagtg

SEQ ID NO: 14709 - DNA, 18 bp, synthetic construct
  misc_feature 1..18: note = Probe
  source 1..18: mol_type = other DNA
aacacctctttacagtga

SEQ ID NO: 14710 - DNA, 19 bp, synthetic construct
  misc_feature 1..19: note = Probe
  source 1..19: mol_type = other DNA
aacacctctttacagtgaa

SEQ ID NO: 14711 - DNA, 20 bp, synthetic construct
  misc_feature 1..20: note = Probe
  source 1..20: mol_type = other DNA
aacacctctttacagtgaaa

SEQ ID NO: 14712 - DNA, 21 bp, synthetic construct
  misc_feature 1..21: note = Probe
  source 1..21: mol_type = other DNA
aacacctctttacagtgaaat

SEQ ID NO: 14713 - DNA, 22 bp, synthetic construct
  misc_feature 1..22: note = Probe
  source 1..22: mol_type = other DNA
aacacctctttacagtgaaatg

SEQ ID NO: 14714 - DNA, 21 bp, synthetic construct
  misc_feature 1..21: note = Probe
  source 1..21: mol_type = other DNA
aacacgcgaaaggtccccggt

SEQ ID NO: 14715 - DNA, 29 bp, synthetic construct
  misc_feature 1..29: note = Probe
  source 1..29: mol_type = other DNA
aacagaggcttacgaccccttatttaccg

SEQ ID NO: 14716 - DNA, 31 bp, synthetic construct; identical to SEQ ID NO: 2039
  misc_feature 1..31: note = Probe
  source 1..31: mol_type = other DNA

SEQ ID NO: 14717 - DNA, 33 bp, synthetic construct
  misc_feature 1..33: note = Probe
  source 1..33: mol_type = other DNA
aacagccggctccatagctcaggggttagagca

SEQ ID NO: 14718 - DNA, 34 bp, synthetic construct
  misc_feature 1..34: note = Probe
  source 1..34: mol_type = other DNA
aacagccggctccatagctcaggggttagagcac

SEQ ID NO: 14719 - DNA, 35 bp, synthetic construct
  misc_feature 1..35: note = Probe
  source 1..35: mol_type = other DNA
aacagccggctccatagctcaggggttagagcact

SEQ ID NO: 14720 - DNA, 41 bp, synthetic construct
  misc_feature 1..41: note = Probe
  source 1..41: mol_type = other DNA
aacagccggctccatagctcaggggttagagcactggtctt

SEQ ID NO: 14721 - DNA, 42 bp, synthetic construct
  misc_feature 1..42: note = Probe
  source 1..42: mol_type = other DNA
aacagccggctccatagctcaggggttagagcactggtcttg

SEQ ID NO: 14722 - DNA, 43 bp, synthetic construct
  misc_feature 1..43: note = Probe
  source 1..43: mol_type = other DNA
aacagccggctccatagctcaggggttagagcactggtcttgt

SEQ ID NO: 14723 - DNA, 28 bp, synthetic construct
  misc_feature 1..28: note = Probe
  source 1..28: mol_type = other DNA
aacagcgccgctggtgtagtggtatcat

SEQ ID NO: 14724 - DNA, 29 bp, synthetic construct
  misc_feature 1..29: note = Probe
  source 1..29: mol_type = other DNA
aacagcgccgctggtgtagtggtatcatg

SEQ ID NO: 14725 - DNA, 31 bp, synthetic construct
  misc_feature 1..31: note = Probe
  source 1..31: mol_type = other DNA
aacagcgccgctggtgtagtggtatcatgca

SEQ ID NO: 14726 - DNA, 33 bp, synthetic construct
  misc_feature 1..33: note = Probe
  source 1..33: mol_type = other DNA
aacagcgccgctggtgtagtggtatcatgcaag

SEQ ID NO: 14727 - DNA, 34 bp, synthetic construct
  misc_feature 1..34: note = Probe
  source 1..34: mol_type = other DNA
aacagcgccgctggtgtagtggtatcatgcaaga

SEQ ID NO: 14728 - DNA, 36 bp, synthetic construct
  misc_feature 1..36: note = Probe
  source 1..36: mol_type = other DNA
aacagcgccgctggtgtagtggtatcatgcaagatt

SEQ ID NO: 14729 - DNA, 37 bp, synthetic construct
  misc_feature 1..37: note = Probe
  source 1..37: mol_type = other DNA
aacagcgccgctggtgtagtggtatcatgcaagattc

SEQ ID NO: 14730 - DNA, 17 bp, synthetic construct
  misc_feature 1..17: note = Probe
  source 1..17: mol_type = other DNA
aacagctaaggactgca

SEQ ID NO: 14731 - DNA, 19 bp, synthetic construct
  misc_feature 1..19: note = Probe
  source 1..19: mol_type = other DNA
aacagctaaggactgcaaa

SEQ ID NO: 14732 - DNA, 20 bp, synthetic construct
  misc_feature 1..20: note = Probe
  source 1..20: mol_type = other DNA
aacagctaaggactgcaaaa

SEQ ID NO: 14733 - DNA, 21 bp, synthetic construct
  misc_feature 1..21: note = Probe
  source 1..21: mol_type = other DNA
aacagctaaggactgcaaaac

SEQ ID NO: 14734 - DNA, 22 bp, synthetic construct
  misc_feature 1..22: note = Probe
  source 1..22: mol_type = other DNA
aacagctaaggactgcaaaacc

SEQ ID NO: 14735 - DNA, 23 bp, synthetic construct
  misc_feature 1..23: note = Probe
  source 1..23: mol_type = other DNA
aacagctaaggactgcaaaaccc

SEQ ID NO: 14736 - DNA, 24 bp, synthetic construct
  misc_feature 1..24: note = Probe
  source 1..24: mol_type = other DNA
aacagctaaggactgcaaaacccc

SEQ ID NO: 14737 - DNA, 25 bp, synthetic construct
  misc_feature 1..25: note = Probe
  source 1..25: mol_type = other DNA
aacagctaaggactgcaaaacccca

SEQ ID NO: 14738 - DNA, 26 bp, synthetic construct
  misc_feature 1..26: note = Probe
  source 1..26: mol_type = other DNA
aacagctaaggactgcaaaaccccac

SEQ ID NO: 14739 - DNA, 27 bp, synthetic construct
  misc_feature 1..27: note = Probe
  source 1..27: mol_type = other DNA
aacagctaaggactgcaaaaccccact

SEQ ID NO: 14740 - DNA, 28 bp, synthetic construct
  misc_feature 1..28: note = Probe
  source 1..28: mol_type = other DNA
aacagctaaggactgcaaaaccccactc

SEQ ID NO: 14741 - DNA, 29 bp, synthetic construct
  misc_feature 1..29: note = Probe
  source 1..29: mol_type = other DNA
aacagctaaggactgcaaaaccccactct

SEQ ID NO: 14742 - DNA, 17 bp, synthetic construct
  misc_feature 1..17: note = Probe
  source 1..17: mol_type = other DNA
aacagctatccattggt

SEQ ID NO: 14743 - DNA, 18 bp, synthetic construct
  misc_feature 1..18: note = Probe
  source 1..18: mol_type = other DNA
aacagctatccattggtc

SEQ ID NO: 14744 - DNA, 19 bp, synthetic construct
  misc_feature 1..19: note = Probe
  source 1..19: mol_type = other DNA
aacagctatccattggtct

SEQ ID NO: 14745 - DNA, 33 bp, synthetic construct
  misc_feature 1..33: note = Probe
  source 1..33: mol_type = other DNA
aacaggagatcctgggttcgaatcccagcgggg

SEQ ID NO: 14746 - DNA, 36 bp, synthetic construct
  misc_feature 1..36: note = Probe
  source 1..36: mol_type = other DNA
aacaggagatcctgggttcgaatcccagcggggcct

SEQ ID NO: 14747 - DNA, 39 bp, synthetic construct
  misc_feature 1..39: note = Probe
  source 1..39: mol_type = other DNA
aacaggagatcctgggttcgaatcccagcggggcctgtt

SEQ ID NO: 14748 - DNA, 39 bp, synthetic construct; identical to SEQ ID NO: 2046
  misc_feature 1..39: note = Probe
  source 1..39: mol_type = other DNA

SEQ ID NO: 14749 - DNA, 34 bp, synthetic construct; identical to SEQ ID NO: 2048
  misc_feature 1..34: note = Probe
  source 1..34: mol_type = other DNA

SEQ ID NO: 14750 - DNA, 35 bp, synthetic construct
  misc_feature 1..35: note = Probe
  source 1..35: mol_type = other DNA
aacaggagatcctgggttcgaatcccagcggtgcc

SEQ ID NO: 14751 - DNA, 36 bp, synthetic construct; identical to SEQ ID NO: 2049
  misc_feature 1..36: note = Probe
  source 1..36: mol_type = other DNA

SEQ ID NO: 14752 - DNA, 37 bp, synthetic construct; identical to SEQ ID NO: 2050
  misc_feature 1..37: note = Probe
  source 1..37: mol_type = other DNA

SEQ ID NO: 14753 - DNA, 38 bp, synthetic construct
  misc_feature 1..38: note = Probe
  source 1..38: mol_type = other DNA
aacaggagatcctgggttcgaatcccagcggtgcctcc

SEQ ID NO: 14754 - DNA, 39 bp, synthetic construct; identical to SEQ ID NO: 2051
  misc_feature 1..39: note = Probe
  source 1..39: mol_type = other DNA

SEQ ID NO: 14755 - DNA, 23 bp, synthetic construct
  misc_feature 1..23: note = Probe
  source 1..23: mol_type = other DNA
aacatcagattgtgaatctgaca

SEQ ID NO: 14756 - DNA, 25 bp, synthetic construct
  misc_feature 1..25: note = Probe
  source 1..25: mol_type = other DNA
aacatcagattgtgaatctgacaac

SEQ ID NO: 14757 - DNA, 26 bp, synthetic construct
  misc_feature 1..26: note = Probe
  source 1..26: mol_type = other DNA
aacatcagattgtgaatctgacaaca

SEQ ID NO: 14758 - DNA, 37 bp, synthetic construct
  misc_feature 1..37: note = Probe
  source 1..37: mol_type = other DNA
aacatcagattgtgaatctgacaacagaggcttacga

SEQ ID NO: 14759 - DNA, 41 bp, synthetic construct; identical to SEQ ID NO: 2056
  misc_feature 1..41: note = Probe
  source 1..41: mol_type = other DNA

SEQ ID NO: 14760 - DNA, 43 bp, synthetic construct; identical to SEQ ID NO: 40
  misc_feature 1..43: note = Probe
  source 1..43: mol_type = other DNA

SEQ ID NO: 14761 - DNA, 24 bp, synthetic construct
  misc_feature 1..24: note = Probe
  source 1..24: mol_type = other DNA
aaccaaaacatcagattgtgaatc

SEQ ID NO: 14762 - DNA, 29 bp, synthetic construct
  misc_feature 1..29: note = Probe
  source 1..29: mol_type = other DNA
aaccaaaacatcagattgtgaatctgaca

SEQ ID NO: 14763 - DNA, 30 bp, synthetic construct; identical to SEQ ID NO: 2063
  misc_feature 1..30: note = Probe
  source 1..30: mol_type = other DNA

SEQ ID NO: 14764 - DNA, 31 bp, synthetic construct; identical to SEQ ID NO: 2064
  misc_feature 1..31: note = Probe
  source 1..31: mol_type = other DNA

SEQ ID NO: 14765 - DNA, 32 bp, synthetic construct; identical to SEQ ID NO: 2065
  misc_feature 1..32: note = Probe
  source 1..32: mol_type = other DNA

SEQ ID NO: 14766 - DNA, 33 bp, synthetic construct; identical to SEQ ID NO: 2066
  misc_feature 1..33: note = Probe
  source 1..33: mol_type = other DNA

SEQ ID NO: 14767 - DNA, 34 bp, synthetic construct
  misc_feature 1..34: note = Probe
  source 1..34: mol_type = other DNA
aaccaaaacatcagattgtgaatctgacaacaga

SEQ ID NO: 14768 - DNA, 35 bp, synthetic construct
  misc_feature 1..35: note = Probe
  source 1..35: mol_type = other DNA
aaccaaaacatcagattgtgaatctgacaacagag

SEQ ID NO: 14769 - DNA, 36 bp, synthetic construct; identical to SEQ ID NO: 2067
  misc_feature 1..36: note = Probe
  source 1..36: mol_type = other DNA

SEQ ID NO: 14770 - DNA, 37 bp, synthetic construct; identical to SEQ ID NO: 2068
  misc_feature 1..37: note = Probe
  source 1..37: mol_type = other DNA

SEQ ID NO: 14771 - DNA, 38 bp, synthetic construct; identical to SEQ ID NO: 2069
  misc_feature 1..38: note = Probe
  source 1..38: mol_type = other DNA

SEQ ID NO: 14772 - DNA, 39 bp, synthetic construct; identical to SEQ ID NO: 2070
  misc_feature 1..39: note = Probe
  source 1..39: mol_type = other DNA

SEQ ID NO: 14773 - DNA, 40 bp, synthetic construct; identical to SEQ ID NO: 43
  misc_feature 1..40: note = Probe
  source 1..40: mol_type = other DNA

SEQ ID NO: 14774 - DNA, 42 bp, synthetic construct
  misc_feature 1..42: note = Probe
  source 1..42: mol_type = other DNA
aaccaaaacatcagattgtgaatctgacaacagaggcttacg

SEQ ID NO: 14775 - DNA, 43 bp, synthetic construct; identical to SEQ ID NO: 44
  misc_feature 1..43: note = Probe
  source 1..43: mol_type = other DNA

SEQ ID NO: 14776 - DNA, 27 bp, synthetic construct
  misc_feature 1..27: note = Probe
  source 1..27: mol_type = other DNA
aaccaaaccccaaagacaccccccaca

SEQ ID NO: 14777 - DNA, 22 bp, synthetic construct
  misc_feature 1..22: note = Probe
  source 1..22: mol_type = other DNA
aaccaacacctctttacagtga

SEQ ID NO: 14778 - DNA, 23 bp, synthetic construct
  misc_feature 1..23: note = Probe
  source 1..23: mol_type = other DNA
aaccaacacctctttacagtgaa

SEQ ID NO: 14779 - DNA, 24 bp, synthetic construct
  misc_feature 1..24: note = Probe
  source 1..24: mol_type = other DNA
aaccaacacctctttacagtgaaa

SEQ ID NO: 14780 - DNA, 25 bp, synthetic construct
  misc_feature 1..25: note = Probe
  source 1..25: mol_type = other DNA
aaccaacacctctttacagtgaaat

SEQ ID NO: 14781 - DNA, 19 bp, synthetic construct
  misc_feature 1..19: note = Probe
  source 1..19: mol_type = other DNA
aaccagctttggggggttc

SEQ ID NO: 14782 - DNA, 36 bp, synthetic construct
  misc_feature 1..36: note = Probe
  source 1..36: mol_type = other DNA
aaccagctttggggggttcgattccttccttttttg

SEQ ID NO: 14783 - DNA, 38 bp, synthetic construct
  misc_feature 1..38: note = Probe
  source 1..38: mol_type = other DNA
aaccagctttggggggttcgattccttccttttttgtc

SEQ ID NO: 14784 - DNA, 39 bp, synthetic construct; identical to SEQ ID NO: 2079
  misc_feature 1..39: note = Probe
  source 1..39: mol_type = other DNA

SEQ ID NO: 14785 - DNA, 39 bp, synthetic construct; identical to SEQ ID NO: 2080
  misc_feature 1..39: note = Probe
  source 1..39: mol_type = other DNA

SEQ ID NO: 14786 - DNA, 33 bp, synthetic construct
  misc_feature 1..33: note = Probe
  source 1..33: mol_type = other DNA
aaccaggggtcgcgagttcgatcctcgctgggg

SEQ ID NO: 14787 - DNA, 39 bp, synthetic construct; identical to SEQ ID NO: 2081
  misc_feature 1..39: note = Probe
  source 1..39: mol_type = other DNA

SEQ ID NO: 14788 - DNA, 27 bp, synthetic construct
  misc_feature 1..27: note = Probe
  source 1..27: mol_type = other DNA
aaccatcctctgctatcggagtttttt

SEQ ID NO: 14789 - DNA, 40 bp, synthetic construct; identical to SEQ ID NO: 2086
  misc_feature 1..40: note = Probe
  source 1..40: mol_type = other DNA

SEQ ID NO: 14790 - DNA, 39 bp, synthetic construct
  misc_feature 1..39: note = Probe
  source 1..39: mol_type = other DNA
aacccagaggtcgatggatcgaaaccatcctctgctatc

SEQ ID NO: 14791 - DNA, 15 bp, synthetic construct
  misc_feature 1..15: note = Probe
  source 1..15: mol_type = other DNA
aacccatccctgaga

SEQ ID NO: 14792 - DNA, 16 bp, synthetic construct
  misc_feature 1..16: note = Probe
  source 1..16: mol_type = other DNA
aaccccactcctggta

SEQ ID NO: 14793 - DNA, 35 bp, synthetic construct
  misc_feature 1..35: note = Probe
  source 1..35: mol_type = other DNA
aaccgaaaggttggtggttcgagcccacccaggga

SEQ ID NO: 14794 - DNA, 40 bp, synthetic construct; identical to SEQ ID NO: 2088
  misc_feature 1..40: note = Probe
  source 1..40: mol_type = other DNA

SEQ ID NO: 14795 - DNA, 33 bp, synthetic construct
  misc_feature 1..33: note = Probe
  source 1..33: mol_type = other DNA
aaccgaagatcacgggttcgaaccccgtccgtg

SEQ ID NO: 14796 - DNA, 39 bp, synthetic construct; identical to SEQ ID NO: 2090
  misc_feature 1..39: note = Probe
  source 1..39: mol_type = other DNA

SEQ ID NO: 14797 - DNA, 16 bp, synthetic construct
  misc_feature 1..16: note = Probe
  source 1..16: mol_type = other DNA
aaccgagcgtccaagc

SEQ ID NO: 14798 - DNA, 21 bp, synthetic construct
  misc_feature 1..21: note = Probe
  source 1..21: mol_type = other DNA
aaccgagcgtccaagctcttt

SEQ ID NO: 14799 - DNA, 22 bp, synthetic construct
  misc_feature 1..22: note = Probe
  source 1..22: mol_type = other DNA
aaccgagcgtccaagctctttc

SEQ ID NO: 14800 - DNA, 23 bp, synthetic construct
  misc_feature 1..23: note = Probe
  source 1..23: mol_type = other DNA
aaccgagcgtccaagctctttcc

SEQ ID NO: 14801 - DNA, 24 bp, synthetic construct
  misc_feature 1..24: note = Probe
  source 1..24: mol_type = other DNA
aaccgagcgtccaagctctttcca

SEQ ID NO: 14802 - DNA, 25 bp, synthetic construct
  misc_feature 1..25: note = Probe
  source 1..25: mol_type = other DNA
aaccgagcgtccaagctctttccat

SEQ ID NO: 14803 - DNA, 26 bp, synthetic construct
  misc_feature 1..26: note = Probe
  source 1..26: mol_type = other DNA
aaccgagcgtccaagctctttccatt

SEQ ID NO: 14804 - DNA, 27 bp, synthetic construct
  misc_feature 1..27: note = Probe
  source 1..27: mol_type = other DNA
aaccgagcgtccaagctctttccattt

SEQ ID NO: 14805 - DNA, 28 bp, synthetic construct
  misc_feature 1..28: note = Probe
  source 1..28: mol_type = other DNA
aaccgagcgtccaagctctttccatttt

SEQ ID NO: 14806 - DNA, 29 bp, synthetic construct
  misc_feature 1..29: note = Probe
  source 1..29: mol_type = other DNA
aaccgagcgtccaagctctttccattttt

SEQ ID NO: 14807 - DNA, 16 bp, synthetic construct
  misc_feature 1..16: note = Probe
  source 1..16: mol_type = other DNA
aaccggagatgaaaac

SEQ ID NO: 14808 - DNA, 18 bp, synthetic construct
  misc_feature 1..18: note = Probe
  source 1..18: mol_type = other DNA
aaccggagatgaaaacct

SEQ ID NO: 14809 - DNA, 24 bp, synthetic construct
  misc_feature 1..24: note = Probe
  source 1..24: mol_type = other DNA
aaccggagatgaaaacctttttcc

SEQ ID NO: 14810 - DNA, 25 bp, synthetic construct
  misc_feature 1..25: note = Probe
  source 1..25: mol_type = other DNA
aaccggagatgaaaacctttttcca

SEQ ID NO: 14811 - DNA, 30 bp, synthetic construct; identical to SEQ ID NO: 52
  misc_feature 1..30: note = Probe
  source 1..30: mol_type = other DNA

SEQ ID NO: 14812 - DNA, 32 bp, synthetic construct; identical to SEQ ID NO: 2102
  misc_feature 1..32: note = Probe
  source 1..32: mol_type = other DNA

SEQ ID NO: 14813 - DNA, 33 bp, synthetic construct; identical to SEQ ID NO: 2103
  misc_feature 1..33: note = Probe
  source 1..33: mol_type = other DNA

SEQ ID NO: 14814 - DNA, 34 bp, synthetic construct; identical to SEQ ID NO: 2104
  misc_feature 1..34: note = Probe
  source 1..34: mol_type = other DNA

SEQ ID NO: 14815 - DNA, 35 bp, synthetic construct; identical to SEQ ID NO: 2105
  misc_feature 1..35: note = Probe
  source 1..35: mol_type = other DNA

SEQ ID NO: 14816 - DNA, 36 bp, synthetic construct; identical to SEQ ID NO: 2106
  misc_feature 1..36: note = Probe
  source 1..36: mol_type = other DNA

SEQ ID NO: 14817 - DNA, 38 bp, synthetic construct
  misc_feature 1..38: note = Probe
  source 1..38: mol_type = other DNA
aaccggagatgaaaacctttttccaaggacaaatcaga

SEQ ID NO: 14818 - DNA, 17 bp, synthetic construct
  misc_feature 1..17: note = Probe
  source 1..17: mol_type = other DNA
aaccgggcggaaacaca

SEQ ID NO: 14819 - DNA, 18 bp, synthetic construct
  misc_feature 1..18: note = Probe
  source 1..18: mol_type = other DNA
aaccgggcggaaacacac

SEQ ID NO: 14820 - DNA, 18 bp, synthetic construct
  misc_feature 1..18: note = Probe
  source 1..18: mol_type = other DNA
aaccgggcggaaacacct

SEQ ID NO: 14821 - DNA, 19 bp, synthetic construct
  misc_feature 1..19: note = Probe
  source 1..19: mol_type = other DNA
aaccgggcggaaacacctc

SEQ ID NO: 14822 - DNA, 20 bp, synthetic construct
  misc_feature 1..20: note = Probe
  source 1..20: mol_type = other DNA
aaccgggcggaaacacctcc

SEQ ID NO: 14823 - DNA, 18 bp, synthetic construct
  misc_feature 1..18: note = Probe
  source 1..18: mol_type = other DNA
aaccgggcggaaacacgt

SEQ ID NO: 14824 - DNA, 19 bp, synthetic construct
  misc_feature 1..19: note = Probe
  source 1..19: mol_type = other DNA
aaccgggcggaaacacgtt

SEQ ID NO: 14825 - DNA, 20 bp, synthetic construct
  misc_feature 1..20: note = Probe
  source 1..20: mol_type = other DNA
aaccgggcggaaacacgttt

SEQ ID NO: 14826 - DNA, 21 bp, synthetic construct
  misc_feature 1..21: note = Probe
  source 1..21: mol_type = other DNA
aaccgggcggaaacacgtttt

SEQ ID NO: 14827 - DNA, 22 bp, synthetic construct
  misc_feature 1..22: note = Probe
  source 1..22: mol_type = other DNA
aaccgggcggaaacacgttttt

SEQ ID NO: 14828 - DNA, 16 bp, synthetic construct
  misc_feature 1..16: note = Probe
  source 1..16: mol_type = other DNA
aacctagccccaaacc

SEQ ID NO: 14829 - DNA, 17 bp, synthetic construct
  misc_feature 1..17: note = Probe
  source 1..17: mol_type = other DNA
aacctagccccaaaccc

SEQ ID NO: 14830 - DNA, 20 bp, synthetic construct
  misc_feature 1..20: note = Probe
  source 1..20: mol_type = other DNA
aacctagccccaaacccact

SEQ ID NO: 14831 - DNA, 25 bp, synthetic construct
  misc_feature 1..25: note = Probe
  source 1..25: mol_type = other DNA
aacctagccccaaacccactccacc

SEQ ID NO: 14832 - DNA, 26 bp, synthetic construct
  misc_feature 1..26: note = Probe
  source 1..26: mol_type = other DNA
aacctagccccaaacccactccacct

SEQ ID NO: 14833 - DNA, 16 bp, synthetic construct
  misc_feature 1..16: note = Probe
  source 1..16: mol_type = other DNA
aacctcctactcctca

SEQ ID NO: 14834 - DNA, 26 bp, synthetic construct
  misc_feature 1..26: note = Probe
  source 1..26: mol_type = other DNA
aacctgccggggcttctcccgccttt

SEQ ID NO: 14835 - DNA, 27 bp, synthetic construct
  misc_feature 1..27: note = Probe
  source 1..27: mol_type = other DNA
aacctgccggggcttctcccgcctttt

SEQ ID NO: 14836 - DNA, 23 bp, synthetic construct
  misc_feature 1..23: note = Probe
  source 1..23: mol_type = other DNA
aaccttcagctatagggtggaga

SEQ ID NO: 14837 - DNA, 27 bp, synthetic construct
  misc_feature 1..27: note = Probe
  source 1..27: mol_type = other DNA
aaccttttaagttaaagattaagagaa

SEQ ID NO: 14838 - DNA, 28 bp, synthetic construct
  misc_feature 1..28: note = Probe
  source 1..28: mol_type = other DNA
aaccttttaagttaaagattaagagaac

SEQ ID NO: 14839 - DNA, 29 bp, synthetic construct
  misc_feature 1..29: note = Probe
  source 1..29: mol_type = other DNA
aaccttttaagttaaagattaagagaacc

SEQ ID NO: 14840 - DNA, 30 bp, synthetic construct
  misc_feature 1..30: note = Probe
  source 1..30: mol_type = other DNA
aaccttttaagttaaagattaagagaacca

SEQ ID NO: 14841 - DNA, 50 bp, synthetic construct; identical to SEQ ID NO: 2121
  misc_feature 1..50: note = Probe
  source 1..50: mol_type = other DNA

SEQ ID NO: 14842 - DNA, 44 bp, synthetic construct
  misc_feature 1..44: note = Probe
  source 1..44: mol_type = other DNA
aacgaatgatttcgactcattaaattatgataatcatatttacc

SEQ ID NO: 14843 - DNA, 49 bp, synthetic construct; identical to SEQ ID NO: 2124
  misc_feature 1..49: note = Probe
  source 1..49: mol_type = other DNA

SEQ ID NO: 14844 - DNA, 50 bp, synthetic construct; identical to SEQ ID NO: 2125
  misc_feature 1..50: note = Probe
  source 1..50: mol_type = other DNA

SEQ ID NO: 14845 - DNA, 40 bp, synthetic construct
  misc_feature 1..40: note = Probe
  source 1..40: mol_type = other DNA
aacgccaaggtcgcgggttcgatccccgtacgggccacga

SEQ ID NO: 14846 - DNA, 40 bp, synthetic construct
  misc_feature 1..40: note = Probe
  source 1..40: mol_type = other DNA
aacgccaaggtcgcgggttcgatccccgtacgggccactg

SEQ ID NO: 14847 - DNA, 36 bp, synthetic construct
  misc_feature 1..36: note = Probe
  source 1..36: mol_type = other DNA
aacgcccgtctctgtggcgcaatcggttagcgcgtt

SEQ ID NO: 14848 - DNA, 21 bp, synthetic construct
  misc_feature 1..21: note = Probe
  source 1..21: mol_type = other DNA
aactaaatactaccgtatggc

SEQ ID NO: 14849 - DNA, 20 bp, synthetic construct
  misc_feature 1..20: note = Probe
  source 1..20: mol_type = other DNA
aactaagtgtttgtgggttt

SEQ ID NO: 14850 - DNA, 34 bp, synthetic construct; identical to SEQ ID NO: 2129
  misc_feature 1..34: note = Probe
  source 1..34: mol_type = other DNA

SEQ ID NO: 14851 - DNA, 35 bp, synthetic construct; identical to SEQ ID NO: 55
  misc_feature 1..35: note = Probe
  source 1..35: mol_type = other DNA

SEQ ID NO: 14852 - DNA, 38 bp, synthetic construct
  misc_feature 1..38: note = Probe
  source 1..38: mol_type = other DNA
aactaagtgtttgtgggtttaagtcccattggtctagt

SEQ ID NO: 14853 - DNA, 39 bp, synthetic construct; identical to SEQ ID NO: 2130
  misc_feature 1..39: note = Probe
  source 1..39: mol_type = other DNA

SEQ ID NO: 14854 - DNA, 40 bp, synthetic construct; identical to SEQ ID NO: 2131
  misc_feature 1..40: note = Probe
  source 1..40: mol_type = other DNA

SEQ ID NO: 14855 - DNA, 24 bp, synthetic construct
  misc_feature 1..24: note = Probe
  source 1..24: mol_type = other DNA
aactactttcttgattcaggtgtt

SEQ ID NO: 14856 - DNA, 25 bp, synthetic construct
  misc_feature 1..25: note = Probe
  source 1..25: mol_type = other DNA
aactactttcttgattcaggtgttt

SEQ ID NO: 14857 - DNA, 28 bp, synthetic construct
  misc_feature 1..28: note = Probe
  source 1..28: mol_type = other DNA
aactagttttgacaacattcaaaaaaga

SEQ ID NO: 14858 - DNA, 31 bp, synthetic construct
  misc_feature 1..31: note = Probe
  source 1..31: mol_type = other DNA
aactagttttgacaacattcaaaaaagagta

SEQ ID NO: 14859 - DNA, 32 bp, synthetic construct; identical to SEQ ID NO: 2132
  misc_feature 1..32: note = Probe
  source 1..32: mol_type = other DNA

SEQ ID NO: 14860 - DNA, 17 bp, synthetic construct
  misc_feature 1..17: note = Probe
  source 1..17: mol_type = other DNA
aactcatgcccccatgt

SEQ ID NO: 14861 - DNA, 18 bp, synthetic construct
  misc_feature 1..18: note = Probe
  source 1..18: mol_type = other DNA
aactcatgcccccatgtc

SEQ ID NO: 14862 - DNA, 19 bp, synthetic construct
  misc_feature 1..19: note = Probe
  source 1..19: mol_type = other DNA
aactcatgcccccatgtct

SEQ ID NO: 14863 - DNA, 20 bp, synthetic construct
  misc_feature 1..20: note = Probe
  source 1..20: mol_type = other DNA
aactcatgcccccatgtcta

SEQ ID NO: 14864 - DNA, 23 bp, synthetic construct
  misc_feature 1..23: note = Probe
  source 1..23: mol_type = other DNA
aactcatgcccccatgtctaaca

SEQ ID NO: 14865 - DNA, 26 bp, synthetic construct
  misc_feature 1..26: note = Probe
  source 1..26: mol_type = other DNA
aactcatgcccccatgtctaacaaca

SEQ ID NO: 14866 - DNA, 31 bp, synthetic construct; identical to SEQ ID NO: 2140
  misc_feature 1..31: note = Probe
  source 1..31: mol_type = other DNA

SEQ ID NO: 14867 - DNA, 32 bp, synthetic construct; identical to SEQ ID NO: 2141
  misc_feature 1..32: note = Probe
  source 1..32: mol_type = other DNA

SEQ ID NO: 14868 - DNA, 33 bp, synthetic construct; identical to SEQ ID NO: 2142
  misc_feature 1..33: note = Probe
  source 1..33: mol_type = other DNA

SEQ ID NO: 14869 - DNA, 34 bp, synthetic construct; identical to SEQ ID NO: 2143
  misc_feature 1..34: note = Probe
  source 1..34: mol_type = other DNA

SEQ ID NO: 14870 - DNA, 35 bp, synthetic construct; identical to SEQ ID NO: 2144
  misc_feature 1..35: note = Probe
  source 1..35: mol_type = other DNA

SEQ ID NO: 14871 - DNA, 36 bp, synthetic construct; identical to SEQ ID NO: 2145
  misc_feature 1..36: note = Probe
  source 1..36: mol_type = other DNA

SEQ ID NO: 14872 - DNA, 37 bp, synthetic construct; identical to SEQ ID NO: 2146
  misc_feature 1..37: note = Probe
  source 1..37: mol_type = other DNA

SEQ ID NO: 14873 - DNA, 38 bp, synthetic construct; identical to SEQ ID NO: 2147
  misc_feature 1..38: note = Probe
  source 1..38: mol_type = other DNA

SEQ ID NO: 14874 - DNA, 39 bp, synthetic construct; identical to SEQ ID NO: 2148
  misc_feature 1..39: note = Probe
  source 1..39: mol_type = other DNA

SEQ ID NO: 14875 - DNA, 40 bp, synthetic construct; identical to SEQ ID NO: 2149
  misc_feature 1..40: note = Probe
  source 1..40: mol_type = other DNA

SEQ ID NO: 14876 - DNA, 41 bp, synthetic construct
  misc_feature 1..41: note = Probe
  source 1..41: mol_type = other DNA
aactcatgcccccatgtctaacaacatggctttctcaactt

SEQ ID NO: 14877 - DNA, 43 bp, synthetic construct
  misc_feature 1..43: note = Probe
  source 1..43: mol_type = other DNA
aactcatgcccccatgtctaacaacatggctttctcaactttt

SEQ ID NO: 14878 - DNA, 30 bp, synthetic construct
  misc_feature 1..30: note = Probe
  source 1..30: mol_type = other DNA
aactgcccggctagctcagtcggtagagca

SEQ ID NO: 14879 - DNA, 36 bp, synthetic construct
  misc_feature 1..36: note = Probe
  source 1..36: mol_type = other DNA
aactgcccggctagctcagtcggtagagcatgggac

SEQ ID NO: 14880 - DNA, 37 bp, synthetic construct; identical to SEQ ID NO: 2152
  misc_feature 1..37: note = Probe
  source 1..37: mol_type = other DNA

SEQ ID NO: 14881 - DNA, 15 bp, synthetic construct
  misc_feature 1..15: note = Probe
  source 1..15: mol_type = other DNA
aactgctaactcatg

SEQ ID NO: 14882 - DNA, 21 bp, synthetic construct
  misc_feature 1..21: note = Probe
  source 1..21: mol_type = other DNA
aactgctaactcatgccccca

SEQ ID NO: 14883 - DNA, 23 bp, synthetic construct
  misc_feature 1..23: note = Probe
  source 1..23: mol_type = other DNA
aactgctaactcatgcccccatg

SEQ ID NO: 14884 - DNA, 26 bp, synthetic construct
  misc_feature 1..26: note = Probe
  source 1..26: mol_type = other DNA
aactgctaactcatgcccccatgtct

SEQ ID NO: 14885 - DNA, 30 bp, synthetic construct
  misc_feature 1..30: note = Probe
  source 1..30: mol_type = other DNA
aactgctaactcatgcccccatgtctaaca

SEQ ID NO: 14886 - DNA, 31 bp, synthetic construct
  misc_feature 1..31: note = Probe
  source 1..31: mol_type = other DNA
aactgctaactcatgcccccatgtctaacaa

SEQ ID NO: 14887 - DNA, 33 bp, synthetic construct
  misc_feature 1..33: note = Probe
  source 1..33: mol_type = other DNA
aactgctaactcatgcccccatgtctaacaaca

SEQ ID NO: 14888 - DNA, 38 bp, synthetic construct; identical to SEQ ID NO: 2157
  misc_feature 1..38: note = Probe
  source 1..38: mol_type = other DNA

SEQ ID NO: 14889 - DNA, 40 bp, synthetic construct; identical to SEQ ID NO: 2159
  misc_feature 1..40: note = Probe
  source 1..40: mol_type = other DNA

SEQ ID NO: 14890 - DNA, 41 bp, synthetic construct; identical to SEQ ID NO: 2160
  misc_feature 1..41: note = Probe
  source 1..41: mol_type = other DNA

SEQ ID NO: 14891 - DNA, 42 bp, synthetic construct; identical to SEQ ID NO: 2161
  misc_feature 1..42: note = Probe
  source 1..42: mol_type = other DNA

SEQ ID NO: 14892 - DNA, 44 bp, synthetic construct; identical to SEQ ID NO: 2163
  misc_feature 1..44: note = Probe
  source 1..44: mol_type = other DNA

SEQ ID NO: 14893 - DNA, 46 bp, synthetic construct; identical to SEQ ID NO: 2165
  misc_feature 1..46: note = Probe
  source 1..46: mol_type = other DNA

SEQ ID NO: 14894 - DNA, 30 bp, synthetic construct
  misc_feature 1..30: note = Probe
  source 1..30: mol_type = other DNA
aactgggtctctgtggcgcaatcggttagc

SEQ ID NO: 14895 - DNA, 31 bp, synthetic construct
  misc_feature 1..31: note = Probe
  source 1..31: mol_type = other DNA
aactgggtctctgtggcgcaatcggttagcg

SEQ ID NO: 14896 - DNA, 34 bp, synthetic construct
  misc_feature 1..34: note = Probe
  source 1..34: mol_type = other DNA
aactgggtctctgtggcgcaatcggttagcgcgt

SEQ ID NO: 14897 - DNA, 35 bp, synthetic construct
  misc_feature 1..35: note = Probe
  source 1..35: mol_type = other DNA
aactgggtctctgtggcgcaatcggttagcgcgtt

SEQ ID NO: 14898 - DNA, 30 bp, synthetic construct
  misc_feature 1..30: note = Probe
  source 1..30: mol_type = other DNA
aacttaaaactttacaatcagaggttcaac

SEQ ID NO: 14899 - DNA, 20 bp, synthetic construct
  misc_feature 1..20: note = Probe
  source 1..20: mol_type = other DNA
aacttaaaactttacagtca

SEQ ID NO: 14900 - DNA, 26 bp, synthetic construct
  misc_feature 1..26: note = Probe
  source 1..26: mol_type = other DNA
aacttaaaactttacagtcagaggtt

SEQ ID NO: 14901 - DNA, 27 bp, synthetic construct
  misc_feature 1..27: note = Probe
  source 1..27: mol_type = other DNA
aacttaaaactttacagtcagaggttc

SEQ ID NO: 14902 - DNA, 28 bp, synthetic construct
  misc_feature 1..28: note = Probe
  source 1..28: mol_type = other DNA
aacttaaaactttacagtcagaggttca

SEQ ID NO: 14903 - DNA, 29 bp, synthetic construct
  misc_feature 1..29: note = Probe
  source 1..29: mol_type = other DNA
aacttaaaactttacagtcagaggttcaa

SEQ ID NO: 14904 - DNA, 30 bp, synthetic construct; identical to SEQ ID NO: 2170
  misc_feature 1..30: note = Probe
  source 1..30: mol_type = other DNA

SEQ ID NO: 14905 - DNA, 31 bp, synthetic construct
  misc_feature 1..31: note = Probe
  source 1..31: mol_type = other DNA
aacttaaaactttacagtcagaggttcaatt

SEQ ID NO: 14906 - DNA, 37 bp, synthetic construct; identical to SEQ ID NO: 60
  misc_feature 1..37: note = Probe
  source 1..37: mol_type = other DNA

SEQ ID NO: 14907 - DNA, 38 bp, synthetic construct; identical to SEQ ID NO: 61
  misc_feature 1..38: note = Probe
  source 1..38: mol_type = other DNA

SEQ ID NO: 14908 - DNA, 39 bp, synthetic construct; identical to SEQ ID NO: 62
  misc_feature 1..39: note = Probe
  source 1..39: mol_type = other DNA

SEQ ID NO: 14909 - DNA, 40 bp, synthetic construct; identical to SEQ ID NO: 2173
  misc_feature 1..40: note = Probe
  source 1..40: mol_type = other DNA

SEQ ID NO: 14910 - DNA, 41 bp, synthetic construct; identical to SEQ ID NO: 2174
  misc_feature 1..41: note = Probe
  source 1..41: mol_type = other DNA

SEQ ID NO: 14911 - DNA, 42 bp, synthetic construct; identical to SEQ ID NO: 2175
  misc_feature 1..42: note = Probe
  source 1..42: mol_type = other DNA

SEQ ID NO: 14912 - DNA, 43 bp, synthetic construct; identical to SEQ ID NO: 2176
  misc_feature 1..43: note = Probe
  source 1..43: mol_type = other DNA

SEQ ID NO: 14913 - DNA, 46 bp, synthetic construct; identical to SEQ ID NO: 2179
  misc_feature 1..46: note = Probe
  source 1..46: mol_type = other DNA

SEQ ID NO: 14914 - DNA, 16 bp, synthetic construct
  misc_feature 1..16: note = Probe
  source 1..16: mol_type = other DNA
aacttaacttgaccgc

SEQ ID NO: 14915 - DNA, 17 bp, synthetic construct
  misc_feature 1..17: note = Probe
  source 1..17: mol_type = other DNA
aacttaacttgaccgct

SEQ ID NO: 14916 - DNA, 18 bp, synthetic construct
  misc_feature 1..18: note = Probe
  source 1..18: mol_type = other DNA
aacttaacttgaccgctc

SEQ ID NO: 14917 - DNA, 19 bp, synthetic construct
  misc_feature 1..19: note = Probe
  source 1..19: mol_type = other DNA
aacttaacttgaccgctct

SEQ ID NO: 14918 - DNA, 21 bp, synthetic construct
  misc_feature 1..21: note = Probe
  source 1..21: mol_type = other DNA
aacttaacttgaccgctctga

SEQ ID NO: 14919 - DNA, 22 bp, synthetic construct
  misc_feature 1..22: note = Probe
  source 1..22: mol_type = other DNA
aacttaacttgaccgctctgag

SEQ ID NO: 14920 - DNA, 23 bp, synthetic construct
  misc_feature 1..23: note = Probe
  source 1..23: mol_type = other DNA
aacttaacttgaccgctctgagc

SEQ ID NO: 14921 - DNA, 24 bp, synthetic construct
  misc_feature 1..24: note = Probe
  source 1..24: mol_type = other DNA
aacttaacttgaccgctctgagct

SEQ ID NO: 14922 - DNA, 16 bp, synthetic construct
  misc_feature 1..16: note = Probe
  source 1..16: mol_type = other DNA
aacttacacttaggag

SEQ ID NO: 14923 - DNA, 17 bp, synthetic construct
  misc_feature 1..17: note = Probe
  source 1..17: mol_type = other DNA
aacttacacttaggaga

SEQ ID NO: 14924 - DNA, 19 bp, synthetic construct
  misc_feature 1..19: note = Probe
  source 1..19: mol_type = other DNA
aacttacacttaggagatt

SEQ ID NO: 14925 - DNA, 20 bp, synthetic construct
  misc_feature 1..20: note = Probe
  source 1..20: mol_type = other DNA
aacttacacttaggagattt

SEQ ID NO: 14926 - DNA, 21 bp, synthetic construct
  misc_feature 1..21: note = Probe
  source 1..21: mol_type = other DNA
aacttacacttaggagatttc

SEQ ID NO: 14927 - DNA, 22 bp, synthetic construct
  misc_feature 1..22: note = Probe
  source 1..22: mol_type = other DNA
aacttacacttaggagatttca

SEQ ID NO: 14928 - DNA, 24 bp, synthetic construct
  misc_feature 1..24: note = Probe
  source 1..24: mol_type = other DNA
aacttacacttaggagatttcaac

SEQ ID NO: 14929 - DNA, 27 bp, synthetic construct
  misc_feature 1..27: note = Probe
  source 1..27: mol_type = other DNA
aacttacacttaggagatttcaactta

SEQ ID NO: 14930 - DNA, 28 bp, synthetic construct
  misc_feature 1..28: note = Probe
  source 1..28: mol_type = other DNA
aacttacacttaggagatttcaacttaa

SEQ ID NO: 14931 - DNA, 30 bp, synthetic construct
  misc_feature 1..30: note = Probe
  source 1..30: mol_type = other DNA
aacttacacttaggagatttcaacttaact

SEQ ID NO: 14932 - DNA, 31 bp, synthetic construct
  misc_feature 1..31: note = Probe
  source 1..31: mol_type = other DNA
aacttacacttaggagatttcaacttaactt

SEQ ID NO: 14933 - DNA, 34 bp, synthetic construct
  misc_feature 1..34: note = Probe
  source 1..34: mol_type = other DNA
aacttacacttaggagatttcaacttaacttgac

SEQ ID NO: 14934 - DNA, 35 bp, synthetic construct
  misc_feature 1..35: note = Probe
  source 1..35: mol_type = other DNA
aacttacacttaggagatttcaacttaacttgacc

SEQ ID NO: 14935 - DNA, 36 bp, synthetic construct; identical to SEQ ID NO: 2188
  misc_feature 1..36: note = Probe
  source 1..36: mol_type = other DNA

SEQ ID NO: 14936 - DNA, 37 bp, synthetic construct; identical to SEQ ID NO: 2189
  misc_feature 1..37: note = Probe
  source 1..37: mol_type = other DNA

SEQ ID NO: 14937 - DNA, 38 bp, synthetic construct; identical to SEQ ID NO: 2190
  misc_feature 1..38: note = Probe
  source 1..38: mol_type = other DNA

SEQ ID NO: 14938 - DNA, 39 bp, synthetic construct; identical to SEQ ID NO: 2191
  misc_feature 1..39: note = Probe
  source 1..39: mol_type = other DNA

SEQ ID NO: 14939 - DNA, 40 bp, synthetic construct
  misc_feature 1..40: note = Probe
  source 1..40: mol_type = other DNA
aacttacacttaggagatttcaacttaacttgaccgctct

SEQ ID NO: 14940 - DNA, 42 bp, synthetic construct; identical to SEQ ID NO: 2192
  misc_feature 1..42: note = Probe
  source 1..42: mol_type = other DNA

SEQ ID NO: 14941 - DNA, 43 bp, synthetic construct; identical to SEQ ID NO: 2193
  misc_feature 1..43: note = Probe
  source 1..43: mol_type = other DNA

SEQ ID NO: 14942 - DNA, 44 bp, synthetic construct; identical to SEQ ID NO: 2194
  misc_feature 1..44: note = Probe
  source 1..44: mol_type = other DNA

SEQ ID NO: 14943 - DNA, 45 bp, synthetic construct; identical to SEQ ID NO: 2195
  misc_feature 1..45: note = Probe
  source 1..45: mol_type = other DNA

SEQ ID NO: 14944 - DNA, 50 bp, synthetic construct; identical to SEQ ID NO: 2197
  misc_feature 1..50: note = Probe
  source 1..50: mol_type = other DNA

SEQ ID NO: 14945 - DNA, 18 bp, synthetic construct
  misc_feature 1..18: note = Probe
  source 1..18: mol_type = other DNA
aacttagcattaaccttt

SEQ ID NO: 14946 - DNA, 29 bp, synthetic construct
  misc_feature 1..29: note = Probe
  source 1..29: mol_type = other DNA
aacttagcattaaccttttaagttaaaga

SEQ ID NO: 14947 - DNA, 37 bp, synthetic construct
  misc_feature 1..37: note = Probe
  source 1..37: mol_type = other DNA
aacttagcattaaccttttaagttaaagattaagaga

SEQ ID NO: 14948 - DNA, 38 bp, synthetic construct
  misc_feature 1..38: note = Probe
  source 1..38: mol_type = other DNA
aacttagcattaaccttttaagttaaagattaagagaa

SEQ ID NO: 14949 - DNA, 50 bp, synthetic construct; identical to SEQ ID NO: 2201
  misc_feature 1..50: note = Probe
  source 1..50: mol_type = other DNA

SEQ ID NO: 14950 - DNA, 44 bp, synthetic construct; identical to SEQ ID NO: 2202
  misc_feature 1..44: note = Probe
  source 1..44: mol_type = other DNA

SEQ ID NO: 14951 - DNA, 45 bp, synthetic construct; identical to SEQ ID NO: 2203
  misc_feature 1..45: note = Probe
  source 1..45: mol_type = other DNA

SEQ ID NO: 14952 - DNA, 16 bp, synthetic construct
  misc_feature 1..16: note = Probe
  source 1..16: mol_type = other DNA
aacttgaccgctctga

SEQ ID NO: 14953 - DNA, 17 bp, synthetic construct
  misc_feature 1..17: note = Probe
  source 1..17: mol_type = other DNA
aacttgaccgctctgag

SEQ ID NO: 14954 - DNA, 18 bp, synthetic construct
  misc_feature 1..18: note = Probe
  source 1..18: mol_type = other DNA
aacttgaccgctctgagc

SEQ ID NO: 14955 - DNA, 20 bp, synthetic construct
  misc_feature 1..20: note = Probe
  source 1..20: mol_type = other DNA
aactttacagtcagaggttc

SEQ ID NO: 14956 - DNA, 21 bp, synthetic construct
  misc_feature 1..21: note = Probe
  source 1..21: mol_type = other DNA
aactttacagtcagaggttca

SEQ ID NO: 14957 - DNA, 22 bp, synthetic construct
  misc_feature 1..22: note = Probe
  source 1..22: mol_type = other DNA
aactttacagtcagaggttcaa

SEQ ID NO: 14958 - DNA, 23 bp, synthetic construct
  misc_feature 1..23: note = Probe
  source 1..23: mol_type = other DNA
aactttacagtcagaggttcaat

SEQ ID NO: 14959 - DNA, 24 bp, synthetic construct
  misc_feature 1..24: note = Probe
  source 1..24: mol_type = other DNA
aactttacagtcagaggttcaatt

SEQ ID NO: 14960 - DNA, 32 bp, synthetic construct; identical to SEQ ID NO: 2206
  misc_feature 1..32: note = Probe
  source 1..32: mol_type = other DNA

SEQ ID NO: 14961 - DNA, 33 bp, synthetic construct; identical to SEQ ID NO: 2207
  misc_feature 1..33: note = Probe
  source 1..33: mol_type = other DNA

SEQ ID NO: 14962 - DNA, 34 bp, synthetic construct; identical to SEQ ID NO: 2208
  misc_feature 1..34: note = Probe
  source 1..34: mol_type = other DNA

SEQ ID NO: 14963 - DNA, 35 bp, synthetic construct; identical to SEQ ID NO: 2209
  misc_feature 1..35: note = Probe
  source 1..35: mol_type = other DNA

SEQ ID NO: 14964 - DNA, 36 bp, synthetic construct; identical to SEQ ID NO: 2210
  misc_feature 1..36: note = Probe
  source 1..36: mol_type = other DNA

SEQ ID NO: 14965 - DNA, 37 bp, synthetic construct; identical to SEQ ID NO: 2211
  misc_feature 1..37: note = Probe
  source 1..37: mol_type = other DNA

SEQ ID NO: 14966 - DNA, 38 bp, synthetic construct; identical to SEQ ID NO: 2212
  misc_feature 1..38: note = Probe
  source 1..38: mol_type = other DNA

SEQ ID NO: 14967 - DNA, 39 bp, synthetic construct; identical to SEQ ID NO: 2213
  misc_feature 1..39: note = Probe
  source 1..39: mol_type = other DNA

SEQ ID NO: 14968 - DNA, 40 bp, synthetic construct; identical to SEQ ID NO: 2214
  misc_feature 1..40: note = Probe
  source 1..40: mol_type = other DNA

SEQ ID NO: 14969 - DNA, 38 bp, synthetic construct; identical to SEQ ID NO: 2217
  misc_feature 1..38: note = Probe
  source 1..38: mol_type = other DNA

SEQ ID NO: 14970 - DNA, 18 bp, synthetic construct
  misc_feature 1..18: note = Probe
  source 1..18: mol_type = other DNA
aagaactgctaactcatg

SEQ ID NO: 14971 - DNA, 24 bp, synthetic construct
  misc_feature 1..24: note = Probe
  source 1..24: mol_type = other DNA
aagaactgctaactcatgccccca

SEQ ID NO: 14972 - DNA, 29 bp, synthetic construct
  misc_feature 1..29: note = Probe
  source 1..29: mol_type = other DNA
aagaactgctaactcatgcccccatgtct

SEQ ID NO: 14973 - DNA, 41 bp, synthetic construct; identical to SEQ ID NO: 66
  misc_feature 1..41: note = Probe
  source 1..41: mol_type = other DNA

SEQ ID NO: 14974 - DNA, 42 bp, synthetic construct; identical to SEQ ID NO: 2227
  misc_feature 1..42: note = Probe
  source 1..42: mol_type = other DNA

SEQ ID NO: 14975 - DNA, 43 bp, synthetic construct; identical to SEQ ID NO: 67
  misc_feature 1..43: note = Probe
  source 1..43: mol_type = other DNA

SEQ ID NO: 14976 - DNA, 44 bp, synthetic construct; identical to SEQ ID NO: 68
  misc_feature 1..44: note = Probe
  source 1..44: mol_type = other DNA

SEQ ID NO: 14977 - DNA, 45 bp, synthetic construct; identical to SEQ ID NO: 69
  misc_feature 1..45: note = Probe
  source 1..45: mol_type = other DNA

SEQ ID NO: 14978 - DNA, 49 bp, synthetic construct; identical to SEQ ID NO: 2229
  misc_feature 1..49: note = Probe
  source 1..49: mol_type = other DNA

SEQ ID NO: 14979 - DNA, 50 bp, synthetic construct; identical to SEQ ID NO: 2230
  misc_feature 1..50: note = Probe
  source 1..50: mol_type = other DNA

SEQ ID NO: 14980 - DNA, 28 bp, synthetic construct
  misc_feature 1..28: note = Probe
  source 1..28: mol_type = other DNA
aagaagcagcttcaaacctgccggggct

SEQ ID NO: 14981 - DNA, 30 bp, synthetic construct
  misc_feature 1..30: note = Probe
  source 1..30: mol_type = other DNA
aagaagcagcttcaaacctgccggggcttc

SEQ ID NO: 14982 - DNA, 31 bp, synthetic construct; identical to SEQ ID NO: 2232
  misc_feature 1..31: note = Probe
  source 1..31: mol_type = other DNA

SEQ ID NO: 14983 - DNA, 32 bp, synthetic construct; identical to SEQ ID NO: 2233
  misc_feature 1..32: note = Probe
  source 1..32: mol_type = other DNA

SEQ ID NO: 14984 - DNA, 23 bp, synthetic construct
  misc_feature 1..23: note = Probe
  source 1..23: mol_type = other DNA
aagacaccccccacagtttatgt

SEQ ID NO: 14985 - DNA, 26 bp, synthetic construct
  misc_feature 1..26: note = Probe
  source 1..26: mol_type = other DNA
aagacaccccccacagtttatgtagc

SEQ ID NO: 14986 - DNA, 27 bp, synthetic construct
  misc_feature 1..27: note = Probe
  source 1..27: mol_type = other DNA
aagacaccccccacagtttatgtagct

SEQ ID NO: 14987 - DNA, 28 bp, synthetic construct
  misc_feature 1..28: note = Probe
  source 1..28: mol_type = other DNA
aagacaccccccacagtttatgtagctt

SEQ ID NO: 14988 - DNA, 29 bp, synthetic construct
  misc_feature 1..29: note = Probe
  source 1..29: mol_type = other DNA
aagacaccccccacagtttatgtagctta

SEQ ID NO: 14989 - DNA, 30 bp, synthetic construct
  misc_feature 1..30: note = Probe
  source 1..30: mol_type = other DNA
aagacaccccccacagtttatgtagcttac

SEQ ID NO: 14990 - DNA, 31 bp, synthetic construct; identical to SEQ ID NO: 2236
  misc_feature 1..31: note = Probe
  source 1..31: mol_type = other DNA

SEQ ID NO: 14991 - DNA, 32 bp, synthetic construct; identical to SEQ ID NO: 2237
  misc_feature 1..32: note = Probe
  source 1..32: mol_type = other DNA

SEQ ID NO: 14992 - DNA, 33 bp, synthetic construct; identical to SEQ ID NO: 2238
  misc_feature 1..33: note = Probe
  source 1..33: mol_type = other DNA

SEQ ID NO: 14993 - DNA, 34 bp, synthetic construct; identical to SEQ ID NO: 2239
  misc_feature 1..34: note = Probe
  source 1..34: mol_type = other DNA

SEQ ID NO: 14994 - DNA, 35 bp, synthetic construct
  misc_feature 1..35: note = Probe
  source 1..35: mol_type = other DNA
aagacaccccccacagtttatgtagcttacctcct

SEQ ID NO: 14995 - DNA, 36 bp, synthetic construct
  misc_feature 1..36: note = Probe
  source 1..36: mol_type = other DNA
aagacaccccccacagtttatgtagcttacctcctc

SEQ ID NO: 14996 - DNA, 37 bp, synthetic construct; identical to SEQ ID NO: 2240
  misc_feature 1..37: note = Probe
  source 1..37: mol_type = other DNA

SEQ ID NO: 14997 - DNA, 38 bp, synthetic construct
  misc_feature 1..38: note = Probe
  source 1..38: mol_type = other DNA
aagacaccccccacagtttatgtagcttacctcctcaa

SEQ ID NO: 14998 - DNA, 22 bp, synthetic construct
  misc_feature 1..22: note = Probe
  source 1..22: mol_type = other DNA
aagacaggggttaggcctcttt

SEQ ID NO: 14999 - DNA, 23 bp, synthetic construct
  misc_feature 1..23: note = Probe
  source 1..23: mol_type = other DNA
aagacaggggttaggcctctttt

SEQ ID NO: 15000 - DNA, 24 bp, synthetic construct
  misc_feature 1..24: note = Probe
  source 1..24: mol_type = other DNA
aagacaggggttaggcctcttttt

SEQ ID NO: 15001 - DNA, 27 bp, synthetic construct
  misc_feature 1..27: note = Probe
  source 1..27: mol_type = other DNA
aagacaggggttaggcctctttttacc

SEQ ID NO: 15002 - DNA, 30 bp, synthetic construct; identical to SEQ ID NO: 2246
  misc_feature 1..30: note = Probe
  source 1..30: mol_type = other DNA

SEQ ID NO: 15003 - DNA, 31 bp, synthetic construct; identical to SEQ ID NO: 2247
  misc_feature 1..31: note = Probe
  source 1..31: mol_type = other DNA

SEQ ID NO: 15004 - DNA, 16 bp, synthetic construct
  misc_feature 1..16: note = Probe
  source 1..16: mol_type = other DNA
aagactttttctctga

SEQ ID NO: 15005 - DNA, 26 bp, synthetic construct
  misc_feature 1..26: note = Probe
  source 1..26: mol_type = other DNA
aagagaaccaacacctctttacagtg

SEQ ID NO: 15006 - DNA, 27 bp, synthetic construct
  misc_feature 1..27: note = Probe
  source 1..27: mol_type = other DNA
aagagaaccaacacctctttacagtga

SEQ ID NO: 15007 - DNA, 28 bp, synthetic construct
  misc_feature 1..28: note = Probe
  source 1..28: mol_type = other DNA
aagagaaccaacacctctttacagtgaa

SEQ ID NO: 15008 - DNA, 29 bp, synthetic construct
  misc_feature 1..29: note = Probe
  source 1..29: mol_type = other DNA
aagagaaccaacacctctttacagtgaaa

SEQ ID NO: 15009 - DNA, 30 bp, synthetic construct; identical to SEQ ID NO: 2251
  misc_feature 1..30: note = Probe
  source 1..30: mol_type = other DNA

SEQ ID NO: 15010 - DNA, 35 bp, synthetic construct
  misc_feature 1..35: note = Probe
  source 1..35: mol_type = other DNA
aagagcccggatagctcagtcggtagagcatcaga

SEQ ID NO: 15011 - DNA, 36 bp, synthetic construct
  misc_feature 1..36: note = Probe
  source 1..36: mol_type = other DNA
aagagcccggatagctcagtcggtagagcatcagac

SEQ ID NO: 15012 - DNA, 37 bp, synthetic construct
  misc_feature 1..37: note = Probe
  source 1..37: mol_type = other DNA
aagagcccggatagctcagtcggtagagcatcagact

SEQ ID NO: 15013 - DNA, 38 bp, synthetic construct
  misc_feature 1..38: note = Probe
  source 1..38: mol_type = other DNA
aagagcccggatagctcagtcggtagagcatcagactt

SEQ ID NO: 15014 - DNA, 39 bp, synthetic construct
  misc_feature 1..39: note = Probe
  source 1..39: mol_type = other DNA
aagagcccggatagctcagtcggtagagcatcagacttt

SEQ ID NO: 15015 - DNA, 40 bp, synthetic construct
  misc_feature 1..40: note = Probe
  source 1..40: mol_type = other DNA
aagagcccggatagctcagtcggtagagcatcagactttt

SEQ ID NO: 15016 - DNA, 30 bp, synthetic construct
  misc_feature 1..30: note = Probe
  source 1..30: mol_type = other DNA
aagagccttcaaagccctcagtaagttgca

SEQ ID NO: 15017 - DNA, 16 bp, synthetic construct
  misc_feature 1..16: note = Probe
  source 1..16: mol_type = other DNA
aagaggtccccggttc

SEQ ID NO: 15018 - DNA, 17 bp, synthetic construct
  misc_feature 1..17: note = Probe
  source 1..17: mol_type = other DNA
aagaggtccccggttca

SEQ ID NO: 15019 - DNA, 22 bp, synthetic construct
  misc_feature 1..22: note = Probe
  source 1..22: mol_type = other DNA
aagattaagagaaccaacacct

SEQ ID NO: 15020 - DNA, 29 bp, synthetic construct
  misc_feature 1..29: note = Probe
  source 1..29: mol_type = other DNA
aagattaagagaaccaacacctctttaca

SEQ ID NO: 15021 - DNA, 31 bp, synthetic construct
  misc_feature 1..31: note = Probe
  source 1..31: mol_type = other DNA
aagattaagagaaccaacacctctttacagt

SEQ ID NO: 15022 - DNA, 32 bp, synthetic construct; identical to SEQ ID NO: 2257
  misc_feature 1..32: note = Probe
  source 1..32: mol_type = other DNA

SEQ ID NO: 15023 - DNA, 33 bp, synthetic construct; identical to SEQ ID NO: 2258
  misc_feature 1..33: note = Probe
  source 1..33: mol_type = other DNA

SEQ ID NO: 15024 - DNA, 34 bp, synthetic construct; identical to SEQ ID NO: 2259
  misc_feature 1..34: note = Probe
  source 1..34: mol_type = other DNA

SEQ ID NO: 15025 - DNA, 35 bp, synthetic construct
  misc_feature 1..35: note = Probe
  source 1..35: mol_type = other DNA
aagattaagagaaccaacacctctttacagtgaaa

SEQ ID NO: 15026 - DNA, 36 bp, synthetic construct; identical to SEQ ID NO: 2260
  misc_feature 1..36: note = Probe
  source 1..36: mol_type = other DNA

SEQ ID NO: 15027 - DNA, 38 bp, synthetic construct
  misc_feature 1..38: note = Probe
  source 1..38: mol_type = other DNA
aagattaagagaaccaacacctctttacagtgaaatgc

SEQ ID NO: 15028 - DNA, 29 bp, synthetic construct
  misc_feature 1..29: note = Probe
  source 1..29: mol_type = other DNA
aagattctaggttcgactcctggctggct

SEQ ID NO: 15029 - DNA, 27 bp, synthetic construct
  misc_feature 1..27: note = Probe
  source 1..27: mol_type = other DNA
aagattgagggttcgagtcccttcgtg

SEQ ID NO: 15030 - DNA, 28 bp, synthetic construct
  misc_feature 1..28: note = Probe
  source 1..28: mol_type = other DNA
aagattgagggttcgagtcccttcgtgg

SEQ ID NO: 15031 - DNA, 29 bp, synthetic construct
  misc_feature 1..29: note = Probe
  source 1..29: mol_type = other DNA
aagattgagggttcgagtcccttcgtggt

SEQ ID NO: 15032 - DNA, 25 bp, synthetic construct
  misc_feature 1..25: note = Probe
  source 1..25: mol_type = other DNA
aagcaatacactgaaaatgtttaga

SEQ ID NO: 15033 - DNA, 28 bp, synthetic construct
  misc_feature 1..28: note = Probe
  source 1..28: mol_type = other DNA
aagcaatacactgaaaatgtttagacgg

SEQ ID NO: 15034 - DNA, 32 bp, synthetic construct
  misc_feature 1..32: note = Probe
  source 1..32: mol_type = other DNA
aagcaatacactgaaaatgtttagacgggctc

SEQ ID NO: 15035 - DNA, 38 bp, synthetic construct
  misc_feature 1..38: note = Probe
  source 1..38: mol_type = other DNA
aagcaatacactgaaaatgtttagacgggctcacatca

SEQ ID NO: 15036 - DNA, 43 bp, synthetic construct; identical to SEQ ID NO: 78
  misc_feature 1..43: note = Probe
  source 1..43: mol_type = other DNA

SEQ ID NO: 15037 - DNA, 50 bp, synthetic construct; identical to SEQ ID NO: 2271
  misc_feature 1..50: note = Probe
  source 1..50: mol_type = other DNA

SEQ ID NO: 15038 - DNA, 16 bp, synthetic construct
  misc_feature 1..16: note = Probe
  source 1..16: mol_type = other DNA
aagcacccaacttaca

SEQ ID NO: 15039 - DNA, 17 bp, synthetic construct
  misc_feature 1..17: note = Probe
  source 1..17: mol_type = other DNA
aagcacccaacttacac

SEQ ID NO: 15040 - DNA, 18 bp, synthetic construct
  misc_feature 1..18: note = Probe
  source 1..18: mol_type = other DNA
aagcacccaacttacact

SEQ ID NO: 15041 - DNA, 19 bp, synthetic construct
  misc_feature 1..19: note = Probe
  source 1..19: mol_type = other DNA
aagcacccaacttacactt

SEQ ID NO: 15042 - DNA, 20 bp, synthetic construct
  misc_feature 1..20: note = Probe
  source 1..20: mol_type = other DNA
aagcacccaacttacactta

SEQ ID NO: 15043 - DNA, 23 bp, synthetic construct
  misc_feature 1..23: note = Probe
  source 1..23: mol_type = other DNA
aagcacccaacttacacttagga

SEQ ID NO: 15044 - DNA, 24 bp, synthetic construct
  misc_feature 1..24: note = Probe
  source 1..24: mol_type = other DNA
aagcacccaacttacacttaggag

SEQ ID NO: 15045 - DNA, 25 bp, synthetic construct
  misc_feature 1..25: note = Probe
  source 1..25: mol_type = other DNA
aagcacccaacttacacttaggaga

SEQ ID NO: 15046 - DNA, 26 bp, synthetic construct
  misc_feature 1..26: note = Probe
  source 1..26: mol_type = other DNA
aagcacccaacttacacttaggagat

SEQ ID NO: 15047 - DNA, 27 bp, synthetic construct
  misc_feature 1..27: note = Probe
  source 1..27: mol_type = other DNA
aagcacccaacttacacttaggagatt

SEQ ID NO: 15048 - DNA, 28 bp, synthetic construct
  misc_feature 1..28: note = Probe
  source 1..28: mol_type = other DNA
aagcacccaacttacacttaggagattt

SEQ ID NO: 15049 - DNA, 29 bp, synthetic construct
  misc_feature 1..29: note = Probe
  source 1..29: mol_type = other DNA
aagcacccaacttacacttaggagatttc

SEQ ID NO: 15050 - DNA, 30 bp, synthetic construct; identical to SEQ ID NO: 2277
  misc_feature 1..30: note = Probe
  source 1..30: mol_type = other DNA

SEQ ID NO: 15051 - DNA, 31 bp, synthetic construct
  misc_feature 1..31: note = Probe
  source 1..31: mol_type = other DNA
aagcacccaacttacacttaggagatttcaa

SEQ ID NO: 15052 - DNA, 32 bp, synthetic construct; identical to SEQ ID NO: 2278
  misc_feature 1..32: note = Probe
  source 1..32: mol_type = other DNA

SEQ ID NO: 15053 - DNA, 33 bp, synthetic construct; identical to SEQ ID NO: 2279
  misc_feature 1..33: note = Probe
  source 1..33: mol_type = other DNA

SEQ ID NO: 15054 - DNA, 35 bp, synthetic construct
  misc_feature 1..35: note = Probe
  source 1..35: mol_type = other DNA
aagcacccaacttacacttaggagatttcaactta

SEQ ID NO: 15055 - DNA, 36 bp, synthetic construct
  misc_feature 1..36: note = Probe
  source 1..36: mol_type = other DNA
aagcacccaacttacacttaggagatttcaacttaa

SEQ ID NO: 15056 - DNA, 38 bp, synthetic construct
  misc_feature 1..38: note = Probe
  source 1..38: mol_type = other DNA
aagcacccaacttacacttaggagatttcaacttaact

SEQ ID NO: 15057 - DNA, 39 bp, synthetic construct
  misc_feature 1..39: note = Probe
  source 1..39: mol_type = other DNA
aagcacccaacttacacttaggagatttcaacttaactt

SEQ ID NO: 15058 - DNA, 42 bp, synthetic construct
  misc_feature 1..42: note = Probe
  source 1..42: mol_type = other DNA
aagcacccaacttacacttaggagatttcaacttaacttgac

SEQ ID NO: 15059 - DNA, 44 bp, synthetic construct; identical to SEQ ID NO: 2280
  misc_feature 1..44: note = Probe
  source 1..44: mol_type = other DNA

SEQ ID NO: 15060 - DNA, 46 bp, synthetic construct
  misc_feature 1..46: note = Probe
  source 1..46: mol_type = other DNA
aagcacccaacttacacttaggagatttcaacttaacttgaccgct

SEQ ID NO: 15061 - DNA, 49 bp, synthetic construct; identical to SEQ ID NO: 2282
  misc_feature 1..49: note = Probe
  source 1..49: mol_type = other DNA

SEQ ID NO: 15062 - DNA, 50 bp, synthetic construct; identical to SEQ ID NO: 2283
  misc_feature 1..50: note = Probe
  source 1..50: mol_type = other DNA

SEQ ID NO: 15063 - DNA, 29 bp, synthetic construct
  misc_feature 1..29: note = Probe
  source 1..29: mol_type = other DNA
aagcagcttcaaacctgccggggcttctc

SEQ ID NO: 15064 - DNA, 16 bp, synthetic construct
  misc_feature 1..16: note = Probe
  source 1..16: mol_type = other DNA
aagcaggcttataggt

SEQ ID NO: 15065 - DNA, 40 bp, synthetic construct
  misc_feature 1..40: note = Probe
  source 1..40: mol_type = other DNA
aagcagtcaggatggccgagcggtctaaggcgctgcgttc

SEQ ID NO: 15066 - DNA, 17 bp, synthetic construct
  misc_feature 1..17: note = Probe
  source 1..17: mol_type = other DNA
aagcagttgacccgggt

SEQ ID NO: 15067 - DNA, 36 bp, synthetic construct
  misc_feature 1..36: note = Probe
  source 1..36: mol_type = other DNA
aagcagttgacccgggttcgattcccggccaacgca

SEQ ID NO: 15068 - DNA, 38 bp, synthetic construct
  misc_feature 1..38: note = Probe
  source 1..38: mol_type = other DNA
aagcagttgacccgggttcgattcccggccaacgcaag

SEQ ID NO: 15069 - DNA, 39 bp, synthetic construct; identical to SEQ ID NO: 2288
  misc_feature 1..39: note = Probe
  source 1..39: mol_type = other DNA

SEQ ID NO: 15070 - DNA, 38 bp, synthetic construct
  misc_feature 1..38: note = Probe
  source 1..38: mol_type = other DNA
aagcagttgacccgggttcgattcccggccaacgcagc

SEQ ID NO: 15071 - DNA, 39 bp, synthetic construct
  misc_feature 1..39: note = Probe
  source 1..39: mol_type = other DNA
aagcagttgacccgggttcgattcccggccaacgcagcg

SEQ ID NO: 15072 - DNA, 38 bp, synthetic construct
  misc_feature 1..38: note = Probe
  source 1..38: mol_type = other DNA
aagcagttgacccgggttcgattcccggccaacgcagt

SEQ ID NO: 15073 - DNA, 39 bp, synthetic construct; identical to SEQ ID NO: 2289
  misc_feature 1..39: note = Probe
  source 1..39: mol_type = other DNA

SEQ ID NO: 15074 - DNA, 38 bp, synthetic construct
  misc_feature 1..38: note = Probe
  source 1..38: mol_type = other DNA
aagcagttgacccgggttcgattcccggccaacgcatg

SEQ ID NO: 15075 - DNA, 27 bp, synthetic construct
  misc_feature 1..27: note = Probe
  source 1..27: mol_type = other DNA
aagcattggactgtaaatctaaagaca

SEQ ID NO: 15076 - DNA, 40 bp, synthetic construct; identical to SEQ ID NO: 2292
  misc_feature 1..40: note = Probe
  source 1..40: mol_type = other DNA

SEQ ID NO: 15077 - DNA, 40 bp, synthetic construct; identical to SEQ ID NO: 2293
  misc_feature 1..40: note = Probe
  source 1..40: mol_type = other DNA

SEQ ID NO: 15078 - DNA, 30 bp, synthetic construct
  misc_feature 1..30: note = Probe
  source 1..30: mol_type = other DNA
aagccagggattgtgggttcgagtcccatc

SEQ ID NO: 15079 - DNA, 34 bp, synthetic construct
  misc_feature 1..34: note = Probe
  source 1..34: mol_type = other DNA
aagccagggattgtgggttcgagtcccatctggg

SEQ ID NO: 15080 - DNA, 35 bp, synthetic construct
  misc_feature 1..35: note = Probe
  source 1..35: mol_type = other DNA
aagccagggattgtgggttcgagtcccatctgggg

SEQ ID NO: 15081 - DNA, 37 bp, synthetic construct
  misc_feature 1..37: note = Probe
  source 1..37: mol_type = other DNA
aagccagggattgtgggttcgagtcccatctggggtg

SEQ ID NO: 15082 - DNA, 38 bp, synthetic construct
  misc_feature 1..38: note = Probe
  source 1..38: mol_type = other DNA
aagccagggattgtgggttcgagtcccatctggggtgg

SEQ ID NO: 15083 - DNA, 39 bp, synthetic construct; identical to SEQ ID NO: 2294
  misc_feature 1..39: note = Probe
  source 1..39: mol_type = other DNA

SEQ ID NO: 15084 - DNA, 40 bp, synthetic construct; identical to SEQ ID NO: 2295
  misc_feature 1..40: note = Probe
  source 1..40: mol_type = other DNA

SEQ ID NO: 15085 - DNA, 25 bp, synthetic construct
  misc_feature 1..25: note = Probe
  source 1..25: mol_type = other DNA
aagcgcgtcaggatggccgagcggt

SEQ ID NO: 15086 - DNA, 26 bp, synthetic construct
  misc_feature 1..26: note = Probe
  source 1..26: mol_type = other DNA
aagcgcgtcaggatggccgagcggtc

SEQ ID NO: 15087 - DNA, 33 bp, synthetic construct
  misc_feature 1..33: note = Probe
  source 1..33: mol_type = other DNA
aagcgcgtcaggatggccgagcggtctaaggcg

SEQ ID NO: 15088 - DNA, 17 bp, synthetic construct
  misc_feature 1..17: note = Probe
  source 1..17: mol_type = other DNA
aagcgggtgctcttatt

SEQ ID NO: 15089 - DNA, 18 bp, synthetic construct
  misc_feature 1..18: note = Probe
  source 1..18: mol_type = other DNA
aagcgggtgctcttattt

SEQ ID NO: 15090 - DNA, 19 bp, synthetic construct
  misc_feature 1..19: note = Probe
  source 1..19: mol_type = other DNA
aagcgggtgctcttatttt

SEQ ID NO: 15091 - DNA, 30 bp, synthetic construct
  misc_feature 1..30: note = Probe
  source 1..30: mol_type = other DNA
aagcgtgctgggcccataacccagaggtcg

SEQ ID NO: 15092 - DNA, 31 bp, synthetic construct
  misc_feature 1..31: note = Probe
  source 1..31: mol_type = other DNA
aagcgtgctgggcccataacccagaggtcga

SEQ ID NO: 15093 - DNA, 34 bp, synthetic construct
  misc_feature 1..34: note = Probe
  source 1..34: mol_type = other DNA
aagcgtgctgggcccataacccagaggtcgatgg

SEQ ID NO: 15094 - DNA, 35 bp, synthetic construct
  misc_feature 1..35: note = Probe
  source 1..35: mol_type = other DNA
aagcgtgctgggcccataacccagaggtcgatgga

SEQ ID NO: 15095 - DNA, 16 bp, synthetic construct
  misc_feature 1..16: note = Probe
  source 1..16: mol_type = other DNA
aagctatcgggcccat

SEQ ID NO: 15096 - DNA, 17 bp, synthetic construct
  misc_feature 1..17: note = Probe
  source 1..17: mol_type = other DNA
aagctatcgggcccata

SEQ ID NO: 15097 - DNA, 21 bp, synthetic construct
  misc_feature 1..21: note = Probe
  source 1..21: mol_type = other DNA
aagctatcgggcccatacccc

SEQ ID NO: 15098 - DNA, 22 bp, synthetic construct
  misc_feature 1..22: note = Probe
  source 1..22: mol_type = other DNA
aagctatcgggcccataccccg

SEQ ID NO: 15099 - DNA, 23 bp, synthetic construct
  misc_feature 1..23: note = Probe
  source 1..23: mol_type = other DNA
aagctatcgggcccataccccga

SEQ ID NO: 15100 - DNA, 24 bp, synthetic construct
  misc_feature 1..24: note = Probe
  source 1..24: mol_type = other DNA
aagctatcgggcccataccccgaa

SEQ ID NO: 15101 - DNA, 25 bp, synthetic construct
  misc_feature 1..25: note = Probe
  source 1..25: mol_type = other DNA
aagctatcgggcccataccccgaaa

SEQ ID NO: 15102 - DNA, 26 bp, synthetic construct
  misc_feature 1..26: note = Probe
  source 1..26: mol_type = other DNA
aagctatcgggcccataccccgaaaa

SEQ ID NO: 15103 - DNA, 27 bp, synthetic construct
  misc_feature 1..27: note = Probe
  source 1..27: mol_type = other DNA
aagctatcgggcccataccccgaaaat

SEQ ID NO: 15104 - DNA, 28 bp, synthetic construct
  misc_feature 1..28: note = Probe
  source 1..28: mol_type = other DNA
aagctatcgggcccataccccgaaaatg

SEQ ID NO: 15105 - DNA, 29 bp, synthetic construct
  misc_feature 1..29: note = Probe
  source 1..29: mol_type = other DNA
aagctatcgggcccataccccgaaaatgt

SEQ ID NO: 15106 - DNA, 30 bp, synthetic construct; identical to SEQ ID NO: 2306
  misc_feature 1..30: note = Probe
  source 1..30: mol_type = other DNA

SEQ ID NO: 15107 - DNA, 31 bp, synthetic construct; identical to SEQ ID NO: 2307
  misc_feature 1..31: note = Probe
  source 1..31: mol_type = other DNA

SEQ ID NO: 15108 - DNA, 32 bp, synthetic construct; identical to SEQ ID NO: 2308
  misc_feature 1..32: note = Probe
  source 1..32: mol_type = other DNA

SEQ ID NO: 15109 - DNA, 33 bp, synthetic construct; identical to SEQ ID NO: 2309
  misc_feature 1..33: note = Probe
  source 1..33: mol_type = other DNA

SEQ ID NO: 15110 - DNA, 34 bp, synthetic construct; identical to SEQ ID NO: 2310
  misc_feature 1..34: note = Probe
  source 1..34: mol_type = other DNA

SEQ ID NO: 15111 - DNA, 35 bp, synthetic construct; identical to SEQ ID NO: 2311
  misc_feature 1..35: note = Probe
  source 1..35: mol_type = other DNA

SEQ ID NO: 15112 - DNA, 38 bp, synthetic construct
  misc_feature 1..38: note = Probe
  source 1..38: mol_type = other DNA
aagctatcgggcccataccccgaaaatgttggttatac

SEQ ID NO: 15113 - DNA, 39 bp, synthetic construct; identical to SEQ ID NO: 2312
  misc_feature 1..39: note = Probe
  source 1..39: mol_type = other DNA

SEQ ID NO: 15114 - DNA, 46 bp, synthetic construct
  misc_feature 1..46: note = Probe
  source 1..46: mol_type = other DNA
aagctatcgggcccataccccgaaaatgttggttatacccttcccg

SEQ ID NO: 15115 - DNA, 50 bp, synthetic construct; identical to SEQ ID NO: 80
  misc_feature 1..50: note = Probe
  source 1..50: mol_type = other DNA

SEQ ID NO: 15116 - DNA, 16 bp, synthetic construct
  misc_feature 1..16: note = Probe
  source 1..16: mol_type = other DNA
aagctcacaagaactg

SEQ ID NO: 15117 - DNA, 22 bp, synthetic construct
  misc_feature 1..22: note = Probe
  source 1..22: mol_type = other DNA
aagctcacaagaactgctaact

SEQ ID NO: 15118 - DNA, 23 bp, synthetic construct
  misc_feature 1..23: note = Probe
  source 1..23: mol_type = other DNA
aagctcacaagaactgctaactc

SEQ ID NO: 15119 - DNA, 24 bp, synthetic construct
  misc_feature 1..24: note = Probe
  source 1..24: mol_type = other DNA
aagctcacaagaactgctaactca

SEQ ID NO: 15120 - DNA, 26 bp, synthetic construct
  misc_feature 1..26: note = Probe
  source 1..26: mol_type = other DNA
aagctcacaagaactgctaactcatg

SEQ ID NO: 15121 - DNA, 30 bp, synthetic construct
  misc_feature 1..30: note = Probe
  source 1..30: mol_type = other DNA
aaggcgtctgacttcggatcagaagattgc

SEQ ID NO: 15122 - DNA, 26 bp, synthetic construct
  misc_feature 1..26: note = Probe
  source 1..26: mol_type = other DNA
aagggcttagcttaattaaagtggct

SEQ ID NO: 15123 - DNA, 28 bp, synthetic construct
  misc_feature 1..28: note = Probe
  source 1..28: mol_type = other DNA
aagggcttagcttaattaaagtggctga

SEQ ID NO: 15124 - DNA, 29 bp, synthetic construct
  misc_feature 1..29: note = Probe
  source 1..29: mol_type = other DNA
aagggcttagcttaattaaagtggctgat

SEQ ID NO: 15125 - DNA, 36 bp, synthetic construct
  misc_feature 1..36: note = Probe
  source 1..36: mol_type = other DNA
aagggcttagcttaattaaagtggctgatttgcgtt

SEQ ID NO: 15126 - DNA, 37 bp, synthetic construct
  misc_feature 1..37: note = Probe
  source 1..37: mol_type = other DNA
aagggcttagcttaattaaagtggctgatttgcgttc

SEQ ID NO: 15127 - DNA, 38 bp, synthetic construct
  misc_feature 1..38: note = Probe
  source 1..38: mol_type = other DNA
aagggcttagcttaattaaagtggctgatttgcgttca

SEQ ID NO: 15128 - DNA, 20 bp, synthetic construct
  misc_feature 1..20: note = Probe
  source 1..20: mol_type = other DNA
aaggtattagaaaaaccatt

SEQ ID NO: 15129 - DNA, 28 bp, synthetic construct
  misc_feature 1..28: note = Probe
  source 1..28: mol_type = other DNA
aaggtattagaaaaaccatttcataact

SEQ ID NO: 15130 - DNA, 34 bp, synthetic construct; identical to SEQ ID NO: 2332
  misc_feature 1..34: note = Probe
  source 1..34: mol_type = other DNA

SEQ ID NO: 15131 - DNA, 25 bp, synthetic construct
  misc_feature 1..25: note = Probe
  source 1..25: mol_type = other DNA
aaggtcagctaaataagctatcggg

SEQ ID NO: 15132 - DNA, 26 bp, synthetic construct
  misc_feature 1..26: note = Probe
  source 1..26: mol_type = other DNA
aaggtcagctaaataagctatcgggc

SEQ ID NO: 15133 - DNA, 27 bp, synthetic construct
  misc_feature 1..27: note = Probe
  source 1..27: mol_type = other DNA
aaggtcagctaaataagctatcgggcc

SEQ ID NO: 15134 - DNA, 28 bp, synthetic construct
  misc_feature 1..28: note = Probe
  source 1..28: mol_type = other DNA
aaggtcagctaaataagctatcgggccc

SEQ ID NO: 15135 - DNA, 29 bp, synthetic construct
  misc_feature 1..29: note = Probe
  source 1..29: mol_type = other DNA
aaggtcagctaaataagctatcgggccca

SEQ ID NO: 15136 - DNA, 30 bp, synthetic construct; identical to SEQ ID NO: 2342
  misc_feature 1..30: note = Probe
  source 1..30: mol_type = other DNA

SEQ ID NO: 15137 - DNA, 31 bp, synthetic construct; identical to SEQ ID NO: 2343
  misc_feature 1..31: note = Probe
  source 1..31: mol_type = other DNA

SEQ ID NO: 15138 - DNA, 32 bp, synthetic construct; identical to SEQ ID NO: 2344
  misc_feature 1..32: note = Probe
  source 1..32: mol_type = other DNA

SEQ ID NO: 15139 - DNA, 33 bp, synthetic construct; identical to SEQ ID NO: 2345
  misc_feature 1..33: note = Probe
  source 1..33: mol_type = other DNA

SEQ ID NO: 15140 - DNA, 35 bp, synthetic construct
  misc_feature 1..35: note = Probe
  source 1..35: mol_type = other DNA
aaggtcagctaaataagctatcgggcccatacccc

SEQ ID NO: 15141 - DNA, 38 bp, synthetic construct
  misc_feature 1..38: note = Probe
  source 1..38: mol_type = other DNA
aaggtcagctaaataagctatcgggcccataccccgaa

SEQ ID NO: 15142 - DNA, 41 bp, synthetic construct; identical to SEQ ID NO: 2350
  misc_feature 1..41: note = Probe
  source 1..41: mol_type = other DNA

SEQ ID NO: 15143 - DNA, 42 bp, synthetic construct; identical to SEQ ID NO: 2351
  misc_feature 1..42: note = Probe
  source 1..42: mol_type = other DNA

SEQ ID NO: 15144 - DNA, 43 bp, synthetic construct; identical to SEQ ID NO: 2352
  misc_feature 1..43: note = Probe
  source 1..43: mol_type = other DNA

SEQ ID NO: 15145 - DNA, 44 bp, synthetic construct; identical to SEQ ID NO: 2353
  misc_feature 1..44: note = Probe
  source 1..44: mol_type = other DNA

SEQ ID NO: 15146 - DNA, 50 bp, synthetic construct; identical to SEQ ID NO: 2358
  misc_feature 1..50: note = Probe
  source 1..50: mol_type = other DNA

SEQ ID NO: 15147 - DNA, 41 bp, synthetic construct
  misc_feature 1..41: note = Probe
  source 1..41: mol_type = other DNA
aaggtcctgagttcgaacctcagagggggcagctgccattt

SEQ ID NO: 15148 - DNA, 29 bp, synthetic construct
  misc_feature 1..29: note = Probe
  source 1..29: mol_type = other DNA
aaggtcctgggttcgagccccagtggaac

SEQ ID NO: 15149 - DNA, 31 bp, synthetic construct
  misc_feature 1..31: note = Probe
  source 1..31: mol_type = other DNA
aaggtcctgggttcgagccccagtggaacca

SEQ ID NO: 15150 - DNA, 33 bp, synthetic construct
  misc_feature 1..33: note = Probe
  source 1..33: mol_type = other DNA
aaggtcctgggttcgagccccagtggaaccacg

SEQ ID NO: 15151 - DNA, 34 bp, synthetic construct; identical to SEQ ID NO: 2360
  misc_feature 1..34: note = Probe
  source 1..34: mol_type = other DNA

SEQ ID NO: 15152 - DNA, 34 bp, synthetic construct
  misc_feature 1..34: note = Probe
  source 1..34: mol_type = other DNA
aaggtcctgggttcgagccccagtggaaccatag

SEQ ID NO: 15153 - DNA, 34 bp, synthetic construct; identical to SEQ ID NO: 2361
  misc_feature 1..34: note = Probe
  source 1..34: mol_type = other DNA

SEQ ID NO: 15154 - DNA, 34 bp, synthetic construct; identical to SEQ ID NO: 2362
  misc_feature 1..34: note = Probe
  source 1..34: mol_type = other DNA

SEQ ID NO: 15155 - DNA, 34 bp, synthetic construct
  misc_feature 1..34: note = Probe
  source 1..34: mol_type = other DNA
aaggtcgcgggttcgatccccgtactggccacgt

SEQ ID NO: 15156 - DNA, 34 bp, synthetic construct
  misc_feature 1..34: note = Probe
  source 1..34: mol_type = other DNA
aaggtcgtgagttcgatcctcacacggggcacaa

SEQ ID NO: 15157 - DNA, 29 bp, synthetic construct
  misc_feature 1..29: note = Probe
  source 1..29: mol_type = other DNA
aaggttccgggttcgagtcccggcggagt

SEQ ID NO: 15158 - DNA, 34 bp, synthetic construct
  misc_feature 1..34: note = Probe
  source 1..34: mol_type = other DNA
aaggttgcgtgttcaaatcacgtcggggtcaaca

SEQ ID NO: 15159 - DNA, 35 bp, synthetic construct; identical to SEQ ID NO: 2365
  misc_feature 1..35: note = Probe
  source 1..35: mol_type = other DNA

SEQ ID NO: 15160 - DNA, 36 bp, synthetic construct; identical to SEQ ID NO: 2366
  misc_feature 1..36: note = Probe
  source 1..36: mol_type = other DNA

SEQ ID NO: 15161 - DNA, 26 bp, synthetic construct
  misc_feature 1..26: note = Probe
  source 1..26: mol_type = other DNA
aagtcggggccagtggcgcaatggat

SEQ ID NO: 15162 - DNA, 16 bp, synthetic construct
  misc_feature 1..16: note = Probe
  source 1..16: mol_type = other DNA
aagtggttcccgtttt

SEQ ID NO: 15163 - DNA, 15 bp, synthetic construct
  misc_feature 1..15: note = Probe
  source 1..15: mol_type = other DNA
aagtgtactggaaag

SEQ ID NO: 15164 - DNA, 24 bp, synthetic construct
  misc_feature 1..24: note = Probe
  source 1..24: mol_type = other DNA
aagtgtactggaaagtgcacttgg

SEQ ID NO: 15165 - DNA, 25 bp, synthetic construct
  misc_feature 1..25: note = Probe
  source 1..25: mol_type = other DNA
aagtgtactggaaagtgcacttgga

SEQ ID NO: 15166 - DNA, 26 bp, synthetic construct
  misc_feature 1..26: note = Probe
  source 1..26: mol_type = other DNA
aagtgtactggaaagtgcacttggac

SEQ ID NO: 15167 - DNA, 27 bp, synthetic construct
  misc_feature 1..27: note = Probe
  source 1..27: mol_type = other DNA
aagtgtactggaaagtgcacttggacg

SEQ ID NO: 15168 - DNA, 28 bp, synthetic construct
  misc_feature 1..28: note = Probe
  source 1..28: mol_type = other DNA
aagtgtactggaaagtgcacttggacga

SEQ ID NO: 15169 - DNA, 29 bp, synthetic construct
  misc_feature 1..29: note = Probe
  source 1..29: mol_type = other DNA
aagtgtactggaaagtgcacttggacgaa

SEQ ID NO: 15170 - DNA, 30 bp, synthetic construct; identical to SEQ ID NO: 2379
  misc_feature 1..30: note = Probe
  source 1..30: mol_type = other DNA

SEQ ID NO: 15171 - DNA, 31 bp, synthetic construct; identical to SEQ ID NO: 2380
  misc_feature 1..31: note = Probe
  source 1..31: mol_type = other DNA

SEQ ID NO: 15172 - DNA, 32 bp, synthetic construct; identical to SEQ ID NO: 2381
  misc_feature 1..32: note = Probe
  source 1..32: mol_type = other DNA

SEQ ID NO: 15173 - DNA, 33 bp, synthetic construct; identical to SEQ ID NO: 2382
  misc_feature 1..33: note = Probe
  source 1..33: mol_type = other DNA

SEQ ID NO: 15174 - DNA, 34 bp, synthetic construct; identical to SEQ ID NO: 2383
  misc_feature 1..34: note = Probe
  source 1..34: mol_type = other DNA

SEQ ID NO: 15175 - DNA, 35 bp, synthetic construct; identical to SEQ ID NO: 2384
  misc_feature 1..35: note = Probe
  source 1..35: mol_type = other DNA

SEQ ID NO: 15176 - DNA, 36 bp, synthetic construct; identical to SEQ ID NO: 2385
  misc_feature 1..36: note = Probe
  source 1..36: mol_type = other DNA

SEQ ID NO: 15177 - DNA, 39 bp, synthetic construct; identical to SEQ ID NO: 2387
  misc_feature 1..39: note = Probe
  source 1..39: mol_type = other DNA

SEQ ID NO: 15178 - DNA, 26 bp, synthetic construct
  misc_feature 1..26: note = Probe
  source 1..26: mol_type = other DNA
aagtgtttgtgggtttaagtcccatt

SEQ ID NO: 15179 - DNA, 27 bp, synthetic construct
  misc_feature 1..27: note = Probe
  source 1..27: mol_type = other DNA
aagtgtttgtgggtttaagtcccattg

SEQ ID NO: 15180 - DNA, 28 bp, synthetic construct
  misc_feature 1..28: note = Probe
  source 1..28: mol_type = other DNA
aagtgtttgtgggtttaagtcccattgg

SEQ ID NO: 15181 - DNA, 29 bp, synthetic construct
  misc_feature 1..29: note = Probe
  source 1..29: mol_type = other DNA
aagtgtttgtgggtttaagtcccattggt

SEQ ID NO: 15182 - DNA, 34 bp, synthetic construct; identical to SEQ ID NO: 2393
  misc_feature 1..34: note = Probe
  source 1..34: mol_type = other DNA

SEQ ID NO: 15183 - DNA, 35 bp, synthetic construct; identical to SEQ ID NO: 2394
  misc_feature 1..35: note = Probe
  source 1..35: mol_type = other DNA

SEQ ID NO: 15184 - DNA, 36 bp, synthetic construct
  misc_feature 1..36: note = Probe
  source 1..36: mol_type = other DNA
aagtgtttgtgggtttaagtcccattggtctagtaa

SEQ ID NO: 15185 - DNA, 38 bp, synthetic construct; identical to SEQ ID NO: 2395
  misc_feature 1..38: note = Probe
  source 1..38: mol_type = other DNA

SEQ ID NO: 15186 - DNA, 39 bp, synthetic construct; identical to SEQ ID NO: 2396
  misc_feature 1..39: note = Probe
  source 1..39: mol_type = other DNA

SEQ ID NO: 15187 - DNA, 40 bp, synthetic construct; identical to SEQ ID NO: 2397
  misc_feature 1..40: note = Probe
  source 1..40: mol_type = other DNA

SEQ ID NO: 15188 - DNA, 41 bp, synthetic construct; identical to SEQ ID NO: 2398
  misc_feature 1..41: note = Probe
  source 1..41: mol_type = other DNA

SEQ ID NO: 15189 - DNA, 42 bp, synthetic construct; identical to SEQ ID NO: 2399
  misc_feature 1..42: note = Probe
  source 1..42: mol_type = other DNA

SEQ ID NO: 15190 - DNA, 43 bp, synthetic construct
  misc_feature 1..43: note = Probe
  source 1..43: mol_type = other DNA
aagttaaagattaagagaaccaacacctctttacagtgaaatg

SEQ ID NO: 15191 - DNA, 44 bp, synthetic construct; identical to SEQ ID NO: 2400
  misc_feature 1..44: note = Probe
  source 1..44: mol_type = other DNA

SEQ ID NO: 15192 - DNA, 49 bp, synthetic construct; identical to SEQ ID NO: 2401
  misc_feature 1..49: note = Probe
  source 1..49: mol_type = other DNA

SEQ ID NO: 15193 - DNA, 50 bp, synthetic construct; identical to SEQ ID NO: 2402
  misc_feature 1..50: note = Probe
  source 1..50: mol_type = other DNA

SEQ ID NO: 15194 - DNA, 33 bp, synthetic construct
  misc_feature 1..33: note = Probe
  source 1..33: mol_type = other DNA
aagttccctggtggtctagtggttaggattcgg

SEQ ID NO: 15195 - DNA, 36 bp, synthetic construct
  misc_feature 1..36: note = Probe
  source 1..36: mol_type = other DNA
aagttccctggtggtctagtggttaggattcggcgc

SEQ ID NO: 15196 - DNA, 37 bp, synthetic construct
  misc_feature 1..37: note = Probe
  source 1..37: mol_type = other DNA
aagttccctggtggtctagtggttaggattcggcgct

SEQ ID NO: 15197 - DNA, 38 bp, synthetic construct
  misc_feature 1..38: note = Probe
  source 1..38: mol_type = other DNA
aagttccctggtggtctagtggttaggattcggcgctc

SEQ ID NO: 15198 - DNA, 40 bp, synthetic construct
  misc_feature 1..40: note = Probe
  source 1..40: mol_type = other DNA
aagttccctggtggtctagtggttaggattcggcgctctc

SEQ ID NO: 15199 - DNA, 21 bp, synthetic construct
  misc_feature 1..21: note = Probe
  source 1..21: mol_type = other DNA
aataacgccaaggtcgcgggt

SEQ ID NO: 15200 - DNA, 20 bp, synthetic construct
  misc_feature 1..20: note = Probe
  source 1..20: mol_type = other DNA
aataagctatcgggcccata

SEQ ID NO: 15201 - DNA, 28 bp, synthetic construct
  misc_feature 1..28: note = Probe
  source 1..28: mol_type = other DNA
aataagctatcgggcccataccccgaaa

SEQ ID NO: 15202 - DNA, 29 bp, synthetic construct
  misc_feature 1..29: note = Probe
  source 1..29: mol_type = other DNA
aataagctatcgggcccataccccgaaaa

SEQ ID NO: 15203 - DNA, 30 bp, synthetic construct; identical to SEQ ID NO: 2407
  misc_feature 1..30: note = Probe
  source 1..30: mol_type = other DNA

SEQ ID NO: 15204 - DNA, 31 bp, synthetic construct; identical to SEQ ID NO: 2408
  misc_feature 1..31: note = Probe
  source 1..31: mol_type = other DNA

SEQ ID NO: 15205 - DNA, 33 bp, synthetic construct; identical to SEQ ID NO: 2412
  misc_feature 1..33: note = Probe
  source 1..33: mol_type = other DNA

SEQ ID NO: 15206 - DNA, 49 bp, synthetic construct; identical to SEQ ID NO: 2416
  misc_feature 1..49: note = Probe
  source 1..49: mol_type = other DNA

SEQ ID NO: 15207 - DNA, 50 bp, synthetic construct; identical to SEQ ID NO: 2417
  misc_feature 1..50: note = Probe
  source 1..50: mol_type = other DNA

SEQ ID NO: 15208 - DNA, 20 bp, synthetic construct
  misc_feature 1..20: note = Probe
  source 1..20: mol_type = other DNA
aatacagaccaagagccttc

SEQ ID NO: 15209 - DNA, 24 bp, synthetic construct
  misc_feature 1..24: note = Probe
  source 1..24: mol_type = other DNA
aataggtttggtcctagcctttct

SEQ ID NO: 15210 - DNA, 30 bp, synthetic construct; identical to SEQ ID NO: 2424
  misc_feature 1..30: note = Probe
  source 1..30: mol_type = other DNA

SEQ ID NO: 15211 - DNA, 37 bp, synthetic construct
  misc_feature 1..37: note = Probe
  source 1..37: mol_type = other DNA
aatagtaccgttaacttccaattaactagttttgaca

SEQ ID NO: 15212 - DNA, 16 bp, synthetic construct
  misc_feature 1..16: note = Probe
  source 1..16: mol_type = other DNA
aatcagagaaaaagtc

SEQ ID NO: 15213 - DNA, 24 bp, synthetic construct
  misc_feature 1..24: note = Probe
  source 1..24: mol_type = other DNA
aatcagagaaaaagtctttaactc

SEQ ID NO: 15214 - DNA, 25 bp, synthetic construct
  misc_feature 1..25: note = Probe
  source 1..25: mol_type = other DNA
aatcagagaaaaagtctttaactcc

SEQ ID NO: 15215 - DNA, 26 bp, synthetic construct
  misc_feature 1..26: note = Probe
  source 1..26: mol_type = other DNA
aatcagagaaaaagtctttaactcca

SEQ ID NO: 15216 - DNA, 28 bp, synthetic construct
  misc_feature 1..28: note = Probe
  source 1..28: mol_type = other DNA
aatcagagaaaaagtctttaactccacc

SEQ ID NO: 15217 - DNA, 29 bp, synthetic construct
  misc_feature 1..29: note = Probe
  source 1..29: mol_type = other DNA
aatcagagaaaaagtctttaactccacca

SEQ ID NO: 15218 - DNA, 30 bp, synthetic construct
  misc_feature 1..30: note = Probe
  source 1..30: mol_type = other DNA
aatcagagaaaaagtctttaactccaccat

SEQ ID NO: 15219 - DNA, 16 bp, synthetic construct
  misc_feature 1..16: note = Probe
  source 1..16: mol_type = other DNA
aatccagcgatccgag

SEQ ID NO: 15220 - DNA, 18 bp, synthetic construct
  misc_feature 1..18: note = Probe
  source 1..18: mol_type = other DNA
aatccagcgatccgagtt

SEQ ID NO: 15221 - DNA, 19 bp, synthetic construct
  misc_feature 1..19: note = Probe
  source 1..19: mol_type = other DNA
aatccagcgatccgagttc

SEQ ID NO: 15222 - DNA, 21 bp, synthetic construct
  misc_feature 1..21: note = Probe
  source 1..21: mol_type = other DNA
aatccagcgatccgagttcaa

SEQ ID NO: 15223 - DNA, 22 bp, synthetic construct
  misc_feature 1..22: note = Probe
  source 1..22: mol_type = other DNA
aatccagcgatccgagttcaaa

SEQ ID NO: 15224 - DNA, 23 bp, synthetic construct
  misc_feature 1..23: note = Probe
  source 1..23: mol_type = other DNA
aatccagcgatccgagttcaaat

SEQ ID NO: 15225 - DNA, 33 bp, synthetic construct
  misc_feature 1..33: note = Probe
  source 1..33: mol_type = other DNA
aatccagcgatccgagttcaaatctcggtggaa

SEQ ID NO: 15226 - DNA, 34 bp, synthetic construct
  misc_feature 1..34: note = Probe
  source 1..34: mol_type = other DNA
aatccagcgatccgagttcaaatctcggtggaac

SEQ ID NO: 15227 - DNA, 37 bp, synthetic construct; identical to SEQ ID NO: 2430
  misc_feature 1..37: note = Probe
  source 1..37: mol_type = other DNA

SEQ ID NO: 15228 - DNA, 38 bp, synthetic construct; identical to SEQ ID NO: 2431
  misc_feature 1..38: note = Probe
  source 1..38: mol_type = other DNA

SEQ ID NO: 15229 - DNA, 39 bp, synthetic construct; identical to SEQ ID NO: 2432
  misc_feature 1..39: note = Probe
  source 1..39: mol_type = other DNA

SEQ ID NO: 15230 - DNA, 37 bp, synthetic construct; identical to SEQ ID NO: 2436
  misc_feature 1..37: note = Probe
  source 1..37: mol_type = other DNA

SEQ ID NO: 15231 - DNA, 34 bp, synthetic construct; identical to SEQ ID NO: 2440
  misc_feature 1..34: note = Probe
  source 1..34: mol_type = other DNA

SEQ ID NO: 15232 - DNA, 38 bp, synthetic construct; identical to SEQ ID NO: 2441
  misc_feature 1..38: note = Probe
  source 1..38: mol_type = other DNA

SEQ ID NO: 15233 - DNA, 39 bp, synthetic construct; identical to SEQ ID NO: 2442
  misc_feature 1..39: note = Probe
  source 1..39: mol_type = other DNA

SEQ ID NO: 15234 - DNA, 36 bp, synthetic construct
  misc_feature 1..36: note = Probe
  source 1..36: mol_type = other DNA
aatccagcgatccgagttcaagtctcggtggaacct

SEQ ID NO: 15235 - DNA, 37 bp, synthetic construct
  misc_feature 1..37: note = Probe
  source 1..37: mol_type = other DNA
aatccagcgatccgagttcaagtctcggtggaacctg

SEQ ID NO: 15236 - DNA, 39 bp, synthetic construct
  misc_feature 1..39: note = Probe
  source 1..39: mol_type = other DNA
aatccagcgatccgagttcaagtctcggtggaacctgct

SEQ ID NO: 15237 - DNA, 36 bp, synthetic construct
  misc_feature 1..36: note = Probe
  source 1..36: mol_type = other DNA
aatccagcgatccgagttcgagtctcggtggaacct

SEQ ID NO: 15238 - DNA, 39 bp, synthetic construct; identical to SEQ ID NO: 2447
  misc_feature 1..39: note = Probe
  source 1..39: mol_type = other DNA

SEQ ID NO: 15239 - DNA, 17 bp, synthetic construct
  misc_feature 1..17: note = Probe
  source 1..17: mol_type = other DNA
aatcccaccgctgccac

SEQ ID NO: 15240 - DNA, 18 bp, synthetic construct
  misc_feature 1..18: note = Probe
  source 1..18: mol_type = other DNA
aatcccaccgctgccaca

SEQ ID NO: 15241 - DNA, 19 bp, synthetic construct
  misc_feature 1..19: note = Probe
  source 1..19: mol_type = other DNA
aatcccaccgctgccacac

SEQ ID NO: 15242 - DNA, 19 bp, synthetic construct
  misc_feature 1..19: note = Probe
  source 1..19: mol_type = other DNA
aatcccaccgctgccaggt

SEQ ID NO: 15243 - DNA, 16 bp, synthetic construct
  misc_feature 1..16: note = Probe
  source 1..16: mol_type = other DNA
aatcccactcctgaca

SEQ ID NO: 15244 - DNA, 16 bp, synthetic construct
  misc_feature 1..16: note = Probe
  source 1..16: mol_type = other DNA
aatcccacttctgaca

SEQ ID NO: 15245 - DNA, 17 bp, synthetic construct
  misc_feature 1..17: note = Probe
  source 1..17: mol_type = other DNA
aatcccacttctgacac

SEQ ID NO: 15246 - DNA, 19 bp, synthetic construct
  misc_feature 1..19: note = Probe
  source 1..19: mol_type = other DNA
aatcccagcggtgcctccg

SEQ ID NO: 15247 - DNA, 18 bp, synthetic construct
  misc_feature 1..18: note = Probe
  source 1..18: mol_type = other DNA
aatcccatcctcgtcgct

SEQ ID NO: 15248 - DNA, 16 bp, synthetic construct
  misc_feature 1..16: note = Probe
  source 1..16: mol_type = other DNA
aatcccggacgagccc

SEQ ID NO: 15249 - DNA, 17 bp, synthetic construct
  misc_feature 1..17: note = Probe
  source 1..17: mol_type = other DNA
aatcccggacgagccca

SEQ ID NO: 15250 - DNA, 17 bp, synthetic construct
  misc_feature 1..17: note = Probe
  source 1..17: mol_type = other DNA
aatcccggacgagcccc

SEQ ID NO: 15251 - DNA, 17 bp, synthetic construct
  misc_feature 1..17: note = Probe
  source 1..17: mol_type = other DNA
aatcccggacgagccct

SEQ ID NO: 15252 - DNA, 18 bp, synthetic construct
  misc_feature 1..18: note = Probe
  source 1..18: mol_type = other DNA
aatccgggtgccccctca

SEQ ID NO: 15253 - DNA, 19 bp, synthetic construct
  misc_feature 1..19: note = Probe
  source 1..19: mol_type = other DNA
aatccgggtgccccctcaa

SEQ ID NO: 15254 - DNA, 17 bp, synthetic construct
  misc_feature 1..17: note = Probe
  source 1..17: mol_type = other DNA
aatccgggtgccccctg

SEQ ID NO: 15255 - DNA, 17 bp, synthetic construct
  misc_feature 1..17: note = Probe
  source 1..17: mol_type = other DNA
aatccgggtgccccctt

SEQ ID NO: 15256 - DNA, 19 bp, synthetic construct
  misc_feature 1..19: note = Probe
  source 1..19: mol_type = other DNA
aatcctatatatcttaatg

SEQ ID NO: 15257 - DNA, 21 bp, synthetic construct
  misc_feature 1..21: note = Probe
  source 1..21: mol_type = other DNA
aatcgcataaaacttaaaact

SEQ ID NO: 15258 - DNA, 29 bp, synthetic construct
  misc_feature 1..29: note = Probe
  source 1..29: mol_type = other DNA
aatcgcataaaacttaaaactttacagtc

SEQ ID NO: 15259 - DNA, 32 bp, synthetic construct
  misc_feature 1..32: note = Probe
  source 1..32: mol_type = other DNA
aatcgcataaaacttaaaactttacagtcaga

SEQ ID NO: 15260 - DNA, 37 bp, synthetic construct; identical to SEQ ID NO: 2460
  misc_feature 1..37: note = Probe
  source 1..37: mol_type = other DNA

SEQ ID NO: 15261 - DNA, 38 bp, synthetic construct
  misc_feature 1..38: note = Probe
  source 1..38: mol_type = other DNA
aatcgcataaaacttaaaactttacagtcagaggttca

SEQ ID NO: 15262 - DNA, 50 bp, synthetic construct; identical to SEQ ID NO: 101
  misc_feature 1..50: note = Probe
  source 1..50: mol_type = other DNA

SEQ ID NO: 15263 - DNA, 30 bp, synthetic construct; identical to SEQ ID NO: 2465
  misc_feature 1..30: note = Probe
  source 1..30: mol_type = other DNA

SEQ ID NO: 15264 - DNA, 33 bp, synthetic construct; identical to SEQ ID NO: 102
  misc_feature 1..33: note = Probe
  source 1..33: mol_type = other DNA

SEQ ID NO: 15265 - DNA, 34 bp, synthetic construct; identical to SEQ ID NO: 103
  misc_feature 1..34: note = Probe
  source 1..34: mol_type = other DNA

SEQ ID NO: 15266 - DNA, 35 bp, synthetic construct
  misc_feature 1..35: note = Probe
  source 1..35: mol_type = other DNA
aatctaaagacaggggttaggcctctttttaccag

SEQ ID NO: 15267 - DNA, 36 bp, synthetic construct; identical to SEQ ID NO: 2466
  misc_feature 1..36: note = Probe
  source 1..36: mol_type = other DNA

SEQ ID NO: 15268 - DNA, 37 bp, synthetic construct; identical to SEQ ID NO: 2467
  misc_feature 1..37: note = Probe
  source 1..37: mol_type = other DNA

SEQ ID NO: 15269 - DNA, 38 bp, synthetic construct; identical to SEQ ID NO: 2468
  misc_feature 1..38: note = Probe
  source 1..38: mol_type = other DNA

SEQ ID NO: 15270 - DNA, 40 bp, synthetic construct; identical to SEQ ID NO: 2472
  misc_feature 1..40: note = Probe
  source 1..40: mol_type = other DNA

SEQ ID NO: 15271 - DNA, 27 bp, synthetic construct
  misc_feature 1..27: note = Probe
  source 1..27: mol_type = other DNA
aatctgacaacagaggcttacgacccc

SEQ ID NO: 15272 - DNA, 28 bp, synthetic construct
  misc_feature 1..28: note = Probe
  source 1..28: mol_type = other DNA
aatctgacaacagaggcttacgacccct

SEQ ID NO: 15273 - DNA, 29 bp, synthetic construct
  misc_feature 1..29: note = Probe
  source 1..29: mol_type = other DNA
aatctgacaacagaggcttacgacccctt

SEQ ID NO: 15274 - DNA, 31 bp, synthetic construct; identical to SEQ ID NO: 107
  misc_feature 1..31: note = Probe
  source 1..31: mol_type = other DNA

SEQ ID NO: 15275 - DNA, 32 bp, synthetic construct; identical to SEQ ID NO: 108
  misc_feature 1..32: note = Probe
  source 1..32: mol_type = other DNA

SEQ ID NO: 15276 - DNA, 33 bp, synthetic construct; identical to SEQ ID NO: 2477
  misc_feature 1..33: note = Probe
  source 1..33: mol_type = other DNA

SEQ ID NO: 15277 - DNA, 34 bp, synthetic construct; identical to SEQ ID NO: 109
  misc_feature 1..34: note = Probe
  source 1..34: mol_type = other DNA

SEQ ID NO: 15278 - DNA, 37 bp, synthetic construct; identical to SEQ ID NO: 2478
  misc_feature 1..37: note = Probe
  source 1..37: mol_type = other DNA

SEQ ID NO: 15279 - DNA, 38 bp, synthetic construct; identical to SEQ ID NO: 2479
  misc_feature 1..38: note = Probe
  source 1..38: mol_type = other DNA

SEQ ID NO: 15280 - DNA, 39 bp, synthetic construct; identical to SEQ ID NO: 2480
  misc_feature 1..39: note = Probe
  source 1..39: mol_type = other DNA

SEQ ID NO: 15281 - DNA, 50 bp, synthetic construct; identical to SEQ ID NO: 2483
  misc_feature 1..50: note = Probe
  source 1..50: mol_type = other DNA

SEQ ID NO: 15282 - DNA, 16 bp, synthetic construct
  misc_feature 1..16: note = Probe
  source 1..16: mol_type = other DNA
aatgccccaactaaat

SEQ ID NO: 15283 - DNA, 17 bp, synthetic construct
  misc_feature 1..17: note = Probe
  source 1..17: mol_type = other DNA
aatgccccaactaaata

SEQ ID NO: 15284 - DNA, 18 bp, synthetic construct
  misc_feature 1..18: note = Probe
  source 1..18: mol_type = other DNA
aatgccccaactaaatac

SEQ ID NO: 15285 - DNA, 19 bp, synthetic construct
  misc_feature 1..19: note = Probe
  source 1..19: mol_type = other DNA
aatgccccaactaaatact

SEQ ID NO: 15286 - DNA, 20 bp, synthetic construct
  misc_feature 1..20: note = Probe
  source 1..20: mol_type = other DNA
aatgccccaactaaatacta

SEQ ID NO: 15287 - DNA, 21 bp, synthetic construct
  misc_feature 1..21: note = Probe
  source 1..21: mol_type = other DNA
aatgccccaactaaatactac

SEQ ID NO: 15288 - DNA, 22 bp, synthetic construct
  misc_feature 1..22: note = Probe
  source 1..22: mol_type = other DNA
aatgccccaactaaatactacc

SEQ ID NO: 15289 - DNA, 23 bp, synthetic construct
  misc_feature 1..23: note = Probe
  source 1..23: mol_type = other DNA
aatgccccaactaaatactaccg

SEQ ID NO: 15290 - DNA, 24 bp, synthetic construct
  misc_feature 1..24: note = Probe
  source 1..24: mol_type = other DNA
aatgccccaactaaatactaccgt

SEQ ID NO: 15291 - DNA, 25 bp, synthetic construct
  misc_feature 1..25: note = Probe
  source 1..25: mol_type = other DNA
aatgccccaactaaatactaccgta

SEQ ID NO: 15292 - DNA, 26 bp, synthetic construct
  misc_feature 1..26: note = Probe
  source 1..26: mol_type = other DNA
aatgccccaactaaatactaccgtat

SEQ ID NO: 15293 - DNA, 27 bp, synthetic construct
  misc_feature 1..27: note = Probe
  source 1..27: mol_type = other DNA
aatgccccaactaaatactaccgtatg

SEQ ID NO: 15294 - DNA, 28 bp, synthetic construct
  misc_feature 1..28: note = Probe
  source 1..28: mol_type = other DNA
aatgccccaactaaatactaccgtatgg

SEQ ID NO: 15295 - DNA, 29 bp, synthetic construct
  misc_feature 1..29: note = Probe
  source 1..29: mol_type = other DNA
aatgccccaactaaatactaccgtatggc

SEQ ID NO: 15296 - DNA, 29 bp, synthetic construct
  misc_feature 1..29: note = Probe
  source 1..29: mol_type = other DNA
aatggtggagttaaagactttttctctga

SEQ ID NO: 15297 - DNA, 30 bp, synthetic construct; identical to SEQ ID NO: 8969
  misc_feature 1..30: note = Probe
  source 1..30: mol_type = other DNA

SEQ ID NO: 15298 - DNA, 31 bp, synthetic construct; identical to SEQ ID NO: 2497
  misc_feature 1..31: note = Probe
  source 1..31: mol_type = other DNA

SEQ ID NO: 15299 - DNA, 32 bp, synthetic construct; identical to SEQ ID NO: 2498
  misc_feature 1..32: note = Probe
  source 1..32: mol_type = other DNA

SEQ ID NO: 15300 - DNA, 36 bp, synthetic construct; identical to SEQ ID NO: 2500
  misc_feature 1..36: note = Probe
  source 1..36: mol_type = other DNA

SEQ ID NO: 15301 - DNA, 38 bp, synthetic construct
  misc_feature 1..38: note = Probe
  source 1..38: mol_type = other DNA
aatggttagcactctggactctgaatccagcgatccga

SEQ ID NO: 15302 - DNA, 39 bp, synthetic construct
  misc_feature 1..39: note = Probe
  source 1..39: mol_type = other DNA
aatggttagcactctggactttgaatccagcgatccgag

SEQ ID NO: 15303 - DNA, 37 bp, synthetic construct; identical to SEQ ID NO: 2501
  misc_feature 1..37: note = Probe
  source 1..37: mol_type = other DNA

SEQ ID NO: 15304 - DNA, 38 bp, synthetic construct
  misc_feature 1..38: note = Probe
  source 1..38: mol_type = other DNA
aatgtttagacgggctcacatcaccccataaacaaata

SEQ ID NO: 15305 - DNA, 33 bp, synthetic construct
  misc_feature 1..33: note = Probe
  source 1..33: mol_type = other DNA
aattaactagttttgacaacattcaaaaaagag

SEQ ID NO: 15306 - DNA, 36 bp, synthetic construct
  misc_feature 1..36: note = Probe
  source 1..36: mol_type = other DNA
aattaactagttttgacaacattcaaaaaagagtaa

SEQ ID NO: 15307 - DNA, 38 bp, synthetic construct; identical to SEQ ID NO: 2503
  misc_feature 1..38: note = Probe
  source 1..38: mol_type = other DNA

SEQ ID NO: 15308 - DNA, 33 bp, synthetic construct; identical to SEQ ID NO: 2504
  misc_feature 1..33: note = Probe
  source 1..33: mol_type = other DNA

SEQ ID NO: 15309 - DNA, 38 bp, synthetic construct
  misc_feature 1..38: note = Probe
  source 1..38: mol_type = other DNA
aattagaatcttagctttgggtgctaatggtggagtta

SEQ ID NO: 15310 - DNA, 20 bp, synthetic construct
  misc_feature 1..20: note = Probe
  source 1..20: mol_type = other DNA
aattcccggtcagggaacca

SEQ ID NO: 15311 - DNA, 37 bp, synthetic construct; identical to SEQ ID NO: 2507
  misc_feature 1..37: note = Probe
  source 1..37: mol_type = other DNA

SEQ ID NO: 15312 - DNA, 38 bp, synthetic construct; identical to SEQ ID NO: 2508
  misc_feature 1..38: note = Probe
  source 1..38: mol_type = other DNA

SEQ ID NO: 15313 - DNA, 39 bp, synthetic construct; identical to SEQ ID NO: 2509
  misc_feature 1..39: note = Probe
  source 1..39: mol_type = other DNA

SEQ ID NO: 15314 - DNA, 16 bp, synthetic construct
  misc_feature 1..16: note = Probe
  source 1..16: mol_type = other DNA
aattctcgcctgccac

SEQ ID NO: 15315 - DNA, 17 bp, synthetic construct
  misc_feature 1..17: note = Probe
  source 1..17: mol_type = other DNA
aattctcgcctgccacg

SEQ ID NO: 15316 - DNA, 18 bp, synthetic construct
  misc_feature 1..18: note = Probe
  source 1..18: mol_type = other DNA
aattctcgcctgccacgc

SEQ ID NO: 15317 - DNA, 31 bp, synthetic construct
  misc_feature 1..31: note = Probe
  source 1..31: mol_type = other DNA
aattctcgcctgccacgcgggaggcccgggt

SEQ ID NO: 15318 - DNA, 39 bp, synthetic construct; identical to SEQ ID NO: 2515
  misc_feature 1..39: note = Probe
  source 1..39: mol_type = other DNA

SEQ ID NO: 15319 - DNA, 40 bp, synthetic construct; identical to SEQ ID NO: 2516
  misc_feature 1..40: note = Probe
  source 1..40: mol_type = other DNA

SEQ ID NO: 15320 - DNA, 45 bp, synthetic construct; identical to SEQ ID NO: 2521
  misc_feature 1..45: note = Probe
  source 1..45: mol_type = other DNA

SEQ ID NO: 15321 - DNA, 50 bp, synthetic construct; identical to SEQ ID NO: 2525
  misc_feature 1..50: note = Probe
  source 1..50: mol_type = other DNA

SEQ ID NO: 15322 - DNA, 28 bp, synthetic construct
  misc_feature 1..28: note = Probe
  source 1..28: mol_type = other DNA
acaaagcacccaacttacacttaggaga

SEQ ID NO: 15323 - DNA, 30 bp, synthetic construct; identical to SEQ ID NO: 2537
  misc_feature 1..30: note = Probe
  source 1..30: mol_type = other DNA

SEQ ID NO: 15324 - DNA, 36 bp, synthetic construct
  misc_feature 1..36: note = Probe
  source 1..36: mol_type = other DNA
acaaagcacccaacttacacttaggagatttcaact

SEQ ID NO: 15325 - DNA, 50 bp, synthetic construct; identical to SEQ ID NO: 117
  misc_feature 1..50: note = Probe
  source 1..50: mol_type = other DNA

SEQ ID NO: 15326 - DNA, 15 bp, synthetic construct
  misc_feature 1..15: note = Probe
  source 1..15: mol_type = other DNA
acaacagaggcttac

SEQ ID NO: 15327 - DNA, 16 bp, synthetic construct
  misc_feature 1..16: note = Probe
  source 1..16: mol_type = other DNA
acaacagaggcttacg

SEQ ID NO: 15328 - DNA, 17 bp, synthetic construct
  misc_feature 1..17: note = Probe
  source 1..17: mol_type = other DNA
acaacagaggcttacga

SEQ ID NO: 15329 - DNA, 19 bp, synthetic construct
  misc_feature 1..19: note = Probe
  source 1..19: mol_type = other DNA
acaacagaggcttacgacc

SEQ ID NO: 15330 - DNA, 20 bp, synthetic construct
  misc_feature 1..20: note = Probe
  source 1..20: mol_type = other DNA
acaacagaggcttacgaccc

SEQ ID NO: 15331 - DNA, 21 bp, synthetic construct
  misc_feature 1..21: note = Probe
  source 1..21: mol_type = other DNA
acaacagaggcttacgacccc

SEQ ID NO: 15332 - DNA, 22 bp, synthetic construct
  misc_feature 1..22: note = Probe
  source 1..22: mol_type = other DNA
acaacagaggcttacgacccct

SEQ ID NO: 15333 - DNA, 23 bp, synthetic construct
  misc_feature 1..23: note = Probe
  source 1..23: mol_type = other DNA
acaacagaggcttacgacccctt

SEQ ID NO: 15334 - DNA, 24 bp, synthetic construct
  misc_feature 1..24: note = Probe
  source 1..24: mol_type = other DNA
acaacagaggcttacgacccctta

SEQ ID NO: 15335 - DNA, 25 bp, synthetic construct
  misc_feature 1..25: note = Probe
  source 1..25: mol_type = other DNA
acaacagaggcttacgaccccttat

SEQ ID NO: 15336 - DNA, 26 bp, synthetic construct
  misc_feature 1..26: note = Probe
  source 1..26: mol_type = other DNA
acaacagaggcttacgaccccttatt

SEQ ID NO: 15337 - DNA, 27 bp, synthetic construct
  misc_feature 1..27: note = Probe
  source 1..27: mol_type = other DNA
acaacagaggcttacgaccccttattt

SEQ ID NO: 15338 - DNA, 28 bp, synthetic construct
  misc_feature 1..28: note = Probe
  source 1..28: mol_type = other DNA
acaacagaggcttacgaccccttattta

SEQ ID NO: 15339 - DNA, 29 bp, synthetic construct
  misc_feature 1..29: note = Probe
  source 1..29: mol_type = other DNA
acaacagaggcttacgaccccttatttac

SEQ ID NO: 15340 - DNA, 30 bp, synthetic construct; identical to SEQ ID NO: 2562
  misc_feature 1..30: note = Probe
  source 1..30: mol_type = other DNA

SEQ ID NO: 15341 - DNA, 31 bp, synthetic construct; identical to SEQ ID NO: 2563
  misc_feature 1..31: note = Probe
  source 1..31: mol_type = other DNA

SEQ ID NO: 15342 - DNA, 32 bp, synthetic construct; identical to SEQ ID NO: 2564
  misc_feature 1..32: note = Probe
  source 1..32: mol_type = other DNA

SEQ ID NO: 15343 - DNA, 33 bp, synthetic construct; identical to SEQ ID NO: 2565
  misc_feature 1..33: note = Probe
  source 1..33: mol_type = other DNA

SEQ ID NO: 15344 - DNA, 34 bp, synthetic construct; identical to SEQ ID NO: 2566
  misc_feature 1..34: note = Probe
  source 1..34: mol_type = other DNA

SEQ ID NO: 15345 - DNA, 35 bp, synthetic construct; identical to SEQ ID NO: 2567
  misc_feature 1..35: note = Probe
  source 1..35: mol_type = other DNA

SEQ ID NO: 15346 - DNA, 36 bp, synthetic construct; identical to SEQ ID NO: 2568
  misc_feature 1..36: note = Probe
  source 1..36: mol_type = other DNA

SEQ ID NO: 15347 - DNA, 38 bp, synthetic construct; identical to SEQ ID NO: 2570
  misc_feature 1..38: note = Probe
  source 1..38: mol_type = other DNA

SEQ ID NO: 15348 - DNA, 41 bp, synthetic construct; identical to SEQ ID NO: 2573
  misc_feature 1..41: note = Probe
  source 1..41: mol_type = other DNA

SEQ ID NO: 15349 - DNA, 33 bp, synthetic construct
  misc_feature 1..33: note = Probe
  source 1..33: mol_type = other DNA
acaacatacccatggccaacctcctactcctca

SEQ ID NO: 15350 - DNA, 19 bp, synthetic construct
  misc_feature 1..19: note = Probe
  source 1..19: mol_type = other DNA
acaacatggctttctcaac

SEQ ID NO: 15351 - DNA, 20 bp, synthetic construct
  misc_feature 1..20: note = Probe
  source 1..20: mol_type = other DNA
acaacattcaaaaaagagta

SEQ ID NO: 15352 - DNA, 29 bp, synthetic construct
  misc_feature 1..29: note = Probe
  source 1..29: mol_type = other DNA
acaacgatggtttttcatatcattggtcg

SEQ ID NO: 15353 - DNA, 30 bp, synthetic construct
  misc_feature 1..30: note = Probe
  source 1..30: mol_type = other DNA
acaacgatggtttttcatatcattggtcgt

SEQ ID NO: 15354 - DNA, 16 bp, synthetic construct
  misc_feature 1..16: note = Probe
  source 1..16: mol_type = other DNA
acaagaactgctaact

SEQ ID NO: 15355 - DNA, 18 bp, synthetic construct
  misc_feature 1..18: note = Probe
  source 1..18: mol_type = other DNA
acaagaactgctaactca

SEQ ID NO: 15356 - DNA, 20 bp, synthetic construct
  misc_feature 1..20: note = Probe
  source 1..20: mol_type = other DNA
acaagaactgctaactcatg

SEQ ID NO: 15357 - DNA, 21 bp, synthetic construct
  misc_feature 1..21: note = Probe
  source 1..21: mol_type = other DNA
acaagaactgctaactcatgc

SEQ ID NO: 15358 - DNA, 22 bp, synthetic construct
  misc_feature 1..22: note = Probe
  source 1..22: mol_type = other DNA
acaagaactgctaactcatgcc

SEQ ID NO: 15359 - DNA, 23 bp, synthetic construct
  misc_feature 1..23: note = Probe
  source 1..23: mol_type = other DNA
acaagaactgctaactcatgccc

SEQ ID NO: 15360 - DNA, 24 bp, synthetic construct
  misc_feature 1..24: note = Probe
  source 1..24: mol_type = other DNA
acaagaactgctaactcatgcccc

SEQ ID NO: 15361 - DNA, 25 bp, synthetic construct
  misc_feature 1..25: note = Probe
  source 1..25: mol_type = other DNA
acaagaactgctaactcatgccccc

SEQ ID NO: 15362 - DNA, 26 bp, synthetic construct
  misc_feature 1..26: note = Probe
  source 1..26: mol_type = other DNA
acaagaactgctaactcatgccccca

SEQ ID NO: 15363 - DNA, 27 bp, synthetic construct
  misc_feature 1..27: note = Probe
  source 1..27: mol_type = other DNA
acaagaactgctaactcatgcccccat

SEQ ID NO: 15364 - DNA, 28 bp, synthetic construct
  misc_feature 1..28: note = Probe
  source 1..28: mol_type = other DNA
acaagaactgctaactcatgcccccatg

SEQ ID NO: 15365 - DNA, 29 bp, synthetic construct
  misc_feature 1..29: note = Probe
  source 1..29: mol_type = other DNA
acaagaactgctaactcatgcccccatgt

SEQ ID NO: 15366 - DNA, 32 bp, synthetic construct; identical to SEQ ID NO: 2585
  misc_feature 1..32: note = Probe
  source 1..32: mol_type = other DNA

SEQ ID NO: 15367 - DNA, 33 bp, synthetic construct
  misc_feature 1..33: note = Probe
  source 1..33: mol_type = other DNA
acaagaactgctaactcatgcccccatgtctaa

SEQ ID NO: 15368 - DNA, 34 bp, synthetic construct
  misc_feature 1..34: note = Probe
  source 1..34: mol_type = other DNA
acaagaactgctaactcatgcccccatgtctaac

SEQ ID NO: 15369 - DNA, 36 bp, synthetic construct
  misc_feature 1..36: note = Probe
  source 1..36: mol_type = other DNA
acaagaactgctaactcatgcccccatgtctaacaa

SEQ ID NO: 15370 - DNA, 39 bp, synthetic construct
  misc_feature 1..39: note = Probe
  source 1..39: mol_type = other DNA
acaagaactgctaactcatgcccccatgtctaacaacat

SEQ ID NO: 15371 - DNA, 43 bp, synthetic construct; identical to SEQ ID NO: 119
  misc_feature 1..43: note = Probe
  source 1..43: mol_type = other DNA

SEQ ID NO: 15372 - DNA, 44 bp, synthetic construct; identical to SEQ ID NO: 120
  misc_feature 1..44: note = Probe
  source 1..44: mol_type = other DNA

SEQ ID NO: 15373 - DNA, 45 bp, synthetic construct; identical to SEQ ID NO: 121
  misc_feature 1..45: note = Probe
  source 1..45: mol_type = other DNA

SEQ ID NO: 15374 - DNA, 46 bp, synthetic construct; identical to SEQ ID NO: 122
  misc_feature 1..46: note = Probe
  source 1..46: mol_type = other DNA

SEQ ID NO: 15375 - DNA, 50 bp, synthetic construct; identical to SEQ ID NO: 2588
  misc_feature 1..50: note = Probe
  source 1..50: mol_type = other DNA

SEQ ID NO: 15376 - DNA, 16 bp, synthetic construct
  misc_feature 1..16: note = Probe
  source 1..16: mol_type = other DNA
acaagtgcggtttttt

SEQ ID NO: 15377 - DNA, 27 bp, synthetic construct
  misc_feature 1..27: note = Probe
  source 1..27: mol_type = other DNA
acaatctccagcattccccctcaaacc

SEQ ID NO: 15378 - DNA, 17 bp, synthetic construct
  misc_feature 1..17: note = Probe
  source 1..17: mol_type = other DNA
acacaaagcacccaact

SEQ ID NO: 15379 - DNA, 23 bp, synthetic construct
  misc_feature 1..23: note = Probe
  source 1..23: mol_type = other DNA
acacaaagcacccaacttacact

SEQ ID NO: 15380 - DNA, 24 bp, synthetic construct
  misc_feature 1..24: note = Probe
  source 1..24: mol_type = other DNA
acacaaagcacccaacttacactt

SEQ ID NO: 15381 - DNA, 31 bp, synthetic construct; identical to SEQ ID NO: 2597
  misc_feature 1..31: note = Probe
  source 1..31: mol_type = other DNA

SEQ ID NO: 15382 - DNA, 32 bp, synthetic construct
  misc_feature 1..32: note = Probe
  source 1..32: mol_type = other DNA
acacaaagcacccaacttacacttaggagatt

SEQ ID NO: 15383 - DNA, 35 bp, synthetic construct; identical to SEQ ID NO: 2598
  misc_feature 1..35: note = Probe
  source 1..35: mol_type = other DNA

SEQ ID NO: 15384 - DNA, 20 bp, synthetic construct
  misc_feature 1..20: note = Probe
  source 1..20: mol_type = other DNA
acacactaaaaaatcccttt

SEQ ID NO: 15385 - DNA, 17 bp, synthetic construct
  misc_feature 1..17: note = Probe
  source 1..17: mol_type = other DNA
acacccacccaagaaca

SEQ ID NO: 15386 - DNA, 19 bp, synthetic construct
  misc_feature 1..19: note = Probe
  source 1..19: mol_type = other DNA
acacccacccaagaacagg

SEQ ID NO: 15387 - DNA, 23 bp, synthetic construct
  misc_feature 1..23: note = Probe
  source 1..23: mol_type = other DNA
acacccacccaagaacagggttt

SEQ ID NO: 15388 - DNA, 24 bp, synthetic construct
  misc_feature 1..24: note = Probe
  source 1..24: mol_type = other DNA
acacccacccaagaacagggtttg

SEQ ID NO: 15389 - DNA, 25 bp, synthetic construct
  misc_feature 1..25: note = Probe
  source 1..25: mol_type = other DNA
acacccacccaagaacagggtttgt

SEQ ID NO: 15390 - DNA, 26 bp, synthetic construct
  misc_feature 1..26: note = Probe
  source 1..26: mol_type = other DNA
acacccacccaagaacagggtttgtt

SEQ ID NO: 15391 - DNA, 27 bp, synthetic construct
  misc_feature 1..27: note = Probe
  source 1..27: mol_type = other DNA
acacccacccaagaacagggtttgtta

SEQ ID NO: 15392 - DNA, 28 bp, synthetic construct
  misc_feature 1..28: note = Probe
  source 1..28: mol_type = other DNA
acacccacccaagaacagggtttgttaa

SEQ ID NO: 15393 - DNA, 29 bp, synthetic construct
  misc_feature 1..29: note = Probe
  source 1..29: mol_type = other DNA
acacccacccaagaacagggtttgttaag

SEQ ID NO: 15394 - DNA, 30 bp, synthetic construct
  misc_feature 1..30: note = Probe
  source 1..30: mol_type = other DNA
acacccacccaagaacagggtttgttaaga

SEQ ID NO: 15395 - DNA, 46 bp, synthetic construct
  misc_feature 1..46: note = Probe
  source 1..46: mol_type = other DNA
acaccccatcctaaagtaaggtcagctaaataagctatcgggccca

SEQ ID NO: 15396 - DNA, 24 bp, synthetic construct
  misc_feature 1..24: note = Probe
  source 1..24: mol_type = other DNA
acaccccccacagtttatgtagct

SEQ ID NO: 15397 - DNA, 28 bp, synthetic construct
  misc_feature 1..28: note = Probe
  source 1..28: mol_type = other DNA
acaccccccacagtttatgtagcttacc

SEQ ID NO: 15398 - DNA, 30 bp, synthetic construct
  misc_feature 1..30: note = Probe
  source 1..30: mol_type = other DNA
acaccccccacagtttatgtagcttacctc

SEQ ID NO: 15399 - DNA, 23 bp, synthetic construct
  misc_feature 1..23: note = Probe
  source 1..23: mol_type = other DNA
acacctcagaaggtctcactttt

SEQ ID NO: 15400 - DNA, 17 bp, synthetic construct
  misc_feature 1..17: note = Probe
  source 1..17: mol_type = other DNA
acacctctttacagtga

SEQ ID NO: 15401 - DNA, 18 bp, synthetic construct
  misc_feature 1..18: note = Probe
  source 1..18: mol_type = other DNA
acacctctttacagtgaa

SEQ ID NO: 15402 - DNA, 19 bp, synthetic construct
  misc_feature 1..19: note = Probe
  source 1..19: mol_type = other DNA
acacctctttacagtgaaa

SEQ ID NO: 15403 - DNA, 20 bp, synthetic construct
  misc_feature 1..20: note = Probe
  source 1..20: mol_type = other DNA
acacctctttacagtgaaat

SEQ ID NO: 15404 - DNA, 16 bp, synthetic construct
  misc_feature 1..16: note = Probe
  source 1..16: mol_type = other DNA
acacgagctattgcga

SEQ ID NO: 15405 - DNA, 42 bp, synthetic construct
  misc_feature 1..42: note = Probe
  source 1..42: mol_type = other DNA
acacgcagaaggtcctgggttcaagccccagtggaaccatgg

SEQ ID NO: 15406 - DNA, 33 bp, synthetic construct
  misc_feature 1..33: note = Probe
  source 1..33: mol_type = other DNA
acacgcagaaggtcctgggttcgagccccagtg

SEQ ID NO: 15407 - DNA, 37 bp, synthetic construct
  misc_feature 1..37: note = Probe
  source 1..37: mol_type = other DNA
acacgcagaaggtcctgggttcgagccccagtggaac

SEQ ID NO: 15408 - DNA, 41 bp, synthetic construct
  misc_feature 1..41: note = Probe
  source 1..41: mol_type = other DNA
acacgcagaaggtcctgggttcgagccccagtggaaccacg

SEQ ID NO: 15409 - DNA, 42 bp, synthetic construct; identical to SEQ ID NO: 2613
  misc_feature 1..42: note = Probe
  source 1..42: mol_type = other DNA

SEQ ID NO: 15410 - DNA, 42 bp, synthetic construct
  misc_feature 1..42: note = Probe
  source 1..42: mol_type = other DNA
acacgcagaaggtcctgggttcgagccccagtggaaccatag

SEQ ID NO: 15411 - DNA, 50 bp, synthetic construct
  misc_feature 1..50: note = Probe
  source 1..50: mol_type = other DNA
acacgcagaaggtcctgggttcgagccccagtggaaccatagccgtaagg

SEQ ID NO: 15412 - DNA, 16 bp, synthetic construct
  misc_feature 1..16: note = Probe
  source 1..16: mol_type = other DNA
acacgcgaaaggtccc

SEQ ID NO: 15413 - DNA, 17 bp, synthetic construct
  misc_feature 1..17: note = Probe
  source 1..17: mol_type = other DNA
acacgcgaaaggtcccc

SEQ ID NO: 15414 - DNA, 22 bp, synthetic construct
  misc_feature 1..22: note = Probe
  source 1..22: mol_type = other DNA
acacgcgaaaggtccccggttc

SEQ ID NO: 15415 - DNA, 42 bp, synthetic construct
  misc_feature 1..42: note = Probe
  source 1..42: mol_type = other DNA
acacgcgaaaggtccccggttcgaaaccgggcggaaacacct

SEQ ID NO: 15416 - DNA, 22 bp, synthetic construct
  misc_feature 1..22: note = Probe
  source 1..22: mol_type = other DNA
acacgcgaaaggtccccggttt

SEQ ID NO: 15417 - DNA, 23 bp, synthetic construct
  misc_feature 1..23: note = Probe
  source 1..23: mol_type = other DNA
acacgcgaaaggtccccggtttg

SEQ ID NO: 15418 - DNA, 19 bp, synthetic construct
  misc_feature 1..19: note = Probe
  source 1..19: mol_type = other DNA
acacggggcacaataattt

SEQ ID NO: 15419 - DNA, 44 bp, synthetic construct; identical to SEQ ID NO: 2618
  misc_feature 1..44: note = Probe
  source 1..44: mol_type = other DNA

SEQ ID NO: 15420 - DNA, 45 bp, synthetic construct; identical to SEQ ID NO: 2619
  misc_feature 1..45: note = Probe
  source 1..45: mol_type = other DNA

SEQ ID NO: 15421 - DNA, 46 bp, synthetic construct; identical to SEQ ID NO: 2620
  misc_feature 1..46: note = Probe
  source 1..46: mol_type = other DNA

SEQ ID NO: 15422 - DNA, 50 bp, synthetic construct; identical to SEQ ID NO: 2621
  misc_feature 1..50: note = Probe
  source 1..50: mol_type = other DNA

SEQ ID NO: 15423 - DNA, 17 bp, synthetic construct
  misc_feature 1..17: note = Probe
  source 1..17: mol_type = other DNA
acacttaggagatttca

SEQ ID NO: 15424 - DNA, 25 bp, synthetic construct
  misc_feature 1..25: note = Probe
  source 1..25: mol_type = other DNA
acacttaggagatttcaacttaact

SEQ ID NO: 15425 - DNA, 29 bp, synthetic construct
  misc_feature 1..29: note = Probe
  source 1..29: mol_type = other DNA
acacttaggagatttcaacttaacttgac

SEQ ID NO: 15426 - DNA, 30 bp, synthetic construct; identical to SEQ ID NO: 8999
  misc_feature 1..30: note = Probe
  source 1..30: mol_type = other DNA

SEQ ID NO: 15427 - DNA, 31 bp, synthetic construct; identical to SEQ ID NO: 2625
  misc_feature 1..31: note = Probe
  source 1..31: mol_type = other DNA

SEQ ID NO: 15428 - DNA, 32 bp, synthetic construct; identical to SEQ ID NO: 2626
  misc_feature 1..32: note = Probe
  source 1..32: mol_type = other DNA

SEQ ID NO: 15429 - DNA, 33 bp, synthetic construct; identical to SEQ ID NO: 2627
  misc_feature 1..33: note = Probe
  source 1..33: mol_type = other DNA

SEQ ID NO: 15430 - DNA, 34 bp, synthetic construct; identical to SEQ ID NO: 2628
  misc_feature 1..34: note = Probe
  source 1..34: mol_type = other DNA

SEQ ID NO: 15431 - DNA, 35 bp, synthetic construct
  misc_feature 1..35: note = Probe
  source 1..35: mol_type = other DNA
acacttaggagatttcaacttaacttgaccgctct

SEQ ID NO: 15432 - DNA, 37 bp, synthetic construct; identical to SEQ ID NO: 2629
  misc_feature 1..37: note = Probe
  source 1..37: mol_type = other DNA

SEQ ID NO: 15433 - DNA, 38 bp, synthetic construct; identical to SEQ ID NO: 2630
  misc_feature 1..38: note = Probe
  source 1..38: mol_type = other DNA

SEQ ID NO: 15434 - DNA, 39 bp, synthetic construct; identical to SEQ ID NO: 2631
  misc_feature 1..39: note = Probe
  source 1..39: mol_type = other DNA

SEQ ID NO: 15435 - DNA, 40 bp, synthetic construct; identical to SEQ ID NO: 2632
  misc_feature 1..40: note = Probe
  source 1..40: mol_type = other DNA

SEQ ID NO: 15436 - DNA, 41 bp, synthetic construct; identical to SEQ ID NO: 2633
  misc_feature 1..41: note = Probe
  source 1..41: mol_type = other DNA

SEQ ID NO: 15437 - DNA, 42 bp, synthetic construct; identical to SEQ ID NO: 2634
  misc_feature 1..42: note = Probe
  source 1..42: mol_type = other DNA

SEQ ID NO: 15438 - DNA, 43 bp, synthetic construct; identical to SEQ ID NO: 2635
  misc_feature 1..43: note = Probe
  source 1..43: mol_type = other DNA

SEQ ID NO: 15439 - DNA, 17 bp, synthetic construct
  misc_feature 1..17: note = Probe
  source 1..17: mol_type = other DNA
acagaccaagagccttc

SEQ ID NO: 15440 - DNA, 31 bp, synthetic construct
  misc_feature 1..31: note = Probe
  source 1..31: mol_type = other DNA
acagaccaagagccttcaaagccctcagtaa

SEQ ID NO: 15441 - DNA, 35 bp, synthetic construct
  misc_feature 1..35: note = Probe
  source 1..35: mol_type = other DNA
acagaccaagagccttcaaagccctcagtaagttg

SEQ ID NO: 15442 - DNA, 36 bp, synthetic construct
  misc_feature 1..36: note = Probe
  source 1..36: mol_type = other DNA
acagaccaagagccttcaaagccctcagtaagttgc

SEQ ID NO: 15443 - DNA, 18 bp, synthetic construct
  misc_feature 1..18: note = Probe
  source 1..18: mol_type = other DNA
acagaggcttacgacccc

SEQ ID NO: 15444 - DNA, 27 bp, synthetic construct
  misc_feature 1..27: note = Probe
  source 1..27: mol_type = other DNA
acagaggcttacgaccccttatttacc

SEQ ID NO: 15445 - DNA, 28 bp, synthetic construct
  misc_feature 1..28: note = Probe
  source 1..28: mol_type = other DNA
acagaggcttacgaccccttatttaccg

SEQ ID NO: 15446 - DNA, 30 bp, synthetic construct; identical to SEQ ID NO: 2640
  misc_feature 1..30: note = Probe
  source 1..30: mol_type = other DNA

SEQ ID NO: 15447 - DNA, 33 bp, synthetic construct
  misc_feature 1..33: note = Probe
  source 1..33: mol_type = other DNA
acagcgccgctggtgtagtggtatcatgcaaga

SEQ ID NO: 15448 - DNA, 35 bp, synthetic construct
  misc_feature 1..35: note = Probe
  source 1..35: mol_type = other DNA
acagcgccgctggtgtagtggtatcatgcaagatt

SEQ ID NO: 15449 - DNA, 16 bp, synthetic construct
  misc_feature 1..16: note = Probe
  source 1..16: mol_type = other DNA
acagctatccattggt

SEQ ID NO: 15450 - DNA, 17 bp, synthetic construct
  misc_feature 1..17: note = Probe
  source 1..17: mol_type = other DNA
acagctatccattggtc

SEQ ID NO: 15451 - DNA, 18 bp, synthetic construct
  misc_feature 1..18: note = Probe
  source 1..18: mol_type = other DNA
acagctatccattggtct

SEQ ID NO: 15452 - DNA, 21 bp, synthetic construct
  misc_feature 1..21: note = Probe
  source 1..21: mol_type = other DNA
acagctatccattggtcttag

SEQ ID NO: 15453 - DNA, 27 bp, synthetic construct
  misc_feature 1..27: note = Probe
  source 1..27: mol_type = other DNA
acagctatccattggtcttaggcccca

SEQ ID NO: 15454 - DNA, 29 bp, synthetic construct
  misc_feature 1..29: note = Probe
  source 1..29: mol_type = other DNA
acaggagatcctgggttcgaatcccagcg

SEQ ID NO: 15455 - DNA, 31 bp, synthetic construct
  misc_feature 1..31: note = Probe
  source 1..31: mol_type = other DNA
acaggagatcctgggttcgaatcccagcggg

SEQ ID NO: 15456 - DNA, 32 bp, synthetic construct
  misc_feature 1..32: note = Probe
  source 1..32: mol_type = other DNA
acaggagatcctgggttcgaatcccagcgggg

SEQ ID NO: 15457 - DNA, 33 bp, synthetic construct
  misc_feature 1..33: note = Probe
  source 1..33: mol_type = other DNA
acaggagatcctgggttcgaatcccagcggggc

SEQ ID NO: 15458 - DNA, 35 bp, synthetic construct
  misc_feature 1..35: note = Probe
  source 1..35: mol_type = other DNA
acaggagatcctgggttcgaatcccagcggggcct

SEQ ID NO: 15459 - DNA, 36 bp, synthetic construct
  misc_feature 1..36: note = Probe
  source 1..36: mol_type = other DNA
acaggagatcctgggttcgaatcccagcggggcctg

SEQ ID NO: 15460 - DNA, 36 bp, synthetic construct
  misc_feature 1..36: note = Probe
  source 1..36: mol_type = other DNA
acaggagatcctgggttcgaatcccagcggggcctt

SEQ ID NO: 15461 - DNA, 38 bp, synthetic construct
  misc_feature 1..38: note = Probe
  source 1..38: mol_type = other DNA
acaggagatcctgggttcgaatcccagcggggccttac

SEQ ID NO: 15462 - DNA, 38 bp, synthetic construct
  misc_feature 1..38: note = Probe
  source 1..38: mol_type = other DNA
acaggagatcctgggttcgaatcccagcggggccttag

SEQ ID NO: 15463 - DNA, 32 bp, synthetic construct
  misc_feature 1..32: note = Probe
  source 1..32: mol_type = other DNA
acaggagatcctgggttcgaatcccagcggtg

SEQ ID NO: 15464 - DNA, 33 bp, synthetic construct; identical to SEQ ID NO: 2645
  misc_feature 1..33: note = Probe
  source 1..33: mol_type = other DNA

SEQ ID NO: 15465 - DNA, 34 bp, synthetic construct
  misc_feature 1..34: note = Probe
  source 1..34: mol_type = other DNA
acaggagatcctgggttcgaatcccagcggtgcc

SEQ ID NO: 15466 - DNA, 35 bp, synthetic construct; identical to SEQ ID NO: 2646
  misc_feature 1..35: note = Probe
  source 1..35: mol_type = other DNA

SEQ ID NO: 15467 - DNA, 36 bp, synthetic construct
  misc_feature 1..36: note = Probe
  source 1..36: mol_type = other DNA
acaggagatcctgggttcgaatcccagcggtgcctc

SEQ ID NO: 15468 - DNA, 37 bp, synthetic construct; identical to SEQ ID NO: 2647
  misc_feature 1..37: note = Probe
  source 1..37: mol_type = other DNA

SEQ ID NO: 15469 - DNA, 38 bp, synthetic construct; identical to SEQ ID NO: 2648
  misc_feature 1..38: note = Probe
  source 1..38: mol_type = other DNA

SEQ ID NO: 15470 - DNA, 38 bp, synthetic construct
  misc_feature 1..38: note = Probe
  source 1..38: mol_type = other DNA
acaggagatcctgggttcgactcccagcggggccttgg

SEQ ID NO: 15471 - DNA, 28 bp, synthetic construct
  misc_feature 1..28: note = Probe
  source 1..28: mol_type = other DNA
acaggggttaggcctctttttaccagct

SEQ ID NO: 15472 - DNA, 36 bp, synthetic construct
  misc_feature 1..36: note = Probe
  source 1..36: mol_type = other DNA
acaggtccctcctcgttagtatagtggtgagtatcc

SEQ ID NO: 15473 - DNA, 25 bp, synthetic construct
  misc_feature 1..25: note = Probe
  source 1..25: mol_type = other DNA
acagtcagaggttcaattcctcttc

SEQ ID NO: 15474 - DNA, 26 bp, synthetic construct
  misc_feature 1..26: note = Probe
  source 1..26: mol_type = other DNA
acagtcagaggttcaattcctcttct

SEQ ID NO: 15475 - DNA, 27 bp, synthetic construct
  misc_feature 1..27: note = Probe
  source 1..27: mol_type = other DNA
acagtcagaggttcaattcctcttctt

SEQ ID NO: 15476 - DNA, 28 bp, synthetic construct
  misc_feature 1..28: note = Probe
  source 1..28: mol_type = other DNA
acagtcagaggttcaattcctcttctta

SEQ ID NO: 15477 - DNA, 29 bp, synthetic construct
  misc_feature 1..29: note = Probe
  source 1..29: mol_type = other DNA
acagtcagaggttcaattcctcttcttaa

SEQ ID NO: 15478 - DNA, 30 bp, synthetic construct
  misc_feature 1..30: note = Probe
  source 1..30: mol_type = other DNA
acagtcagaggttcaattcctcttcttaac

SEQ ID NO: 15479 - DNA, 31 bp, synthetic construct; identical to SEQ ID NO: 2654
  misc_feature 1..31: note = Probe
  source 1..31: mol_type = other DNA

SEQ ID NO: 15480 - DNA, 32 bp, synthetic construct
  misc_feature 1..32: note = Probe
  source 1..32: mol_type = other DNA
acagtcagaggttcaattcctcttcttaacaa

SEQ ID NO: 15481 - DNA, 33 bp, synthetic construct; identical to SEQ ID NO: 2655
  misc_feature 1..33: note = Probe
  source 1..33: mol_type = other DNA

SEQ ID NO: 15482 - DNA, 34 bp, synthetic construct; identical to SEQ ID NO: 2656
  misc_feature 1..34: note = Probe
  source 1..34: mol_type = other DNA

SEQ ID NO: 15483 - DNA, 27 bp, synthetic construct
  misc_feature 1..27: note = Probe
  source 1..27: mol_type = other DNA
acagtggctcgttggtctaggggtatg

SEQ ID NO: 15484 - DNA, 28 bp, synthetic construct
  misc_feature 1..28: note = Probe
  source 1..28: mol_type = other DNA
acagtggctcgttggtctaggggtatga

SEQ ID NO: 15485 - DNA, 29 bp, synthetic construct
  misc_feature 1..29: note = Probe
  source 1..29: mol_type = other DNA
acagtggctcgttggtctaggggtatgat

SEQ ID NO: 15486 - DNA, 30 bp, synthetic construct
  misc_feature 1..30: note = Probe
  source 1..30: mol_type = other DNA
acagtggctcgttggtctaggggtatgatt

SEQ ID NO: 15487 - DNA, 31 bp, synthetic construct
  misc_feature 1..31: note = Probe
  source 1..31: mol_type = other DNA
acagtggctcgttggtctaggggtatgattc

SEQ ID NO: 15488 - DNA, 32 bp, synthetic construct
  misc_feature 1..32: note = Probe
  source 1..32: mol_type = other DNA
acagtggctcgttggtctaggggtatgattct

SEQ ID NO: 15489 - DNA, 36 bp, synthetic construct
  misc_feature 1..36: note = Probe
  source 1..36: mol_type = other DNA
acagtggctcgttggtctaggggtatgattctcgct

SEQ ID NO: 15490 - DNA, 37 bp, synthetic construct
  misc_feature 1..37: note = Probe
  source 1..37: mol_type = other DNA
acagtggctcgttggtctaggggtatgattctcgctt

SEQ ID NO: 15491 - DNA, 38 bp, synthetic construct
  misc_feature 1..38: note = Probe
  source 1..38: mol_type = other DNA
acagtggctcgttggtctaggggtatgattctcgcttt

SEQ ID NO: 15492 - DNA, 17 bp, synthetic construct
  misc_feature 1..17: note = Probe
  source 1..17: mol_type = other DNA
acatacccatggccaac

SEQ ID NO: 15493 - DNA, 18 bp, synthetic construct
  misc_feature 1..18: note = Probe
  source 1..18: mol_type = other DNA
acatacccatggccaacc

SEQ ID NO: 15494 - DNA, 19 bp, synthetic construct
  misc_feature 1..19: note = Probe
  source 1..19: mol_type = other DNA
acatacccatggccaacct

SEQ ID NO: 15495 - DNA, 20 bp, synthetic construct
  misc_feature 1..20: note = Probe
  source 1..20: mol_type = other DNA
acatacccatggccaacctc

SEQ ID NO: 15496 - DNA, 21 bp, synthetic construct
  misc_feature 1..21: note = Probe
  source 1..21: mol_type = other DNA
acatacccatggccaacctcc

SEQ ID NO: 15497 - DNA, 22 bp, synthetic construct
  misc_feature 1..22: note = Probe
  source 1..22: mol_type = other DNA
acatacccatggccaacctcct

SEQ ID NO: 15498 - DNA, 23 bp, synthetic construct
  misc_feature 1..23: note = Probe
  source 1..23: mol_type = other DNA
acatacccatggccaacctccta

SEQ ID NO: 15499 - DNA, 24 bp, synthetic construct
  misc_feature 1..24: note = Probe
  source 1..24: mol_type = other DNA
acatacccatggccaacctcctac

SEQ ID NO: 15500 - DNA, 25 bp, synthetic construct
  misc_feature 1..25: note = Probe
  source 1..25: mol_type = other DNA
acatacccatggccaacctcctact

SEQ ID NO: 15501 - DNA, 26 bp, synthetic construct
  misc_feature 1..26: note = Probe
  source 1..26: mol_type = other DNA
acatacccatggccaacctcctactc

SEQ ID NO: 15502 - DNA, 27 bp, synthetic construct
  misc_feature 1..27: note = Probe
  source 1..27: mol_type = other DNA
acatacccatggccaacctcctactcc

SEQ ID NO: 15503 - DNA, 28 bp, synthetic construct
  misc_feature 1..28: note = Probe
  source 1..28: mol_type = other DNA
acatacccatggccaacctcctactcct

SEQ ID NO: 15504 - DNA, 29 bp, synthetic construct
  misc_feature 1..29: note = Probe
  source 1..29: mol_type = other DNA
acatacccatggccaacctcctactcctc

SEQ ID NO: 15505 - DNA, 30 bp, synthetic construct; identical to SEQ ID NO: 2668
  misc_feature 1..30: note = Probe
  source 1..30: mol_type = other DNA

SEQ ID NO: 15506 - DNA, 17 bp, synthetic construct
  misc_feature 1..17: note = Probe
  source 1..17: mol_type = other DNA
acatcaccccataaaca

SEQ ID NO: 15507 - DNA, 18 bp, synthetic construct
  misc_feature 1..18: note = Probe
  source 1..18: mol_type = other DNA
acatcaccccataaacaa

SEQ ID NO: 15508 - DNA, 19 bp, synthetic construct
  misc_feature 1..19: note = Probe
  source 1..19: mol_type = other DNA
acatcaccccataaacaaa

SEQ ID NO: 15509 - DNA, 20 bp, synthetic construct
  misc_feature 1..20: note = Probe
  source 1..20: mol_type = other DNA
acatcaccccataaacaaat

SEQ ID NO: 15510 - DNA, 25 bp, synthetic construct
  misc_feature 1..25: note = Probe
  source 1..25: mol_type = other DNA
acatcagattgtgaatctgacaaca

SEQ ID NO: 15511 - DNA, 50 bp, synthetic construct; identical to SEQ ID NO: 2685
  misc_feature 1..50: note = Probe
  source 1..50: mol_type = other DNA

SEQ ID NO: 15512 - DNA, 30 bp, synthetic construct; identical to SEQ ID NO: 2689
  misc_feature 1..30: note = Probe
  source 1..30: mol_type = other DNA

SEQ ID NO: 15513 - DNA, 31 bp, synthetic construct; identical to SEQ ID NO: 2690
  misc_feature 1..31: note = Probe
  source 1..31: mol_type = other DNA

SEQ ID NO: 15514 - DNA, 17 bp, synthetic construct
  misc_feature 1..17: note = Probe
  source 1..17: mol_type = other DNA
acattcaaaaaagagta

SEQ ID NO: 15515 - DNA, 28 bp, synthetic construct
  misc_feature 1..28: note = Probe
  source 1..28: mol_type = other DNA
accaaaacatcagattgtgaatctgaca

SEQ ID NO: 15516 - DNA, 29 bp, synthetic construct
  misc_feature 1..29: note = Probe
  source 1..29: mol_type = other DNA
accaaaacatcagattgtgaatctgacaa

SEQ ID NO: 15517 - DNA, 30 bp, synthetic construct; identical to SEQ ID NO: 2694
  misc_feature 1..30: note = Probe
  source 1..30: mol_type = other DNA

SEQ ID NO: 15518 - DNA, 31 bp, synthetic construct; identical to SEQ ID NO: 2695
  misc_feature 1..31: note = Probe
  source 1..31: mol_type = other DNA

SEQ ID NO: 15519 - DNA, 32 bp, synthetic construct
  misc_feature 1..32: note = Probe
  source 1..32: mol_type = other DNA
accaaaacatcagattgtgaatctgacaacag

SEQ ID NO: 15520 - DNA, 33 bp, synthetic construct
  misc_feature 1..33: note = Probe
  source 1..33: mol_type = other DNA
accaaaacatcagattgtgaatctgacaacaga

SEQ ID NO: 15521 - DNA, 34 bp, synthetic construct
  misc_feature 1..34: note = Probe
  source 1..34: mol_type = other DNA
accaaaacatcagattgtgaatctgacaacagag

SEQ ID NO: 15522 - DNA, 36 bp, synthetic construct
  misc_feature 1..36: note = Probe
  source 1..36: mol_type = other DNA
accaaaacatcagattgtgaatctgacaacagaggc

SEQ ID NO: 15523 - DNA, 37 bp, synthetic construct; identical to SEQ ID NO: 2697
  misc_feature 1..37: note = Probe
  source 1..37: mol_type = other DNA

SEQ ID NO: 15524 - DNA, 21 bp, synthetic construct
  misc_feature 1..21: note = Probe
  source 1..21: mol_type = other DNA
accaacacctctttacagtga

SEQ ID NO: 15525 - DNA, 22 bp, synthetic construct
  misc_feature 1..22: note = Probe
  source 1..22: mol_type = other DNA
accaacacctctttacagtgaa

SEQ ID NO: 15526 - DNA, 23 bp, synthetic construct
  misc_feature 1..23: note = Probe
  source 1..23: mol_type = other DNA
accaacacctctttacagtgaaa

SEQ ID NO: 15527 - DNA, 24 bp, synthetic construct
  misc_feature 1..24: note = Probe
  source 1..24: mol_type = other DNA
accaacacctctttacagtgaaat

SEQ ID NO: 15528 - DNA, 15 bp, synthetic construct
  misc_feature 1..15: note = Probe
  source 1..15: mol_type = other DNA
accaaccaaacccca

SEQ ID NO: 15529 - DNA, 23 bp, synthetic construct
  misc_feature 1..23: note = Probe
  source 1..23: mol_type = other DNA
accagaatggccgagtggttaag

SEQ ID NO: 15530 - DNA, 18 bp, synthetic construct
  misc_feature 1..18: note = Probe
  source 1..18: mol_type = other DNA
accagctttggggggttc

SEQ ID NO: 15531 - DNA, 20 bp, synthetic construct
  misc_feature 1..20: note = Probe
  source 1..20: mol_type = other DNA
accagctttggggggttcga

SEQ ID NO: 15532 - DNA, 31 bp, synthetic construct; identical to SEQ ID NO: 2713
  misc_feature 1..31: note = Probe
  source 1..31: mol_type = other DNA

SEQ ID NO: 15533 - DNA, 32 bp, synthetic construct; identical to SEQ ID NO: 2714
  misc_feature 1..32: note = Probe
  source 1..32: mol_type = other DNA

SEQ ID NO: 15534 - DNA, 34 bp, synthetic construct; identical to SEQ ID NO: 2716
  misc_feature 1..34: note = Probe
  source 1..34: mol_type = other DNA

SEQ ID NO: 15535 - DNA, 35 bp, synthetic construct; identical to SEQ ID NO: 2717
  misc_feature 1..35: note = Probe
  source 1..35: mol_type = other DNA

SEQ ID NO: 15536 - DNA, 36 bp, synthetic construct; identical to SEQ ID NO: 2718
  misc_feature 1..36: note = Probe
  source 1..36: mol_type = other DNA

SEQ ID NO: 15537 - DNA, 37 bp, synthetic construct; identical to SEQ ID NO: 2719
  misc_feature 1..37: note = Probe
  source 1..37: mol_type = other DNA

SEQ ID NO: 15538 - DNA, 38 bp, synthetic construct; identical to SEQ ID NO: 2720
  misc_feature 1..38: note = Probe
  source 1..38: mol_type = other DNA

SEQ ID NO: 15539 - DNA, 39 bp, synthetic construct; identical to SEQ ID NO: 2721
  misc_feature 1..39: note = Probe
  source 1..39: mol_type = other DNA

SEQ ID NO: 15540 - DNA, 18 bp, synthetic construct
  misc_feature 1..18: note = Probe
  source 1..18: mol_type = other DNA
accaggatggccgagtgg

SEQ ID NO: 15541 - DNA, 19 bp, synthetic construct
  misc_feature 1..19: note = Probe
  source 1..19: mol_type = other DNA
accaggatggccgagtggt

SEQ ID NO: 15542 - DNA, 21 bp, synthetic construct
  misc_feature 1..21: note = Probe
  source 1..21: mol_type = other DNA
accaggatggccgagtggtta

SEQ ID NO: 15543 - DNA, 22 bp, synthetic construct
  misc_feature 1..22: note = Probe
  source 1..22: mol_type = other DNA
accaggatggccgagtggttaa

SEQ ID NO: 15544 - DNA, 24 bp, synthetic construct
  misc_feature 1..24: note = Probe
  source 1..24: mol_type = other DNA
accaggatggccgagtggttaagg

SEQ ID NO: 15545 - DNA, 25 bp, synthetic construct
  misc_feature 1..25: note = Probe
  source 1..25: mol_type = other DNA
accaggatggccgagtggttaaggc

SEQ ID NO: 15546 - DNA, 16 bp, synthetic construct
  misc_feature 1..16: note = Probe
  source 1..16: mol_type = other DNA
accaggggtcgcgagt

SEQ ID NO: 15547 - DNA, 38 bp, synthetic construct; identical to SEQ ID NO: 2727
  misc_feature 1..38: note = Probe
  source 1..38: mol_type = other DNA

SEQ ID NO: 15548 - DNA, 32 bp, synthetic construct
  misc_feature 1..32: note = Probe
  source 1..32: mol_type = other DNA
accaggggtcgcgagttcaattctcgctgggg

SEQ ID NO: 15549 - DNA, 38 bp, synthetic construct; identical to SEQ ID NO: 2728
  misc_feature 1..38: note = Probe
  source 1..38: mol_type = other DNA

SEQ ID NO: 15550 - DNA, 36 bp, synthetic construct
  misc_feature 1..36: note = Probe
  source 1..36: mol_type = other DNA
accaggggtcgcgagttcgatcctcgctggggcctc

SEQ ID NO: 15551 - DNA, 38 bp, synthetic construct
  misc_feature 1..38: note = Probe
  source 1..38: mol_type = other DNA
accaggggtcgcgagttcgatcctcgctggggcctcct

SEQ ID NO: 15552 - DNA, 46 bp, synthetic construct; identical to SEQ ID NO: 2729
  misc_feature 1..46: note = Probe
  source 1..46: mol_type = other DNA

SEQ ID NO: 15553 - DNA, 26 bp, synthetic construct
  misc_feature 1..26: note = Probe
  source 1..26: mol_type = other DNA
accatcctctgctatagactcccttt

SEQ ID NO: 15554 - DNA, 26 bp, synthetic construct
  misc_feature 1..26: note = Probe
  source 1..26: mol_type = other DNA
accatcctctgctatcggagtttttt

SEQ ID NO: 15555 - DNA, 21 bp, synthetic construct
  misc_feature 1..21: note = Probe
  source 1..21: mol_type = other DNA
acccaacttacacttaggaga

SEQ ID NO: 15556 - DNA, 22 bp, synthetic construct
  misc_feature 1..22: note = Probe
  source 1..22: mol_type = other DNA
acccaacttacacttaggagat

SEQ ID NO: 15557 - DNA, 23 bp, synthetic construct
  misc_feature 1..23: note = Probe
  source 1..23: mol_type = other DNA
acccaacttacacttaggagatt

SEQ ID NO: 15558 - DNA, 25 bp, synthetic construct
  misc_feature 1..25: note = Probe
  source 1..25: mol_type = other DNA
acccaacttacacttaggagatttc

SEQ ID NO: 15559 - DNA, 26 bp, synthetic construct
  misc_feature 1..26: note = Probe
  source 1..26: mol_type = other DNA
acccaacttacacttaggagatttca

SEQ ID NO: 15560 - DNA, 27 bp, synthetic construct
  misc_feature 1..27: note = Probe
  source 1..27: mol_type = other DNA
acccaacttacacttaggagatttcaa

SEQ ID NO: 15561 - DNA, 30 bp, synthetic construct; identical to SEQ ID NO: 2739
  misc_feature 1..30: note = Probe
  source 1..30: mol_type = other DNA

SEQ ID NO: 15562 - DNA, 31 bp, synthetic construct; identical to SEQ ID NO: 2740
  misc_feature 1..31: note = Probe
  source 1..31: mol_type = other DNA

SEQ ID NO: 15563 - DNA, 34 bp, synthetic construct
  misc_feature 1..34: note = Probe
  source 1..34: mol_type = other DNA
acccaacttacacttaggagatttcaacttaact

SEQ ID NO: 15564 - DNA, 39 bp, synthetic construct
  misc_feature 1..39: note = Probe
  source 1..39: mol_type = other DNA
acccaacttacacttaggagatttcaacttaacttgacc

SEQ ID NO: 15565 - DNA, 40 bp, synthetic construct; identical to SEQ ID NO: 2743
  misc_feature 1..40: note = Probe
  source 1..40: mol_type = other DNA

SEQ ID NO: 15566 - DNA, 42 bp, synthetic construct; identical to SEQ ID NO: 2744
  misc_feature 1..42: note = Probe
  source 1..42: mol_type = other DNA

SEQ ID NO: 15567 - DNA, 50 bp, synthetic construct; identical to SEQ ID NO: 2749
  misc_feature 1..50: note = Probe
  source 1..50: mol_type = other DNA

SEQ ID NO: 15568 - DNA, 18 bp, synthetic construct
  misc_feature 1..18: note = Probe
  source 1..18: mol_type = other DNA
acccaagaacagggtttg

SEQ ID NO: 15569 - DNA, 21 bp, synthetic construct
  misc_feature 1..21: note = Probe
  source 1..21: mol_type = other DNA
acccaagaacagggtttgtta

SEQ ID NO: 15570 - DNA, 28 bp, synthetic construct
  misc_feature 1..28: note = Probe
  source 1..28: mol_type = other DNA
acccacacccacccaagaacagggtttg

SEQ ID NO: 15571 - DNA, 29 bp, synthetic construct
  misc_feature 1..29: note = Probe
  source 1..29: mol_type = other DNA
acccacacccacccaagaacagggtttgt

SEQ ID NO: 15572 - DNA, 30 bp, synthetic construct
  misc_feature 1..30: note = Probe
  source 1..30: mol_type = other DNA
acccacacccacccaagaacagggtttgtt

SEQ ID NO: 15573 - DNA, 31 bp, synthetic construct; identical to SEQ ID NO: 2755
  misc_feature 1..31: note = Probe
  source 1..31: mol_type = other DNA

SEQ ID NO: 15574 - DNA, 22 bp, synthetic construct
  misc_feature 1..22: note = Probe
  source 1..22: mol_type = other DNA
acccacccaagaacagggtttg

SEQ ID NO: 15575 - DNA, 23 bp, synthetic construct
  misc_feature 1..23: note = Probe
  source 1..23: mol_type = other DNA
acccacccaagaacagggtttgt

SEQ ID NO: 15576 - DNA, 24 bp, synthetic construct
  misc_feature 1..24: note = Probe
  source 1..24: mol_type = other DNA
acccacccaagaacagggtttgtt

SEQ ID NO: 15577 - DNA, 25 bp, synthetic construct
  misc_feature 1..25: note = Probe
  source 1..25: mol_type = other DNA
acccacccaagaacagggtttgtta

SEQ ID NO: 15578 - DNA, 28 bp, synthetic construct
  misc_feature 1..28: note = Probe
  source 1..28: mol_type = other DNA
acccacccaagaacagggtttgttaaga

SEQ ID NO: 15579 - DNA, 16 bp, synthetic construct
  misc_feature 1..16: note = Probe
  source 1..16: mol_type = other DNA
acccagaggtcgatgg

SEQ ID NO: 15580 - DNA, 17 bp, synthetic construct
  misc_feature 1..17: note = Probe
  source 1..17: mol_type = other DNA
acccagaggtcgatgga

SEQ ID NO: 15581 - DNA, 19 bp, synthetic construct
  misc_feature 1..19: note = Probe
  source 1..19: mol_type = other DNA
acccagaggtcgatggatc

SEQ ID NO: 15582 - DNA, 34 bp, synthetic construct
  misc_feature 1..34: note = Probe
  source 1..34: mol_type = other DNA
acccagaggtcgatggatcgaaaccatcctctgc

SEQ ID NO: 15583 - DNA, 35 bp, synthetic construct
  misc_feature 1..35: note = Probe
  source 1..35: mol_type = other DNA
acccagaggtcgatggatcgaaaccatcctctgct

SEQ ID NO: 15584 - DNA, 36 bp, synthetic construct
  misc_feature 1..36: note = Probe
  source 1..36: mol_type = other DNA
acccagaggtcgatggatcgaaaccatcctctgcta

SEQ ID NO: 15585 - DNA, 37 bp, synthetic construct
  misc_feature 1..37: note = Probe
  source 1..37: mol_type = other DNA
acccagaggtcgatggatcgaaaccatcctctgctag

SEQ ID NO: 15586 - DNA, 38 bp, synthetic construct
  misc_feature 1..38: note = Probe
  source 1..38: mol_type = other DNA
acccagaggtcgatggatcgaaaccatcctctgctagg

SEQ ID NO: 15587 - DNA, 39 bp, synthetic construct
  misc_feature 1..39: note = Probe
  source 1..39: mol_type = other DNA
acccagaggtcgatggatcgaaaccatcctctgctaggg

SEQ ID NO: 15588 - DNA, 39 bp, synthetic construct; identical to SEQ ID NO: 2760
  misc_feature 1..39: note = Probe
  source 1..39: mol_type = other DNA

SEQ ID NO: 15589 - DNA, 37 bp, synthetic construct
  misc_feature 1..37: note = Probe
  source 1..37: mol_type = other DNA
acccagaggtcgatggatcgaaaccatcctctgctat

SEQ ID NO: 15590 - DNA, 38 bp, synthetic construct; identical to SEQ ID NO: 2761
  misc_feature 1..38: note = Probe
  source 1..38: mol_type = other DNA

SEQ ID NO: 15591 - DNA, 38 bp, synthetic construct
  misc_feature 1..38: note = Probe
  source 1..38: mol_type = other DNA
acccagaggtcgatggatcgaaaccatcctctgctatt

SEQ ID NO: 15592 - DNA, 39 bp, synthetic construct
  misc_feature 1..39: note = Probe
  source 1..39: mol_type = other DNA
acccagaggtcgatggatcgaaaccatcctctgctattt

SEQ ID NO: 15593 - DNA, 33 bp, synthetic construct; identical to SEQ ID NO: 2762
  misc_feature 1..33: note = Probe
  source 1..33: mol_type = other DNA

SEQ ID NO: 15594 - DNA, 34 bp, synthetic construct
  misc_feature 1..34: note = Probe
  source 1..34: mol_type = other DNA
acccagatagctcagtcagtagagcatcagactt

SEQ ID NO: 15595 - DNA, 38 bp, synthetic construct
  misc_feature 1..38: note = Probe
  source 1..38: mol_type = other DNA
acccaggcggcccgggttcgactcccggtgtgggaacg

SEQ ID NO: 15596 - DNA, 39 bp, synthetic construct; identical to SEQ ID NO: 2764
  misc_feature 1..39: note = Probe
  source 1..39: mol_type = other DNA

SEQ ID NO: 15597 - DNA, 30 bp, synthetic construct
  misc_feature 1..30: note = Probe
  source 1..30: mol_type = other DNA
acccaggtggcccgggttcgactcccggta

SEQ ID NO: 15598 - DNA, 34 bp, synthetic construct
  misc_feature 1..34: note = Probe
  source 1..34: mol_type = other DNA
acccaggtggcccgggttcgactcccggtatggg

SEQ ID NO: 15599 - DNA, 35 bp, synthetic construct
  misc_feature 1..35: note = Probe
  source 1..35: mol_type = other DNA
acccaggtggcccgggttcgactcccggtatggga

SEQ ID NO: 15600 - DNA, 36 bp, synthetic construct; identical to SEQ ID NO: 2765
  misc_feature 1..36: note = Probe
  source 1..36: mol_type = other DNA

SEQ ID NO: 15601 - DNA, 38 bp, synthetic construct
  misc_feature 1..38: note = Probe
  source 1..38: mol_type = other DNA
acccaggtggcccgggttcgactcccggtatgggaaca

SEQ ID NO: 15602 - DNA, 39 bp, synthetic construct; identical to SEQ ID NO: 2766
  misc_feature 1..39: note = Probe
  source 1..39: mol_type = other DNA

SEQ ID NO: 15603 - DNA, 38 bp, synthetic construct
  misc_feature 1..38: note = Probe
  source 1..38: mol_type = other DNA
acccaggtggcccgggttcgactcccggtatgggaacg

SEQ ID NO: 15604 - DNA, 26 bp, synthetic construct
  misc_feature 1..26: note = Probe
  source 1..26: mol_type = other DNA
acccatggccaacctcctactcctca

SEQ ID NO: 15605 - DNA, 16 bp, synthetic construct
  misc_feature 1..16: note = Probe
  source 1..16: mol_type = other DNA
accccactcctggtag

SEQ ID NO: 15606 - DNA, 27 bp, synthetic construct
  misc_feature 1..27: note = Probe
  source 1..27: mol_type = other DNA
accccataaacaaataggtttggtcct

SEQ ID NO: 15607 - DNA, 31 bp, synthetic construct
  misc_feature 1..31: note = Probe
  source 1..31: mol_type = other DNA
accccataaacaaataggtttggtcctagcc

SEQ ID NO: 15608 - DNA, 44 bp, synthetic construct
  misc_feature 1..44: note = Probe
  source 1..44: mol_type = other DNA
accccatcctaaagtaaggtcagctaaataagctatcgggccca

SEQ ID NO: 15609 - DNA, 30 bp, synthetic construct
  misc_feature 1..30: note = Probe
  source 1..30: mol_type = other DNA
accccccacagtttatgtagcttacctcct

SEQ ID NO: 15610 - DNA, 22 bp, synthetic construct
  misc_feature 1..22: note = Probe
  source 1..22: mol_type = other DNA
accccgaaaatgttggttatac

SEQ ID NO: 15611 - DNA, 23 bp, synthetic construct
  misc_feature 1..23: note = Probe
  source 1..23: mol_type = other DNA
accccgaaaatgttggttatacc

SEQ ID NO: 15612 - DNA, 24 bp, synthetic construct
  misc_feature 1..24: note = Probe
  source 1..24: mol_type = other DNA
accccgaaaatgttggttataccc

SEQ ID NO: 15613 - DNA, 25 bp, synthetic construct
  misc_feature 1..25: note = Probe
  source 1..25: mol_type = other DNA
accccgaaaatgttggttataccct

SEQ ID NO: 15614 - DNA, 27 bp, synthetic construct
  misc_feature 1..27: note = Probe
  source 1..27: mol_type = other DNA
accccgaaaatgttggttatacccttc

SEQ ID NO: 15615 - DNA, 28 bp, synthetic construct
  misc_feature 1..28: note = Probe
  source 1..28: mol_type = other DNA
accccgaaaatgttggttatacccttcc

SEQ ID NO: 15616 - DNA, 29 bp, synthetic construct
  misc_feature 1..29: note = Probe
  source 1..29: mol_type = other DNA
accccgaaaatgttggttatacccttccc

SEQ ID NO: 15617 - DNA, 30 bp, synthetic construct; identical to SEQ ID NO: 2769
  misc_feature 1..30: note = Probe
  source 1..30: mol_type = other DNA

SEQ ID NO: 15618 - DNA, 31 bp, synthetic construct; identical to SEQ ID NO: 2770
  misc_feature 1..31: note = Probe
  source 1..31: mol_type = other DNA

SEQ ID NO: 15619 - DNA, 36 bp, synthetic construct; identical to SEQ ID NO: 2771
  misc_feature 1..36: note = Probe
  source 1..36: mol_type = other DNA

SEQ ID NO: 15620 - DNA, 37 bp, synthetic construct; identical to SEQ ID NO: 2772
  misc_feature 1..37: note = Probe
  source 1..37: mol_type = other DNA

SEQ ID NO: 15621 - DNA, 38 bp, synthetic construct; identical to SEQ ID NO: 2773
  misc_feature 1..38: note = Probe
  source 1..38: mol_type = other DNA

SEQ ID NO: 15622 - DNA, 15 bp, synthetic construct
  misc_feature 1..15: note = Probe
  source 1..15: mol_type = other DNA
accccgacatcatta

SEQ ID NO: 15623 - DNA, 20 bp, synthetic construct
  misc_feature 1..20: note = Probe
  source 1..20: mol_type = other DNA
accccgacatcattaccggg

SEQ ID NO: 15624 - DNA, 22 bp, synthetic construct
  misc_feature 1..22: note = Probe
  source 1..22: mol_type = other DNA
accccgacatcattaccgggtt

SEQ ID NO: 15625 - DNA, 23 bp, synthetic construct
  misc_feature 1..23: note = Probe
  source 1..23: mol_type = other DNA
accccgacatcattaccgggttt

SEQ ID NO: 15626 - DNA, 24 bp, synthetic construct
  misc_feature 1..24: note = Probe
  source 1..24: mol_type = other DNA
accccgacatcattaccgggtttt

SEQ ID NO: 15627 - DNA, 25 bp, synthetic construct
  misc_feature 1..25: note = Probe
  source 1..25: mol_type = other DNA
accccgacatcattaccgggttttc

SEQ ID NO: 15628 - DNA, 26 bp, synthetic construct
  misc_feature 1..26: note = Probe
  source 1..26: mol_type = other DNA
accccgacatcattaccgggttttcc

SEQ ID NO: 15629 - DNA, 27 bp, synthetic construct
  misc_feature 1..27: note = Probe
  source 1..27: mol_type = other DNA
accccgacatcattaccgggttttcct

SEQ ID NO: 15630 - DNA, 28 bp, synthetic construct
  misc_feature 1..28: note = Probe
  source 1..28: mol_type = other DNA
accccgacatcattaccgggttttcctc

SEQ ID NO: 15631 - DNA, 29 bp, synthetic construct
  misc_feature 1..29: note = Probe
  source 1..29: mol_type = other DNA
accccgacatcattaccgggttttcctct

SEQ ID NO: 15632 - DNA, 30 bp, synthetic construct; identical to SEQ ID NO: 2782
  misc_feature 1..30: note = Probe
  source 1..30: mol_type = other DNA

SEQ ID NO: 15633 - DNA, 30 bp, synthetic construct
  misc_feature 1..30: note = Probe
  source 1..30: mol_type = other DNA
acccgggttcgattcccggccaacgcaagt

SEQ ID NO: 15634 - DNA, 30 bp, synthetic construct
  misc_feature 1..30: note = Probe
  source 1..30: mol_type = other DNA
acccgggttcgattcccggccaacgcagtg

SEQ ID NO: 15635 - DNA, 19 bp, synthetic construct
  misc_feature 1..19: note = Probe
  source 1..19: mol_type = other DNA
accctgtggtctagtggct

SEQ ID NO: 15636 - DNA, 18 bp, synthetic construct
  misc_feature 1..18: note = Probe
  source 1..18: mol_type = other DNA
accctgtggtctagtggt

SEQ ID NO: 15637 - DNA, 22 bp, synthetic construct
  misc_feature 1..22: note = Probe
  source 1..22: mol_type = other DNA
accctgtggtctagtggttagg

SEQ ID NO: 15638 - DNA, 23 bp, synthetic construct
  misc_feature 1..23: note = Probe
  source 1..23: mol_type = other DNA
accctgtggtctagtggttagga

SEQ ID NO: 15639 - DNA, 36 bp, synthetic construct; identical to SEQ ID NO: 158
  misc_feature 1..36: note = Probe
  source 1..36: mol_type = other DNA

SEQ ID NO: 15640 - DNA, 38 bp, synthetic construct
  misc_feature 1..38: note = Probe
  source 1..38: mol_type = other DNA
accgaaaggttggtggttcgagcccacccagggacgcc

SEQ ID NO: 15641 - DNA, 39 bp, synthetic construct; identical to SEQ ID NO: 2787
  misc_feature 1..39: note = Probe
  source 1..39: mol_type = other DNA

SEQ ID NO: 15642 - DNA, 38 bp, synthetic construct
  misc_feature 1..38: note = Probe
  source 1..38: mol_type = other DNA
accgaagatcacgggttcgaaccccgtccgtgcctgat

SEQ ID NO: 15643 - DNA, 38 bp, synthetic construct
  misc_feature 1..38: note = Probe
  source 1..38: mol_type = other DNA
accgaagatcgcgggttcgaaccccgtccgtgcctgag

SEQ ID NO: 15644 - DNA, 31 bp, synthetic construct
  misc_feature 1..31: note = Probe
  source 1..31: mol_type = other DNA
accgaagtctctgtggcgcaatcggttagcg

SEQ ID NO: 15645 - DNA, 34 bp, synthetic construct
  misc_feature 1..34: note = Probe
  source 1..34: mol_type = other DNA
accgaagtctctgtggcgcaatcggttagcgcgt

SEQ ID NO: 15646 - DNA, 35 bp, synthetic construct
  misc_feature 1..35: note = Probe
  source 1..35: mol_type = other DNA
accgaagtctctgtggcgcaatcggttagcgcgtt

SEQ ID NO: 15647 - DNA, 36 bp, synthetic construct
  misc_feature 1..36: note = Probe
  source 1..36: mol_type = other DNA
accgaagtctctgtggcgcaatcggttagcgcgttc

SEQ ID NO: 15648 - DNA, 23 bp, synthetic construct
  misc_feature 1..23: note = Probe
  source 1..23: mol_type = other DNA
accgagcgtccaagctctttcca

SEQ ID NO: 15649 - DNA, 25 bp, synthetic construct
  misc_feature 1..25: note = Probe
  source 1..25: mol_type = other DNA
accgagcgtccaagctctttccatt

SEQ ID NO: 15650 - DNA, 26 bp, synthetic construct
  misc_feature 1..26: note = Probe
  source 1..26: mol_type = other DNA
accgagcgtccaagctctttccattt

SEQ ID NO: 15651 - DNA, 27 bp, synthetic construct
  misc_feature 1..27: note = Probe
  source 1..27: mol_type = other DNA
accgagcgtccaagctctttccatttt

SEQ ID NO: 15652 - DNA, 28 bp, synthetic construct
  misc_feature 1..28: note = Probe
  source 1..28: mol_type = other DNA
accgagcgtccaagctctttccattttt

SEQ ID NO: 15653 - DNA, 37 bp, synthetic construct
  misc_feature 1..37: note = Probe
  source 1..37: mol_type = other DNA
accgccgcagcccgggttcgattcccggtcatggaac

SEQ ID NO: 15654 - DNA, 38 bp, synthetic construct
  misc_feature 1..38: note = Probe
  source 1..38: mol_type = other DNA
accgccgcagcccgggttcgattcccggtcatggaacc

SEQ ID NO: 15655 - DNA, 39 bp, synthetic construct; identical to SEQ ID NO: 2791
  misc_feature 1..39: note = Probe
  source 1..39: mol_type = other DNA

SEQ ID NO: 15656 - DNA, 36 bp, synthetic construct
  misc_feature 1..36: note = Probe
  source 1..36: mol_type = other DNA
accgccgcggcccgggttcgattcccggccagggaa

SEQ ID NO: 15657 - DNA, 39 bp, synthetic construct
  misc_feature 1..39: note = Probe
  source 1..39: mol_type = other DNA
accgccgcggcccgggttcgattcccggccagggaattg

SEQ ID NO: 15658 - DNA, 31 bp, synthetic construct
  misc_feature 1..31: note = Probe
  source 1..31: mol_type = other DNA
accgccgcggcccgggttcgattcccggtca

SEQ ID NO: 15659 - DNA, 34 bp, synthetic construct
  misc_feature 1..34: note = Probe
  source 1..34: mol_type = other DNA
accgccgcggcccgggttcgattcccggtcaggg

SEQ ID NO: 15660 - DNA, 37 bp, synthetic construct; identical to SEQ ID NO: 2792
  misc_feature 1..37: note = Probe
  source 1..37: mol_type = other DNA

SEQ ID NO: 15661 - DNA, 38 bp, synthetic construct
  misc_feature 1..38: note = Probe
  source 1..38: mol_type = other DNA
accgccgcggcccgggttcgattcccggtcagggaaag

SEQ ID NO: 15662 - DNA, 39 bp, synthetic construct
  misc_feature 1..39: note = Probe
  source 1..39: mol_type = other DNA
accgccgcggcccgggttcgattcccggtcagggaaaga

SEQ ID NO: 15663 - DNA, 37 bp, synthetic construct; identical to SEQ ID NO: 2793
  misc_feature 1..37: note = Probe
  source 1..37: mol_type = other DNA

SEQ ID NO: 15664 - DNA, 38 bp, synthetic construct
  misc_feature 1..38: note = Probe
  source 1..38: mol_type = other DNA
accgccgcggcccgggttcgattcccggtcagggaagc

SEQ ID NO: 15665 - DNA, 39 bp, synthetic construct; identical to SEQ ID NO: 2794
  misc_feature 1..39: note = Probe
  source 1..39: mol_type = other DNA

SEQ ID NO: 15666 - DNA, 38 bp, synthetic construct
  misc_feature 1..38: note = Probe
  source 1..38: mol_type = other DNA
accgccgcggcccgggttcgattcccggtcagggaagt

SEQ ID NO: 15667 - DNA, 39 bp, synthetic construct; identical to SEQ ID NO: 2795
  misc_feature 1..39: note = Probe
  source 1..39: mol_type = other DNA

SEQ ID NO: 15668 - DNA, 37 bp, synthetic construct; identical to SEQ ID NO: 2796
  misc_feature 1..37: note = Probe
  source 1..37: mol_type = other DNA

SEQ ID NO: 15669 - DNA, 38 bp, synthetic construct
  misc_feature 1..38: note = Probe
  source 1..38: mol_type = other DNA
accgccgcggcccgggttcgattcccggtcagggaatg

SEQ ID NO: 15670 - DNA, 39 bp, synthetic construct
  misc_feature 1..39: note = Probe
  source 1..39: mol_type = other DNA
accgccgcggcccgggttcgattcccggtcagggaatga

SEQ ID NO: 15671 - DNA, 38 bp, synthetic construct
  misc_feature 1..38: note = Probe
  source 1..38: mol_type = other DNA
accgccgcggcccgggttcgattcccggtcagggaatt

SEQ ID NO: 15672 - DNA, 39 bp, synthetic construct; identical to SEQ ID NO: 2797
  misc_feature 1..39: note = Probe
  source 1..39: mol_type = other DNA

SEQ ID NO: 15673 - DNA, 35 bp, synthetic construct
  misc_feature 1..35: note = Probe
  source 1..35: mol_type = other DNA
accgcctggtttccgtagtgtagtggttatcacgt

SEQ ID NO: 15674 - DNA, 36 bp, synthetic construct
  misc_feature 1..36: note = Probe
  source 1..36: mol_type = other DNA
accgcctggtttccgtagtgtagtggttatcacgtt

SEQ ID NO: 15675 - DNA, 38 bp, synthetic construct
  misc_feature 1..38: note = Probe
  source 1..38: mol_type = other DNA
accgcctggtttccgtagtgtagtggttatcacgttcg

SEQ ID NO: 15676 - DNA, 30 bp, synthetic construct
  misc_feature 1..30: note = Probe
  source 1..30: mol_type = other DNA
accgctctgagctaaacctagccccaaacc

SEQ ID NO: 15677 - DNA, 31 bp, synthetic construct
  misc_feature 1..31: note = Probe
  source 1..31: mol_type = other DNA
accgctctgagctaaacctagccccaaaccc

SEQ ID NO: 15678 - DNA, 33 bp, synthetic construct
  misc_feature 1..33: note = Probe
  source 1..33: mol_type = other DNA
accgctctgagctaaacctagccccaaacccac

SEQ ID NO: 15679 - DNA, 27 bp, synthetic construct
  misc_feature 1..27: note = Probe
  source 1..27: mol_type = other DNA
accgctgccacacctcagaaggtctca

SEQ ID NO: 15680 - DNA, 29 bp, synthetic construct
  misc_feature 1..29: note = Probe
  source 1..29: mol_type = other DNA
accgctgccacacctcagaaggtctcact

SEQ ID NO: 15681 - DNA, 32 bp, synthetic construct
  misc_feature 1..32: note = Probe
  source 1..32: mol_type = other DNA
accgctgccacacctcagaaggtctcactttt

SEQ ID NO: 15682 - DNA, 25 bp, synthetic construct
  misc_feature 1..25: note = Probe
  source 1..25: mol_type = other DNA
accgctgccagggttgctgtctttt

SEQ ID NO: 15683 - DNA, 26 bp, synthetic construct
  misc_feature 1..26: note = Probe
  source 1..26: mol_type = other DNA
accgctgccagggttgctgtcttttt

SEQ ID NO: 15684 - DNA, 24 bp, synthetic construct
  misc_feature 1..24: note = Probe
  source 1..24: mol_type = other DNA
accggagatgaaaacctttttcca

SEQ ID NO: 15685 - DNA, 25 bp, synthetic construct
  misc_feature 1..25: note = Probe
  source 1..25: mol_type = other DNA
accggagatgaaaacctttttccaa

SEQ ID NO: 15686 - DNA, 31 bp, synthetic construct; identical to SEQ ID NO: 2802
  misc_feature 1..31: note = Probe
  source 1..31: mol_type = other DNA

SEQ ID NO: 15687 - DNA, 32 bp, synthetic construct; identical to SEQ ID NO: 2803
  misc_feature 1..32: note = Probe
  source 1..32: mol_type = other DNA

SEQ ID NO: 15688 - DNA, 33 bp, synthetic construct; identical to SEQ ID NO: 2804
  misc_feature 1..33: note = Probe
  source 1..33: mol_type = other DNA

SEQ ID NO: 15689 - DNA, 34 bp, synthetic construct; identical to SEQ ID NO: 2805
  misc_feature 1..34: note = Probe
  source 1..34: mol_type = other DNA

SEQ ID NO: 15690 - DNA, 30 bp, synthetic construct
  misc_feature 1..30: note = Probe
  source 1..30: mol_type = other DNA
accggagcgttggtggtatagtggtaagca

SEQ ID NO: 15691 - DNA, 17 bp, synthetic construct
  misc_feature 1..17: note = Probe
  source 1..17: mol_type = other DNA
accgggcggaaacaaag

SEQ ID NO: 15692 - DNA, 16 bp, synthetic construct
  misc_feature 1..16: note = Probe
  source 1..16: mol_type = other DNA
accgggcggaaacaca

SEQ ID NO: 15693 - DNA, 17 bp, synthetic construct
  misc_feature 1..17: note = Probe
  source 1..17: mol_type = other DNA
accgggcggaaacacac

SEQ ID NO: 15694 - DNA, 30 bp, synthetic construct
  misc_feature 1..30: note = Probe
  source 1..30: mol_type = other DNA
accgggcggaaacacactaaaaaatccctt

SEQ ID NO: 15695 - DNA, 31 bp, synthetic construct
  misc_feature 1..31: note = Probe
  source 1..31: mol_type = other DNA
accgggcggaaacacactaaaaaatcccttt

SEQ ID NO: 15696 - DNA, 17 bp, synthetic construct
  misc_feature 1..17: note = Probe
  source 1..17: mol_type = other DNA
accgggcggaaacacct

SEQ ID NO: 15697 - DNA, 18 bp, synthetic construct
  misc_feature 1..18: note = Probe
  source 1..18: mol_type = other DNA
accgggcggaaacacctc

SEQ ID NO: 15698 - DNA, 19 bp, synthetic construct
  misc_feature 1..19: note = Probe
  source 1..19: mol_type = other DNA
accgggcggaaacacctcc

SEQ ID NO: 15699 - DNA, 17 bp, synthetic construct
  misc_feature 1..17: note = Probe
  source 1..17: mol_type = other DNA
accgggcggaaacacgt

SEQ ID NO: 15700 - DNA, 17 bp, synthetic construct
  misc_feature 1..17: note = Probe
  source 1..17: mol_type = other DNA
accgggcggaaacaggt

SEQ ID NO: 15701 - DNA, 30 bp, synthetic construct; identical to SEQ ID NO: 2808
  misc_feature 1..30: note = Probe
  source 1..30: mol_type = other DNA

SEQ ID NO: 15702 - DNA, 21 bp, synthetic construct
  misc_feature 1..21: note = Probe
  source 1..21: mol_type = other DNA
accggggttcgattccccgac

SEQ ID NO: 15703 - DNA, 23 bp, synthetic construct
  misc_feature 1..23: note = Probe
  source 1..23: mol_type = other DNA
accggggttcgattccccgacgg

SEQ ID NO: 15704 - DNA, 26 bp, synthetic construct
  misc_feature 1..26: note = Probe
  source 1..26: mol_type = other DNA
accggggttcgattccccgacgggga

SEQ ID NO: 15705 - DNA, 27 bp, synthetic construct
  misc_feature 1..27: note = Probe
  source 1..27: mol_type = other DNA
accggggttcgattccccgacggggag

SEQ ID NO: 15706 - DNA, 28 bp, synthetic construct
  misc_feature 1..28: note = Probe
  source 1..28: mol_type = other DNA
accggggttcgattccccgacggggaga

SEQ ID NO: 15707 - DNA, 30 bp, synthetic construct
  misc_feature 1..30: note = Probe
  source 1..30: mol_type = other DNA
accggggttcgattccccgacggggagaaa

SEQ ID NO: 15708 - DNA, 29 bp, synthetic construct
  misc_feature 1..29: note = Probe
  source 1..29: mol_type = other DNA
accggggttcgattccccgacggggagac

SEQ ID NO: 15709 - DNA, 30 bp, synthetic construct
  misc_feature 1..30: note = Probe
  source 1..30: mol_type = other DNA
accggggttcgattccccgacggggagacg

SEQ ID NO: 15710 - DNA, 30 bp, synthetic construct
  misc_feature 1..30: note = Probe
  source 1..30: mol_type = other DNA
accggggttcgattccccgacggggagagt

SEQ ID NO: 15711 - DNA, 28 bp, synthetic construct
  misc_feature 1..28: note = Probe
  source 1..28: mol_type = other DNA
accggggttcgattccccgacggggagg

SEQ ID NO: 15712 - DNA, 29 bp, synthetic construct
  misc_feature 1..29: note = Probe
  source 1..29: mol_type = other DNA
accggggttcgattccccgacggggaggc

SEQ ID NO: 15713 - DNA, 30 bp, synthetic construct; identical to SEQ ID NO: 2811
  misc_feature 1..30: note = Probe
  source 1..30: mol_type = other DNA

SEQ ID NO: 15714 - DNA, 30 bp, synthetic construct
  misc_feature 1..30: note = Probe
  source 1..30: mol_type = other DNA
accggggttcgattccccgacggggaggcc

SEQ ID NO: 15715 - DNA, 32 bp, synthetic construct
  misc_feature 1..32: note = Probe
  source 1..32: mol_type = other DNA
accggtttccgtagtgtagcggttatcacatt

SEQ ID NO: 15716 - DNA, 44 bp, synthetic construct
  misc_feature 1..44: note = Probe
  source 1..44: mol_type = other DNA
accgtgagcccggatagctcagtcggtagagcatcagactttta

SEQ ID NO: 15717 - DNA, 25 bp, synthetic construct
  misc_feature 1..25: note = Probe
  source 1..25: mol_type = other DNA
accgttaacttccaattaactagtt

SEQ ID NO: 15718 - DNA, 31 bp, synthetic construct; identical to SEQ ID NO: 2814
  misc_feature 1..31: note = Probe
  source 1..31: mol_type = other DNA

SEQ ID NO: 15719 - DNA, 50 bp, synthetic construct; identical to SEQ ID NO: 2815
  misc_feature 1..50: note = Probe
  source 1..50: mol_type = other DNA

SEQ ID NO: 15720 - DNA, 25 bp, synthetic construct
  misc_feature 1..25: note = Probe
  source 1..25: mol_type = other DNA
acctagccccaaacccactccacct

SEQ ID NO: 15721 - DNA, 15 bp, synthetic construct
  misc_feature 1..15: note = Probe
  source 1..15: mol_type = other DNA
acctattctcaaact

SEQ ID NO: 15722 - DNA, 16 bp, synthetic construct
  misc_feature 1..16: note = Probe
  source 1..16: mol_type = other DNA
acctattctcaaactt

SEQ ID NO: 15723 - DNA, 17 bp, synthetic construct
  misc_feature 1..17: note = Probe
  source 1..17: mol_type = other DNA
acctattctcaaacttt

SEQ ID NO: 15724 - DNA, 18 bp, synthetic construct
  misc_feature 1..18: note = Probe
  source 1..18: mol_type = other DNA
acctattctcaaacttta

SEQ ID NO: 15725 - DNA, 19 bp, synthetic construct
  misc_feature 1..19: note = Probe
  source 1..19: mol_type = other DNA
acctattctcaaactttaa

SEQ ID NO: 15726 - DNA, 20 bp, synthetic construct
  misc_feature 1..20: note = Probe
  source 1..20: mol_type = other DNA
acctattctcaaactttaaa

SEQ ID NO: 15727 - DNA, 21 bp, synthetic construct
  misc_feature 1..21: note = Probe
  source 1..21: mol_type = other DNA
acctattctcaaactttaaat

SEQ ID NO: 15728 - DNA, 22 bp, synthetic construct
  misc_feature 1..22: note = Probe
  source 1..22: mol_type = other DNA
acctattctcaaactttaaatg

SEQ ID NO: 15729 - DNA, 23 bp, synthetic construct
  misc_feature 1..23: note = Probe
  source 1..23: mol_type = other DNA
acctattctcaaactttaaatgg

SEQ ID NO: 15730 - DNA, 24 bp, synthetic construct
  misc_feature 1..24: note = Probe
  source 1..24: mol_type = other DNA
acctattctcaaactttaaatggg

SEQ ID NO: 15731 - DNA, 25 bp, synthetic construct
  misc_feature 1..25: note = Probe
  source 1..25: mol_type = other DNA
acctattctcaaactttaaatgggc

SEQ ID NO: 15732 - DNA, 26 bp, synthetic construct
  misc_feature 1..26: note = Probe
  source 1..26: mol_type = other DNA
acctattctcaaactttaaatgggca

SEQ ID NO: 15733 - DNA, 31 bp, synthetic construct
  misc_feature 1..31: note = Probe
  source 1..31: mol_type = other DNA
acctattctcaaactttaaatgggcaagaag

SEQ ID NO: 15734 - DNA, 32 bp, synthetic construct; identical to SEQ ID NO: 2827
  misc_feature 1..32: note = Probe
  source 1..32: mol_type = other DNA

SEQ ID NO: 15735 - DNA, 33 bp, synthetic construct; identical to SEQ ID NO: 2828
  misc_feature 1..33: note = Probe
  source 1..33: mol_type = other DNA

SEQ ID NO: 15736 - DNA, 34 bp, synthetic construct
  misc_feature 1..34: note = Probe
  source 1..34: mol_type = other DNA
acctattctcaaactttaaatgggcaagaagccc

SEQ ID NO: 15737 - DNA, 35 bp, synthetic construct
  misc_feature 1..35: note = Probe
  source 1..35: mol_type = other DNA
acctattctcaaactttaaatgggcaagaagccca

SEQ ID NO: 15738 - DNA, 36 bp, synthetic construct; identical to SEQ ID NO: 2829
  misc_feature 1..36: note = Probe
  source 1..36: mol_type = other DNA

SEQ ID NO: 15739 - DNA, 37 bp, synthetic construct; identical to SEQ ID NO: 2830
  misc_feature 1..37: note = Probe
  source 1..37: mol_type = other DNA

SEQ ID NO: 15740 - DNA, 38 bp, synthetic construct
  misc_feature 1..38: note = Probe
  source 1..38: mol_type = other DNA
acctattctcaaactttaaatgggcaagaagcccagct

SEQ ID NO: 15741 - DNA, 39 bp, synthetic construct; identical to SEQ ID NO: 2831
  misc_feature 1..39: note = Probe
  source 1..39: mol_type = other DNA

SEQ ID NO: 15742 - DNA, 16 bp, synthetic construct
  misc_feature 1..16: note = Probe
  source 1..16: mol_type = other DNA
acctcagaaggtctca

SEQ ID NO: 15743 - DNA, 17 bp, synthetic construct
  misc_feature 1..17: note = Probe
  source 1..17: mol_type = other DNA
acctcagaaggtctcac

SEQ ID NO: 15744 - DNA, 19 bp, synthetic construct
  misc_feature 1..19: note = Probe
  source 1..19: mol_type = other DNA
acctcagaaggtctcactt

SEQ ID NO: 15745 - DNA, 20 bp, synthetic construct
  misc_feature 1..20: note = Probe
  source 1..20: mol_type = other DNA
acctcagaaggtctcacttt

SEQ ID NO: 15746 - DNA, 21 bp, synthetic construct
  misc_feature 1..21: note = Probe
  source 1..21: mol_type = other DNA
acctcagaaggtctcactttt

SEQ ID NO: 15747 - DNA, 22 bp, synthetic construct
  misc_feature 1..22: note = Probe
  source 1..22: mol_type = other DNA
acctcagaaggtctcacttttc

SEQ ID NO: 15748 - DNA, 29 bp, synthetic construct
  misc_feature 1..29: note = Probe
  source 1..29: mol_type = other DNA
acctcagaaggtctcacttttctatccat

SEQ ID NO: 15749 - DNA, 15 bp, synthetic construct
  misc_feature 1..15: note = Probe
  source 1..15: mol_type = other DNA
acctcctactcctca

SEQ ID NO: 15750 - DNA, 17 bp, synthetic construct
  misc_feature 1..17: note = Probe
  source 1..17: mol_type = other DNA
acctcctcaaagcaata

SEQ ID NO: 15751 - DNA, 19 bp, synthetic construct
  misc_feature 1..19: note = Probe
  source 1..19: mol_type = other DNA
acctcctcaaagcaataca

SEQ ID NO: 15752 - DNA, 21 bp, synthetic construct
  misc_feature 1..21: note = Probe
  source 1..21: mol_type = other DNA
acctcctcaaagcaatacact

SEQ ID NO: 15753 - DNA, 29 bp, synthetic construct
  misc_feature 1..29: note = Probe
  source 1..29: mol_type = other DNA
acctgtctctgtggcgcaatcggttagcg

SEQ ID NO: 15754 - DNA, 31 bp, synthetic construct
  misc_feature 1..31: note = Probe
  source 1..31: mol_type = other DNA
acctgtctctgtggcgcaatcggttagcgcg

SEQ ID NO: 15755 - DNA, 32 bp, synthetic construct
  misc_feature 1..32: note = Probe
  source 1..32: mol_type = other DNA
acctgtctctgtggcgcaatcggttagcgcgt

SEQ ID NO: 15756 - DNA, 33 bp, synthetic construct
  misc_feature 1..33: note = Probe
  source 1..33: mol_type = other DNA
acctgtctctgtggcgcaatcggttagcgcgtt

SEQ ID NO: 15757 - DNA, 34 bp, synthetic construct
  misc_feature 1..34: note = Probe
  source 1..34: mol_type = other DNA
acctgtctctgtggcgcaatcggttagcgcgttc

SEQ ID NO: 15758 - DNA, 36 bp, synthetic construct
  misc_feature 1..36: note = Probe
  source 1..36: mol_type = other DNA
acctgtctctgtggcgcaatcggttagcgcgttcgg

SEQ ID NO: 15759 - DNA, 50 bp, synthetic construct
  misc_feature 1..50: note = Probe
  source 1..50: mol_type = other DNA
acctgtctctgtggcgcaatcggttagcgcgttcggctgttaaccgaaag

SEQ ID NO: 15760 - DNA, 31 bp, synthetic construct
  misc_feature 1..31: note = Probe
  source 1..31: mol_type = other DNA
acctgtctctgtggcgtagtcggttagcgcg

SEQ ID NO: 15761 - DNA, 24 bp, synthetic construct
  misc_feature 1..24: note = Probe
  source 1..24: mol_type = other DNA
accttttaagttaaagattaagag

SEQ ID NO: 15762 - DNA, 26 bp, synthetic construct
  misc_feature 1..26: note = Probe
  source 1..26: mol_type = other DNA
accttttaagttaaagattaagagaa

SEQ ID NO: 15763 - DNA, 27 bp, synthetic construct
  misc_feature 1..27: note = Probe
  source 1..27: mol_type = other DNA
accttttaagttaaagattaagagaac

SEQ ID NO: 15764 - DNA, 28 bp, synthetic construct
  misc_feature 1..28: note = Probe
  source 1..28: mol_type = other DNA
accttttaagttaaagattaagagaacc

SEQ ID NO: 15765 - DNA, 29 bp, synthetic construct
  misc_feature 1..29: note = Probe
  source 1..29: mol_type = other DNA
accttttaagttaaagattaagagaacca

SEQ ID NO: 15766 - DNA, 30 bp, synthetic construct
  misc_feature 1..30: note = Probe
  source 1..30: mol_type = other DNA
accttttaagttaaagattaagagaaccaa

SEQ ID NO: 15767 - DNA, 31 bp, synthetic construct
  misc_feature 1..31: note = Probe
  source 1..31: mol_type = other DNA
accttttaagttaaagattaagagaaccaac

SEQ ID NO: 15768 - DNA, 32 bp, synthetic construct
  misc_feature 1..32: note = Probe
  source 1..32: mol_type = other DNA
accttttaagttaaagattaagagaaccaaca

SEQ ID NO: 15769 - DNA, 46 bp, synthetic construct; identical to SEQ ID NO: 2839
  misc_feature 1..46: note = Probe
  source 1..46: mol_type = other DNA

SEQ ID NO: 15770 - DNA, 50 bp, synthetic construct; identical to SEQ ID NO: 2840
  misc_feature 1..50: note = Probe
  source 1..50: mol_type = other DNA

SEQ ID NO: 15771 - DNA, 50 bp, synthetic construct; identical to SEQ ID NO: 2841
  misc_feature 1..50: note = Probe
  source 1..50: mol_type = other DNA

SEQ ID NO: 15772 - DNA, 18 bp, synthetic construct
  misc_feature 1..18: note = Probe
  source 1..18: mol_type = other DNA
acgaccccttatttaccg

SEQ ID NO: 15773 - DNA, 36 bp, synthetic construct
  misc_feature 1..36: note = Probe
  source 1..36: mol_type = other DNA
acgaggtcccgggttcaatccccggcacctccacca

SEQ ID NO: 15774 - DNA, 37 bp, synthetic construct
  misc_feature 1..37: note = Probe
  source 1..37: mol_type = other DNA
acgcagaaggtcctgggttcaagccccagtggaacca

SEQ ID NO: 15775 - DNA, 38 bp, synthetic construct
  misc_feature 1..38: note = Probe
  source 1..38: mol_type = other DNA
acgcagaaggtcctgggttcaagccccagtggaaccat

SEQ ID NO: 15776 - DNA, 40 bp, synthetic construct
  misc_feature 1..40: note = Probe
  source 1..40: mol_type = other DNA
acgcagaaggtcctgggttcaagccccagtggaaccatgg

SEQ ID NO: 15777 - DNA, 23 bp, synthetic construct
  misc_feature 1..23: note = Probe
  source 1..23: mol_type = other DNA
acgcagaaggtcctgggttcgag

SEQ ID NO: 15778 - DNA, 33 bp, synthetic construct
  misc_feature 1..33: note = Probe
  source 1..33: mol_type = other DNA
acgcagaaggtcctgggttcgagccccagtgga

SEQ ID NO: 15779 - DNA, 39 bp, synthetic construct; identical to SEQ ID NO: 2845
  misc_feature 1..39: note = Probe
  source 1..39: mol_type = other DNA

SEQ ID NO: 15780 - DNA, 40 bp, synthetic construct; identical to SEQ ID NO: 2846
  misc_feature 1..40: note = Probe
  source 1..40: mol_type = other DNA

SEQ ID NO: 15781 - DNA, 40 bp, synthetic construct; identical to SEQ ID NO: 2847
  misc_feature 1..40: note = Probe
  source 1..40: mol_type = other DNA

SEQ ID NO: 15782 - DNA, 40 bp, synthetic construct
  misc_feature 1..40: note = Probe
  source 1..40: mol_type = other DNA
acgcagaaggtcctgggttcgagccccagtggaaccatga

SEQ ID NO: 15783 - DNA, 18 bp, synthetic construct
  misc_feature 1..18: note = Probe
  source 1..18: mol_type = other DNA
acgccaaggtcgcgggtt

SEQ ID NO: 15784 - DNA, 19 bp, synthetic construct
  misc_feature 1..19: note = Probe
  source 1..19: mol_type = other DNA
acgccaaggtcgcgggttc

SEQ ID NO: 15785 - DNA, 29 bp, synthetic construct
  misc_feature 1..29: note = Probe
  source 1..29: mol_type = other DNA
acgccaaggtcgcgggttcgatccccgta

SEQ ID NO: 15786 - DNA, 39 bp, synthetic construct; identical to SEQ ID NO: 2849
  misc_feature 1..39: note = Probe
  source 1..39: mol_type = other DNA

SEQ ID NO: 15787 - DNA, 39 bp, synthetic construct; identical to SEQ ID NO: 2850
  misc_feature 1..39: note = Probe
  source 1..39: mol_type = other DNA

SEQ ID NO: 15788 - DNA, 39 bp, synthetic construct
  misc_feature 1..39: note = Probe
  source 1..39: mol_type = other DNA
acgccaaggtcgcgggttcgatccccgtacgggccactt

SEQ ID NO: 15789 - DNA, 39 bp, synthetic construct; identical to SEQ ID NO: 2851
  misc_feature 1..39: note = Probe
  source 1..39: mol_type = other DNA

SEQ ID NO: 15790 - DNA, 39 bp, synthetic construct; identical to SEQ ID NO: 2852
  misc_feature 1..39: note = Probe
  source 1..39: mol_type = other DNA

SEQ ID NO: 15791 - DNA, 36 bp, synthetic construct
  misc_feature 1..36: note = Probe
  source 1..36: mol_type = other DNA
acgcgaaaggtccccggttcgaaaccgggcggaaac

SEQ ID NO: 15792 - DNA, 37 bp, synthetic construct
  misc_feature 1..37: note = Probe
  source 1..37: mol_type = other DNA
acgcgaaaggtccccggttcgaaaccgggcggaaaca

SEQ ID NO: 15793 - DNA, 38 bp, synthetic construct
  misc_feature 1..38: note = Probe
  source 1..38: mol_type = other DNA
acgcgaaaggtccccggttcgaaaccgggcggaaacac

SEQ ID NO: 15794 - DNA, 39 bp, synthetic construct; identical to SEQ ID NO: 173
  misc_feature 1..39: note = Probe
  source 1..39: mol_type = other DNA

SEQ ID NO: 15795 - DNA, 40 bp, synthetic construct; identical to SEQ ID NO: 2854
  misc_feature 1..40: note = Probe
  source 1..40: mol_type = other DNA

SEQ ID NO: 15796 - DNA, 34 bp, synthetic construct
  misc_feature 1..34: note = Probe
  source 1..34: mol_type = other DNA
acgcgaaaggtccccggttcgatcccgggcggaa

SEQ ID NO: 15797 - DNA, 39 bp, synthetic construct
  misc_feature 1..39: note = Probe
  source 1..39: mol_type = other DNA
acgcgaaaggtccccggttcgatcccgggcggaaacagg

SEQ ID NO: 15798 - DNA, 40 bp, synthetic construct; identical to SEQ ID NO: 2855
  misc_feature 1..40: note = Probe
  source 1..40: mol_type = other DNA

SEQ ID NO: 15799 - DNA, 20 bp, synthetic construct
  misc_feature 1..20: note = Probe
  source 1..20: mol_type = other DNA
acgcgaaaggtccccggttt

SEQ ID NO: 15800 - DNA, 21 bp, synthetic construct
  misc_feature 1..21: note = Probe
  source 1..21: mol_type = other DNA
acgcgaaaggtccccggtttg

SEQ ID NO: 15801 - DNA, 32 bp, synthetic construct
  misc_feature 1..32: note = Probe
  source 1..32: mol_type = other DNA
acgcgaggcattggtggttcagtggtagaatt

SEQ ID NO: 15802 - DNA, 32 bp, synthetic construct
  misc_feature 1..32: note = Probe
  source 1..32: mol_type = other DNA
acgcgggagacccgggttcaattcccggccaa

SEQ ID NO: 15803 - DNA, 33 bp, synthetic construct
  misc_feature 1..33: note = Probe
  source 1..33: mol_type = other DNA
acgcgggagacccgggttcaattcccggccaat

SEQ ID NO: 15804 - DNA, 34 bp, synthetic construct
  misc_feature 1..34: note = Probe
  source 1..34: mol_type = other DNA
acgcgggagacccgggttcaattcccggccaatg

SEQ ID NO: 15805 - DNA, 36 bp, synthetic construct
  misc_feature 1..36: note = Probe
  source 1..36: mol_type = other DNA
acgcgggagacccgggttcaattcccggccaatgca

SEQ ID NO: 15806 - DNA, 37 bp, synthetic construct
  misc_feature 1..37: note = Probe
  source 1..37: mol_type = other DNA
acgcgggagacccgggttcaattcccggccaatgcaa

SEQ ID NO: 15807 - DNA, 39 bp, synthetic construct
  misc_feature 1..39: note = Probe
  source 1..39: mol_type = other DNA
acgcgggagacccgggttcaattcccggccaatgcaaaa

SEQ ID NO: 15808 - DNA, 16 bp, synthetic construct
  misc_feature 1..16: note = Probe
  source 1..16: mol_type = other DNA
acgcgggagaccgggg

SEQ ID NO: 15809 - DNA, 19 bp, synthetic construct
  misc_feature 1..19: note = Probe
  source 1..19: mol_type = other DNA
acgcgggagaccggggttc

SEQ ID NO: 15810 - DNA, 29 bp, synthetic construct
  misc_feature 1..29: note = Probe
  source 1..29: mol_type = other DNA
acgcgggagaccggggttcaattccccga

SEQ ID NO: 15811 - DNA, 37 bp, synthetic construct; identical to SEQ ID NO: 2859
  misc_feature 1..37: note = Probe
  source 1..37: mol_type = other DNA

SEQ ID NO: 15812 - DNA, 38 bp, synthetic construct; identical to SEQ ID NO: 2860
  misc_feature 1..38: note = Probe
  source 1..38: mol_type = other DNA

SEQ ID NO: 15813 - DNA, 39 bp, synthetic construct; identical to SEQ ID NO: 2861
  misc_feature 1..39: note = Probe
  source 1..39: mol_type = other DNA

SEQ ID NO: 15814 - DNA, 40 bp, synthetic construct; identical to SEQ ID NO: 2862
  misc_feature 1..40: note = Probe
  source 1..40: mol_type = other DNA

SEQ ID NO: 15815 - DNA, 20 bp, synthetic construct
  misc_feature 1..20: note = Probe
  source 1..20: mol_type = other DNA
acgcgggagaccggggttcg

SEQ ID NO: 15816 - DNA, 21 bp, synthetic construct
  misc_feature 1..21: note = Probe
  source 1..21: mol_type = other DNA
acgcgggagaccggggttcga

SEQ ID NO: 15817 - DNA, 22 bp, synthetic construct
  misc_feature 1..22: note = Probe
  source 1..22: mol_type = other DNA
acgcgggagaccggggttcgat

SEQ ID NO: 15818 - DNA, 26 bp, synthetic construct
  misc_feature 1..26: note = Probe
  source 1..26: mol_type = other DNA
acgcgggagaccggggttcgattccc

SEQ ID NO: 15819 - DNA, 27 bp, synthetic construct
  misc_feature 1..27: note = Probe
  source 1..27: mol_type = other DNA
acgcgggagaccggggttcgattcccc

SEQ ID NO: 15820 - DNA, 32 bp, synthetic construct
  misc_feature 1..32: note = Probe
  source 1..32: mol_type = other DNA
acgcgggagaccggggttcgattccccaacgg

SEQ ID NO: 15821 - DNA, 33 bp, synthetic construct
  misc_feature 1..33: note = Probe
  source 1..33: mol_type = other DNA
acgcgggagaccggggttcgattccccaacggg

SEQ ID NO: 15822 - DNA, 36 bp, synthetic construct
  misc_feature 1..36: note = Probe
  source 1..36: mol_type = other DNA
acgcgggagaccggggttcgattccccaacggggag

SEQ ID NO: 15823 - DNA, 39 bp, synthetic construct; identical to SEQ ID NO: 2864
  misc_feature 1..39: note = Probe
  source 1..39: mol_type = other DNA

SEQ ID NO: 15824 - DNA, 37 bp, synthetic construct; identical to SEQ ID NO: 2865
  misc_feature 1..37: note = Probe
  source 1..37: mol_type = other DNA

SEQ ID NO: 15825 - DNA, 38 bp, synthetic construct; identical to SEQ ID NO: 2866
  misc_feature 1..38: note = Probe
  source 1..38: mol_type = other DNA

SEQ ID NO: 15826 - DNA, 39 bp, synthetic construct; identical to SEQ ID NO: 2867
  misc_feature 1..39: note = Probe
  source 1..39: mol_type = other DNA

SEQ ID NO: 15827 - DNA, 50 bp, synthetic construct
  misc_feature 1..50: note = Probe
  source 1..50: mol_type = other DNA
acgcgggagaccggggttcgattccccgacggggagaaaagttgcttttt

SEQ ID NO: 15828 - DNA, 38 bp, synthetic construct; identical to SEQ ID NO: 2869
  misc_feature 1..38: note = Probe
  source 1..38: mol_type = other DNA

SEQ ID NO: 15829 - DNA, 39 bp, synthetic construct; identical to SEQ ID NO: 2870
  misc_feature 1..39: note = Probe
  source 1..39: mol_type = other DNA

SEQ ID NO: 15830 - DNA, 38 bp, synthetic construct
  misc_feature 1..38: note = Probe
  source 1..38: mol_type = other DNA
acgcgggagaccggggttcgattccccgacggggagag

SEQ ID NO: 15831 - DNA, 39 bp, synthetic construct; identical to SEQ ID NO: 2871
  misc_feature 1..39: note = Probe
  source 1..39: mol_type = other DNA

SEQ ID NO: 15832 - DNA, 37 bp, synthetic construct; identical to SEQ ID NO: 2872
  misc_feature 1..37: note = Probe
  source 1..37: mol_type = other DNA

SEQ ID NO: 15833 - DNA, 38 bp, synthetic construct
  misc_feature 1..38: note = Probe
  source 1..38: mol_type = other DNA
acgcgggagaccggggttcgattccccgacggggagga

SEQ ID NO: 15834 - DNA, 39 bp, synthetic construct
  misc_feature 1..39: note = Probe
  source 1..39: mol_type = other DNA
acgcgggagaccggggttcgattccccgacggggaggag

SEQ ID NO: 15835 - DNA, 38 bp, synthetic construct; identical to SEQ ID NO: 2873
  misc_feature 1..38: note = Probe
  source 1..38: mol_type = other DNA

SEQ ID NO: 15836 - DNA, 39 bp, synthetic construct; identical to SEQ ID NO: 2874
  misc_feature 1..39: note = Probe
  source 1..39: mol_type = other DNA

SEQ ID NO: 15837 - DNA, 40 bp, synthetic construct
  misc_feature 1..40: note = Probe
  source 1..40: mol_type = other DNA
acgcgggagaccggggttcgattccccgacggggaggcac

SEQ ID NO: 15838 - DNA, 47 bp, synthetic construct; identical to SEQ ID NO: 2875
  misc_feature 1..47: note = Probe
  source 1..47: mol_type = other DNA

SEQ ID NO: 15839 - DNA, 48 bp, synthetic construct
  misc_feature 1..48: note = Probe
  source 1..48: mol_type = other DNA
acgcgggagaccggggttcgattccccgacggggaggcacagtaattg

SEQ ID NO: 15840 - DNA, 50 bp, synthetic construct
  misc_feature 1..50: note = Probe
  source 1..50: mol_type = other DNA
acgcgggagaccggggttcgattccccgacggggaggcacagtaattgtt

SEQ ID NO: 15841 - DNA, 39 bp, synthetic construct; identical to SEQ ID NO: 2877
  misc_feature 1..39: note = Probe
  source 1..39: mol_type = other DNA

SEQ ID NO: 15842 - DNA, 41 bp, synthetic construct
  misc_feature 1..41: note = Probe
  source 1..41: mol_type = other DNA
acgcgggagaccggggttcgattccccgacggggaggccgg

SEQ ID NO: 15843 - DNA, 16 bp, synthetic construct
  misc_feature 1..16: note = Probe
  source 1..16: mol_type = other DNA
acgcgggaggcccggg

SEQ ID NO: 15844 - DNA, 19 bp, synthetic construct
  misc_feature 1..19: note = Probe
  source 1..19: mol_type = other DNA
acgcgggaggcccgggttc

SEQ ID NO: 15845 - DNA, 23 bp, synthetic construct
  misc_feature 1..23: note = Probe
  source 1..23: mol_type = other DNA
acgcgggaggcccgggttcgatt

SEQ ID NO: 15846 - DNA, 30 bp, synthetic construct
  misc_feature 1..30: note = Probe
  source 1..30: mol_type = other DNA
acgcgggaggcccgggttcgattcccggcc

SEQ ID NO: 15847 - DNA, 32 bp, synthetic construct
  misc_feature 1..32: note = Probe
  source 1..32: mol_type = other DNA
acgcgggaggcccgggttcgattcccggccaa

SEQ ID NO: 15848 - DNA, 33 bp, synthetic construct
  misc_feature 1..33: note = Probe
  source 1..33: mol_type = other DNA
acgcgggaggcccgggttcgattcccggccaat

SEQ ID NO: 15849 - DNA, 34 bp, synthetic construct
  misc_feature 1..34: note = Probe
  source 1..34: mol_type = other DNA
acgcgggaggcccgggttcgattcccggccaatg

SEQ ID NO: 15850 - DNA, 35 bp, synthetic construct
  misc_feature 1..35: note = Probe
  source 1..35: mol_type = other DNA
acgcgggaggcccgggttcgattcccggccaatgc

SEQ ID NO: 15851 - DNA, 37 bp, synthetic construct
  misc_feature 1..37: note = Probe
  source 1..37: mol_type = other DNA
acgcgggaggcccgggttcgattcccggccaatgcaa

SEQ ID NO: 15852 - DNA, 38 bp, synthetic construct
  misc_feature 1..38: note = Probe
  source 1..38: mol_type = other DNA
acgcgggaggcccgggttcgattcccggccaatgcaac

SEQ ID NO: 15853 - DNA, 38 bp, synthetic construct
  misc_feature 1..38: note = Probe
  source 1..38: mol_type = other DNA
acgcgggaggcccgggttcgattcccggccaatgcaag

SEQ ID NO: 15854 - DNA, 39 bp, synthetic construct; identical to SEQ ID NO: 2881
  misc_feature 1..39: note = Probe
  source 1..39: mol_type = other DNA

SEQ ID NO: 15855 - DNA, 37 bp, synthetic construct
  misc_feature 1..37: note = Probe
  source 1..37: mol_type = other DNA
acgcgggaggcccgggttcgattcccggccaatgcac

SEQ ID NO: 15856 - DNA, 38 bp, synthetic construct
  misc_feature 1..38: note = Probe
  source 1..38: mol_type = other DNA
acgcgggaggcccgggttcgattcccggccaatgcacg

SEQ ID NO: 15857 - DNA, 39 bp, synthetic construct; identical to SEQ ID NO: 2882
  misc_feature 1..39: note = Probe
  source 1..39: mol_type = other DNA

SEQ ID NO: 15858 - DNA, 38 bp, synthetic construct
  misc_feature 1..38: note = Probe
  source 1..38: mol_type = other DNA
acgcgggaggcccgggttcgattcccggccaatgcact

SEQ ID NO: 15859 - DNA, 39 bp, synthetic construct
  misc_feature 1..39: note = Probe
  source 1..39: mol_type = other DNA
acgcgggaggcccgggttcgattcccggccaatgcactt

SEQ ID NO: 15860 - DNA, 39 bp, synthetic construct; identical to SEQ ID NO: 2883
  misc_feature 1..39: note = Probe
  source 1..39: mol_type = other DNA

SEQ ID NO: 15861 - DNA, 50 bp, synthetic construct
  misc_feature 1..50: note = Probe
  source 1..50: mol_type = other DNA
acgcgggaggcccgggttcgattcccggccaatgcagcagcagaccttta

SEQ ID NO: 15862 - DNA, 32 bp, synthetic construct
  misc_feature 1..32: note = Probe
  source 1..32: mol_type = other DNA
acgcgggaggcccgggttcgattcccggccca

SEQ ID NO: 15863 - DNA, 35 bp, synthetic construct
  misc_feature 1..35: note = Probe
  source 1..35: mol_type = other DNA
acgcgggaggcccgggttcgattcccggcccatgc

SEQ ID NO: 15864 - DNA, 36 bp, synthetic construct
  misc_feature 1..36: note = Probe
  source 1..36: mol_type = other DNA
acgcgggaggcccgggttcgattcccggcccatgca

SEQ ID NO: 15865 - DNA, 37 bp, synthetic construct
  misc_feature 1..37: note = Probe
  source 1..37: mol_type = other DNA
acgcgggaggcccgggttcgattcccggcccatgcag

SEQ ID NO: 15866 - DNA, 38 bp, synthetic construct; identical to SEQ ID NO: 2885
  misc_feature 1..38: note = Probe
  source 1..38: mol_type = other DNA

SEQ ID NO: 15867 - DNA, 39 bp, synthetic construct; identical to SEQ ID NO: 2886
  misc_feature 1..39: note = Probe
  source 1..39: mol_type = other DNA

SEQ ID NO: 15868 - DNA, 20 bp, synthetic construct
  misc_feature 1..20: note = Probe
  source 1..20: mol_type = other DNA
acgcgggaggcccgggtttg

SEQ ID NO: 15869 - DNA, 39 bp, synthetic construct
  misc_feature 1..39: note = Probe
  source 1..39: mol_type = other DNA
acgctaaggtcgcgggttcgatccccgtactggccagac

SEQ ID NO: 15870 - DNA, 33 bp, synthetic construct
  misc_feature 1..33: note = Probe
  source 1..33: mol_type = other DNA
acggcttgtcctcgttagtatagtggtgagtat

SEQ ID NO: 15871 - DNA, 36 bp, synthetic construct
  misc_feature 1..36: note = Probe
  source 1..36: mol_type = other DNA
acggcttgtcctcgttagtatagtggtgagtatccc

SEQ ID NO: 15872 - DNA, 38 bp, synthetic construct
  misc_feature 1..38: note = Probe
  source 1..38: mol_type = other DNA
acggcttgtcctcgttagtatagtggtgagtatccccg

SEQ ID NO: 15873 - DNA, 44 bp, synthetic construct
  misc_feature 1..44: note = Probe
  source 1..44: mol_type = other DNA
acggcttgtcctcgttagtatagtggtgagtatccccgcctgtc

SEQ ID NO: 15874 - DNA, 30 bp, synthetic construct
  misc_feature 1..30: note = Probe
  source 1..30: mol_type = other DNA
acgggagcccggatagctcagtcggtagag

SEQ ID NO: 15875 - DNA, 36 bp, synthetic construct
  misc_feature 1..36: note = Probe
  source 1..36: mol_type = other DNA
acgggagcccggatagctcagtcggtagagcatcag

SEQ ID NO: 15876 - DNA, 37 bp, synthetic construct
  misc_feature 1..37: note = Probe
  source 1..37: mol_type = other DNA
acgggagcccggatagctcagtcggtagagcatcaga

SEQ ID NO: 15877 - DNA, 38 bp, synthetic construct
  misc_feature 1..38: note = Probe
  source 1..38: mol_type = other DNA
acgggagcccggatagctcagtcggtagagcatcagac

SEQ ID NO: 15878 - DNA, 41 bp, synthetic construct
  misc_feature 1..41: note = Probe
  source 1..41: mol_type = other DNA
acgggagcccggatagctcagtcggtagagcatcagacttt

SEQ ID NO: 15879 - DNA, 42 bp, synthetic construct
  misc_feature 1..42: note = Probe
  source 1..42: mol_type = other DNA
acgggagcccggatagctcagtcggtagagcatcagactttt

SEQ ID NO: 15880 - DNA, 43 bp, synthetic construct
  misc_feature 1..43: note = Probe
  source 1..43: mol_type = other DNA
acgggagcccggatagctcagtcggtagagcatcagactttta

SEQ ID NO: 15881 - DNA, 50 bp, synthetic construct
  misc_feature 1..50: note = Probe
  source 1..50: mol_type = other DNA
acgggagcccggatagctcagtcggtagagcatcagacttttaatctgag

SEQ ID NO: 15882 - DNA, 16 bp, synthetic construct
  misc_feature 1..16: note = Probe
  source 1..16: mol_type = other DNA
acgggctcacatcacc

SEQ ID NO: 15883 - DNA, 19 bp, synthetic construct
  misc_feature 1..19: note = Probe
  source 1..19: mol_type = other DNA
acgggctcacatcacccca

SEQ ID NO: 15884 - DNA, 21 bp, synthetic construct
  misc_feature 1..21: note = Probe
  source 1..21: mol_type = other DNA
acgggctcacatcaccccata

SEQ ID NO: 15885 - DNA, 25 bp, synthetic construct
  misc_feature 1..25: note = Probe
  source 1..25: mol_type = other DNA
acgggctcacatcaccccataaaca

SEQ ID NO: 15886 - DNA, 27 bp, synthetic construct
  misc_feature 1..27: note = Probe
  source 1..27: mol_type = other DNA
acgggctcacatcaccccataaacaaa

SEQ ID NO: 15887 - DNA, 28 bp, synthetic construct
  misc_feature 1..28: note = Probe
  source 1..28: mol_type = other DNA
acgggctcacatcaccccataaacaaat

SEQ ID NO: 15888 - DNA, 17 bp, synthetic construct
  misc_feature 1..17: note = Probe
  source 1..17: mol_type = other DNA
acggggcacaataattt

SEQ ID NO: 15889 - DNA, 16 bp, synthetic construct
  misc_feature 1..16: note = Probe
  source 1..16: mol_type = other DNA
acgggtccccggtagc

SEQ ID NO: 15890 - DNA, 17 bp, synthetic construct
  misc_feature 1..17: note = Probe
  source 1..17: mol_type = other DNA
acgggtccccggtagct

SEQ ID NO: 15891 - DNA, 18 bp, synthetic construct
  misc_feature 1..18: note = Probe
  source 1..18: mol_type = other DNA
acgggtccccggtagctc

SEQ ID NO: 15892 - DNA, 19 bp, synthetic construct
  misc_feature 1..19: note = Probe
  source 1..19: mol_type = other DNA
acgggtccccggtagctcg

SEQ ID NO: 15893 - DNA, 20 bp, synthetic construct
  misc_feature 1..20: note = Probe
  source 1..20: mol_type = other DNA
acgggtccccggtagctcgc

SEQ ID NO: 15894 - DNA, 21 bp, synthetic construct
  misc_feature 1..21: note = Probe
  source 1..21: mol_type = other DNA
acgggtccccggtagctcgcc

SEQ ID NO: 15895 - DNA, 29 bp, synthetic construct
  misc_feature 1..29: note = Probe
  source 1..29: mol_type = other DNA
acgggtccccggtagctcgccgtgatcgt

SEQ ID NO: 15896 - DNA, 24 bp, synthetic construct
  misc_feature 1..24: note = Probe
  source 1..24: mol_type = other DNA
acgggtggcgccgtggcttagttg

SEQ ID NO: 15897 - DNA, 40 bp, synthetic construct
  misc_feature 1..40: note = Probe
  source 1..40: mol_type = other DNA
acgtatgaggccccgggttcaatccccggcatctccagac

SEQ ID NO: 15898 - DNA, 31 bp, synthetic construct
  misc_feature 1..31: note = Probe
  source 1..31: mol_type = other DNA
acgttcgcctcacacgcgaaaggtccccggt

SEQ ID NO: 15899 - DNA, 16 bp, synthetic construct
  misc_feature 1..16: note = Probe
  source 1..16: mol_type = other DNA
actaaaaaatcccttt

SEQ ID NO: 15900 - DNA, 17 bp, synthetic construct
  misc_feature 1..17: note = Probe
  source 1..17: mol_type = other DNA
actaaaaaatccctttt

SEQ ID NO: 15901 - DNA, 20 bp, synthetic construct
  misc_feature 1..20: note = Probe
  source 1..20: mol_type = other DNA
actaaatactaccgtatggc

SEQ ID NO: 15902 - DNA, 19 bp, synthetic construct
  misc_feature 1..19: note = Probe
  source 1..19: mol_type = other DNA
actaagtgtttgtgggttt

SEQ ID NO: 15903 - DNA, 32 bp, synthetic construct
  misc_feature 1..32: note = Probe
  source 1..32: mol_type = other DNA
actaagtgtttgtgggtttaagtcccattggt

SEQ ID NO: 15904 - DNA, 37 bp, synthetic construct; identical to SEQ ID NO: 2895
  misc_feature 1..37: note = Probe
  source 1..37: mol_type = other DNA

SEQ ID NO: 15905 - DNA, 38 bp, synthetic construct; identical to SEQ ID NO: 2896
  misc_feature 1..38: note = Probe
  source 1..38: mol_type = other DNA

SEQ ID NO: 15906 - DNA, 39 bp, synthetic construct; identical to SEQ ID NO: 2897
  misc_feature 1..39: note = Probe
  source 1..39: mol_type = other DNA

SEQ ID NO: 15907 - DNA, 40 bp, synthetic construct; identical to SEQ ID NO: 2898
  misc_feature 1..40: note = Probe
  source 1..40: mol_type = other DNA

SEQ ID NO: 15908 - DNA, 41 bp, synthetic construct; identical to SEQ ID NO: 2899
  misc_feature 1..41: note = Probe
  source 1..41: mol_type = other DNA

SEQ ID NO: 15909 - DNA, 42 bp, synthetic construct; identical to SEQ ID NO: 2900
  misc_feature 1..42: note = Probe
  source 1..42: mol_type = other DNA

SEQ ID NO: 15910 - DNA, 18 bp, synthetic construct
  misc_feature 1..18: note = Probe
  source 1..18: mol_type = other DNA
actactataaccacccta

SEQ ID NO: 15911 - DNA, 24 bp, synthetic construct
  misc_feature 1..24: note = Probe
  source 1..24: mol_type = other DNA
actactttcttgattcaggtgttt

SEQ ID NO: 15912 - DNA, 27 bp, synthetic construct
  misc_feature 1..27: note = Probe
  source 1..27: mol_type = other DNA
actagttttgacaacattcaaaaaaga

SEQ ID NO: 15913 - DNA, 30 bp, synthetic construct
  misc_feature 1..30: note = Probe
  source 1..30: mol_type = other DNA
actagttttgacaacattcaaaaaagagta

SEQ ID NO: 15914 - DNA, 31 bp, synthetic construct
  misc_feature 1..31: note = Probe
  source 1..31: mol_type = other DNA
actagttttgacaacattcaaaaaagagtaa

SEQ ID NO: 15915 - DNA, 15 bp, synthetic construct
  misc_feature 1..15: note = Probe
  source 1..15: mol_type = other DNA
actataaccacccta

SEQ ID NO: 15916 - DNA, 16 bp, synthetic construct
  misc_feature 1..16: note = Probe
  source 1..16: mol_type = other DNA
actcatgcccccatgt

SEQ ID NO: 15917 - DNA, 17 bp, synthetic construct
  misc_feature 1..17: note = Probe
  source 1..17: mol_type = other DNA
actcatgcccccatgtc

SEQ ID NO: 15918 - DNA, 18 bp, synthetic construct
  misc_feature 1..18: note = Probe
  source 1..18: mol_type = other DNA
actcatgcccccatgtct

SEQ ID NO: 15919 - DNA, 19 bp, synthetic construct
  misc_feature 1..19: note = Probe
  source 1..19: mol_type = other DNA
actcatgcccccatgtcta

SEQ ID NO: 15920 - DNA, 22 bp, synthetic construct
  misc_feature 1..22: note = Probe
  source 1..22: mol_type = other DNA
actcatgcccccatgtctaaca

SEQ ID NO: 15921 - DNA, 25 bp, synthetic construct
  misc_feature 1..25: note = Probe
  source 1..25: mol_type = other DNA
actcatgcccccatgtctaacaaca

SEQ ID NO: 15922 - DNA, 27 bp, synthetic construct
  misc_feature 1..27: note = Probe
  source 1..27: mol_type = other DNA
actcatgcccccatgtctaacaacatg

SEQ ID NO: 15923 - DNA, 30 bp, synthetic construct; identical to SEQ ID NO: 2906
  misc_feature 1..30: note = Probe
  source 1..30: mol_type = other DNA

SEQ ID NO: 15924 - DNA, 31 bp, synthetic construct; identical to SEQ ID NO: 2907
  misc_feature 1..31: note = Probe
  source 1..31: mol_type = other DNA

SEQ ID NO: 15925 - DNA, 32 bp, synthetic construct; identical to SEQ ID NO: 2908
  misc_feature 1..32: note = Probe
  source 1..32: mol_type = other DNA

SEQ ID NO: 15926 - DNA, 33 bp, synthetic construct; identical to SEQ ID NO: 2909
  misc_feature 1..33: note = Probe
  source 1..33: mol_type = other DNA

SEQ ID NO: 15927 - DNA, 34 bp, synthetic construct; identical to SEQ ID NO: 2910
  misc_feature 1..34: note = Probe
  source 1..34: mol_type = other DNA

SEQ ID NO: 15928 - DNA, 35 bp, synthetic construct; identical to SEQ ID NO: 2911
  misc_feature 1..35: note = Probe
  source 1..35: mol_type = other DNA

SEQ ID NO: 15929 - DNA, 36 bp, synthetic construct; identical to SEQ ID NO: 2912
  misc_feature 1..36: note = Probe
  source 1..36: mol_type = other DNA

SEQ ID NO: 15930 - DNA, 37 bp, synthetic construct; identical to SEQ ID NO: 2913
  misc_feature 1..37: note = Probe
  source 1..37: mol_type = other DNA

SEQ ID NO: 15931 - DNA, 38 bp, synthetic construct; identical to SEQ ID NO: 2914
  misc_feature 1..38: note = Probe
  source 1..38: mol_type = other DNA

SEQ ID NO: 15932 - DNA, 39 bp, synthetic construct; identical to SEQ ID NO: 2915
  misc_feature 1..39: note = Probe
  source 1..39: mol_type = other DNA

SEQ ID NO: 15933 - DNA, 40 bp, synthetic construct
  misc_feature 1..40: note = Probe
  source 1..40: mol_type = other DNA
actcatgcccccatgtctaacaacatggctttctcaactt

SEQ ID NO: 15934 - DNA, 42 bp, synthetic construct
  misc_feature 1..42: note = Probe
  source 1..42: mol_type = other DNA
actcatgcccccatgtctaacaacatggctttctcaactttt

SEQ ID NO: 15935 - DNA, 43 bp, synthetic construct
  misc_feature 1..43: note = Probe
  source 1..43: mol_type = other DNA
actcatgcccccatgtctaacaacatggctttctcaactttta

SEQ ID NO: 15936 - DNA, 30 bp, synthetic construct
  misc_feature 1..30: note = Probe
  source 1..30: mol_type = other DNA
actcattaaattatgataatcatatttacc

SEQ ID NO: 15937 - DNA, 34 bp, synthetic construct
  misc_feature 1..34: note = Probe
  source 1..34: mol_type = other DNA
actcattaaattatgataatcatatttaccaaat

SEQ ID NO: 15938 - DNA, 35 bp, synthetic construct; identical to SEQ ID NO: 2917
  misc_feature 1..35: note = Probe
  source 1..35: mol_type = other DNA

SEQ ID NO: 15939 - DNA, 19 bp, synthetic construct
  misc_feature 1..19: note = Probe
  source 1..19: mol_type = other DNA
actcccggtatgggaacaa

SEQ ID NO: 15940 - DNA, 18 bp, synthetic construct
  misc_feature 1..18: note = Probe
  source 1..18: mol_type = other DNA
actcccggtgtgggaacg

SEQ ID NO: 15941 - DNA, 19 bp, synthetic construct
  misc_feature 1..19: note = Probe
  source 1..19: mol_type = other DNA
actcccggtgtgggaacgc

SEQ ID NO: 15942 - DNA, 19 bp, synthetic construct
  misc_feature 1..19: note = Probe
  source 1..19: mol_type = other DNA
actcccggtgtgggaatga

SEQ ID NO: 15943 - DNA, 16 bp, synthetic construct
  misc_feature 1..16: note = Probe
  source 1..16: mol_type = other DNA
actctgaatccagcga

SEQ ID NO: 15944 - DNA, 22 bp, synthetic construct
  misc_feature 1..22: note = Probe
  source 1..22: mol_type = other DNA
actctgaatccagcgatccgag

SEQ ID NO: 15945 - DNA, 30 bp, synthetic construct
  misc_feature 1..30: note = Probe
  source 1..30: mol_type = other DNA
actctggactttgaatccagcgatccgagt

SEQ ID NO: 15946 - DNA, 16 bp, synthetic construct
  misc_feature 1..16: note = Probe
  source 1..16: mol_type = other DNA
actcttaatcccaggg

SEQ ID NO: 15947 - DNA, 23 bp, synthetic construct
  misc_feature 1..23: note = Probe
  source 1..23: mol_type = other DNA
actcttttagtataaatagtacc

SEQ ID NO: 15948 - DNA, 26 bp, synthetic construct
  misc_feature 1..26: note = Probe
  source 1..26: mol_type = other DNA
actcttttagtataaatagtaccgtt

SEQ ID NO: 15949 - DNA, 27 bp, synthetic construct
  misc_feature 1..27: note = Probe
  source 1..27: mol_type = other DNA
actcttttagtataaatagtaccgtta

SEQ ID NO: 15950 - DNA, 30 bp, synthetic construct; identical to SEQ ID NO: 2927
  misc_feature 1..30: note = Probe
  source 1..30: mol_type = other DNA

SEQ ID NO: 15951 - DNA, 31 bp, synthetic construct; identical to SEQ ID NO: 2928
  misc_feature 1..31: note = Probe
  source 1..31: mol_type = other DNA

SEQ ID NO: 15952 - DNA, 42 bp, synthetic construct
  misc_feature 1..42: note = Probe
  source 1..42: mol_type = other DNA
actcttttagtataaatagtaccgttaacttccaattaacta

SEQ ID NO: 15953 - DNA, 44 bp, synthetic construct; identical to SEQ ID NO: 2930
  misc_feature 1..44: note = Probe
  source 1..44: mol_type = other DNA

SEQ ID NO: 15954 - DNA, 42 bp, synthetic construct; identical to SEQ ID NO: 2937
  misc_feature 1..42: note = Probe
  source 1..42: mol_type = other DNA

SEQ ID NO: 15955 - DNA, 43 bp, synthetic construct; identical to SEQ ID NO: 2938
  misc_feature 1..43: note = Probe
  source 1..43: mol_type = other DNA

SEQ ID NO: 15956 - DNA, 44 bp, synthetic construct; identical to SEQ ID NO: 2939
  misc_feature 1..44: note = Probe
  source 1..44: mol_type = other DNA

SEQ ID NO: 15957 - DNA, 45 bp, synthetic construct; identical to SEQ ID NO: 2940
  misc_feature 1..45: note = Probe
  source 1..45: mol_type = other DNA

SEQ ID NO: 15958 - DNA, 49 bp, synthetic construct
  misc_feature 1..49: note = Probe
  source 1..49: mol_type = other DNA
actgaaaatgtttagacgggctcacatcaccccataaacaaataggttt

SEQ ID NO: 15959 - DNA, 50 bp, synthetic construct; identical to SEQ ID NO: 2941
  misc_feature 1..50: note = Probe
  source 1..50: mol_type = other DNA

SEQ ID NO: 15960 - DNA, 20 bp, synthetic construct
  misc_feature 1..20: note = Probe
  source 1..20: mol_type = other DNA
actgctaactcatgccccca

SEQ ID NO: 15961 - DNA, 25 bp, synthetic construct
  misc_feature 1..25: note = Probe
  source 1..25: mol_type = other DNA
actgctaactcatgcccccatgtct

SEQ ID NO: 15962 - DNA, 29 bp, synthetic construct
  misc_feature 1..29: note = Probe
  source 1..29: mol_type = other DNA
actgctaactcatgcccccatgtctaaca

SEQ ID NO: 15963 - DNA, 37 bp, synthetic construct; identical to SEQ ID NO: 2947
  misc_feature 1..37: note = Probe
  source 1..37: mol_type = other DNA

SEQ ID NO: 15964 - DNA, 38 bp, synthetic construct; identical to SEQ ID NO: 2948
  misc_feature 1..38: note = Probe
  source 1..38: mol_type = other DNA

SEQ ID NO: 15965 - DNA, 39 bp, synthetic construct; identical to SEQ ID NO: 2949
  misc_feature 1..39: note = Probe
  source 1..39: mol_type = other DNA

SEQ ID NO: 15966 - DNA, 40 bp, synthetic construct; identical to SEQ ID NO: 2950
  misc_feature 1..40: note = Probe
  source 1..40: mol_type = other DNA

SEQ ID NO: 15967 - DNA, 41 bp, synthetic construct; identical to SEQ ID NO: 2951
  misc_feature 1..41: note = Probe
  source 1..41: mol_type = other DNA

SEQ ID NO: 15968 - DNA, 42 bp, synthetic construct; identical to SEQ ID NO: 2952
  misc_feature 1..42: note = Probe
  source 1..42: mol_type = other DNA

SEQ ID NO: 15969 - DNA, 43 bp, synthetic construct; identical to SEQ ID NO: 2953
  misc_feature 1..43: note = Probe
  source 1..43: mol_type = other DNA

SEQ ID NO: 15970 - DNA, 44 bp, synthetic construct; identical to SEQ ID NO: 2954
  misc_feature 1..44: note = Probe
  source 1..44: mol_type = other DNA

SEQ ID NO: 15971 - DNA, 45 bp, synthetic construct; identical to SEQ ID NO: 2955
  misc_feature 1..45: note = Probe
  source 1..45: mol_type = other DNA

SEQ ID NO: 15972 - DNA, 46 bp, synthetic construct; identical to SEQ ID NO: 2956
  misc_feature 1..46: note = Probe
  source 1..46: mol_type = other DNA

SEQ ID NO: 15973 - DNA, 25 bp, synthetic construct
  misc_feature 1..25: note = Probe
  source 1..25: mol_type = other DNA
actggaaagtgcacttggacgaacc

SEQ ID NO: 15974 - DNA, 43 bp, synthetic construct; identical to SEQ ID NO: 2960
  misc_feature 1..43: note = Probe
  source 1..43: mol_type = other DNA

SEQ ID NO: 15975 - DNA, 37 bp, synthetic construct; identical to SEQ ID NO: 200
  misc_feature 1..37: note = Probe
  source 1..37: mol_type = other DNA

SEQ ID NO: 15976 - DNA, 38 bp, synthetic construct; identical to SEQ ID NO: 2962
  misc_feature 1..38: note = Probe
  source 1..38: mol_type = other DNA

SEQ ID NO: 15977 - DNA, 39 bp, synthetic construct; identical to SEQ ID NO: 2963
  misc_feature 1..39: note = Probe
  source 1..39: mol_type = other DNA

SEQ ID NO: 15978 - DNA, 41 bp, synthetic construct; identical to SEQ ID NO: 2965
  misc_feature 1..41: note = Probe
  source 1..41: mol_type = other DNA

SEQ ID NO: 15979 - DNA, 42 bp, synthetic construct; identical to SEQ ID NO: 2966
  misc_feature 1..42: note = Probe
  source 1..42: mol_type = other DNA

SEQ ID NO: 15980 - DNA, 45 bp, synthetic construct; identical to SEQ ID NO: 2969
  misc_feature 1..45: note = Probe
  source 1..45: mol_type = other DNA

SEQ ID NO: 15981 - DNA, 46 bp, synthetic construct; identical to SEQ ID NO: 2970
  misc_feature 1..46: note = Probe
  source 1..46: mol_type = other DNA

SEQ ID NO: 15982 - DNA, 16 bp, synthetic construct
  misc_feature 1..16: note = Probe
  source 1..16: mol_type = other DNA
acttaacttgaccgct

SEQ ID NO: 15983 - DNA, 17 bp, synthetic construct
  misc_feature 1..17: note = Probe
  source 1..17: mol_type = other DNA
acttaacttgaccgctc

SEQ ID NO: 15984 - DNA, 18 bp, synthetic construct
  misc_feature 1..18: note = Probe
  source 1..18: mol_type = other DNA
acttaacttgaccgctct

SEQ ID NO: 15985 - DNA, 20 bp, synthetic construct
  misc_feature 1..20: note = Probe
  source 1..20: mol_type = other DNA
acttaacttgaccgctctga

SEQ ID NO: 15986 - DNA, 21 bp, synthetic construct
  misc_feature 1..21: note = Probe
  source 1..21: mol_type = other DNA
acttaacttgaccgctctgag

SEQ ID NO: 15987 - DNA, 22 bp, synthetic construct
  misc_feature 1..22: note = Probe
  source 1..22: mol_type = other DNA
acttaacttgaccgctctgagc

SEQ ID NO: 15988 - DNA, 23 bp, synthetic construct
  misc_feature 1..23: note = Probe
  source 1..23: mol_type = other DNA
acttaacttgaccgctctgagct

SEQ ID NO: 15989 - DNA, 16 bp, synthetic construct
  misc_feature 1..16: note = Probe
  source 1..16: mol_type = other DNA
acttacacttaggaga

SEQ ID NO: 15990 - DNA, 17 bp, synthetic construct
  misc_feature 1..17: note = Probe
  source 1..17: mol_type = other DNA
acttacacttaggagat

SEQ ID NO: 15991 - DNA, 18 bp, synthetic construct
  misc_feature 1..18: note = Probe
  source 1..18: mol_type = other DNA
acttacacttaggagatt

SEQ ID NO: 15992 - DNA, 21 bp, synthetic construct
  misc_feature 1..21: note = Probe
  source 1..21: mol_type = other DNA
acttacacttaggagatttca

SEQ ID NO: 15993 - DNA, 24 bp, synthetic construct
  misc_feature 1..24: note = Probe
  source 1..24: mol_type = other DNA
acttacacttaggagatttcaact

SEQ ID NO: 15994 - DNA, 25 bp, synthetic construct
  misc_feature 1..25: note = Probe
  source 1..25: mol_type = other DNA
acttacacttaggagatttcaactt

SEQ ID NO: 15995 - DNA, 26 bp, synthetic construct
  misc_feature 1..26: note = Probe
  source 1..26: mol_type = other DNA
acttacacttaggagatttcaactta

SEQ ID NO: 15996 - DNA, 27 bp, synthetic construct
  misc_feature 1..27: note = Probe
  source 1..27: mol_type = other DNA
acttacacttaggagatttcaacttaa

SEQ ID NO: 15997 - DNA, 29 bp, synthetic construct
  misc_feature 1..29: note = Probe
  source 1..29: mol_type = other DNA
acttacacttaggagatttcaacttaact

SEQ ID NO: 15998 - DNA, 31 bp, synthetic construct
  misc_feature 1..31: note = Probe
  source 1..31: mol_type = other DNA
acttacacttaggagatttcaacttaacttg

SEQ ID NO: 15999 - DNA, 33 bp, synthetic construct; identical to SEQ ID NO: 2981
  misc_feature 1..33: note = Probe
  source 1..33: mol_type = other DNA

SEQ ID NO: 16000 - DNA, 34 bp, synthetic construct
  misc_feature 1..34: note = Probe
  source 1..34: mol_type = other DNA
acttacacttaggagatttcaacttaacttgacc

SEQ ID NO: 16001 - DNA, 35 bp, synthetic construct; identical to SEQ ID NO: 2982
  misc_feature 1..35: note = Probe
  source 1..35: mol_type = other DNA

SEQ ID NO: 16002 - DNA, 36 bp, synthetic construct; identical to SEQ ID NO: 2983
  misc_feature 1..36: note = Probe
  source 1..36: mol_type = other DNA

SEQ ID NO: 16003 - DNA, 37 bp, synthetic construct; identical to SEQ ID NO: 2984
  misc_feature 1..37: note = Probe
  source 1..37: mol_type = other DNA

SEQ ID NO: 16004 - DNA, 38 bp, synthetic construct
  misc_feature 1..38: note = Probe
  source 1..38: mol_type = other DNA
acttacacttaggagatttcaacttaacttgaccgctc

SEQ ID NO: 16005 - DNA, 39 bp, synthetic construct; identical to SEQ ID NO: 2985
  misc_feature 1..39: note = Probe
  source 1..39: mol_type = other DNA

SEQ ID NO: 16006 - DNA, 41 bp, synthetic construct; identical to SEQ ID NO: 2987
  misc_feature 1..41: note = Probe
  source 1..41: mol_type = other DNA

SEQ ID NO: 16007 - DNA, 42 bp, synthetic construct; identical to SEQ ID NO: 2988
  misc_feature 1..42: note = Probe
  source 1..42: mol_type = other DNA

SEQ ID NO: 16008 - DNA, 43 bp, synthetic construct; identical to SEQ ID NO: 2989
  misc_feature 1..43: note = Probe
  source 1..43: mol_type = other DNA

SEQ ID NO: 16009 - DNA, 44 bp, synthetic construct; identical to SEQ ID NO: 2990
  misc_feature 1..44: note = Probe
  source 1..44: mol_type = other DNA

SEQ ID NO: 16010 - DNA, 50 bp, synthetic construct; identical to SEQ ID NO: 2992
  misc_feature 1..50: note = Probe
  source 1..50: mol_type = other DNA

SEQ ID NO: 16011 - DNA, 36 bp, synthetic construct
  misc_feature 1..36: note = Probe
  source 1..36: mol_type = other DNA
acttagcattaaccttttaagttaaagattaagaga

SEQ ID NO: 16012 - DNA, 23 bp, synthetic construct
  misc_feature 1..23: note = Probe
  source 1..23: mol_type = other DNA
acttaggagatttcaacttaact

SEQ ID NO: 16013 - DNA, 27 bp, synthetic construct
  misc_feature 1..27: note = Probe
  source 1..27: mol_type = other DNA
acttaggagatttcaacttaacttgac

SEQ ID NO: 16014 - DNA, 28 bp, synthetic construct
  misc_feature 1..28: note = Probe
  source 1..28: mol_type = other DNA
acttaggagatttcaacttaacttgacc

SEQ ID NO: 16015 - DNA, 29 bp, synthetic construct
  misc_feature 1..29: note = Probe
  source 1..29: mol_type = other DNA
acttaggagatttcaacttaacttgaccg

SEQ ID NO: 16016 - DNA, 30 bp, synthetic construct; identical to SEQ ID NO: 9072
  misc_feature 1..30: note = Probe
  source 1..30: mol_type = other DNA

SEQ ID NO: 16017 - DNA, 31 bp, synthetic construct; identical to SEQ ID NO: 2999
  misc_feature 1..31: note = Probe
  source 1..31: mol_type = other DNA

SEQ ID NO: 16018 - DNA, 33 bp, synthetic construct; identical to SEQ ID NO: 3001
  misc_feature 1..33: note = Probe
  source 1..33: mol_type = other DNA

SEQ ID NO: 16019 - DNA, 36 bp, synthetic construct; identical to SEQ ID NO: 3003
  misc_feature 1..36: note = Probe
  source 1..36: mol_type = other DNA

SEQ ID NO: 16020 - DNA, 37 bp, synthetic construct; identical to SEQ ID NO: 3004
  misc_feature 1..37: note = Probe
  source 1..37: mol_type = other DNA

SEQ ID NO: 16021 - DNA, 38 bp, synthetic construct; identical to SEQ ID NO: 3005
  misc_feature 1..38: note = Probe
  source 1..38: mol_type = other DNA

SEQ ID NO: 16022 - DNA, 39 bp, synthetic construct; identical to SEQ ID NO: 3006
  misc_feature 1..39: note = Probe
  source 1..39: mol_type = other DNA

SEQ ID NO: 16023 - DNA, 43 bp, synthetic construct; identical to SEQ ID NO: 3009
  misc_feature 1..43: note = Probe
  source 1..43: mol_type = other DNA

SEQ ID NO: 16024 - DNA, 44 bp, synthetic construct; identical to SEQ ID NO: 3010
  misc_feature 1..44: note = Probe
  source 1..44: mol_type = other DNA

SEQ ID NO: 16025 - DNA, 26 bp, synthetic construct
  misc_feature 1..26: note = Probe
  source 1..26: mol_type = other DNA
acttcgccttaattttaataatcaac

SEQ ID NO: 16026 - DNA, 19 bp, synthetic construct
  misc_feature 1..19: note = Probe
  source 1..19: mol_type = other DNA
actttacagtcagaggttc

SEQ ID NO: 16027 - DNA, 30 bp, synthetic construct; identical to SEQ ID NO: 202
  misc_feature 1..30: note = Probe
  source 1..30: mol_type = other DNA

SEQ ID NO: 16028 - DNA, 31 bp, synthetic construct; identical to SEQ ID NO: 3013
  misc_feature 1..31: note = Probe
  source 1..31: mol_type = other DNA

SEQ ID NO: 16029 - DNA, 32 bp, synthetic construct; identical to SEQ ID NO: 3014
  misc_feature 1..32: note = Probe
  source 1..32: mol_type = other DNA

SEQ ID NO: 16030 - DNA, 33 bp, synthetic construct; identical to SEQ ID NO: 3015
  misc_feature 1..33: note = Probe
  source 1..33: mol_type = other DNA

SEQ ID NO: 16031 - DNA, 36 bp, synthetic construct
  misc_feature 1..36: note = Probe
  source 1..36: mol_type = other DNA
actttacagtcagaggttcaattcctcttcttaaca

SEQ ID NO: 16032 - DNA, 38 bp, synthetic construct; identical to SEQ ID NO: 3018
  misc_feature 1..38: note = Probe
  source 1..38: mol_type = other DNA

SEQ ID NO: 16033 - DNA, 39 bp, synthetic construct; identical to SEQ ID NO: 3019
  misc_feature 1..39: note = Probe
  source 1..39: mol_type = other DNA

SEQ ID NO: 16034 - DNA, 16 bp, synthetic construct
  misc_feature 1..16: note = Probe
  source 1..16: mol_type = other DNA
actttgaatccagcga

SEQ ID NO: 16035 - DNA, 21 bp, synthetic construct
  misc_feature 1..21: note = Probe
  source 1..21: mol_type = other DNA
actttgaatccagcgatccga

SEQ ID NO: 16036 - DNA, 22 bp, synthetic construct
  misc_feature 1..22: note = Probe
  source 1..22: mol_type = other DNA
actttgaatccagcgatccgag

SEQ ID NO: 16037 - DNA, 23 bp, synthetic construct
  misc_feature 1..23: note = Probe
  source 1..23: mol_type = other DNA
actttgaatccagcgatccgagt

SEQ ID NO: 16038 - DNA, 24 bp, synthetic construct
  misc_feature 1..24: note = Probe
  source 1..24: mol_type = other DNA
actttgaatccagcgatccgagtt

SEQ ID NO: 16039 - DNA, 29 bp, synthetic construct
  misc_feature 1..29: note = Probe
  source 1..29: mol_type = other DNA
actttgatagagtaaataataggagctta

SEQ ID NO: 16040 - DNA, 33 bp, synthetic construct; identical to SEQ ID NO: 3022
  misc_feature 1..33: note = Probe
  source 1..33: mol_type = other DNA

SEQ ID NO: 16041 - DNA, 35 bp, synthetic construct; identical to SEQ ID NO: 3024
  misc_feature 1..35: note = Probe
  source 1..35: mol_type = other DNA

SEQ ID NO: 16042 - DNA, 36 bp, synthetic construct; identical to SEQ ID NO: 3025
  misc_feature 1..36: note = Probe
  source 1..36: mol_type = other DNA

SEQ ID NO: 16043 - DNA, 37 bp, synthetic construct; identical to SEQ ID NO: 203
  misc_feature 1..37: note = Probe
  source 1..37: mol_type = other DNA

SEQ ID NO: 16044 - DNA, 38 bp, synthetic construct; identical to SEQ ID NO: 204
  misc_feature 1..38: note = Probe
  source 1..38: mol_type = other DNA

SEQ ID NO: 16045 - DNA, 40 bp, synthetic construct; identical to SEQ ID NO: 3026
  misc_feature 1..40: note = Probe
  source 1..40: mol_type = other DNA

SEQ ID NO: 16046 - DNA, 41 bp, synthetic construct; identical to SEQ ID NO: 3027
  misc_feature 1..41: note = Probe
  source 1..41: mol_type = other DNA

SEQ ID NO: 16047 - DNA, 42 bp, synthetic construct; identical to SEQ ID NO: 3028
  misc_feature 1..42: note = Probe
  source 1..42: mol_type = other DNA

SEQ ID NO: 16048 - DNA, 44 bp, synthetic construct; identical to SEQ ID NO: 3030
  misc_feature 1..44: note = Probe
  source 1..44: mol_type = other DNA

SEQ ID NO: 16049 - DNA, 45 bp, synthetic construct; identical to SEQ ID NO: 206
  misc_feature 1..45: note = Probe
  source 1..45: mol_type = other DNA

SEQ ID NO: 16050 - DNA, 46 bp, synthetic construct; identical to SEQ ID NO: 3031
  misc_feature 1..46: note = Probe
  source 1..46: mol_type = other DNA

SEQ ID NO: 16051 - DNA, 50 bp, synthetic construct; identical to SEQ ID NO: 3033
  misc_feature 1..50: note = Probe
  source 1..50: mol_type = other DNA

SEQ ID NO: 16052 - DNA, 20 bp, synthetic construct
  misc_feature 1..20: note = Probe
  source 1..20: mol_type = other DNA
acttttaaaggataacagct

SEQ ID NO: 16053 - DNA, 30 bp, synthetic construct; identical to SEQ ID NO: 209
  misc_feature 1..30: note = Probe
  source 1..30: mol_type = other DNA

SEQ ID NO: 16054 - DNA, 33 bp, synthetic construct; identical to SEQ ID NO: 3035
  misc_feature 1..33: note = Probe
  source 1..33: mol_type = other DNA

SEQ ID NO: 16055 - DNA, 38 bp, synthetic construct
  misc_feature 1..38: note = Probe
  source 1..38: mol_type = other DNA
acttttaaaggataacagctatccattggtcttaggcc

SEQ ID NO: 16056 - DNA, 40 bp, synthetic construct
  misc_feature 1..40: note = Probe
  source 1..40: mol_type = other DNA
acttttaaaggataacagctatccattggtcttaggcccc

SEQ ID NO: 16057 - DNA, 41 bp, synthetic construct; identical to SEQ ID NO: 3037
  misc_feature 1..41: note = Probe
  source 1..41: mol_type = other DNA

SEQ ID NO: 16058 - DNA, 42 bp, synthetic construct
  misc_feature 1..42: note = Probe
  source 1..42: mol_type = other DNA
acttttaaaggataacagctatccattggtcttaggccccaa

SEQ ID NO: 16059 - DNA, 44 bp, synthetic construct
  misc_feature 1..44: note = Probe
  source 1..44: mol_type = other DNA
acttttaaaggataacagctatccattggtcttaggccccaaaa

SEQ ID NO: 16060 - DNA, 25 bp, synthetic construct
  misc_feature 1..25: note = Probe
  source 1..25: mol_type = other DNA
agaaagctcacaagaactgctaact

SEQ ID NO: 16061 - DNA, 26 bp, synthetic construct
  misc_feature 1..26: note = Probe
  source 1..26: mol_type = other DNA
agaaagctcacaagaactgctaactc

SEQ ID NO: 16062 - DNA, 27 bp, synthetic construct
  misc_feature 1..27: note = Probe
  source 1..27: mol_type = other DNA
agaaagctcacaagaactgctaactca

SEQ ID NO: 16063 - DNA, 29 bp, synthetic construct
  misc_feature 1..29: note = Probe
  source 1..29: mol_type = other DNA
agaaagctcacaagaactgctaactcatg

SEQ ID NO: 16064 - DNA, 35 bp, synthetic construct; identical to SEQ ID NO: 3042
  misc_feature 1..35: note = Probe
  source 1..35: mol_type = other DNA

SEQ ID NO: 16065 - DNA, 16 bp, synthetic construct
  misc_feature 1..16: note = Probe
  source 1..16: mol_type = other DNA
agaaaggccgaatttt

SEQ ID NO: 16066 - DNA, 17 bp, synthetic construct
  misc_feature 1..17: note = Probe
  source 1..17: mol_type = other DNA
agaaaggccgaatttta

SEQ ID NO: 16067 - DNA, 31 bp, synthetic construct; identical to SEQ ID NO: 3044
  misc_feature 1..31: note = Probe
  source 1..31: mol_type = other DNA

SEQ ID NO: 16068 - DNA, 34 bp, synthetic construct; identical to SEQ ID NO: 3047
  misc_feature 1..34: note = Probe
  source 1..34: mol_type = other DNA

SEQ ID NO: 16069 - DNA, 24 bp, synthetic construct
  misc_feature 1..24: note = Probe
  source 1..24: mol_type = other DNA
agaacagcagagtggcgcagcgga

SEQ ID NO: 16070 - DNA, 25 bp, synthetic construct
  misc_feature 1..25: note = Probe
  source 1..25: mol_type = other DNA
agaacagcagagtggcgcagcggaa

SEQ ID NO: 16071 - DNA, 26 bp, synthetic construct
  misc_feature 1..26: note = Probe
  source 1..26: mol_type = other DNA
agaacagcagagtggcgcagcggaag

SEQ ID NO: 16072 - DNA, 27 bp, synthetic construct
  misc_feature 1..27: note = Probe
  source 1..27: mol_type = other DNA
agaacagcagagtggcgcagcggaagc

SEQ ID NO: 16073 - DNA, 30 bp, synthetic construct
  misc_feature 1..30: note = Probe
  source 1..30: mol_type = other DNA
agaacagcagagtggcgcagcggaagcgtg

SEQ ID NO: 16074 - DNA, 31 bp, synthetic construct
  misc_feature 1..31: note = Probe
  source 1..31: mol_type = other DNA
agaacagcagagtggcgcagcggaagcgtgc

SEQ ID NO: 16075 - DNA, 41 bp, synthetic construct
  misc_feature 1..41: note = Probe
  source 1..41: mol_type = other DNA
agaacagcagagtggcgcagcggaagcgtgctgggcccata

SEQ ID NO: 16076 - DNA, 16 bp, synthetic construct
  misc_feature 1..16: note = Probe
  source 1..16: mol_type = other DNA
agaacagggtttgtta

SEQ ID NO: 16077 - DNA, 20 bp, synthetic construct
  misc_feature 1..20: note = Probe
  source 1..20: mol_type = other DNA
agaaccaacacctctttaca

SEQ ID NO: 16078 - DNA, 22 bp, synthetic construct
  misc_feature 1..22: note = Probe
  source 1..22: mol_type = other DNA
agaaccaacacctctttacagt

SEQ ID NO: 16079 - DNA, 23 bp, synthetic construct
  misc_feature 1..23: note = Probe
  source 1..23: mol_type = other DNA
agaaccaacacctctttacagtg

SEQ ID NO: 16080 - DNA, 24 bp, synthetic construct
  misc_feature 1..24: note = Probe
  source 1..24: mol_type = other DNA
agaaccaacacctctttacagtga

SEQ ID NO: 16081 - DNA, 25 bp, synthetic construct
  misc_feature 1..25: note = Probe
  source 1..25: mol_type = other DNA
agaaccaacacctctttacagtgaa

SEQ ID NO: 16082 - DNA, 26 bp, synthetic construct
  misc_feature 1..26: note = Probe
  source 1..26: mol_type = other DNA
agaaccaacacctctttacagtgaaa

SEQ ID NO: 16083 - DNA, 27 bp, synthetic construct
  misc_feature 1..27: note = Probe
  source 1..27: mol_type = other DNA
agaaccaacacctctttacagtgaaat

SEQ ID NO: 16084 - DNA, 16 bp, synthetic construct
  misc_feature 1..16: note = Probe
  source 1..16: mol_type = other DNA
agaactgacagtacct

SEQ ID NO: 16085 - DNA, 16 bp, synthetic construct
  misc_feature 1..16: note = Probe
  source 1..16: mol_type = other DNA
agaactgctaactcat

SEQ ID NO: 16086 - DNA, 17 bp, synthetic construct
  misc_feature 1..17: note = Probe
  source 1..17: mol_type = other DNA
agaactgctaactcatg

SEQ ID NO: 16087 - DNA, 20 bp, synthetic construct
  misc_feature 1..20: note = Probe
  source 1..20: mol_type = other DNA
agaactgctaactcatgccc

SEQ ID NO: 16088 - DNA, 21 bp, synthetic construct
  misc_feature 1..21: note = Probe
  source 1..21: mol_type = other DNA
agaactgctaactcatgcccc

SEQ ID NO: 16089 - DNA, 22 bp, synthetic construct
  misc_feature 1..22: note = Probe
  source 1..22: mol_type = other DNA
agaactgctaactcatgccccc

SEQ ID NO: 16090 - DNA, 23 bp, synthetic construct
  misc_feature 1..23: note = Probe
  source 1..23: mol_type = other DNA
agaactgctaactcatgccccca

SEQ ID NO: 16091 - DNA, 24 bp, synthetic construct
  misc_feature 1..24: note = Probe
  source 1..24: mol_type = other DNA
agaactgctaactcatgcccccat

SEQ ID NO: 16092 - DNA, 26 bp, synthetic construct
  misc_feature 1..26: note = Probe
  source 1..26: mol_type = other DNA
agaactgctaactcatgcccccatgt

SEQ ID NO: 16093 - DNA, 29 bp, synthetic construct
  misc_feature 1..29: note = Probe
  source 1..29: mol_type = other DNA
agaactgctaactcatgcccccatgtcta

SEQ ID NO: 16094 - DNA, 30 bp, synthetic construct
  misc_feature 1..30: note = Probe
  source 1..30: mol_type = other DNA
agaactgctaactcatgcccccatgtctaa

SEQ ID NO: 16095 - DNA, 31 bp, synthetic construct
  misc_feature 1..31: note = Probe
  source 1..31: mol_type = other DNA
agaactgctaactcatgcccccatgtctaac

SEQ ID NO: 16096 - DNA, 33 bp, synthetic construct
  misc_feature 1..33: note = Probe
  source 1..33: mol_type = other DNA
agaactgctaactcatgcccccatgtctaacaa

SEQ ID NO: 16097 - DNA, 34 bp, synthetic construct
  misc_feature 1..34: note = Probe
  source 1..34: mol_type = other DNA
agaactgctaactcatgcccccatgtctaacaac

SEQ ID NO: 16098 - DNA, 40 bp, synthetic construct; identical to SEQ ID NO: 218
  misc_feature 1..40: note = Probe
  source 1..40: mol_type = other DNA

SEQ ID NO: 16099 - DNA, 41 bp, synthetic construct; identical to SEQ ID NO: 219
  misc_feature 1..41: note = Probe
  source 1..41: mol_type = other DNA

SEQ ID NO: 16100 - DNA, 42 bp, synthetic construct; identical to SEQ ID NO: 220
  misc_feature 1..42: note = Probe
  source 1..42: mol_type = other DNA

SEQ ID NO: 16101 - DNA, 43 bp, synthetic construct; identical to SEQ ID NO: 221
  misc_feature 1..43: note = Probe
  source 1..43: mol_type = other DNA

SEQ ID NO: 16102 - DNA, 45 bp, synthetic construct; identical to SEQ ID NO: 223
  misc_feature 1..45: note = Probe
  source 1..45: mol_type = other DNA

SEQ ID NO: 16103 - DNA, 46 bp, synthetic construct; identical to SEQ ID NO: 224
  misc_feature 1..46: note = Probe
  source 1..46: mol_type = other DNA

SEQ ID NO: 16104 - DNA, 50 bp, synthetic construct; identical to SEQ ID NO: 3070
  misc_feature 1..50: note = Probe
  source 1..50: mol_type = other DNA

SEQ ID NO: 16105 - DNA, 36 bp, synthetic construct; identical to SEQ ID NO: 3073
  misc_feature 1..36: note = Probe
  source 1..36: mol_type = other DNA

SEQ ID NO: 16106 - DNA, 33 bp, synthetic construct; identical to SEQ ID NO: 3075
  misc_feature 1..33: note = Probe
  source 1..33: mol_type = other DNA

SEQ ID NO: 16107 - DNA, 35 bp, synthetic construct
  misc_feature 1..35: note = Probe
  source 1..35: mol_type = other DNA
agaagattctaggttcgactcctggctggctcgcg

SEQ ID NO: 16108 - DNA, 36 bp, synthetic construct; identical to SEQ ID NO: 3076
  misc_feature 1..36: note = Probe
  source 1..36: mol_type = other DNA

SEQ ID NO: 16109 - DNA, 35 bp, synthetic construct
  misc_feature 1..35: note = Probe
  source 1..35: mol_type = other DNA
agaagattctaggttcgactcctggctggctcgct

SEQ ID NO: 16110 - DNA, 36 bp, synthetic construct; identical to SEQ ID NO: 3077
  misc_feature 1..36: note = Probe
  source 1..36: mol_type = other DNA

SEQ ID NO: 16111 - DNA, 30 bp, synthetic construct
  misc_feature 1..30: note = Probe
  source 1..30: mol_type = other DNA
agaagattgagggttcgagtcccttcgtgg

SEQ ID NO: 16112 - DNA, 33 bp, synthetic construct; identical to SEQ ID NO: 231
  misc_feature 1..33: note = Probe
  source 1..33: mol_type = other DNA

SEQ ID NO: 16113 - DNA, 31 bp, synthetic construct; identical to SEQ ID NO: 3084
  misc_feature 1..31: note = Probe
  source 1..31: mol_type = other DNA

SEQ ID NO: 16114 - DNA, 29 bp, synthetic construct
  misc_feature 1..29: note = Probe
  source 1..29: mol_type = other DNA
agaagcagcttcaaacctgccggggcttc

SEQ ID NO: 16115 - DNA, 30 bp, synthetic construct; identical to SEQ ID NO: 3090
  misc_feature 1..30: note = Probe
  source 1..30: mol_type = other DNA

SEQ ID NO: 16116 - DNA, 31 bp, synthetic construct; identical to SEQ ID NO: 3091
  misc_feature 1..31: note = Probe
  source 1..31: mol_type = other DNA

SEQ ID NO: 16117 - DNA, 30 bp, synthetic construct
  misc_feature 1..30: note = Probe
  source 1..30: mol_type = other DNA
agaagccccagtggcctaatggataaggca

SEQ ID NO: 16118 - DNA, 36 bp, synthetic construct
  misc_feature 1..36: note = Probe
  source 1..36: mol_type = other DNA
agaaggtcctgggttcaagccccagtggaaccatgg

SEQ ID NO: 16119 - DNA, 35 bp, synthetic construct; identical to SEQ ID NO: 3095
  misc_feature 1..35: note = Probe
  source 1..35: mol_type = other DNA

SEQ ID NO: 16120 - DNA, 36 bp, synthetic construct; identical to SEQ ID NO: 3096
  misc_feature 1..36: note = Probe
  source 1..36: mol_type = other DNA

SEQ ID NO: 16121 - DNA, 16 bp, synthetic construct
  misc_feature 1..16: note = Probe
  source 1..16: mol_type = other DNA
agaaggtctcactttt

SEQ ID NO: 16122 - DNA, 27 bp, synthetic construct
  misc_feature 1..27: note = Probe
  source 1..27: mol_type = other DNA
agaatcttagctttgggtgctaatggt

SEQ ID NO: 16123 - DNA, 28 bp, synthetic construct
  misc_feature 1..28: note = Probe
  source 1..28: mol_type = other DNA
agaatcttagctttgggtgctaatggtg

SEQ ID NO: 16124 - DNA, 29 bp, synthetic construct
  misc_feature 1..29: note = Probe
  source 1..29: mol_type = other DNA
agaatcttagctttgggtgctaatggtgg

SEQ ID NO: 16125 - DNA, 30 bp, synthetic construct
  misc_feature 1..30: note = Probe
  source 1..30: mol_type = other DNA
agaatcttagctttgggtgctaatggtgga

SEQ ID NO: 16126 - DNA, 31 bp, synthetic construct; identical to SEQ ID NO: 3097
  misc_feature 1..31: note = Probe
  source 1..31: mol_type = other DNA

SEQ ID NO: 16127 - DNA, 33 bp, synthetic construct
  misc_feature 1..33: note = Probe
  source 1..33: mol_type = other DNA
agaatcttagctttgggtgctaatggtggagtt

SEQ ID NO: 16128 - DNA, 34 bp, synthetic construct; identical to SEQ ID NO: 3098
  misc_feature 1..34: note = Probe
  source 1..34: mol_type = other DNA

SEQ ID NO: 16129 - DNA, 38 bp, synthetic construct
  misc_feature 1..38: note = Probe
  source 1..38: mol_type = other DNA
agaatcttagctttgggtgctaatggtggagttaaaga

SEQ ID NO: 16130 - DNA, 49 bp, synthetic construct; identical to SEQ ID NO: 234
  misc_feature 1..49: note = Probe
  source 1..49: mol_type = other DNA

SEQ ID NO: 16131 - DNA, 16 bp, synthetic construct
  misc_feature 1..16: note = Probe
  source 1..16: mol_type = other DNA
agaattctcgcctgcc

SEQ ID NO: 16132 - DNA, 18 bp, synthetic construct
  misc_feature 1..18: note = Probe
  source 1..18: mol_type = other DNA
agaattctcgcctgccac

SEQ ID NO: 16133 - DNA, 29 bp, synthetic construct
  misc_feature 1..29: note = Probe
  source 1..29: mol_type = other DNA
agaattctcgcctgccacgcgggaggccc

SEQ ID NO: 16134 - DNA, 33 bp, synthetic construct
  misc_feature 1..33: note = Probe
  source 1..33: mol_type = other DNA
agaattctcgcctgccacgcgggaggcccgggt

SEQ ID NO: 16135 - DNA, 16 bp, synthetic construct
  misc_feature 1..16: note = Probe
  source 1..16: mol_type = other DNA
agacaacccagaacgt

SEQ ID NO: 16136 - DNA, 26 bp, synthetic construct
  misc_feature 1..26: note = Probe
  source 1..26: mol_type = other DNA
agacaccccccacagtttatgtagct

SEQ ID NO: 16137 - DNA, 28 bp, synthetic construct
  misc_feature 1..28: note = Probe
  source 1..28: mol_type = other DNA
agacaccccccacagtttatgtagctta

SEQ ID NO: 16138 - DNA, 30 bp, synthetic construct
  misc_feature 1..30: note = Probe
  source 1..30: mol_type = other DNA
agacaccccccacagtttatgtagcttacc

SEQ ID NO: 16139 - DNA, 31 bp, synthetic construct
  misc_feature 1..31: note = Probe
  source 1..31: mol_type = other DNA
agacaccccccacagtttatgtagcttacct

SEQ ID NO: 16140 - DNA, 31 bp, synthetic construct
  misc_feature 1..31: note = Probe
  source 1..31: mol_type = other DNA
agacagccggctcgttggtctaggggtatga

SEQ ID NO: 16141 - DNA, 32 bp, synthetic construct
  misc_feature 1..32: note = Probe
  source 1..32: mol_type = other DNA
agacagccggctcgttggtctaggggtatgat

SEQ ID NO: 16142 - DNA, 33 bp, synthetic construct
  misc_feature 1..33: note = Probe
  source 1..33: mol_type = other DNA
agacagccggctcgttggtctaggggtatgatt

SEQ ID NO: 16143 - DNA, 38 bp, synthetic construct
  misc_feature 1..38: note = Probe
  source 1..38: mol_type = other DNA
agacagccggctcgttggtctaggggtatgattctcgc

SEQ ID NO: 16144 - DNA, 41 bp, synthetic construct
  misc_feature 1..41: note = Probe
  source 1..41: mol_type = other DNA
agacagccggctcgttggtctaggggtatgattctcgcttt

SEQ ID NO: 16145 - DNA, 42 bp, synthetic construct
  misc_feature 1..42: note = Probe
  source 1..42: mol_type = other DNA
agacagccggctcgttggtctaggggtatgattctcgctttg

SEQ ID NO: 16146 - DNA, 28 bp, synthetic construct
  misc_feature 1..28: note = Probe
  source 1..28: mol_type = other DNA
agacagcgccgctggtgtagtggtatca

SEQ ID NO: 16147 - DNA, 29 bp, synthetic construct
  misc_feature 1..29: note = Probe
  source 1..29: mol_type = other DNA
agacagcgccgctggtgtagtggtatcat

SEQ ID NO: 16148 - DNA, 30 bp, synthetic construct
  misc_feature 1..30: note = Probe
  source 1..30: mol_type = other DNA
agacagcgccgctggtgtagtggtatcatg

SEQ ID NO: 16149 - DNA, 36 bp, synthetic construct
  misc_feature 1..36: note = Probe
  source 1..36: mol_type = other DNA
agacagcgccgctggtgtagtggtatcatgcaagat

SEQ ID NO: 16150 - DNA, 37 bp, synthetic construct
  misc_feature 1..37: note = Probe
  source 1..37: mol_type = other DNA
agacagcgccgctggtgtagtggtatcatgcaagatt

SEQ ID NO: 16151 - DNA, 38 bp, synthetic construct
  misc_feature 1..38: note = Probe
  source 1..38: mol_type = other DNA
agacagcgccgctggtgtagtggtatcatgcaagattc

SEQ ID NO: 16152 - DNA, 23 bp, synthetic construct
  misc_feature 1..23: note = Probe
  source 1..23: mol_type = other DNA
agacaggggttaggcctcttttt

SEQ ID NO: 16153 - DNA, 26 bp, synthetic construct
  misc_feature 1..26: note = Probe
  source 1..26: mol_type = other DNA
agacaggggttaggcctctttttacc

SEQ ID NO: 16154 - DNA, 27 bp, synthetic construct
  misc_feature 1..27: note = Probe
  source 1..27: mol_type = other DNA
agacaggggttaggcctctttttacca

SEQ ID NO: 16155 - DNA, 29 bp, synthetic construct
  misc_feature 1..29: note = Probe
  source 1..29: mol_type = other DNA
agacaggggttaggcctctttttaccagc

SEQ ID NO: 16156 - DNA, 30 bp, synthetic construct
  misc_feature 1..30: note = Probe
  source 1..30: mol_type = other DNA
agacaggggttaggcctctttttaccagct

SEQ ID NO: 16157 - DNA, 16 bp, synthetic construct
  misc_feature 1..16: note = Probe
  source 1..16: mol_type = other DNA
agaccaagagccttca

SEQ ID NO: 16158 - DNA, 28 bp, synthetic construct
  misc_feature 1..28: note = Probe
  source 1..28: mol_type = other DNA
agaccaagagccttcaaagccctcagta

SEQ ID NO: 16159 - DNA, 31 bp, synthetic construct; identical to SEQ ID NO: 3106
  misc_feature 1..31: note = Probe
  source 1..31: mol_type = other DNA

SEQ ID NO: 16160 - DNA, 33 bp, synthetic construct
  misc_feature 1..33: note = Probe
  source 1..33: mol_type = other DNA
agaccaagagccttcaaagccctcagtaagttg

SEQ ID NO: 16161 - DNA, 46 bp, synthetic construct; identical to SEQ ID NO: 3107
  misc_feature 1..46: note = Probe
  source 1..46: mol_type = other DNA

SEQ ID NO: 16162 - DNA, 49 bp, synthetic construct; identical to SEQ ID NO: 3109
  misc_feature 1..49: note = Probe
  source 1..49: mol_type = other DNA

SEQ ID NO: 16163 - DNA, 19 bp, synthetic construct
  misc_feature 1..19: note = Probe
  source 1..19: mol_type = other DNA
agacccgaggtagggcttt

SEQ ID NO: 16164 - DNA, 20 bp, synthetic construct
  misc_feature 1..20: note = Probe
  source 1..20: mol_type = other DNA
agacccgaggtagggctttg

SEQ ID NO: 16165 - DNA, 29 bp, synthetic construct
  misc_feature 1..29: note = Probe
  source 1..29: mol_type = other DNA
agacccgaggtagggctttggctgtgggg

SEQ ID NO: 16166 - DNA, 28 bp, synthetic construct
  misc_feature 1..28: note = Probe
  source 1..28: mol_type = other DNA
agacccttttggatgttcgcaacccctt

SEQ ID NO: 16167 - DNA, 29 bp, synthetic construct
  misc_feature 1..29: note = Probe
  source 1..29: mol_type = other DNA
agacccttttggatgttcgcaaccccttt

SEQ ID NO: 16168 - DNA, 30 bp, synthetic construct
  misc_feature 1..30: note = Probe
  source 1..30: mol_type = other DNA
agacccttttggatgttcgcaacccctttt

SEQ ID NO: 16169 - DNA, 26 bp, synthetic construct
  misc_feature 1..26: note = Probe
  source 1..26: mol_type = other DNA
agaccggggttcaattccccgacggg

SEQ ID NO: 16170 - DNA, 28 bp, synthetic construct
  misc_feature 1..28: note = Probe
  source 1..28: mol_type = other DNA
agaccggggttcaattccccgacgggga

SEQ ID NO: 16171 - DNA, 30 bp, synthetic construct; identical to SEQ ID NO: 3111
  misc_feature 1..30: note = Probe
  source 1..30: mol_type = other DNA

SEQ ID NO: 16172 - DNA, 32 bp, synthetic construct; identical to SEQ ID NO: 3112
  misc_feature 1..32: note = Probe
  source 1..32: mol_type = other DNA

SEQ ID NO: 16173 - DNA, 27 bp, synthetic construct
  misc_feature 1..27: note = Probe
  source 1..27: mol_type = other DNA
agaccggggttcgattccccgacgggg

SEQ ID NO: 16174 - DNA, 30 bp, synthetic construct; identical to SEQ ID NO: 3114
  misc_feature 1..30: note = Probe
  source 1..30: mol_type = other DNA

SEQ ID NO: 16175 - DNA, 32 bp, synthetic construct; identical to SEQ ID NO: 3116
  misc_feature 1..32: note = Probe
  source 1..32: mol_type = other DNA

SEQ ID NO: 16176 - DNA, 31 bp, synthetic construct; identical to SEQ ID NO: 3117
  misc_feature 1..31: note = Probe
  source 1..31: mol_type = other DNA

SEQ ID NO: 16177 - DNA, 32 bp, synthetic construct; identical to SEQ ID NO: 3118
  misc_feature 1..32: note = Probe
  source 1..32: mol_type = other DNA

SEQ ID NO: 16178 - DNA, 32 bp, synthetic construct; identical to SEQ ID NO: 3119
  misc_feature 1..32: note = Probe
  source 1..32: mol_type = other DNA

SEQ ID NO: 16179 - DNA, 30 bp, synthetic construct; identical to SEQ ID NO: 3120
  misc_feature 1..30: note = Probe
  source 1..30: mol_type = other DNA

SEQ ID NO: 16180 - DNA, 31 bp, synthetic construct; identical to SEQ ID NO: 3121
  misc_feature 1..31: note = Probe
  source 1..31: mol_type = other DNA

SEQ ID NO: 16181 - DNA, 32 bp, synthetic construct; identical to SEQ ID NO: 3122
  misc_feature 1..32: note = Probe
  source 1..32: mol_type = other DNA

SEQ ID NO: 16182 - DNA, 32 bp, synthetic construct; identical to SEQ ID NO: 3123
  misc_feature 1..32: note = Probe
  source 1..32: mol_type = other DNA

SEQ ID NO: 16183 - DNA, 30 bp, synthetic construct
  misc_feature 1..30: note = Probe
  source 1..30: mol_type = other DNA
agacgagggctccatagctcaggggttaga

SEQ ID NO: 16184 - DNA, 20 bp, synthetic construct
  misc_feature 1..20: note = Probe
  source 1..20: mol_type = other DNA
agacgggctcacatcacccc

SEQ ID NO: 16185 - DNA, 21 bp, synthetic construct
  misc_feature 1..21: note = Probe
  source 1..21: mol_type = other DNA
agacgggctcacatcacccca

SEQ ID NO: 16186 - DNA, 22 bp, synthetic construct
  misc_feature 1..22: note = Probe
  source 1..22: mol_type = other DNA
agacgggctcacatcaccccat

SEQ ID NO: 16187 - DNA, 23 bp, synthetic construct
  misc_feature 1..23: note = Probe
  source 1..23: mol_type = other DNA
agacgggctcacatcaccccata

SEQ ID NO: 16188 - DNA, 24 bp, synthetic construct
  misc_feature 1..24: note = Probe
  source 1..24: mol_type = other DNA
agacgggctcacatcaccccataa

SEQ ID NO: 16189 - DNA, 25 bp, synthetic construct
  misc_feature 1..25: note = Probe
  source 1..25: mol_type = other DNA
agacgggctcacatcaccccataaa

SEQ ID NO: 16190 - DNA, 26 bp, synthetic construct
  misc_feature 1..26: note = Probe
  source 1..26: mol_type = other DNA
agacgggctcacatcaccccataaac

SEQ ID NO: 16191 - DNA, 27 bp, synthetic construct
  misc_feature 1..27: note = Probe
  source 1..27: mol_type = other DNA
agacgggctcacatcaccccataaaca

SEQ ID NO: 16192 - DNA, 28 bp, synthetic construct
  misc_feature 1..28: note = Probe
  source 1..28: mol_type = other DNA
agacgggctcacatcaccccataaacaa

SEQ ID NO: 16193 - DNA, 29 bp, synthetic construct
  misc_feature 1..29: note = Probe
  source 1..29: mol_type = other DNA
agacgggctcacatcaccccataaacaaa

SEQ ID NO: 16194 - DNA, 30 bp, synthetic construct; identical to SEQ ID NO: 3135
  misc_feature 1..30: note = Probe
  source 1..30: mol_type = other DNA

SEQ ID NO: 16195 - DNA, 31 bp, synthetic construct; identical to SEQ ID NO: 3136
  misc_feature 1..31: note = Probe
  source 1..31: mol_type = other DNA

SEQ ID NO: 16196 - DNA, 29 bp, synthetic construct
  misc_feature 1..29: note = Probe
  source 1..29: mol_type = other DNA
agactcgcggccgccttaagaagccagca

SEQ ID NO: 16197 - DNA, 30 bp, synthetic construct
  misc_feature 1..30: note = Probe
  source 1..30: mol_type = other DNA
agactcgcggccgccttaagaagccagcag

SEQ ID NO: 16198 - DNA, 30 bp, synthetic construct
  misc_feature 1..30: note = Probe
  source 1..30: mol_type = other DNA
agactgtgttttccttccagttcaaaaagg

SEQ ID NO: 16199 - DNA, 26 bp, synthetic construct
  misc_feature 1..26: note = Probe
  source 1..26: mol_type = other DNA
agagaaccaacacctctttacagtga

SEQ ID NO: 16200 - DNA, 28 bp, synthetic construct
  misc_feature 1..28: note = Probe
  source 1..28: mol_type = other DNA
agagaaccaacacctctttacagtgaaa

SEQ ID NO: 16201 - DNA, 29 bp, synthetic construct
  misc_feature 1..29: note = Probe
  source 1..29: mol_type = other DNA
agagaaccaacacctctttacagtgaaat

SEQ ID NO: 16202 - DNA, 29 bp, synthetic construct
  misc_feature 1..29: note = Probe
  source 1..29: mol_type = other DNA
agagcatgagactcttaatctcagggtcg

SEQ ID NO: 16203 - DNA, 30 bp, synthetic construct; identical to SEQ ID NO: 3140
  misc_feature 1..30: note = Probe
  source 1..30: mol_type = other DNA

SEQ ID NO: 16204 - DNA, 34 bp, synthetic construct
  misc_feature 1..34: note = Probe
  source 1..34: mol_type = other DNA
agagcatgagactcttaatctcagggtcgtgggt

SEQ ID NO: 16205 - DNA, 26 bp, synthetic construct
  misc_feature 1..26: note = Probe
  source 1..26: mol_type = other DNA
agagcatgggactcttaatcccaggg

SEQ ID NO: 16206 - DNA, 27 bp, synthetic construct
  misc_feature 1..27: note = Probe
  source 1..27: mol_type = other DNA
agagcatgggactcttaatcccagggt

SEQ ID NO: 16207 - DNA, 28 bp, synthetic construct
  misc_feature 1..28: note = Probe
  source 1..28: mol_type = other DNA
agagcatgggactcttaatcccagggtc

SEQ ID NO: 16208 - DNA, 29 bp, synthetic construct
  misc_feature 1..29: note = Probe
  source 1..29: mol_type = other DNA
agagcatgggactcttaatcccagggtcg

SEQ ID NO: 16209 - DNA, 30 bp, synthetic construct
  misc_feature 1..30: note = Probe
  source 1..30: mol_type = other DNA
agagcatgggactcttaatcccagggtcgt

SEQ ID NO: 16210 - DNA, 31 bp, synthetic construct; identical to SEQ ID NO: 3142
  misc_feature 1..31: note = Probe
  source 1..31: mol_type = other DNA

SEQ ID NO: 16211 - DNA, 34 bp, synthetic construct
  misc_feature 1..34: note = Probe
  source 1..34: mol_type = other DNA
agagcatgggactcttaatcccagggtcgtgggt

SEQ ID NO: 16212 - DNA, 16 bp, synthetic construct
  misc_feature 1..16: note = Probe
  source 1..16: mol_type = other DNA
agagcatttgactgca

SEQ ID NO: 16213 - DNA, 34 bp, synthetic construct
  misc_feature 1..34: note = Probe
  source 1..34: mol_type = other DNA
agagcccggatagctcagtcggtagagcatcaga

SEQ ID NO: 16214 - DNA, 36 bp, synthetic construct
  misc_feature 1..36: note = Probe
  source 1..36: mol_type = other DNA
agagcccggatagctcagtcggtagagcatcagact

SEQ ID NO: 16215 - DNA, 38 bp, synthetic construct
  misc_feature 1..38: note = Probe
  source 1..38: mol_type = other DNA
agagcccggatagctcagtcggtagagcatcagacttt

SEQ ID NO: 16216 - DNA, 40 bp, synthetic construct
  misc_feature 1..40: note = Probe
  source 1..40: mol_type = other DNA
agagcccggatagctcagtcggtagagcatcagactttta

SEQ ID NO: 16217 - DNA, 17 bp, synthetic construct
  misc_feature 1..17: note = Probe
  source 1..17: mol_type = other DNA
agagcccggtaatcgca

SEQ ID NO: 16218 - DNA, 30 bp, synthetic construct
  misc_feature 1..30: note = Probe
  source 1..30: mol_type = other DNA
agagcccggtaatcgcataaaacttaaaac

SEQ ID NO: 16219 - DNA, 31 bp, synthetic construct; identical to SEQ ID NO: 248
  misc_feature 1..31: note = Probe
  source 1..31: mol_type = other DNA

SEQ ID NO: 16220 - DNA, 32 bp, synthetic construct; identical to SEQ ID NO: 3144
  misc_feature 1..32: note = Probe
  source 1..32: mol_type = other DNA

SEQ ID NO: 16221 - DNA, 42 bp, synthetic construct
  misc_feature 1..42: note = Probe
  source 1..42: mol_type = other DNA
agagcccggtaatcgcataaaacttaaaactttacagtcaga

SEQ ID NO: 16222 - DNA, 50 bp, synthetic construct; identical to SEQ ID NO: 3146
  misc_feature 1..50: note = Probe
  source 1..50: mol_type = other DNA

SEQ ID NO: 16223 - DNA, 30 bp, synthetic construct
  misc_feature 1..30: note = Probe
  source 1..30: mol_type = other DNA
agagccgttggttaagcgggagagacagtt

SEQ ID NO: 16224 - DNA, 31 bp, synthetic construct
  misc_feature 1..31: note = Probe
  source 1..31: mol_type = other DNA
agagccgttggttaagcgggagagacagttg

SEQ ID NO: 16225 - DNA, 38 bp, synthetic construct
  misc_feature 1..38: note = Probe
  source 1..38: mol_type = other DNA
agagcctggatagctcagtcggtagagcatcagacttt

SEQ ID NO: 16226 - DNA, 16 bp, synthetic construct
  misc_feature 1..16: note = Probe
  source 1..16: mol_type = other DNA
agagctcaattacttt

SEQ ID NO: 16227 - DNA, 33 bp, synthetic construct
  misc_feature 1..33: note = Probe
  source 1..33: mol_type = other DNA
agagctccagtggcgcaatcggttagcgcgcgg

SEQ ID NO: 16228 - DNA, 35 bp, synthetic construct
  misc_feature 1..35: note = Probe
  source 1..35: mol_type = other DNA
agagctccagtggcgcaatcggttagcgcgcggta

SEQ ID NO: 16229 - DNA, 36 bp, synthetic construct
  misc_feature 1..36: note = Probe
  source 1..36: mol_type = other DNA
agagctccagtggcgcaatcggttagcgcgcggtac

SEQ ID NO: 16230 - DNA, 37 bp, synthetic construct
  misc_feature 1..37: note = Probe
  source 1..37: mol_type = other DNA
agagctccagtggcgcaatcggttagcgcgcggtact

SEQ ID NO: 16231 - DNA, 38 bp, synthetic construct
  misc_feature 1..38: note = Probe
  source 1..38: mol_type = other DNA
agagctccagtggcgcaatcggttagcgcgcggtactt

SEQ ID NO: 16232 - DNA, 39 bp, synthetic construct
  misc_feature 1..39: note = Probe
  source 1..39: mol_type = other DNA
agagctccagtggcgcaatcggttagcgcgcggtactta

SEQ ID NO: 16233 - DNA, 40 bp, synthetic construct
  misc_feature 1..40: note = Probe
  source 1..40: mol_type = other DNA
agagctccagtggcgcaatcggttagcgcgcggtacttat

SEQ ID NO: 16234 - DNA, 41 bp, synthetic construct
  misc_feature 1..41: note = Probe
  source 1..41: mol_type = other DNA
agagctccagtggcgcaatcggttagcgcgcggtacttata

SEQ ID NO: 16235 - DNA, 33 bp, synthetic construct
  misc_feature 1..33: note = Probe
  source 1..33: mol_type = other DNA
agagggggtatagctcagtggtagagcatttga

SEQ ID NO: 16236 - DNA, 30 bp, synthetic construct
  misc_feature 1..30: note = Probe
  source 1..30: mol_type = other DNA
agagggtctttttcaccccgctgttgctct

SEQ ID NO: 16237 - DNA, 29 bp, synthetic construct
  misc_feature 1..29: note = Probe
  source 1..29: mol_type = other DNA
agaggtcccgggttcaaatcccggacgag

SEQ ID NO: 16238 - DNA, 30 bp, synthetic construct
  misc_feature 1..30: note = Probe
  source 1..30: mol_type = other DNA
agaggtcccgggttcaaatcccggacgagc

SEQ ID NO: 16239 - DNA, 31 bp, synthetic construct
  misc_feature 1..31: note = Probe
  source 1..31: mol_type = other DNA
agaggtcccgggttcaaatcccggacgagcc

SEQ ID NO: 16240 - DNA, 32 bp, synthetic construct
  misc_feature 1..32: note = Probe
  source 1..32: mol_type = other DNA
agaggtcccgggttcaaatcccggacgagccc

SEQ ID NO: 16241 - DNA, 33 bp, synthetic construct
  misc_feature 1..33: note = Probe
  source 1..33: mol_type = other DNA
agaggtcccgggttcaaatcccggacgagcccc

SEQ ID NO: 16242 - DNA, 34 bp, synthetic construct
  misc_feature 1..34: note = Probe
  source 1..34: mol_type = other DNA
agaggtcccgggttcaaatcccggacgagccccc

SEQ ID NO: 16243 - DNA, 35 bp, synthetic construct
  misc_feature 1..35: note = Probe
  source 1..35: mol_type = other DNA
agaggtcccgggttcaaatcccggacgagccccct

SEQ ID NO: 16244 - DNA, 16 bp, synthetic construct
  misc_feature 1..16: note = Probe
  source 1..16: mol_type = other DNA
agaggtcgatggatcg

SEQ ID NO: 16245 - DNA, 30 bp, synthetic construct
  misc_feature 1..30: note = Probe
  source 1..30: mol_type = other DNA
agaggttccatagtgtagtggttatcacgt

SEQ ID NO: 16246 - DNA, 25 bp, synthetic construct
  misc_feature 1..25: note = Probe
  source 1..25: mol_type = other DNA
agagtaaataataggagcttaaacc

SEQ ID NO: 16247 - DNA, 26 bp, synthetic construct
  misc_feature 1..26: note = Probe
  source 1..26: mol_type = other DNA
agagtaaataataggagcttaaaccc

SEQ ID NO: 16248 - DNA, 27 bp, synthetic construct
  misc_feature 1..27: note = Probe
  source 1..27: mol_type = other DNA
agagtaaataataggagcttaaacccc

SEQ ID NO: 16249 - DNA, 29 bp, synthetic construct
  misc_feature 1..29: note = Probe
  source 1..29: mol_type = other DNA
agagtaaataataggagcttaaaccccct

SEQ ID NO: 16250 - DNA, 30 bp, synthetic construct; identical to SEQ ID NO: 251
  misc_feature 1..30: note = Probe
  source 1..30: mol_type = other DNA

SEQ ID NO: 16251 - DNA, 32 bp, synthetic construct; identical to SEQ ID NO: 253
  misc_feature 1..32: note = Probe
  source 1..32: mol_type = other DNA

SEQ ID NO: 16252 - DNA, 33 bp, synthetic construct; identical to SEQ ID NO: 3156
  misc_feature 1..33: note = Probe
  source 1..33: mol_type = other DNA

SEQ ID NO: 16253 - DNA, 34 bp, synthetic construct
  misc_feature 1..34: note = Probe
  source 1..34: mol_type = other DNA
agagtaaataataggagcttaaacccccttattt

SEQ ID NO: 16254 - DNA, 35 bp, synthetic construct; identical to SEQ ID NO: 254
  misc_feature 1..35: note = Probe
  source 1..35: mol_type = other DNA

SEQ ID NO: 16255 - DNA, 38 bp, synthetic construct; identical to SEQ ID NO: 3157
  misc_feature 1..38: note = Probe
  source 1..38: mol_type = other DNA

SEQ ID NO: 16256 - DNA, 39 bp, synthetic construct; identical to SEQ ID NO: 3158
  misc_feature 1..39: note = Probe
  source 1..39: mol_type = other DNA

SEQ ID NO: 16257 - DNA, 40 bp, synthetic construct; identical to SEQ ID NO: 3159
  misc_feature 1..40: note = Probe
  source 1..40: mol_type = other DNA

SEQ ID NO: 16258 - DNA, 41 bp, synthetic construct; identical to SEQ ID NO: 3160
  misc_feature 1..41: note = Probe
  source 1..41: mol_type = other DNA

SEQ ID NO: 16259 - DNA, 42 bp, synthetic construct
  misc_feature 1..42: note = Probe
  source 1..42: mol_type = other DNA
agagtaaataataggagcttaaacccccttatttctaggact

SEQ ID NO: 16260 - DNA, 32 bp, synthetic construct; identical to SEQ ID NO: 257
  misc_feature 1..32: note = Probe
  source 1..32: mol_type = other DNA

SEQ ID NO: 16261 - DNA, 23 bp, synthetic construct
  misc_feature 1..23: note = Probe
  source 1..23: mol_type = other DNA
agagtggggttttgcagtcctta

SEQ ID NO: 16262 - DNA, 25 bp, synthetic construct
  misc_feature 1..25: note = Probe
  source 1..25: mol_type = other DNA
agagtggggttttgcagtccttagc

SEQ ID NO: 16263 - DNA, 26 bp, synthetic construct
  misc_feature 1..26: note = Probe
  source 1..26: mol_type = other DNA
agagtggggttttgcagtccttagct

SEQ ID NO: 16264 - DNA, 26 bp, synthetic construct
  misc_feature 1..26: note = Probe
  source 1..26: mol_type = other DNA
agagtgtagcttaacacaaagcaccc

SEQ ID NO: 16265 - DNA, 27 bp, synthetic construct
  misc_feature 1..27: note = Probe
  source 1..27: mol_type = other DNA
agagtgtagcttaacacaaagcaccca

SEQ ID NO: 16266 - DNA, 28 bp, synthetic construct
  misc_feature 1..28: note = Probe
  source 1..28: mol_type = other DNA
agagtgtagcttaacacaaagcacccaa

SEQ ID NO: 16267 - DNA, 29 bp, synthetic construct
  misc_feature 1..29: note = Probe
  source 1..29: mol_type = other DNA
agagtgtagcttaacacaaagcacccaac

SEQ ID NO: 16268 - DNA, 36 bp, synthetic construct
  misc_feature 1..36: note = Probe
  source 1..36: mol_type = other DNA
agatagcagagtggcgcagcggaagcgtgctgggcc

SEQ ID NO: 16269 - DNA, 37 bp, synthetic construct
  misc_feature 1..37: note = Probe
  source 1..37: mol_type = other DNA
agatagcagagtggcgcagcggaagcgtgctgggccc

SEQ ID NO: 16270 - DNA, 38 bp, synthetic construct
  misc_feature 1..38: note = Probe
  source 1..38: mol_type = other DNA
agatagcagagtggcgcagcggaagcgtgctgggccca

SEQ ID NO: 16271 - DNA, 41 bp, synthetic construct
  misc_feature 1..41: note = Probe
  source 1..41: mol_type = other DNA
agatagcagagtggcgcagcggaagcgtgctgggcccataa

SEQ ID NO: 16272 - DNA, 19 bp, synthetic construct
  misc_feature 1..19: note = Probe
  source 1..19: mol_type = other DNA
agatcaagaggtccccggt

SEQ ID NO: 16273 - DNA, 33 bp, synthetic construct
  misc_feature 1..33: note = Probe
  source 1..33: mol_type = other DNA
agatcctgggttcgaatcccagcggtgcctccg

SEQ ID NO: 16274 - DNA, 27 bp, synthetic construct
  misc_feature 1..27: note = Probe
  source 1..27: mol_type = other DNA
agatgaaaacctttttccaaggacaaa

SEQ ID NO: 16275 - DNA, 28 bp, synthetic construct
  misc_feature 1..28: note = Probe
  source 1..28: mol_type = other DNA
agatgaaaacctttttccaaggacaaat

SEQ ID NO: 16276 - DNA, 25 bp, synthetic construct
  misc_feature 1..25: note = Probe
  source 1..25: mol_type = other DNA
agatgcgttggtggtatagtggtga

SEQ ID NO: 16277 - DNA, 26 bp, synthetic construct
  misc_feature 1..26: note = Probe
  source 1..26: mol_type = other DNA
agatgcgttggtggtatagtggtgag

SEQ ID NO: 16278 - DNA, 28 bp, synthetic construct
  misc_feature 1..28: note = Probe
  source 1..28: mol_type = other DNA
agatgcgttggtggtatagtggtgagca

SEQ ID NO: 16279 - DNA, 30 bp, synthetic construct
  misc_feature 1..30: note = Probe
  source 1..30: mol_type = other DNA
agatgcgttggtggtatagtggtgagcata

SEQ ID NO: 16280 - DNA, 31 bp, synthetic construct
  misc_feature 1..31: note = Probe
  source 1..31: mol_type = other DNA
agatgcgttggtggtatagtggtgagcatag

SEQ ID NO: 16281 - DNA, 32 bp, synthetic construct
  misc_feature 1..32: note = Probe
  source 1..32: mol_type = other DNA
agatgcgttggtggtatagtggtgagcatagc

SEQ ID NO: 16282 - DNA, 34 bp, synthetic construct
  misc_feature 1..34: note = Probe
  source 1..34: mol_type = other DNA
agatgcgttggtggtatagtggtgagcatagctg

SEQ ID NO: 16283 - DNA, 27 bp, synthetic construct
  misc_feature 1..27: note = Probe
  source 1..27: mol_type = other DNA
agatggctcgttggtctaggggtatga

SEQ ID NO: 16284 - DNA, 29 bp, synthetic construct
  misc_feature 1..29: note = Probe
  source 1..29: mol_type = other DNA
agatggctcgttggtctaggggtatgatt

SEQ ID NO: 16285 - DNA, 36 bp, synthetic construct
  misc_feature 1..36: note = Probe
  source 1..36: mol_type = other DNA
agatggctcgttggtctaggggtatgattctcggtt

SEQ ID NO: 16286 - DNA, 37 bp, synthetic construct
  misc_feature 1..37: note = Probe
  source 1..37: mol_type = other DNA
agatggctcgttggtctaggggtatgattctcggttt

SEQ ID NO: 16287 - DNA, 26 bp, synthetic construct
  misc_feature 1..26: note = Probe
  source 1..26: mol_type = other DNA
agattaagagaaccaacacctcttta

SEQ ID NO: 16288 - DNA, 30 bp, synthetic construct; identical to SEQ ID NO: 9098
  misc_feature 1..30: note = Probe
  source 1..30: mol_type = other DNA

SEQ ID NO: 16289 - DNA, 31 bp, synthetic construct; identical to SEQ ID NO: 3175
  misc_feature 1..31: note = Probe
  source 1..31: mol_type = other DNA

SEQ ID NO: 16290 - DNA, 32 bp, synthetic construct; identical to SEQ ID NO: 3176
  misc_feature 1..32: note = Probe
  source 1..32: mol_type = other DNA

SEQ ID NO: 16291 - DNA, 33 bp, synthetic construct; identical to SEQ ID NO: 3177
  misc_feature 1..33: note = Probe
  source 1..33: mol_type = other DNA

SEQ ID NO: 16292 - DNA, 34 bp, synthetic construct; identical to SEQ ID NO: 3178
  misc_feature 1..34: note = Probe
  source 1..34: mol_type = other DNA

SEQ ID NO: 16293 - DNA, 35 bp, synthetic construct; identical to SEQ ID NO: 3179
  misc_feature 1..35: note = Probe
  source 1..35: mol_type = other DNA

SEQ ID NO: 16294 - DNA, 50 bp, synthetic construct
  misc_feature 1..50: note = Probe
  source 1..50: mol_type = other DNA
agattgaagccagttgattagggtgcttagctgttaactaagtgtttgtg

SEQ ID NO: 16295 - DNA, 27 bp, synthetic construct
  misc_feature 1..27: note = Probe
  source 1..27: mol_type = other DNA
agattgagggttcgagtcccttcgtgg

SEQ ID NO: 16296 - DNA, 33 bp, synthetic construct; identical to SEQ ID NO: 3191
  misc_feature 1..33: note = Probe
  source 1..33: mol_type = other DNA

SEQ ID NO: 16297 - DNA, 17 bp, synthetic construct
  misc_feature 1..17: note = Probe
  source 1..17: mol_type = other DNA
agattgtgaatctgaca

SEQ ID NO: 16298 - DNA, 20 bp, synthetic construct
  misc_feature 1..20: note = Probe
  source 1..20: mol_type = other DNA
agattgtgaatctgacaaca

SEQ ID NO: 16299 - DNA, 21 bp, synthetic construct
  misc_feature 1..21: note = Probe
  source 1..21: mol_type = other DNA
agattgtgaatctgacaacag

SEQ ID NO: 16300 - DNA, 36 bp, synthetic construct; identical to SEQ ID NO: 3197
  misc_feature 1..36: note = Probe
  source 1..36: mol_type = other DNA

SEQ ID NO: 16301 - DNA, 37 bp, synthetic construct; identical to SEQ ID NO: 266
  misc_feature 1..37: note = Probe
  source 1..37: mol_type = other DNA

SEQ ID NO: 16302 - DNA, 38 bp, synthetic construct; identical to SEQ ID NO: 267
  misc_feature 1..38: note = Probe
  source 1..38: mol_type = other DNA

SEQ ID NO: 16303 - DNA, 39 bp, synthetic construct; identical to SEQ ID NO: 268
  misc_feature 1..39: note = Probe
  source 1..39: mol_type = other DNA

SEQ ID NO: 16304 - DNA, 41 bp, synthetic construct; identical to SEQ ID NO: 3199
  misc_feature 1..41: note = Probe
  source 1..41: mol_type = other DNA

SEQ ID NO: 16305 - DNA, 20 bp, synthetic construct
  misc_feature 1..20: note = Probe
  source 1..20: mol_type = other DNA
agatttcaacttaacttgac

SEQ ID NO: 16306 - DNA, 21 bp, synthetic construct
  misc_feature 1..21: note = Probe
  source 1..21: mol_type = other DNA
agatttcaacttaacttgacc

SEQ ID NO: 16307 - DNA, 22 bp, synthetic construct
  misc_feature 1..22: note = Probe
  source 1..22: mol_type = other DNA
agatttcaacttaacttgaccg

SEQ ID NO: 16308 - DNA, 23 bp, synthetic construct
  misc_feature 1..23: note = Probe
  source 1..23: mol_type = other DNA
agatttcaacttaacttgaccgc

SEQ ID NO: 16309 - DNA, 24 bp, synthetic construct
  misc_feature 1..24: note = Probe
  source 1..24: mol_type = other DNA
agatttcaacttaacttgaccgct

SEQ ID NO: 16310 - DNA, 25 bp, synthetic construct
  misc_feature 1..25: note = Probe
  source 1..25: mol_type = other DNA
agatttcaacttaacttgaccgctc

SEQ ID NO: 16311 - DNA, 26 bp, synthetic construct
  misc_feature 1..26: note = Probe
  source 1..26: mol_type = other DNA
agatttcaacttaacttgaccgctct

SEQ ID NO: 16312 - DNA, 27 bp, synthetic construct
  misc_feature 1..27: note = Probe
  source 1..27: mol_type = other DNA
agatttcaacttaacttgaccgctctg

SEQ ID NO: 16313 - DNA, 28 bp, synthetic construct
  misc_feature 1..28: note = Probe
  source 1..28: mol_type = other DNA
agatttcaacttaacttgaccgctctga

SEQ ID NO: 16314 - DNA, 29 bp, synthetic construct
  misc_feature 1..29: note = Probe
  source 1..29: mol_type = other DNA
agatttcaacttaacttgaccgctctgag

SEQ ID NO: 16315 - DNA, 30 bp, synthetic construct; identical to SEQ ID NO: 3214
  misc_feature 1..30: note = Probe
  source 1..30: mol_type = other DNA

SEQ ID NO: 16316 - DNA, 31 bp, synthetic construct; identical to SEQ ID NO: 3215
  misc_feature 1..31: note = Probe
  source 1..31: mol_type = other DNA

SEQ ID NO: 16317 - DNA, 34 bp, synthetic construct; identical to SEQ ID NO: 3219
  misc_feature 1..34: note = Probe
  source 1..34: mol_type = other DNA

SEQ ID NO: 16318 - DNA, 34 bp, synthetic construct; identical to SEQ ID NO: 3221
  misc_feature 1..34: note = Probe
  source 1..34: mol_type = other DNA

SEQ ID NO: 16319 - DNA, 21 bp, synthetic construct
  misc_feature 1..21: note = Probe
  source 1..21: mol_type = other DNA
agcaaggccgagcggtctaag

SEQ ID NO: 16320 - DNA, 26 bp, synthetic construct
  misc_feature 1..26: note = Probe
  source 1..26: mol_type = other DNA
agcaatacactgaaaatgtttagacg

SEQ ID NO: 16321 - DNA, 27 bp, synthetic construct
  misc_feature 1..27: note = Probe
  source 1..27: mol_type = other DNA
agcaatacactgaaaatgtttagacgg

SEQ ID NO: 16322 - DNA, 34 bp, synthetic construct; identical to SEQ ID NO: 3225
  misc_feature 1..34: note = Probe
  source 1..34: mol_type = other DNA

SEQ ID NO: 16323 - DNA, 49 bp, synthetic construct; identical to SEQ ID NO: 3228
  misc_feature 1..49: note = Probe
  source 1..49: mol_type = other DNA

SEQ ID NO: 16324 - DNA, 50 bp, synthetic construct; identical to SEQ ID NO: 3229
  misc_feature 1..50: note = Probe
  source 1..50: mol_type = other DNA

SEQ ID NO: 16325 - DNA, 17 bp, synthetic construct
  misc_feature 1..17: note = Probe
  source 1..17: mol_type = other DNA
agcacccaacttacact

SEQ ID NO: 16326 - DNA, 18 bp, synthetic construct
  misc_feature 1..18: note = Probe
  source 1..18: mol_type = other DNA
agcacccaacttacactt

SEQ ID NO: 16327 - DNA, 19 bp, synthetic construct
  misc_feature 1..19: note = Probe
  source 1..19: mol_type = other DNA
agcacccaacttacactta

SEQ ID NO: 16328 - DNA, 22 bp, synthetic construct
  misc_feature 1..22: note = Probe
  source 1..22: mol_type = other DNA
agcacccaacttacacttagga

SEQ ID NO: 16329 - DNA, 23 bp, synthetic construct
  misc_feature 1..23: note = Probe
  source 1..23: mol_type = other DNA
agcacccaacttacacttaggag

SEQ ID NO: 16330 - DNA, 24 bp, synthetic construct
  misc_feature 1..24: note = Probe
  source 1..24: mol_type = other DNA
agcacccaacttacacttaggaga

SEQ ID NO: 16331 - DNA, 25 bp, synthetic construct
  misc_feature 1..25: note = Probe
  source 1..25: mol_type = other DNA
agcacccaacttacacttaggagat

SEQ ID NO: 16332 - DNA, 26 bp, synthetic construct
  misc_feature 1..26: note = Probe
  source 1..26: mol_type = other DNA
agcacccaacttacacttaggagatt

SEQ ID NO: 16333 - DNA, 27 bp, synthetic construct
  misc_feature 1..27: note = Probe
  source 1..27: mol_type = other DNA
agcacccaacttacacttaggagattt

SEQ ID NO: 16334 - DNA, 28 bp, synthetic construct
  misc_feature 1..28: note = Probe
  source 1..28: mol_type = other DNA
agcacccaacttacacttaggagatttc

SEQ ID NO: 16335 - DNA, 29 bp, synthetic construct
  misc_feature 1..29: note = Probe
  source 1..29: mol_type = other DNA
agcacccaacttacacttaggagatttca

SEQ ID NO: 16336 - DNA, 30 bp, synthetic construct
  misc_feature 1..30: note = Probe
  source 1..30: mol_type = other DNA
agcacccaacttacacttaggagatttcaa

SEQ ID NO: 16337 - DNA, 31 bp, synthetic construct; identical to SEQ ID NO: 3241
  misc_feature 1..31: note = Probe
  source 1..31: mol_type = other DNA

SEQ ID NO: 16338 - DNA, 32 bp, synthetic construct; identical to SEQ ID NO: 3242
  misc_feature 1..32: note = Probe
  source 1..32: mol_type = other DNA

SEQ ID NO: 16339 - DNA, 33 bp, synthetic construct; identical to SEQ ID NO: 3243
  misc_feature 1..33: note = Probe
  source 1..33: mol_type = other DNA

SEQ ID NO: 16340 - DNA, 34 bp, synthetic construct
  misc_feature 1..34: note = Probe
  source 1..34: mol_type = other DNA
agcacccaacttacacttaggagatttcaactta

SEQ ID NO: 16341 - DNA, 35 bp, synthetic construct
  misc_feature 1..35: note = Probe
  source 1..35: mol_type = other DNA
agcacccaacttacacttaggagatttcaacttaa

SEQ ID NO: 16342 - DNA, 36 bp, synthetic construct; identical to SEQ ID NO: 3244
  misc_feature 1..36: note = Probe
  source 1..36: mol_type = other DNA

SEQ ID NO: 16343 - DNA, 37 bp, synthetic construct
  misc_feature 1..37: note = Probe
  source 1..37: mol_type = other DNA
agcacccaacttacacttaggagatttcaacttaact

SEQ ID NO: 16344 - DNA, 38 bp, synthetic construct
  misc_feature 1..38: note = Probe
  source 1..38: mol_type = other DNA
agcacccaacttacacttaggagatttcaacttaactt

SEQ ID NO: 16345 - DNA, 41 bp, synthetic construct
  misc_feature 1..41: note = Probe
  source 1..41: mol_type = other DNA
agcacccaacttacacttaggagatttcaacttaacttgac

SEQ ID NO: 16346 - DNA, 42 bp, synthetic construct
  misc_feature 1..42: note = Probe
  source 1..42: mol_type = other DNA
agcacccaacttacacttaggagatttcaacttaacttgacc

SEQ ID NO: 16347 - DNA, 43 bp, synthetic construct; identical to SEQ ID NO: 3246
  misc_feature 1..43: note = Probe
  source 1..43: mol_type = other DNA

SEQ ID NO: 16348 - DNA, 45 bp, synthetic construct; identical to SEQ ID NO: 3248
  misc_feature 1..45: note = Probe
  source 1..45: mol_type = other DNA

SEQ ID NO: 16349 - DNA, 46 bp, synthetic construct; identical to SEQ ID NO: 3249
  misc_feature 1..46: note = Probe
  source 1..46: mol_type = other DNA

SEQ ID NO: 16350 - DNA, 50 bp, synthetic construct; identical to SEQ ID NO: 3251
  misc_feature 1..50: note = Probe
  source 1..50: mol_type = other DNA

SEQ ID NO: 16351 - DNA, 29 bp, synthetic construct
  misc_feature 1..29: note = Probe
  source 1..29: mol_type = other DNA
agcactctggactctgaatccagcgatcc

SEQ ID NO: 16352 - DNA, 30 bp, synthetic construct; identical to SEQ ID NO: 270
  misc_feature 1..30: note = Probe
  source 1..30: mol_type = other DNA

SEQ ID NO: 16353 - DNA, 31 bp, synthetic construct; identical to SEQ ID NO: 271
  misc_feature 1..31: note = Probe
  source 1..31: mol_type = other DNA

SEQ ID NO: 16354 - DNA, 32 bp, synthetic construct; identical to SEQ ID NO: 3254
  misc_feature 1..32: note = Probe
  source 1..32: mol_type = other DNA

SEQ ID NO: 16355 - DNA, 50 bp, synthetic construct; identical to SEQ ID NO: 272
  misc_feature 1..50: note = Probe
  source 1..50: mol_type = other DNA

SEQ ID NO: 16356 - DNA, 28 bp, synthetic construct
  misc_feature 1..28: note = Probe
  source 1..28: mol_type = other DNA
agcactctggactttgaatccagcgatc

SEQ ID NO: 16357 - DNA, 32 bp, synthetic construct
  misc_feature 1..32: note = Probe
  source 1..32: mol_type = other DNA
agcactctggactttgaatccagcgatccgag

SEQ ID NO: 16358 - DNA, 50 bp, synthetic construct; identical to SEQ ID NO: 273
  misc_feature 1..50: note = Probe
  source 1..50: mol_type = other DNA

SEQ ID NO: 16359 - DNA, 40 bp, synthetic construct
  misc_feature 1..40: note = Probe
  source 1..40: mol_type = other DNA
agcacttcccatatggtctagcggttaggattcctggttt

SEQ ID NO: 16360 - DNA, 41 bp, synthetic construct
  misc_feature 1..41: note = Probe
  source 1..41: mol_type = other DNA
agcacttcccatatggtctagcggttaggattcctggtttt

SEQ ID NO: 16361 - DNA, 27 bp, synthetic construct
  misc_feature 1..27: note = Probe
  source 1..27: mol_type = other DNA
agcagagtggcgcagcggaagcgtgct

SEQ ID NO: 16362 - DNA, 30 bp, synthetic construct; identical to SEQ ID NO: 8539
  misc_feature 1..30: note = Probe
  source 1..30: mol_type = other DNA

SEQ ID NO: 16363 - DNA, 37 bp, synthetic construct
  misc_feature 1..37: note = Probe
  source 1..37: mol_type = other DNA
agcagagtggcgcagcggaagcgtgctgggcccataa

SEQ ID NO: 16364 - DNA, 38 bp, synthetic construct
  misc_feature 1..38: note = Probe
  source 1..38: mol_type = other DNA
agcagagtggcgcagcggaagcgtgctgggcccataac

SEQ ID NO: 16365 - DNA, 41 bp, synthetic construct
  misc_feature 1..41: note = Probe
  source 1..41: mol_type = other DNA
agcagagtggcgcagcggaagcgtgctgggcccataaccca

SEQ ID NO: 16366 - DNA, 50 bp, synthetic construct; identical to SEQ ID NO: 3258
  misc_feature 1..50: note = Probe
  source 1..50: mol_type = other DNA

SEQ ID NO: 16367 - DNA, 31 bp, synthetic construct
  misc_feature 1..31: note = Probe
  source 1..31: mol_type = other DNA
agcagcctcgttagcgcagtaggcagcgcgt

SEQ ID NO: 16368 - DNA, 39 bp, synthetic construct
  misc_feature 1..39: note = Probe
  source 1..39: mol_type = other DNA
agcagcctcgttagcgcagtaggcagcgcgtcagtctca

SEQ ID NO: 16369 - DNA, 28 bp, synthetic construct
  misc_feature 1..28: note = Probe
  source 1..28: mol_type = other DNA
agcagcttcaaacctgccggggcttctc

SEQ ID NO: 16370 - DNA, 35 bp, synthetic construct
  misc_feature 1..35: note = Probe
  source 1..35: mol_type = other DNA
agcaggacctcgtggcgcaacggtagcgcgtctga

SEQ ID NO: 16371 - DNA, 28 bp, synthetic construct
  misc_feature 1..28: note = Probe
  source 1..28: mol_type = other DNA
agcaggtcccatggtgtaatggttagca

SEQ ID NO: 16372 - DNA, 39 bp, synthetic construct
  misc_feature 1..39: note = Probe
  source 1..39: mol_type = other DNA
agcagtcaggatggccgagcggtctaaggcgctgcgttc

SEQ ID NO: 16373 - DNA, 32 bp, synthetic construct
  misc_feature 1..32: note = Probe
  source 1..32: mol_type = other DNA
agcagttcccatatggtctagcggttaggatt

SEQ ID NO: 16374 - DNA, 38 bp, synthetic construct
  misc_feature 1..38: note = Probe
  source 1..38: mol_type = other DNA
agcagttcccatatggtctagcggttaggattcctggt

SEQ ID NO: 16375 - DNA, 39 bp, synthetic construct
  misc_feature 1..39: note = Probe
  source 1..39: mol_type = other DNA
agcagttcccatatggtctagcggttaggattcctggtt

SEQ ID NO: 16376 - DNA, 40 bp, synthetic construct
  misc_feature 1..40: note = Probe
  source 1..40: mol_type = other DNA
agcagttcccatatggtctagcggttaggattcctggttt

SEQ ID NO: 16377 - DNA, 41 bp, synthetic construct
  misc_feature 1..41: note = Probe
  source 1..41: mol_type = other DNA
agcagttcccatatggtctagcggttaggattcctggtttt

SEQ ID NO: 16378 - DNA, 16 bp, synthetic construct
  misc_feature 1..16: note = Probe
  source 1..16: mol_type = other DNA
agcagttgacccgggt

SEQ ID NO: 16379 - DNA, 19 bp, synthetic construct
  misc_feature 1..19: note = Probe
  source 1..19: mol_type = other DNA
agcagttgacccgggttcg

SEQ ID NO: 16380 - DNA, 32 bp, synthetic construct
  misc_feature 1..32: note = Probe
  source 1..32: mol_type = other DNA
agcagttgacccgggttcgattcccggccaac

SEQ ID NO: 16381 - DNA, 38 bp, synthetic construct
  misc_feature 1..38: note = Probe
  source 1..38: mol_type = other DNA
agcagttgacccgggttcgattcccggccaacgcaagt

SEQ ID NO: 16382 - DNA, 37 bp, synthetic construct
  misc_feature 1..37: note = Probe
  source 1..37: mol_type = other DNA
agcagttgacccgggttcgattcccggccaacgcagc

SEQ ID NO: 16383 - DNA, 38 bp, synthetic construct
  misc_feature 1..38: note = Probe
  source 1..38: mol_type = other DNA
agcagttgacccgggttcgattcccggccaacgcagcg

SEQ ID NO: 16384 - DNA, 38 bp, synthetic construct
  misc_feature 1..38: note = Probe
  source 1..38: mol_type = other DNA
agcagttgacccgggttcgattcccggccaacgcagtg

SEQ ID NO: 16385 - DNA, 28 bp, synthetic construct
  misc_feature 1..28: note = Probe
  source 1..28: mol_type = other DNA
agcatagctgccttccaagcagttgacc

SEQ ID NO: 16386 - DNA, 33 bp, synthetic construct
  misc_feature 1..33: note = Probe
  source 1..33: mol_type = other DNA
agcatagctgccttccaagcagttgacccgggt

SEQ ID NO: 16387 - DNA, 34 bp, synthetic construct
  misc_feature 1..34: note = Probe
  source 1..34: mol_type = other DNA
agcatagctgccttccaagcagttgacccgggtt

SEQ ID NO: 16388 - DNA, 27 bp, synthetic construct
  misc_feature 1..27: note = Probe
  source 1..27: mol_type = other DNA
agcatgagactcttaatctcagggtcg

SEQ ID NO: 16389 - DNA, 21 bp, synthetic construct
  misc_feature 1..21: note = Probe
  source 1..21: mol_type = other DNA
agcatggctgagtggtctaag

SEQ ID NO: 16390 - DNA, 25 bp, synthetic construct
  misc_feature 1..25: note = Probe
  source 1..25: mol_type = other DNA
agcatgggactcttaatcccagggt

SEQ ID NO: 16391 - DNA, 27 bp, synthetic construct
  misc_feature 1..27: note = Probe
  source 1..27: mol_type = other DNA
agcatgggactcttaatcccagggtcg

SEQ ID NO: 16392 - DNA, 28 bp, synthetic construct
  misc_feature 1..28: note = Probe
  source 1..28: mol_type = other DNA
agcatgggactcttaatcccagggtcgt

SEQ ID NO: 16393 - DNA, 32 bp, synthetic construct
  misc_feature 1..32: note = Probe
  source 1..32: mol_type = other DNA
agcatgggactcttaatcccagggtcgtgggt

SEQ ID NO: 16394 - DNA, 17 bp, synthetic construct
  misc_feature 1..17: note = Probe
  source 1..17: mol_type = other DNA
agcattaaccttttaag

SEQ ID NO: 16395 - DNA, 18 bp, synthetic construct
  misc_feature 1..18: note = Probe
  source 1..18: mol_type = other DNA
agcattaaccttttaagt

SEQ ID NO: 16396 - DNA, 24 bp, synthetic construct
  misc_feature 1..24: note = Probe
  source 1..24: mol_type = other DNA
agcattaaccttttaagttaaaga

SEQ ID NO: 16397 - DNA, 26 bp, synthetic construct
  misc_feature 1..26: note = Probe
  source 1..26: mol_type = other DNA
agcattaaccttttaagttaaagatt

SEQ ID NO: 16398 - DNA, 31 bp, synthetic construct
  misc_feature 1..31: note = Probe
  source 1..31: mol_type = other DNA
agcattaaccttttaagttaaagattaagag

SEQ ID NO: 16399 - DNA, 32 bp, synthetic construct
  misc_feature 1..32: note = Probe
  source 1..32: mol_type = other DNA
agcattaaccttttaagttaaagattaagaga

SEQ ID NO: 16400 - DNA, 38 bp, synthetic construct; identical to SEQ ID NO: 3273
  misc_feature 1..38: note = Probe
  source 1..38: mol_type = other DNA

SEQ ID NO: 16401 - DNA, 39 bp, synthetic construct; identical to SEQ ID NO: 283
  misc_feature 1..39: note = Probe
  source 1..39: mol_type = other DNA

SEQ ID NO: 16402 - DNA, 41 bp, synthetic construct; identical to SEQ ID NO: 3275
  misc_feature 1..41: note = Probe
  source 1..41: mol_type = other DNA

SEQ ID NO: 16403 - DNA, 42 bp, synthetic construct; identical to SEQ ID NO: 284
  misc_feature 1..42: note = Probe
  source 1..42: mol_type = other DNA

SEQ ID NO: 16404 - DNA, 48 bp, synthetic construct; identical to SEQ ID NO: 3279
  misc_feature 1..48: note = Probe
  source 1..48: mol_type = other DNA

SEQ ID NO: 16405 - DNA, 34 bp, synthetic construct; identical to SEQ ID NO: 3283
  misc_feature 1..34: note = Probe
  source 1..34: mol_type = other DNA

SEQ ID NO: 16406 - DNA, 36 bp, synthetic construct
  misc_feature 1..36: note = Probe
  source 1..36: mol_type = other DNA
agcattggtggttcagtggtagaattctcgcctgcc

SEQ ID NO: 16407 - DNA, 41 bp, synthetic construct
  misc_feature 1..41: note = Probe
  source 1..41: mol_type = other DNA
agccagcagagtggcgcagcggaagcgtgctgggcccataa

SEQ ID NO: 16408 - DNA, 20 bp, synthetic construct
  misc_feature 1..20: note = Probe
  source 1..20: mol_type = other DNA
agccagggattgtgggttcg

SEQ ID NO: 16409 - DNA, 36 bp, synthetic construct
  misc_feature 1..36: note = Probe
  source 1..36: mol_type = other DNA
agccagggattgtgggttcgagtcccacccggggta

SEQ ID NO: 16410 - DNA, 38 bp, synthetic construct
  misc_feature 1..38: note = Probe
  source 1..38: mol_type = other DNA
agccagggattgtgggttcgagtcccacccggggtaaa

SEQ ID NO: 16411 - DNA, 36 bp, synthetic construct
  misc_feature 1..36: note = Probe
  source 1..36: mol_type = other DNA
agccagggattgtgggttcgagtcccacctggggta

SEQ ID NO: 16412 - DNA, 39 bp, synthetic construct; identical to SEQ ID NO: 3285
  misc_feature 1..39: note = Probe
  source 1..39: mol_type = other DNA

SEQ ID NO: 16413 - DNA, 29 bp, synthetic construct
  misc_feature 1..29: note = Probe
  source 1..29: mol_type = other DNA
agccagggattgtgggttcgagtcccatc

SEQ ID NO: 16414 - DNA, 31 bp, synthetic construct
  misc_feature 1..31: note = Probe
  source 1..31: mol_type = other DNA
agccagggattgtgggttcgagtcccatctg

SEQ ID NO: 16415 - DNA, 33 bp, synthetic construct
  misc_feature 1..33: note = Probe
  source 1..33: mol_type = other DNA
agccagggattgtgggttcgagtcccatctggg

SEQ ID NO: 16416 - DNA, 36 bp, synthetic construct; identical to SEQ ID NO: 288
  misc_feature 1..36: note = Probe
  source 1..36: mol_type = other DNA

SEQ ID NO: 16417 - DNA, 37 bp, synthetic construct
  misc_feature 1..37: note = Probe
  source 1..37: mol_type = other DNA
agccagggattgtgggttcgagtcccatctggggtgg

SEQ ID NO: 16418 - DNA, 38 bp, synthetic construct
  misc_feature 1..38: note = Probe
  source 1..38: mol_type = other DNA
agccagggattgtgggttcgagtcccatctggggtggc

SEQ ID NO: 16419 - DNA, 39 bp, synthetic construct; identical to SEQ ID NO: 3287
  misc_feature 1..39: note = Probe
  source 1..39: mol_type = other DNA

SEQ ID NO: 16420 - DNA, 43 bp, synthetic construct
  misc_feature 1..43: note = Probe
  source 1..43: mol_type = other DNA
agccagtaggtagcgtggccgagcggtctaaggcgctggatta

SEQ ID NO: 16421 - DNA, 20 bp, synthetic construct
  misc_feature 1..20: note = Probe
  source 1..20: mol_type = other DNA
agccccaaacccactccacc

SEQ ID NO: 16422 - DNA, 21 bp, synthetic construct
  misc_feature 1..21: note = Probe
  source 1..21: mol_type = other DNA
agccccaaacccactccacct

SEQ ID NO: 16423 - DNA, 16 bp, synthetic construct
  misc_feature 1..16: note = Probe
  source 1..16: mol_type = other DNA
agccccagtggaacca

SEQ ID NO: 16424 - DNA, 17 bp, synthetic construct
  misc_feature 1..17: note = Probe
  source 1..17: mol_type = other DNA
agccccagtggaaccac

SEQ ID NO: 16425 - DNA, 27 bp, synthetic construct
  misc_feature 1..27: note = Probe
  source 1..27: mol_type = other DNA
agcccggatagctcagtcggtagagca

SEQ ID NO: 16426 - DNA, 32 bp, synthetic construct
  misc_feature 1..32: note = Probe
  source 1..32: mol_type = other DNA
agcccggatagctcagtcggtagagcatcaga

SEQ ID NO: 16427 - DNA, 33 bp, synthetic construct
  misc_feature 1..33: note = Probe
  source 1..33: mol_type = other DNA
agcccggatagctcagtcggtagagcatcagac

SEQ ID NO: 16428 - DNA, 34 bp, synthetic construct
  misc_feature 1..34: note = Probe
  source 1..34: mol_type = other DNA
agcccggatagctcagtcggtagagcatcagact

SEQ ID NO: 16429 - DNA, 36 bp, synthetic construct
  misc_feature 1..36: note = Probe
  source 1..36: mol_type = other DNA
agcccggatagctcagtcggtagagcatcagacttt

SEQ ID NO: 16430 - DNA, 37 bp, synthetic construct
  misc_feature 1..37: note = Probe
  source 1..37: mol_type = other DNA
agcccggatagctcagtcggtagagcatcagactttt

SEQ ID NO: 16431 - DNA, 38 bp, synthetic construct
  misc_feature 1..38: note = Probe
  source 1..38: mol_type = other DNA
agcccggatagctcagtcggtagagcatcagactttta

SEQ ID NO: 16432 - DNA, 18 bp, synthetic construct
  misc_feature 1..18: note = Probe
  source 1..18: mol_type = other DNA
agcccggtaatcgcataa

SEQ ID NO: 16433 - DNA, 27 bp, synthetic construct
  misc_feature 1..27: note = Probe
  source 1..27: mol_type = other DNA
agcccggtaatcgcataaaacttaaaa

SEQ ID NO: 16434 - DNA, 28 bp, synthetic construct
  misc_feature 1..28: note = Probe
  source 1..28: mol_type = other DNA
agcccggtaatcgcataaaacttaaaac

SEQ ID NO: 16435 - DNA, 30 bp, synthetic construct
  misc_feature 1..30: note = Probe
  source 1..30: mol_type = other DNA
agcccggtaatcgcataaaacttaaaactt

SEQ ID NO: 16436 - DNA, 31 bp, synthetic construct
  misc_feature 1..31: note = Probe
  source 1..31: mol_type = other DNA
agcccggtaatcgcataaaacttaaaacttt

SEQ ID NO: 16437 - DNA, 34 bp, synthetic construct
  misc_feature 1..34: note = Probe
  source 1..34: mol_type = other DNA
agcccggtaatcgcataaaacttaaaactttaca

SEQ ID NO: 16438 - DNA, 37 bp, synthetic construct; identical to SEQ ID NO: 3291
  misc_feature 1..37: note = Probe
  source 1..37: mol_type = other DNA

SEQ ID NO: 16439 - DNA, 38 bp, synthetic construct; identical to SEQ ID NO: 292
  misc_feature 1..38: note = Probe
  source 1..38: mol_type = other DNA

SEQ ID NO: 16440 - DNA, 41 bp, synthetic construct
  misc_feature 1..41: note = Probe
  source 1..41: mol_type = other DNA
agcccggtaatcgcataaaacttaaaactttacagtcagag

SEQ ID NO: 16441 - DNA, 50 bp, synthetic construct; identical to SEQ ID NO: 3296
  misc_feature 1..50: note = Probe
  source 1..50: mol_type = other DNA

SEQ ID NO: 16442 - DNA, 17 bp, synthetic construct
  misc_feature 1..17: note = Probe
  source 1..17: mol_type = other DNA
agccctcagtaagttgc

SEQ ID NO: 16443 - DNA, 31 bp, synthetic construct
  misc_feature 1..31: note = Probe
  source 1..31: mol_type = other DNA
agccctccctggtggtctagtggctaggatt

SEQ ID NO: 16444 - DNA, 41 bp, synthetic construct
  misc_feature 1..41: note = Probe
  source 1..41: mol_type = other DNA
agccctccctggtggtctagtggctaggattcggcgctttc

SEQ ID NO: 16445 - DNA, 25 bp, synthetic construct
  misc_feature 1..25: note = Probe
  source 1..25: mol_type = other DNA
agccggagaccgcgtggcctaatgg

SEQ ID NO: 16446 - DNA, 27 bp, synthetic construct
  misc_feature 1..27: note = Probe
  source 1..27: mol_type = other DNA
agccggagaccgcgtggcctaatggat

SEQ ID NO: 16447 - DNA, 39 bp, synthetic construct
  misc_feature 1..39: note = Probe
  source 1..39: mol_type = other DNA
agccggagaccgcgtggcctaatggataaggcgtctgac

SEQ ID NO: 16448 - DNA, 50 bp, synthetic construct
  misc_feature 1..50: note = Probe
  source 1..50: mol_type = other DNA
agccggagaccgcgtggcctaatggataaggcgtctgacttcggatcaga

SEQ ID NO: 16449 - DNA, 27 bp, synthetic construct
  misc_feature 1..27: note = Probe
  source 1..27: mol_type = other DNA
agccggctcgttggtctaggggtatga

SEQ ID NO: 16450 - DNA, 28 bp, synthetic construct
  misc_feature 1..28: note = Probe
  source 1..28: mol_type = other DNA
agccggctcgttggtctaggggtatgat

SEQ ID NO: 16451 - DNA, 29 bp, synthetic construct
  misc_feature 1..29: note = Probe
  source 1..29: mol_type = other DNA
agccggctcgttggtctaggggtatgatt

SEQ ID NO: 16452 - DNA, 30 bp, synthetic construct
  misc_feature 1..30: note = Probe
  source 1..30: mol_type = other DNA
agccggctcgttggtctaggggtatgattc

SEQ ID NO: 16453 - DNA, 31 bp, synthetic construct
  misc_feature 1..31: note = Probe
  source 1..31: mol_type = other DNA
agccggctcgttggtctaggggtatgattct

SEQ ID NO: 16454 - DNA, 33 bp, synthetic construct
  misc_feature 1..33: note = Probe
  source 1..33: mol_type = other DNA
agccggctcgttggtctaggggtatgattctcg

SEQ ID NO: 16455 - DNA, 34 bp, synthetic construct
  misc_feature 1..34: note = Probe
  source 1..34: mol_type = other DNA
agccggctcgttggtctaggggtatgattctcgc

SEQ ID NO: 16456 - DNA, 37 bp, synthetic construct
  misc_feature 1..37: note = Probe
  source 1..37: mol_type = other DNA
agccggctcgttggtctaggggtatgattctcgcttt

SEQ ID NO: 16457 - DNA, 38 bp, synthetic construct
  misc_feature 1..38: note = Probe
  source 1..38: mol_type = other DNA
agccggctcgttggtctaggggtatgattctcgctttg

SEQ ID NO: 16458 - DNA, 29 bp, synthetic construct
  misc_feature 1..29: note = Probe
  source 1..29: mol_type = other DNA
agccgtgggggattagctcaaatggtaga

SEQ ID NO: 16459 - DNA, 15 bp, synthetic construct
  misc_feature 1..15: note = Probe
  source 1..15: mol_type = other DNA
agcctttctattagc

SEQ ID NO: 16460 - DNA, 28 bp, synthetic construct
  misc_feature 1..28: note = Probe
  source 1..28: mol_type = other DNA
agcgatccgagttcaaatctcggtggaa

SEQ ID NO: 16461 - DNA, 29 bp, synthetic construct
  misc_feature 1..29: note = Probe
  source 1..29: mol_type = other DNA
agcgatccgagttcaaatctcggtggaac

SEQ ID NO: 16462 - DNA, 30 bp, synthetic construct
  misc_feature 1..30: note = Probe
  source 1..30: mol_type = other DNA
agcgatccgagttcaaatctcggtggaacc

SEQ ID NO: 16463 - DNA, 31 bp, synthetic construct; identical to SEQ ID NO: 295
  misc_feature 1..31: note = Probe
  source 1..31: mol_type = other DNA

SEQ ID NO: 16464 - DNA, 32 bp, synthetic construct; identical to SEQ ID NO: 3301
  misc_feature 1..32: note = Probe
  source 1..32: mol_type = other DNA

SEQ ID NO: 16465 - DNA, 33 bp, synthetic construct; identical to SEQ ID NO: 3302
  misc_feature 1..33: note = Probe
  source 1..33: mol_type = other DNA

SEQ ID NO: 16466 - DNA, 34 bp, synthetic construct; identical to SEQ ID NO: 3303
  misc_feature 1..34: note = Probe
  source 1..34: mol_type = other DNA

SEQ ID NO: 16467 - DNA, 32 bp, synthetic construct; identical to SEQ ID NO: 3304
  misc_feature 1..32: note = Probe
  source 1..32: mol_type = other DNA

SEQ ID NO: 16468 - DNA, 28 bp, synthetic construct
  misc_feature 1..28: note = Probe
  source 1..28: mol_type = other DNA
agcgatccgagttcaaatctcggtggga

SEQ ID NO: 16469 - DNA, 29 bp, synthetic construct
  misc_feature 1..29: note = Probe
  source 1..29: mol_type = other DNA
agcgatccgagttcaaatctcggtgggac

SEQ ID NO: 16470 - DNA, 30 bp, synthetic construct; identical to SEQ ID NO: 297
  misc_feature 1..30: note = Probe
  source 1..30: mol_type = other DNA

SEQ ID NO: 16471 - DNA, 31 bp, synthetic construct; identical to SEQ ID NO: 298
  misc_feature 1..31: note = Probe
  source 1..31: mol_type = other DNA

SEQ ID NO: 16472 - DNA, 32 bp, synthetic construct; identical to SEQ ID NO: 299
  misc_feature 1..32: note = Probe
  source 1..32: mol_type = other DNA

SEQ ID NO: 16473 - DNA, 34 bp, synthetic construct; identical to SEQ ID NO: 3306
  misc_feature 1..34: note = Probe
  source 1..34: mol_type = other DNA

SEQ ID NO: 16474 - DNA, 28 bp, synthetic construct
  misc_feature 1..28: note = Probe
  source 1..28: mol_type = other DNA
agcgatccgagttcaagtctcggtggaa

SEQ ID NO: 16475 - DNA, 31 bp, synthetic construct
  misc_feature 1..31: note = Probe
  source 1..31: mol_type = other DNA
agcgatccgagttcaagtctcggtggaacct

SEQ ID NO: 16476 - DNA, 34 bp, synthetic construct
  misc_feature 1..34: note = Probe
  source 1..34: mol_type = other DNA
agcgatccgagttcgagtctcggtggaacctttg

SEQ ID NO: 16477 - DNA, 26 bp, synthetic construct
  misc_feature 1..26: note = Probe
  source 1..26: mol_type = other DNA
agcgccgctggtgtagtggtatcatg

SEQ ID NO: 16478 - DNA, 30 bp, synthetic construct
  misc_feature 1..30: note = Probe
  source 1..30: mol_type = other DNA
agcgccgctggtgtagtggtatcatgcaag

SEQ ID NO: 16479 - DNA, 31 bp, synthetic construct
  misc_feature 1..31: note = Probe
  source 1..31: mol_type = other DNA
agcgccgctggtgtagtggtatcatgcaaga

SEQ ID NO: 16480 - DNA, 32 bp, synthetic construct
  misc_feature 1..32: note = Probe
  source 1..32: mol_type = other DNA
agcgccgctggtgtagtggtatcatgcaagat

SEQ ID NO: 16481 - DNA, 33 bp, synthetic construct; identical to SEQ ID NO: 3310
  misc_feature 1..33: note = Probe
  source 1..33: mol_type = other DNA

SEQ ID NO: 16482 - DNA, 34 bp, synthetic construct
  misc_feature 1..34: note = Probe
  source 1..34: mol_type = other DNA
agcgccgctggtgtagtggtatcatgcaagattc

SEQ ID NO: 16483 - DNA, 36 bp, synthetic construct
  misc_feature 1..36: note = Probe
  source 1..36: mol_type = other DNA
agcgccgctggtgtagtggtatcatgcaagattccc

SEQ ID NO: 16484 - DNA, 42 bp, synthetic construct
  misc_feature 1..42: note = Probe
  source 1..42: mol_type = other DNA
agcgccgctggtgtagtggtatcatgcaagattcccattctt

SEQ ID NO: 16485 - DNA, 27 bp, synthetic construct
  misc_feature 1..27: note = Probe
  source 1..27: mol_type = other DNA
agcgcgttcggctgttaaccgaaaggt

SEQ ID NO: 16486 - DNA, 50 bp, synthetic construct; identical to SEQ ID NO: 3312
  misc_feature 1..50: note = Probe
  source 1..50: mol_type = other DNA

SEQ ID NO: 16487 - DNA, 30 bp, synthetic construct
  misc_feature 1..30: note = Probe
  source 1..30: mol_type = other DNA
agcgctcttttccggtatttcagaagagaa

SEQ ID NO: 16488 - DNA, 20 bp, synthetic construct
  misc_feature 1..20: note = Probe
  source 1..20: mol_type = other DNA
agcggaagcgtgctgggccc

SEQ ID NO: 16489 - DNA, 16 bp, synthetic construct
  misc_feature 1..16: note = Probe
  source 1..16: mol_type = other DNA
agcggagccttcgata

SEQ ID NO: 16490 - DNA, 17 bp, synthetic construct
  misc_feature 1..17: note = Probe
  source 1..17: mol_type = other DNA
agcggagccttcgatag

SEQ ID NO: 16491 - DNA, 24 bp, synthetic construct
  misc_feature 1..24: note = Probe
  source 1..24: mol_type = other DNA
agcggagccttcgatagctcagtt

SEQ ID NO: 16492 - DNA, 36 bp, synthetic construct
  misc_feature 1..36: note = Probe
  source 1..36: mol_type = other DNA
agcggagccttcgatagctcagttggtagagcggag

SEQ ID NO: 16493 - DNA, 38 bp, synthetic construct
  misc_feature 1..38: note = Probe
  source 1..38: mol_type = other DNA
agcggagccttcgatagctcagttggtagagcggagga

SEQ ID NO: 16494 - DNA, 39 bp, synthetic construct
  misc_feature 1..39: note = Probe
  source 1..39: mol_type = other DNA
agcggagccttcgatagctcagttggtagagcggaggac

SEQ ID NO: 16495 - DNA, 42 bp, synthetic construct
  misc_feature 1..42: note = Probe
  source 1..42: mol_type = other DNA
agcggagccttcgatagctcagttggtagagcggaggactgt

SEQ ID NO: 16496 - DNA, 43 bp, synthetic construct
  misc_feature 1..43: note = Probe
  source 1..43: mol_type = other DNA
agcggagccttcgatagctcagttggtagagcggaggactgta

SEQ ID NO: 16497 - DNA, 44 bp, synthetic construct; identical to SEQ ID NO: 3314
  misc_feature 1..44: note = Probe
  source 1..44: mol_type = other DNA

SEQ ID NO: 16498 - DNA, 46 bp, synthetic construct
  misc_feature 1..46: note = Probe
  source 1..46: mol_type = other DNA
agcggagccttcgatagctcagttggtagagcggaggactgtagtg

SEQ ID NO: 16499 - DNA, 49 bp, synthetic construct
  misc_feature 1..49: note = Probe
  source 1..49: mol_type = other DNA
agcggagccttcgatagctcagttggtagagcggaggactgtagtggat

SEQ ID NO: 16500 - DNA, 50 bp, synthetic construct
  misc_feature 1..50: note = Probe
  source 1..50: mol_type = other DNA
agcggagccttcgatagctcagttggtagagcggaggactgtagtggata

SEQ ID NO: 16501 - DNA, 18 bp, synthetic construct
  misc_feature 1..18: note = Probe
  source 1..18: mol_type = other DNA
agcggcctctggtggcgt

SEQ ID NO: 16502 - DNA, 24 bp, synthetic construct
  misc_feature 1..24: note = Probe
  source 1..24: mol_type = other DNA
agcggttaggattcctggttttca

SEQ ID NO: 16503 - DNA, 36 bp, synthetic construct
  misc_feature 1..36: note = Probe
  source 1..36: mol_type = other DNA
agcggttaggattcctggttttcacccaggtggccc

SEQ ID NO: 16504 - DNA, 40 bp, synthetic construct
  misc_feature 1..40: note = Probe
  source 1..40: mol_type = other DNA
agcggttaggattcctggttttcacccaggtggcccgggt

SEQ ID NO: 16505 - DNA, 21 bp, synthetic construct
  misc_feature 1..21: note = Probe
  source 1..21: mol_type = other DNA
agcgtggccgagcggtctaag

SEQ ID NO: 16506 - DNA, 21 bp, synthetic construct
  misc_feature 1..21: note = Probe
  source 1..21: mol_type = other DNA
agcgtggccgagtggtctaag

SEQ ID NO: 16507 - DNA, 33 bp, synthetic construct
  misc_feature 1..33: note = Probe
  source 1..33: mol_type = other DNA
agcgtggccgagtggtctaaggcgctggattta

SEQ ID NO: 16508 - DNA, 31 bp, synthetic construct; identical to SEQ ID NO: 3315
  misc_feature 1..31: note = Probe
  source 1..31: mol_type = other DNA

SEQ ID NO: 16509 - DNA, 23 bp, synthetic construct
  misc_feature 1..23: note = Probe
  source 1..23: mol_type = other DNA
agctaaataagctatcgggccca

SEQ ID NO: 16510 - DNA, 25 bp, synthetic construct
  misc_feature 1..25: note = Probe
  source 1..25: mol_type = other DNA
agctaaataagctatcgggcccata

SEQ ID NO: 16511 - DNA, 26 bp, synthetic construct
  misc_feature 1..26: note = Probe
  source 1..26: mol_type = other DNA
agctaaataagctatcgggcccatac

SEQ ID NO: 16512 - DNA, 27 bp, synthetic construct
  misc_feature 1..27: note = Probe
  source 1..27: mol_type = other DNA
agctaaataagctatcgggcccatacc

SEQ ID NO: 16513 - DNA, 28 bp, synthetic construct
  misc_feature 1..28: note = Probe
  source 1..28: mol_type = other DNA
agctaaataagctatcgggcccataccc

SEQ ID NO: 16514 - DNA, 36 bp, synthetic construct
  misc_feature 1..36: note = Probe
  source 1..36: mol_type = other DNA
agctaaataagctatcgggcccataccccgaaaatg

SEQ ID NO: 16515 - DNA, 29 bp, synthetic construct
  misc_feature 1..29: note = Probe
  source 1..29: mol_type = other DNA
agctagctcagtcggtagagcatgagact

SEQ ID NO: 16516 - DNA, 27 bp, synthetic construct
  misc_feature 1..27: note = Probe
  source 1..27: mol_type = other DNA
agctagctcagtcggtagagcatggga

SEQ ID NO: 16517 - DNA, 28 bp, synthetic construct
  misc_feature 1..28: note = Probe
  source 1..28: mol_type = other DNA
agctagctcagtcggtagagcatgggac

SEQ ID NO: 16518 - DNA, 29 bp, synthetic construct
  misc_feature 1..29: note = Probe
  source 1..29: mol_type = other DNA
agctagctcagtcggtagagcatgggact

SEQ ID NO: 16519 - DNA, 30 bp, synthetic construct
  misc_feature 1..30: note = Probe
  source 1..30: mol_type = other DNA
agctagctcagtcggtagagcatgggactc

SEQ ID NO: 16520 - DNA, 16 bp, synthetic construct
  misc_feature 1..16: note = Probe
  source 1..16: mol_type = other DNA
agctatcgggcccata

SEQ ID NO: 16521 - DNA, 21 bp, synthetic construct
  misc_feature 1..21: note = Probe
  source 1..21: mol_type = other DNA
agctatcgggcccataccccg

SEQ ID NO: 16522 - DNA, 22 bp, synthetic construct
  misc_feature 1..22: note = Probe
  source 1..22: mol_type = other DNA
agctatcgggcccataccccga

SEQ ID NO: 16523 - DNA, 23 bp, synthetic construct
  misc_feature 1..23: note = Probe
  source 1..23: mol_type = other DNA
agctatcgggcccataccccgaa

SEQ ID NO: 16524 - DNA, 24 bp, synthetic construct
  misc_feature 1..24: note = Probe
  source 1..24: mol_type = other DNA
agctatcgggcccataccccgaaa

SEQ ID NO: 16525 - DNA, 25 bp, synthetic construct
  misc_feature 1..25: note = Probe
  source 1..25: mol_type = other DNA
agctatcgggcccataccccgaaaa

SEQ ID NO: 16526 - DNA, 26 bp, synthetic construct
  misc_feature 1..26: note = Probe
  source 1..26: mol_type = other DNA
agctatcgggcccataccccgaaaat

SEQ ID NO: 16527 - DNA, 27 bp, synthetic construct
  misc_feature 1..27: note = Probe
  source 1..27: mol_type = other DNA
agctatcgggcccataccccgaaaatg

SEQ ID NO: 16528 - DNA, 28 bp, synthetic construct
  misc_feature 1..28: note = Probe
  source 1..28: mol_type = other DNA
agctatcgggcccataccccgaaaatgt

SEQ ID NO: 16529 - DNA, 29 bp, synthetic construct
  misc_feature 1..29: note = Probe
  source 1..29: mol_type = other DNA
agctatcgggcccataccccgaaaatgtt

SEQ ID NO: 16530 - DNA, 30 bp, synthetic construct; identical to SEQ ID NO: 3337
  misc_feature 1..30: note = Probe
  source 1..30: mol_type = other DNA

SEQ ID NO: 16531 - DNA, 31 bp, synthetic construct; identical to SEQ ID NO: 3338
  misc_feature 1..31: note = Probe
  source 1..31: mol_type = other DNA

SEQ ID NO: 16532 - DNA, 32 bp, synthetic construct; identical to SEQ ID NO: 3339
  misc_feature 1..32: note = Probe
  source 1..32: mol_type = other DNA

SEQ ID NO: 16533 - DNA, 33 bp, synthetic construct; identical to SEQ ID NO: 3340
  misc_feature 1..33: note = Probe
  source 1..33: mol_type = other DNA

SEQ ID NO: 16534 - DNA, 34 bp, synthetic construct; identical to SEQ ID NO: 3341
  misc_feature 1..34: note = Probe
  source 1..34: mol_type = other DNA

SEQ ID NO: 16535 - DNA, 40 bp, synthetic construct; identical to SEQ ID NO: 3342
  misc_feature 1..40: note = Probe
  source 1..40: mol_type = other DNA

SEQ ID NO: 16536 - DNA, 45 bp, synthetic construct; identical to SEQ ID NO: 3345
  misc_feature 1..45: note = Probe
  source 1..45: mol_type = other DNA

SEQ ID NO: 16537 - DNA, 21 bp, synthetic construct
  misc_feature 1..21: note = Probe
  source 1..21: mol_type = other DNA
agctcacaagaactgctaact

SEQ ID NO: 16538 - DNA, 23 bp, synthetic construct
  misc_feature 1..23: note = Probe
  source 1..23: mol_type = other DNA
agctcacaagaactgctaactca

SEQ ID NO: 16539 - DNA, 25 bp, synthetic construct
  misc_feature 1..25: note = Probe
  source 1..25: mol_type = other DNA
agctcacaagaactgctaactcatg

SEQ ID NO: 16540 - DNA, 30 bp, synthetic construct
  misc_feature 1..30: note = Probe
  source 1..30: mol_type = other DNA
agctcacaagaactgctaactcatgccccc

SEQ ID NO: 16541 - DNA, 50 bp, synthetic construct; identical to SEQ ID NO: 311
  misc_feature 1..50: note = Probe
  source 1..50: mol_type = other DNA

SEQ ID NO: 16542 - DNA, 23 bp, synthetic construct
  misc_feature 1..23: note = Probe
  source 1..23: mol_type = other DNA
agctcagtcggtagagcatcaga

SEQ ID NO: 16543 - DNA, 24 bp, synthetic construct
  misc_feature 1..24: note = Probe
  source 1..24: mol_type = other DNA
agctcagtcggtagagcatcagac

SEQ ID NO: 16544 - DNA, 25 bp, synthetic construct
  misc_feature 1..25: note = Probe
  source 1..25: mol_type = other DNA
agctcagtcggtagagcatcagact

SEQ ID NO: 16545 - DNA, 26 bp, synthetic construct
  misc_feature 1..26: note = Probe
  source 1..26: mol_type = other DNA
agctcagtcggtagagcatcagactt

SEQ ID NO: 16546 - DNA, 23 bp, synthetic construct
  misc_feature 1..23: note = Probe
  source 1..23: mol_type = other DNA
agctcagtcggtagagcatgaga

SEQ ID NO: 16547 - DNA, 24 bp, synthetic construct
  misc_feature 1..24: note = Probe
  source 1..24: mol_type = other DNA
agctcagtcggtagagcatgagac

SEQ ID NO: 16548 - DNA, 25 bp, synthetic construct
  misc_feature 1..25: note = Probe
  source 1..25: mol_type = other DNA
agctcagtcggtagagcatgagact

SEQ ID NO: 16549 - DNA, 26 bp, synthetic construct
  misc_feature 1..26: note = Probe
  source 1..26: mol_type = other DNA
agctcagtcggtagagcatgagactc

SEQ ID NO: 16550 - DNA, 21 bp, synthetic construct
  misc_feature 1..21: note = Probe
  source 1..21: mol_type = other DNA
agctcagtcggtagagcatgg

SEQ ID NO: 16551 - DNA, 23 bp, synthetic construct
  misc_feature 1..23: note = Probe
  source 1..23: mol_type = other DNA
agctcagtcggtagagcatggga

SEQ ID NO: 16552 - DNA, 28 bp, synthetic construct
  misc_feature 1..28: note = Probe
  source 1..28: mol_type = other DNA
agctcagtcggtagagcatgggactctt

SEQ ID NO: 16553 - DNA, 16 bp, synthetic construct
  misc_feature 1..16: note = Probe
  source 1..16: mol_type = other DNA
agctccgaggtgattt

SEQ ID NO: 16554 - DNA, 17 bp, synthetic construct
  misc_feature 1..17: note = Probe
  source 1..17: mol_type = other DNA
agctccgaggtgatttt

SEQ ID NO: 16555 - DNA, 18 bp, synthetic construct
  misc_feature 1..18: note = Probe
  source 1..18: mol_type = other DNA
agctccgaggtgattttc

SEQ ID NO: 16556 - DNA, 21 bp, synthetic construct
  misc_feature 1..21: note = Probe
  source 1..21: mol_type = other DNA
agctccgaggtgattttcata

SEQ ID NO: 16557 - DNA, 32 bp, synthetic construct; identical to SEQ ID NO: 316
  misc_feature 1..32: note = Probe
  source 1..32: mol_type = other DNA

SEQ ID NO: 16558 - DNA, 33 bp, synthetic construct; identical to SEQ ID NO: 3363
  misc_feature 1..33: note = Probe
  source 1..33: mol_type = other DNA

SEQ ID NO: 16559 - DNA, 34 bp, synthetic construct
  misc_feature 1..34: note = Probe
  source 1..34: mol_type = other DNA
agctccgaggtgattttcatattgaattgcaaat

SEQ ID NO: 16560 - DNA, 35 bp, synthetic construct; identical to SEQ ID NO: 3364
  misc_feature 1..35: note = Probe
  source 1..35: mol_type = other DNA

SEQ ID NO: 16561 - DNA, 36 bp, synthetic construct
  misc_feature 1..36: note = Probe
  source 1..36: mol_type = other DNA
agctccgaggtgattttcatattgaattgcaaattc

SEQ ID NO: 16562 - DNA, 37 bp, synthetic construct; identical to SEQ ID NO: 3365
  misc_feature 1..37: note = Probe
  source 1..37: mol_type = other DNA

SEQ ID NO: 16563 - DNA, 38 bp, synthetic construct; identical to SEQ ID NO: 3366
  misc_feature 1..38: note = Probe
  source 1..38: mol_type = other DNA

SEQ ID NO: 16564 - DNA, 44 bp, synthetic construct; identical to SEQ ID NO: 3369
  misc_feature 1..44: note = Probe
  source 1..44: mol_type = other DNA

SEQ ID NO: 16565 - DNA, 49 bp, synthetic construct; identical to SEQ ID NO: 3373
  misc_feature 1..49: note = Probe
  source 1..49: mol_type = other DNA

SEQ ID NO: 16566 - DNA, 50 bp, synthetic construct; identical to SEQ ID NO: 3374
  misc_feature 1..50: note = Probe
  source 1..50: mol_type = other DNA

SEQ ID NO: 16567 - DNA, 17 bp, synthetic construct
  misc_feature 1..17: note = Probe
  source 1..17: mol_type = other DNA
agctggggattgtgggt

SEQ ID NO: 16568 - DNA, 29 bp, synthetic construct
  misc_feature 1..29: note = Probe
  source 1..29: mol_type = other DNA
agctggggattgtgggttcgagtcccatc

SEQ ID NO: 16569 - DNA, 31 bp, synthetic construct
  misc_feature 1..31: note = Probe
  source 1..31: mol_type = other DNA
agctggggattgtgggttcgagtcccatctg

SEQ ID NO: 16570 - DNA, 32 bp, synthetic construct
  misc_feature 1..32: note = Probe
  source 1..32: mol_type = other DNA
agctggggattgtgggttcgagtcccatctgg

SEQ ID NO: 16571 - DNA, 33 bp, synthetic construct
  misc_feature 1..33: note = Probe
  source 1..33: mol_type = other DNA
agctggggattgtgggttcgagtcccatctggg

SEQ ID NO: 16572 - DNA, 36 bp, synthetic construct
  misc_feature 1..36: note = Probe
  source 1..36: mol_type = other DNA
agctggggattgtgggttcgagtcccatctgggtcg

SEQ ID NO: 16573 - DNA, 37 bp, synthetic construct
  misc_feature 1..37: note = Probe
  source 1..37: mol_type = other DNA
agctggggattgtgggttcgagtcccatctgggtcgc

SEQ ID NO: 16574 - DNA, 39 bp, synthetic construct; identical to SEQ ID NO: 3375
  misc_feature 1..39: note = Probe
  source 1..39: mol_type = other DNA

SEQ ID NO: 16575 - DNA, 39 bp, synthetic construct
  misc_feature 1..39: note = Probe
  source 1..39: mol_type = other DNA
agctgttaactaagtgtttgtgggtttaagtcccattgg

SEQ ID NO: 16576 - DNA, 43 bp, synthetic construct; identical to SEQ ID NO: 3377
  misc_feature 1..43: note = Probe
  source 1..43: mol_type = other DNA

SEQ ID NO: 16577 - DNA, 46 bp, synthetic construct
  misc_feature 1..46: note = Probe
  source 1..46: mol_type = other DNA
agctgttaactaagtgtttgtgggtttaagtcccattggtctagta

SEQ ID NO: 16578 - DNA, 16 bp, synthetic construct
  misc_feature 1..16: note = Probe
  source 1..16: mol_type = other DNA
agcttaaaccccctta

SEQ ID NO: 16579 - DNA, 22 bp, synthetic construct
  misc_feature 1..22: note = Probe
  source 1..22: mol_type = other DNA
agcttaaacccccttatttcta

SEQ ID NO: 16580 - DNA, 23 bp, synthetic construct
  misc_feature 1..23: note = Probe
  source 1..23: mol_type = other DNA
agcttaaacccccttatttctag

SEQ ID NO: 16581 - DNA, 24 bp, synthetic construct
  misc_feature 1..24: note = Probe
  source 1..24: mol_type = other DNA
agcttaaacccccttatttctagg

SEQ ID NO: 16582 - DNA, 25 bp, synthetic construct
  misc_feature 1..25: note = Probe
  source 1..25: mol_type = other DNA
agcttaaacccccttatttctagga

SEQ ID NO: 16583 - DNA, 23 bp, synthetic construct
  misc_feature 1..23: note = Probe
  source 1..23: mol_type = other DNA
agcttacctcctcaaagcaatac

SEQ ID NO: 16584 - DNA, 27 bp, synthetic construct
  misc_feature 1..27: note = Probe
  source 1..27: mol_type = other DNA
agcttacctcctcaaagcaatacactg

SEQ ID NO: 16585 - DNA, 23 bp, synthetic construct
  misc_feature 1..23: note = Probe
  source 1..23: mol_type = other DNA
agcttcaaacctgccggggcttc

SEQ ID NO: 16586 - DNA, 24 bp, synthetic construct
  misc_feature 1..24: note = Probe
  source 1..24: mol_type = other DNA
agcttcaaacctgccggggcttct

SEQ ID NO: 16587 - DNA, 25 bp, synthetic construct
  misc_feature 1..25: note = Probe
  source 1..25: mol_type = other DNA
agcttcaaacctgccggggcttctc

SEQ ID NO: 16588 - DNA, 28 bp, synthetic construct
  misc_feature 1..28: note = Probe
  source 1..28: mol_type = other DNA
agcttccctggtggtctagtggttagga

SEQ ID NO: 16589 - DNA, 29 bp, synthetic construct
  misc_feature 1..29: note = Probe
  source 1..29: mol_type = other DNA
agcttccctggtggtctagtggttaggat

SEQ ID NO: 16590 - DNA, 30 bp, synthetic construct
  misc_feature 1..30: note = Probe
  source 1..30: mol_type = other DNA
agcttccctggtggtctagtggttaggatt

SEQ ID NO: 16591 - DNA, 31 bp, synthetic construct
  misc_feature 1..31: note = Probe
  source 1..31: mol_type = other DNA
agcttccctggtggtctagtggttaggattc

SEQ ID NO: 16592 - DNA, 32 bp, synthetic construct
  misc_feature 1..32: note = Probe
  source 1..32: mol_type = other DNA
agcttccctggtggtctagtggttaggattcg

SEQ ID NO: 16593 - DNA, 33 bp, synthetic construct
  misc_feature 1..33: note = Probe
  source 1..33: mol_type = other DNA
agcttccctggtggtctagtggttaggattcgg

SEQ ID NO: 16594 - DNA, 34 bp, synthetic construct
  misc_feature 1..34: note = Probe
  source 1..34: mol_type = other DNA
agcttccctggtggtctagtggttaggattcggc

SEQ ID NO: 16595 - DNA, 35 bp, synthetic construct
  misc_feature 1..35: note = Probe
  source 1..35: mol_type = other DNA
agcttccctggtggtctagtggttaggattcggcg

SEQ ID NO: 16596 - DNA, 36 bp, synthetic construct
  misc_feature 1..36: note = Probe
  source 1..36: mol_type = other DNA
agcttccctggtggtctagtggttaggattcggcgc

SEQ ID NO: 16597 - DNA, 37 bp, synthetic construct
  misc_feature 1..37: note = Probe
  source 1..37: mol_type = other DNA
agcttccctggtggtctagtggttaggattcggcgct

SEQ ID NO: 16598 - DNA, 38 bp, synthetic construct
  misc_feature 1..38: note = Probe
  source 1..38: mol_type = other DNA
agcttccctggtggtctagtggttaggattcggcgctc

SEQ ID NO: 16599 - DNA, 39 bp, synthetic construct
  misc_feature 1..39: note = Probe
  source 1..39: mol_type = other DNA
agcttccctggtggtctagtggttaggattcggcgctct

SEQ ID NO: 16600 - DNA, 40 bp, synthetic construct
  misc_feature 1..40: note = Probe
  source 1..40: mol_type = other DNA
agcttccctggtggtctagtggttaggattcggcgctctc

SEQ ID NO: 16601 - DNA, 41 bp, synthetic construct
  misc_feature 1..41: note = Probe
  source 1..41: mol_type = other DNA
agcttccctggtggtctagtggttaggattcggcgctctca

SEQ ID NO: 16602 - DNA, 16 bp, synthetic construct
  misc_feature 1..16: note = Probe
  source 1..16: mol_type = other DNA
agctttggggggttcg

SEQ ID NO: 16603 - DNA, 27 bp, synthetic construct
  misc_feature 1..27: note = Probe
  source 1..27: mol_type = other DNA
agctttggggggttcgattccttcctt

SEQ ID NO: 16604 - DNA, 28 bp, synthetic construct
  misc_feature 1..28: note = Probe
  source 1..28: mol_type = other DNA
agctttggggggttcgattccttccttt

SEQ ID NO: 16605 - DNA, 29 bp, synthetic construct
  misc_feature 1..29: note = Probe
  source 1..29: mol_type = other DNA
agctttggggggttcgattccttcctttt

SEQ ID NO: 16606 - DNA, 30 bp, synthetic construct
  misc_feature 1..30: note = Probe
  source 1..30: mol_type = other DNA
agctttggggggttcgattccttccttttt

SEQ ID NO: 16607 - DNA, 31 bp, synthetic construct; identical to SEQ ID NO: 3387
  misc_feature 1..31: note = Probe
  source 1..31: mol_type = other DNA

SEQ ID NO: 16608 - DNA, 32 bp, synthetic construct; identical to SEQ ID NO: 3388
  misc_feature 1..32: note = Probe
  source 1..32: mol_type = other DNA

SEQ ID NO: 16609 - DNA, 33 bp, synthetic construct; identical to SEQ ID NO: 3389
  misc_feature 1..33: note = Probe
  source 1..33: mol_type = other DNA

SEQ ID NO: 16610 - DNA, 34 bp, synthetic construct; identical to SEQ ID NO: 3390
  misc_feature 1..34: note = Probe
  source 1..34: mol_type = other DNA

SEQ ID NO: 16611 - DNA, 35 bp, synthetic construct; identical to SEQ ID NO: 3391
  misc_feature 1..35: note = Probe
  source 1..35: mol_type = other DNA

SEQ ID NO: 16612 - DNA, 36 bp, synthetic construct
  misc_feature 1..36: note = Probe
  source 1..36: mol_type = other DNA
agctttggggggttcgattccttccttttttgtcta

SEQ ID NO: 16613 - DNA, 32 bp, synthetic construct
  misc_feature 1..32: note = Probe
  source 1..32: mol_type = other DNA
aggacctcgtggcgcaacggtagcgcgtctga

SEQ ID NO: 16614 - DNA, 33 bp, synthetic construct
  misc_feature 1..33: note = Probe
  source 1..33: mol_type = other DNA
aggacctcgtggcgcaacggtagcgcgtctgac

SEQ ID NO: 16615 - DNA, 34 bp, synthetic construct
  misc_feature 1..34: note = Probe
  source 1..34: mol_type = other DNA
aggacctcgtggcgcaacggtagcgcgtctgact

SEQ ID NO: 16616 - DNA, 35 bp, synthetic construct
  misc_feature 1..35: note = Probe
  source 1..35: mol_type = other DNA
aggacctcgtggcgcaacggtagcgcgtctgactc

SEQ ID NO: 16617 - DNA, 36 bp, synthetic construct
  misc_feature 1..36: note = Probe
  source 1..36: mol_type = other DNA
aggacctcgtggcgcaacggtagcgcgtctgactcc

SEQ ID NO: 16618 - DNA, 30 bp, synthetic construct
  misc_feature 1..30: note = Probe
  source 1..30: mol_type = other DNA
aggagatcctgggttcgaatcccagcgggg

SEQ ID NO: 16619 - DNA, 31 bp, synthetic construct
  misc_feature 1..31: note = Probe
  source 1..31: mol_type = other DNA
aggagatcctgggttcgaatcccagcggggc

SEQ ID NO: 16620 - DNA, 33 bp, synthetic construct; identical to SEQ ID NO: 3396
  misc_feature 1..33: note = Probe
  source 1..33: mol_type = other DNA

SEQ ID NO: 16621 - DNA, 36 bp, synthetic construct
  misc_feature 1..36: note = Probe
  source 1..36: mol_type = other DNA
aggagatcctgggttcgaatcccagcggggccttac

SEQ ID NO: 16622 - DNA, 30 bp, synthetic construct
  misc_feature 1..30: note = Probe
  source 1..30: mol_type = other DNA
aggagatcctgggttcgaatcccagcggtg

SEQ ID NO: 16623 - DNA, 31 bp, synthetic construct; identical to SEQ ID NO: 3397
  misc_feature 1..31: note = Probe
  source 1..31: mol_type = other DNA

SEQ ID NO: 16624 - DNA, 32 bp, synthetic construct; identical to SEQ ID NO: 3398
  misc_feature 1..32: note = Probe
  source 1..32: mol_type = other DNA

SEQ ID NO: 16625 - DNA, 33 bp, synthetic construct; identical to SEQ ID NO: 318
  misc_feature 1..33: note = Probe
  source 1..33: mol_type = other DNA

SEQ ID NO: 16626 - DNA, 34 bp, synthetic construct
  misc_feature 1..34: note = Probe
  source 1..34: mol_type = other DNA
aggagatcctgggttcgaatcccagcggtgcctc

SEQ ID NO: 16627 - DNA, 35 bp, synthetic construct; identical to SEQ ID NO: 3399
  misc_feature 1..35: note = Probe
  source 1..35: mol_type = other DNA

SEQ ID NO: 16628 - DNA, 36 bp, synthetic construct; identical to SEQ ID NO: 3400
  misc_feature 1..36: note = Probe
  source 1..36: mol_type = other DNA

SEQ ID NO: 16629 - DNA, 16 bp, synthetic construct
  misc_feature 1..16: note = Probe
  source 1..16: mol_type = other DNA
aggagatttcaactta

SEQ ID NO: 16630 - DNA, 17 bp, synthetic construct
  misc_feature 1..17: note = Probe
  source 1..17: mol_type = other DNA
aggagatttcaacttaa

SEQ ID NO: 16631 - DNA, 19 bp, synthetic construct
  misc_feature 1..19: note = Probe
  source 1..19: mol_type = other DNA
aggagatttcaacttaact

SEQ ID NO: 16632 - DNA, 23 bp, synthetic construct
  misc_feature 1..23: note = Probe
  source 1..23: mol_type = other DNA
aggagatttcaacttaacttgac

SEQ ID NO: 16633 - DNA, 24 bp, synthetic construct
  misc_feature 1..24: note = Probe
  source 1..24: mol_type = other DNA
aggagatttcaacttaacttgacc

SEQ ID NO: 16634 - DNA, 25 bp, synthetic construct
  misc_feature 1..25: note = Probe
  source 1..25: mol_type = other DNA
aggagatttcaacttaacttgaccg

SEQ ID NO: 16635 - DNA, 26 bp, synthetic construct
  misc_feature 1..26: note = Probe
  source 1..26: mol_type = other DNA
aggagatttcaacttaacttgaccgc

SEQ ID NO: 16636 - DNA, 27 bp, synthetic construct
  misc_feature 1..27: note = Probe
  source 1..27: mol_type = other DNA
aggagatttcaacttaacttgaccgct

SEQ ID NO: 16637 - DNA, 28 bp, synthetic construct
  misc_feature 1..28: note = Probe
  source 1..28: mol_type = other DNA
aggagatttcaacttaacttgaccgctc

SEQ ID NO: 16638 - DNA, 29 bp, synthetic construct
  misc_feature 1..29: note = Probe
  source 1..29: mol_type = other DNA
aggagatttcaacttaacttgaccgctct

SEQ ID NO: 16639 - DNA, 30 bp, synthetic construct; identical to SEQ ID NO: 3410
  misc_feature 1..30: note = Probe
  source 1..30: mol_type = other DNA

SEQ ID NO: 16640 - DNA, 31 bp, synthetic construct; identical to SEQ ID NO: 3411
  misc_feature 1..31: note = Probe
  source 1..31: mol_type = other DNA

SEQ ID NO: 16641 - DNA, 32 bp, synthetic construct; identical to SEQ ID NO: 3412
  misc_feature 1..32: note = Probe
  source 1..32: mol_type = other DNA

SEQ ID NO: 16642 - DNA, 33 bp, synthetic construct; identical to SEQ ID NO: 3413
  misc_feature 1..33: note = Probe
  source 1..33: mol_type = other DNA

SEQ ID NO: 16643 - DNA, 34 bp, synthetic construct; identical to SEQ ID NO: 3414
  misc_feature 1..34: note = Probe
  source 1..34: mol_type = other DNA

SEQ ID NO: 16644 - DNA, 16 bp, synthetic construct
  misc_feature 1..16: note = Probe
  source 1..16: mol_type = other DNA
aggagcttaaaccccc

SEQ ID NO: 16645 - DNA, 19 bp, synthetic construct
  misc_feature 1..19: note = Probe
  source 1..19: mol_type = other DNA
aggagcttaaaccccctta

SEQ ID NO: 16646 - DNA, 24 bp, synthetic construct
  misc_feature 1..24: note = Probe
  source 1..24: mol_type = other DNA
aggagcttaaacccccttatttct

SEQ ID NO: 16647 - DNA, 27 bp, synthetic construct
  misc_feature 1..27: note = Probe
  source 1..27: mol_type = other DNA
aggagcttaaacccccttatttctagg

SEQ ID NO: 16648 - DNA, 19 bp, synthetic construct
  misc_feature 1..19: note = Probe
  source 1..19: mol_type = other DNA
aggatggccgagcggtcta

SEQ ID NO: 16649 - DNA, 20 bp, synthetic construct
  misc_feature 1..20: note = Probe
  source 1..20: mol_type = other DNA
aggatggccgagcggtctaa

SEQ ID NO: 16650 - DNA, 21 bp, synthetic construct
  misc_feature 1..21: note = Probe
  source 1..21: mol_type = other DNA
aggatggccgagcggtctaag

SEQ ID NO: 16651 - DNA, 22 bp, synthetic construct
  misc_feature 1..22: note = Probe
  source 1..22: mol_type = other DNA
aggatggccgagtggtctaagg

SEQ ID NO: 16652 - DNA, 25 bp, synthetic construct
  misc_feature 1..25: note = Probe
  source 1..25: mol_type = other DNA
aggatggccgagtggtctaaggcgc

SEQ ID NO: 16653 - DNA, 26 bp, synthetic construct
  misc_feature 1..26: note = Probe
  source 1..26: mol_type = other DNA
aggatggccgagtggtctaaggcgcc

SEQ ID NO: 16654 - DNA, 28 bp, synthetic construct
  misc_feature 1..28: note = Probe
  source 1..28: mol_type = other DNA
aggatggggtgtgataggtggcacggag

SEQ ID NO: 16655 - DNA, 29 bp, synthetic construct
  misc_feature 1..29: note = Probe
  source 1..29: mol_type = other DNA
aggatggggtgtgataggtggcacggaga

SEQ ID NO: 16656 - DNA, 33 bp, synthetic construct
  misc_feature 1..33: note = Probe
  source 1..33: mol_type = other DNA
aggatggggtgtgataggtggcacggagaattt

SEQ ID NO: 16657 - DNA, 35 bp, synthetic construct
  misc_feature 1..35: note = Probe
  source 1..35: mol_type = other DNA
aggatggggtgtgataggtggcacggagaattttg

SEQ ID NO: 16658 - DNA, 17 bp, synthetic construct
  misc_feature 1..17: note = Probe
  source 1..17: mol_type = other DNA
aggattcctggttttca

SEQ ID NO: 16659 - DNA, 28 bp, synthetic construct
  misc_feature 1..28: note = Probe
  source 1..28: mol_type = other DNA
aggattcctggttttcacccaggcggcc

SEQ ID NO: 16660 - DNA, 30 bp, synthetic construct
  misc_feature 1..30: note = Probe
  source 1..30: mol_type = other DNA
aggattcctggttttcacccaggcggcccg

SEQ ID NO: 16661 - DNA, 30 bp, synthetic construct
  misc_feature 1..30: note = Probe
  source 1..30: mol_type = other DNA
aggattcctggttttcacccaggtggcccg

SEQ ID NO: 16662 - DNA, 33 bp, synthetic construct
  misc_feature 1..33: note = Probe
  source 1..33: mol_type = other DNA
aggattcctggttttcacccaggtggcccgggt

SEQ ID NO: 16663 - DNA, 17 bp, synthetic construct
  misc_feature 1..17: note = Probe
  source 1..17: mol_type = other DNA
aggattcggcgctctca

SEQ ID NO: 16664 - DNA, 28 bp, synthetic construct
  misc_feature 1..28: note = Probe
  source 1..28: mol_type = other DNA
aggattcggcgctctcaccgccgcggcc

SEQ ID NO: 16665 - DNA, 30 bp, synthetic construct
  misc_feature 1..30: note = Probe
  source 1..30: mol_type = other DNA
aggattcggcgctctcaccgccgcggcccg

SEQ ID NO: 16666 - DNA, 30 bp, synthetic construct
  misc_feature 1..30: note = Probe
  source 1..30: mol_type = other DNA
aggattcggcgctttcaccgccgcggcccg

SEQ ID NO: 16667 - DNA, 30 bp, synthetic construct
  misc_feature 1..30: note = Probe
  source 1..30: mol_type = other DNA
aggccccgggttcaatccccggcacctcca

SEQ ID NO: 16668 - DNA, 24 bp, synthetic construct
  misc_feature 1..24: note = Probe
  source 1..24: mol_type = other DNA
aggccccgggttcgatccccggca

SEQ ID NO: 16669 - DNA, 27 bp, synthetic construct
  misc_feature 1..27: note = Probe
  source 1..27: mol_type = other DNA
aggccccgggttcgatccccggcatct

SEQ ID NO: 16670 - DNA, 30 bp, synthetic construct
  misc_feature 1..30: note = Probe
  source 1..30: mol_type = other DNA
aggccccgggttcgatccccggcatctcca

SEQ ID NO: 16671 - DNA, 33 bp, synthetic construct
  misc_feature 1..33: note = Probe
  source 1..33: mol_type = other DNA
aggccccgggttcgatccccggcatctccattg

SEQ ID NO: 16672 - DNA, 23 bp, synthetic construct
  misc_feature 1..23: note = Probe
  source 1..23: mol_type = other DNA
aggcgccagactcaaggtaagca

SEQ ID NO: 16673 - DNA, 30 bp, synthetic construct
  misc_feature 1..30: note = Probe
  source 1..30: mol_type = other DNA
aggcgcccggctagctcagtcggtagagca

SEQ ID NO: 16674 - DNA, 32 bp, synthetic construct
  misc_feature 1..32: note = Probe
  source 1..32: mol_type = other DNA
aggcgcccggctagctcagtcggtagagcatg

SEQ ID NO: 16675 - DNA, 36 bp, synthetic construct
  misc_feature 1..36: note = Probe
  source 1..36: mol_type = other DNA
aggcgcccggctagctcagtcggtagagcatgggac

SEQ ID NO: 16676 - DNA, 37 bp, synthetic construct
  misc_feature 1..37: note = Probe
  source 1..37: mol_type = other DNA
aggcgcccggctagctcagtcggtagagcatgggact

SEQ ID NO: 16677 - DNA, 38 bp, synthetic construct
  misc_feature 1..38: note = Probe
  source 1..38: mol_type = other DNA
aggcgcccggctagctcagtcggtagagcatgggactc

SEQ ID NO: 16678 - DNA, 40 bp, synthetic construct
  misc_feature 1..40: note = Probe
  source 1..40: mol_type = other DNA
aggcgcccggctagctcagtcggtagagcatgggactctt

SEQ ID NO: 16679 - DNA, 41 bp, synthetic construct
  misc_feature 1..41: note = Probe
  source 1..41: mol_type = other DNA
aggcgcccggctagctcagtcggtagagcatgggactctta

SEQ ID NO: 16680 - DNA, 34 bp, synthetic construct
  misc_feature 1..34: note = Probe
  source 1..34: mol_type = other DNA
aggcggcccgggttcgactcccggtgtgggaacg

SEQ ID NO: 16681 - DNA, 35 bp, synthetic construct; identical to SEQ ID NO: 3427
  misc_feature 1..35: note = Probe
  source 1..35: mol_type = other DNA

SEQ ID NO: 16682 - DNA, 44 bp, synthetic construct
  misc_feature 1..44: note = Probe
  source 1..44: mol_type = other DNA
aggcggcccgggttcgactcccggtgtgggaacgccgaaatttt

SEQ ID NO: 16683 - DNA, 33 bp, synthetic construct
  misc_feature 1..33: note = Probe
  source 1..33: mol_type = other DNA
aggcggcccgggttcgactcccggtgtgggaat

SEQ ID NO: 16684 - DNA, 27 bp, synthetic construct
  misc_feature 1..27: note = Probe
  source 1..27: mol_type = other DNA
aggcggctcgttggtctaggggtatga

SEQ ID NO: 16685 - DNA, 25 bp, synthetic construct
  misc_feature 1..25: note = Probe
  source 1..25: mol_type = other DNA
aggctaaatcctatatatcttaatg

SEQ ID NO: 16686 - DNA, 24 bp, synthetic construct
  misc_feature 1..24: note = Probe
  source 1..24: mol_type = other DNA
aggcttacgaccccttatttaccg

SEQ ID NO: 16687 - DNA, 26 bp, synthetic construct
  misc_feature 1..26: note = Probe
  source 1..26: mol_type = other DNA
aggcttacgaccccttatttaccgag

SEQ ID NO: 16688 - DNA, 30 bp, synthetic construct
  misc_feature 1..30: note = Probe
  source 1..30: mol_type = other DNA
agggagcccggatagctcagtcggtagagc

SEQ ID NO: 16689 - DNA, 31 bp, synthetic construct
  misc_feature 1..31: note = Probe
  source 1..31: mol_type = other DNA
agggagcccggatagctcagtcggtagagca

SEQ ID NO: 16690 - DNA, 36 bp, synthetic construct
  misc_feature 1..36: note = Probe
  source 1..36: mol_type = other DNA
agggagcccggatagctcagtcggtagagcatcaga

SEQ ID NO: 16691 - DNA, 37 bp, synthetic construct
  misc_feature 1..37: note = Probe
  source 1..37: mol_type = other DNA
agggagcccggatagctcagtcggtagagcatcagac

SEQ ID NO: 16692 - DNA, 38 bp, synthetic construct
  misc_feature 1..38: note = Probe
  source 1..38: mol_type = other DNA
agggagcccggatagctcagtcggtagagcatcagact

SEQ ID NO: 16693 - DNA, 40 bp, synthetic construct
  misc_feature 1..40: note = Probe
  source 1..40: mol_type = other DNA
agggagcccggatagctcagtcggtagagcatcagacttt

SEQ ID NO: 16694 - DNA, 41 bp, synthetic construct
  misc_feature 1..41: note = Probe
  source 1..41: mol_type = other DNA
agggagcccggatagctcagtcggtagagcatcagactttt

SEQ ID NO: 16695 - DNA, 42 bp, synthetic construct
  misc_feature 1..42: note = Probe
  source 1..42: mol_type = other DNA
agggagcccggatagctcagtcggtagagcatcagactttta

SEQ ID NO: 16696 - DNA, 16 bp, synthetic construct
  misc_feature 1..16: note = Probe
  source 1..16: mol_type = other DNA
agggaggttatgatta

SEQ ID NO: 16697 - DNA, 21 bp, synthetic construct
  misc_feature 1..21: note = Probe
  source 1..21: mol_type = other DNA
agggaggttatgattaacttt

SEQ ID NO: 16698 - DNA, 22 bp, synthetic construct
  misc_feature 1..22: note = Probe
  source 1..22: mol_type = other DNA
agggaggttatgattaactttt

SEQ ID NO: 16699 - DNA, 23 bp, synthetic construct
  misc_feature 1..23: note = Probe
  source 1..23: mol_type = other DNA
agggaggttatgattaactttta

SEQ ID NO: 16700 - DNA, 27 bp, synthetic construct
  misc_feature 1..27: note = Probe
  source 1..27: mol_type = other DNA
agggaggttatgattaacttttagttt

SEQ ID NO: 16701 - DNA, 25 bp, synthetic construct
  misc_feature 1..25: note = Probe
  source 1..25: mol_type = other DNA
agggatgggttcgattctcatagtc

SEQ ID NO: 16702 - DNA, 27 bp, synthetic construct
  misc_feature 1..27: note = Probe
  source 1..27: mol_type = other DNA
agggatgggttcgattctcatagtcct

SEQ ID NO: 16703 - DNA, 32 bp, synthetic construct; identical to SEQ ID NO: 3433
  misc_feature 1..32: note = Probe
  source 1..32: mol_type = other DNA

SEQ ID NO: 16704 - DNA, 30 bp, synthetic construct
  misc_feature 1..30: note = Probe
  source 1..30: mol_type = other DNA
agggattgtgggttcgagtcccacctgggg

SEQ ID NO: 16705 - DNA, 25 bp, synthetic construct
  misc_feature 1..25: note = Probe
  source 1..25: mol_type = other DNA
agggattgtgggttcgagtcccatc

SEQ ID NO: 16706 - DNA, 28 bp, synthetic construct
  misc_feature 1..28: note = Probe
  source 1..28: mol_type = other DNA
agggattgtgggttcgagtcccatctgg

SEQ ID NO: 16707 - DNA, 30 bp, synthetic construct
  misc_feature 1..30: note = Probe
  source 1..30: mol_type = other DNA
agggattgtgggttcgagtcccatctgggg

SEQ ID NO: 16708 - DNA, 32 bp, synthetic construct; identical to SEQ ID NO: 3436
  misc_feature 1..32: note = Probe
  source 1..32: mol_type = other DNA

SEQ ID NO: 16709 - DNA, 33 bp, synthetic construct; identical to SEQ ID NO: 3437
  misc_feature 1..33: note = Probe
  source 1..33: mol_type = other DNA

SEQ ID NO: 16710 - DNA, 30 bp, synthetic construct
  misc_feature 1..30: note = Probe
  source 1..30: mol_type = other DNA
aggggcccggatagctcagtcggtagagca

SEQ ID NO: 16711 - DNA, 35 bp, synthetic construct
  misc_feature 1..35: note = Probe
  source 1..35: mol_type = other DNA
aggggcccggatagctcagtcggtagagcatcaga

SEQ ID NO: 16712 - DNA, 36 bp, synthetic construct
  misc_feature 1..36: note = Probe
  source 1..36: mol_type = other DNA
aggggcccggatagctcagtcggtagagcatcagac

SEQ ID NO: 16713 - DNA, 37 bp, synthetic construct
  misc_feature 1..37: note = Probe
  source 1..37: mol_type = other DNA
aggggcccggatagctcagtcggtagagcatcagact

SEQ ID NO: 16714 - DNA, 38 bp, synthetic construct
  misc_feature 1..38: note = Probe
  source 1..38: mol_type = other DNA
aggggcccggatagctcagtcggtagagcatcagactt

SEQ ID NO: 16715 - DNA, 39 bp, synthetic construct
  misc_feature 1..39: note = Probe
  source 1..39: mol_type = other DNA
aggggcccggatagctcagtcggtagagcatcagacttt

SEQ ID NO: 16716 - DNA, 40 bp, synthetic construct
  misc_feature 1..40: note = Probe
  source 1..40: mol_type = other DNA
aggggcccggatagctcagtcggtagagcatcagactttt

SEQ ID NO: 16717 - DNA, 41 bp, synthetic construct
  misc_feature 1..41: note = Probe
  source 1..41: mol_type = other DNA
aggggcccggatagctcagtcggtagagcatcagactttta

SEQ ID NO: 16718 - DNA, 16 bp, synthetic construct
  misc_feature 1..16: note = Probe
  source 1..16: mol_type = other DNA
aggggtatgattctcg

SEQ ID NO: 16719 - DNA, 17 bp, synthetic construct
  misc_feature 1..17: note = Probe
  source 1..17: mol_type = other DNA
aggggtatgattctcgc

SEQ ID NO: 16720 - DNA, 18 bp, synthetic construct
  misc_feature 1..18: note = Probe
  source 1..18: mol_type = other DNA
aggggtatgattctcgct

SEQ ID NO: 16721 - DNA, 36 bp, synthetic construct
  misc_feature 1..36: note = Probe
  source 1..36: mol_type = other DNA
aggggtatgattctcgcttagggtgcgagaggtccc

SEQ ID NO: 16722 - DNA, 36 bp, synthetic construct
  misc_feature 1..36: note = Probe
  source 1..36: mol_type = other DNA
aggggtatgattctcgcttcgggtgcgagaggtccc

SEQ ID NO: 16723 - DNA, 36 bp, synthetic construct
  misc_feature 1..36: note = Probe
  source 1..36: mol_type = other DNA
aggggtatgattctcgctttgggtgcgagaggtccc

SEQ ID NO: 16724 - DNA, 31 bp, synthetic construct
  misc_feature 1..31: note = Probe
  source 1..31: mol_type = other DNA
aggggtcgcgagttcaaatctcgctggggcc

SEQ ID NO: 16725 - DNA, 25 bp, synthetic construct
  misc_feature 1..25: note = Probe
  source 1..25: mol_type = other DNA
aggggttaggcctctttttaccagc

SEQ ID NO: 16726 - DNA, 26 bp, synthetic construct
  misc_feature 1..26: note = Probe
  source 1..26: mol_type = other DNA
aggggttaggcctctttttaccagct

SEQ ID NO: 16727 - DNA, 29 bp, synthetic construct
  misc_feature 1..29: note = Probe
  source 1..29: mol_type = other DNA
agggtccagggttcaagtccctgttcggg

SEQ ID NO: 16728 - DNA, 34 bp, synthetic construct
  misc_feature 1..34: note = Probe
  source 1..34: mol_type = other DNA
agggtccagggttcaagtccctgttcgggcggca

SEQ ID NO: 16729 - DNA, 21 bp, synthetic construct
  misc_feature 1..21: note = Probe
  source 1..21: mol_type = other DNA
agggtgcgagaggtcccgggt

SEQ ID NO: 16730 - DNA, 22 bp, synthetic construct
  misc_feature 1..22: note = Probe
  source 1..22: mol_type = other DNA
agggtgcgagaggtcccgggtt

SEQ ID NO: 16731 - DNA, 50 bp, synthetic construct; identical to SEQ ID NO: 334
  misc_feature 1..50: note = Probe
  source 1..50: mol_type = other DNA

SEQ ID NO: 16732 - DNA, 17 bp, synthetic construct
  misc_feature 1..17: note = Probe
  source 1..17: mol_type = other DNA
aggtcagctaaataagc

SEQ ID NO: 16733 - DNA, 22 bp, synthetic construct
  misc_feature 1..22: note = Probe
  source 1..22: mol_type = other DNA
aggtcagctaaataagctatcg

SEQ ID NO: 16734 - DNA, 23 bp, synthetic construct
  misc_feature 1..23: note = Probe
  source 1..23: mol_type = other DNA
aggtcagctaaataagctatcgg

SEQ ID NO: 16735 - DNA, 24 bp, synthetic construct
  misc_feature 1..24: note = Probe
  source 1..24: mol_type = other DNA
aggtcagctaaataagctatcggg

SEQ ID NO: 16736 - DNA, 25 bp, synthetic construct
  misc_feature 1..25: note = Probe
  source 1..25: mol_type = other DNA
aggtcagctaaataagctatcgggc

SEQ ID NO: 16737 - DNA, 26 bp, synthetic construct
  misc_feature 1..26: note = Probe
  source 1..26: mol_type = other DNA
aggtcagctaaataagctatcgggcc

SEQ ID NO: 16738 - DNA, 27 bp, synthetic construct
  misc_feature 1..27: note = Probe
  source 1..27: mol_type = other DNA
aggtcagctaaataagctatcgggccc

SEQ ID NO: 16739 - DNA, 28 bp, synthetic construct
  misc_feature 1..28: note = Probe
  source 1..28: mol_type = other DNA
aggtcagctaaataagctatcgggccca

SEQ ID NO: 16740 - DNA, 29 bp, synthetic construct
  misc_feature 1..29: note = Probe
  source 1..29: mol_type = other DNA
aggtcagctaaataagctatcgggcccat

SEQ ID NO: 16741 - DNA, 30 bp, synthetic construct; identical to SEQ ID NO: 3454
  misc_feature 1..30: note = Probe
  source 1..30: mol_type = other DNA

SEQ ID NO: 16742 - DNA, 31 bp, synthetic construct; identical to SEQ ID NO: 3455
  misc_feature 1..31: note = Probe
  source 1..31: mol_type = other DNA

SEQ ID NO: 16743 - DNA, 32 bp, synthetic construct; identical to SEQ ID NO: 3456
  misc_feature 1..32: note = Probe
  source 1..32: mol_type = other DNA

SEQ ID NO: 16744 - DNA, 33 bp, synthetic construct; identical to SEQ ID NO: 3457
  misc_feature 1..33: note = Probe
  source 1..33: mol_type = other DNA

SEQ ID NO: 16745 - DNA, 34 bp, synthetic construct; identical to SEQ ID NO: 3458
  misc_feature 1..34: note = Probe
  source 1..34: mol_type = other DNA

SEQ ID NO: 16746 - DNA, 36 bp, synthetic construct; identical to SEQ ID NO: 3460
  misc_feature 1..36: note = Probe
  source 1..36: mol_type = other DNA

SEQ ID NO: 16747 - DNA, 37 bp, synthetic construct; identical to SEQ ID NO: 3461
  misc_feature 1..37: note = Probe
  source 1..37: mol_type = other DNA

SEQ ID NO: 16748 - DNA, 38 bp, synthetic construct; identical to SEQ ID NO: 3462
  misc_feature 1..38: note = Probe
  source 1..38: mol_type = other DNA

SEQ ID NO: 16749 - DNA, 39 bp, synthetic construct; identical to SEQ ID NO: 3463
  misc_feature 1..39: note = Probe
  source 1..39: mol_type = other DNA

SEQ ID NO: 16750 - DNA, 40 bp, synthetic construct; identical to SEQ ID NO: 3464
  misc_feature 1..40: note = Probe
  source 1..40: mol_type = other DNA

SEQ ID NO: 16751 - DNA, 41 bp, synthetic construct; identical to SEQ ID NO: 3465
  misc_feature 1..41: note = Probe
  source 1..41: mol_type = other DNA

SEQ ID NO: 16752 - DNA, 42 bp, synthetic construct; identical to SEQ ID NO: 3466
  misc_feature 1..42: note = Probe
  source 1..42: mol_type = other DNA

SEQ ID NO: 16753 - DNA, 43 bp, synthetic construct; identical to SEQ ID NO: 3467
  misc_feature 1..43: note = Probe
  source 1..43: mol_type = other DNA

SEQ ID NO: 16754 - DNA, 44 bp, synthetic construct; identical to SEQ ID NO: 3468
  misc_feature 1..44: note = Probe
  source 1..44: mol_type = other DNA

SEQ ID NO: 16755 - DNA, 45 bp, synthetic construct; identical to SEQ ID NO: 3469
  misc_feature 1..45: note = Probe
  source 1..45: mol_type = other DNA

SEQ ID NO: 16756 - DNA, 50 bp, synthetic construct; identical to SEQ ID NO: 3474
  misc_feature 1..50: note = Probe
  source 1..50: mol_type = other DNA

SEQ ID NO: 16757 - DNA, 33 bp, synthetic construct
  misc_feature 1..33: note = Probe
  source 1..33: mol_type = other DNA
aggtcccgggttcaaatcccggacgagccccct

SEQ ID NO: 16758 - DNA, 33 bp, synthetic construct
  misc_feature 1..33: note = Probe
  source 1..33: mol_type = other DNA
aggtcccgggttcaatccccggcacctccacca

SEQ ID NO: 16759 - DNA, 24 bp, synthetic construct
  misc_feature 1..24: note = Probe
  source 1..24: mol_type = other DNA
aggtcccgggttcgatccccagca

SEQ ID NO: 16760 - DNA, 33 bp, synthetic construct; identical to SEQ ID NO: 3476
  misc_feature 1..33: note = Probe
  source 1..33: mol_type = other DNA

SEQ ID NO: 16761 - DNA, 24 bp, synthetic construct
  misc_feature 1..24: note = Probe
  source 1..24: mol_type = other DNA
aggtcccgggttcgatccccggca

SEQ ID NO: 16762 - DNA, 33 bp, synthetic construct
  misc_feature 1..33: note = Probe
  source 1..33: mol_type = other DNA
aggtccctcctcgttagtatagtggtgagtatc

SEQ ID NO: 16763 - DNA, 34 bp, synthetic construct
  misc_feature 1..34: note = Probe
  source 1..34: mol_type = other DNA
aggtccctcctcgttagtatagtggtgagtatcc

SEQ ID NO: 16764 - DNA, 40 bp, synthetic construct
  misc_feature 1..40: note = Probe
  source 1..40: mol_type = other DNA
aggtccctcctcgttagtatagtggtgagtatccccgcct

SEQ ID NO: 16765 - DNA, 42 bp, synthetic construct
  misc_feature 1..42: note = Probe
  source 1..42: mol_type = other DNA
aggtccctcctcgttagtatagtggtgagtatccccgcctgt

SEQ ID NO: 16766 - DNA, 37 bp, synthetic construct
  misc_feature 1..37: note = Probe
  source 1..37: mol_type = other DNA
aggtcctgagttcgaacctcagagggggcagctgcca

SEQ ID NO: 16767 - DNA, 38 bp, synthetic construct
  misc_feature 1..38: note = Probe
  source 1..38: mol_type = other DNA
aggtcctgagttcgaacctcagagggggcagctgccat

SEQ ID NO: 16768 - DNA, 39 bp, synthetic construct
  misc_feature 1..39: note = Probe
  source 1..39: mol_type = other DNA
aggtcctgagttcgaacctcagagggggcagctgccatt

SEQ ID NO: 16769 - DNA, 40 bp, synthetic construct
  misc_feature 1..40: note = Probe
  source 1..40: mol_type = other DNA
aggtcctgagttcgaacctcagagggggcagctgccattt

SEQ ID NO: 16770 - DNA, 41 bp, synthetic construct
  misc_feature 1..41: note = Probe
  source 1..41: mol_type = other DNA
aggtcctgagttcgaacctcagagggggcagctgccatttt

SEQ ID NO: 16771 - DNA, 37 bp, synthetic construct
  misc_feature 1..37: note = Probe
  source 1..37: mol_type = other DNA
aggtcctgagttcgagcctcagagagggcagctgttt

SEQ ID NO: 16772 - DNA, 27 bp, synthetic construct
  misc_feature 1..27: note = Probe
  source 1..27: mol_type = other DNA
aggtcctgggttcgagccccagtggaa

SEQ ID NO: 16773 - DNA, 31 bp, synthetic construct
  misc_feature 1..31: note = Probe
  source 1..31: mol_type = other DNA
aggtcctgggttcgagccccagtggaaccac

SEQ ID NO: 16774 - DNA, 32 bp, synthetic construct; identical to SEQ ID NO: 3477
  misc_feature 1..32: note = Probe
  source 1..32: mol_type = other DNA

SEQ ID NO: 16775 - DNA, 33 bp, synthetic construct; identical to SEQ ID NO: 3478
  misc_feature 1..33: note = Probe
  source 1..33: mol_type = other DNA

SEQ ID NO: 16776 - DNA, 33 bp, synthetic construct; identical to SEQ ID NO: 3479
  misc_feature 1..33: note = Probe
  source 1..33: mol_type = other DNA

SEQ ID NO: 16777 - DNA, 30 bp, synthetic construct
  misc_feature 1..30: note = Probe
  source 1..30: mol_type = other DNA
aggtcgcgggttcgatccccgtacgggcca

SEQ ID NO: 16778 - DNA, 33 bp, synthetic construct; identical to SEQ ID NO: 3483
  misc_feature 1..33: note = Probe
  source 1..33: mol_type = other DNA

SEQ ID NO: 16779 - DNA, 33 bp, synthetic construct; identical to SEQ ID NO: 3485
  misc_feature 1..33: note = Probe
  source 1..33: mol_type = other DNA

SEQ ID NO: 16780 - DNA, 33 bp, synthetic construct
  misc_feature 1..33: note = Probe
  source 1..33: mol_type = other DNA
aggtcgcgggttcgatccccgtactggccacgt

SEQ ID NO: 16781 - DNA, 26 bp, synthetic construct
  misc_feature 1..26: note = Probe
  source 1..26: mol_type = other DNA
aggtcgctggttcgattccggctcga

SEQ ID NO: 16782 - DNA, 32 bp, synthetic construct
  misc_feature 1..32: note = Probe
  source 1..32: mol_type = other DNA
aggtcgctggttcgattccggctcgaaggact

SEQ ID NO: 16783 - DNA, 30 bp, synthetic construct
  misc_feature 1..30: note = Probe
  source 1..30: mol_type = other DNA
aggtcgtgagttcgagcctcacacggggca

SEQ ID NO: 16784 - DNA, 33 bp, synthetic construct; identical to SEQ ID NO: 3486
  misc_feature 1..33: note = Probe
  source 1..33: mol_type = other DNA

SEQ ID NO: 16785 - DNA, 26 bp, synthetic construct
  misc_feature 1..26: note = Probe
  source 1..26: mol_type = other DNA
aggtgcctcgttagcgcagtaggtag

SEQ ID NO: 16786 - DNA, 27 bp, synthetic construct
  misc_feature 1..27: note = Probe
  source 1..27: mol_type = other DNA
aggtgcctcgttagcgcagtaggtagc

SEQ ID NO: 16787 - DNA, 28 bp, synthetic construct
  misc_feature 1..28: note = Probe
  source 1..28: mol_type = other DNA
aggtgcctcgttagcgcagtaggtagcg

SEQ ID NO: 16788 - DNA, 29 bp, synthetic construct
  misc_feature 1..29: note = Probe
  source 1..29: mol_type = other DNA
aggtgcctcgttagcgcagtaggtagcgc

SEQ ID NO: 16789 - DNA, 30 bp, synthetic construct
  misc_feature 1..30: note = Probe
  source 1..30: mol_type = other DNA
aggtgcctcgttagcgcagtaggtagcgcg

SEQ ID NO: 16790 - DNA, 31 bp, synthetic construct
  misc_feature 1..31: note = Probe
  source 1..31: mol_type = other DNA
aggtgcctcgttagcgcagtaggtagcgcgt

SEQ ID NO: 16791 - DNA, 32 bp, synthetic construct
  misc_feature 1..32: note = Probe
  source 1..32: mol_type = other DNA
aggtgcctcgttagcgcagtaggtagcgcgtc

SEQ ID NO: 16792 - DNA, 33 bp, synthetic construct
  misc_feature 1..33: note = Probe
  source 1..33: mol_type = other DNA
aggtgcctcgttagcgcagtaggtagcgcgtca

SEQ ID NO: 16793 - DNA, 34 bp, synthetic construct
  misc_feature 1..34: note = Probe
  source 1..34: mol_type = other DNA
aggtgcctcgttagcgcagtaggtagcgcgtcag

SEQ ID NO: 16794 - DNA, 35 bp, synthetic construct
  misc_feature 1..35: note = Probe
  source 1..35: mol_type = other DNA
aggtgcctcgttagcgcagtaggtagcgcgtcagt

SEQ ID NO: 16795 - DNA, 36 bp, synthetic construct
  misc_feature 1..36: note = Probe
  source 1..36: mol_type = other DNA
aggtgcctcgttagcgcagtaggtagcgcgtcagtc

SEQ ID NO: 16796 - DNA, 37 bp, synthetic construct
  misc_feature 1..37: note = Probe
  source 1..37: mol_type = other DNA
aggtgcctcgttagcgcagtaggtagcgcgtcagtct

SEQ ID NO: 16797 - DNA, 38 bp, synthetic construct
  misc_feature 1..38: note = Probe
  source 1..38: mol_type = other DNA
aggtgcctcgttagcgcagtaggtagcgcgtcagtctc

SEQ ID NO: 16798 - DNA, 39 bp, synthetic construct
  misc_feature 1..39: note = Probe
  source 1..39: mol_type = other DNA
aggtgcctcgttagcgcagtaggtagcgcgtcagtctca

SEQ ID NO: 16799 - DNA, 40 bp, synthetic construct
  misc_feature 1..40: note = Probe
  source 1..40: mol_type = other DNA
aggtgcctcgttagcgcagtaggtagcgcgtcagtctcat

SEQ ID NO: 16800 - DNA, 41 bp, synthetic construct
  misc_feature 1..41: note = Probe
  source 1..41: mol_type = other DNA
aggtgcctcgttagcgcagtaggtagcgcgtcagtctcata

SEQ ID NO: 16801 - DNA, 50 bp, synthetic construct
  misc_feature 1..50: note = Probe
  source 1..50: mol_type = other DNA
aggtgcctcgttagcgcagtaggtagcgcgtcagtctcataatctgaagg

SEQ ID NO: 16802 - DNA, 26 bp, synthetic construct
  misc_feature 1..26: note = Probe
  source 1..26: mol_type = other DNA
aggtggcccgggttcgactcccggta

SEQ ID NO: 16803 - DNA, 28 bp, synthetic construct
  misc_feature 1..28: note = Probe
  source 1..28: mol_type = other DNA
aggtggcccgggttcgactcccggtatg

SEQ ID NO: 16804 - DNA, 30 bp, synthetic construct
  misc_feature 1..30: note = Probe
  source 1..30: mol_type = other DNA
aggtggcccgggttcgactcccggtatggg

SEQ ID NO: 16805 - DNA, 34 bp, synthetic construct
  misc_feature 1..34: note = Probe
  source 1..34: mol_type = other DNA
aggtggcccgggttcgactcccggtatgggaaca

SEQ ID NO: 16806 - DNA, 35 bp, synthetic construct; identical to SEQ ID NO: 3490
  misc_feature 1..35: note = Probe
  source 1..35: mol_type = other DNA

SEQ ID NO: 16807 - DNA, 34 bp, synthetic construct
  misc_feature 1..34: note = Probe
  source 1..34: mol_type = other DNA
aggtggcccgggttcgactcccggtatgggaacg

SEQ ID NO: 16808 - DNA, 32 bp, synthetic construct
  misc_feature 1..32: note = Probe
  source 1..32: mol_type = other DNA
aggtggctccgtggcgcaatggatagcgcatt

SEQ ID NO: 16809 - DNA, 37 bp, synthetic construct
  misc_feature 1..37: note = Probe
  source 1..37: mol_type = other DNA
aggtggctccgtggcgcaatggatagcgcattggact

SEQ ID NO: 16810 - DNA, 41 bp, synthetic construct
  misc_feature 1..41: note = Probe
  source 1..41: mol_type = other DNA
aggtggctccgtggcgcaatggatagcgcattggacttcta

SEQ ID NO: 16811 - DNA, 29 bp, synthetic construct
  misc_feature 1..29: note = Probe
  source 1..29: mol_type = other DNA
aggtggctcgttggtctaggggtatgatt

SEQ ID NO: 16812 - DNA, 28 bp, synthetic construct
  misc_feature 1..28: note = Probe
  source 1..28: mol_type = other DNA
aggtgtcaggatggccgagtggtctaag

SEQ ID NO: 16813 - DNA, 29 bp, synthetic construct
  misc_feature 1..29: note = Probe
  source 1..29: mol_type = other DNA
aggtgtcaggatggccgagtggtctaagg

SEQ ID NO: 16814 - DNA, 38 bp, synthetic construct
  misc_feature 1..38: note = Probe
  source 1..38: mol_type = other DNA
aggtgtcaggatggccgagtggtctaaggcgccagact

SEQ ID NO: 16815 - DNA, 39 bp, synthetic construct
  misc_feature 1..39: note = Probe
  source 1..39: mol_type = other DNA
aggtgtcaggatggccgagtggtctaaggcgccagactc

SEQ ID NO: 16816 - DNA, 50 bp, synthetic construct
  misc_feature 1..50: note = Probe
  source 1..50: mol_type = other DNA
aggtgtcaggatggccgagtggtctaaggcgccagactcaagcttggctt

SEQ ID NO: 16817 - DNA, 36 bp, synthetic construct
  misc_feature 1..36: note = Probe
  source 1..36: mol_type = other DNA
aggtgtgggtttccgtagtgtagtggtcatcacgtt

SEQ ID NO: 16818 - DNA, 26 bp, synthetic construct
  misc_feature 1..26: note = Probe
  source 1..26: mol_type = other DNA
aggttcgaatcctgccgactacggca

SEQ ID NO: 16819 - DNA, 26 bp, synthetic construct
  misc_feature 1..26: note = Probe
  source 1..26: mol_type = other DNA
aggttcgaatcctgccgactacgtca

SEQ ID NO: 16820 - DNA, 28 bp, synthetic construct
  misc_feature 1..28: note = Probe
  source 1..28: mol_type = other DNA
aggttggtggttcgagcccacccaggga

SEQ ID NO: 16821 - DNA, 30 bp, synthetic construct
  misc_feature 1..30: note = Probe
  source 1..30: mol_type = other DNA
aggttggtggttcgagcccacccagggacg

SEQ ID NO: 16822 - DNA, 33 bp, synthetic construct
  misc_feature 1..33: note = Probe
  source 1..33: mol_type = other DNA
aggttgtgagttcgagcctcacctggagcattg

SEQ ID NO: 16823 - DNA, 27 bp, synthetic construct
  misc_feature 1..27: note = Probe
  source 1..27: mol_type = other DNA
aggtttggtcctagcctttctattagc

SEQ ID NO: 16824 - DNA, 21 bp, synthetic construct
  misc_feature 1..21: note = Probe
  source 1..21: mol_type = other DNA
agtaaacaggagatcctgggt

SEQ ID NO: 16825 - DNA, 36 bp, synthetic construct
  misc_feature 1..36: note = Probe
  source 1..36: mol_type = other DNA
agtaaataataggagcttaaacccccttatttctag

SEQ ID NO: 16826 - DNA, 37 bp, synthetic construct; identical to SEQ ID NO: 3499
  misc_feature 1..37: note = Probe
  source 1..37: mol_type = other DNA

SEQ ID NO: 16827 - DNA, 38 bp, synthetic construct; identical to SEQ ID NO: 3500
  misc_feature 1..38: note = Probe
  source 1..38: mol_type = other DNA

SEQ ID NO: 16828 - DNA, 16 bp, synthetic construct
  misc_feature 1..16: note = Probe
  source 1..16: mol_type = other DNA
agtaaggtcagctaaa

SEQ ID NO: 16829 - DNA, 17 bp, synthetic construct
  misc_feature 1..17: note = Probe
  source 1..17: mol_type = other DNA
agtaaggtcagctaaat

SEQ ID NO: 16830 - DNA, 18 bp, synthetic construct
  misc_feature 1..18: note = Probe
  source 1..18: mol_type = other DNA
agtaaggtcagctaaata

SEQ ID NO: 16831 - DNA, 19 bp, synthetic construct
  misc_feature 1..19: note = Probe
  source 1..19: mol_type = other DNA
agtaaggtcagctaaataa

SEQ ID NO: 16832 - DNA, 20 bp, synthetic construct
  misc_feature 1..20: note = Probe
  source 1..20: mol_type = other DNA
agtaaggtcagctaaataag

SEQ ID NO: 16833 - DNA, 21 bp, synthetic construct
  misc_feature 1..21: note = Probe
  source 1..21: mol_type = other DNA
agtaaggtcagctaaataagc

SEQ ID NO: 16834 - DNA, 22 bp, synthetic construct
  misc_feature 1..22: note = Probe
  source 1..22: mol_type = other DNA
agtaaggtcagctaaataagct

SEQ ID NO: 16835 - DNA, 23 bp, synthetic construct
  misc_feature 1..23: note = Probe
  source 1..23: mol_type = other DNA
agtaaggtcagctaaataagcta

SEQ ID NO: 16836 - DNA, 24 bp, synthetic construct
  misc_feature 1..24: note = Probe
  source 1..24: mol_type = other DNA
agtaaggtcagctaaataagctat

SEQ ID NO: 16837 - DNA, 25 bp, synthetic construct
  misc_feature 1..25: note = Probe
  source 1..25: mol_type = other DNA
agtaaggtcagctaaataagctatc

SEQ ID NO: 16838 - DNA, 26 bp, synthetic construct
  misc_feature 1..26: note = Probe
  source 1..26: mol_type = other DNA
agtaaggtcagctaaataagctatcg

SEQ ID NO: 16839 - DNA, 27 bp, synthetic construct
  misc_feature 1..27: note = Probe
  source 1..27: mol_type = other DNA
agtaaggtcagctaaataagctatcgg

SEQ ID NO: 16840 - DNA, 28 bp, synthetic construct
  misc_feature 1..28: note = Probe
  source 1..28: mol_type = other DNA
agtaaggtcagctaaataagctatcggg

SEQ ID NO: 16841 - DNA, 29 bp, synthetic construct
  misc_feature 1..29: note = Probe
  source 1..29: mol_type = other DNA
agtaaggtcagctaaataagctatcgggc

SEQ ID NO: 16842 - DNA, 30 bp, synthetic construct; identical to SEQ ID NO: 3514
  misc_feature 1..30: note = Probe
  source 1..30: mol_type = other DNA

SEQ ID NO: 16843 - DNA, 31 bp, synthetic construct; identical to SEQ ID NO: 3515
  misc_feature 1..31: note = Probe
  source 1..31: mol_type = other DNA

SEQ ID NO: 16844 - DNA, 32 bp, synthetic construct; identical to SEQ ID NO: 3516
  misc_feature 1..32: note = Probe
  source 1..32: mol_type = other DNA

SEQ ID NO: 16845 - DNA, 33 bp, synthetic construct; identical to SEQ ID NO: 3517
  misc_feature 1..33: note = Probe
  source 1..33: mol_type = other DNA

SEQ ID NO: 16846 - DNA, 34 bp, synthetic construct; identical to SEQ ID NO: 3518
  misc_feature 1..34: note = Probe
  source 1..34: mol_type = other DNA

SEQ ID NO: 16847 - DNA, 35 bp, synthetic construct; identical to SEQ ID NO: 3519
  misc_feature 1..35: note = Probe
  source 1..35: mol_type = other DNA

SEQ ID NO: 16848 - DNA, 36 bp, synthetic construct; identical to SEQ ID NO: 3520
  misc_feature 1..36: note = Probe
  source 1..36: mol_type = other DNA

SEQ ID NO: 16849 - DNA, 37 bp, synthetic construct; identical to SEQ ID NO: 3521
  misc_feature 1..37: note = Probe
  source 1..37: mol_type = other DNA

SEQ ID NO: 16850 - DNA, 38 bp, synthetic construct; identical to SEQ ID NO: 3522
  misc_feature 1..38: note = Probe
  source 1..38: mol_type = other DNA

SEQ ID NO: 16851 - DNA, 39 bp, synthetic construct; identical to SEQ ID NO: 3523
  misc_feature 1..39: note = Probe
  source 1..39: mol_type = other DNA

SEQ ID NO: 16852 - DNA, 40 bp, synthetic construct; identical to SEQ ID NO: 3524
  misc_feature 1..40: note = Probe
  source 1..40: mol_type = other DNA

SEQ ID NO: 16853 - DNA, 41 bp, synthetic construct; identical to SEQ ID NO: 3525
  misc_feature 1..41: note = Probe
  source 1..41: mol_type = other DNA

SEQ ID NO: 16854 - DNA, 42 bp, synthetic construct; identical to SEQ ID NO: 3526
  misc_feature 1..42: note = Probe
  source 1..42: mol_type = other DNA

SEQ ID NO: 16855 - DNA, 43 bp, synthetic construct; identical to SEQ ID NO: 3527
  misc_feature 1..43: note = Probe
  source 1..43: mol_type = other DNA

SEQ ID NO: 16856 - DNA, 44 bp, synthetic construct; identical to SEQ ID NO: 3528
  misc_feature 1..44: note = Probe
  source 1..44: mol_type = other DNA

SEQ ID NO: 16857 - DNA, 45 bp, synthetic construct; identical to SEQ ID NO: 3529
  misc_feature 1..45: note = Probe
  source 1..45: mol_type = other DNA

SEQ ID NO: 16858 - DNA, 46 bp, synthetic construct; identical to SEQ ID NO: 3530
  misc_feature 1..46: note = Probe
  source 1..46: mol_type = other DNA

SEQ ID NO: 16859 - DNA, 48 bp, synthetic construct; identical to SEQ ID NO: 3532
  misc_feature 1..48: note = Probe
  source 1..48: mol_type = other DNA

SEQ ID NO: 16860 - DNA, 49 bp, synthetic construct; identical to SEQ ID NO: 3533
  misc_feature 1..49: note = Probe
  source 1..49: mol_type = other DNA

SEQ ID NO: 16861 - DNA, 50 bp, synthetic construct; identical to SEQ ID NO: 3534
  misc_feature 1..50: note = Probe
  source 1..50: mol_type = other DNA

SEQ ID NO: 16862 - DNA, 16 bp, synthetic construct
  misc_feature 1..16: note = Probe
  source 1..16: mol_type = other DNA
agtaccgttaacttcc

SEQ ID NO: 16863 - DNA, 17 bp, synthetic construct
  misc_feature 1..17: note = Probe
  source 1..17: mol_type = other DNA
agtaccgttaacttcca

SEQ ID NO: 16864 - DNA, 28 bp, synthetic construct
  misc_feature 1..28: note = Probe
  source 1..28: mol_type = other DNA
agtaccgttaacttccaattaactagtt

SEQ ID NO: 16865 - DNA, 31 bp, synthetic construct
  misc_feature 1..31: note = Probe
  source 1..31: mol_type = other DNA
agtaccgttaacttccaattaactagttttg

SEQ ID NO: 16866 - DNA, 36 bp, synthetic construct
  misc_feature 1..36: note = Probe
  source 1..36: mol_type = other DNA
agtaccgttaacttccaattaactagttttgacaac

SEQ ID NO: 16867 - DNA, 37 bp, synthetic construct; identical to SEQ ID NO: 3538
  misc_feature 1..37: note = Probe
  source 1..37: mol_type = other DNA

SEQ ID NO: 16868 - DNA, 50 bp, synthetic construct; identical to SEQ ID NO: 337
  misc_feature 1..50: note = Probe
  source 1..50: mol_type = other DNA

SEQ ID NO: 16869 - DNA, 32 bp, synthetic construct
  misc_feature 1..32: note = Probe
  source 1..32: mol_type = other DNA
agtacctgtctctgtggcgtagtcggttagcg

SEQ ID NO: 16870 - DNA, 34 bp, synthetic construct
  misc_feature 1..34: note = Probe
  source 1..34: mol_type = other DNA
agtacctgtctctgtggcgtagtcggttagcgcg

SEQ ID NO: 16871 - DNA, 36 bp, synthetic construct
  misc_feature 1..36: note = Probe
  source 1..36: mol_type = other DNA
agtacctgtctctgtggcgtagtcggttagcgcgtt

SEQ ID NO: 16872 - DNA, 38 bp, synthetic construct
  misc_feature 1..38: note = Probe
  source 1..38: mol_type = other DNA
agtacctgtctctgtggcgtagtcggttagcgcgttcg

SEQ ID NO: 16873 - DNA, 33 bp, synthetic construct
  misc_feature 1..33: note = Probe
  source 1..33: mol_type = other DNA
agtactctgcgttgtggccgcagcaacctcggt

SEQ ID NO: 16874 - DNA, 18 bp, synthetic construct
  misc_feature 1..18: note = Probe
  source 1..18: mol_type = other DNA
agtagaactgacagtacc

SEQ ID NO: 16875 - DNA, 19 bp, synthetic construct
  misc_feature 1..19: note = Probe
  source 1..19: mol_type = other DNA
agtagaactgacagtacct

SEQ ID NO: 16876 - DNA, 22 bp, synthetic construct
  misc_feature 1..22: note = Probe
  source 1..22: mol_type = other DNA
agtatagtggtgagtatccccg

SEQ ID NO: 16877 - DNA, 23 bp, synthetic construct
  misc_feature 1..23: note = Probe
  source 1..23: mol_type = other DNA
agtatagtggtgagtatccccgc

SEQ ID NO: 16878 - DNA, 28 bp, synthetic construct
  misc_feature 1..28: note = Probe
  source 1..28: mol_type = other DNA
agtatagtggtgagtatccccgcctgtc

SEQ ID NO: 16879 - DNA, 29 bp, synthetic construct
  misc_feature 1..29: note = Probe
  source 1..29: mol_type = other DNA
agtatccccgcctgtcacgcgggagaccg

SEQ ID NO: 16880 - DNA, 23 bp, synthetic construct
  misc_feature 1..23: note = Probe
  source 1..23: mol_type = other DNA
agtcagaggttcaattcctcttc

SEQ ID NO: 16881 - DNA, 24 bp, synthetic construct
  misc_feature 1..24: note = Probe
  source 1..24: mol_type = other DNA
agtcagaggttcaattcctcttct

SEQ ID NO: 16882 - DNA, 25 bp, synthetic construct
  misc_feature 1..25: note = Probe
  source 1..25: mol_type = other DNA
agtcagaggttcaattcctcttctt

SEQ ID NO: 16883 - DNA, 26 bp, synthetic construct
  misc_feature 1..26: note = Probe
  source 1..26: mol_type = other DNA
agtcagaggttcaattcctcttctta

SEQ ID NO: 16884 - DNA, 28 bp, synthetic construct
  misc_feature 1..28: note = Probe
  source 1..28: mol_type = other DNA
agtcagaggttcaattcctcttcttaac

SEQ ID NO: 16885 - DNA, 29 bp, synthetic construct
  misc_feature 1..29: note = Probe
  source 1..29: mol_type = other DNA
agtcagaggttcaattcctcttcttaaca

SEQ ID NO: 16886 - DNA, 32 bp, synthetic construct; identical to SEQ ID NO: 3546
  misc_feature 1..32: note = Probe
  source 1..32: mol_type = other DNA

SEQ ID NO: 16887 - DNA, 16 bp, synthetic construct
  misc_feature 1..16: note = Probe
  source 1..16: mol_type = other DNA
agtccgtgcgagaata

SEQ ID NO: 16888 - DNA, 17 bp, synthetic construct
  misc_feature 1..17: note = Probe
  source 1..17: mol_type = other DNA
agtccgtgcgagaataa

SEQ ID NO: 16889 - DNA, 19 bp, synthetic construct
  misc_feature 1..19: note = Probe
  source 1..19: mol_type = other DNA
agtccgtgcgagaataatg

SEQ ID NO: 16890 - DNA, 20 bp, synthetic construct
  misc_feature 1..20: note = Probe
  source 1..20: mol_type = other DNA
agtcggtagagcatcagact

SEQ ID NO: 16891 - DNA, 23 bp, synthetic construct
  misc_feature 1..23: note = Probe
  source 1..23: mol_type = other DNA
agtcggtagagcatcagactttt

SEQ ID NO: 16892 - DNA, 16 bp, synthetic construct
  misc_feature 1..16: note = Probe
  source 1..16: mol_type = other DNA
agtcggtagagcatga

SEQ ID NO: 16893 - DNA, 17 bp, synthetic construct
  misc_feature 1..17: note = Probe
  source 1..17: mol_type = other DNA
agtcggtagagcatgag

SEQ ID NO: 16894 - DNA, 18 bp, synthetic construct
  misc_feature 1..18: note = Probe
  source 1..18: mol_type = other DNA
agtcggtagagcatgaga

SEQ ID NO: 16895 - DNA, 19 bp, synthetic construct
  misc_feature 1..19: note = Probe
  source 1..19: mol_type = other DNA
agtcggtagagcatgagac

SEQ ID NO: 16896 - DNA, 20 bp, synthetic construct
  misc_feature 1..20: note = Probe
  source 1..20: mol_type = other DNA
agtcggtagagcatgagact

SEQ ID NO: 16897 - DNA, 36 bp, synthetic construct; identical to SEQ ID NO: 346
  misc_feature 1..36: note = Probe
  source 1..36: mol_type = other DNA

SEQ ID NO: 16898 - DNA, 41 bp, synthetic construct; identical to SEQ ID NO: 3557
  misc_feature 1..41: note = Probe
  source 1..41: mol_type = other DNA

SEQ ID NO: 16899 - DNA, 17 bp, synthetic construct
  misc_feature 1..17: note = Probe
  source 1..17: mol_type = other DNA
agtcggtagagcatggg

SEQ ID NO: 16900 - DNA, 20 bp, synthetic construct
  misc_feature 1..20: note = Probe
  source 1..20: mol_type = other DNA
agtcggtagagcatgggact

SEQ ID NO: 16901 - DNA, 36 bp, synthetic construct; identical to SEQ ID NO: 354
  misc_feature 1..36: note = Probe
  source 1..36: mol_type = other DNA

SEQ ID NO: 16902 - DNA, 41 bp, synthetic construct
  misc_feature 1..41: note = Probe
  source 1..41: mol_type = other DNA
agtcggtagagcatgggactcttaatcccagggtcgtgggt

SEQ ID NO: 16903 - DNA, 26 bp, synthetic construct
  misc_feature 1..26: note = Probe
  source 1..26: mol_type = other DNA
agtctcataatctgaaggtcctgagt

SEQ ID NO: 16904 - DNA, 28 bp, synthetic construct
  misc_feature 1..28: note = Probe
  source 1..28: mol_type = other DNA
agtctcataatctgaaggtcctgagttc

SEQ ID NO: 16905 - DNA, 21 bp, synthetic construct
  misc_feature 1..21: note = Probe
  source 1..21: mol_type = other DNA
agtctcataatctgaaggtcg

SEQ ID NO: 16906 - DNA, 23 bp, synthetic construct
  misc_feature 1..23: note = Probe
  source 1..23: mol_type = other DNA
agtctcataatctgaaggtcgtg

SEQ ID NO: 16907 - DNA, 24 bp, synthetic construct
  misc_feature 1..24: note = Probe
  source 1..24: mol_type = other DNA
agtctcataatctgaaggtcgtga

SEQ ID NO: 16908 - DNA, 28 bp, synthetic construct
  misc_feature 1..28: note = Probe
  source 1..28: mol_type = other DNA
agtctcataatctgaaggtcgtgagttc

SEQ ID NO: 16909 - DNA, 21 bp, synthetic construct
  misc_feature 1..21: note = Probe
  source 1..21: mol_type = other DNA
agtctcttcgggggcgtgggt

SEQ ID NO: 16910 - DNA, 22 bp, synthetic construct
  misc_feature 1..22: note = Probe
  source 1..22: mol_type = other DNA
agtctcttcgggggcgtgggtt

SEQ ID NO: 16911 - DNA, 24 bp, synthetic construct
  misc_feature 1..24: note = Probe
  source 1..24: mol_type = other DNA
agtctcttcgggggcgtgggttcg

SEQ ID NO: 16912 - DNA, 43 bp, synthetic construct
  misc_feature 1..43: note = Probe
  source 1..43: mol_type = other DNA
agtctcttcgggggcgtgggttcgaatcccaccgctgccaggt

SEQ ID NO: 16913 - DNA, 43 bp, synthetic construct; identical to SEQ ID NO: 3569
  misc_feature 1..43: note = Probe
  source 1..43: mol_type = other DNA

SEQ ID NO: 16914 - DNA, 18 bp, synthetic construct
  misc_feature 1..18: note = Probe
  source 1..18: mol_type = other DNA
agtgcacttggacgaacc

SEQ ID NO: 16915 - DNA, 28 bp, synthetic construct
  misc_feature 1..28: note = Probe
  source 1..28: mol_type = other DNA
agtgcccggctagctcagtcggtagagc

SEQ ID NO: 16916 - DNA, 29 bp, synthetic construct
  misc_feature 1..29: note = Probe
  source 1..29: mol_type = other DNA
agtgcccggctagctcagtcggtagagca

SEQ ID NO: 16917 - DNA, 34 bp, synthetic construct
  misc_feature 1..34: note = Probe
  source 1..34: mol_type = other DNA
agtgcccggctagctcagtcggtagagcatgaga

SEQ ID NO: 16918 - DNA, 36 bp, synthetic construct
  misc_feature 1..36: note = Probe
  source 1..36: mol_type = other DNA
agtgcccggctagctcagtcggtagagcatgagact

SEQ ID NO: 16919 - DNA, 40 bp, synthetic construct
  misc_feature 1..40: note = Probe
  source 1..40: mol_type = other DNA
agtgcccggctagctcagtcggtagagcatgagactctta

SEQ ID NO: 16920 - DNA, 30 bp, synthetic construct
  misc_feature 1..30: note = Probe
  source 1..30: mol_type = other DNA
agtggcgcaatcggttagcgcgcggtactt

SEQ ID NO: 16921 - DNA, 31 bp, synthetic construct
  misc_feature 1..31: note = Probe
  source 1..31: mol_type = other DNA
agtggcgcaatcggttagcgcgcggtactta

SEQ ID NO: 16922 - DNA, 32 bp, synthetic construct
  misc_feature 1..32: note = Probe
  source 1..32: mol_type = other DNA
agtggcgcaatcggttagcgcgcggtacttat

SEQ ID NO: 16923 - DNA, 19 bp, synthetic construct
  misc_feature 1..19: note = Probe
  source 1..19: mol_type = other DNA
agtggctaggattcggcgc

SEQ ID NO: 16924 - DNA, 24 bp, synthetic construct
  misc_feature 1..24: note = Probe
  source 1..24: mol_type = other DNA
agtggctaggattcggcgctttca

SEQ ID NO: 16925 - DNA, 24 bp, synthetic construct
  misc_feature 1..24: note = Probe
  source 1..24: mol_type = other DNA
agtggggttttgcagtccttagct

SEQ ID NO: 16926 - DNA, 33 bp, synthetic construct
  misc_feature 1..33: note = Probe
  source 1..33: mol_type = other DNA
agtgggtttccgtagtgtagtggttatcacgtt

SEQ ID NO: 16927 - DNA, 36 bp, synthetic construct
  misc_feature 1..36: note = Probe
  source 1..36: mol_type = other DNA
agtggtaagcatagctgccttccaagcagttgaccc

SEQ ID NO: 16928 - DNA, 40 bp, synthetic construct
  misc_feature 1..40: note = Probe
  source 1..40: mol_type = other DNA
agtggtaagcatagctgccttccaagcagttgacccgggt

SEQ ID NO: 16929 - DNA, 16 bp, synthetic construct
  misc_feature 1..16: note = Probe
  source 1..16: mol_type = other DNA
agtggtagaattctcg

SEQ ID NO: 16930 - DNA, 17 bp, synthetic construct
  misc_feature 1..17: note = Probe
  source 1..17: mol_type = other DNA
agtggtagaattctcgc

SEQ ID NO: 16931 - DNA, 18 bp, synthetic construct
  misc_feature 1..18: note = Probe
  source 1..18: mol_type = other DNA
agtggtagaattctcgcc

SEQ ID NO: 16932 - DNA, 19 bp, synthetic construct
  misc_feature 1..19: note = Probe
  source 1..19: mol_type = other DNA
agtggtagaattctcgcct

SEQ ID NO: 16933 - DNA, 20 bp, synthetic construct
  misc_feature 1..20: note = Probe
  source 1..20: mol_type = other DNA
agtggtagaattctcgcctg

SEQ ID NO: 16934 - DNA, 21 bp, synthetic construct
  misc_feature 1..21: note = Probe
  source 1..21: mol_type = other DNA
agtggtagaattctcgcctgc

SEQ ID NO: 16935 - DNA, 22 bp, synthetic construct
  misc_feature 1..22: note = Probe
  source 1..22: mol_type = other DNA
agtggtagaattctcgcctgcc

SEQ ID NO: 16936 - DNA, 17 bp, synthetic construct
  misc_feature 1..17: note = Probe
  source 1..17: mol_type = other DNA
agtggtagagcgcatgc

SEQ ID NO: 16937 - DNA, 17 bp, synthetic construct
  misc_feature 1..17: note = Probe
  source 1..17: mol_type = other DNA
agtggtatcatgcaaga

SEQ ID NO: 16938 - DNA, 36 bp, synthetic construct
  misc_feature 1..36: note = Probe
  source 1..36: mol_type = other DNA
agtggtatgattctcgctttgggtgcgagaggtccc

SEQ ID NO: 16939 - DNA, 22 bp, synthetic construct
  misc_feature 1..22: note = Probe
  source 1..22: mol_type = other DNA
agtggtgagcatagctgccttc

SEQ ID NO: 16940 - DNA, 23 bp, synthetic construct
  misc_feature 1..23: note = Probe
  source 1..23: mol_type = other DNA
agtggtgagcatagctgccttcc

SEQ ID NO: 16941 - DNA, 24 bp, synthetic construct
  misc_feature 1..24: note = Probe
  source 1..24: mol_type = other DNA
agtggtgagcatagctgccttcca

SEQ ID NO: 16942 - DNA, 36 bp, synthetic construct
  misc_feature 1..36: note = Probe
  source 1..36: mol_type = other DNA
agtggtgagcatagctgccttccaagcagttgaccc

SEQ ID NO: 16943 - DNA, 40 bp, synthetic construct
  misc_feature 1..40: note = Probe
  source 1..40: mol_type = other DNA
agtggtgagcatagctgccttccaagcagttgacccgggt

SEQ ID NO: 16944 - DNA, 16 bp, synthetic construct
  misc_feature 1..16: note = Probe
  source 1..16: mol_type = other DNA
agtggtgagtatcccc

SEQ ID NO: 16945 - DNA, 17 bp, synthetic construct
  misc_feature 1..17: note = Probe
  source 1..17: mol_type = other DNA
agtggtgagtatccccg

SEQ ID NO: 16946 - DNA, 18 bp, synthetic construct
  misc_feature 1..18: note = Probe
  source 1..18: mol_type = other DNA
agtggtgagtatccccgc

SEQ ID NO: 16947 - DNA, 27 bp, synthetic construct
  misc_feature 1..27: note = Probe
  source 1..27: mol_type = other DNA
agtggtgagtatccccgcctgtcacgc

SEQ ID NO: 16948 - DNA, 35 bp, synthetic construct
  misc_feature 1..35: note = Probe
  source 1..35: mol_type = other DNA
agtggtgagtatccccgcctgtcacgcgggagacc

SEQ ID NO: 16949 - DNA, 38 bp, synthetic construct
  misc_feature 1..38: note = Probe
  source 1..38: mol_type = other DNA
agtggttagcatagctgccttccaagcagttgacccgg

SEQ ID NO: 16950 - DNA, 50 bp, synthetic construct
  misc_feature 1..50: note = Probe
  source 1..50: mol_type = other DNA
agtggttagcatagctgccttccaagcagttgacccgggttcgattcccg

SEQ ID NO: 16951 - DNA, 16 bp, synthetic construct
  misc_feature 1..16: note = Probe
  source 1..16: mol_type = other DNA
agtggttaggattcgg

SEQ ID NO: 16952 - DNA, 17 bp, synthetic construct
  misc_feature 1..17: note = Probe
  source 1..17: mol_type = other DNA
agtggttaggattcggc

SEQ ID NO: 16953 - DNA, 22 bp, synthetic construct
  misc_feature 1..22: note = Probe
  source 1..22: mol_type = other DNA
agtggttaggattcggcgctct

SEQ ID NO: 16954 - DNA, 25 bp, synthetic construct
  misc_feature 1..25: note = Probe
  source 1..25: mol_type = other DNA
agtggttaggattcggcgctctcac

SEQ ID NO: 16955 - DNA, 29 bp, synthetic construct
  misc_feature 1..29: note = Probe
  source 1..29: mol_type = other DNA
agtggttaggattcggcgctctcaccgcc

SEQ ID NO: 16956 - DNA, 31 bp, synthetic construct
  misc_feature 1..31: note = Probe
  source 1..31: mol_type = other DNA
agtggttaggattcggcgctctcaccgccgc

SEQ ID NO: 16957 - DNA, 32 bp, synthetic construct
  misc_feature 1..32: note = Probe
  source 1..32: mol_type = other DNA
agtggttaggattcggcgctctcaccgccgcg

SEQ ID NO: 16958 - DNA, 33 bp, synthetic construct
  misc_feature 1..33: note = Probe
  source 1..33: mol_type = other DNA
agtggttaggattcggcgctctcaccgccgcgg

SEQ ID NO: 16959 - DNA, 16 bp, synthetic construct
  misc_feature 1..16: note = Probe
  source 1..16: mol_type = other DNA
agtggttagtactctg

SEQ ID NO: 16960 - DNA, 17 bp, synthetic construct
  misc_feature 1..17: note = Probe
  source 1..17: mol_type = other DNA
agtggttagtactctgc

SEQ ID NO: 16961 - DNA, 20 bp, synthetic construct
  misc_feature 1..20: note = Probe
  source 1..20: mol_type = other DNA
agtggttagtactctgcgtt

SEQ ID NO: 16962 - DNA, 16 bp, synthetic construct
  misc_feature 1..16: note = Probe
  source 1..16: mol_type = other DNA
agtggttagtatcccc

SEQ ID NO: 16963 - DNA, 25 bp, synthetic construct
  misc_feature 1..25: note = Probe
  source 1..25: mol_type = other DNA
agtggttagtatccccgcctgtcac

SEQ ID NO: 16964 - DNA, 36 bp, synthetic construct
  misc_feature 1..36: note = Probe
  source 1..36: mol_type = other DNA
agtggttagtatccccgcctgtcacgcgggagaccg

SEQ ID NO: 16965 - DNA, 41 bp, synthetic construct
  misc_feature 1..41: note = Probe
  source 1..41: mol_type = other DNA
agtggttatcacgttcgcctaacacgcgaaaggtccccggt

SEQ ID NO: 16966 - DNA, 25 bp, synthetic construct
  misc_feature 1..25: note = Probe
  source 1..25: mol_type = other DNA
agtggttatcacgttcgcctcacac

SEQ ID NO: 16967 - DNA, 27 bp, synthetic construct
  misc_feature 1..27: note = Probe
  source 1..27: mol_type = other DNA
agtggttatcacgttcgcctcacacgc

SEQ ID NO: 16968 - DNA, 41 bp, synthetic construct
  misc_feature 1..41: note = Probe
  source 1..41: mol_type = other DNA
agtggttatcacgttcgcctcacacgcgaaaggtccccggt

SEQ ID NO: 16969 - DNA, 20 bp, synthetic construct
  misc_feature 1..20: note = Probe
  source 1..20: mol_type = other DNA
agtgtagtggttatcacgtt

SEQ ID NO: 16970 - DNA, 23 bp, synthetic construct
  misc_feature 1..23: note = Probe
  source 1..23: mol_type = other DNA
agtgtagtggttatcacgttcgc

SEQ ID NO: 16971 - DNA, 24 bp, synthetic construct
  misc_feature 1..24: note = Probe
  source 1..24: mol_type = other DNA
agtgtagtggttatcacgttcgcc

SEQ ID NO: 16972 - DNA, 27 bp, synthetic construct
  misc_feature 1..27: note = Probe
  source 1..27: mol_type = other DNA
agtgtagtggttatcacgttcgcctca

SEQ ID NO: 16973 - DNA, 35 bp, synthetic construct
  misc_feature 1..35: note = Probe
  source 1..35: mol_type = other DNA
agtgtcgtctctgtggcgcaatcggttagcgcgtt

SEQ ID NO: 16974 - DNA, 20 bp, synthetic construct
  misc_feature 1..20: note = Probe
  source 1..20: mol_type = other DNA
agtgtgtcaggatggccgag

SEQ ID NO: 16975 - DNA, 21 bp, synthetic construct
  misc_feature 1..21: note = Probe
  source 1..21: mol_type = other DNA
agtgtgtcaggatggccgagt

SEQ ID NO: 16976 - DNA, 22 bp, synthetic construct
  misc_feature 1..22: note = Probe
  source 1..22: mol_type = other DNA
agtgtgtcaggatggccgagtg

SEQ ID NO: 16977 - DNA, 26 bp, synthetic construct
  misc_feature 1..26: note = Probe
  source 1..26: mol_type = other DNA
agtgtgtcaggatggccgagtggtct

SEQ ID NO: 16978 - DNA, 27 bp, synthetic construct
  misc_feature 1..27: note = Probe
  source 1..27: mol_type = other DNA
agtgtgtcaggatggccgagtggtcta

SEQ ID NO: 16979 - DNA, 30 bp, synthetic construct
  misc_feature 1..30: note = Probe
  source 1..30: mol_type = other DNA
agtgtgtcaggatggccgagtggtctaagg

SEQ ID NO: 16980 - DNA, 34 bp, synthetic construct
  misc_feature 1..34: note = Probe
  source 1..34: mol_type = other DNA
agtgtgtcaggatggccgagtggtctaaggcgcc

SEQ ID NO: 16981 - DNA, 35 bp, synthetic construct
  misc_feature 1..35: note = Probe
  source 1..35: mol_type = other DNA
agtgtgtcaggatggccgagtggtctaaggcgcca

SEQ ID NO: 16982 - DNA, 36 bp, synthetic construct
  misc_feature 1..36: note = Probe
  source 1..36: mol_type = other DNA
agtgtgtcaggatggccgagtggtctaaggcgccag

SEQ ID NO: 16983 - DNA, 37 bp, synthetic construct
  misc_feature 1..37: note = Probe
  source 1..37: mol_type = other DNA
agtgtgtcaggatggccgagtggtctaaggcgccaga

SEQ ID NO: 16984 - DNA, 38 bp, synthetic construct
  misc_feature 1..38: note = Probe
  source 1..38: mol_type = other DNA
agtgtgtcaggatggccgagtggtctaaggcgccagac

SEQ ID NO: 16985 - DNA, 39 bp, synthetic construct
  misc_feature 1..39: note = Probe
  source 1..39: mol_type = other DNA
agtgtgtcaggatggccgagtggtctaaggcgccagact

SEQ ID NO: 16986 - DNA, 40 bp, synthetic construct
  misc_feature 1..40: note = Probe
  source 1..40: mol_type = other DNA
agtgtgtcaggatggccgagtggtctaaggcgccagactc

SEQ ID NO: 16987 - DNA, 41 bp, synthetic construct
  misc_feature 1..41: note = Probe
  source 1..41: mol_type = other DNA
agtgtgtcaggatggccgagtggtctaaggcgccagactca

SEQ ID NO: 16988 - DNA, 42 bp, synthetic construct
  misc_feature 1..42: note = Probe
  source 1..42: mol_type = other DNA
agtgtgtcaggatggccgagtggtctaaggcgccagactcaa

SEQ ID NO: 16989 - DNA, 44 bp, synthetic construct
  misc_feature 1..44: note = Probe
  source 1..44: mol_type = other DNA
agtgtgtcaggatggccgagtggtctaaggcgccagactcaagc

SEQ ID NO: 16990 - DNA, 45 bp, synthetic construct
  misc_feature 1..45: note = Probe
  source 1..45: mol_type = other DNA
agtgtgtcaggatggccgagtggtctaaggcgccagactcaagct

SEQ ID NO: 16991 - DNA, 46 bp, synthetic construct
  misc_feature 1..46: note = Probe
  source 1..46: mol_type = other DNA
agtgtgtcaggatggccgagtggtctaaggcgccagactcaagcta

SEQ ID NO: 16992 - DNA, 25 bp, synthetic construct
  misc_feature 1..25: note = Probe
  source 1..25: mol_type = other DNA
agtgtttgtgggtttaagtcccatt

SEQ ID NO: 16993 - DNA, 27 bp, synthetic construct
  misc_feature 1..27: note = Probe
  source 1..27: mol_type = other DNA
agtgtttgtgggtttaagtcccattgg

SEQ ID NO: 16994 - DNA, 28 bp, synthetic construct
  misc_feature 1..28: note = Probe
  source 1..28: mol_type = other DNA
agtgtttgtgggtttaagtcccattggt

SEQ ID NO: 16995 - DNA, 32 bp, synthetic construct
  misc_feature 1..32: note = Probe
  source 1..32: mol_type = other DNA
agtgtttgtgggtttaagtcccattggtctag

SEQ ID NO: 16996 - DNA, 33 bp, synthetic construct
  misc_feature 1..33: note = Probe
  source 1..33: mol_type = other DNA
agtgtttgtgggtttaagtcccattggtctagt

SEQ ID NO: 16997 - DNA, 34 bp, synthetic construct; identical to SEQ ID NO: 3601
  misc_feature 1..34: note = Probe
  source 1..34: mol_type = other DNA

SEQ ID NO: 16998 - DNA, 24 bp, synthetic construct
  misc_feature 1..24: note = Probe
  source 1..24: mol_type = other DNA
agttaaagactttttctctgattt

SEQ ID NO: 16999 - DNA, 20 bp, synthetic construct
  misc_feature 1..20: note = Probe
  source 1..20: mol_type = other DNA
agttaaagattaagagaacc

SEQ ID NO: 17000 - DNA, 21 bp, synthetic construct
  misc_feature 1..21: note = Probe
  source 1..21: mol_type = other DNA
agttaaagattaagagaacca

SEQ ID NO: 17001 - DNA, 37 bp, synthetic construct; identical to SEQ ID NO: 3604
  misc_feature 1..37: note = Probe
  source 1..37: mol_type = other DNA

SEQ ID NO: 17002 - DNA, 38 bp, synthetic construct; identical to SEQ ID NO: 3605
  misc_feature 1..38: note = Probe
  source 1..38: mol_type = other DNA

SEQ ID NO: 17003 - DNA, 39 bp, synthetic construct; identical to SEQ ID NO: 3606
  misc_feature 1..39: note = Probe
  source 1..39: mol_type = other DNA

SEQ ID NO: 17004 - DNA, 40 bp, synthetic construct; identical to SEQ ID NO: 3607
  misc_feature 1..40: note = Probe
  source 1..40: mol_type = other DNA

SEQ ID NO: 17005 - DNA, 41 bp, synthetic construct; identical to SEQ ID NO: 3608
  misc_feature 1..41: note = Probe
  source 1..41: mol_type = other DNA

SEQ ID NO: 17006 - DNA, 42 bp, synthetic construct
  misc_feature 1..42: note = Probe
  source 1..42: mol_type = other DNA
agttaaagattaagagaaccaacacctctttacagtgaaatg

SEQ ID NO: 17007 - DNA, 43 bp, synthetic construct; identical to SEQ ID NO: 3609
  misc_feature 1..43: note = Probe
  source 1..43: mol_type = other DNA

SEQ ID NO: 17008 - DNA, 44 bp, synthetic construct
  misc_feature 1..44: note = Probe
  source 1..44: mol_type = other DNA
agttaaagattaagagaaccaacacctctttacagtgaaatgcc

SEQ ID NO: 17009 - DNA, 50 bp, synthetic construct; identical to SEQ ID NO: 3610
  misc_feature 1..50: note = Probe
  source 1..50: mol_type = other DNA

SEQ ID NO: 17010 - DNA, 28 bp, synthetic construct
  misc_feature 1..28: note = Probe
  source 1..28: mol_type = other DNA
agttaaattataggctaaatcctatata

SEQ ID NO: 17011 - DNA, 25 bp, synthetic construct
  misc_feature 1..25: note = Probe
  source 1..25: mol_type = other DNA
agttcgatcctcacacggggcacaa

SEQ ID NO: 17012 - DNA, 39 bp, synthetic construct
  misc_feature 1..39: note = Probe
  source 1..39: mol_type = other DNA
agttctggctcgttggtctagtggtatgattctcgcttt

SEQ ID NO: 17013 - DNA, 28 bp, synthetic construct
  misc_feature 1..28: note = Probe
  source 1..28: mol_type = other DNA
agttgatgcagagtggggttttgcagtc

SEQ ID NO: 17014 - DNA, 29 bp, synthetic construct
  misc_feature 1..29: note = Probe
  source 1..29: mol_type = other DNA
agttgatgcagagtggggttttgcagtcc

SEQ ID NO: 17015 - DNA, 33 bp, synthetic construct; identical to SEQ ID NO: 3615
  misc_feature 1..33: note = Probe
  source 1..33: mol_type = other DNA

SEQ ID NO: 17016 - DNA, 34 bp, synthetic construct
  misc_feature 1..34: note = Probe
  source 1..34: mol_type = other DNA
agttgatgcagagtggggttttgcagtccttagc

SEQ ID NO: 17017 - DNA, 35 bp, synthetic construct; identical to SEQ ID NO: 3616
  misc_feature 1..35: note = Probe
  source 1..35: mol_type = other DNA

SEQ ID NO: 17018 - DNA, 44 bp, synthetic construct; identical to SEQ ID NO: 3617
  misc_feature 1..44: note = Probe
  source 1..44: mol_type = other DNA

SEQ ID NO: 17019 - DNA, 34 bp, synthetic construct; identical to SEQ ID NO: 3619
  misc_feature 1..34: note = Probe
  source 1..34: mol_type = other DNA

SEQ ID NO: 17020 - DNA, 37 bp, synthetic construct; identical to SEQ ID NO: 3621
  misc_feature 1..37: note = Probe
  source 1..37: mol_type = other DNA

SEQ ID NO: 17021 - DNA, 31 bp, synthetic construct
  misc_feature 1..31: note = Probe
  source 1..31: mol_type = other DNA
agttttccttcctgtcccgtacggtttttct

SEQ ID NO: 17022 - DNA, 27 bp, synthetic construct
  misc_feature 1..27: note = Probe
  source 1..27: mol_type = other DNA
agttttgacaacattcaaaaaagagta

SEQ ID NO: 17023 - DNA, 27 bp, synthetic construct
  misc_feature 1..27: note = Probe
  source 1..27: mol_type = other DNA
ataaacttcgccttaattttaataatc

SEQ ID NO: 17024 - DNA, 30 bp, synthetic construct; identical to SEQ ID NO: 3625
  misc_feature 1..30: note = Probe
  source 1..30: mol_type = other DNA

SEQ ID NO: 17025 - DNA, 19 bp, synthetic construct
  misc_feature 1..19: note = Probe
  source 1..19: mol_type = other DNA
ataacagctatccattggt

SEQ ID NO: 17026 - DNA, 16 bp, synthetic construct
  misc_feature 1..16: note = Probe
  source 1..16: mol_type = other DNA
ataaccatgcacacta

SEQ ID NO: 17027 - DNA, 17 bp, synthetic construct
  misc_feature 1..17: note = Probe
  source 1..17: mol_type = other DNA
ataaccatgcacactac

SEQ ID NO: 17028 - DNA, 18 bp, synthetic construct
  misc_feature 1..18: note = Probe
  source 1..18: mol_type = other DNA
ataaccatgcacactact

SEQ ID NO: 17029 - DNA, 19 bp, synthetic construct
  misc_feature 1..19: note = Probe
  source 1..19: mol_type = other DNA
ataaccatgcacactacta

SEQ ID NO: 17030 - DNA, 20 bp, synthetic construct
  misc_feature 1..20: note = Probe
  source 1..20: mol_type = other DNA
ataaccatgcacactactat

SEQ ID NO: 17031 - DNA, 21 bp, synthetic construct
  misc_feature 1..21: note = Probe
  source 1..21: mol_type = other DNA
ataaccatgcacactactata

SEQ ID NO: 17032 - DNA, 23 bp, synthetic construct
  misc_feature 1..23: note = Probe
  source 1..23: mol_type = other DNA
ataaccatgcacactactataac

SEQ ID NO: 17033 - DNA, 24 bp, synthetic construct
  misc_feature 1..24: note = Probe
  source 1..24: mol_type = other DNA
ataaccatgcacactactataacc

SEQ ID NO: 17034 - DNA, 25 bp, synthetic construct
  misc_feature 1..25: note = Probe
  source 1..25: mol_type = other DNA
ataaccatgcacactactataacca

SEQ ID NO: 17035 - DNA, 26 bp, synthetic construct
  misc_feature 1..26: note = Probe
  source 1..26: mol_type = other DNA
ataaccatgcacactactataaccac

SEQ ID NO: 17036 - DNA, 27 bp, synthetic construct
  misc_feature 1..27: note = Probe
  source 1..27: mol_type = other DNA
ataaccatgcacactactataaccacc

SEQ ID NO: 17037 - DNA, 28 bp, synthetic construct
  misc_feature 1..28: note = Probe
  source 1..28: mol_type = other DNA
ataaccatgcacactactataaccaccc

SEQ ID NO: 17038 - DNA, 29 bp, synthetic construct
  misc_feature 1..29: note = Probe
  source 1..29: mol_type = other DNA
ataaccatgcacactactataaccaccct

SEQ ID NO: 17039 - DNA, 30 bp, synthetic construct; identical to SEQ ID NO: 3631
  misc_feature 1..30: note = Probe
  source 1..30: mol_type = other DNA

SEQ ID NO: 17040 - DNA, 16 bp, synthetic construct
  misc_feature 1..16: note = Probe
  source 1..16: mol_type = other DNA
ataacccagaggtcga

SEQ ID NO: 17041 - DNA, 42 bp, synthetic construct; identical to SEQ ID NO: 3634
  misc_feature 1..42: note = Probe
  source 1..42: mol_type = other DNA

SEQ ID NO: 17042 - DNA, 50 bp, synthetic construct
  misc_feature 1..50: note = Probe
  source 1..50: mol_type = other DNA
ataacccagaggtcgatggatcgaaaccatcctctgctaggtgcctgttt

SEQ ID NO: 17043 - DNA, 41 bp, synthetic construct
  misc_feature 1..41: note = Probe
  source 1..41: mol_type = other DNA
ataacccagaggtcgatggatcgaaaccatcctctgctatc

SEQ ID NO: 17044 - DNA, 42 bp, synthetic construct
  misc_feature 1..42: note = Probe
  source 1..42: mol_type = other DNA
ataacgccaaggtcgcgggttcgatccccgtacgggccacag

SEQ ID NO: 17045 - DNA, 41 bp, synthetic construct
  misc_feature 1..41: note = Probe
  source 1..41: mol_type = other DNA
ataacgccaaggtcgcgggttcgatccccgtacgggccacg

SEQ ID NO: 17046 - DNA, 42 bp, synthetic construct
  misc_feature 1..42: note = Probe
  source 1..42: mol_type = other DNA
ataacgccaaggtcgcgggttcgatccccgtacgggccacga

SEQ ID NO: 17047 - DNA, 42 bp, synthetic construct
  misc_feature 1..42: note = Probe
  source 1..42: mol_type = other DNA
ataacgccaaggtcgcgggttcgatccccgtacgggccactg

SEQ ID NO: 17048 - DNA, 49 bp, synthetic construct
  misc_feature 1..49: note = Probe
  source 1..49: mol_type = other DNA
ataacgccaaggtcgcgggttcgatccccgtacgggccactggatgcca

SEQ ID NO: 17049 - DNA, 50 bp, synthetic construct
  misc_feature 1..50: note = Probe
  source 1..50: mol_type = other DNA
ataacgccaaggtcgcgggttcgatccccgtacgggccactggatgccat

SEQ ID NO: 17050 - DNA, 41 bp, synthetic construct
  misc_feature 1..41: note = Probe
  source 1..41: mol_type = other DNA
ataacgccaaggtcgcgggttcgatccccgtacgggccagg

SEQ ID NO: 17051 - DNA, 42 bp, synthetic construct
  misc_feature 1..42: note = Probe
  source 1..42: mol_type = other DNA
ataacgccaaggtcgcgggttcgatccccgtacgggccagga

SEQ ID NO: 17052 - DNA, 42 bp, synthetic construct
  misc_feature 1..42: note = Probe
  source 1..42: mol_type = other DNA
ataacgccaaggtcgcgggttcgatccccgtacgggccaggc

SEQ ID NO: 17053 - DNA, 50 bp, synthetic construct
  misc_feature 1..50: note = Probe
  source 1..50: mol_type = other DNA
ataacgccaaggtcgcgggttcgatccccgtacgggccaggctaactttt

SEQ ID NO: 17054 - DNA, 42 bp, synthetic construct
  misc_feature 1..42: note = Probe
  source 1..42: mol_type = other DNA
ataacgccaaggtcgcgggttcgatccccgtactggccacgt

SEQ ID NO: 17055 - DNA, 29 bp, synthetic construct
  misc_feature 1..29: note = Probe
  source 1..29: mol_type = other DNA
ataagcattggtggttcagtggtagaatt

SEQ ID NO: 17056 - DNA, 30 bp, synthetic construct
  misc_feature 1..30: note = Probe
  source 1..30: mol_type = other DNA
ataagcattggtggttcagtggtagaattc

SEQ ID NO: 17057 - DNA, 31 bp, synthetic construct
  misc_feature 1..31: note = Probe
  source 1..31: mol_type = other DNA
ataagcattggtggttcagtggtagaattct

SEQ ID NO: 17058 - DNA, 33 bp, synthetic construct
  misc_feature 1..33: note = Probe
  source 1..33: mol_type = other DNA
ataagcattggtggttcagtggtagaattctcg

SEQ ID NO: 17059 - DNA, 35 bp, synthetic construct
  misc_feature 1..35: note = Probe
  source 1..35: mol_type = other DNA
ataagcattggtggttcagtggtagaattctcgcc

SEQ ID NO: 17060 - DNA, 36 bp, synthetic construct
  misc_feature 1..36: note = Probe
  source 1..36: mol_type = other DNA
ataagcattggtggttcagtggtagaattctcgcct

SEQ ID NO: 17061 - DNA, 37 bp, synthetic construct
  misc_feature 1..37: note = Probe
  source 1..37: mol_type = other DNA
ataagcattggtggttcagtggtagaattctcgcctg

SEQ ID NO: 17062 - DNA, 38 bp, synthetic construct
  misc_feature 1..38: note = Probe
  source 1..38: mol_type = other DNA
ataagcattggtggttcagtggtagaattctcgcctgc

SEQ ID NO: 17063 - DNA, 39 bp, synthetic construct
  misc_feature 1..39: note = Probe
  source 1..39: mol_type = other DNA
ataagcattggtggttcagtggtagaattctcgcctgcc

SEQ ID NO: 17064 - DNA, 16 bp, synthetic construct
  misc_feature 1..16: note = Probe
  source 1..16: mol_type = other DNA
ataagctatcgggccc

SEQ ID NO: 17065 - DNA, 17 bp, synthetic construct
  misc_feature 1..17: note = Probe
  source 1..17: mol_type = other DNA
ataagctatcgggccca

SEQ ID NO: 17066 - DNA, 18 bp, synthetic construct
  misc_feature 1..18: note = Probe
  source 1..18: mol_type = other DNA
ataagctatcgggcccat

SEQ ID NO: 17067 - DNA, 19 bp, synthetic construct
  misc_feature 1..19: note = Probe
  source 1..19: mol_type = other DNA
ataagctatcgggcccata

SEQ ID NO: 17068 - DNA, 24 bp, synthetic construct
  misc_feature 1..24: note = Probe
  source 1..24: mol_type = other DNA
ataagctatcgggcccataccccg

SEQ ID NO: 17069 - DNA, 25 bp, synthetic construct
  misc_feature 1..25: note = Probe
  source 1..25: mol_type = other DNA
ataagctatcgggcccataccccga

SEQ ID NO: 17070 - DNA, 26 bp, synthetic construct
  misc_feature 1..26: note = Probe
  source 1..26: mol_type = other DNA
ataagctatcgggcccataccccgaa

SEQ ID NO: 17071 - DNA, 27 bp, synthetic construct
  misc_feature 1..27: note = Probe
  source 1..27: mol_type = other DNA
ataagctatcgggcccataccccgaaa

SEQ ID NO: 17072 - DNA, 28 bp, synthetic construct
  misc_feature 1..28: note = Probe
  source 1..28: mol_type = other DNA
ataagctatcgggcccataccccgaaaa

SEQ ID NO: 17073 - DNA, 29 bp, synthetic construct
  misc_feature 1..29: note = Probe
  source 1..29: mol_type = other DNA
ataagctatcgggcccataccccgaaaat

SEQ ID NO: 17074 - DNA, 30 bp, synthetic construct; identical to SEQ ID NO: 3643
  misc_feature 1..30: note = Probe
  source 1..30: mol_type = other DNA

SEQ ID NO: 17075 - DNA, 31 bp, synthetic construct; identical to SEQ ID NO: 3644
  misc_feature 1..31: note = Probe
  source 1..31: mol_type = other DNA

SEQ ID NO: 17076 - DNA, 32 bp, synthetic construct; identical to SEQ ID NO: 3645
  misc_feature 1..32: note = Probe
  source 1..32: mol_type = other DNA

SEQ ID NO: 17077 - DNA, 33 bp, synthetic construct; identical to SEQ ID NO: 3646
  misc_feature 1..33: note = Probe
  source 1..33: mol_type = other DNA

SEQ ID NO: 17078 - DNA, 34 bp, synthetic construct; identical to SEQ ID NO: 3647
  misc_feature 1..34: note = Probe
  source 1..34: mol_type = other DNA

SEQ ID NO: 17079 - DNA, 36 bp, synthetic construct; identical to SEQ ID NO: 3648
  misc_feature 1..36: note = Probe
  source 1..36: mol_type = other DNA

SEQ ID NO: 17080 - DNA, 37 bp, synthetic construct; identical to SEQ ID NO: 3649
  misc_feature 1..37: note = Probe
  source 1..37: mol_type = other DNA

SEQ ID NO: 17081 - DNA, 50 bp, synthetic construct; identical to SEQ ID NO: 3652
  misc_feature 1..50: note = Probe
  source 1..50: mol_type = other DNA

SEQ ID NO: 17082 - DNA, 20 bp, synthetic construct
  misc_feature 1..20: note = Probe
  source 1..20: mol_type = other DNA
ataatcatatttaccaaatg

SEQ ID NO: 17083 - DNA, 20 bp, synthetic construct
  misc_feature 1..20: note = Probe
  source 1..20: mol_type = other DNA
ataatctgaaggtcgtgagt

SEQ ID NO: 17084 - DNA, 31 bp, synthetic construct
  misc_feature 1..31: note = Probe
  source 1..31: mol_type = other DNA
atacaacgatggtttttcatatcattggtcg

SEQ ID NO: 17085 - DNA, 42 bp, synthetic construct
  misc_feature 1..42: note = Probe
  source 1..42: mol_type = other DNA
atacaacgatggtttttcatatcattggtcgtggttgtagtc

SEQ ID NO: 17086 - DNA, 30 bp, synthetic construct
  misc_feature 1..30: note = Probe
  source 1..30: mol_type = other DNA
atacactgaaaatgtttagacgggctcaca

SEQ ID NO: 17087 - DNA, 46 bp, synthetic construct; identical to SEQ ID NO: 3655
  misc_feature 1..46: note = Probe
  source 1..46: mol_type = other DNA

SEQ ID NO: 17088 - DNA, 50 bp, synthetic construct; identical to SEQ ID NO: 3657
  misc_feature 1..50: note = Probe
  source 1..50: mol_type = other DNA

SEQ ID NO: 17089 - DNA, 23 bp, synthetic construct
  misc_feature 1..23: note = Probe
  source 1..23: mol_type = other DNA
atacccacacccacccaagaaca

SEQ ID NO: 17090 - DNA, 29 bp, synthetic construct
  misc_feature 1..29: note = Probe
  source 1..29: mol_type = other DNA
atacccacacccacccaagaacagggttt

SEQ ID NO: 17091 - DNA, 30 bp, synthetic construct; identical to SEQ ID NO: 3660
  misc_feature 1..30: note = Probe
  source 1..30: mol_type = other DNA

SEQ ID NO: 17092 - DNA, 31 bp, synthetic construct; identical to SEQ ID NO: 3661
  misc_feature 1..31: note = Probe
  source 1..31: mol_type = other DNA

SEQ ID NO: 17093 - DNA, 32 bp, synthetic construct; identical to SEQ ID NO: 3662
  misc_feature 1..32: note = Probe
  source 1..32: mol_type = other DNA

SEQ ID NO: 17094 - DNA, 33 bp, synthetic construct; identical to SEQ ID NO: 3663
  misc_feature 1..33: note = Probe
  source 1..33: mol_type = other DNA

SEQ ID NO: 17095 - DNA, 34 bp, synthetic construct
  misc_feature 1..34: note = Probe
  source 1..34: mol_type = other DNA
atacccacacccacccaagaacagggtttgttaa

SEQ ID NO: 17096 - DNA, 36 bp, synthetic construct
  misc_feature 1..36: note = Probe
  source 1..36: mol_type = other DNA
atacccacacccacccaagaacagggtttgttaaga

SEQ ID NO: 17097 - DNA, 39 bp, synthetic construct
  misc_feature 1..39: note = Probe
  source 1..39: mol_type = other DNA
atacccacacccacccaagaacagggtttgttaagatgg

SEQ ID NO: 17098 - DNA, 34 bp, synthetic construct; identical to SEQ ID NO: 3665
  misc_feature 1..34: note = Probe
  source 1..34: mol_type = other DNA

SEQ ID NO: 17099 - DNA, 36 bp, synthetic construct
  misc_feature 1..36: note = Probe
  source 1..36: mol_type = other DNA
ataccccgaaaatgttggttatacccttcccgtact

SEQ ID NO: 17100 - DNA, 40 bp, synthetic construct; identical to SEQ ID NO: 3667
  misc_feature 1..40: note = Probe
  source 1..40: mol_type = other DNA

SEQ ID NO: 17101 - DNA, 17 bp, synthetic construct
  misc_feature 1..17: note = Probe
  source 1..17: mol_type = other DNA
atacccttcccgtacta

SEQ ID NO: 17102 - DNA, 30 bp, synthetic construct
  misc_feature 1..30: note = Probe
  source 1..30: mol_type = other DNA
atagagtaaataataggagcttaaaccccc

SEQ ID NO: 17103 - DNA, 33 bp, synthetic construct; identical to SEQ ID NO: 368
  misc_feature 1..33: note = Probe
  source 1..33: mol_type = other DNA

SEQ ID NO: 17104 - DNA, 34 bp, synthetic construct; identical to SEQ ID NO: 369
  misc_feature 1..34: note = Probe
  source 1..34: mol_type = other DNA

SEQ ID NO: 17105 - DNA, 37 bp, synthetic construct; identical to SEQ ID NO: 3668
  misc_feature 1..37: note = Probe
  source 1..37: mol_type = other DNA

SEQ ID NO: 17106 - DNA, 38 bp, synthetic construct; identical to SEQ ID NO: 370
  misc_feature 1..38: note = Probe
  source 1..38: mol_type = other DNA

SEQ ID NO: 17107 - DNA, 39 bp, synthetic construct; identical to SEQ ID NO: 371
  misc_feature 1..39: note = Probe
  source 1..39: mol_type = other DNA

SEQ ID NO: 17108 - DNA, 40 bp, synthetic construct; identical to SEQ ID NO: 3669
  misc_feature 1..40: note = Probe
  source 1..40: mol_type = other DNA

SEQ ID NO: 17109 - DNA, 41 bp, synthetic construct; identical to SEQ ID NO: 3670
  misc_feature 1..41: note = Probe
  source 1..41: mol_type = other DNA

SEQ ID NO: 17110 - DNA, 42 bp, synthetic construct; identical to SEQ ID NO: 3671
  misc_feature 1..42: note = Probe
  source 1..42: mol_type = other DNA

SEQ ID NO: 17111 - DNA, 43 bp, synthetic construct; identical to SEQ ID NO: 3672
  misc_feature 1..43: note = Probe
  source 1..43: mol_type = other DNA

SEQ ID NO: 17112 - DNA, 25 bp, synthetic construct
  misc_feature 1..25: note = Probe
  source 1..25: mol_type = other DNA
atagctcagtcggtagagcatcaga

SEQ ID NO: 17113 - DNA, 26 bp, synthetic construct
  misc_feature 1..26: note = Probe
  source 1..26: mol_type = other DNA
atagctcagtcggtagagcatcagac

SEQ ID NO: 17114 - DNA, 28 bp, synthetic construct
  misc_feature 1..28: note = Probe
  source 1..28: mol_type = other DNA
atagctcagtcggtagagcatcagactt

SEQ ID NO: 17115 - DNA, 25 bp, synthetic construct
  misc_feature 1..25: note = Probe
  source 1..25: mol_type = other DNA
atagctcagttggtagagcggagga

SEQ ID NO: 17116 - DNA, 16 bp, synthetic construct
  misc_feature 1..16: note = Probe
  source 1..16: mol_type = other DNA
ataggagcttaaaccc

SEQ ID NO: 17117 - DNA, 17 bp, synthetic construct
  misc_feature 1..17: note = Probe
  source 1..17: mol_type = other DNA
ataggagcttaaacccc

SEQ ID NO: 17118 - DNA, 31 bp, synthetic construct
  misc_feature 1..31: note = Probe
  source 1..31: mol_type = other DNA
ataggtggctcgttggtctaggggtatgatt

SEQ ID NO: 17119 - DNA, 16 bp, synthetic construct
  misc_feature 1..16: note = Probe
  source 1..16: mol_type = other DNA
ataggtttggtcctag

SEQ ID NO: 17120 - DNA, 17 bp, synthetic construct
  misc_feature 1..17: note = Probe
  source 1..17: mol_type = other DNA
ataggtttggtcctagc

SEQ ID NO: 17121 - DNA, 18 bp, synthetic construct
  misc_feature 1..18: note = Probe
  source 1..18: mol_type = other DNA
ataggtttggtcctagcc

SEQ ID NO: 17122 - DNA, 19 bp, synthetic construct
  misc_feature 1..19: note = Probe
  source 1..19: mol_type = other DNA
ataggtttggtcctagcct

SEQ ID NO: 17123 - DNA, 20 bp, synthetic construct
  misc_feature 1..20: note = Probe
  source 1..20: mol_type = other DNA
ataggtttggtcctagcctt

SEQ ID NO: 17124 - DNA, 21 bp, synthetic construct
  misc_feature 1..21: note = Probe
  source 1..21: mol_type = other DNA
ataggtttggtcctagccttt

SEQ ID NO: 17125 - DNA, 22 bp, synthetic construct
  misc_feature 1..22: note = Probe
  source 1..22: mol_type = other DNA
ataggtttggtcctagcctttc

SEQ ID NO: 17126 - DNA, 23 bp, synthetic construct
  misc_feature 1..23: note = Probe
  source 1..23: mol_type = other DNA
ataggtttggtcctagcctttct

SEQ ID NO: 17127 - DNA, 24 bp, synthetic construct
  misc_feature 1..24: note = Probe
  source 1..24: mol_type = other DNA
ataggtttggtcctagcctttcta

SEQ ID NO: 17128 - DNA, 26 bp, synthetic construct
  misc_feature 1..26: note = Probe
  source 1..26: mol_type = other DNA
ataggtttggtcctagcctttctatt

SEQ ID NO: 17129 - DNA, 27 bp, synthetic construct
  misc_feature 1..27: note = Probe
  source 1..27: mol_type = other DNA
ataggtttggtcctagcctttctatta

SEQ ID NO: 17130 - DNA, 29 bp, synthetic construct
  misc_feature 1..29: note = Probe
  source 1..29: mol_type = other DNA
ataggtttggtcctagcctttctattagc

SEQ ID NO: 17131 - DNA, 36 bp, synthetic construct
  misc_feature 1..36: note = Probe
  source 1..36: mol_type = other DNA
atagtaccgttaacttccaattaactagttttgaca

SEQ ID NO: 17132 - DNA, 20 bp, synthetic construct
  misc_feature 1..20: note = Probe
  source 1..20: mol_type = other DNA
atagtggtgagtatccccgc

SEQ ID NO: 17133 - DNA, 24 bp, synthetic construct
  misc_feature 1..24: note = Probe
  source 1..24: mol_type = other DNA
atagtggtgagtatccccgcctgt

SEQ ID NO: 17134 - DNA, 39 bp, synthetic construct; identical to SEQ ID NO: 3689
  misc_feature 1..39: note = Probe
  source 1..39: mol_type = other DNA

SEQ ID NO: 17135 - DNA, 23 bp, synthetic construct
  misc_feature 1..23: note = Probe
  source 1..23: mol_type = other DNA
atatcattggtcgtggttgtagt

SEQ ID NO: 17136 - DNA, 24 bp, synthetic construct
  misc_feature 1..24: note = Probe
  source 1..24: mol_type = other DNA
atatcattggtcgtggttgtagtc

SEQ ID NO: 17137 - DNA, 25 bp, synthetic construct
  misc_feature 1..25: note = Probe
  source 1..25: mol_type = other DNA
atatcattggtcgtggttgtagtcc

SEQ ID NO: 17138 - DNA, 28 bp, synthetic construct
  misc_feature 1..28: note = Probe
  source 1..28: mol_type = other DNA
atatcattggtcgtggttgtagtccgtg

SEQ ID NO: 17139 - DNA, 30 bp, synthetic construct; identical to SEQ ID NO: 3694
  misc_feature 1..30: note = Probe
  source 1..30: mol_type = other DNA

SEQ ID NO: 17140 - DNA, 32 bp, synthetic construct
  misc_feature 1..32: note = Probe
  source 1..32: mol_type = other DNA
atatcattggtcgtggttgtagtccgtgcgag

SEQ ID NO: 17141 - DNA, 37 bp, synthetic construct
  misc_feature 1..37: note = Probe
  source 1..37: mol_type = other DNA
atatcattggtcgtggttgtagtccgtgcgagaataa

SEQ ID NO: 17142 - DNA, 38 bp, synthetic construct
  misc_feature 1..38: note = Probe
  source 1..38: mol_type = other DNA
atatcattggtcgtggttgtagtccgtgcgagaataat

SEQ ID NO: 17143 - DNA, 39 bp, synthetic construct; identical to SEQ ID NO: 3695
  misc_feature 1..39: note = Probe
  source 1..39: mol_type = other DNA

SEQ ID NO: 17144 - DNA, 40 bp, synthetic construct
  misc_feature 1..40: note = Probe
  source 1..40: mol_type = other DNA
atatcattggtcgtggttgtagtccgtgcgagaataatga

SEQ ID NO: 17145 - DNA, 29 bp, synthetic construct
  misc_feature 1..29: note = Probe
  source 1..29: mol_type = other DNA
atatccaaccttcagctatagggtggaga

SEQ ID NO: 17146 - DNA, 16 bp, synthetic construct
  misc_feature 1..16: note = Probe
  source 1..16: mol_type = other DNA
atatgtccgcgtgggt

SEQ ID NO: 17147 - DNA, 25 bp, synthetic construct
  misc_feature 1..25: note = Probe
  source 1..25: mol_type = other DNA
atatgtgttttccgtccttactttt

SEQ ID NO: 17148 - DNA, 50 bp, synthetic construct; identical to SEQ ID NO: 3698
  misc_feature 1..50: note = Probe
  source 1..50: mol_type = other DNA

SEQ ID NO: 17149 - DNA, 16 bp, synthetic construct
  misc_feature 1..16: note = Probe
  source 1..16: mol_type = other DNA
atcaagaggtccccgg

SEQ ID NO: 17150 - DNA, 17 bp, synthetic construct
  misc_feature 1..17: note = Probe
  source 1..17: mol_type = other DNA
atcaagaggtccccggt

SEQ ID NO: 17151 - DNA, 19 bp, synthetic construct
  misc_feature 1..19: note = Probe
  source 1..19: mol_type = other DNA
atcaagaggtccccggttc

SEQ ID NO: 17152 - DNA, 39 bp, synthetic construct
  misc_feature 1..39: note = Probe
  source 1..39: mol_type = other DNA
atcaagaggtccccggttcaaatccgggtgccccctctg

SEQ ID NO: 17153 - DNA, 38 bp, synthetic construct
  misc_feature 1..38: note = Probe
  source 1..38: mol_type = other DNA
atcaagaggtccctggttcaaatccgggtgccccctca

SEQ ID NO: 17154 - DNA, 39 bp, synthetic construct; identical to SEQ ID NO: 3700
  misc_feature 1..39: note = Probe
  source 1..39: mol_type = other DNA

SEQ ID NO: 17155 - DNA, 36 bp, synthetic construct
  misc_feature 1..36: note = Probe
  source 1..36: mol_type = other DNA
atcagaagattccaggttcgactcctggctggctcg

SEQ ID NO: 17156 - DNA, 37 bp, synthetic construct; identical to SEQ ID NO: 3702
  misc_feature 1..37: note = Probe
  source 1..37: mol_type = other DNA

SEQ ID NO: 17157 - DNA, 39 bp, synthetic construct; identical to SEQ ID NO: 3703
  misc_feature 1..39: note = Probe
  source 1..39: mol_type = other DNA

SEQ ID NO: 17158 - DNA, 37 bp, synthetic construct; identical to SEQ ID NO: 3704
  misc_feature 1..37: note = Probe
  source 1..37: mol_type = other DNA

SEQ ID NO: 17159 - DNA, 38 bp, synthetic construct; identical to SEQ ID NO: 3705
  misc_feature 1..38: note = Probe
  source 1..38: mol_type = other DNA

SEQ ID NO: 17160 - DNA, 32 bp, synthetic construct
  misc_feature 1..32: note = Probe
  source 1..32: mol_type = other DNA
atcagaagattctaggttcgactcctggctgg

SEQ ID NO: 17161 - DNA, 37 bp, synthetic construct
  misc_feature 1..37: note = Probe
  source 1..37: mol_type = other DNA
atcagaagattctaggttcgactcctggctggctcgc

SEQ ID NO: 17162 - DNA, 38 bp, synthetic construct
  misc_feature 1..38: note = Probe
  source 1..38: mol_type = other DNA
atcagaagattctaggttcgactcctggctggctcgcg

SEQ ID NO: 17163 - DNA, 39 bp, synthetic construct; identical to SEQ ID NO: 3707
  misc_feature 1..39: note = Probe
  source 1..39: mol_type = other DNA

SEQ ID NO: 17164 - DNA, 38 bp, synthetic construct
  misc_feature 1..38: note = Probe
  source 1..38: mol_type = other DNA
atcagaagattctaggttcgactcctggctggctcgct

SEQ ID NO: 17165 - DNA, 33 bp, synthetic construct
  misc_feature 1..33: note = Probe
  source 1..33: mol_type = other DNA
atcagaagattgagggttcgagtcccttcgtgg

SEQ ID NO: 17166 - DNA, 36 bp, synthetic construct
  misc_feature 1..36: note = Probe
  source 1..36: mol_type = other DNA
atcagaagattgagggttcgagtcccttcgtggtcg

SEQ ID NO: 17167 - DNA, 17 bp, synthetic construct
  misc_feature 1..17: note = Probe
  source 1..17: mol_type = other DNA
atcagaagattgcaggt

SEQ ID NO: 17168 - DNA, 39 bp, synthetic construct
  misc_feature 1..39: note = Probe
  source 1..39: mol_type = other DNA
atcagaagattgcaggttcgagtcctgccgcggtcgaag

SEQ ID NO: 17169 - DNA, 39 bp, synthetic construct; identical to SEQ ID NO: 3712
  misc_feature 1..39: note = Probe
  source 1..39: mol_type = other DNA

SEQ ID NO: 17170 - DNA, 39 bp, synthetic construct; identical to SEQ ID NO: 3713
  misc_feature 1..39: note = Probe
  source 1..39: mol_type = other DNA

SEQ ID NO: 17171 - DNA, 36 bp, synthetic construct
  misc_feature 1..36: note = Probe
  source 1..36: mol_type = other DNA
atcagaaggttgcgtgttcaagtcacgtcggggtca

SEQ ID NO: 17172 - DNA, 29 bp, synthetic construct
  misc_feature 1..29: note = Probe
  source 1..29: mol_type = other DNA
atcagagaaaaagtctttaactccaccat

SEQ ID NO: 17173 - DNA, 21 bp, synthetic construct
  misc_feature 1..21: note = Probe
  source 1..21: mol_type = other DNA
atcagccgacgtttgcttttt

SEQ ID NO: 17174 - DNA, 28 bp, synthetic construct
  misc_feature 1..28: note = Probe
  source 1..28: mol_type = other DNA
atcagggcgttggtggtatagtggttag

SEQ ID NO: 17175 - DNA, 29 bp, synthetic construct
  misc_feature 1..29: note = Probe
  source 1..29: mol_type = other DNA
atcagggcgttggtggtatagtggttagc

SEQ ID NO: 17176 - DNA, 30 bp, synthetic construct
  misc_feature 1..30: note = Probe
  source 1..30: mol_type = other DNA
atcagggcgttggtggtatagtggttagca

SEQ ID NO: 17177 - DNA, 32 bp, synthetic construct
  misc_feature 1..32: note = Probe
  source 1..32: mol_type = other DNA
atcagggcgttggtggtatagtggttagcata

SEQ ID NO: 17178 - DNA, 33 bp, synthetic construct
  misc_feature 1..33: note = Probe
  source 1..33: mol_type = other DNA
atcagggcgttggtggtatagtggttagcatag

SEQ ID NO: 17179 - DNA, 36 bp, synthetic construct
  misc_feature 1..36: note = Probe
  source 1..36: mol_type = other DNA
atcagggcgttggtggtatagtggttagcatagctg

SEQ ID NO: 17180 - DNA, 38 bp, synthetic construct
  misc_feature 1..38: note = Probe
  source 1..38: mol_type = other DNA
atcagggcgttggtggtatagtggttagcatagctgcc

SEQ ID NO: 17181 - DNA, 31 bp, synthetic construct
  misc_feature 1..31: note = Probe
  source 1..31: mol_type = other DNA
atcatgcaagattcccattcttgcgacccgg

SEQ ID NO: 17182 - DNA, 23 bp, synthetic construct
  misc_feature 1..23: note = Probe
  source 1..23: mol_type = other DNA
atcattggtcgtggttgtagtcc

SEQ ID NO: 17183 - DNA, 26 bp, synthetic construct
  misc_feature 1..26: note = Probe
  source 1..26: mol_type = other DNA
atcattggtcgtggttgtagtccgtg

SEQ ID NO: 17184 - DNA, 30 bp, synthetic construct; identical to SEQ ID NO: 8552
  misc_feature 1..30: note = Probe
  source 1..30: mol_type = other DNA

SEQ ID NO: 17185 - DNA, 31 bp, synthetic construct
  misc_feature 1..31: note = Probe
  source 1..31: mol_type = other DNA
atcattggtcgtggttgtagtccgtgcgaga

SEQ ID NO: 17186 - DNA, 32 bp, synthetic construct
  misc_feature 1..32: note = Probe
  source 1..32: mol_type = other DNA
atcattggtcgtggttgtagtccgtgcgagaa

SEQ ID NO: 17187 - DNA, 33 bp, synthetic construct
  misc_feature 1..33: note = Probe
  source 1..33: mol_type = other DNA
atcattggtcgtggttgtagtccgtgcgagaat

SEQ ID NO: 17188 - DNA, 37 bp, synthetic construct; identical to SEQ ID NO: 3718
  misc_feature 1..37: note = Probe
  source 1..37: mol_type = other DNA

SEQ ID NO: 17189 - DNA, 27 bp, synthetic construct
  misc_feature 1..27: note = Probe
  source 1..27: mol_type = other DNA
atccaaccttcagctatagggtggaga

SEQ ID NO: 17190 - DNA, 24 bp, synthetic construct
  misc_feature 1..24: note = Probe
  source 1..24: mol_type = other DNA
atccaatggacatatgtccgcgtg

SEQ ID NO: 17191 - DNA, 26 bp, synthetic construct
  misc_feature 1..26: note = Probe
  source 1..26: mol_type = other DNA
atccaatggggtctccccgcgcaggt

SEQ ID NO: 17192 - DNA, 17 bp, synthetic construct
  misc_feature 1..17: note = Probe
  source 1..17: mol_type = other DNA
atccagcgatccgagtt

SEQ ID NO: 17193 - DNA, 33 bp, synthetic construct
  misc_feature 1..33: note = Probe
  source 1..33: mol_type = other DNA
atccagcgatccgagttcaaatctcggtggaac

SEQ ID NO: 17194 - DNA, 34 bp, synthetic construct
  misc_feature 1..34: note = Probe
  source 1..34: mol_type = other DNA
atccagcgatccgagttcaaatctcggtggaacc

SEQ ID NO: 17195 - DNA, 36 bp, synthetic construct
  misc_feature 1..36: note = Probe
  source 1..36: mol_type = other DNA
atccagcgatccgagttcaaatctcggtggaacctg

SEQ ID NO: 17196 - DNA, 37 bp, synthetic construct; identical to SEQ ID NO: 3722
  misc_feature 1..37: note = Probe
  source 1..37: mol_type = other DNA

SEQ ID NO: 17197 - DNA, 38 bp, synthetic construct; identical to SEQ ID NO: 3723
  misc_feature 1..38: note = Probe
  source 1..38: mol_type = other DNA

SEQ ID NO: 17198 - DNA, 36 bp, synthetic construct
  misc_feature 1..36: note = Probe
  source 1..36: mol_type = other DNA
atccagcgatccgagttcaaatctcggtggaacctt

SEQ ID NO: 17199 - DNA, 34 bp, synthetic construct
  misc_feature 1..34: note = Probe
  source 1..34: mol_type = other DNA
atccagcgatccgagttcaaatctcggtgggacc

SEQ ID NO: 17200 - DNA, 35 bp, synthetic construct; identical to SEQ ID NO: 380
  misc_feature 1..35: note = Probe
  source 1..35: mol_type = other DNA

SEQ ID NO: 17201 - DNA, 36 bp, synthetic construct
  misc_feature 1..36: note = Probe
  source 1..36: mol_type = other DNA
atccagcgatccgagttcaaatctcggtgggacctc

SEQ ID NO: 17202 - DNA, 38 bp, synthetic construct; identical to SEQ ID NO: 3724
  misc_feature 1..38: note = Probe
  source 1..38: mol_type = other DNA

SEQ ID NO: 17203 - DNA, 36 bp, synthetic construct
  misc_feature 1..36: note = Probe
  source 1..36: mol_type = other DNA
atccagcgatccgagttcaagtctcggtggaacctg

SEQ ID NO: 17204 - DNA, 38 bp, synthetic construct
  misc_feature 1..38: note = Probe
  source 1..38: mol_type = other DNA
atccagcgatccgagttcaagtctcggtggaacctgct

SEQ ID NO: 17205 - DNA, 36 bp, synthetic construct
  misc_feature 1..36: note = Probe
  source 1..36: mol_type = other DNA
atccagcgatccgagttcgagtctcggtggaacctt

SEQ ID NO: 17206 - DNA, 38 bp, synthetic construct
  misc_feature 1..38: note = Probe
  source 1..38: mol_type = other DNA
atccagcgatccgagttcgagtctcggtggaacctttg

SEQ ID NO: 17207 - DNA, 16 bp, synthetic construct
  misc_feature 1..16: note = Probe
  source 1..16: mol_type = other DNA
atccaggtgcccccta

SEQ ID NO: 17208 - DNA, 16 bp, synthetic construct
  misc_feature 1..16: note = Probe
  source 1..16: mol_type = other DNA
atccaggtgccccctc

SEQ ID NO: 17209 - DNA, 18 bp, synthetic construct
  misc_feature 1..18: note = Probe
  source 1..18: mol_type = other DNA
atccaggtgccccctccc

SEQ ID NO: 17210 - DNA, 26 bp, synthetic construct
  misc_feature 1..26: note = Probe
  source 1..26: mol_type = other DNA
atccattggggtctccccgcgcaggt

SEQ ID NO: 17211 - DNA, 23 bp, synthetic construct
  misc_feature 1..23: note = Probe
  source 1..23: mol_type = other DNA
atccattggggtttccccgcgca

SEQ ID NO: 17212 - DNA, 26 bp, synthetic construct
  misc_feature 1..26: note = Probe
  source 1..26: mol_type = other DNA
atccattggggtttccccgcgcaggt

SEQ ID NO: 17213 - DNA, 21 bp, synthetic construct
  misc_feature 1..21: note = Probe
  source 1..21: mol_type = other DNA
atccattggtcttaggcccca

SEQ ID NO: 17214 - DNA, 22 bp, synthetic construct
  misc_feature 1..22: note = Probe
  source 1..22: mol_type = other DNA
atccattggtcttaggccccaa

SEQ ID NO: 17215 - DNA, 25 bp, synthetic construct
  misc_feature 1..25: note = Probe
  source 1..25: mol_type = other DNA
atccattggtcttaggccccaaaaa

SEQ ID NO: 17216 - DNA, 45 bp, synthetic construct; identical to SEQ ID NO: 3727
  misc_feature 1..45: note = Probe
  source 1..45: mol_type = other DNA

SEQ ID NO: 17217 - DNA, 16 bp, synthetic construct
  misc_feature 1..16: note = Probe
  source 1..16: mol_type = other DNA
atcccaccgctgccaa

SEQ ID NO: 17218 - DNA, 17 bp, synthetic construct
  misc_feature 1..17: note = Probe
  source 1..17: mol_type = other DNA
atcccaccgctgccaag

SEQ ID NO: 17219 - DNA, 18 bp, synthetic construct
  misc_feature 1..18: note = Probe
  source 1..18: mol_type = other DNA
atcccaccgctgccaagt

SEQ ID NO: 17220 - DNA, 17 bp, synthetic construct
  misc_feature 1..17: note = Probe
  source 1..17: mol_type = other DNA
atcccaccgctgccaca

SEQ ID NO: 17221 - DNA, 18 bp, synthetic construct
  misc_feature 1..18: note = Probe
  source 1..18: mol_type = other DNA
atcccaccgctgccacac

SEQ ID NO: 17222 - DNA, 19 bp, synthetic construct
  misc_feature 1..19: note = Probe
  source 1..19: mol_type = other DNA
atcccaccgctgccacacc

SEQ ID NO: 17223 - DNA, 20 bp, synthetic construct
  misc_feature 1..20: note = Probe
  source 1..20: mol_type = other DNA
atcccaccgctgccacacct

SEQ ID NO: 17224 - DNA, 21 bp, synthetic construct
  misc_feature 1..21: note = Probe
  source 1..21: mol_type = other DNA
atcccaccgctgccacacctc

SEQ ID NO: 17225 - DNA, 16 bp, synthetic construct
  misc_feature 1..16: note = Probe
  source 1..16: mol_type = other DNA
atcccaccgctgccag

SEQ ID NO: 17226 - DNA, 17 bp, synthetic construct
  misc_feature 1..17: note = Probe
  source 1..17: mol_type = other DNA
atcccaccgctgccagc

SEQ ID NO: 17227 - DNA, 17 bp, synthetic construct
  misc_feature 1..17: note = Probe
  source 1..17: mol_type = other DNA
atcccaccgctgccagg

SEQ ID NO: 17228 - DNA, 18 bp, synthetic construct
  misc_feature 1..18: note = Probe
  source 1..18: mol_type = other DNA
atcccaccgctgccaggg

SEQ ID NO: 17229 - DNA, 30 bp, synthetic construct
  misc_feature 1..30: note = Probe
  source 1..30: mol_type = other DNA
atcccaccgctgccagggttgctgtctttt

SEQ ID NO: 17230 - DNA, 18 bp, synthetic construct
  misc_feature 1..18: note = Probe
  source 1..18: mol_type = other DNA
atcccaccgctgccaggt

SEQ ID NO: 17231 - DNA, 20 bp, synthetic construct
  misc_feature 1..20: note = Probe
  source 1..20: mol_type = other DNA
atcccaccgctgccaggttt

SEQ ID NO: 17232 - DNA, 21 bp, synthetic construct
  misc_feature 1..21: note = Probe
  source 1..21: mol_type = other DNA
atcccaccgctgccaggttta

SEQ ID NO: 17233 - DNA, 22 bp, synthetic construct
  misc_feature 1..22: note = Probe
  source 1..22: mol_type = other DNA
atcccaccgctgccaggtttat

SEQ ID NO: 17234 - DNA, 17 bp, synthetic construct
  misc_feature 1..17: note = Probe
  source 1..17: mol_type = other DNA
atcccaccgctgccagt

SEQ ID NO: 17235 - DNA, 18 bp, synthetic construct
  misc_feature 1..18: note = Probe
  source 1..18: mol_type = other DNA
atcccaccgctgccagtt

SEQ ID NO: 17236 - DNA, 16 bp, synthetic construct
  misc_feature 1..16: note = Probe
  source 1..16: mol_type = other DNA
atcccactcctgacaa

SEQ ID NO: 17237 - DNA, 18 bp, synthetic construct
  misc_feature 1..18: note = Probe
  source 1..18: mol_type = other DNA
atcccactcctgacaagc

SEQ ID NO: 17238 - DNA, 18 bp, synthetic construct
  misc_feature 1..18: note = Probe
  source 1..18: mol_type = other DNA
atcccactcctgacagtt

SEQ ID NO: 17239 - DNA, 16 bp, synthetic construct
  misc_feature 1..16: note = Probe
  source 1..16: mol_type = other DNA
atcccacttctgacac

SEQ ID NO: 17240 - DNA, 17 bp, synthetic construct
  misc_feature 1..17: note = Probe
  source 1..17: mol_type = other DNA
atcccacttctgacaca

SEQ ID NO: 17241 - DNA, 18 bp, synthetic construct
  misc_feature 1..18: note = Probe
  source 1..18: mol_type = other DNA
atcccacttctgacacaa

SEQ ID NO: 17242 - DNA, 18 bp, synthetic construct
  misc_feature 1..18: note = Probe
  source 1..18: mol_type = other DNA
atcccacttctgacacag

SEQ ID NO: 17243 - DNA, 24 bp, synthetic construct
  misc_feature 1..24: note = Probe
  source 1..24: mol_type = other DNA
atcccacttctgacacatactttt

SEQ ID NO: 17244 - DNA, 16 bp, synthetic construct
  misc_feature 1..16: note = Probe
  source 1..16: mol_type = other DNA
atcccagcggtgcctc

SEQ ID NO: 17245 - DNA, 18 bp, synthetic construct
  misc_feature 1..18: note = Probe
  source 1..18: mol_type = other DNA
atcccagcggtgcctccg

SEQ ID NO: 17246 - DNA, 34 bp, synthetic construct
  misc_feature 1..34: note = Probe
  source 1..34: mol_type = other DNA
atcccagggtcgtgggttcgagccccacgttggg

SEQ ID NO: 17247 - DNA, 16 bp, synthetic construct
  misc_feature 1..16: note = Probe
  source 1..16: mol_type = other DNA
atcccatcctcgtcgc

SEQ ID NO: 17248 - DNA, 16 bp, synthetic construct
  misc_feature 1..16: note = Probe
  source 1..16: mol_type = other DNA
atccccagtacctcca

SEQ ID NO: 17249 - DNA, 30 bp, synthetic construct
  misc_feature 1..30: note = Probe
  source 1..30: mol_type = other DNA
atccccgcctgtcacgcgggagaccggggt

SEQ ID NO: 17250 - DNA, 31 bp, synthetic construct
  misc_feature 1..31: note = Probe
  source 1..31: mol_type = other DNA
atccccgcctgtcacgcgggagaccggggtt

SEQ ID NO: 17251 - DNA, 17 bp, synthetic construct
  misc_feature 1..17: note = Probe
  source 1..17: mol_type = other DNA
atccccggcatctccaa

SEQ ID NO: 17252 - DNA, 18 bp, synthetic construct
  misc_feature 1..18: note = Probe
  source 1..18: mol_type = other DNA
atccccggcatctccaaa

SEQ ID NO: 17253 - DNA, 18 bp, synthetic construct
  misc_feature 1..18: note = Probe
  source 1..18: mol_type = other DNA
atccccggcatctccaat

SEQ ID NO: 17254 - DNA, 17 bp, synthetic construct
  misc_feature 1..17: note = Probe
  source 1..17: mol_type = other DNA
atccccggcatctccag

SEQ ID NO: 17255 - DNA, 18 bp, synthetic construct
  misc_feature 1..18: note = Probe
  source 1..18: mol_type = other DNA
atccccggcatctccaga

SEQ ID NO: 17256 - DNA, 18 bp, synthetic construct
  misc_feature 1..18: note = Probe
  source 1..18: mol_type = other DNA
atccccggcatctccagt

SEQ ID NO: 17257 - DNA, 17 bp, synthetic construct
  misc_feature 1..17: note = Probe
  source 1..17: mol_type = other DNA
atccccggcatctccat

SEQ ID NO: 17258 - DNA, 18 bp, synthetic construct
  misc_feature 1..18: note = Probe
  source 1..18: mol_type = other DNA
atccccggcatctccatt

SEQ ID NO: 17259 - DNA, 19 bp, synthetic construct
  misc_feature 1..19: note = Probe
  source 1..19: mol_type = other DNA
atccccggcatctccattg

SEQ ID NO: 17260 - DNA, 26 bp, synthetic construct
  misc_feature 1..26: note = Probe
  source 1..26: mol_type = other DNA
atcccctggcccaacccgtcatctac

SEQ ID NO: 17261 - DNA, 16 bp, synthetic construct
  misc_feature 1..16: note = Probe
  source 1..16: mol_type = other DNA
atcccggacgagccca

SEQ ID NO: 17262 - DNA, 18 bp, synthetic construct
  misc_feature 1..18: note = Probe
  source 1..18: mol_type = other DNA
atcccggacgagcccaca

SEQ ID NO: 17263 - DNA, 16 bp, synthetic construct
  misc_feature 1..16: note = Probe
  source 1..16: mol_type = other DNA
atcccggacgagcccc

SEQ ID NO: 17264 - DNA, 17 bp, synthetic construct
  misc_feature 1..17: note = Probe
  source 1..17: mol_type = other DNA
atcccggacgagccccc

SEQ ID NO: 17265 - DNA, 18 bp, synthetic construct
  misc_feature 1..18: note = Probe
  source 1..18: mol_type = other DNA
atcccggacgagccccct

SEQ ID NO: 17266 - DNA, 19 bp, synthetic construct
  misc_feature 1..19: note = Probe
  source 1..19: mol_type = other DNA
atcccggacgagccccctt

SEQ ID NO: 17267 - DNA, 17 bp, synthetic construct
  misc_feature 1..17: note = Probe
  source 1..17: mol_type = other DNA
atcccggacgagcccct

SEQ ID NO: 17268 - DNA, 18 bp, synthetic construct
  misc_feature 1..18: note = Probe
  source 1..18: mol_type = other DNA
atcccggacgagcccctc

SEQ ID NO: 17269 - DNA, 18 bp, synthetic construct
  misc_feature 1..18: note = Probe
  source 1..18: mol_type = other DNA
atcccggacgagcccctt

SEQ ID NO: 17270 - DNA, 16 bp, synthetic construct
  misc_feature 1..16: note = Probe
  source 1..16: mol_type = other DNA
atcccggacgagcccg

SEQ ID NO: 17271 - DNA, 18 bp, synthetic construct
  misc_feature 1..18: note = Probe
  source 1..18: mol_type = other DNA
atcccggacgagcccggt

SEQ ID NO: 17272 - DNA, 16 bp, synthetic construct
  misc_feature 1..16: note = Probe
  source 1..16: mol_type = other DNA
atcccggacgagccct

SEQ ID NO: 17273 - DNA, 18 bp, synthetic construct
  misc_feature 1..18: note = Probe
  source 1..18: mol_type = other DNA
atcccggacgagccctag

SEQ ID NO: 17274 - DNA, 18 bp, synthetic construct
  misc_feature 1..18: note = Probe
  source 1..18: mol_type = other DNA
atcccggacgagccctca

SEQ ID NO: 17275 - DNA, 18 bp, synthetic construct
  misc_feature 1..18: note = Probe
  source 1..18: mol_type = other DNA
atcccggacgagccctcg

SEQ ID NO: 17276 - DNA, 18 bp, synthetic construct
  misc_feature 1..18: note = Probe
  source 1..18: mol_type = other DNA
atcccggacgagccctgt

SEQ ID NO: 17277 - DNA, 19 bp, synthetic construct
  misc_feature 1..19: note = Probe
  source 1..19: mol_type = other DNA
atcccgggcggaaacaggt

SEQ ID NO: 17278 - DNA, 16 bp, synthetic construct
  misc_feature 1..16: note = Probe
  source 1..16: mol_type = other DNA
atcccgggtttcggca

SEQ ID NO: 17279 - DNA, 16 bp, synthetic construct
  misc_feature 1..16: note = Probe
  source 1..16: mol_type = other DNA
atccggctcgaaggac

SEQ ID NO: 17280 - DNA, 18 bp, synthetic construct
  misc_feature 1..18: note = Probe
  source 1..18: mol_type = other DNA
atccggctcgaaggacga

SEQ ID NO: 17281 - DNA, 18 bp, synthetic construct
  misc_feature 1..18: note = Probe
  source 1..18: mol_type = other DNA
atccggctcggaggacgg

SEQ ID NO: 17282 - DNA, 17 bp, synthetic construct
  misc_feature 1..17: note = Probe
  source 1..17: mol_type = other DNA
atccgggtgccccctca

SEQ ID NO: 17283 - DNA, 18 bp, synthetic construct
  misc_feature 1..18: note = Probe
  source 1..18: mol_type = other DNA
atccgggtgccccctcaa

SEQ ID NO: 17284 - DNA, 19 bp, synthetic construct
  misc_feature 1..19: note = Probe
  source 1..19: mol_type = other DNA
atccgggtgccccctcaat

SEQ ID NO: 17285 - DNA, 20 bp, synthetic construct
  misc_feature 1..20: note = Probe
  source 1..20: mol_type = other DNA
atccgggtgccccctcaatg

SEQ ID NO: 17286 - DNA, 21 bp, synthetic construct
  misc_feature 1..21: note = Probe
  source 1..21: mol_type = other DNA
atccgggtgccccctcaatgg

SEQ ID NO: 17287 - DNA, 18 bp, synthetic construct
  misc_feature 1..18: note = Probe
  source 1..18: mol_type = other DNA
atccgggtgccccctcac

SEQ ID NO: 17288 - DNA, 19 bp, synthetic construct
  misc_feature 1..19: note = Probe
  source 1..19: mol_type = other DNA
atccgggtgccccctcaca

SEQ ID NO: 17289 - DNA, 17 bp, synthetic construct
  misc_feature 1..17: note = Probe
  source 1..17: mol_type = other DNA
atccgggtgccccctcg

SEQ ID NO: 17290 - DNA, 18 bp, synthetic construct
  misc_feature 1..18: note = Probe
  source 1..18: mol_type = other DNA
atccgggtgccccctcgg

SEQ ID NO: 17291 - DNA, 17 bp, synthetic construct
  misc_feature 1..17: note = Probe
  source 1..17: mol_type = other DNA
atccgggtgccccctct

SEQ ID NO: 17292 - DNA, 18 bp, synthetic construct
  misc_feature 1..18: note = Probe
  source 1..18: mol_type = other DNA
atccgggtgccccctctg

SEQ ID NO: 17293 - DNA, 19 bp, synthetic construct
  misc_feature 1..19: note = Probe
  source 1..19: mol_type = other DNA
atccgggtgccccctctgt

SEQ ID NO: 17294 - DNA, 20 bp, synthetic construct
  misc_feature 1..20: note = Probe
  source 1..20: mol_type = other DNA
atccgggtgccccctctgtg

SEQ ID NO: 17295 - DNA, 18 bp, synthetic construct
  misc_feature 1..18: note = Probe
  source 1..18: mol_type = other DNA
atccgggtgccccctctt

SEQ ID NO: 17296 - DNA, 19 bp, synthetic construct
  misc_feature 1..19: note = Probe
  source 1..19: mol_type = other DNA
atccgggtgccccctcttt

SEQ ID NO: 17297 - DNA, 16 bp, synthetic construct
  misc_feature 1..16: note = Probe
  source 1..16: mol_type = other DNA
atccgggtgccccctg

SEQ ID NO: 17298 - DNA, 16 bp, synthetic construct
  misc_feature 1..16: note = Probe
  source 1..16: mol_type = other DNA
atccgggtgccccctt

SEQ ID NO: 17299 - DNA, 17 bp, synthetic construct
  misc_feature 1..17: note = Probe
  source 1..17: mol_type = other DNA
atccgggtgcccccttc

SEQ ID NO: 17300 - DNA, 18 bp, synthetic construct
  misc_feature 1..18: note = Probe
  source 1..18: mol_type = other DNA
atccgggtgcccccttcc

SEQ ID NO: 17301 - DNA, 19 bp, synthetic construct
  misc_feature 1..19: note = Probe
  source 1..19: mol_type = other DNA
atcctcacacggggcacaa

SEQ ID NO: 17302 - DNA, 16 bp, synthetic construct
  misc_feature 1..16: note = Probe
  source 1..16: mol_type = other DNA
atcctgctcacagcgc

SEQ ID NO: 17303 - DNA, 31 bp, synthetic construct
  misc_feature 1..31: note = Probe
  source 1..31: mol_type = other DNA
atcctgggttcgaatcccagcggtgcctccg

SEQ ID NO: 17304 - DNA, 16 bp, synthetic construct
  misc_feature 1..16: note = Probe
  source 1..16: mol_type = other DNA
atccttaggtcgctgg

SEQ ID NO: 17305 - DNA, 17 bp, synthetic construct
  misc_feature 1..17: note = Probe
  source 1..17: mol_type = other DNA
atccttaggtcgctggt

SEQ ID NO: 17306 - DNA, 33 bp, synthetic construct
  misc_feature 1..33: note = Probe
  source 1..33: mol_type = other DNA
atccttaggtcgctggttcgattccggctcgaa

SEQ ID NO: 17307 - DNA, 34 bp, synthetic construct
  misc_feature 1..34: note = Probe
  source 1..34: mol_type = other DNA
atccttaggtcgctggttcgattccggctcgaag

SEQ ID NO: 17308 - DNA, 50 bp, synthetic construct
  misc_feature 1..50: note = Probe
  source 1..50: mol_type = other DNA
atccttaggtcgctggttcgattccggctcgaaggaagtgcccgatgctt

SEQ ID NO: 17309 - DNA, 38 bp, synthetic construct
  misc_feature 1..38: note = Probe
  source 1..38: mol_type = other DNA
atccttaggtcgctggttcgattccggctcgaaggact

SEQ ID NO: 17310 - DNA, 50 bp, synthetic construct; identical to SEQ ID NO: 3753
  misc_feature 1..50: note = Probe
  source 1..50: mol_type = other DNA

SEQ ID NO: 17311 - DNA, 23 bp, synthetic construct
  misc_feature 1..23: note = Probe
  source 1..23: mol_type = other DNA
atcgaaaccatcctctgctaggt

SEQ ID NO: 17312 - DNA, 20 bp, synthetic construct
  misc_feature 1..20: note = Probe
  source 1..20: mol_type = other DNA
atcgcataaaacttaaaact

SEQ ID NO: 17313 - DNA, 25 bp, synthetic construct
  misc_feature 1..25: note = Probe
  source 1..25: mol_type = other DNA
atcgcataaaacttaaaactttaca

SEQ ID NO: 17314 - DNA, 30 bp, synthetic construct
  misc_feature 1..30: note = Probe
  source 1..30: mol_type = other DNA
atcgcataaaacttaaaactttacagtcag

SEQ ID NO: 17315 - DNA, 31 bp, synthetic construct
  misc_feature 1..31: note = Probe
  source 1..31: mol_type = other DNA
atcgcataaaacttaaaactttacagtcaga

SEQ ID NO: 17316 - DNA, 50 bp, synthetic construct; identical to SEQ ID NO: 3759
  misc_feature 1..50: note = Probe
  source 1..50: mol_type = other DNA

SEQ ID NO: 17317 - DNA, 27 bp, synthetic construct
  misc_feature 1..27: note = Probe
  source 1..27: mol_type = other DNA
atcgcggctcgttggtctaggggtatg

SEQ ID NO: 17318 - DNA, 28 bp, synthetic construct
  misc_feature 1..28: note = Probe
  source 1..28: mol_type = other DNA
atcgcggctcgttggtctaggggtatga

SEQ ID NO: 17319 - DNA, 29 bp, synthetic construct
  misc_feature 1..29: note = Probe
  source 1..29: mol_type = other DNA
atcgcggctcgttggtctaggggtatgat

SEQ ID NO: 17320 - DNA, 30 bp, synthetic construct
  misc_feature 1..30: note = Probe
  source 1..30: mol_type = other DNA
atcgcggctcgttggtctaggggtatgatt

SEQ ID NO: 17321 - DNA, 31 bp, synthetic construct
  misc_feature 1..31: note = Probe
  source 1..31: mol_type = other DNA
atcgcggctcgttggtctaggggtatgattc

SEQ ID NO: 17322 - DNA, 32 bp, synthetic construct
  misc_feature 1..32: note = Probe
  source 1..32: mol_type = other DNA
atcgcggctcgttggtctaggggtatgattct

SEQ ID NO: 17323 - DNA, 36 bp, synthetic construct
  misc_feature 1..36: note = Probe
  source 1..36: mol_type = other DNA
atcgcggctcgttggtctaggggtatgattctcgct

SEQ ID NO: 17324 - DNA, 16 bp, synthetic construct
  misc_feature 1..16: note = Probe
  source 1..16: mol_type = other DNA
atcgggcccatacccc

SEQ ID NO: 17325 - DNA, 50 bp, synthetic construct; identical to SEQ ID NO: 3760
  misc_feature 1..50: note = Probe
  source 1..50: mol_type = other DNA

SEQ ID NO: 17326 - DNA, 16 bp, synthetic construct
  misc_feature 1..16: note = Probe
  source 1..16: mol_type = other DNA
atcggtgcatgggtgg

SEQ ID NO: 17327 - DNA, 23 bp, synthetic construct
  misc_feature 1..23: note = Probe
  source 1..23: mol_type = other DNA
atcggtgcatgggtggttcagtg

SEQ ID NO: 17328 - DNA, 24 bp, synthetic construct
  misc_feature 1..24: note = Probe
  source 1..24: mol_type = other DNA
atcggtgcatgggtggttcagtgg

SEQ ID NO: 17329 - DNA, 25 bp, synthetic construct
  misc_feature 1..25: note = Probe
  source 1..25: mol_type = other DNA
atcggtgcatgggtggttcagtggt

SEQ ID NO: 17330 - DNA, 26 bp, synthetic construct
  misc_feature 1..26: note = Probe
  source 1..26: mol_type = other DNA
atcggtgcatgggtggttcagtggta

SEQ ID NO: 17331 - DNA, 27 bp, synthetic construct
  misc_feature 1..27: note = Probe
  source 1..27: mol_type = other DNA
atcggtgcatgggtggttcagtggtag

SEQ ID NO: 17332 - DNA, 28 bp, synthetic construct
  misc_feature 1..28: note = Probe
  source 1..28: mol_type = other DNA
atcggtgcatgggtggttcagtggtaga

SEQ ID NO: 17333 - DNA, 29 bp, synthetic construct
  misc_feature 1..29: note = Probe
  source 1..29: mol_type = other DNA
atcggtgcatgggtggttcagtggtagaa

SEQ ID NO: 17334 - DNA, 30 bp, synthetic construct
  misc_feature 1..30: note = Probe
  source 1..30: mol_type = other DNA
atcggtgcatgggtggttcagtggtagaat

SEQ ID NO: 17335 - DNA, 31 bp, synthetic construct
  misc_feature 1..31: note = Probe
  source 1..31: mol_type = other DNA
atcggtgcatgggtggttcagtggtagaatt

SEQ ID NO: 17336 - DNA, 32 bp, synthetic construct
  misc_feature 1..32: note = Probe
  source 1..32: mol_type = other DNA
atcggtgcatgggtggttcagtggtagaattc

SEQ ID NO: 17337 - DNA, 33 bp, synthetic construct
  misc_feature 1..33: note = Probe
  source 1..33: mol_type = other DNA
atcggtgcatgggtggttcagtggtagaattct

SEQ ID NO: 17338 - DNA, 35 bp, synthetic construct
  misc_feature 1..35: note = Probe
  source 1..35: mol_type = other DNA
atcggtgcatgggtggttcagtggtagaattctcg

SEQ ID NO: 17339 - DNA, 36 bp, synthetic construct
  misc_feature 1..36: note = Probe
  source 1..36: mol_type = other DNA
atcggtgcatgggtggttcagtggtagaattctcgc

SEQ ID NO: 17340 - DNA, 37 bp, synthetic construct
  misc_feature 1..37: note = Probe
  source 1..37: mol_type = other DNA
atcggtgcatgggtggttcagtggtagaattctcgcc

SEQ ID NO: 17341 - DNA, 38 bp, synthetic construct
  misc_feature 1..38: note = Probe
  source 1..38: mol_type = other DNA
atcggtgcatgggtggttcagtggtagaattctcgcct

SEQ ID NO: 17342 - DNA, 24 bp, synthetic construct
  misc_feature 1..24: note = Probe
  source 1..24: mol_type = other DNA
atcgtatagtggttagtactctgc

SEQ ID NO: 17343 - DNA, 27 bp, synthetic construct
  misc_feature 1..27: note = Probe
  source 1..27: mol_type = other DNA
atcgtatagtggttagtactctgcgtt

SEQ ID NO: 17344 - DNA, 31 bp, synthetic construct
  misc_feature 1..31: note = Probe
  source 1..31: mol_type = other DNA
atctaaagacaggggttaggcctctttttac

SEQ ID NO: 17345 - DNA, 34 bp, synthetic construct
  misc_feature 1..34: note = Probe
  source 1..34: mol_type = other DNA
atctaaagacaggggttaggcctctttttaccag

SEQ ID NO: 17346 - DNA, 35 bp, synthetic construct; identical to SEQ ID NO: 3765
  misc_feature 1..35: note = Probe
  source 1..35: mol_type = other DNA

SEQ ID NO: 17347 - DNA, 36 bp, synthetic construct; identical to SEQ ID NO: 3766
  misc_feature 1..36: note = Probe
  source 1..36: mol_type = other DNA

SEQ ID NO: 17348 - DNA, 37 bp, synthetic construct
  misc_feature 1..37: note = Probe
  source 1..37: mol_type = other DNA
atctaaagacaggggttaggcctctttttaccagctc

SEQ ID NO: 17349 - DNA, 38 bp, synthetic construct
  misc_feature 1..38: note = Probe
  source 1..38: mol_type = other DNA
atctaaagacaggggttaggcctctttttaccagctcc

SEQ ID NO: 17350 - DNA, 17 bp, synthetic construct
  misc_feature 1..17: note = Probe
  source 1..17: mol_type = other DNA
atctaaaggtccctggt

SEQ ID NO: 17351 - DNA, 21 bp, synthetic construct
  misc_feature 1..21: note = Probe
  source 1..21: mol_type = other DNA
atctaaaggtccctggttcga

SEQ ID NO: 17352 - DNA, 22 bp, synthetic construct
  misc_feature 1..22: note = Probe
  source 1..22: mol_type = other DNA
atctaaaggtccctggttcgat

SEQ ID NO: 17353 - DNA, 36 bp, synthetic construct; identical to SEQ ID NO: 393
  misc_feature 1..36: note = Probe
  source 1..36: mol_type = other DNA

SEQ ID NO: 17354 - DNA, 39 bp, synthetic construct; identical to SEQ ID NO: 3774
  misc_feature 1..39: note = Probe
  source 1..39: mol_type = other DNA

SEQ ID NO: 17355 - DNA, 39 bp, synthetic construct; identical to SEQ ID NO: 3776
  misc_feature 1..39: note = Probe
  source 1..39: mol_type = other DNA

SEQ ID NO: 17356 - DNA, 34 bp, synthetic construct
  misc_feature 1..34: note = Probe
  source 1..34: mol_type = other DNA
atctcagggtcgtgggttcgagccccacgttggg

SEQ ID NO: 17357 - DNA, 24 bp, synthetic construct
  misc_feature 1..24: note = Probe
  source 1..24: mol_type = other DNA
atctccagcattccccctcaaacc

SEQ ID NO: 17358 - DNA, 25 bp, synthetic construct
  misc_feature 1..25: note = Probe
  source 1..25: mol_type = other DNA
atctccagcattccccctcaaacct

SEQ ID NO: 17359 - DNA, 26 bp, synthetic construct
  misc_feature 1..26: note = Probe
  source 1..26: mol_type = other DNA
atctccagcattccccctcaaaccta

SEQ ID NO: 17360 - DNA, 16 bp, synthetic construct
  misc_feature 1..16: note = Probe
  source 1..16: mol_type = other DNA
atctcgctggggcctc

SEQ ID NO: 17361 - DNA, 16 bp, synthetic construct
  misc_feature 1..16: note = Probe
  source 1..16: mol_type = other DNA
atctcggtgggaccta

SEQ ID NO: 17362 - DNA, 16 bp, synthetic construct
  misc_feature 1..16: note = Probe
  source 1..16: mol_type = other DNA
atctcggtgggacctc

SEQ ID NO: 17363 - DNA, 17 bp, synthetic construct
  misc_feature 1..17: note = Probe
  source 1..17: mol_type = other DNA
atctgaaggtcgtgagt

SEQ ID NO: 17364 - DNA, 33 bp, synthetic construct
  misc_feature 1..33: note = Probe
  source 1..33: mol_type = other DNA
atctgaaggtcgtgagttcgagcctcacacggg

SEQ ID NO: 17365 - DNA, 36 bp, synthetic construct
  misc_feature 1..36: note = Probe
  source 1..36: mol_type = other DNA
atctgaaggtcgtgagttcgatcctcacacggggca

SEQ ID NO: 17366 - DNA, 39 bp, synthetic construct; identical to SEQ ID NO: 3783
  misc_feature 1..39: note = Probe
  source 1..39: mol_type = other DNA

SEQ ID NO: 17367 - DNA, 31 bp, synthetic construct; identical to SEQ ID NO: 398
  misc_feature 1..31: note = Probe
  source 1..31: mol_type = other DNA

SEQ ID NO: 17368 - DNA, 35 bp, synthetic construct; identical to SEQ ID NO: 399
  misc_feature 1..35: note = Probe
  source 1..35: mol_type = other DNA

SEQ ID NO: 17369 - DNA, 36 bp, synthetic construct; identical to SEQ ID NO: 3790
  misc_feature 1..36: note = Probe
  source 1..36: mol_type = other DNA

SEQ ID NO: 17370 - DNA, 38 bp, synthetic construct; identical to SEQ ID NO: 3792
  misc_feature 1..38: note = Probe
  source 1..38: mol_type = other DNA

SEQ ID NO: 17371 - DNA, 34 bp, synthetic construct
  misc_feature 1..34: note = Probe
  source 1..34: mol_type = other DNA
atctgagggtccagggttcaagtccctgttcggg

SEQ ID NO: 17372 - DNA, 39 bp, synthetic construct; identical to SEQ ID NO: 3794
  misc_feature 1..39: note = Probe
  source 1..39: mol_type = other DNA

SEQ ID NO: 17373 - DNA, 30 bp, synthetic construct
  misc_feature 1..30: note = Probe
  source 1..30: mol_type = other DNA
atctgtttccgtagtgtagtggttatcacg

SEQ ID NO: 17374 - DNA, 31 bp, synthetic construct
  misc_feature 1..31: note = Probe
  source 1..31: mol_type = other DNA
atctgtttccgtagtgtagtggttatcacgt

SEQ ID NO: 17375 - DNA, 32 bp, synthetic construct
  misc_feature 1..32: note = Probe
  source 1..32: mol_type = other DNA
atctgtttccgtagtgtagtggttatcacgtt

SEQ ID NO: 17376 - DNA, 31 bp, synthetic construct; identical to SEQ ID NO: 3795
  misc_feature 1..31: note = Probe
  source 1..31: mol_type = other DNA

SEQ ID NO: 17377 - DNA, 50 bp, synthetic construct; identical to SEQ ID NO: 3797
  misc_feature 1..50: note = Probe
  source 1..50: mol_type = other DNA

SEQ ID NO: 17378 - DNA, 25 bp, synthetic construct
  misc_feature 1..25: note = Probe
  source 1..25: mol_type = other DNA
atgaaaacctttttccaaggacaaa

SEQ ID NO: 17379 - DNA, 26 bp, synthetic construct
  misc_feature 1..26: note = Probe
  source 1..26: mol_type = other DNA
atgaaaacctttttccaaggacaaat

SEQ ID NO: 17380 - DNA, 36 bp, synthetic construct
  misc_feature 1..36: note = Probe
  source 1..36: mol_type = other DNA
atgaggccccgggttcaatccccggcatctccagac

SEQ ID NO: 17381 - DNA, 30 bp, synthetic construct
  misc_feature 1..30: note = Probe
  source 1..30: mol_type = other DNA
atgaggccccgggttcgatccccggcatct

SEQ ID NO: 17382 - DNA, 36 bp, synthetic construct
  misc_feature 1..36: note = Probe
  source 1..36: mol_type = other DNA
atgaggccccgggttcgatccccggcatctccattg

SEQ ID NO: 17383 - DNA, 23 bp, synthetic construct
  misc_feature 1..23: note = Probe
  source 1..23: mol_type = other DNA
atgataatcatatttaccaaatg

SEQ ID NO: 17384 - DNA, 30 bp, synthetic construct
  misc_feature 1..30: note = Probe
  source 1..30: mol_type = other DNA
atgatgtatgctttgtttctgttgagtgtg

SEQ ID NO: 17385 - DNA, 30 bp, synthetic construct
  misc_feature 1..30: note = Probe
  source 1..30: mol_type = other DNA
atgattctcgcttagggtgcgagaggtccc

SEQ ID NO: 17386 - DNA, 31 bp, synthetic construct; identical to SEQ ID NO: 3801
  misc_feature 1..31: note = Probe
  source 1..31: mol_type = other DNA

SEQ ID NO: 17387 - DNA, 30 bp, synthetic construct
  misc_feature 1..30: note = Probe
  source 1..30: mol_type = other DNA
atgattctcgcttcgggtgcgagaggtccc

SEQ ID NO: 17388 - DNA, 31 bp, synthetic construct; identical to SEQ ID NO: 3802
  misc_feature 1..31: note = Probe
  source 1..31: mol_type = other DNA

SEQ ID NO: 17389 - DNA, 34 bp, synthetic construct
  misc_feature 1..34: note = Probe
  source 1..34: mol_type = other DNA
atgattctcgcttcgggtgcgagaggtcccgggt

SEQ ID NO: 17390 - DNA, 31 bp, synthetic construct; identical to SEQ ID NO: 3804
  misc_feature 1..31: note = Probe
  source 1..31: mol_type = other DNA

SEQ ID NO: 17391 - DNA, 30 bp, synthetic construct
  misc_feature 1..30: note = Probe
  source 1..30: mol_type = other DNA
atgattctcggtttgggtccgagaggtccc

SEQ ID NO: 17392 - DNA, 31 bp, synthetic construct
  misc_feature 1..31: note = Probe
  source 1..31: mol_type = other DNA
atgattctcggtttgggtccgagaggtcccg

SEQ ID NO: 17393 - DNA, 33 bp, synthetic construct
  misc_feature 1..33: note = Probe
  source 1..33: mol_type = other DNA
atgcaagattcccattcttgcgacccgggttcg

SEQ ID NO: 17394 - DNA, 24 bp, synthetic construct
  misc_feature 1..24: note = Probe
  source 1..24: mol_type = other DNA
atgcacactactataaccacccta

SEQ ID NO: 17395 - DNA, 29 bp, synthetic construct
  misc_feature 1..29: note = Probe
  source 1..29: mol_type = other DNA
atgcagagtggggttttgcagtccttagc

SEQ ID NO: 17396 - DNA, 30 bp, synthetic construct; identical to SEQ ID NO: 3807
  misc_feature 1..30: note = Probe
  source 1..30: mol_type = other DNA

SEQ ID NO: 17397 - DNA, 16 bp, synthetic construct
  misc_feature 1..16: note = Probe
  source 1..16: mol_type = other DNA
atgccccaactaaata

SEQ ID NO: 17398 - DNA, 18 bp, synthetic construct
  misc_feature 1..18: note = Probe
  source 1..18: mol_type = other DNA
atgccccaactaaatact

SEQ ID NO: 17399 - DNA, 19 bp, synthetic construct
  misc_feature 1..19: note = Probe
  source 1..19: mol_type = other DNA
atgccccaactaaatacta

SEQ ID NO: 17400 - DNA, 20 bp, synthetic construct
  misc_feature 1..20: note = Probe
  source 1..20: mol_type = other DNA
atgccccaactaaatactac

SEQ ID NO: 17401 - DNA, 21 bp, synthetic construct
  misc_feature 1..21: note = Probe
  source 1..21: mol_type = other DNA
atgccccaactaaatactacc

SEQ ID NO: 17402 - DNA, 22 bp, synthetic construct
  misc_feature 1..22: note = Probe
  source 1..22: mol_type = other DNA
atgccccaactaaatactaccg

SEQ ID NO: 17403 - DNA, 23 bp, synthetic construct
  misc_feature 1..23: note = Probe
  source 1..23: mol_type = other DNA
atgccccaactaaatactaccgt

SEQ ID NO: 17404 - DNA, 24 bp, synthetic construct
  misc_feature 1..24: note = Probe
  source 1..24: mol_type = other DNA
atgccccaactaaatactaccgta

SEQ ID NO: 17405 - DNA, 25 bp, synthetic construct
  misc_feature 1..25: note = Probe
  source 1..25: mol_type = other DNA
atgccccaactaaatactaccgtat

SEQ ID NO: 17406 - DNA, 26 bp, synthetic construct
  misc_feature 1..26: note = Probe
  source 1..26: mol_type = other DNA
atgccccaactaaatactaccgtatg

SEQ ID NO: 17407 - DNA, 27 bp, synthetic construct
  misc_feature 1..27: note = Probe
  source 1..27: mol_type = other DNA
atgccccaactaaatactaccgtatgg

SEQ ID NO: 17408 - DNA, 28 bp, synthetic construct
  misc_feature 1..28: note = Probe
  source 1..28: mol_type = other DNA
atgccccaactaaatactaccgtatggc

SEQ ID NO: 17409 - DNA, 16 bp, synthetic construct
  misc_feature 1..16: note = Probe
  source 1..16: mol_type = other DNA
atgcccccatgtctaa

SEQ ID NO: 17410 - DNA, 18 bp, synthetic construct
  misc_feature 1..18: note = Probe
  source 1..18: mol_type = other DNA
atgcccccatgtctaaca

SEQ ID NO: 17411 - DNA, 21 bp, synthetic construct
  misc_feature 1..21: note = Probe
  source 1..21: mol_type = other DNA
atgcccccatgtctaacaaca

SEQ ID NO: 17412 - DNA, 22 bp, synthetic construct
  misc_feature 1..22: note = Probe
  source 1..22: mol_type = other DNA
atgcccccatgtctaacaacat

SEQ ID NO: 17413 - DNA, 26 bp, synthetic construct
  misc_feature 1..26: note = Probe
  source 1..26: mol_type = other DNA
atgcccccatgtctaacaacatggct

SEQ ID NO: 17414 - DNA, 27 bp, synthetic construct
  misc_feature 1..27: note = Probe
  source 1..27: mol_type = other DNA
atgcccccatgtctaacaacatggctt

SEQ ID NO: 17415 - DNA, 28 bp, synthetic construct
  misc_feature 1..28: note = Probe
  source 1..28: mol_type = other DNA
atgcccccatgtctaacaacatggcttt

SEQ ID NO: 17416 - DNA, 29 bp, synthetic construct
  misc_feature 1..29: note = Probe
  source 1..29: mol_type = other DNA
atgcccccatgtctaacaacatggctttc

SEQ ID NO: 17417 - DNA, 30 bp, synthetic construct; identical to SEQ ID NO: 3818
  misc_feature 1..30: note = Probe
  source 1..30: mol_type = other DNA

SEQ ID NO: 17418 - DNA, 31 bp, synthetic construct; identical to SEQ ID NO: 3819
  misc_feature 1..31: note = Probe
  source 1..31: mol_type = other DNA

SEQ ID NO: 17419 - DNA, 32 bp, synthetic construct; identical to SEQ ID NO: 3820
  misc_feature 1..32: note = Probe
  source 1..32: mol_type = other DNA

SEQ ID NO: 17420 - DNA, 33 bp, synthetic construct; identical to SEQ ID NO: 3821
  misc_feature 1..33: note = Probe
  source 1..33: mol_type = other DNA

SEQ ID NO: 17421 - DNA, 34 bp, synthetic construct; identical to SEQ ID NO: 3822
  misc_feature 1..34: note = Probe
  source 1..34: mol_type = other DNA

SEQ ID NO: 17422 - DNA, 35 bp, synthetic construct; identical to SEQ ID NO: 3823
  misc_feature 1..35: note = Probe
  source 1..35: mol_type = other DNA

SEQ ID NO: 17423 - DNA, 36 bp, synthetic construct
  misc_feature 1..36: note = Probe
  source 1..36: mol_type = other DNA
atgcccccatgtctaacaacatggctttctcaactt

SEQ ID NO: 17424 - DNA, 16 bp, synthetic construct
  misc_feature 1..16: note = Probe
  source 1..16: mol_type = other DNA
atgcccctcatttaca

SEQ ID NO: 17425 - DNA, 18 bp, synthetic construct
  misc_feature 1..18: note = Probe
  source 1..18: mol_type = other DNA
atgcccctcatttacata

SEQ ID NO: 17426 - DNA, 19 bp, synthetic construct
  misc_feature 1..19: note = Probe
  source 1..19: mol_type = other DNA
atgcccctcatttacataa

SEQ ID NO: 17427 - DNA, 21 bp, synthetic construct
  misc_feature 1..21: note = Probe
  source 1..21: mol_type = other DNA
atgcccctcatttacataaat

SEQ ID NO: 17428 - DNA, 22 bp, synthetic construct
  misc_feature 1..22: note = Probe
  source 1..22: mol_type = other DNA
atgcccctcatttacataaata

SEQ ID NO: 17429 - DNA, 27 bp, synthetic construct
  misc_feature 1..27: note = Probe
  source 1..27: mol_type = other DNA
atgcccctcatttacataaatattata

SEQ ID NO: 17430 - DNA, 28 bp, synthetic construct
  misc_feature 1..28: note = Probe
  source 1..28: mol_type = other DNA
atgcccctcatttacataaatattatac

SEQ ID NO: 17431 - DNA, 29 bp, synthetic construct
  misc_feature 1..29: note = Probe
  source 1..29: mol_type = other DNA
atgcccctcatttacataaatattatact

SEQ ID NO: 17432 - DNA, 30 bp, synthetic construct; identical to SEQ ID NO: 3825
  misc_feature 1..30: note = Probe
  source 1..30: mol_type = other DNA

SEQ ID NO: 17433 - DNA, 33 bp, synthetic construct
  misc_feature 1..33: note = Probe
  source 1..33: mol_type = other DNA
atgccgaggttgtgagttcgagcctcacctgga

SEQ ID NO: 17434 - DNA, 34 bp, synthetic construct
  misc_feature 1..34: note = Probe
  source 1..34: mol_type = other DNA
atgccgaggttgtgagttcgagcctcacctggag

SEQ ID NO: 17435 - DNA, 36 bp, synthetic construct
  misc_feature 1..36: note = Probe
  source 1..36: mol_type = other DNA
atgccgaggttgtgagttcgagcctcacctggagca

SEQ ID NO: 17436 - DNA, 45 bp, synthetic construct
  misc_feature 1..45: note = Probe
  source 1..45: mol_type = other DNA
atgccgaggttgtgagttcgagcctcacctggagcaagacccttt

SEQ ID NO: 17437 - DNA, 46 bp, synthetic construct
  misc_feature 1..46: note = Probe
  source 1..46: mol_type = other DNA
atgccgaggttgtgagttcgagcctcacctggagcaagaccctttt

SEQ ID NO: 17438 - DNA, 39 bp, synthetic construct
  misc_feature 1..39: note = Probe
  source 1..39: mol_type = other DNA
atgccgaggttgtgagttcgagcctcacctggagcattg

SEQ ID NO: 17439 - DNA, 16 bp, synthetic construct
  misc_feature 1..16: note = Probe
  source 1..16: mol_type = other DNA
atggcacatgcagcgc

SEQ ID NO: 17440 - DNA, 17 bp, synthetic construct
  misc_feature 1..17: note = Probe
  source 1..17: mol_type = other DNA
atggcacatgcagcgca

SEQ ID NO: 17441 - DNA, 18 bp, synthetic construct
  misc_feature 1..18: note = Probe
  source 1..18: mol_type = other DNA
atggcacatgcagcgcaa

SEQ ID NO: 17442 - DNA, 19 bp, synthetic construct
  misc_feature 1..19: note = Probe
  source 1..19: mol_type = other DNA
atggcacatgcagcgcaag

SEQ ID NO: 17443 - DNA, 20 bp, synthetic construct
  misc_feature 1..20: note = Probe
  source 1..20: mol_type = other DNA
atggcacatgcagcgcaagt

SEQ ID NO: 17444 - DNA, 21 bp, synthetic construct
  misc_feature 1..21: note = Probe
  source 1..21: mol_type = other DNA
atggcacatgcagcgcaagta

SEQ ID NO: 17445 - DNA, 22 bp, synthetic construct
  misc_feature 1..22: note = Probe
  source 1..22: mol_type = other DNA
atggcacatgcagcgcaagtag

SEQ ID NO: 17446 - DNA, 23 bp, synthetic construct
  misc_feature 1..23: note = Probe
  source 1..23: mol_type = other DNA
atggcacatgcagcgcaagtagg

SEQ ID NO: 17447 - DNA, 24 bp, synthetic construct
  misc_feature 1..24: note = Probe
  source 1..24: mol_type = other DNA
atggcacatgcagcgcaagtaggt

SEQ ID NO: 17448 - DNA, 25 bp, synthetic construct
  misc_feature 1..25: note = Probe
  source 1..25: mol_type = other DNA
atggcacatgcagcgcaagtaggtc

SEQ ID NO: 17449 - DNA, 26 bp, synthetic construct
  misc_feature 1..26: note = Probe
  source 1..26: mol_type = other DNA
atggcacatgcagcgcaagtaggtct

SEQ ID NO: 17450 - DNA, 27 bp, synthetic construct
  misc_feature 1..27: note = Probe
  source 1..27: mol_type = other DNA
atggcacatgcagcgcaagtaggtcta

SEQ ID NO: 17451 - DNA, 28 bp, synthetic construct
  misc_feature 1..28: note = Probe
  source 1..28: mol_type = other DNA
atggcacatgcagcgcaagtaggtctac

SEQ ID NO: 17452 - DNA, 29 bp, synthetic construct
  misc_feature 1..29: note = Probe
  source 1..29: mol_type = other DNA
atggcacatgcagcgcaagtaggtctaca

SEQ ID NO: 17453 - DNA, 30 bp, synthetic construct; identical to SEQ ID NO: 3841
  misc_feature 1..30: note = Probe
  source 1..30: mol_type = other DNA

SEQ ID NO: 17454 - DNA, 19 bp, synthetic construct
  misc_feature 1..19: note = Probe
  source 1..19: mol_type = other DNA
atggcacggcaaggggctc

SEQ ID NO: 17455 - DNA, 16 bp, synthetic construct
  misc_feature 1..16: note = Probe
  source 1..16: mol_type = other DNA
atggccgcatatattt

SEQ ID NO: 17456 - DNA, 33 bp, synthetic construct
  misc_feature 1..33: note = Probe
  source 1..33: mol_type = other DNA
atggcgtgggttcgaatcccaccgctgccacac

SEQ ID NO: 17457 - DNA, 25 bp, synthetic construct
  misc_feature 1..25: note = Probe
  source 1..25: mol_type = other DNA
atgggtggttcagtggtagaattct

SEQ ID NO: 17458 - DNA, 27 bp, synthetic construct
  misc_feature 1..27: note = Probe
  source 1..27: mol_type = other DNA
atgggtggttcagtggtagaattctcg

SEQ ID NO: 17459 - DNA, 28 bp, synthetic construct
  misc_feature 1..28: note = Probe
  source 1..28: mol_type = other DNA
atgggtggttcagtggtagaattctcgc

SEQ ID NO: 17460 - DNA, 24 bp, synthetic construct
  misc_feature 1..24: note = Probe
  source 1..24: mol_type = other DNA
atggtctagcggttaggattcctg

SEQ ID NO: 17461 - DNA, 30 bp, synthetic construct; identical to SEQ ID NO: 3846
  misc_feature 1..30: note = Probe
  source 1..30: mol_type = other DNA

SEQ ID NO: 17462 - DNA, 31 bp, synthetic construct; identical to SEQ ID NO: 3847
  misc_feature 1..31: note = Probe
  source 1..31: mol_type = other DNA

SEQ ID NO: 17463 - DNA, 35 bp, synthetic construct; identical to SEQ ID NO: 3849
  misc_feature 1..35: note = Probe
  source 1..35: mol_type = other DNA

SEQ ID NO: 17464 - DNA, 30 bp, synthetic construct
  misc_feature 1..30: note = Probe
  source 1..30: mol_type = other DNA
atggtggttcagtggtagaattctcgcctt

SEQ ID NO: 17465 - DNA, 16 bp, synthetic construct
  misc_feature 1..16: note = Probe
  source 1..16: mol_type = other DNA
atggttagcactctgg

SEQ ID NO: 17466 - DNA, 17 bp, synthetic construct
  misc_feature 1..17: note = Probe
  source 1..17: mol_type = other DNA
atggttagcactctgga

SEQ ID NO: 17467 - DNA, 19 bp, synthetic construct
  misc_feature 1..19: note = Probe
  source 1..19: mol_type = other DNA
atggttagcactctggact

SEQ ID NO: 17468 - DNA, 20 bp, synthetic construct
  misc_feature 1..20: note = Probe
  source 1..20: mol_type = other DNA
atggttagcactctggactc

SEQ ID NO: 17469 - DNA, 22 bp, synthetic construct
  misc_feature 1..22: note = Probe
  source 1..22: mol_type = other DNA
atggttagcactctggactctg

SEQ ID NO: 17470 - DNA, 36 bp, synthetic construct
  misc_feature 1..36: note = Probe
  source 1..36: mol_type = other DNA
atggttagcactctggactctgaatccagcgatccg

SEQ ID NO: 17471 - DNA, 38 bp, synthetic construct
  misc_feature 1..38: note = Probe
  source 1..38: mol_type = other DNA
atggttagcactctggactctgaatccagcgatccgag

SEQ ID NO: 17472 - DNA, 39 bp, synthetic construct
  misc_feature 1..39: note = Probe
  source 1..39: mol_type = other DNA
atggttagcactctggactctgaatccagcgatccgagt

SEQ ID NO: 17473 - DNA, 16 bp, synthetic construct
  misc_feature 1..16: note = Probe
  source 1..16: mol_type = other DNA
atgtccgcgtgggttc

SEQ ID NO: 17474 - DNA, 30 bp, synthetic construct; identical to SEQ ID NO: 9409
  misc_feature 1..30: note = Probe
  source 1..30: mol_type = other DNA

SEQ ID NO: 17475 - DNA, 22 bp, synthetic construct
  misc_feature 1..22: note = Probe
  source 1..22: mol_type = other DNA
atgtctaacaacatggctttct

SEQ ID NO: 17476 - DNA, 24 bp, synthetic construct
  misc_feature 1..24: note = Probe
  source 1..24: mol_type = other DNA
atgtctaacaacatggctttctca

SEQ ID NO: 17477 - DNA, 25 bp, synthetic construct
  misc_feature 1..25: note = Probe
  source 1..25: mol_type = other DNA
atgtctaacaacatggctttctcaa

SEQ ID NO: 17478 - DNA, 26 bp, synthetic construct
  misc_feature 1..26: note = Probe
  source 1..26: mol_type = other DNA
atgtctaacaacatggctttctcaac

SEQ ID NO: 17479 - DNA, 27 bp, synthetic construct
  misc_feature 1..27: note = Probe
  source 1..27: mol_type = other DNA
atgtctaacaacatggctttctcaact

SEQ ID NO: 17480 - DNA, 30 bp, synthetic construct
  misc_feature 1..30: note = Probe
  source 1..30: mol_type = other DNA
atgtctccatctattgatgagggtcttact

SEQ ID NO: 17481 - DNA, 17 bp, synthetic construct
  misc_feature 1..17: note = Probe
  source 1..17: mol_type = other DNA
atgtggtggcttacttt

SEQ ID NO: 17482 - DNA, 18 bp, synthetic construct
  misc_feature 1..18: note = Probe
  source 1..18: mol_type = other DNA
atgtggtggcttactttt

SEQ ID NO: 17483 - DNA, 21 bp, synthetic construct
  misc_feature 1..21: note = Probe
  source 1..21: mol_type = other DNA
atgtttagacgggctcacatc

SEQ ID NO: 17484 - DNA, 22 bp, synthetic construct
  misc_feature 1..22: note = Probe
  source 1..22: mol_type = other DNA
atgtttagacgggctcacatca

SEQ ID NO: 17485 - DNA, 25 bp, synthetic construct
  misc_feature 1..25: note = Probe
  source 1..25: mol_type = other DNA
atgtttagacgggctcacatcaccc

SEQ ID NO: 17486 - DNA, 26 bp, synthetic construct
  misc_feature 1..26: note = Probe
  source 1..26: mol_type = other DNA
atgtttagacgggctcacatcacccc

SEQ ID NO: 17487 - DNA, 28 bp, synthetic construct
  misc_feature 1..28: note = Probe
  source 1..28: mol_type = other DNA
atgtttagacgggctcacatcaccccat

SEQ ID NO: 17488 - DNA, 29 bp, synthetic construct
  misc_feature 1..29: note = Probe
  source 1..29: mol_type = other DNA
atgtttagacgggctcacatcaccccata

SEQ ID NO: 17489 - DNA, 30 bp, synthetic construct; identical to SEQ ID NO: 419
  misc_feature 1..30: note = Probe
  source 1..30: mol_type = other DNA

SEQ ID NO: 17490 - DNA, 31 bp, synthetic construct; identical to SEQ ID NO: 3863
  misc_feature 1..31: note = Probe
  source 1..31: mol_type = other DNA

SEQ ID NO: 17491 - DNA, 33 bp, synthetic construct; identical to SEQ ID NO: 3865
  misc_feature 1..33: note = Probe
  source 1..33: mol_type = other DNA

SEQ ID NO: 17492 - DNA, 35 bp, synthetic construct; identical to SEQ ID NO: 3866
  misc_feature 1..35: note = Probe
  source 1..35: mol_type = other DNA

SEQ ID NO: 17493 - DNA, 36 bp, synthetic construct; identical to SEQ ID NO: 3867
  misc_feature 1..36: note = Probe
  source 1..36: mol_type = other DNA

SEQ ID NO: 17494 - DNA, 37 bp, synthetic construct; identical to SEQ ID NO: 3868
  misc_feature 1..37: note = Probe
  source 1..37: mol_type = other DNA

SEQ ID NO: 17495 - DNA, 38 bp, synthetic construct; identical to SEQ ID NO: 3869
  misc_feature 1..38: note = Probe
  source 1..38: mol_type = other DNA

SEQ ID NO: 17496 - DNA, 20 bp, synthetic construct
  misc_feature 1..20: note = Probe
  source 1..20: mol_type = other DNA
attaactagttttgacaaca

SEQ ID NO: 17497 - DNA, 31 bp, synthetic construct
  misc_feature 1..31: note = Probe
  source 1..31: mol_type = other DNA
attaactagttttgacaacattcaaaaaaga

SEQ ID NO: 17498 - DNA, 33 bp, synthetic construct
  misc_feature 1..33: note = Probe
  source 1..33: mol_type = other DNA
attaactagttttgacaacattcaaaaaagagt

SEQ ID NO: 17499 - DNA, 34 bp, synthetic construct
  misc_feature 1..34: note = Probe
  source 1..34: mol_type = other DNA
attaactagttttgacaacattcaaaaaagagta

SEQ ID NO: 17500 - DNA, 35 bp, synthetic construct
  misc_feature 1..35: note = Probe
  source 1..35: mol_type = other DNA
attaactagttttgacaacattcaaaaaagagtaa

SEQ ID NO: 17501 - DNA, 36 bp, synthetic construct
  misc_feature 1..36: note = Probe
  source 1..36: mol_type = other DNA
attaactagttttgacaacattcaaaaaagagtaat

SEQ ID NO: 17502 - DNA, 37 bp, synthetic construct; identical to SEQ ID NO: 3871
  misc_feature 1..37: note = Probe
  source 1..37: mol_type = other DNA

SEQ ID NO: 17503 - DNA, 33 bp, synthetic construct; identical to SEQ ID NO: 3873
  misc_feature 1..33: note = Probe
  source 1..33: mol_type = other DNA

SEQ ID NO: 17504 - DNA, 20 bp, synthetic construct
  misc_feature 1..20: note = Probe
  source 1..20: mol_type = other DNA
attaatcccctggcccaacc

SEQ ID NO: 17505 - DNA, 21 bp, synthetic construct
  misc_feature 1..21: note = Probe
  source 1..21: mol_type = other DNA
attaatcccctggcccaaccc

SEQ ID NO: 17506 - DNA, 22 bp, synthetic construct
  misc_feature 1..22: note = Probe
  source 1..22: mol_type = other DNA
attaatcccctggcccaacccg

SEQ ID NO: 17507 - DNA, 23 bp, synthetic construct
  misc_feature 1..23: note = Probe
  source 1..23: mol_type = other DNA
attaatcccctggcccaacccgt

SEQ ID NO: 17508 - DNA, 24 bp, synthetic construct
  misc_feature 1..24: note = Probe
  source 1..24: mol_type = other DNA
attaatcccctggcccaacccgtc

SEQ ID NO: 17509 - DNA, 25 bp, synthetic construct
  misc_feature 1..25: note = Probe
  source 1..25: mol_type = other DNA
attaatcccctggcccaacccgtca

SEQ ID NO: 17510 - DNA, 27 bp, synthetic construct
  misc_feature 1..27: note = Probe
  source 1..27: mol_type = other DNA
attaatcccctggcccaacccgtcatc

SEQ ID NO: 17511 - DNA, 28 bp, synthetic construct
  misc_feature 1..28: note = Probe
  source 1..28: mol_type = other DNA
attaatcccctggcccaacccgtcatct

SEQ ID NO: 17512 - DNA, 29 bp, synthetic construct
  misc_feature 1..29: note = Probe
  source 1..29: mol_type = other DNA
attaatcccctggcccaacccgtcatcta

SEQ ID NO: 17513 - DNA, 30 bp, synthetic construct; identical to SEQ ID NO: 3877
  misc_feature 1..30: note = Probe
  source 1..30: mol_type = other DNA

SEQ ID NO: 17514 - DNA, 50 bp, synthetic construct; identical to SEQ ID NO: 420
  misc_feature 1..50: note = Probe
  source 1..50: mol_type = other DNA

SEQ ID NO: 17515 - DNA, 50 bp, synthetic construct; identical to SEQ ID NO: 421
  misc_feature 1..50: note = Probe
  source 1..50: mol_type = other DNA

SEQ ID NO: 17516 - DNA, 33 bp, synthetic construct
  misc_feature 1..33: note = Probe
  source 1..33: mol_type = other DNA
attcaaaggttccgggttcgagtcccggcggag

SEQ ID NO: 17517 - DNA, 34 bp, synthetic construct
  misc_feature 1..34: note = Probe
  source 1..34: mol_type = other DNA
attcaaaggttccgggttcgagtcccggcggagt

SEQ ID NO: 17518 - DNA, 36 bp, synthetic construct
  misc_feature 1..36: note = Probe
  source 1..36: mol_type = other DNA
attcaaaggttccgggttcgagtcccggcggagtcg

SEQ ID NO: 17519 - DNA, 39 bp, synthetic construct
  misc_feature 1..39: note = Probe
  source 1..39: mol_type = other DNA
attcaaaggttccgggttcgagtcccggcggagtcgtaa

SEQ ID NO: 17520 - DNA, 34 bp, synthetic construct
  misc_feature 1..34: note = Probe
  source 1..34: mol_type = other DNA
attcaaaggttgtgggttcgagtcccaccagagt

SEQ ID NO: 17521 - DNA, 36 bp, synthetic construct
  misc_feature 1..36: note = Probe
  source 1..36: mol_type = other DNA
attcaaaggttgtgggttcgagtcccaccagagtcg

SEQ ID NO: 17522 - DNA, 45 bp, synthetic construct
  misc_feature 1..45: note = Probe
  source 1..45: mol_type = other DNA
attcccattcttgcgacccgggttcgattcccgggcggcgcactt

SEQ ID NO: 17523 - DNA, 19 bp, synthetic construct
  misc_feature 1..19: note = Probe
  source 1..19: mol_type = other DNA
attccccgacggggaggca

SEQ ID NO: 17524 - DNA, 19 bp, synthetic construct
  misc_feature 1..19: note = Probe
  source 1..19: mol_type = other DNA
attcccggccaacgcaagt

SEQ ID NO: 17525 - DNA, 19 bp, synthetic construct
  misc_feature 1..19: note = Probe
  source 1..19: mol_type = other DNA
attcccggccaacgcagtg

SEQ ID NO: 17526 - DNA, 19 bp, synthetic construct
  misc_feature 1..19: note = Probe
  source 1..19: mol_type = other DNA
attcccggcccatgcagca

SEQ ID NO: 17527 - DNA, 19 bp, synthetic construct
  misc_feature 1..19: note = Probe
  source 1..19: mol_type = other DNA
attccggctcgaaggaagt

SEQ ID NO: 17528 - DNA, 19 bp, synthetic construct
  misc_feature 1..19: note = Probe
  source 1..19: mol_type = other DNA
attccggctcgaaggagct

SEQ ID NO: 17529 - DNA, 49 bp, synthetic construct; identical to SEQ ID NO: 3881
  misc_feature 1..49: note = Probe
  source 1..49: mol_type = other DNA

SEQ ID NO: 17530 - DNA, 50 bp, synthetic construct; identical to SEQ ID NO: 3882
  misc_feature 1..50: note = Probe
  source 1..50: mol_type = other DNA

SEQ ID NO: 17531 - DNA, 30 bp, synthetic construct
  misc_feature 1..30: note = Probe
  source 1..30: mol_type = other DNA
attcctggttttcacccaggtggcccgggt

SEQ ID NO: 17532 - DNA, 31 bp, synthetic construct
  misc_feature 1..31: note = Probe
  source 1..31: mol_type = other DNA
attcctggttttcacccaggtggcccgggtt

SEQ ID NO: 17533 - DNA, 33 bp, synthetic construct; identical to SEQ ID NO: 3885
  misc_feature 1..33: note = Probe
  source 1..33: mol_type = other DNA

SEQ ID NO: 17534 - DNA, 36 bp, synthetic construct; identical to SEQ ID NO: 3887
  misc_feature 1..36: note = Probe
  source 1..36: mol_type = other DNA

SEQ ID NO: 17535 - DNA, 37 bp, synthetic construct; identical to SEQ ID NO: 3888
  misc_feature 1..37: note = Probe
  source 1..37: mol_type = other DNA

SEQ ID NO: 17536 - DNA, 38 bp, synthetic construct
  misc_feature 1..38: note = Probe
  source 1..38: mol_type = other DNA
attcgaagaagcagcttcaaacctgccggggcttctcc

SEQ ID NO: 17537 - DNA, 30 bp, synthetic construct
  misc_feature 1..30: note = Probe
  source 1..30: mol_type = other DNA
attcggcgctctcaccgccgcggcccgggt

SEQ ID NO: 17538 - DNA, 36 bp, synthetic construct
  misc_feature 1..36: note = Probe
  source 1..36: mol_type = other DNA
attctcagggatgggttcgattctcatagtcctaga

SEQ ID NO: 17539 - DNA, 38 bp, synthetic construct; identical to SEQ ID NO: 3893
  misc_feature 1..38: note = Probe
  source 1..38: mol_type = other DNA

SEQ ID NO: 17540 - DNA, 30 bp, synthetic construct
  misc_feature 1..30: note = Probe
  source 1..30: mol_type = other DNA
attctcgcctgccacgcgggaggcccgggt

SEQ ID NO: 17541 - DNA, 33 bp, synthetic construct
  misc_feature 1..33: note = Probe
  source 1..33: mol_type = other DNA
attcttgcgacccgggttcgattcccgggcggc

SEQ ID NO: 17542 - DNA, 34 bp, synthetic construct
  misc_feature 1..34: note = Probe
  source 1..34: mol_type = other DNA
attcttgcgacccgggttcgattcccgggcggcg

SEQ ID NO: 17543 - DNA, 36 bp, synthetic construct
  misc_feature 1..36: note = Probe
  source 1..36: mol_type = other DNA
attcttgcgacccgggttcgattcccgggcggcgca

SEQ ID NO: 17544 - DNA, 38 bp, synthetic construct; identical to SEQ ID NO: 3895
  misc_feature 1..38: note = Probe
  source 1..38: mol_type = other DNA

SEQ ID NO: 17545 - DNA, 39 bp, synthetic construct; identical to SEQ ID NO: 3896
  misc_feature 1..39: note = Probe
  source 1..39: mol_type = other DNA

SEQ ID NO: 17546 - DNA, 39 bp, synthetic construct; identical to SEQ ID NO: 3898
  misc_feature 1..39: note = Probe
  source 1..39: mol_type = other DNA

SEQ ID NO: 17547 - DNA, 42 bp, synthetic construct
  misc_feature 1..42: note = Probe
  source 1..42: mol_type = other DNA
attgcaaattcgaagaagcagcttcaaacctgccggggcttc

SEQ ID NO: 17548 - DNA, 43 bp, synthetic construct; identical to SEQ ID NO: 3905
  misc_feature 1..43: note = Probe
  source 1..43: mol_type = other DNA

SEQ ID NO: 17549 - DNA, 44 bp, synthetic construct; identical to SEQ ID NO: 3906
  misc_feature 1..44: note = Probe
  source 1..44: mol_type = other DNA

SEQ ID NO: 17550 - DNA, 19 bp, synthetic construct
  misc_feature 1..19: note = Probe
  source 1..19: mol_type = other DNA
attggtcgtggttgtagtc

SEQ ID NO: 17551 - DNA, 20 bp, synthetic construct
  misc_feature 1..20: note = Probe
  source 1..20: mol_type = other DNA
attggtcgtggttgtagtcc

SEQ ID NO: 17552 - DNA, 23 bp, synthetic construct
  misc_feature 1..23: note = Probe
  source 1..23: mol_type = other DNA
attggtcgtggttgtagtccgtg

SEQ ID NO: 17553 - DNA, 26 bp, synthetic construct
  misc_feature 1..26: note = Probe
  source 1..26: mol_type = other DNA
attggtcgtggttgtagtccgtgcga

SEQ ID NO: 17554 - DNA, 30 bp, synthetic construct; identical to SEQ ID NO: 9429
  misc_feature 1..30: note = Probe
  source 1..30: mol_type = other DNA

SEQ ID NO: 17555 - DNA, 32 bp, synthetic construct
  misc_feature 1..32: note = Probe
  source 1..32: mol_type = other DNA
attggtcgtggttgtagtccgtgcgagaataa

SEQ ID NO: 17556 - DNA, 33 bp, synthetic construct; identical to SEQ ID NO: 3910
  misc_feature 1..33: note = Probe
  source 1..33: mol_type = other DNA

SEQ ID NO: 17557 - DNA, 34 bp, synthetic construct; identical to SEQ ID NO: 3911
  misc_feature 1..34: note = Probe
  source 1..34: mol_type = other DNA

SEQ ID NO: 17558 - DNA, 23 bp, synthetic construct
  misc_feature 1..23: note = Probe
  source 1..23: mol_type = other DNA
attggtggttcagtggtagaatt

SEQ ID NO: 17559 - DNA, 25 bp, synthetic construct
  misc_feature 1..25: note = Probe
  source 1..25: mol_type = other DNA
attggtggttcagtggtagaattct

SEQ ID NO: 17560 - DNA, 26 bp, synthetic construct
  misc_feature 1..26: note = Probe
  source 1..26: mol_type = other DNA
attggtggttcagtggtagaattctc

SEQ ID NO: 17561 - DNA, 27 bp, synthetic construct
  misc_feature 1..27: note = Probe
  source 1..27: mol_type = other DNA
attggtggttcagtggtagaattctcg

SEQ ID NO: 17562 - DNA, 28 bp, synthetic construct
  misc_feature 1..28: note = Probe
  source 1..28: mol_type = other DNA
attggtggttcagtggtagaattctcgc

SEQ ID NO: 17563 - DNA, 29 bp, synthetic construct
  misc_feature 1..29: note = Probe
  source 1..29: mol_type = other DNA
attggtggttcagtggtagaattctcgcc

SEQ ID NO: 17564 - DNA, 30 bp, synthetic construct; identical to SEQ ID NO: 3916
  misc_feature 1..30: note = Probe
  source 1..30: mol_type = other DNA

SEQ ID NO: 17565 - DNA, 31 bp, synthetic construct; identical to SEQ ID NO: 3917
  misc_feature 1..31: note = Probe
  source 1..31: mol_type = other DNA

SEQ ID NO: 17566 - DNA, 32 bp, synthetic construct
  misc_feature 1..32: note = Probe
  source 1..32: mol_type = other DNA
attggtggttcagtggtagaattctcgcctcc

SEQ ID NO: 17567 - DNA, 33 bp, synthetic construct; identical to SEQ ID NO: 3918
  misc_feature 1..33: note = Probe
  source 1..33: mol_type = other DNA

SEQ ID NO: 17568 - DNA, 31 bp, synthetic construct; identical to SEQ ID NO: 3919
  misc_feature 1..31: note = Probe
  source 1..31: mol_type = other DNA

SEQ ID NO: 17569 - DNA, 32 bp, synthetic construct; identical to SEQ ID NO: 3920
  misc_feature 1..32: note = Probe
  source 1..32: mol_type = other DNA

SEQ ID NO: 17570 - DNA, 33 bp, synthetic construct; identical to SEQ ID NO: 3921
  misc_feature 1..33: note = Probe
  source 1..33: mol_type = other DNA

SEQ ID NO: 17571 - DNA, 34 bp, synthetic construct; identical to SEQ ID NO: 3922
  misc_feature 1..34: note = Probe
  source 1..34: mol_type = other DNA

SEQ ID NO: 17572 - DNA, 36 bp, synthetic construct
  misc_feature 1..36: note = Probe
  source 1..36: mol_type = other DNA
attggtggttcagtggtagaattctcgcctgccacg

SEQ ID NO: 17573 - DNA, 38 bp, synthetic construct
  misc_feature 1..38: note = Probe
  source 1..38: mol_type = other DNA
attggtggttcagtggtagaattctcgcctgccacgcg

SEQ ID NO: 17574 - DNA, 18 bp, synthetic construct
  misc_feature 1..18: note = Probe
  source 1..18: mol_type = other DNA
attgtgaatctgacaaca

SEQ ID NO: 17575 - DNA, 31 bp, synthetic construct; identical to SEQ ID NO: 3923
  misc_feature 1..31: note = Probe
  source 1..31: mol_type = other DNA

SEQ ID NO: 17576 - DNA, 34 bp, synthetic construct; identical to SEQ ID NO: 3926
  misc_feature 1..34: note = Probe
  source 1..34: mol_type = other DNA

SEQ ID NO: 17577 - DNA, 43 bp, synthetic construct; identical to SEQ ID NO: 3930
  misc_feature 1..43: note = Probe
  source 1..43: mol_type = other DNA

SEQ ID NO: 17578 - DNA, 44 bp, synthetic construct; identical to SEQ ID NO: 3931
  misc_feature 1..44: note = Probe
  source 1..44: mol_type = other DNA

SEQ ID NO: 17579 - DNA, 45 bp, synthetic construct; identical to SEQ ID NO: 3932
  misc_feature 1..45: note = Probe
  source 1..45: mol_type = other DNA

SEQ ID NO: 17580 - DNA, 50 bp, synthetic construct; identical to SEQ ID NO: 3934
  misc_feature 1..50: note = Probe
  source 1..50: mol_type = other DNA

SEQ ID NO: 17581 - DNA, 20 bp, synthetic construct
  misc_feature 1..20: note = Probe
  source 1..20: mol_type = other DNA
atttcaacttaacttgaccg

SEQ ID NO: 17582 - DNA, 22 bp, synthetic construct
  misc_feature 1..22: note = Probe
  source 1..22: mol_type = other DNA
atttcaacttaacttgaccgct

SEQ ID NO: 17583 - DNA, 24 bp, synthetic construct
  misc_feature 1..24: note = Probe
  source 1..24: mol_type = other DNA
atttcaacttaacttgaccgctct

SEQ ID NO: 17584 - DNA, 26 bp, synthetic construct
  misc_feature 1..26: note = Probe
  source 1..26: mol_type = other DNA
atttcaacttaacttgaccgctctga

SEQ ID NO: 17585 - DNA, 27 bp, synthetic construct
  misc_feature 1..27: note = Probe
  source 1..27: mol_type = other DNA
atttcaacttaacttgaccgctctgag

SEQ ID NO: 17586 - DNA, 28 bp, synthetic construct
  misc_feature 1..28: note = Probe
  source 1..28: mol_type = other DNA
atttcaacttaacttgaccgctctgagc

SEQ ID NO: 17587 - DNA, 29 bp, synthetic construct
  misc_feature 1..29: note = Probe
  source 1..29: mol_type = other DNA
atttcaacttaacttgaccgctctgagct

SEQ ID NO: 17588 - DNA, 36 bp, synthetic construct
  misc_feature 1..36: note = Probe
  source 1..36: mol_type = other DNA
atttcgactcattaaattatgataatcatatttacc

SEQ ID NO: 17589 - DNA, 41 bp, synthetic construct
  misc_feature 1..41: note = Probe
  source 1..41: mol_type = other DNA
atttcgactcattaaattatgataatcatatttaccaaatg

SEQ ID NO: 17590 - DNA, 26 bp, synthetic construct
  misc_feature 1..26: note = Probe
  source 1..26: mol_type = other DNA
caaaaattttggtgcaactccaaata

SEQ ID NO: 17591 - DNA, 35 bp, synthetic construct
  misc_feature 1..35: note = Probe
  source 1..35: mol_type = other DNA
caaaaattttggtgcaactccaaataaaagtaata

SEQ ID NO: 17592 - DNA, 26 bp, synthetic construct
  misc_feature 1..26: note = Probe
  source 1..26: mol_type = other DNA
caaaacatcagattgtgaatctgaca

SEQ ID NO: 17593 - DNA, 27 bp, synthetic construct
  misc_feature 1..27: note = Probe
  source 1..27: mol_type = other DNA
caaaacatcagattgtgaatctgacaa

SEQ ID NO: 17594 - DNA, 28 bp, synthetic construct
  misc_feature 1..28: note = Probe
  source 1..28: mol_type = other DNA
caaaacatcagattgtgaatctgacaac

SEQ ID NO: 17595 - DNA, 29 bp, synthetic construct
  misc_feature 1..29: note = Probe
  source 1..29: mol_type = other DNA
caaaacatcagattgtgaatctgacaaca

SEQ ID NO: 17596 - DNA, 30 bp, synthetic construct; identical to SEQ ID NO: 3948
  misc_feature 1..30: note = Probe
  source 1..30: mol_type = other DNA

SEQ ID NO: 17597 - DNA, 31 bp, synthetic construct
  misc_feature 1..31: note = Probe
  source 1..31: mol_type = other DNA
caaaacatcagattgtgaatctgacaacaga

SEQ ID NO: 17598 - DNA, 32 bp, synthetic construct; identical to SEQ ID NO: 3949
  misc_feature 1..32: note = Probe
  source 1..32: mol_type = other DNA

SEQ ID NO: 17599 - DNA, 33 bp, synthetic construct; identical to SEQ ID NO: 3950
  misc_feature 1..33: note = Probe
  source 1..33: mol_type = other DNA

SEQ ID NO: 17600 - DNA, 34 bp, synthetic construct; identical to SEQ ID NO: 3951
  misc_feature 1..34: note = Probe
  source 1..34: mol_type = other DNA

SEQ ID NO: 17601 - DNA, 35 bp, synthetic construct; identical to SEQ ID NO: 3952
  misc_feature 1..35: note = Probe
  source 1..35: mol_type = other DNA

SEQ ID NO: 17602 - DNA, 44 bp, synthetic construct; identical to SEQ ID NO: 434
  misc_feature 1..44: note = Probe
  source 1..44: mol_type = other DNA

SEQ ID NO: 17603 - DNA, 46 bp, synthetic construct; identical to SEQ ID NO: 436
  misc_feature 1..46: note = Probe
  source 1..46: mol_type = other DNA

SEQ ID NO: 17604 - DNA, 49 bp, synthetic construct; identical to SEQ ID NO: 3955
  misc_feature 1..49: note = Probe
  source 1..49: mol_type = other DNA

SEQ ID NO: 17605 - DNA, 39 bp, synthetic construct
  misc_feature 1..39: note = Probe
  source 1..39: mol_type = other DNA
caaaacgaatgatttcgactcattaaattatgataatca

SEQ ID NO: 17606 - DNA, 49 bp, synthetic construct; identical to SEQ ID NO: 3957
  misc_feature 1..49: note = Probe
  source 1..49: mol_type = other DNA

SEQ ID NO: 17607 - DNA, 50 bp, synthetic construct; identical to SEQ ID NO: 3958
  misc_feature 1..50: note = Probe
  source 1..50: mol_type = other DNA

SEQ ID NO: 17608 - DNA, 16 bp, synthetic construct
  misc_feature 1..16: note = Probe
  source 1..16: mol_type = other DNA
caaacccactccacct

SEQ ID NO: 17609 - DNA, 22 bp, synthetic construct
  misc_feature 1..22: note = Probe
  source 1..22: mol_type = other DNA
caaagacaccccccacagttta

SEQ ID NO: 17610 - DNA, 25 bp, synthetic construct
  misc_feature 1..25: note = Probe
  source 1..25: mol_type = other DNA
caaagacaccccccacagtttatgt

SEQ ID NO: 17611 - DNA, 28 bp, synthetic construct
  misc_feature 1..28: note = Probe
  source 1..28: mol_type = other DNA
caaagacaccccccacagtttatgtagc

SEQ ID NO: 17612 - DNA, 29 bp, synthetic construct
  misc_feature 1..29: note = Probe
  source 1..29: mol_type = other DNA
caaagacaccccccacagtttatgtagct

SEQ ID NO: 17613 - DNA, 30 bp, synthetic construct
  misc_feature 1..30: note = Probe
  source 1..30: mol_type = other DNA
caaagacaccccccacagtttatgtagctt

SEQ ID NO: 17614 - DNA, 31 bp, synthetic construct; identical to SEQ ID NO: 3960
  misc_feature 1..31: note = Probe
  source 1..31: mol_type = other DNA

SEQ ID NO: 17615 - DNA, 32 bp, synthetic construct
  misc_feature 1..32: note = Probe
  source 1..32: mol_type = other DNA
caaagacaccccccacagtttatgtagcttac

SEQ ID NO: 17616 - DNA, 33 bp, synthetic construct; identical to SEQ ID NO: 3961
  misc_feature 1..33: note = Probe
  source 1..33: mol_type = other DNA

SEQ ID NO: 17617 - DNA, 34 bp, synthetic construct
  misc_feature 1..34: note = Probe
  source 1..34: mol_type = other DNA
caaagacaccccccacagtttatgtagcttacct

SEQ ID NO: 17618 - DNA, 36 bp, synthetic construct; identical to SEQ ID NO: 3962
  misc_feature 1..36: note = Probe
  source 1..36: mol_type = other DNA

SEQ ID NO: 17619 - DNA, 38 bp, synthetic construct
  misc_feature 1..38: note = Probe
  source 1..38: mol_type = other DNA
caaagacaccccccacagtttatgtagcttacctcctc

SEQ ID NO: 17620 - DNA, 39 bp, synthetic construct
  misc_feature 1..39: note = Probe
  source 1..39: mol_type = other DNA
caaagacaccccccacagtttatgtagcttacctcctca

SEQ ID NO: 17621 - DNA, 41 bp, synthetic construct
  misc_feature 1..41: note = Probe
  source 1..41: mol_type = other DNA
caaagacaccccccacagtttatgtagcttacctcctcaaa

SEQ ID NO: 17622 - DNA, 16 bp, synthetic construct
  misc_feature 1..16: note = Probe
  source 1..16: mol_type = other DNA
caaagcaatacactga

SEQ ID NO: 17623 - DNA, 17 bp, synthetic construct
  misc_feature 1..17: note = Probe
  source 1..17: mol_type = other DNA
caaagcaatacactgaa

SEQ ID NO: 17624 - DNA, 30 bp, synthetic construct
  misc_feature 1..30: note = Probe
  source 1..30: mol_type = other DNA
caaagcaatacactgaaaatgtttagacgg

SEQ ID NO: 17625 - DNA, 36 bp, synthetic construct
  misc_feature 1..36: note = Probe
  source 1..36: mol_type = other DNA
caaagcaatacactgaaaatgtttagacgggctcac

SEQ ID NO: 17626 - DNA, 16 bp, synthetic construct
  misc_feature 1..16: note = Probe
  source 1..16: mol_type = other DNA
caaagcacccaactta

SEQ ID NO: 17627 - DNA, 17 bp, synthetic construct
  misc_feature 1..17: note = Probe
  source 1..17: mol_type = other DNA
caaagcacccaacttac

SEQ ID NO: 17628 - DNA, 18 bp, synthetic construct
  misc_feature 1..18: note = Probe
  source 1..18: mol_type = other DNA
caaagcacccaacttaca

SEQ ID NO: 17629 - DNA, 20 bp, synthetic construct
  misc_feature 1..20: note = Probe
  source 1..20: mol_type = other DNA
caaagcacccaacttacact

SEQ ID NO: 17630 - DNA, 22 bp, synthetic construct
  misc_feature 1..22: note = Probe
  source 1..22: mol_type = other DNA
caaagcacccaacttacactta

SEQ ID NO: 17631 - DNA, 26 bp, synthetic construct
  misc_feature 1..26: note = Probe
  source 1..26: mol_type = other DNA
caaagcacccaacttacacttaggag

SEQ ID NO: 17632 - DNA, 27 bp, synthetic construct
  misc_feature 1..27: note = Probe
  source 1..27: mol_type = other DNA
caaagcacccaacttacacttaggaga

SEQ ID NO: 17633 - DNA, 28 bp, synthetic construct
  misc_feature 1..28: note = Probe
  source 1..28: mol_type = other DNA
caaagcacccaacttacacttaggagat

SEQ ID NO: 17634 - DNA, 29 bp, synthetic construct
  misc_feature 1..29: note = Probe
  source 1..29: mol_type = other DNA
caaagcacccaacttacacttaggagatt

SEQ ID NO: 17635 - DNA, 30 bp, synthetic construct
  misc_feature 1..30: note = Probe
  source 1..30: mol_type = other DNA
caaagcacccaacttacacttaggagattt

SEQ ID NO: 17636 - DNA, 31 bp, synthetic construct
  misc_feature 1..31: note = Probe
  source 1..31: mol_type = other DNA
caaagcacccaacttacacttaggagatttc

SEQ ID NO: 17637 - DNA, 32 bp, synthetic construct; identical to SEQ ID NO: 3981
  misc_feature 1..32: note = Probe
  source 1..32: mol_type = other DNA

SEQ ID NO: 17638 - DNA, 33 bp, synthetic construct; identical to SEQ ID NO: 3982
  misc_feature 1..33: note = Probe
  source 1..33: mol_type = other DNA

SEQ ID NO: 17639 - DNA, 34 bp, synthetic construct; identical to SEQ ID NO: 3983
  misc_feature 1..34: note = Probe
  source 1..34: mol_type = other DNA

SEQ ID NO: 17640 - DNA, 35 bp, synthetic construct; identical to SEQ ID NO: 3984
  misc_feature 1..35: note = Probe
  source 1..35: mol_type = other DNA

SEQ ID NO: 17641 - DNA, 36 bp, synthetic construct; identical to SEQ ID NO: 3985
  misc_feature 1..36: note = Probe
  source 1..36: mol_type = other DNA

SEQ ID NO: 17642 - DNA, 37 bp, synthetic construct; identical to SEQ ID NO: 443
  misc_feature 1..37: note = Probe
  source 1..37: mol_type = other DNA

SEQ ID NO: 17643 - DNA, 31 bp, synthetic construct
  misc_feature 1..31: note = Probe
  source 1..31: mol_type = other DNA
caaaggttgtgggttcgagtcccaccagagt

SEQ ID NO: 17644 - DNA, 31 bp, synthetic construct; identical to SEQ ID NO: 3988
  misc_feature 1..31: note = Probe
  source 1..31: mol_type = other DNA

SEQ ID NO: 17645 - DNA, 29 bp, synthetic construct
  misc_feature 1..29: note = Probe
  source 1..29: mol_type = other DNA
caaatcacgtcggggtcagcggctatttt

SEQ ID NO: 17646 - DNA, 21 bp, synthetic construct
  misc_feature 1..21: note = Probe
  source 1..21: mol_type = other DNA
caaatcccggacgagccccct

SEQ ID NO: 17647 - DNA, 21 bp, synthetic construct
  misc_feature 1..21: note = Probe
  source 1..21: mol_type = other DNA
caaatccgggtgccccctcaa

SEQ ID NO: 17648 - DNA, 38 bp, synthetic construct
  misc_feature 1..38: note = Probe
  source 1..38: mol_type = other DNA
caaattcgaagaagcagcttcaaacctgccggggcttc

SEQ ID NO: 17649 - DNA, 40 bp, synthetic construct; identical to SEQ ID NO: 3995
  misc_feature 1..40: note = Probe
  source 1..40: mol_type = other DNA

SEQ ID NO: 17650 - DNA, 21 bp, synthetic construct
  misc_feature 1..21: note = Probe
  source 1..21: mol_type = other DNA
caacacctctttacagtgaaa

SEQ ID NO: 17651 - DNA, 22 bp, synthetic construct
  misc_feature 1..22: note = Probe
  source 1..22: mol_type = other DNA
caacacctctttacagtgaaat

SEQ ID NO: 17652 - DNA, 29 bp, synthetic construct
  misc_feature 1..29: note = Probe
  source 1..29: mol_type = other DNA
caacagaggcttacgaccccttatttacc

SEQ ID NO: 17653 - DNA, 30 bp, synthetic construct; identical to SEQ ID NO: 4001
  misc_feature 1..30: note = Probe
  source 1..30: mol_type = other DNA

SEQ ID NO: 17654 - DNA, 31 bp, synthetic construct; identical to SEQ ID NO: 4002
  misc_feature 1..31: note = Probe
  source 1..31: mol_type = other DNA

SEQ ID NO: 17655 - DNA, 32 bp, synthetic construct; identical to SEQ ID NO: 4003
  misc_feature 1..32: note = Probe
  source 1..32: mol_type = other DNA

SEQ ID NO: 17656 - DNA, 15 bp, synthetic construct
  misc_feature 1..15: note = Probe
  source 1..15: mol_type = other DNA
caaccccatggcctc

SEQ ID NO: 17657 - DNA, 28 bp, synthetic construct
  misc_feature 1..28: note = Probe
  source 1..28: mol_type = other DNA
caaccccatggcctccatgactttttca

SEQ ID NO: 17658 - DNA, 15 bp, synthetic construct
  misc_feature 1..15: note = Probe
  source 1..15: mol_type = other DNA
caacccgtcatctac

SEQ ID NO: 17659 - DNA, 27 bp, synthetic construct
  misc_feature 1..27: note = Probe
  source 1..27: mol_type = other DNA
caaccgagcgtccaagctctttccatt

SEQ ID NO: 17660 - DNA, 28 bp, synthetic construct
  misc_feature 1..28: note = Probe
  source 1..28: mol_type = other DNA
caaccgagcgtccaagctctttccattt

SEQ ID NO: 17661 - DNA, 29 bp, synthetic construct
  misc_feature 1..29: note = Probe
  source 1..29: mol_type = other DNA
caaccgagcgtccaagctctttccatttt

SEQ ID NO: 17662 - DNA, 30 bp, synthetic construct
  misc_feature 1..30: note = Probe
  source 1..30: mol_type = other DNA
caaccgagcgtccaagctctttccattttt

SEQ ID NO: 17663 - DNA, 32 bp, synthetic construct; identical to SEQ ID NO: 4008
  misc_feature 1..32: note = Probe
  source 1..32: mol_type = other DNA

SEQ ID NO: 17664 - DNA, 32 bp, synthetic construct; identical to SEQ ID NO: 4010
  misc_feature 1..32: note = Probe
  source 1..32: mol_type = other DNA

SEQ ID NO: 17665 - DNA, 24 bp, synthetic construct
  misc_feature 1..24: note = Probe
  source 1..24: mol_type = other DNA
caaccttcagctatagggtggaga

SEQ ID NO: 17666 - DNA, 22 bp, synthetic construct
  misc_feature 1..22: note = Probe
  source 1..22: mol_type = other DNA
caactaaatactaccgtatggc

SEQ ID NO: 17667 - DNA, 16 bp, synthetic construct
  misc_feature 1..16: note = Probe
  source 1..16: mol_type = other DNA
caacttaacttgaccg

SEQ ID NO: 17668 - DNA, 17 bp, synthetic construct
  misc_feature 1..17: note = Probe
  source 1..17: mol_type = other DNA
caacttaacttgaccgc

SEQ ID NO: 17669 - DNA, 18 bp, synthetic construct
  misc_feature 1..18: note = Probe
  source 1..18: mol_type = other DNA
caacttaacttgaccgct

SEQ ID NO: 17670 - DNA, 19 bp, synthetic construct
  misc_feature 1..19: note = Probe
  source 1..19: mol_type = other DNA
caacttaacttgaccgctc

SEQ ID NO: 17671 - DNA, 20 bp, synthetic construct
  misc_feature 1..20: note = Probe
  source 1..20: mol_type = other DNA
caacttaacttgaccgctct

SEQ ID NO: 17672 - DNA, 21 bp, synthetic construct
  misc_feature 1..21: note = Probe
  source 1..21: mol_type = other DNA
caacttaacttgaccgctctg

SEQ ID NO: 17673 - DNA, 22 bp, synthetic construct
  misc_feature 1..22: note = Probe
  source 1..22: mol_type = other DNA
caacttaacttgaccgctctga

SEQ ID NO: 17674 - DNA, 23 bp, synthetic construct
  misc_feature 1..23: note = Probe
  source 1..23: mol_type = other DNA
caacttaacttgaccgctctgag

SEQ ID NO: 17675 - DNA, 24 bp, synthetic construct
  misc_feature 1..24: note = Probe
  source 1..24: mol_type = other DNA
caacttaacttgaccgctctgagc

SEQ ID NO: 17676 - DNA, 25 bp, synthetic construct
  misc_feature 1..25: note = Probe
  source 1..25: mol_type = other DNA
caacttaacttgaccgctctgagct

SEQ ID NO: 17677 - DNA, 16 bp, synthetic construct
  misc_feature 1..16: note = Probe
  source 1..16: mol_type = other DNA
caacttacacttagga

SEQ ID NO: 17678 - DNA, 17 bp, synthetic construct
  misc_feature 1..17: note = Probe
  source 1..17: mol_type = other DNA
caacttacacttaggag

SEQ ID NO: 17679 - DNA, 18 bp, synthetic construct
  misc_feature 1..18: note = Probe
  source 1..18: mol_type = other DNA
caacttacacttaggaga

SEQ ID NO: 17680 - DNA, 19 bp, synthetic construct
  misc_feature 1..19: note = Probe
  source 1..19: mol_type = other DNA
caacttacacttaggagat

SEQ ID NO: 17681 - DNA, 20 bp, synthetic construct
  misc_feature 1..20: note = Probe
  source 1..20: mol_type = other DNA
caacttacacttaggagatt

SEQ ID NO: 17682 - DNA, 21 bp, synthetic construct
  misc_feature 1..21: note = Probe
  source 1..21: mol_type = other DNA
caacttacacttaggagattt

SEQ ID NO: 17683 - DNA, 22 bp, synthetic construct
  misc_feature 1..22: note = Probe
  source 1..22: mol_type = other DNA
caacttacacttaggagatttc

SEQ ID NO: 17684 - DNA, 23 bp, synthetic construct
  misc_feature 1..23: note = Probe
  source 1..23: mol_type = other DNA
caacttacacttaggagatttca

SEQ ID NO: 17685 - DNA, 27 bp, synthetic construct
  misc_feature 1..27: note = Probe
  source 1..27: mol_type = other DNA
caacttacacttaggagatttcaactt

SEQ ID NO: 17686 - DNA, 28 bp, synthetic construct
  misc_feature 1..28: note = Probe
  source 1..28: mol_type = other DNA
caacttacacttaggagatttcaactta

SEQ ID NO: 17687 - DNA, 29 bp, synthetic construct
  misc_feature 1..29: note = Probe
  source 1..29: mol_type = other DNA
caacttacacttaggagatttcaacttaa

SEQ ID NO: 17688 - DNA, 31 bp, synthetic construct
  misc_feature 1..31: note = Probe
  source 1..31: mol_type = other DNA
caacttacacttaggagatttcaacttaact

SEQ ID NO: 17689 - DNA, 32 bp, synthetic construct
  misc_feature 1..32: note = Probe
  source 1..32: mol_type = other DNA
caacttacacttaggagatttcaacttaactt

SEQ ID NO: 17690 - DNA, 33 bp, synthetic construct; identical to SEQ ID NO: 4024
  misc_feature 1..33: note = Probe
  source 1..33: mol_type = other DNA

SEQ ID NO: 17691 - DNA, 35 bp, synthetic construct; identical to SEQ ID NO: 4025
  misc_feature 1..35: note = Probe
  source 1..35: mol_type = other DNA

SEQ ID NO: 17692 - DNA, 36 bp, synthetic construct
  misc_feature 1..36: note = Probe
  source 1..36: mol_type = other DNA
caacttacacttaggagatttcaacttaacttgacc

SEQ ID NO: 17693 - DNA, 37 bp, synthetic construct; identical to SEQ ID NO: 4026
  misc_feature 1..37: note = Probe
  source 1..37: mol_type = other DNA

SEQ ID NO: 17694 - DNA, 38 bp, synthetic construct
  misc_feature 1..38: note = Probe
  source 1..38: mol_type = other DNA
caacttacacttaggagatttcaacttaacttgaccgc

SEQ ID NO: 17695 - DNA, 39 bp, synthetic construct; identical to SEQ ID NO: 4027
  misc_feature 1..39: note = Probe
  source 1..39: mol_type = other DNA

SEQ ID NO: 17696 - DNA, 41 bp, synthetic construct; identical to SEQ ID NO: 4028
  misc_feature 1..41: note = Probe
  source 1..41: mol_type = other DNA

SEQ ID NO: 17697 - DNA, 42 bp, synthetic construct
  misc_feature 1..42: note = Probe
  source 1..42: mol_type = other DNA
caacttacacttaggagatttcaacttaacttgaccgctctg

SEQ ID NO: 17698 - DNA, 43 bp, synthetic construct; identical to SEQ ID NO: 4029
  misc_feature 1..43: note = Probe
  source 1..43: mol_type = other DNA

SEQ ID NO: 17699 - DNA, 44 bp, synthetic construct; identical to SEQ ID NO: 4030
  misc_feature 1..44: note = Probe
  source 1..44: mol_type = other DNA

SEQ ID NO: 17700 - DNA, 45 bp, synthetic construct; identical to SEQ ID NO: 4031
  misc_feature 1..45: note = Probe
  source 1..45: mol_type = other DNA

SEQ ID NO: 17701 - DNA, 46 bp, synthetic construct; identical to SEQ ID NO: 4032
  misc_feature 1..46: note = Probe
  source 1..46: mol_type = other DNA

SEQ ID NO: 17702 - DNA, 18 bp, synthetic construct
  misc_feature 1..18: note = Probe
  source 1..18: mol_type = other DNA
caagaacagggtttgtta

SEQ ID NO: 17703 - DNA, 16 bp, synthetic construct
  misc_feature 1..16: note = Probe
  source 1..16: mol_type = other DNA
caagaactgctaactc

SEQ ID NO: 17704 - DNA, 17 bp, synthetic construct
  misc_feature 1..17: note = Probe
  source 1..17: mol_type = other DNA
caagaactgctaactca

SEQ ID NO: 17705 - DNA, 19 bp, synthetic construct
  misc_feature 1..19: note = Probe
  source 1..19: mol_type = other DNA
caagaactgctaactcatg

SEQ ID NO: 17706 - DNA, 20 bp, synthetic construct
  misc_feature 1..20: note = Probe
  source 1..20: mol_type = other DNA
caagaactgctaactcatgc

SEQ ID NO: 17707 - DNA, 21 bp, synthetic construct
  misc_feature 1..21: note = Probe
  source 1..21: mol_type = other DNA
caagaactgctaactcatgcc

SEQ ID NO: 17708 - DNA, 22 bp, synthetic construct
  misc_feature 1..22: note = Probe
  source 1..22: mol_type = other DNA
caagaactgctaactcatgccc

SEQ ID NO: 17709 - DNA, 23 bp, synthetic construct
  misc_feature 1..23: note = Probe
  source 1..23: mol_type = other DNA
caagaactgctaactcatgcccc

SEQ ID NO: 17710 - DNA, 25 bp, synthetic construct
  misc_feature 1..25: note = Probe
  source 1..25: mol_type = other DNA
caagaactgctaactcatgccccca

SEQ ID NO: 17711 - DNA, 26 bp, synthetic construct
  misc_feature 1..26: note = Probe
  source 1..26: mol_type = other DNA
caagaactgctaactcatgcccccat

SEQ ID NO: 17712 - DNA, 27 bp, synthetic construct
  misc_feature 1..27: note = Probe
  source 1..27: mol_type = other DNA
caagaactgctaactcatgcccccatg

SEQ ID NO: 17713 - DNA, 28 bp, synthetic construct
  misc_feature 1..28: note = Probe
  source 1..28: mol_type = other DNA
caagaactgctaactcatgcccccatgt

SEQ ID NO: 17714 - DNA, 29 bp, synthetic construct
  misc_feature 1..29: note = Probe
  source 1..29: mol_type = other DNA
caagaactgctaactcatgcccccatgtc

SEQ ID NO: 17715 - DNA, 31 bp, synthetic construct; identical to SEQ ID NO: 4039
  misc_feature 1..31: note = Probe
  source 1..31: mol_type = other DNA

SEQ ID NO: 17716 - DNA, 33 bp, synthetic construct
  misc_feature 1..33: note = Probe
  source 1..33: mol_type = other DNA
caagaactgctaactcatgcccccatgtctaac

SEQ ID NO: 17717 - DNA, 35 bp, synthetic construct
  misc_feature 1..35: note = Probe
  source 1..35: mol_type = other DNA
caagaactgctaactcatgcccccatgtctaacaa

SEQ ID NO: 17718 - DNA, 36 bp, synthetic construct
  misc_feature 1..36: note = Probe
  source 1..36: mol_type = other DNA
caagaactgctaactcatgcccccatgtctaacaac

SEQ ID NO: 17719 - DNA, 42 bp, synthetic construct; identical to SEQ ID NO: 449
  misc_feature 1..42: note = Probe
  source 1..42: mol_type = other DNA

SEQ ID NO: 17720 - DNA, 44 bp, synthetic construct; identical to SEQ ID NO: 450
  misc_feature 1..44: note = Probe
  source 1..44: mol_type = other DNA

SEQ ID NO: 17721 - DNA, 45 bp, synthetic construct; identical to SEQ ID NO: 451
  misc_feature 1..45: note = Probe
  source 1..45: mol_type = other DNA

SEQ ID NO: 17722 - DNA, 49 bp, synthetic construct; identical to SEQ ID NO: 4043
  misc_feature 1..49: note = Probe
  source 1..49: mol_type = other DNA

SEQ ID NO: 17723 - DNA, 50 bp, synthetic construct; identical to SEQ ID NO: 4044
  misc_feature 1..50: note = Probe
  source 1..50: mol_type = other DNA

SEQ ID NO: 17724 - DNA, 20 bp, synthetic construct
  misc_feature 1..20: note = Probe
  source 1..20: mol_type = other DNA
caagcagttgacccgggttc

SEQ ID NO: 17725 - DNA, 31 bp, synthetic construct; identical to SEQ ID NO: 457
  misc_feature 1..31: note = Probe
  source 1..31: mol_type = other DNA

SEQ ID NO: 17726 - DNA, 40 bp, synthetic construct
  misc_feature 1..40: note = Probe
  source 1..40: mol_type = other DNA
caagcagttgacccgggttcgattcccggccaacgcaagt

SEQ ID NO: 17727 - DNA, 39 bp, synthetic construct
  misc_feature 1..39: note = Probe
  source 1..39: mol_type = other DNA
caagcagttgacccgggttcgattcccggccaacgcagc

SEQ ID NO: 17728 - DNA, 40 bp, synthetic construct
  misc_feature 1..40: note = Probe
  source 1..40: mol_type = other DNA
caagcagttgacccgggttcgattcccggccaacgcagtg

SEQ ID NO: 17729 - DNA, 35 bp, synthetic construct
  misc_feature 1..35: note = Probe
  source 1..35: mol_type = other DNA
caaggtcgcgggttcgatccccgtacgggccacga

SEQ ID NO: 17730 - DNA, 35 bp, synthetic construct
  misc_feature 1..35: note = Probe
  source 1..35: mol_type = other DNA
caaggtcgcgggttcgatccccgtacgggccactg

SEQ ID NO: 17731 - DNA, 35 bp, synthetic construct
  misc_feature 1..35: note = Probe
  source 1..35: mol_type = other DNA
caaggtcgcgggttcgatccccgtactggccacgt

SEQ ID NO: 17732 - DNA, 21 bp, synthetic construct
  misc_feature 1..21: note = Probe
  source 1..21: mol_type = other DNA
caagtccctgttcgggcggca

SEQ ID NO: 17733 - DNA, 32 bp, synthetic construct
  misc_feature 1..32: note = Probe
  source 1..32: mol_type = other DNA
caatacactgaaaatgtttagacgggctcaca

SEQ ID NO: 17734 - DNA, 50 bp, synthetic construct; identical to SEQ ID NO: 4055
  misc_feature 1..50: note = Probe
  source 1..50: mol_type = other DNA

SEQ ID NO: 17735 - DNA, 32 bp, synthetic construct
  misc_feature 1..32: note = Probe
  source 1..32: mol_type = other DNA
caatccccggcatctccaaatcagccgacgtt

SEQ ID NO: 17736 - DNA, 33 bp, synthetic construct
  misc_feature 1..33: note = Probe
  source 1..33: mol_type = other DNA
caatccccggcatctccaaatcagccgacgttt

SEQ ID NO: 17737 - DNA, 20 bp, synthetic construct
  misc_feature 1..20: note = Probe
  source 1..20: mol_type = other DNA
caatgcaacgatgacgtttt

SEQ ID NO: 17738 - DNA, 23 bp, synthetic construct
  misc_feature 1..23: note = Probe
  source 1..23: mol_type = other DNA
caatgggggttccccgcgcaggt

SEQ ID NO: 17739 - DNA, 23 bp, synthetic construct
  misc_feature 1..23: note = Probe
  source 1..23: mol_type = other DNA
caatggggtctccccgcgcaggt

SEQ ID NO: 17740 - DNA, 23 bp, synthetic construct
  misc_feature 1..23: note = Probe
  source 1..23: mol_type = other DNA
caatggggtttccccgcacaggt

SEQ ID NO: 17741 - DNA, 33 bp, synthetic construct; identical to SEQ ID NO: 4058
  misc_feature 1..33: note = Probe
  source 1..33: mol_type = other DNA

SEQ ID NO: 17742 - DNA, 38 bp, synthetic construct; identical to SEQ ID NO: 4060
  misc_feature 1..38: note = Probe
  source 1..38: mol_type = other DNA

SEQ ID NO: 17743 - DNA, 39 bp, synthetic construct; identical to SEQ ID NO: 4061
  misc_feature 1..39: note = Probe
  source 1..39: mol_type = other DNA

SEQ ID NO: 17744 - DNA, 21 bp, synthetic construct
  misc_feature 1..21: note = Probe
  source 1..21: mol_type = other DNA
caattcccggtcagggaacca

SEQ ID NO: 17745 - DNA, 21 bp, synthetic construct
  misc_feature 1..21: note = Probe
  source 1..21: mol_type = other DNA
caattcctcttcttaacaaca

SEQ ID NO: 17746 - DNA, 21 bp, synthetic construct
  misc_feature 1..21: note = Probe
  source 1..21: mol_type = other DNA
cacaagaactgctaactcatg

SEQ ID NO: 17747 - DNA, 23 bp, synthetic construct
  misc_feature 1..23: note = Probe
  source 1..23: mol_type = other DNA
cacaagaactgctaactcatgcc

SEQ ID NO: 17748 - DNA, 49 bp, synthetic construct; identical to SEQ ID NO: 4093
  misc_feature 1..49: note = Probe
  source 1..49: mol_type = other DNA

SEQ ID NO: 17749 - DNA, 50 bp, synthetic construct; identical to SEQ ID NO: 466
  misc_feature 1..50: note = Probe
  source 1..50: mol_type = other DNA

SEQ ID NO: 17750 - DNA, 18 bp, synthetic construct
  misc_feature 1..18: note = Probe
  source 1..18: mol_type = other DNA
cacacccacccaagaaca

SEQ ID NO: 17751 - DNA, 25 bp, synthetic construct
  misc_feature 1..25: note = Probe
  source 1..25: mol_type = other DNA
cacacccacccaagaacagggtttg

SEQ ID NO: 17752 - DNA, 26 bp, synthetic construct
  misc_feature 1..26: note = Probe
  source 1..26: mol_type = other DNA
cacacccacccaagaacagggtttgt

SEQ ID NO: 17753 - DNA, 27 bp, synthetic construct
  misc_feature 1..27: note = Probe
  source 1..27: mol_type = other DNA
cacacccacccaagaacagggtttgtt

SEQ ID NO: 17754 - DNA, 28 bp, synthetic construct
  misc_feature 1..28: note = Probe
  source 1..28: mol_type = other DNA
cacacccacccaagaacagggtttgtta

SEQ ID NO: 17755 - DNA, 24 bp, synthetic construct
  misc_feature 1..24: note = Probe
  source 1..24: mol_type = other DNA
cacacctcagaaggtctcactttt

SEQ ID NO: 17756 - DNA, 20 bp, synthetic construct
  misc_feature 1..20: note = Probe
  source 1..20: mol_type = other DNA
cacacgcgaaaggtccccgg

SEQ ID NO: 17757 - DNA, 21 bp, synthetic construct
  misc_feature 1..21: note = Probe
  source 1..21: mol_type = other DNA
cacacgcgaaaggtccccggt

SEQ ID NO: 17758 - DNA, 22 bp, synthetic construct
  misc_feature 1..22: note = Probe
  source 1..22: mol_type = other DNA
cacacgcgaaaggtccccggtt

SEQ ID NO: 17759 - DNA, 20 bp, synthetic construct
  misc_feature 1..20: note = Probe
  source 1..20: mol_type = other DNA
cacacggggcacaataattt

SEQ ID NO: 17760 - DNA, 18 bp, synthetic construct
  misc_feature 1..18: note = Probe
  source 1..18: mol_type = other DNA
cacatcaccccataaaca

SEQ ID NO: 17761 - DNA, 20 bp, synthetic construct
  misc_feature 1..20: note = Probe
  source 1..20: mol_type = other DNA
cacatcaccccataaacaaa

SEQ ID NO: 17762 - DNA, 21 bp, synthetic construct
  misc_feature 1..21: note = Probe
  source 1..21: mol_type = other DNA
cacatcaccccataaacaaat

SEQ ID NO: 17763 - DNA, 30 bp, synthetic construct; identical to SEQ ID NO: 469
  misc_feature 1..30: note = Probe
  source 1..30: mol_type = other DNA

SEQ ID NO: 17764 - DNA, 31 bp, synthetic construct; identical to SEQ ID NO: 470
  misc_feature 1..31: note = Probe
  source 1..31: mol_type = other DNA

SEQ ID NO: 17765 - DNA, 32 bp, synthetic construct; identical to SEQ ID NO: 471
  misc_feature 1..32: note = Probe
  source 1..32: mol_type = other DNA

SEQ ID NO: 17766 - DNA, 33 bp, synthetic construct; identical to SEQ ID NO: 472
  misc_feature 1..33: note = Probe
  source 1..33: mol_type = other DNA

SEQ ID NO: 17767 - DNA, 22 bp, synthetic construct
  misc_feature 1..22: note = Probe
  source 1..22: mol_type = other DNA
cacccaacttacacttaggaga

SEQ ID NO: 17768 - DNA, 22 bp, synthetic construct
  misc_feature 1..22: note = Probe
  source 1..22: mol_type = other DNA
cacctcagaaggtctcactttt

SEQ ID NO: 17769 - DNA, 38 bp, synthetic construct
  misc_feature 1..38: note = Probe
  source 1..38: mol_type = other DNA
cacgcagaaggtcctgggttcgagccccagtggaacca

SEQ ID NO: 17770 - DNA, 41 bp, synthetic construct; identical to SEQ ID NO: 4122
  misc_feature 1..41: note = Probe
  source 1..41: mol_type = other DNA

SEQ ID NO: 17771 - DNA, 20 bp, synthetic construct
  misc_feature 1..20: note = Probe
  source 1..20: mol_type = other DNA
cacgcgaaaggtccccggtt

SEQ ID NO: 17772 - DNA, 18 bp, synthetic construct
  misc_feature 1..18: note = Probe
  source 1..18: mol_type = other DNA
cacgcgggagaccggggt

SEQ ID NO: 17773 - DNA, 33 bp, synthetic construct; identical to SEQ ID NO: 476
  misc_feature 1..33: note = Probe
  source 1..33: mol_type = other DNA

SEQ ID NO: 17774 - DNA, 35 bp, synthetic construct
  misc_feature 1..35: note = Probe
  source 1..35: mol_type = other DNA
cacgcgggagaccggggttcaattccccgacgggg

SEQ ID NO: 17775 - DNA, 37 bp, synthetic construct; identical to SEQ ID NO: 478
  misc_feature 1..37: note = Probe
  source 1..37: mol_type = other DNA

SEQ ID NO: 17776 - DNA, 40 bp, synthetic construct; identical to SEQ ID NO: 4131
  misc_feature 1..40: note = Probe
  source 1..40: mol_type = other DNA

SEQ ID NO: 17777 - DNA, 30 bp, synthetic construct; identical to SEQ ID NO: 479
  misc_feature 1..30: note = Probe
  source 1..30: mol_type = other DNA

SEQ ID NO: 17778 - DNA, 31 bp, synthetic construct; identical to SEQ ID NO: 480
  misc_feature 1..31: note = Probe
  source 1..31: mol_type = other DNA

SEQ ID NO: 17779 - DNA, 32 bp, synthetic construct; identical to SEQ ID NO: 481
  misc_feature 1..32: note = Probe
  source 1..32: mol_type = other DNA

SEQ ID NO: 17780 - DNA, 36 bp, synthetic construct; identical to SEQ ID NO: 485
  misc_feature 1..36: note = Probe
  source 1..36: mol_type = other DNA

SEQ ID NO: 17781 - DNA, 38 bp, synthetic construct; identical to SEQ ID NO: 4137
  misc_feature 1..38: note = Probe
  source 1..38: mol_type = other DNA

SEQ ID NO: 17782 - DNA, 40 bp, synthetic construct; identical to SEQ ID NO: 4139
  misc_feature 1..40: note = Probe
  source 1..40: mol_type = other DNA

SEQ ID NO: 17783 - DNA, 50 bp, synthetic construct; identical to SEQ ID NO: 4143
  misc_feature 1..50: note = Probe
  source 1..50: mol_type = other DNA

SEQ ID NO: 17784 - DNA, 40 bp, synthetic construct; identical to SEQ ID NO: 4145
  misc_feature 1..40: note = Probe
  source 1..40: mol_type = other DNA

SEQ ID NO: 17785 - DNA, 40 bp, synthetic construct; identical to SEQ ID NO: 4147
  misc_feature 1..40: note = Probe
  source 1..40: mol_type = other DNA

SEQ ID NO: 17786 - DNA, 38 bp, synthetic construct; identical to SEQ ID NO: 4149
  misc_feature 1..38: note = Probe
  source 1..38: mol_type = other DNA

SEQ ID NO: 17787 - DNA, 39 bp, synthetic construct; identical to SEQ ID NO: 4154
  misc_feature 1..39: note = Probe
  source 1..39: mol_type = other DNA

SEQ ID NO: 17788 - DNA, 40 bp, synthetic construct; identical to SEQ ID NO: 4155
  misc_feature 1..40: note = Probe
  source 1..40: mol_type = other DNA

SEQ ID NO: 17789 - DNA, 41 bp, synthetic construct; identical to SEQ ID NO: 4156
  misc_feature 1..41: note = Probe
  source 1..41: mol_type = other DNA

SEQ ID NO: 17790 - DNA, 46 bp, synthetic construct; identical to SEQ ID NO: 4158
  misc_feature 1..46: note = Probe
  source 1..46: mol_type = other DNA

SEQ ID NO: 17791 - DNA, 48 bp, synthetic construct; identical to SEQ ID NO: 4160
  misc_feature 1..48: note = Probe
  source 1..48: mol_type = other DNA

SEQ ID NO: 17792 - DNA, 49 bp, synthetic construct; identical to SEQ ID NO: 4161
  misc_feature 1..49: note = Probe
  source 1..49: mol_type = other DNA

SEQ ID NO: 17793 - DNA, 50 bp, synthetic construct; identical to SEQ ID NO: 4162
  misc_feature 1..50: note = Probe
  source 1..50: mol_type = other DNA

SEQ ID NO: 17794 - DNA, 40 bp, synthetic construct; identical to SEQ ID NO: 4165
  misc_feature 1..40: note = Probe
  source 1..40: mol_type = other DNA

SEQ ID NO: 17795 - DNA, 26 bp, synthetic construct
  misc_feature 1..26: note = Probe
  source 1..26: mol_type = other DNA
cactctggactctgaatccagcgatc

SEQ ID NO: 17796 - DNA, 27 bp, synthetic construct
  misc_feature 1..27: note = Probe
  source 1..27: mol_type = other DNA
cactctggactctgaatccagcgatcc

SEQ ID NO: 17797 - DNA, 28 bp, synthetic construct
  misc_feature 1..28: note = Probe
  source 1..28: mol_type = other DNA
cactctggactctgaatccagcgatccg

SEQ ID NO: 17798 - DNA, 30 bp, synthetic construct; identical to SEQ ID NO: 4174
  misc_feature 1..30: note = Probe
  source 1..30: mol_type = other DNA

SEQ ID NO: 17799 - DNA, 27 bp, synthetic construct
  misc_feature 1..27: note = Probe
  source 1..27: mol_type = other DNA
cactctggactttgaatccagcgatcc

SEQ ID NO: 17800 - DNA, 30 bp, synthetic construct
  misc_feature 1..30: note = Probe
  source 1..30: mol_type = other DNA
cactctggactttgaatccagcgatccgag

SEQ ID NO: 17801 - DNA, 16 bp, synthetic construct
  misc_feature 1..16: note = Probe
  source 1..16: mol_type = other DNA
cactgtaaagctaact

SEQ ID NO: 17802 - DNA, 29 bp, synthetic construct
  misc_feature 1..29: note = Probe
  source 1..29: mol_type = other DNA
cactgtaaagctaacttagcattaacctt

SEQ ID NO: 17803 - DNA, 31 bp, synthetic construct; identical to SEQ ID NO: 494
  misc_feature 1..31: note = Probe
  source 1..31: mol_type = other DNA

SEQ ID NO: 17804 - DNA, 32 bp, synthetic construct; identical to SEQ ID NO: 495
  misc_feature 1..32: note = Probe
  source 1..32: mol_type = other DNA

SEQ ID NO: 17805 - DNA, 33 bp, synthetic construct; identical to SEQ ID NO: 4180
  misc_feature 1..33: note = Probe
  source 1..33: mol_type = other DNA

SEQ ID NO: 17806 - DNA, 34 bp, synthetic construct; identical to SEQ ID NO: 496
  misc_feature 1..34: note = Probe
  source 1..34: mol_type = other DNA

SEQ ID NO: 17807 - DNA, 35 bp, synthetic construct; identical to SEQ ID NO: 497
  misc_feature 1..35: note = Probe
  source 1..35: mol_type = other DNA

SEQ ID NO: 17808 - DNA, 36 bp, synthetic construct; identical to SEQ ID NO: 498
  misc_feature 1..36: note = Probe
  source 1..36: mol_type = other DNA

SEQ ID NO: 17809 - DNA, 37 bp, synthetic construct; identical to SEQ ID NO: 4181
  misc_feature 1..37: note = Probe
  source 1..37: mol_type = other DNA

SEQ ID NO: 17810 - DNA, 38 bp, synthetic construct
  misc_feature 1..38: note = Probe
  source 1..38: mol_type = other DNA
cactgtaaagctaacttagcattaaccttttaagttaa

SEQ ID NO: 17811 - DNA, 39 bp, synthetic construct; identical to SEQ ID NO: 499
  misc_feature 1..39: note = Probe
  source 1..39: mol_type = other DNA

SEQ ID NO: 17812 - DNA, 41 bp, synthetic construct; identical to SEQ ID NO: 500
  misc_feature 1..41: note = Probe
  source 1..41: mol_type = other DNA

SEQ ID NO: 17813 - DNA, 42 bp, synthetic construct; identical to SEQ ID NO: 4183
  misc_feature 1..42: note = Probe
  source 1..42: mol_type = other DNA

SEQ ID NO: 17814 - DNA, 43 bp, synthetic construct; identical to SEQ ID NO: 501
  misc_feature 1..43: note = Probe
  source 1..43: mol_type = other DNA

SEQ ID NO: 17815 - DNA, 44 bp, synthetic construct; identical to SEQ ID NO: 4184
  misc_feature 1..44: note = Probe
  source 1..44: mol_type = other DNA

SEQ ID NO: 17816 - DNA, 49 bp, synthetic construct; identical to SEQ ID NO: 4187
  misc_feature 1..49: note = Probe
  source 1..49: mol_type = other DNA

SEQ ID NO: 17817 - DNA, 30 bp, synthetic construct; identical to SEQ ID NO: 4195
  misc_feature 1..30: note = Probe
  source 1..30: mol_type = other DNA

SEQ ID NO: 17818 - DNA, 33 bp, synthetic construct; identical to SEQ ID NO: 4198
  misc_feature 1..33: note = Probe
  source 1..33: mol_type = other DNA

SEQ ID NO: 17819 - DNA, 34 bp, synthetic construct; identical to SEQ ID NO: 4199
  misc_feature 1..34: note = Probe
  source 1..34: mol_type = other DNA

SEQ ID NO: 17820 - DNA, 37 bp, synthetic construct; identical to SEQ ID NO: 4202
  misc_feature 1..37: note = Probe
  source 1..37: mol_type = other DNA

SEQ ID NO: 17821 - DNA, 38 bp, synthetic construct; identical to SEQ ID NO: 4203
  misc_feature 1..38: note = Probe
  source 1..38: mol_type = other DNA

SEQ ID NO: 17822 - DNA, 39 bp, synthetic construct; identical to SEQ ID NO: 4204
  misc_feature 1..39: note = Probe
  source 1..39: mol_type = other DNA

SEQ ID NO: 17823 - DNA, 40 bp, synthetic construct; identical to SEQ ID NO: 4205
  misc_feature 1..40: note = Probe
  source 1..40: mol_type = other DNA

SEQ ID NO: 17824 - DNA, 16 bp, synthetic construct
  misc_feature 1..16: note = Probe
  source 1..16: mol_type = other DNA
cagaagattccaggtt

SEQ ID NO: 17825 - DNA, 34 bp, synthetic construct
  misc_feature 1..34: note = Probe
  source 1..34: mol_type = other DNA
cagaagattccaggttcgactcctggctggctcg

SEQ ID NO: 17826 - DNA, 34 bp, synthetic construct; identical to SEQ ID NO: 4212
  misc_feature 1..34: note = Probe
  source 1..34: mol_type = other DNA

SEQ ID NO: 17827 - DNA, 36 bp, synthetic construct
  misc_feature 1..36: note = Probe
  source 1..36: mol_type = other DNA
cagaagattctaggttcgactcctggctggctcgcg

SEQ ID NO: 17828 - DNA, 37 bp, synthetic construct; identical to SEQ ID NO: 4213
  misc_feature 1..37: note = Probe
  source 1..37: mol_type = other DNA

SEQ ID NO: 17829 - DNA, 36 bp, synthetic construct
  misc_feature 1..36: note = Probe
  source 1..36: mol_type = other DNA
cagaagattctaggttcgactcctggctggctcgct

SEQ ID NO: 17830 - DNA, 31 bp, synthetic construct; identical to SEQ ID NO: 4215
  misc_feature 1..31: note = Probe
  source 1..31: mol_type = other DNA

SEQ ID NO: 17831 - DNA, 33 bp, synthetic construct; identical to SEQ ID NO: 4216
  misc_feature 1..33: note = Probe
  source 1..33: mol_type = other DNA

SEQ ID NO: 17832 - DNA, 37 bp, synthetic construct; identical to SEQ ID NO: 4218
  misc_feature 1..37: note = Probe
  source 1..37: mol_type = other DNA

SEQ ID NO: 17833 - DNA, 16 bp, synthetic construct
  misc_feature 1..16: note = Probe
  source 1..16: mol_type = other DNA
cagaagattgcaggtt

SEQ ID NO: 17834 - DNA, 30 bp, synthetic construct; identical to SEQ ID NO: 9540
  misc_feature 1..30: note = Probe
  source 1..30: mol_type = other DNA

SEQ ID NO: 17835 - DNA, 37 bp, synthetic construct
  misc_feature 1..37: note = Probe
  source 1..37: mol_type = other DNA
cagaagattgcaggttcgagtcctgccgcggtcgaag

SEQ ID NO: 17836 - DNA, 31 bp, synthetic construct
  misc_feature 1..31: note = Probe
  source 1..31: mol_type = other DNA
cagaaggtcctgggttcgagccccagtggaa

SEQ ID NO: 17837 - DNA, 32 bp, synthetic construct
  misc_feature 1..32: note = Probe
  source 1..32: mol_type = other DNA
cagaaggtcctgggttcgagccccagtggaac

SEQ ID NO: 17838 - DNA, 34 bp, synthetic construct
  misc_feature 1..34: note = Probe
  source 1..34: mol_type = other DNA
cagaaggtcctgggttcgagccccagtggaacca

SEQ ID NO: 17839 - DNA, 36 bp, synthetic construct; identical to SEQ ID NO: 4221
  misc_feature 1..36: note = Probe
  source 1..36: mol_type = other DNA

SEQ ID NO: 17840 - DNA, 37 bp, synthetic construct; identical to SEQ ID NO: 4222
  misc_feature 1..37: note = Probe
  source 1..37: mol_type = other DNA

SEQ ID NO: 17841 - DNA, 16 bp, synthetic construct
  misc_feature 1..16: note = Probe
  source 1..16: mol_type = other DNA
cagaaggtctcacttt

SEQ ID NO: 17842 - DNA, 17 bp, synthetic construct
  misc_feature 1..17: note = Probe
  source 1..17: mol_type = other DNA
cagaaggtctcactttt

SEQ ID NO: 17843 - DNA, 16 bp, synthetic construct
  misc_feature 1..16: note = Probe
  source 1..16: mol_type = other DNA
cagaccaagagccttc

SEQ ID NO: 17844 - DNA, 29 bp, synthetic construct
  misc_feature 1..29: note = Probe
  source 1..29: mol_type = other DNA
cagaccaagagccttcaaagccctcagta

SEQ ID NO: 17845 - DNA, 33 bp, synthetic construct
  misc_feature 1..33: note = Probe
  source 1..33: mol_type = other DNA
cagaccaagagccttcaaagccctcagtaagtt

SEQ ID NO: 17846 - DNA, 35 bp, synthetic construct; identical to SEQ ID NO: 4226
  misc_feature 1..35: note = Probe
  source 1..35: mol_type = other DNA

SEQ ID NO: 17847 - DNA, 49 bp, synthetic construct; identical to SEQ ID NO: 4227
  misc_feature 1..49: note = Probe
  source 1..49: mol_type = other DNA

SEQ ID NO: 17848 - DNA, 50 bp, synthetic construct; identical to SEQ ID NO: 514
  misc_feature 1..50: note = Probe
  source 1..50: mol_type = other DNA

SEQ ID NO: 17849 - DNA, 21 bp, synthetic construct
  misc_feature 1..21: note = Probe
  source 1..21: mol_type = other DNA
cagagaatagtttaaattaga

SEQ ID NO: 17850 - DNA, 22 bp, synthetic construct
  misc_feature 1..22: note = Probe
  source 1..22: mol_type = other DNA
cagagaatagtttaaattagaa

SEQ ID NO: 17851 - DNA, 23 bp, synthetic construct
  misc_feature 1..23: note = Probe
  source 1..23: mol_type = other DNA
cagagaatagtttaaattagaat

SEQ ID NO: 17852 - DNA, 25 bp, synthetic construct
  misc_feature 1..25: note = Probe
  source 1..25: mol_type = other DNA
cagagaatagtttaaattagaatct

SEQ ID NO: 17853 - DNA, 26 bp, synthetic construct
  misc_feature 1..26: note = Probe
  source 1..26: mol_type = other DNA
cagagaatagtttaaattagaatctt

SEQ ID NO: 17854 - DNA, 27 bp, synthetic construct
  misc_feature 1..27: note = Probe
  source 1..27: mol_type = other DNA
cagagaatagtttaaattagaatctta

SEQ ID NO: 17855 - DNA, 28 bp, synthetic construct
  misc_feature 1..28: note = Probe
  source 1..28: mol_type = other DNA
cagagaatagtttaaattagaatcttag

SEQ ID NO: 17856 - DNA, 29 bp, synthetic construct
  misc_feature 1..29: note = Probe
  source 1..29: mol_type = other DNA
cagagaatagtttaaattagaatcttagc

SEQ ID NO: 17857 - DNA, 31 bp, synthetic construct; identical to SEQ ID NO: 520
  misc_feature 1..31: note = Probe
  source 1..31: mol_type = other DNA

SEQ ID NO: 17858 - DNA, 32 bp, synthetic construct; identical to SEQ ID NO: 521
  misc_feature 1..32: note = Probe
  source 1..32: mol_type = other DNA

SEQ ID NO: 17859 - DNA, 33 bp, synthetic construct; identical to SEQ ID NO: 522
  misc_feature 1..33: note = Probe
  source 1..33: mol_type = other DNA

SEQ ID NO: 17860 - DNA, 34 bp, synthetic construct; identical to SEQ ID NO: 523
  misc_feature 1..34: note = Probe
  source 1..34: mol_type = other DNA

SEQ ID NO: 17861 - DNA, 35 bp, synthetic construct; identical to SEQ ID NO: 4232
  misc_feature 1..35: note = Probe
  source 1..35: mol_type = other DNA

SEQ ID NO: 17862 - DNA, 36 bp, synthetic construct; identical to SEQ ID NO: 4233
  misc_feature 1..36: note = Probe
  source 1..36: mol_type = other DNA

SEQ ID NO: 17863 - DNA, 37 bp, synthetic construct; identical to SEQ ID NO: 4234
  misc_feature 1..37: note = Probe
  source 1..37: mol_type = other DNA

SEQ ID NO: 17864 - DNA, 38 bp, synthetic construct; identical to SEQ ID NO: 4235
  misc_feature 1..38: note = Probe
  source 1..38: mol_type = other DNA

SEQ ID NO: 17865 - DNA, 39 bp, synthetic construct; identical to SEQ ID NO: 4236
  misc_feature 1..39: note = Probe
  source 1..39: mol_type = other DNA

SEQ ID NO: 17866 - DNA, 40 bp, synthetic construct; identical to SEQ ID NO: 524
  misc_feature 1..40: note = Probe
  source 1..40: mol_type = other DNA

SEQ ID NO: 17867 - DNA, 50 bp, synthetic construct; identical to SEQ ID NO: 526
  misc_feature 1..50: note = Probe
  source 1..50: mol_type = other DNA

SEQ ID NO: 17868 - DNA, 20 bp, synthetic construct
  misc_feature 1..20: note = Probe
  source 1..20: mol_type = other DNA
cagagcccggtaatcgcata

SEQ ID NO: 17869 - DNA, 27 bp, synthetic construct
  misc_feature 1..27: note = Probe
  source 1..27: mol_type = other DNA
cagagcccggtaatcgcataaaactta

SEQ ID NO: 17870 - DNA, 32 bp, synthetic construct
  misc_feature 1..32: note = Probe
  source 1..32: mol_type = other DNA
cagagcccggtaatcgcataaaacttaaaact

SEQ ID NO: 17871 - DNA, 33 bp, synthetic construct
  misc_feature 1..33: note = Probe
  source 1..33: mol_type = other DNA
cagagcccggtaatcgcataaaacttaaaactt

SEQ ID NO: 17872 - DNA, 27 bp, synthetic construct
  misc_feature 1..27: note = Probe
  source 1..27: mol_type = other DNA
cagaggcttacgaccccttatttaccg

SEQ ID NO: 17873 - DNA, 29 bp, synthetic construct
  misc_feature 1..29: note = Probe
  source 1..29: mol_type = other DNA
cagaggcttacgaccccttatttaccgag

SEQ ID NO: 17874 - DNA, 29 bp, synthetic construct
  misc_feature 1..29: note = Probe
  source 1..29: mol_type = other DNA
cagagtggcgcagcggaagcgtgctgggc

SEQ ID NO: 17875 - DNA, 33 bp, synthetic construct; identical to SEQ ID NO: 528
  misc_feature 1..33: note = Probe
  source 1..33: mol_type = other DNA

SEQ ID NO: 17876 - DNA, 24 bp, synthetic construct
  misc_feature 1..24: note = Probe
  source 1..24: mol_type = other DNA
cagagtggggttttgcagtcctta

SEQ ID NO: 17877 - DNA, 25 bp, synthetic construct
  misc_feature 1..25: note = Probe
  source 1..25: mol_type = other DNA
cagagtggggttttgcagtccttag

SEQ ID NO: 17878 - DNA, 26 bp, synthetic construct
  misc_feature 1..26: note = Probe
  source 1..26: mol_type = other DNA
cagagtggggttttgcagtccttagc

SEQ ID NO: 17879 - DNA, 27 bp, synthetic construct
  misc_feature 1..27: note = Probe
  source 1..27: mol_type = other DNA
cagagtggggttttgcagtccttagct

SEQ ID NO: 17880 - DNA, 16 bp, synthetic construct
  misc_feature 1..16: note = Probe
  source 1..16: mol_type = other DNA
cagagtgtagcttaac

SEQ ID NO: 17881 - DNA, 17 bp, synthetic construct
  misc_feature 1..17: note = Probe
  source 1..17: mol_type = other DNA
cagagtgtagcttaaca

SEQ ID NO: 17882 - DNA, 19 bp, synthetic construct
  misc_feature 1..19: note = Probe
  source 1..19: mol_type = other DNA
cagagtgtagcttaacaca

SEQ ID NO: 17883 - DNA, 20 bp, synthetic construct
  misc_feature 1..20: note = Probe
  source 1..20: mol_type = other DNA
cagagtgtagcttaacacaa

SEQ ID NO: 17884 - DNA, 21 bp, synthetic construct
  misc_feature 1..21: note = Probe
  source 1..21: mol_type = other DNA
cagagtgtagcttaacacaaa

SEQ ID NO: 17885 - DNA, 23 bp, synthetic construct
  misc_feature 1..23: note = Probe
  source 1..23: mol_type = other DNA
cagagtgtagcttaacacaaagc

SEQ ID NO: 17886 - DNA, 24 bp, synthetic construct
  misc_feature 1..24: note = Probe
  source 1..24: mol_type = other DNA
cagagtgtagcttaacacaaagca

SEQ ID NO: 17887 - DNA, 25 bp, synthetic construct
  misc_feature 1..25: note = Probe
  source 1..25: mol_type = other DNA
cagagtgtagcttaacacaaagcac

SEQ ID NO: 17888 - DNA, 26 bp, synthetic construct
  misc_feature 1..26: note = Probe
  source 1..26: mol_type = other DNA
cagagtgtagcttaacacaaagcacc

SEQ ID NO: 17889 - DNA, 27 bp, synthetic construct
  misc_feature 1..27: note = Probe
  source 1..27: mol_type = other DNA
cagagtgtagcttaacacaaagcaccc

SEQ ID NO: 17890 - DNA, 28 bp, synthetic construct
  misc_feature 1..28: note = Probe
  source 1..28: mol_type = other DNA
cagagtgtagcttaacacaaagcaccca

SEQ ID NO: 17891 - DNA, 29 bp, synthetic construct
  misc_feature 1..29: note = Probe
  source 1..29: mol_type = other DNA
cagagtgtagcttaacacaaagcacccaa

SEQ ID NO: 17892 - DNA, 30 bp, synthetic construct; identical to SEQ ID NO: 4262
  misc_feature 1..30: note = Probe
  source 1..30: mol_type = other DNA

SEQ ID NO: 17893 - DNA, 31 bp, synthetic construct; identical to SEQ ID NO: 4263
  misc_feature 1..31: note = Probe
  source 1..31: mol_type = other DNA

SEQ ID NO: 17894 - DNA, 32 bp, synthetic construct; identical to SEQ ID NO: 4264
  misc_feature 1..32: note = Probe
  source 1..32: mol_type = other DNA

SEQ ID NO: 17895 - DNA, 33 bp, synthetic construct; identical to SEQ ID NO: 4265
  misc_feature 1..33: note = Probe
  source 1..33: mol_type = other DNA

SEQ ID NO: 17896 - DNA, 34 bp, synthetic construct; identical to SEQ ID NO: 4266
  misc_feature 1..34: note = Probe
  source 1..34: mol_type = other DNA

SEQ ID NO: 17897 - DNA, 35 bp, synthetic construct; identical to SEQ ID NO: 4267
  misc_feature 1..35: note = Probe
  source 1..35: mol_type = other DNA

SEQ ID NO: 17898 - DNA, 36 bp, synthetic construct; identical to SEQ ID NO: 4268
  misc_feature 1..36: note = Probe
  source 1..36: mol_type = other DNA

SEQ ID NO: 17899 - DNA, 37 bp, synthetic construct; identical to SEQ ID NO: 4269
  misc_feature 1..37: note = Probe
  source 1..37: mol_type = other DNA

SEQ ID NO: 17900 - DNA, 38 bp, synthetic construct; identical to SEQ ID NO: 4270
  misc_feature 1..38: note = Probe
  source 1..38: mol_type = other DNA

SEQ ID NO: 17901 - DNA, 39 bp, synthetic construct; identical to SEQ ID NO: 4271
  misc_feature 1..39: note = Probe
  source 1..39: mol_type = other DNA

SEQ ID NO: 17902 - DNA, 40 bp, synthetic construct; identical to SEQ ID NO: 4272
  misc_feature 1..40: note = Probe
  source 1..40: mol_type = other DNA

SEQ ID NO: 17903 - DNA, 41 bp, synthetic construct; identical to SEQ ID NO: 4273
  misc_feature 1..41: note = Probe
  source 1..41: mol_type = other DNA

SEQ ID NO: 17904 - DNA, 42 bp, synthetic construct; identical to SEQ ID NO: 4274
  misc_feature 1..42: note = Probe
  source 1..42: mol_type = other DNA

SEQ ID NO: 17905 - DNA, 43 bp, synthetic construct; identical to SEQ ID NO: 4275
  misc_feature 1..43: note = Probe
  source 1..43: mol_type = other DNA

SEQ ID NO: 17906 - DNA, 44 bp, synthetic construct; identical to SEQ ID NO: 4276
  misc_feature 1..44: note = Probe
  source 1..44: mol_type = other DNA

SEQ ID NO: 17907 - DNA, 45 bp, synthetic construct; identical to SEQ ID NO: 4277
  misc_feature 1..45: note = Probe
  source 1..45: mol_type = other DNA

SEQ ID NO: 17908 - DNA, 46 bp, synthetic construct; identical to SEQ ID NO: 4278
  misc_feature 1..46: note = Probe
  source 1..46: mol_type = other DNA

SEQ ID NO: 17909 - DNA, 50 bp, synthetic construct; identical to SEQ ID NO: 4281
  misc_feature 1..50: note = Probe
  source 1..50: mol_type = other DNA

SEQ ID NO: 17910 - DNA, 30 bp, synthetic construct
  misc_feature 1..30: note = Probe
  source 1..30: mol_type = other DNA
cagattgtgaatctgacaacagaggcttac

SEQ ID NO: 17911 - DNA, 36 bp, synthetic construct
  misc_feature 1..36: note = Probe
  source 1..36: mol_type = other DNA
cagattgtgaatctgacaacagaggcttacgacccc

SEQ ID NO: 17912 - DNA, 50 bp, synthetic construct; identical to SEQ ID NO: 4284
  misc_feature 1..50: note = Probe
  source 1..50: mol_type = other DNA

SEQ ID NO: 17913 - DNA, 16 bp, synthetic construct
  misc_feature 1..16: note = Probe
  source 1..16: mol_type = other DNA
cagcaacctcggttcg

SEQ ID NO: 17914 - DNA, 29 bp, synthetic construct
  misc_feature 1..29: note = Probe
  source 1..29: mol_type = other DNA
cagcaacctcggttcgaatccgagtcacg

SEQ ID NO: 17915 - DNA, 30 bp, synthetic construct
  misc_feature 1..30: note = Probe
  source 1..30: mol_type = other DNA
cagcaacctcggttcgaatccgagtcacgg

SEQ ID NO: 17916 - DNA, 32 bp, synthetic construct; identical to SEQ ID NO: 4285
  misc_feature 1..32: note = Probe
  source 1..32: mol_type = other DNA

SEQ ID NO: 17917 - DNA, 35 bp, synthetic construct; identical to SEQ ID NO: 4288
  misc_feature 1..35: note = Probe
  source 1..35: mol_type = other DNA

SEQ ID NO: 17918 - DNA, 35 bp, synthetic construct; identical to SEQ ID NO: 4290
  misc_feature 1..35: note = Probe
  source 1..35: mol_type = other DNA

SEQ ID NO: 17919 - DNA, 16 bp, synthetic construct
  misc_feature 1..16: note = Probe
  source 1..16: mol_type = other DNA
cagcagtacatgcaga

SEQ ID NO: 17920 - DNA, 18 bp, synthetic construct
  misc_feature 1..18: note = Probe
  source 1..18: mol_type = other DNA
cagcagtacatgcagagc

SEQ ID NO: 17921 - DNA, 19 bp, synthetic construct
  misc_feature 1..19: note = Probe
  source 1..19: mol_type = other DNA
cagcagtacatgcagagca

SEQ ID NO: 17922 - DNA, 20 bp, synthetic construct
  misc_feature 1..20: note = Probe
  source 1..20: mol_type = other DNA
cagcagtacatgcagagcaa

SEQ ID NO: 17923 - DNA, 27 bp, synthetic construct
  misc_feature 1..27: note = Probe
  source 1..27: mol_type = other DNA
cagcctccggagctggggattgtgggt

SEQ ID NO: 17924 - DNA, 16 bp, synthetic construct
  misc_feature 1..16: note = Probe
  source 1..16: mol_type = other DNA
cagcgatccgagttca

SEQ ID NO: 17925 - DNA, 29 bp, synthetic construct
  misc_feature 1..29: note = Probe
  source 1..29: mol_type = other DNA
cagcgatccgagttcaaatctcggtggaa

SEQ ID NO: 17926 - DNA, 30 bp, synthetic construct
  misc_feature 1..30: note = Probe
  source 1..30: mol_type = other DNA
cagcgatccgagttcaaatctcggtggaac

SEQ ID NO: 17927 - DNA, 32 bp, synthetic construct; identical to SEQ ID NO: 530
  misc_feature 1..32: note = Probe
  source 1..32: mol_type = other DNA

SEQ ID NO: 17928 - DNA, 33 bp, synthetic construct; identical to SEQ ID NO: 4291
  misc_feature 1..33: note = Probe
  source 1..33: mol_type = other DNA

SEQ ID NO: 17929 - DNA, 35 bp, synthetic construct; identical to SEQ ID NO: 4293
  misc_feature 1..35: note = Probe
  source 1..35: mol_type = other DNA

SEQ ID NO: 17930 - DNA, 33 bp, synthetic construct; identical to SEQ ID NO: 4294
  misc_feature 1..33: note = Probe
  source 1..33: mol_type = other DNA

SEQ ID NO: 17931 - DNA, 29 bp, synthetic construct
  misc_feature 1..29: note = Probe
  source 1..29: mol_type = other DNA
cagcgatccgagttcaaatctcggtggga

SEQ ID NO: 17932 - DNA, 30 bp, synthetic construct
  misc_feature 1..30: note = Probe
  source 1..30: mol_type = other DNA
cagcgatccgagttcaaatctcggtgggac

SEQ ID NO: 17933 - DNA, 32 bp, synthetic construct; identical to SEQ ID NO: 531
  misc_feature 1..32: note = Probe
  source 1..32: mol_type = other DNA

SEQ ID NO: 17934 - DNA, 35 bp, synthetic construct; identical to SEQ ID NO: 4298
  misc_feature 1..35: note = Probe
  source 1..35: mol_type = other DNA

SEQ ID NO: 17935 - DNA, 23 bp, synthetic construct
  misc_feature 1..23: note = Probe
  source 1..23: mol_type = other DNA
cagctaaataagctatcgggccc

SEQ ID NO: 17936 - DNA, 24 bp, synthetic construct
  misc_feature 1..24: note = Probe
  source 1..24: mol_type = other DNA
cagctaaataagctatcgggccca

SEQ ID NO: 17937 - DNA, 25 bp, synthetic construct
  misc_feature 1..25: note = Probe
  source 1..25: mol_type = other DNA
cagctaaataagctatcgggcccat

SEQ ID NO: 17938 - DNA, 26 bp, synthetic construct
  misc_feature 1..26: note = Probe
  source 1..26: mol_type = other DNA
cagctaaataagctatcgggcccata

SEQ ID NO: 17939 - DNA, 27 bp, synthetic construct
  misc_feature 1..27: note = Probe
  source 1..27: mol_type = other DNA
cagctaaataagctatcgggcccatac

SEQ ID NO: 17940 - DNA, 34 bp, synthetic construct; identical to SEQ ID NO: 4310
  misc_feature 1..34: note = Probe
  source 1..34: mol_type = other DNA

SEQ ID NO: 17941 - DNA, 35 bp, synthetic construct; identical to SEQ ID NO: 4311
  misc_feature 1..35: note = Probe
  source 1..35: mol_type = other DNA

SEQ ID NO: 17942 - DNA, 36 bp, synthetic construct; identical to SEQ ID NO: 4312
  misc_feature 1..36: note = Probe
  source 1..36: mol_type = other DNA

SEQ ID NO: 17943 - DNA, 37 bp, synthetic construct; identical to SEQ ID NO: 4313
  misc_feature 1..37: note = Probe
  source 1..37: mol_type = other DNA

SEQ ID NO: 17944 - DNA, 38 bp, synthetic construct
  misc_feature 1..38: note = Probe
  source 1..38: mol_type = other DNA
cagctaaataagctatcgggcccataccccgaaaatgt

SEQ ID NO: 17945 - DNA, 39 bp, synthetic construct; identical to SEQ ID NO: 4314
  misc_feature 1..39: note = Probe
  source 1..39: mol_type = other DNA

SEQ ID NO: 17946 - DNA, 28 bp, synthetic construct
  misc_feature 1..28: note = Probe
  source 1..28: mol_type = other DNA
cagctagctcagtcggtagagcatgaga

SEQ ID NO: 17947 - DNA, 29 bp, synthetic construct
  misc_feature 1..29: note = Probe
  source 1..29: mol_type = other DNA
cagctagctcagtcggtagagcatgagac

SEQ ID NO: 17948 - DNA, 30 bp, synthetic construct
  misc_feature 1..30: note = Probe
  source 1..30: mol_type = other DNA
cagctagctcagtcggtagagcatgagact

SEQ ID NO: 17949 - DNA, 17 bp, synthetic construct
  misc_feature 1..17: note = Probe
  source 1..17: mol_type = other DNA
cagctatagggtggaga

SEQ ID NO: 17950 - DNA, 15 bp, synthetic construct
  misc_feature 1..15: note = Probe
  source 1..15: mol_type = other DNA
cagctatccattggt

SEQ ID NO: 17951 - DNA, 24 bp, synthetic construct
  misc_feature 1..24: note = Probe
  source 1..24: mol_type = other DNA
cagcttcaaacctgccggggcttc

SEQ ID NO: 17952 - DNA, 26 bp, synthetic construct
  misc_feature 1..26: note = Probe
  source 1..26: mol_type = other DNA
cagcttcaaacctgccggggcttctc

SEQ ID NO: 17953 - DNA, 17 bp, synthetic construct
  misc_feature 1..17: note = Probe
  source 1..17: mol_type = other DNA
cagctttggggggttcg

SEQ ID NO: 17954 - DNA, 18 bp, synthetic construct
  misc_feature 1..18: note = Probe
  source 1..18: mol_type = other DNA
cagctttggggggttcga

SEQ ID NO: 17955 - DNA, 29 bp, synthetic construct
  misc_feature 1..29: note = Probe
  source 1..29: mol_type = other DNA
cagctttggggggttcgattccttccttt

SEQ ID NO: 17956 - DNA, 30 bp, synthetic construct; identical to SEQ ID NO: 4332
  misc_feature 1..30: note = Probe
  source 1..30: mol_type = other DNA

SEQ ID NO: 17957 - DNA, 31 bp, synthetic construct
  misc_feature 1..31: note = Probe
  source 1..31: mol_type = other DNA
cagctttggggggttcgattccttccttttt

SEQ ID NO: 17958 - DNA, 32 bp, synthetic construct; identical to SEQ ID NO: 4333
  misc_feature 1..32: note = Probe
  source 1..32: mol_type = other DNA

SEQ ID NO: 17959 - DNA, 33 bp, synthetic construct; identical to SEQ ID NO: 4334
  misc_feature 1..33: note = Probe
  source 1..33: mol_type = other DNA

SEQ ID NO: 17960 - DNA, 34 bp, synthetic construct; identical to SEQ ID NO: 4335
  misc_feature 1..34: note = Probe
  source 1..34: mol_type = other DNA

SEQ ID NO: 17961 - DNA, 35 bp, synthetic construct; identical to SEQ ID NO: 4336
  misc_feature 1..35: note = Probe
  source 1..35: mol_type = other DNA

SEQ ID NO: 17962 - DNA, 36 bp, synthetic construct; identical to SEQ ID NO: 4337
  misc_feature 1..36: note = Probe
  source 1..36: mol_type = other DNA

SEQ ID NO: 17963 - DNA, 37 bp, synthetic construct
  misc_feature 1..37: note = Probe
  source 1..37: mol_type = other DNA
cagctttggggggttcgattccttccttttttgtcta

SEQ ID NO: 17964 - DNA, 31 bp, synthetic construct
  misc_feature 1..31: note = Probe
  source 1..31: mol_type = other DNA
caggagatcctgggttcgaatcccagcgggg

SEQ ID NO: 17965 - DNA, 34 bp, synthetic construct
  misc_feature 1..34: note = Probe
  source 1..34: mol_type = other DNA
caggagatcctgggttcgaatcccagcggggcct

SEQ ID NO: 17966 - DNA, 31 bp, synthetic construct
  misc_feature 1..31: note = Probe
  source 1..31: mol_type = other DNA
caggagatcctgggttcgaatcccagcggtg

SEQ ID NO: 17967 - DNA, 32 bp, synthetic construct
  misc_feature 1..32: note = Probe
  source 1..32: mol_type = other DNA
caggagatcctgggttcgaatcccagcggtgc

SEQ ID NO: 17968 - DNA, 34 bp, synthetic construct
  misc_feature 1..34: note = Probe
  source 1..34: mol_type = other DNA
caggagatcctgggttcgaatcccagcggtgcct

SEQ ID NO: 17969 - DNA, 35 bp, synthetic construct
  misc_feature 1..35: note = Probe
  source 1..35: mol_type = other DNA
caggagatcctgggttcgaatcccagcggtgcctc

SEQ ID NO: 17970 - DNA, 37 bp, synthetic construct; identical to SEQ ID NO: 4338
  misc_feature 1..37: note = Probe
  source 1..37: mol_type = other DNA

SEQ ID NO: 17971 - DNA, 37 bp, synthetic construct
  misc_feature 1..37: note = Probe
  source 1..37: mol_type = other DNA
caggagatcctgggttcgactcccagcggggccttgg

SEQ ID NO: 17972 - DNA, 22 bp, synthetic construct
  misc_feature 1..22: note = Probe
  source 1..22: mol_type = other DNA
caggatggccgagcggtctaag

SEQ ID NO: 17973 - DNA, 22 bp, synthetic construct
  misc_feature 1..22: note = Probe
  source 1..22: mol_type = other DNA
caggatggccgagtggtctaag

SEQ ID NO: 17974 - DNA, 38 bp, synthetic construct
  misc_feature 1..38: note = Probe
  source 1..38: mol_type = other DNA
caggcgcccggctagctcagtcggtagagcatgggact

SEQ ID NO: 17975 - DNA, 39 bp, synthetic construct
  misc_feature 1..39: note = Probe
  source 1..39: mol_type = other DNA
caggcgcccggctagctcagtcggtagagcatgggactc

SEQ ID NO: 17976 - DNA, 15 bp, synthetic construct
  misc_feature 1..15: note = Probe
  source 1..15: mol_type = other DNA
caggcgcggtggctc

SEQ ID NO: 17977 - DNA, 32 bp, synthetic construct
  misc_feature 1..32: note = Probe
  source 1..32: mol_type = other DNA
caggcggcccgggttcgactcccggtgtggga

SEQ ID NO: 17978 - DNA, 35 bp, synthetic construct
  misc_feature 1..35: note = Probe
  source 1..35: mol_type = other DNA
caggcggcccgggttcgactcccggtgtgggaacg

SEQ ID NO: 17979 - DNA, 36 bp, synthetic construct; identical to SEQ ID NO: 4340
  misc_feature 1..36: note = Probe
  source 1..36: mol_type = other DNA

SEQ ID NO: 17980 - DNA, 30 bp, synthetic construct
  misc_feature 1..30: note = Probe
  source 1..30: mol_type = other DNA
cagggatgggttcgattctcatagtcctag

SEQ ID NO: 17981 - DNA, 31 bp, synthetic construct; identical to SEQ ID NO: 4343
  misc_feature 1..31: note = Probe
  source 1..31: mol_type = other DNA

SEQ ID NO: 17982 - DNA, 32 bp, synthetic construct; identical to SEQ ID NO: 4344
  misc_feature 1..32: note = Probe
  source 1..32: mol_type = other DNA

SEQ ID NO: 17983 - DNA, 33 bp, synthetic construct; identical to SEQ ID NO: 4345
  misc_feature 1..33: note = Probe
  source 1..33: mol_type = other DNA

SEQ ID NO: 17984 - DNA, 40 bp, synthetic construct
  misc_feature 1..40: note = Probe
  source 1..40: mol_type = other DNA
cagggatgggttcgattctcatagtcctagaaataagggg

SEQ ID NO: 17985 - DNA, 36 bp, synthetic construct
  misc_feature 1..36: note = Probe
  source 1..36: mol_type = other DNA
cagggattgtgggttcgagtcccacccggggtaaag

SEQ ID NO: 17986 - DNA, 26 bp, synthetic construct
  misc_feature 1..26: note = Probe
  source 1..26: mol_type = other DNA
cagggattgtgggttcgagtcccatc

SEQ ID NO: 17987 - DNA, 30 bp, synthetic construct
  misc_feature 1..30: note = Probe
  source 1..30: mol_type = other DNA
cagggattgtgggttcgagtcccatctggg

SEQ ID NO: 17988 - DNA, 31 bp, synthetic construct; identical to SEQ ID NO: 4347
  misc_feature 1..31: note = Probe
  source 1..31: mol_type = other DNA

SEQ ID NO: 17989 - DNA, 33 bp, synthetic construct
  misc_feature 1..33: note = Probe
  source 1..33: mol_type = other DNA
cagggattgtgggttcgagtcccatctggggtg

SEQ ID NO: 17990 - DNA, 36 bp, synthetic construct
  misc_feature 1..36: note = Probe
  source 1..36: mol_type = other DNA
caggggtcgcgagttcaattctcgctggggcctgtg

SEQ ID NO: 17991 - DNA, 36 bp, synthetic construct
  misc_feature 1..36: note = Probe
  source 1..36: mol_type = other DNA
caggggtcgcgagttcgatcctcgctggggcctcct

SEQ ID NO: 17992 - DNA, 26 bp, synthetic construct
  misc_feature 1..26: note = Probe
  source 1..26: mol_type = other DNA
caggggttaggcctctttttaccagc

SEQ ID NO: 17993 - DNA, 27 bp, synthetic construct
  misc_feature 1..27: note = Probe
  source 1..27: mol_type = other DNA
caggggttaggcctctttttaccagct

SEQ ID NO: 17994 - DNA, 16 bp, synthetic construct
  misc_feature 1..16: note = Probe
  source 1..16: mol_type = other DNA
cagggtcgtgggttcg

SEQ ID NO: 17995 - DNA, 31 bp, synthetic construct; identical to SEQ ID NO: 4352
  misc_feature 1..31: note = Probe
  source 1..31: mol_type = other DNA

SEQ ID NO: 17996 - DNA, 33 bp, synthetic construct
  misc_feature 1..33: note = Probe
  source 1..33: mol_type = other DNA
cagggtcgtgggttcgagccccacgttgggcgc

SEQ ID NO: 17997 - DNA, 16 bp, synthetic construct
  misc_feature 1..16: note = Probe
  source 1..16: mol_type = other DNA
caggtcgcagtctccc

SEQ ID NO: 17998 - DNA, 29 bp, synthetic construct
  misc_feature 1..29: note = Probe
  source 1..29: mol_type = other DNA
caggtggcccgggttcgactcccggtatg

SEQ ID NO: 17999 - DNA, 30 bp, synthetic construct
  misc_feature 1..30: note = Probe
  source 1..30: mol_type = other DNA
caggtggcccgggttcgactcccggtatgg

SEQ ID NO: 18000 - DNA, 31 bp, synthetic construct
  misc_feature 1..31: note = Probe
  source 1..31: mol_type = other DNA
caggtggcccgggttcgactcccggtatggg

SEQ ID NO: 18001 - DNA, 33 bp, synthetic construct
  misc_feature 1..33: note = Probe
  source 1..33: mol_type = other DNA
caggtggcccgggttcgactcccggtatgggaa

SEQ ID NO: 18002 - DNA, 36 bp, synthetic construct; identical to SEQ ID NO: 4354
  misc_feature 1..36: note = Probe
  source 1..36: mol_type = other DNA

SEQ ID NO: 18003 - DNA, 16 bp, synthetic construct
  misc_feature 1..16: note = Probe
  source 1..16: mol_type = other DNA
cagtacatgcagagca

SEQ ID NO: 18004 - DNA, 24 bp, synthetic construct
  misc_feature 1..24: note = Probe
  source 1..24: mol_type = other DNA
cagtcagaggttcaattcctcttc

SEQ ID NO: 18005 - DNA, 25 bp, synthetic construct
  misc_feature 1..25: note = Probe
  source 1..25: mol_type = other DNA
cagtcagaggttcaattcctcttct

SEQ ID NO: 18006 - DNA, 26 bp, synthetic construct
  misc_feature 1..26: note = Probe
  source 1..26: mol_type = other DNA
cagtcagaggttcaattcctcttctt

SEQ ID NO: 18007 - DNA, 27 bp, synthetic construct
  misc_feature 1..27: note = Probe
  source 1..27: mol_type = other DNA
cagtcagaggttcaattcctcttctta

SEQ ID NO: 18008 - DNA, 30 bp, synthetic construct; identical to SEQ ID NO: 4358
  misc_feature 1..30: note = Probe
  source 1..30: mol_type = other DNA

SEQ ID NO: 18009 - DNA, 31 bp, synthetic construct
  misc_feature 1..31: note = Probe
  source 1..31: mol_type = other DNA
cagtcagaggttcaattcctcttcttaacaa

SEQ ID NO: 18010 - DNA, 33 bp, synthetic construct; identical to SEQ ID NO: 4360
  misc_feature 1..33: note = Probe
  source 1..33: mol_type = other DNA

SEQ ID NO: 18011 - DNA, 44 bp, synthetic construct; identical to SEQ ID NO: 4361
  misc_feature 1..44: note = Probe
  source 1..44: mol_type = other DNA

SEQ ID NO: 18012 - DNA, 17 bp, synthetic construct
  misc_feature 1..17: note = Probe
  source 1..17: mol_type = other DNA
cagtcggtagagcatca

SEQ ID NO: 18013 - DNA, 19 bp, synthetic construct
  misc_feature 1..19: note = Probe
  source 1..19: mol_type = other DNA
cagtcggtagagcatcaga

SEQ ID NO: 18014 - DNA, 42 bp, synthetic construct
  misc_feature 1..42: note = Probe
  source 1..42: mol_type = other DNA
cagtcggtagagcatgagactcttaatctcagggtcgtgggt

SEQ ID NO: 18015 - DNA, 20 bp, synthetic construct
  misc_feature 1..20: note = Probe
  source 1..20: mol_type = other DNA
cagtcggtagagcatgggac

SEQ ID NO: 18016 - DNA, 21 bp, synthetic construct
  misc_feature 1..21: note = Probe
  source 1..21: mol_type = other DNA
cagtcggtagagcatgggact

SEQ ID NO: 18017 - DNA, 42 bp, synthetic construct
  misc_feature 1..42: note = Probe
  source 1..42: mol_type = other DNA
cagtcggtagagcatgggactcttaatcccagggtcgtgggt

SEQ ID NO: 18018 - DNA, 22 bp, synthetic construct
  misc_feature 1..22: note = Probe
  source 1..22: mol_type = other DNA
cagtctcataatctgaaggtcc

SEQ ID NO: 18019 - DNA, 27 bp, synthetic construct
  misc_feature 1..27: note = Probe
  source 1..27: mol_type = other DNA
cagtctcataatctgaaggtcctgagt

SEQ ID NO: 18020 - DNA, 22 bp, synthetic construct
  misc_feature 1..22: note = Probe
  source 1..22: mol_type = other DNA
cagtctcataatctgaaggtcg

SEQ ID NO: 18021 - DNA, 38 bp, synthetic construct
  misc_feature 1..38: note = Probe
  source 1..38: mol_type = other DNA
cagtctcttcgggggcgtgggttcgaatcccaccgctg

SEQ ID NO: 18022 - DNA, 39 bp, synthetic construct
  misc_feature 1..39: note = Probe
  source 1..39: mol_type = other DNA
cagtctcttcgggggcgtgggttcgaatcccaccgctgc

SEQ ID NO: 18023 - DNA, 44 bp, synthetic construct
  misc_feature 1..44: note = Probe
  source 1..44: mol_type = other DNA
cagtctcttcgggggcgtgggttcgaatcccaccgctgccaggt

SEQ ID NO: 18024 - DNA, 44 bp, synthetic construct; identical to SEQ ID NO: 4374
  misc_feature 1..44: note = Probe
  source 1..44: mol_type = other DNA

SEQ ID NO: 18025 - DNA, 29 bp, synthetic construct
  misc_feature 1..29: note = Probe
  source 1..29: mol_type = other DNA
cagtgcccggctagctcagtcggtagagc

SEQ ID NO: 18026 - DNA, 30 bp, synthetic construct
  misc_feature 1..30: note = Probe
  source 1..30: mol_type = other DNA
cagtgcccggctagctcagtcggtagagca

SEQ ID NO: 18027 - DNA, 32 bp, synthetic construct
  misc_feature 1..32: note = Probe
  source 1..32: mol_type = other DNA
cagtggcctaatggataaggcatcagcctccg

SEQ ID NO: 18028 - DNA, 19 bp, synthetic construct
  misc_feature 1..19: note = Probe
  source 1..19: mol_type = other DNA
cagtggtagaattctcgcc

SEQ ID NO: 18029 - DNA, 20 bp, synthetic construct
  misc_feature 1..20: note = Probe
  source 1..20: mol_type = other DNA
cagtggtagaattctcgcct

SEQ ID NO: 18030 - DNA, 21 bp, synthetic construct
  misc_feature 1..21: note = Probe
  source 1..21: mol_type = other DNA
cagtggtagaattctcgcctg

SEQ ID NO: 18031 - DNA, 22 bp, synthetic construct
  misc_feature 1..22: note = Probe
  source 1..22: mol_type = other DNA
cagtggtagaattctcgcctgc

SEQ ID NO: 18032 - DNA, 23 bp, synthetic construct
  misc_feature 1..23: note = Probe
  source 1..23: mol_type = other DNA
cagtggtagaattctcgcctgcc

SEQ ID NO: 18033 - DNA, 36 bp, synthetic construct
  misc_feature 1..36: note = Probe
  source 1..36: mol_type = other DNA
cagtggtagaattctcgcctgccacgcgggaggccc

SEQ ID NO: 18034 - DNA, 29 bp, synthetic construct
  misc_feature 1..29: note = Probe
  source 1..29: mol_type = other DNA
cagttgatgcagagtggggttttgcagtc

SEQ ID NO: 18035 - DNA, 31 bp, synthetic construct
  misc_feature 1..31: note = Probe
  source 1..31: mol_type = other DNA
cagttgatgcagagtggggttttgcagtcct

SEQ ID NO: 18036 - DNA, 32 bp, synthetic construct
  misc_feature 1..32: note = Probe
  source 1..32: mol_type = other DNA
cagttgatgcagagtggggttttgcagtcctt

SEQ ID NO: 18037 - DNA, 33 bp, synthetic construct; identical to SEQ ID NO: 4379
  misc_feature 1..33: note = Probe
  source 1..33: mol_type = other DNA

SEQ ID NO: 18038 - DNA, 34 bp, synthetic construct; identical to SEQ ID NO: 4380
  misc_feature 1..34: note = Probe
  source 1..34: mol_type = other DNA

SEQ ID NO: 18039 - DNA, 35 bp, synthetic construct
  misc_feature 1..35: note = Probe
  source 1..35: mol_type = other DNA
cagttgatgcagagtggggttttgcagtccttagc

SEQ ID NO: 18040 - DNA, 36 bp, synthetic construct; identical to SEQ ID NO: 4381
  misc_feature 1..36: note = Probe
  source 1..36: mol_type = other DNA

SEQ ID NO: 18041 - DNA, 24 bp, synthetic construct
  misc_feature 1..24: note = Probe
  source 1..24: mol_type = other DNA
cataaaacttaaaactttacagtc

SEQ ID NO: 18042 - DNA, 50 bp, synthetic construct; identical to SEQ ID NO: 4387
  misc_feature 1..50: note = Probe
  source 1..50: mol_type = other DNA

SEQ ID NO: 18043 - DNA, 43 bp, synthetic construct; identical to SEQ ID NO: 4391
  misc_feature 1..43: note = Probe
  source 1..43: mol_type = other DNA

SEQ ID NO: 18044 - DNA, 42 bp, synthetic construct
  misc_feature 1..42: note = Probe
  source 1..42: mol_type = other DNA
cataacccagaggtcgatggatcgaaaccatcctctgctatc

SEQ ID NO: 18045 - DNA, 21 bp, synthetic construct
  misc_feature 1..21: note = Probe
  source 1..21: mol_type = other DNA
cataatctgaaggtcctgagt

SEQ ID NO: 18046 - DNA, 33 bp, synthetic construct; identical to SEQ ID NO: 4394
  misc_feature 1..33: note = Probe
  source 1..33: mol_type = other DNA

SEQ ID NO: 18047 - DNA, 35 bp, synthetic construct; identical to SEQ ID NO: 4395
  misc_feature 1..35: note = Probe
  source 1..35: mol_type = other DNA

SEQ ID NO: 18048 - DNA, 37 bp, synthetic construct
  misc_feature 1..37: note = Probe
  source 1..37: mol_type = other DNA
cataccccgaaaatgttggttatacccttcccgtact

SEQ ID NO: 18049 - DNA, 40 bp, synthetic construct; identical to SEQ ID NO: 4396
  misc_feature 1..40: note = Probe
  source 1..40: mol_type = other DNA

SEQ ID NO: 18050 - DNA, 41 bp, synthetic construct; identical to SEQ ID NO: 4397
  misc_feature 1..41: note = Probe
  source 1..41: mol_type = other DNA

SEQ ID NO: 18051 - DNA, 27 bp, synthetic construct
  misc_feature 1..27: note = Probe
  source 1..27: mol_type = other DNA
catagctgccttccaagcagttgaccc

SEQ ID NO: 18052 - DNA, 30 bp, synthetic construct
  misc_feature 1..30: note = Probe
  source 1..30: mol_type = other DNA
catagctgccttccaagcagttgacccggg

SEQ ID NO: 18053 - DNA, 31 bp, synthetic construct
  misc_feature 1..31: note = Probe
  source 1..31: mol_type = other DNA
catagctgccttccaagcagttgacccgggt

SEQ ID NO: 18054 - DNA, 32 bp, synthetic construct
  misc_feature 1..32: note = Probe
  source 1..32: mol_type = other DNA
catagctgccttccaagcagttgacccgggtt

SEQ ID NO: 18055 - DNA, 26 bp, synthetic construct
  misc_feature 1..26: note = Probe
  source 1..26: mol_type = other DNA
catagtgtagtggttatcacgtctgc

SEQ ID NO: 18056 - DNA, 25 bp, synthetic construct
  misc_feature 1..25: note = Probe
  source 1..25: mol_type = other DNA
catatcattggtcgtggttgtagtc

SEQ ID NO: 18057 - DNA, 26 bp, synthetic construct
  misc_feature 1..26: note = Probe
  source 1..26: mol_type = other DNA
catatcattggtcgtggttgtagtcc

SEQ ID NO: 18058 - DNA, 29 bp, synthetic construct
  misc_feature 1..29: note = Probe
  source 1..29: mol_type = other DNA
catatcattggtcgtggttgtagtccgtg

SEQ ID NO: 18059 - DNA, 33 bp, synthetic construct
  misc_feature 1..33: note = Probe
  source 1..33: mol_type = other DNA
catatcattggtcgtggttgtagtccgtgcgag

SEQ ID NO: 18060 - DNA, 35 bp, synthetic construct
  misc_feature 1..35: note = Probe
  source 1..35: mol_type = other DNA
catatcattggtcgtggttgtagtccgtgcgagaa

SEQ ID NO: 18061 - DNA, 36 bp, synthetic construct
  misc_feature 1..36: note = Probe
  source 1..36: mol_type = other DNA
catatcattggtcgtggttgtagtccgtgcgagaat

SEQ ID NO: 18062 - DNA, 40 bp, synthetic construct
  misc_feature 1..40: note = Probe
  source 1..40: mol_type = other DNA
catatcattggtcgtggttgtagtccgtgcgagaataatg

SEQ ID NO: 18063 - DNA, 31 bp, synthetic construct; identical to SEQ ID NO: 4402
  misc_feature 1..31: note = Probe
  source 1..31: mol_type = other DNA

SEQ ID NO: 18064 - DNA, 32 bp, synthetic construct; identical to SEQ ID NO: 4403
  misc_feature 1..32: note = Probe
  source 1..32: mol_type = other DNA

SEQ ID NO: 18065 - DNA, 33 bp, synthetic construct; identical to SEQ ID NO: 541
  misc_feature 1..33: note = Probe
  source 1..33: mol_type = other DNA

SEQ ID NO: 18066 - DNA, 17 bp, synthetic construct
  misc_feature 1..17: note = Probe
  source 1..17: mol_type = other DNA
catatgtccgcgtgggt

SEQ ID NO: 18067 - DNA, 19 bp, synthetic construct
  misc_feature 1..19: note = Probe
  source 1..19: mol_type = other DNA
catatgtccgcgtgggttc

SEQ ID NO: 18068 - DNA, 50 bp, synthetic construct; identical to SEQ ID NO: 4406
  misc_feature 1..50: note = Probe
  source 1..50: mol_type = other DNA

SEQ ID NO: 18069 - DNA, 16 bp, synthetic construct
  misc_feature 1..16: note = Probe
  source 1..16: mol_type = other DNA
catcaccccataaaca

SEQ ID NO: 18070 - DNA, 17 bp, synthetic construct
  misc_feature 1..17: note = Probe
  source 1..17: mol_type = other DNA
catcaccccataaacaa

SEQ ID NO: 18071 - DNA, 18 bp, synthetic construct
  misc_feature 1..18: note = Probe
  source 1..18: mol_type = other DNA
catcaccccataaacaaa

SEQ ID NO: 18072 - DNA, 19 bp, synthetic construct
  misc_feature 1..19: note = Probe
  source 1..19: mol_type = other DNA
catcaccccataaacaaat

SEQ ID NO: 18073 - DNA, 30 bp, synthetic construct
  misc_feature 1..30: note = Probe
  source 1..30: mol_type = other DNA
catcaccccataaacaaataggtttggtcc

SEQ ID NO: 18074 - DNA, 31 bp, synthetic construct
  misc_feature 1..31: note = Probe
  source 1..31: mol_type = other DNA
catcaccccataaacaaataggtttggtcct

SEQ ID NO: 18075 - DNA, 50 bp, synthetic construct; identical to SEQ ID NO: 4419
  misc_feature 1..50: note = Probe
  source 1..50: mol_type = other DNA

SEQ ID NO: 18076 - DNA, 40 bp, synthetic construct; identical to SEQ ID NO: 4420
  misc_feature 1..40: note = Probe
  source 1..40: mol_type = other DNA

SEQ ID NO: 18077 - DNA, 24 bp, synthetic construct
  misc_feature 1..24: note = Probe
  source 1..24: mol_type = other DNA
catcctctgctatagactcccttt

SEQ ID NO: 18078 - DNA, 16 bp, synthetic construct
  misc_feature 1..16: note = Probe
  source 1..16: mol_type = other DNA
catgagactcttaatc

SEQ ID NO: 18079 - DNA, 37 bp, synthetic construct; identical to SEQ ID NO: 4421
  misc_feature 1..37: note = Probe
  source 1..37: mol_type = other DNA

SEQ ID NO: 18080 - DNA, 18 bp, synthetic construct
  misc_feature 1..18: note = Probe
  source 1..18: mol_type = other DNA
catgcaagattcccattc

SEQ ID NO: 18081 - DNA, 29 bp, synthetic construct
  misc_feature 1..29: note = Probe
  source 1..29: mol_type = other DNA
catgcaagattcccattcttgcgacccgg

SEQ ID NO: 18082 - DNA, 30 bp, synthetic construct
  misc_feature 1..30: note = Probe
  source 1..30: mol_type = other DNA
catgcaagattcccattcttgcgacccggg

SEQ ID NO: 18083 - DNA, 32 bp, synthetic construct
  misc_feature 1..32: note = Probe
  source 1..32: mol_type = other DNA
catgcaagattcccattcttgcgacccgggtt

SEQ ID NO: 18084 - DNA, 33 bp, synthetic construct
  misc_feature 1..33: note = Probe
  source 1..33: mol_type = other DNA
catgcaagattcccattcttgcgacccgggttc

SEQ ID NO: 18085 - DNA, 34 bp, synthetic construct
  misc_feature 1..34: note = Probe
  source 1..34: mol_type = other DNA
catgcaagattcccattcttgcgacccgggttcg

SEQ ID NO: 18086 - DNA, 16 bp, synthetic construct
  misc_feature 1..16: note = Probe
  source 1..16: mol_type = other DNA
catgcccccatgtcta

SEQ ID NO: 18087 - DNA, 19 bp, synthetic construct
  misc_feature 1..19: note = Probe
  source 1..19: mol_type = other DNA
catgcccccatgtctaaca

SEQ ID NO: 18088 - DNA, 21 bp, synthetic construct
  misc_feature 1..21: note = Probe
  source 1..21: mol_type = other DNA
catgcccccatgtctaacaac

SEQ ID NO: 18089 - DNA, 22 bp, synthetic construct
  misc_feature 1..22: note = Probe
  source 1..22: mol_type = other DNA
catgcccccatgtctaacaaca

SEQ ID NO: 18090 - DNA, 23 bp, synthetic construct
  misc_feature 1..23: note = Probe
  source 1..23: mol_type = other DNA
catgcccccatgtctaacaacat

SEQ ID NO: 18091 - DNA, 27 bp, synthetic construct
  misc_feature 1..27: note = Probe
  source 1..27: mol_type = other DNA
catgcccccatgtctaacaacatggct

SEQ ID NO: 18092 - DNA, 28 bp, synthetic construct
  misc_feature 1..28: note = Probe
  source 1..28: mol_type = other DNA
catgcccccatgtctaacaacatggctt

SEQ ID NO: 18093 - DNA, 29 bp, synthetic construct
  misc_feature 1..29: note = Probe
  source 1..29: mol_type = other DNA
catgcccccatgtctaacaacatggcttt

SEQ ID NO: 18094 - DNA, 30 bp, synthetic construct; identical to SEQ ID NO: 4433
  misc_feature 1..30: note = Probe
  source 1..30: mol_type = other DNA

SEQ ID NO: 18095 - DNA, 31 bp, synthetic construct; identical to SEQ ID NO: 4434
  misc_feature 1..31: note = Probe
  source 1..31: mol_type = other DNA

SEQ ID NO: 18096 - DNA, 32 bp, synthetic construct; identical to SEQ ID NO: 4435
  misc_feature 1..32: note = Probe
  source 1..32: mol_type = other DNA

SEQ ID NO: 18097 - DNA, 33 bp, synthetic construct; identical to SEQ ID NO: 4436
  misc_feature 1..33: note = Probe
  source 1..33: mol_type = other DNA

SEQ ID NO: 18098 - DNA, 34 bp, synthetic construct; identical to SEQ ID NO: 4437
  misc_feature 1..34: note = Probe
  source 1..34: mol_type = other DNA

SEQ ID NO: 18099 - DNA, 35 bp, synthetic construct; identical to SEQ ID NO: 4438
  misc_feature 1..35: note = Probe
  source 1..35: mol_type = other DNA

SEQ ID NO: 18100 - DNA, 36 bp, synthetic construct; identical to SEQ ID NO: 4439
  misc_feature 1..36: note = Probe
  source 1..36: mol_type = other DNA

SEQ ID NO: 18101 - DNA, 37 bp, synthetic construct
  misc_feature 1..37: note = Probe
  source 1..37: mol_type = other DNA
catgcccccatgtctaacaacatggctttctcaactt

SEQ ID NO: 18102 - DNA, 38 bp, synthetic construct
  misc_feature 1..38: note = Probe
  source 1..38: mol_type = other DNA
catgcccccatgtctaacaacatggctttctcaacttt

SEQ ID NO: 18103 - DNA, 39 bp, synthetic construct
  misc_feature 1..39: note = Probe
  source 1..39: mol_type = other DNA
catgcccccatgtctaacaacatggctttctcaactttt

SEQ ID NO: 18104 - DNA, 23 bp, synthetic construct
  misc_feature 1..23: note = Probe
  source 1..23: mol_type = other DNA
catggccaacctcctactcctca

SEQ ID NO: 18105 - DNA, 31 bp, synthetic construct
  misc_feature 1..31: note = Probe
  source 1..31: mol_type = other DNA
catggggttggcttgaaaccagctttggggg

SEQ ID NO: 18106 - DNA, 33 bp, synthetic construct; identical to SEQ ID NO: 4440
  misc_feature 1..33: note = Probe
  source 1..33: mol_type = other DNA

SEQ ID NO: 18107 - DNA, 26 bp, synthetic construct
  misc_feature 1..26: note = Probe
  source 1..26: mol_type = other DNA
catgggtggttcagtggtagaattct

SEQ ID NO: 18108 - DNA, 29 bp, synthetic construct
  misc_feature 1..29: note = Probe
  source 1..29: mol_type = other DNA
catgggtggttcagtggtagaattctcgc

SEQ ID NO: 18109 - DNA, 30 bp, synthetic construct; identical to SEQ ID NO: 9630
  misc_feature 1..30: note = Probe
  source 1..30: mol_type = other DNA

SEQ ID NO: 18110 - DNA, 33 bp, synthetic construct; identical to SEQ ID NO: 542
  misc_feature 1..33: note = Probe
  source 1..33: mol_type = other DNA

SEQ ID NO: 18111 - DNA, 34 bp, synthetic construct; identical to SEQ ID NO: 4444
  misc_feature 1..34: note = Probe
  source 1..34: mol_type = other DNA

SEQ ID NO: 18112 - DNA, 27 bp, synthetic construct
  misc_feature 1..27: note = Probe
  source 1..27: mol_type = other DNA
catgtctaacaacatggctttctcaac

SEQ ID NO: 18113 - DNA, 28 bp, synthetic construct
  misc_feature 1..28: note = Probe
  source 1..28: mol_type = other DNA
catgtctaacaacatggctttctcaact

SEQ ID NO: 18114 - DNA, 26 bp, synthetic construct
  misc_feature 1..26: note = Probe
  source 1..26: mol_type = other DNA
catgttaacgttttcttccagctcca

SEQ ID NO: 18115 - DNA, 27 bp, synthetic construct
  misc_feature 1..27: note = Probe
  source 1..27: mol_type = other DNA
cattaaattatgataatcatatttacc

SEQ ID NO: 18116 - DNA, 32 bp, synthetic construct; identical to SEQ ID NO: 4447
  misc_feature 1..32: note = Probe
  source 1..32: mol_type = other DNA

SEQ ID NO: 18117 - DNA, 34 bp, synthetic construct
  misc_feature 1..34: note = Probe
  source 1..34: mol_type = other DNA
cattcttgcgacccgggttcgattcccgggcggc

SEQ ID NO: 18118 - DNA, 38 bp, synthetic construct
  misc_feature 1..38: note = Probe
  source 1..38: mol_type = other DNA
cattcttgcgacccgggttcgattcccgggcggcgcac

SEQ ID NO: 18119 - DNA, 39 bp, synthetic construct; identical to SEQ ID NO: 4450
  misc_feature 1..39: note = Probe
  source 1..39: mol_type = other DNA

SEQ ID NO: 18120 - DNA, 40 bp, synthetic construct; identical to SEQ ID NO: 4451
  misc_feature 1..40: note = Probe
  source 1..40: mol_type = other DNA

SEQ ID NO: 18121 - DNA, 40 bp, synthetic construct; identical to SEQ ID NO: 4455
  misc_feature 1..40: note = Probe
  source 1..40: mol_type = other DNA

SEQ ID NO: 18122 - DNA, 23 bp, synthetic construct
  misc_feature 1..23: note = Probe
  source 1..23: mol_type = other DNA
cattggggtctccccgcgcaggt

SEQ ID NO: 18123 - DNA, 24 bp, synthetic construct
  misc_feature 1..24: note = Probe
  source 1..24: mol_type = other DNA
cattggggtctccccgcgcaggtt

SEQ ID NO: 18124 - DNA, 25 bp, synthetic construct
  misc_feature 1..25: note = Probe
  source 1..25: mol_type = other DNA
cattggggtttccccgcgcaggttc

SEQ ID NO: 18125 - DNA, 21 bp, synthetic construct
  misc_feature 1..21: note = Probe
  source 1..21: mol_type = other DNA
cattggtcgtggttgtagtcc

SEQ ID NO: 18126 - DNA, 24 bp, synthetic construct
  misc_feature 1..24: note = Probe
  source 1..24: mol_type = other DNA
cattggtcgtggttgtagtccgtg

SEQ ID NO: 18127 - DNA, 26 bp, synthetic construct
  misc_feature 1..26: note = Probe
  source 1..26: mol_type = other DNA
cattggtcgtggttgtagtccgtgcg

SEQ ID NO: 18128 - DNA, 28 bp, synthetic construct
  misc_feature 1..28: note = Probe
  source 1..28: mol_type = other DNA
cattggtcgtggttgtagtccgtgcgag

SEQ ID NO: 18129 - DNA, 29 bp, synthetic construct
  misc_feature 1..29: note = Probe
  source 1..29: mol_type = other DNA
cattggtcgtggttgtagtccgtgcgaga

SEQ ID NO: 18130 - DNA, 30 bp, synthetic construct
  misc_feature 1..30: note = Probe
  source 1..30: mol_type = other DNA
cattggtcgtggttgtagtccgtgcgagaa

SEQ ID NO: 18131 - DNA, 31 bp, synthetic construct
  misc_feature 1..31: note = Probe
  source 1..31: mol_type = other DNA
cattggtcgtggttgtagtccgtgcgagaat

SEQ ID NO: 18132 - DNA, 33 bp, synthetic construct; identical to SEQ ID NO: 4460
  misc_feature 1..33: note = Probe
  source 1..33: mol_type = other DNA

SEQ ID NO: 18133 - DNA, 35 bp, synthetic construct; identical to SEQ ID NO: 4461
  misc_feature 1..35: note = Probe
  source 1..35: mol_type = other DNA

SEQ ID NO: 18134 - DNA, 26 bp, synthetic construct
  misc_feature 1..26: note = Probe
  source 1..26: mol_type = other DNA
cattggtggttcagtggtagaattct

SEQ ID NO: 18135 - DNA, 28 bp, synthetic construct
  misc_feature 1..28: note = Probe
  source 1..28: mol_type = other DNA
cattggtggttcagtggtagaattctcg

SEQ ID NO: 18136 - DNA, 30 bp, synthetic construct; identical to SEQ ID NO: 4462
  misc_feature 1..30: note = Probe
  source 1..30: mol_type = other DNA

SEQ ID NO: 18137 - DNA, 31 bp, synthetic construct; identical to SEQ ID NO: 4463
  misc_feature 1..31: note = Probe
  source 1..31: mol_type = other DNA

SEQ ID NO: 18138 - DNA, 32 bp, synthetic construct; identical to SEQ ID NO: 4464
  misc_feature 1..32: note = Probe
  source 1..32: mol_type = other DNA

SEQ ID NO: 18139 - DNA, 33 bp, synthetic construct; identical to SEQ ID NO: 4465
  misc_feature 1..33: note = Probe
  source 1..33: mol_type = other DNA

SEQ ID NO: 18140 - DNA, 34 bp, synthetic construct; identical to SEQ ID NO: 4466
  misc_feature 1..34: note = Probe
  source 1..34: mol_type = other DNA

SEQ ID NO: 18141 - DNA, 50 bp, synthetic construct
  misc_feature 1..50: note = Probe
  source 1..50: mol_type = other DNA
cattggtggttcagtggtagaattctcgcctgccacgcgggaggcccggg

SEQ ID NO: 18142 - DNA, 40 bp, synthetic construct
  misc_feature 1..40: note = Probe
  source 1..40: mol_type = other DNA
cattgtgctttgcacgcgtgggttcgaatcccatcctcgt

SEQ ID NO: 18143 - DNA, 27 bp, synthetic construct
  misc_feature 1..27: note = Probe
  source 1..27: mol_type = other DNA
ccaaaacatcagattgtgaatctgaca

SEQ ID NO: 18144 - DNA, 28 bp, synthetic construct
  misc_feature 1..28: note = Probe
  source 1..28: mol_type = other DNA
ccaaaacatcagattgtgaatctgacaa

SEQ ID NO: 18145 - DNA, 29 bp, synthetic construct
  misc_feature 1..29: note = Probe
  source 1..29: mol_type = other DNA
ccaaaacatcagattgtgaatctgacaac

SEQ ID NO: 18146 - DNA, 30 bp, synthetic construct; identical to SEQ ID NO: 4473
  misc_feature 1..30: note = Probe
  source 1..30: mol_type = other DNA

SEQ ID NO: 18147 - DNA, 31 bp, synthetic construct; identical to SEQ ID NO: 4474
  misc_feature 1..31: note = Probe
  source 1..31: mol_type = other DNA

SEQ ID NO: 18148 - DNA, 32 bp, synthetic construct; identical to SEQ ID NO: 4475
  misc_feature 1..32: note = Probe
  source 1..32: mol_type = other DNA

SEQ ID NO: 18149 - DNA, 33 bp, synthetic construct; identical to SEQ ID NO: 4476
  misc_feature 1..33: note = Probe
  source 1..33: mol_type = other DNA

SEQ ID NO: 18150 - DNA, 36 bp, synthetic construct; identical to SEQ ID NO: 4479
  misc_feature 1..36: note = Probe
  source 1..36: mol_type = other DNA

SEQ ID NO: 18151 - DNA, 38 bp, synthetic construct; identical to SEQ ID NO: 550
  misc_feature 1..38: note = Probe
  source 1..38: mol_type = other DNA

SEQ ID NO: 18152 - DNA, 39 bp, synthetic construct; identical to SEQ ID NO: 551
  misc_feature 1..39: note = Probe
  source 1..39: mol_type = other DNA

SEQ ID NO: 18153 - DNA, 41 bp, synthetic construct; identical to SEQ ID NO: 553
  misc_feature 1..41: note = Probe
  source 1..41: mol_type = other DNA

SEQ ID NO: 18154 - DNA, 50 bp, synthetic construct; identical to SEQ ID NO: 4482
  misc_feature 1..50: note = Probe
  source 1..50: mol_type = other DNA

SEQ ID NO: 18155 - DNA, 17 bp, synthetic construct
  misc_feature 1..17: note = Probe
  source 1..17: mol_type = other DNA
ccaaacccactccacct

SEQ ID NO: 18156 - DNA, 22 bp, synthetic construct
  misc_feature 1..22: note = Probe
  source 1..22: mol_type = other DNA
ccaaagacaccccccacagttt

SEQ ID NO: 18157 - DNA, 23 bp, synthetic construct
  misc_feature 1..23: note = Probe
  source 1..23: mol_type = other DNA
ccaaagacaccccccacagttta

SEQ ID NO: 18158 - DNA, 29 bp, synthetic construct
  misc_feature 1..29: note = Probe
  source 1..29: mol_type = other DNA
ccaaagacaccccccacagtttatgtagc

SEQ ID NO: 18159 - DNA, 30 bp, synthetic construct
  misc_feature 1..30: note = Probe
  source 1..30: mol_type = other DNA
ccaaagacaccccccacagtttatgtagct

SEQ ID NO: 18160 - DNA, 31 bp, synthetic construct
  misc_feature 1..31: note = Probe
  source 1..31: mol_type = other DNA
ccaaagacaccccccacagtttatgtagctt

SEQ ID NO: 18161 - DNA, 32 bp, synthetic construct
  misc_feature 1..32: note = Probe
  source 1..32: mol_type = other DNA
ccaaagacaccccccacagtttatgtagctta

SEQ ID NO: 18162 - DNA, 33 bp, synthetic construct
  misc_feature 1..33: note = Probe
  source 1..33: mol_type = other DNA
ccaaagacaccccccacagtttatgtagcttac

SEQ ID NO: 18163 - DNA, 34 bp, synthetic construct
  misc_feature 1..34: note = Probe
  source 1..34: mol_type = other DNA
ccaaagacaccccccacagtttatgtagcttacc

SEQ ID NO: 18164 - DNA, 35 bp, synthetic construct
  misc_feature 1..35: note = Probe
  source 1..35: mol_type = other DNA
ccaaagacaccccccacagtttatgtagcttacct

SEQ ID NO: 18165 - DNA, 36 bp, synthetic construct
  misc_feature 1..36: note = Probe
  source 1..36: mol_type = other DNA
ccaaagacaccccccacagtttatgtagcttacctc

SEQ ID NO: 18166 - DNA, 37 bp, synthetic construct
  misc_feature 1..37: note = Probe
  source 1..37: mol_type = other DNA
ccaaagacaccccccacagtttatgtagcttacctcc

SEQ ID NO: 18167 - DNA, 38 bp, synthetic construct
  misc_feature 1..38: note = Probe
  source 1..38: mol_type = other DNA
ccaaagacaccccccacagtttatgtagcttacctcct

SEQ ID NO: 18168 - DNA, 40 bp, synthetic construct; identical to SEQ ID NO: 4484
  misc_feature 1..40: note = Probe
  source 1..40: mol_type = other DNA

SEQ ID NO: 18169 - DNA, 42 bp, synthetic construct
  misc_feature 1..42: note = Probe
  source 1..42: mol_type = other DNA
ccaaagacaccccccacagtttatgtagcttacctcctcaaa

SEQ ID NO: 18170 - DNA, 45 bp, synthetic construct
  misc_feature 1..45: note = Probe
  source 1..45: mol_type = other DNA
ccaaagacaccccccacagtttatgtagcttacctcctcaaagca

SEQ ID NO: 18171 - DNA, 20 bp, synthetic construct
  misc_feature 1..20: note = Probe
  source 1..20: mol_type = other DNA
ccaacacctctttacagtga

SEQ ID NO: 18172 - DNA, 21 bp, synthetic construct
  misc_feature 1..21: note = Probe
  source 1..21: mol_type = other DNA
ccaacacctctttacagtgaa

SEQ ID NO: 18173 - DNA, 22 bp, synthetic construct
  misc_feature 1..22: note = Probe
  source 1..22: mol_type = other DNA
ccaacacctctttacagtgaaa

SEQ ID NO: 18174 - DNA, 23 bp, synthetic construct
  misc_feature 1..23: note = Probe
  source 1..23: mol_type = other DNA
ccaacacctctttacagtgaaat

SEQ ID NO: 18175 - DNA, 25 bp, synthetic construct
  misc_feature 1..25: note = Probe
  source 1..25: mol_type = other DNA
ccaaccttcagctatagggtggaga

SEQ ID NO: 18176 - DNA, 23 bp, synthetic construct
  misc_feature 1..23: note = Probe
  source 1..23: mol_type = other DNA
ccaactaaatactaccgtatggc

SEQ ID NO: 18177 - DNA, 17 bp, synthetic construct
  misc_feature 1..17: note = Probe
  source 1..17: mol_type = other DNA
ccaacttacacttagga

SEQ ID NO: 18178 - DNA, 19 bp, synthetic construct
  misc_feature 1..19: note = Probe
  source 1..19: mol_type = other DNA
ccaacttacacttaggaga

SEQ ID NO: 18179 - DNA, 20 bp, synthetic construct
  misc_feature 1..20: note = Probe
  source 1..20: mol_type = other DNA
ccaacttacacttaggagat

SEQ ID NO: 18180 - DNA, 21 bp, synthetic construct
  misc_feature 1..21: note = Probe
  source 1..21: mol_type = other DNA
ccaacttacacttaggagatt

SEQ ID NO: 18181 - DNA, 23 bp, synthetic construct
  misc_feature 1..23: note = Probe
  source 1..23: mol_type = other DNA
ccaacttacacttaggagatttc

SEQ ID NO: 18182 - DNA, 24 bp, synthetic construct
  misc_feature 1..24: note = Probe
  source 1..24: mol_type = other DNA
ccaacttacacttaggagatttca

SEQ ID NO: 18183 - DNA, 29 bp, synthetic construct
  misc_feature 1..29: note = Probe
  source 1..29: mol_type = other DNA
ccaacttacacttaggagatttcaactta

SEQ ID NO: 18184 - DNA, 44 bp, synthetic construct; identical to SEQ ID NO: 4505
  misc_feature 1..44: note = Probe
  source 1..44: mol_type = other DNA

SEQ ID NO: 18185 - DNA, 46 bp, synthetic construct; identical to SEQ ID NO: 4507
  misc_feature 1..46: note = Probe
  source 1..46: mol_type = other DNA

SEQ ID NO: 18186 - DNA, 49 bp, synthetic construct; identical to SEQ ID NO: 4509
  misc_feature 1..49: note = Probe
  source 1..49: mol_type = other DNA

SEQ ID NO: 18187 - DNA, 50 bp, synthetic construct; identical to SEQ ID NO: 4510
  misc_feature 1..50: note = Probe
  source 1..50: mol_type = other DNA

SEQ ID NO: 18188 - DNA, 19 bp, synthetic construct
  misc_feature 1..19: note = Probe
  source 1..19: mol_type = other DNA
ccaagaacagggtttgtta

SEQ ID NO: 18189 - DNA, 25 bp, synthetic construct
  misc_feature 1..25: note = Probe
  source 1..25: mol_type = other DNA
ccaagagccttcaaagccctcagta

SEQ ID NO: 18190 - DNA, 19 bp, synthetic construct
  misc_feature 1..19: note = Probe
  source 1..19: mol_type = other DNA
ccaagcagttgacccgggt

SEQ ID NO: 18191 - DNA, 20 bp, synthetic construct
  misc_feature 1..20: note = Probe
  source 1..20: mol_type = other DNA
ccaagcagttgacccgggtt

SEQ ID NO: 18192 - DNA, 41 bp, synthetic construct
  misc_feature 1..41: note = Probe
  source 1..41: mol_type = other DNA
ccaagcagttgacccgggttcgattcccggccaacgcaagt

SEQ ID NO: 18193 - DNA, 50 bp, synthetic construct
  misc_feature 1..50: note = Probe
  source 1..50: mol_type = other DNA
ccaagcagttgacccgggttcgattcccggccaacgcaagtcgttttggg

SEQ ID NO: 18194 - DNA, 41 bp, synthetic construct
  misc_feature 1..41: note = Probe
  source 1..41: mol_type = other DNA
ccaagcagttgacccgggttcgattcccggccaacgcagcg

SEQ ID NO: 18195 - DNA, 41 bp, synthetic construct
  misc_feature 1..41: note = Probe
  source 1..41: mol_type = other DNA
ccaagcagttgacccgggttcgattcccggccaacgcagtg

SEQ ID NO: 18196 - DNA, 16 bp, synthetic construct
  misc_feature 1..16: note = Probe
  source 1..16: mol_type = other DNA
ccaaggtcgcgggttc

SEQ ID NO: 18197 - DNA, 26 bp, synthetic construct
  misc_feature 1..26: note = Probe
  source 1..26: mol_type = other DNA
ccaaggtcgcgggttcgatccccgta

SEQ ID NO: 18198 - DNA, 30 bp, synthetic construct
  misc_feature 1..30: note = Probe
  source 1..30: mol_type = other DNA
ccaaggtcgcgggttcgatccccgtacggg

SEQ ID NO: 18199 - DNA, 31 bp, synthetic construct
  misc_feature 1..31: note = Probe
  source 1..31: mol_type = other DNA
ccaaggtcgcgggttcgatccccgtacgggc

SEQ ID NO: 18200 - DNA, 33 bp, synthetic construct
  misc_feature 1..33: note = Probe
  source 1..33: mol_type = other DNA
ccaaggtcgcgggttcgatccccgtacgggcca

SEQ ID NO: 18201 - DNA, 36 bp, synthetic construct; identical to SEQ ID NO: 4515
  misc_feature 1..36: note = Probe
  source 1..36: mol_type = other DNA

SEQ ID NO: 18202 - DNA, 36 bp, synthetic construct; identical to SEQ ID NO: 4516
  misc_feature 1..36: note = Probe
  source 1..36: mol_type = other DNA

SEQ ID NO: 18203 - DNA, 36 bp, synthetic construct
  misc_feature 1..36: note = Probe
  source 1..36: mol_type = other DNA
ccaaggtcgcgggttcgatccccgtacgggccagga

SEQ ID NO: 18204 - DNA, 36 bp, synthetic construct
  misc_feature 1..36: note = Probe
  source 1..36: mol_type = other DNA
ccaaggtcgcgggttcgatccccgtacgggccaggc

SEQ ID NO: 18205 - DNA, 36 bp, synthetic construct
  misc_feature 1..36: note = Probe
  source 1..36: mol_type = other DNA
ccaaggtcgcgggttcgatccccgtactggccacgt

SEQ ID NO: 18206 - DNA, 16 bp, synthetic construct
  misc_feature 1..16: note = Probe
  source 1..16: mol_type = other DNA
ccaatgcacgagtaca

SEQ ID NO: 18207 - DNA, 21 bp, synthetic construct
  misc_feature 1..21: note = Probe
  source 1..21: mol_type = other DNA
ccaatgcacgagtacagtttt

SEQ ID NO: 18208 - DNA, 24 bp, synthetic construct
  misc_feature 1..24: note = Probe
  source 1..24: mol_type = other DNA
ccaatgggggttccccgcgcaggt

SEQ ID NO: 18209 - DNA, 24 bp, synthetic construct
  misc_feature 1..24: note = Probe
  source 1..24: mol_type = other DNA
ccaatggggtctccccgcgcaggt

SEQ ID NO: 18210 - DNA, 24 bp, synthetic construct
  misc_feature 1..24: note = Probe
  source 1..24: mol_type = other DNA
ccaatggggtttccccgcacaggt

SEQ ID NO: 18211 - DNA, 37 bp, synthetic construct; identical to SEQ ID NO: 4519
  misc_feature 1..37: note = Probe
  source 1..37: mol_type = other DNA

SEQ ID NO: 18212 - DNA, 38 bp, synthetic construct; identical to SEQ ID NO: 4520
  misc_feature 1..38: note = Probe
  source 1..38: mol_type = other DNA

SEQ ID NO: 18213 - DNA, 39 bp, synthetic construct; identical to SEQ ID NO: 4521
  misc_feature 1..39: note = Probe
  source 1..39: mol_type = other DNA

SEQ ID NO: 18214 - DNA, 40 bp, synthetic construct; identical to SEQ ID NO: 4522
  misc_feature 1..40: note = Probe
  source 1..40: mol_type = other DNA

SEQ ID NO: 18215 - DNA, 19 bp, synthetic construct
  misc_feature 1..19: note = Probe
  source 1..19: mol_type = other DNA
ccacacccacccaagaaca

SEQ ID NO: 18216 - DNA, 25 bp, synthetic construct
  misc_feature 1..25: note = Probe
  source 1..25: mol_type = other DNA
ccacacccacccaagaacagggttt

SEQ ID NO: 18217 - DNA, 26 bp, synthetic construct
  misc_feature 1..26: note = Probe
  source 1..26: mol_type = other DNA
ccacacccacccaagaacagggtttg

SEQ ID NO: 18218 - DNA, 27 bp, synthetic construct
  misc_feature 1..27: note = Probe
  source 1..27: mol_type = other DNA
ccacacccacccaagaacagggtttgt

SEQ ID NO: 18219 - DNA, 28 bp, synthetic construct
  misc_feature 1..28: note = Probe
  source 1..28: mol_type = other DNA
ccacacccacccaagaacagggtttgtt

SEQ ID NO: 18220 - DNA, 29 bp, synthetic construct
  misc_feature 1..29: note = Probe
  source 1..29: mol_type = other DNA
ccacacccacccaagaacagggtttgtta

SEQ ID NO: 18221 - DNA, 30 bp, synthetic construct
  misc_feature 1..30: note = Probe
  source 1..30: mol_type = other DNA
ccacacccacccaagaacagggtttgttaa

SEQ ID NO: 18222 - DNA, 31 bp, synthetic construct
  misc_feature 1..31: note = Probe
  source 1..31: mol_type = other DNA
ccacacccacccaagaacagggtttgttaag

SEQ ID NO: 18223 - DNA, 25 bp, synthetic construct
  misc_feature 1..25: note = Probe
  source 1..25: mol_type = other DNA
ccacacctcagaaggtctcactttt

SEQ ID NO: 18224 - DNA, 15 bp, synthetic construct
  misc_feature 1..15: note = Probe
  source 1..15: mol_type = other DNA
ccacacctgtgggta

SEQ ID NO: 18225 - DNA, 24 bp, synthetic construct
  misc_feature 1..24: note = Probe
  source 1..24: mol_type = other DNA
ccacagtttatgtagcttacctcc

SEQ ID NO: 18226 - DNA, 26 bp, synthetic construct
  misc_feature 1..26: note = Probe
  source 1..26: mol_type = other DNA
ccacatggtctagcggttaggattcc

SEQ ID NO: 18227 - DNA, 16 bp, synthetic construct
  misc_feature 1..16: note = Probe
  source 1..16: mol_type = other DNA
ccacccaagaacaggg

SEQ ID NO: 18228 - DNA, 20 bp, synthetic construct
  misc_feature 1..20: note = Probe
  source 1..20: mol_type = other DNA
ccacccaagaacagggtttg

SEQ ID NO: 18229 - DNA, 23 bp, synthetic construct
  misc_feature 1..23: note = Probe
  source 1..23: mol_type = other DNA
ccacccaagaacagggtttgtta

SEQ ID NO: 18230 - DNA, 26 bp, synthetic construct
  misc_feature 1..26: note = Probe
  source 1..26: mol_type = other DNA
ccacccagggacgcgtggtgactttt

SEQ ID NO: 18231 - DNA, 34 bp, synthetic construct
  misc_feature 1..34: note = Probe
  source 1..34: mol_type = other DNA
ccaccgctgccacacctcagaaggtctcactttt

SEQ ID NO: 18232 - DNA, 27 bp, synthetic construct
  misc_feature 1..27: note = Probe
  source 1..27: mol_type = other DNA
ccaccgctgccagggttgctgtctttt

SEQ ID NO: 18233 - DNA, 21 bp, synthetic construct
  misc_feature 1..21: note = Probe
  source 1..21: mol_type = other DNA
ccacgcgggaggcccgggttc

SEQ ID NO: 18234 - DNA, 38 bp, synthetic construct
  misc_feature 1..38: note = Probe
  source 1..38: mol_type = other DNA
ccacgcgggaggcccgggttcgattcccggccaatgca

SEQ ID NO: 18235 - DNA, 41 bp, synthetic construct
  misc_feature 1..41: note = Probe
  source 1..41: mol_type = other DNA
ccacgcgggaggcccgggttcgattcccggccaatgcaagt

SEQ ID NO: 18236 - DNA, 41 bp, synthetic construct; identical to SEQ ID NO: 4531
  misc_feature 1..41: note = Probe
  source 1..41: mol_type = other DNA

SEQ ID NO: 18237 - DNA, 41 bp, synthetic construct; identical to SEQ ID NO: 4532
  misc_feature 1..41: note = Probe
  source 1..41: mol_type = other DNA

SEQ ID NO: 18238 - DNA, 41 bp, synthetic construct; identical to SEQ ID NO: 4534
  misc_feature 1..41: note = Probe
  source 1..41: mol_type = other DNA

SEQ ID NO: 18239 - DNA, 22 bp, synthetic construct
  misc_feature 1..22: note = Probe
  source 1..22: mol_type = other DNA
ccacgcgggaggcccgggtttg

SEQ ID NO: 18240 - DNA, 31 bp, synthetic construct; identical to SEQ ID NO: 4536
  misc_feature 1..31: note = Probe
  source 1..31: mol_type = other DNA

SEQ ID NO: 18241 - DNA, 50 bp, synthetic construct
  misc_feature 1..50: note = Probe
  source 1..50: mol_type = other DNA
ccactgtaaagctaacttagcattaaccttttaagttaaagattaagaga

SEQ ID NO: 18242 - DNA, 21 bp, synthetic construct
  misc_feature 1..21: note = Probe
  source 1..21: mol_type = other DNA
ccacttctgacacatactttt

SEQ ID NO: 18243 - DNA, 33 bp, synthetic construct
  misc_feature 1..33: note = Probe
  source 1..33: mol_type = other DNA
ccagactcaaggtaagcaccttgcctgcgggct

SEQ ID NO: 18244 - DNA, 30 bp, synthetic construct
  misc_feature 1..30: note = Probe
  source 1..30: mol_type = other DNA
ccagagtgtagcttaacacaaagcacccaa

SEQ ID NO: 18245 - DNA, 46 bp, synthetic construct; identical to SEQ ID NO: 4548
  misc_feature 1..46: note = Probe
  source 1..46: mol_type = other DNA

SEQ ID NO: 18246 - DNA, 16 bp, synthetic construct
  misc_feature 1..16: note = Probe
  source 1..16: mol_type = other DNA
ccagcgatccgagttc

SEQ ID NO: 18247 - DNA, 33 bp, synthetic construct; identical to SEQ ID NO: 4551
  misc_feature 1..33: note = Probe
  source 1..33: mol_type = other DNA

SEQ ID NO: 18248 - DNA, 34 bp, synthetic construct
  misc_feature 1..34: note = Probe
  source 1..34: mol_type = other DNA
ccagcgatccgagttcaaatctcggtggaacctg

SEQ ID NO: 18249 - DNA, 35 bp, synthetic construct
  misc_feature 1..35: note = Probe
  source 1..35: mol_type = other DNA
ccagcgatccgagttcaaatctcggtggaacctgc

SEQ ID NO: 18250 - DNA, 36 bp, synthetic construct; identical to SEQ ID NO: 4552
  misc_feature 1..36: note = Probe
  source 1..36: mol_type = other DNA

SEQ ID NO: 18251 - DNA, 34 bp, synthetic construct
  misc_feature 1..34: note = Probe
  source 1..34: mol_type = other DNA
ccagcgatccgagttcaaatctcggtggaacctt

SEQ ID NO: 18252 - DNA, 30 bp, synthetic construct
  misc_feature 1..30: note = Probe
  source 1..30: mol_type = other DNA
ccagcgatccgagttcaaatctcggtggga

SEQ ID NO: 18253 - DNA, 31 bp, synthetic construct
  misc_feature 1..31: note = Probe
  source 1..31: mol_type = other DNA
ccagcgatccgagttcaaatctcggtgggac

SEQ ID NO: 18254 - DNA, 33 bp, synthetic construct; identical to SEQ ID NO: 571
  misc_feature 1..33: note = Probe
  source 1..33: mol_type = other DNA

SEQ ID NO: 18255 - DNA, 34 bp, synthetic construct
  misc_feature 1..34: note = Probe
  source 1..34: mol_type = other DNA
ccagcgatccgagttcaaatctcggtgggacctc

SEQ ID NO: 18256 - DNA, 36 bp, synthetic construct; identical to SEQ ID NO: 4554
  misc_feature 1..36: note = Probe
  source 1..36: mol_type = other DNA

SEQ ID NO: 18257 - DNA, 33 bp, synthetic construct; identical to SEQ ID NO: 4555
  misc_feature 1..33: note = Probe
  source 1..33: mol_type = other DNA

SEQ ID NO: 18258 - DNA, 36 bp, synthetic construct
  misc_feature 1..36: note = Probe
  source 1..36: mol_type = other DNA
ccagcgatccgagttcgagtctcggtggaacctttg

SEQ ID NO: 18259 - DNA, 29 bp, synthetic construct
  misc_feature 1..29: note = Probe
  source 1..29: mol_type = other DNA
ccagcggtgcctcaaccgagcgtccaagc

SEQ ID NO: 18260 - DNA, 39 bp, synthetic construct
  misc_feature 1..39: note = Probe
  source 1..39: mol_type = other DNA
ccagcggtgcctcaaccgagcgtccaagctctttccatt

SEQ ID NO: 18261 - DNA, 30 bp, synthetic construct
  misc_feature 1..30: note = Probe
  source 1..30: mol_type = other DNA
ccagctagctcagtcggtagagcatgagac

SEQ ID NO: 18262 - DNA, 31 bp, synthetic construct
  misc_feature 1..31: note = Probe
  source 1..31: mol_type = other DNA
ccagctagctcagtcggtagagcatgagact

SEQ ID NO: 18263 - DNA, 17 bp, synthetic construct
  misc_feature 1..17: note = Probe
  source 1..17: mol_type = other DNA
ccagctttggggggttc

SEQ ID NO: 18264 - DNA, 18 bp, synthetic construct
  misc_feature 1..18: note = Probe
  source 1..18: mol_type = other DNA
ccagctttggggggttcg

SEQ ID NO: 18265 - DNA, 33 bp, synthetic construct
  misc_feature 1..33: note = Probe
  source 1..33: mol_type = other DNA
ccagctttggggggttcgattccttcctttttt

SEQ ID NO: 18266 - DNA, 34 bp, synthetic construct
  misc_feature 1..34: note = Probe
  source 1..34: mol_type = other DNA
ccagctttggggggttcgattccttccttttttg

SEQ ID NO: 18267 - DNA, 35 bp, synthetic construct; identical to SEQ ID NO: 4558
  misc_feature 1..35: note = Probe
  source 1..35: mol_type = other DNA

SEQ ID NO: 18268 - DNA, 36 bp, synthetic construct; identical to SEQ ID NO: 4559
  misc_feature 1..36: note = Probe
  source 1..36: mol_type = other DNA

SEQ ID NO: 18269 - DNA, 37 bp, synthetic construct; identical to SEQ ID NO: 4560
  misc_feature 1..37: note = Probe
  source 1..37: mol_type = other DNA

SEQ ID NO: 18270 - DNA, 38 bp, synthetic construct
  misc_feature 1..38: note = Probe
  source 1..38: mol_type = other DNA
ccagctttggggggttcgattccttccttttttgtcta

SEQ ID NO: 18271 - DNA, 30 bp, synthetic construct; identical to SEQ ID NO: 9659
  misc_feature 1..30: note = Probe
  source 1..30: mol_type = other DNA

SEQ ID NO: 18272 - DNA, 33 bp, synthetic construct
  misc_feature 1..33: note = Probe
  source 1..33: mol_type = other DNA
ccaggcggcccgggttcgactcccggtgtggga

SEQ ID NO: 18273 - DNA, 36 bp, synthetic construct
  misc_feature 1..36: note = Probe
  source 1..36: mol_type = other DNA
ccaggcggcccgggttcgactcccggtgtgggaacg

SEQ ID NO: 18274 - DNA, 37 bp, synthetic construct; identical to SEQ ID NO: 4563
  misc_feature 1..37: note = Probe
  source 1..37: mol_type = other DNA

SEQ ID NO: 18275 - DNA, 34 bp, synthetic construct
  misc_feature 1..34: note = Probe
  source 1..34: mol_type = other DNA
ccagggattgtgggttcgagtcccatctggggtg

SEQ ID NO: 18276 - DNA, 32 bp, synthetic construct
  misc_feature 1..32: note = Probe
  source 1..32: mol_type = other DNA
ccaggggtcgcgagttcaattctcgctggggc

SEQ ID NO: 18277 - DNA, 31 bp, synthetic construct
  misc_feature 1..31: note = Probe
  source 1..31: mol_type = other DNA
ccaggggtcgcgagttcgatcctcgctgggg

SEQ ID NO: 18278 - DNA, 37 bp, synthetic construct
  misc_feature 1..37: note = Probe
  source 1..37: mol_type = other DNA
ccaggggtcgcgagttcgatcctcgctggggcctcct

SEQ ID NO: 18279 - DNA, 16 bp, synthetic construct
  misc_feature 1..16: note = Probe
  source 1..16: mol_type = other DNA
ccagggtcgtgggttc

SEQ ID NO: 18280 - DNA, 17 bp, synthetic construct
  misc_feature 1..17: note = Probe
  source 1..17: mol_type = other DNA
ccagggtcgtgggttcg

SEQ ID NO: 18281 - DNA, 33 bp, synthetic construct; identical to SEQ ID NO: 4570
  misc_feature 1..33: note = Probe
  source 1..33: mol_type = other DNA

SEQ ID NO: 18282 - DNA, 34 bp, synthetic construct
  misc_feature 1..34: note = Probe
  source 1..34: mol_type = other DNA
ccagggtcgtgggttcgagccccacgttgggcgc

SEQ ID NO: 18283 - DNA, 30 bp, synthetic construct
  misc_feature 1..30: note = Probe
  source 1..30: mol_type = other DNA
ccaggtggcccgggttcgactcccggtatg

SEQ ID NO: 18284 - DNA, 31 bp, synthetic construct
  misc_feature 1..31: note = Probe
  source 1..31: mol_type = other DNA
ccaggtggcccgggttcgactcccggtatgg

SEQ ID NO: 18285 - DNA, 34 bp, synthetic construct
  misc_feature 1..34: note = Probe
  source 1..34: mol_type = other DNA
ccaggtggcccgggttcgactcccggtatgggaa

SEQ ID NO: 18286 - DNA, 37 bp, synthetic construct; identical to SEQ ID NO: 4571
  misc_feature 1..37: note = Probe
  source 1..37: mol_type = other DNA

SEQ ID NO: 18287 - DNA, 36 bp, synthetic construct
  misc_feature 1..36: note = Probe
  source 1..36: mol_type = other DNA
ccaggtggcccgggttcgactcccggtatgggaacg

SEQ ID NO: 18288 - DNA, 45 bp, synthetic construct; identical to SEQ ID NO: 4572
  misc_feature 1..45: note = Probe
  source 1..45: mol_type = other DNA

SEQ ID NO: 18289 - DNA, 39 bp, synthetic construct
  misc_feature 1..39: note = Probe
  source 1..39: mol_type = other DNA
ccagtctcttcgggggcgtgggttcgaatcccaccgctg

SEQ ID NO: 18290 - DNA, 40 bp, synthetic construct
  misc_feature 1..40: note = Probe
  source 1..40: mol_type = other DNA
ccagtctcttcgggggcgtgggttcgaatcccaccgctgc

SEQ ID NO: 18291 - DNA, 45 bp, synthetic construct
  misc_feature 1..45: note = Probe
  source 1..45: mol_type = other DNA
ccagtctcttcgggggcgtgggttcgaatcccaccgctgccaggt

SEQ ID NO: 18292 - DNA, 50 bp, synthetic construct
  misc_feature 1..50: note = Probe
  source 1..50: mol_type = other DNA
ccagtctcttcgggggcgtgggttcgaatcccaccgctgccaggtgcttc

SEQ ID NO: 18293 - DNA, 45 bp, synthetic construct; identical to SEQ ID NO: 4573
  misc_feature 1..45: note = Probe
  source 1..45: mol_type = other DNA

SEQ ID NO: 18294 - DNA, 31 bp, synthetic construct
  misc_feature 1..31: note = Probe
  source 1..31: mol_type = other DNA
ccagtggcctaatggataaggcatcagcctc

SEQ ID NO: 18295 - DNA, 33 bp, synthetic construct
  misc_feature 1..33: note = Probe
  source 1..33: mol_type = other DNA
ccagtggcctaatggataaggcatcagcctccg

SEQ ID NO: 18296 - DNA, 44 bp, synthetic construct; identical to SEQ ID NO: 4575
  misc_feature 1..44: note = Probe
  source 1..44: mol_type = other DNA

SEQ ID NO: 18297 - DNA, 36 bp, synthetic construct
  misc_feature 1..36: note = Probe
  source 1..36: mol_type = other DNA
ccataccccgaaaatgttggttatacccttcccgta

SEQ ID NO: 18298 - DNA, 38 bp, synthetic construct
  misc_feature 1..38: note = Probe
  source 1..38: mol_type = other DNA
ccataccccgaaaatgttggttatacccttcccgtact

SEQ ID NO: 18299 - DNA, 39 bp, synthetic construct
  misc_feature 1..39: note = Probe
  source 1..39: mol_type = other DNA
ccataccccgaaaatgttggttatacccttcccgtacta

SEQ ID NO: 18300 - DNA, 41 bp, synthetic construct; identical to SEQ ID NO: 4577
  misc_feature 1..41: note = Probe
  source 1..41: mol_type = other DNA

SEQ ID NO: 18301 - DNA, 42 bp, synthetic construct; identical to SEQ ID NO: 4578
  misc_feature 1..42: note = Probe
  source 1..42: mol_type = other DNA

SEQ ID NO: 18302 - DNA, 24 bp, synthetic construct
  misc_feature 1..24: note = Probe
  source 1..24: mol_type = other DNA
ccatagtgtagtggttatcacgtc

SEQ ID NO: 18303 - DNA, 28 bp, synthetic construct
  misc_feature 1..28: note = Probe
  source 1..28: mol_type = other DNA
ccatatggtctagcggttaggattcctg

SEQ ID NO: 18304 - DNA, 29 bp, synthetic construct
  misc_feature 1..29: note = Probe
  source 1..29: mol_type = other DNA
ccatatggtctagcggttaggattcctgg

SEQ ID NO: 18305 - DNA, 31 bp, synthetic construct; identical to SEQ ID NO: 4582
  misc_feature 1..31: note = Probe
  source 1..31: mol_type = other DNA

SEQ ID NO: 18306 - DNA, 34 bp, synthetic construct; identical to SEQ ID NO: 577
  misc_feature 1..34: note = Probe
  source 1..34: mol_type = other DNA

SEQ ID NO: 18307 - DNA, 23 bp, synthetic construct
  misc_feature 1..23: note = Probe
  source 1..23: mol_type = other DNA
ccatcctctgctatcggagtttt

SEQ ID NO: 18308 - DNA, 25 bp, synthetic construct
  misc_feature 1..25: note = Probe
  source 1..25: mol_type = other DNA
ccatcctctgctatcggagtttttt

SEQ ID NO: 18309 - DNA, 22 bp, synthetic construct
  misc_feature 1..22: note = Probe
  source 1..22: mol_type = other DNA
ccatctattgatgagggtctta

SEQ ID NO: 18310 - DNA, 26 bp, synthetic construct
  misc_feature 1..26: note = Probe
  source 1..26: mol_type = other DNA
ccatgcacactactataaccacccta

SEQ ID NO: 18311 - DNA, 27 bp, synthetic construct
  misc_feature 1..27: note = Probe
  source 1..27: mol_type = other DNA
ccatgttaacgttttcttccagctcca

SEQ ID NO: 18312 - DNA, 41 bp, synthetic construct; identical to SEQ ID NO: 4587
  misc_feature 1..41: note = Probe
  source 1..41: mol_type = other DNA

SEQ ID NO: 18313 - DNA, 24 bp, synthetic construct
  misc_feature 1..24: note = Probe
  source 1..24: mol_type = other DNA
ccattggggtctccccgcgcaggt

SEQ ID NO: 18314 - DNA, 21 bp, synthetic construct
  misc_feature 1..21: note = Probe
  source 1..21: mol_type = other DNA
ccattggggtttccccgcgca

SEQ ID NO: 18315 - DNA, 23 bp, synthetic construct
  misc_feature 1..23: note = Probe
  source 1..23: mol_type = other DNA
ccattggggtttccccgcgcagg

SEQ ID NO: 18316 - DNA, 25 bp, synthetic construct
  misc_feature 1..25: note = Probe
  source 1..25: mol_type = other DNA
ccattggggtttccccgcgcaggtt

SEQ ID NO: 18317 - DNA, 26 bp, synthetic construct
  misc_feature 1..26: note = Probe
  source 1..26: mol_type = other DNA
ccattggggtttccccgcgcaggttc

SEQ ID NO: 18318 - DNA, 24 bp, synthetic construct
  misc_feature 1..24: note = Probe
  source 1..24: mol_type = other DNA
ccattgtgctttgcacgcgtgggt

SEQ ID NO: 18319 - DNA, 41 bp, synthetic construct
  misc_feature 1..41: note = Probe
  source 1..41: mol_type = other DNA
ccattgtgctttgcacgcgtgggttcgaatcccatcctcgt

SEQ ID NO: 18320 - DNA, 28 bp, synthetic construct
  misc_feature 1..28: note = Probe
  source 1..28: mol_type = other DNA
cccaaaaattttggtgcaactccaaata

SEQ ID NO: 18321 - DNA, 37 bp, synthetic construct; identical to SEQ ID NO: 4594
  misc_feature 1..37: note = Probe
  source 1..37: mol_type = other DNA

SEQ ID NO: 18322 - DNA, 18 bp, synthetic construct
  misc_feature 1..18: note = Probe
  source 1..18: mol_type = other DNA
cccaaacccactccacct

SEQ ID NO: 18323 - DNA, 24 bp, synthetic construct
  misc_feature 1..24: note = Probe
  source 1..24: mol_type = other DNA
cccaaagacaccccccacagttta

SEQ ID NO: 18324 - DNA, 30 bp, synthetic construct
  misc_feature 1..30: note = Probe
  source 1..30: mol_type = other DNA
cccaaagacaccccccacagtttatgtagc

SEQ ID NO: 18325 - DNA, 31 bp, synthetic construct; identical to SEQ ID NO: 4596
  misc_feature 1..31: note = Probe
  source 1..31: mol_type = other DNA

SEQ ID NO: 18326 - DNA, 32 bp, synthetic construct
  misc_feature 1..32: note = Probe
  source 1..32: mol_type = other DNA
cccaaagacaccccccacagtttatgtagctt

SEQ ID NO: 18327 - DNA, 33 bp, synthetic construct
  misc_feature 1..33: note = Probe
  source 1..33: mol_type = other DNA
cccaaagacaccccccacagtttatgtagctta

SEQ ID NO: 18328 - DNA, 35 bp, synthetic construct
  misc_feature 1..35: note = Probe
  source 1..35: mol_type = other DNA
cccaaagacaccccccacagtttatgtagcttacc

SEQ ID NO: 18329 - DNA, 36 bp, synthetic construct
  misc_feature 1..36: note = Probe
  source 1..36: mol_type = other DNA
cccaaagacaccccccacagtttatgtagcttacct

SEQ ID NO: 18330 - DNA, 37 bp, synthetic construct
  misc_feature 1..37: note = Probe
  source 1..37: mol_type = other DNA
cccaaagacaccccccacagtttatgtagcttacctc

SEQ ID NO: 18331 - DNA, 38 bp, synthetic construct
  misc_feature 1..38: note = Probe
  source 1..38: mol_type = other DNA
cccaaagacaccccccacagtttatgtagcttacctcc

SEQ ID NO: 18332 - DNA, 39 bp, synthetic construct
  misc_feature 1..39: note = Probe
  source 1..39: mol_type = other DNA
cccaaagacaccccccacagtttatgtagcttacctcct

SEQ ID NO: 18333 - DNA, 41 bp, synthetic construct
  misc_feature 1..41: note = Probe
  source 1..41: mol_type = other DNA
cccaaagacaccccccacagtttatgtagcttacctcctca

SEQ ID NO: 18334 - DNA, 24 bp, synthetic construct
  misc_feature 1..24: note = Probe
  source 1..24: mol_type = other DNA
cccaactaaatactaccgtatggc

SEQ ID NO: 18335 - DNA, 16 bp, synthetic construct
  misc_feature 1..16: note = Probe
  source 1..16: mol_type = other DNA
cccaacttacacttag

SEQ ID NO: 18336 - DNA, 17 bp, synthetic construct
  misc_feature 1..17: note = Probe
  source 1..17: mol_type = other DNA
cccaacttacacttagg

SEQ ID NO: 18337 - DNA, 18 bp, synthetic construct
  misc_feature 1..18: note = Probe
  source 1..18: mol_type = other DNA
cccaacttacacttagga

SEQ ID NO: 18338 - DNA, 19 bp, synthetic construct
  misc_feature 1..19: note = Probe
  source 1..19: mol_type = other DNA
cccaacttacacttaggag

SEQ ID NO: 18339 - DNA, 20 bp, synthetic construct
  misc_feature 1..20: note = Probe
  source 1..20: mol_type = other DNA
cccaacttacacttaggaga

SEQ ID NO: 18340 - DNA, 21 bp, synthetic construct
  misc_feature 1..21: note = Probe
  source 1..21: mol_type = other DNA
cccaacttacacttaggagat

SEQ ID NO: 18341 - DNA, 22 bp, synthetic construct
  misc_feature 1..22: note = Probe
  source 1..22: mol_type = other DNA
cccaacttacacttaggagatt

SEQ ID NO: 18342 - DNA, 23 bp, synthetic construct
  misc_feature 1..23: note = Probe
  source 1..23: mol_type = other DNA
cccaacttacacttaggagattt

SEQ ID NO: 18343 - DNA, 24 bp, synthetic construct
  misc_feature 1..24: note = Probe
  source 1..24: mol_type = other DNA
cccaacttacacttaggagatttc

SEQ ID NO: 18344 - DNA, 25 bp, synthetic construct
  misc_feature 1..25: note = Probe
  source 1..25: mol_type = other DNA
cccaacttacacttaggagatttca

SEQ ID NO: 18345 - DNA, 30 bp, synthetic construct
  misc_feature 1..30: note = Probe
  source 1..30: mol_type = other DNA
cccaacttacacttaggagatttcaactta

SEQ ID NO: 18346 - DNA, 46 bp, synthetic construct; identical to SEQ ID NO: 4610
  misc_feature 1..46: note = Probe
  source 1..46: mol_type = other DNA

SEQ ID NO: 18347 - DNA, 49 bp, synthetic construct; identical to SEQ ID NO: 4612
  misc_feature 1..49: note = Probe
  source 1..49: mol_type = other DNA

SEQ ID NO: 18348 - DNA, 50 bp, synthetic construct; identical to SEQ ID NO: 4613
  misc_feature 1..50: note = Probe
  source 1..50: mol_type = other DNA

SEQ ID NO: 18349 - DNA, 17 bp, synthetic construct
  misc_feature 1..17: note = Probe
  source 1..17: mol_type = other DNA
cccaagaacagggtttg

SEQ ID NO: 18350 - DNA, 20 bp, synthetic construct
  misc_feature 1..20: note = Probe
  source 1..20: mol_type = other DNA
cccaagaacagggtttgtta

SEQ ID NO: 18351 - DNA, 20 bp, synthetic construct
  misc_feature 1..20: note = Probe
  source 1..20: mol_type = other DNA
cccacacccacccaagaaca

SEQ ID NO: 18352 - DNA, 26 bp, synthetic construct
  misc_feature 1..26: note = Probe
  source 1..26: mol_type = other DNA
cccacacccacccaagaacagggttt

SEQ ID NO: 18353 - DNA, 27 bp, synthetic construct
  misc_feature 1..27: note = Probe
  source 1..27: mol_type = other DNA
cccacacccacccaagaacagggtttg

SEQ ID NO: 18354 - DNA, 28 bp, synthetic construct
  misc_feature 1..28: note = Probe
  source 1..28: mol_type = other DNA
cccacacccacccaagaacagggtttgt

SEQ ID NO: 18355 - DNA, 29 bp, synthetic construct
  misc_feature 1..29: note = Probe
  source 1..29: mol_type = other DNA
cccacacccacccaagaacagggtttgtt

SEQ ID NO: 18356 - DNA, 30 bp, synthetic construct; identical to SEQ ID NO: 4619
  misc_feature 1..30: note = Probe
  source 1..30: mol_type = other DNA

SEQ ID NO: 18357 - DNA, 31 bp, synthetic construct; identical to SEQ ID NO: 4620
  misc_feature 1..31: note = Probe
  source 1..31: mol_type = other DNA

SEQ ID NO: 18358 - DNA, 32 bp, synthetic construct
  misc_feature 1..32: note = Probe
  source 1..32: mol_type = other DNA
cccacacccacccaagaacagggtttgttaag

SEQ ID NO: 18359 - DNA, 33 bp, synthetic construct
  misc_feature 1..33: note = Probe
  source 1..33: mol_type = other DNA
cccacacccacccaagaacagggtttgttaaga

SEQ ID NO: 18360 - DNA, 22 bp, synthetic construct
  misc_feature 1..22: note = Probe
  source 1..22: mol_type = other DNA
cccacagtttatgtagcttacc

SEQ ID NO: 18361 - DNA, 24 bp, synthetic construct
  misc_feature 1..24: note = Probe
  source 1..24: mol_type = other DNA
cccacagtttatgtagcttacctc

SEQ ID NO: 18362 - DNA, 25 bp, synthetic construct
  misc_feature 1..25: note = Probe
  source 1..25: mol_type = other DNA
cccacagtttatgtagcttacctcc

SEQ ID NO: 18363 - DNA, 26 bp, synthetic construct
  misc_feature 1..26: note = Probe
  source 1..26: mol_type = other DNA
cccacagtttatgtagcttacctcct

SEQ ID NO: 18364 - DNA, 27 bp, synthetic construct
  misc_feature 1..27: note = Probe
  source 1..27: mol_type = other DNA
cccacatggtctagcggttaggattcc

SEQ ID NO: 18365 - DNA, 29 bp, synthetic construct
  misc_feature 1..29: note = Probe
  source 1..29: mol_type = other DNA
cccacatggtctagcggttaggattcctg

SEQ ID NO: 18366 - DNA, 30 bp, synthetic construct; identical to SEQ ID NO: 9679
  misc_feature 1..30: note = Probe
  source 1..30: mol_type = other DNA

SEQ ID NO: 18367 - DNA, 31 bp, synthetic construct
  misc_feature 1..31: note = Probe
  source 1..31: mol_type = other DNA
cccacatggtctagcggttaggattcctggt

SEQ ID NO: 18368 - DNA, 38 bp, synthetic construct
  misc_feature 1..38: note = Probe
  source 1..38: mol_type = other DNA
cccacatggtctagcggttaggattcctggttttcacc

SEQ ID NO: 18369 - DNA, 20 bp, synthetic construct
  misc_feature 1..20: note = Probe
  source 1..20: mol_type = other DNA
cccacccaagaacagggttt

SEQ ID NO: 18370 - DNA, 21 bp, synthetic construct
  misc_feature 1..21: note = Probe
  source 1..21: mol_type = other DNA
cccacccaagaacagggtttg

SEQ ID NO: 18371 - DNA, 22 bp, synthetic construct
  misc_feature 1..22: note = Probe
  source 1..22: mol_type = other DNA
cccacccaagaacagggtttgt

SEQ ID NO: 18372 - DNA, 23 bp, synthetic construct
  misc_feature 1..23: note = Probe
  source 1..23: mol_type = other DNA
cccacccaagaacagggtttgtt

SEQ ID NO: 18373 - DNA, 24 bp, synthetic construct
  misc_feature 1..24: note = Probe
  source 1..24: mol_type = other DNA
cccacccaagaacagggtttgtta

SEQ ID NO: 18374 - DNA, 26 bp, synthetic construct
  misc_feature 1..26: note = Probe
  source 1..26: mol_type = other DNA
cccacccaagaacagggtttgttaag

SEQ ID NO: 18375 - DNA, 27 bp, synthetic construct
  misc_feature 1..27: note = Probe
  source 1..27: mol_type = other DNA
cccacccaagaacagggtttgttaaga

SEQ ID NO: 18376 - DNA, 16 bp, synthetic construct
  misc_feature 1..16: note = Probe
  source 1..16: mol_type = other DNA
cccacccagggacgcc

SEQ ID NO: 18377 - DNA, 17 bp, synthetic construct
  misc_feature 1..17: note = Probe
  source 1..17: mol_type = other DNA
cccacccagggacgcct

SEQ ID NO: 18378 - DNA, 25 bp, synthetic construct
  misc_feature 1..25: note = Probe
  source 1..25: mol_type = other DNA
cccacccagggacgcgctctccttt

SEQ ID NO: 18379 - DNA, 26 bp, synthetic construct
  misc_feature 1..26: note = Probe
  source 1..26: mol_type = other DNA
cccacccagggacgcgtggtgacttt

SEQ ID NO: 18380 - DNA, 27 bp, synthetic construct
  misc_feature 1..27: note = Probe
  source 1..27: mol_type = other DNA
cccacccagggacgcgtggtgactttt

SEQ ID NO: 18381 - DNA, 29 bp, synthetic construct
  misc_feature 1..29: note = Probe
  source 1..29: mol_type = other DNA
cccacccagggacggtcagtgcttctttt

SEQ ID NO: 18382 - DNA, 35 bp, synthetic construct
  misc_feature 1..35: note = Probe
  source 1..35: mol_type = other DNA
cccaccgctgccacacctcagaaggtctcactttt

SEQ ID NO: 18383 - DNA, 27 bp, synthetic construct
  misc_feature 1..27: note = Probe
  source 1..27: mol_type = other DNA
cccaccgctgccagggttgctgtcttt

SEQ ID NO: 18384 - DNA, 28 bp, synthetic construct
  misc_feature 1..28: note = Probe
  source 1..28: mol_type = other DNA
cccaccgctgccagggttgctgtctttt

SEQ ID NO: 18385 - DNA, 30 bp, synthetic construct
  misc_feature 1..30: note = Probe
  source 1..30: mol_type = other DNA
cccactcctggtagctttaggtttttctct

SEQ ID NO: 18386 - DNA, 21 bp, synthetic construct
  misc_feature 1..21: note = Probe
  source 1..21: mol_type = other DNA
cccacttctgacacatacttt

SEQ ID NO: 18387 - DNA, 22 bp, synthetic construct
  misc_feature 1..22: note = Probe
  source 1..22: mol_type = other DNA
cccacttctgacacatactttt

SEQ ID NO: 18388 - DNA, 23 bp, synthetic construct
  misc_feature 1..23: note = Probe
  source 1..23: mol_type = other DNA
cccacttctgacacattcgtttt

SEQ ID NO: 18389 - DNA, 16 bp, synthetic construct
  misc_feature 1..16: note = Probe
  source 1..16: mol_type = other DNA
cccagaggtcgatgga

SEQ ID NO: 18390 - DNA, 19 bp, synthetic construct
  misc_feature 1..19: note = Probe
  source 1..19: mol_type = other DNA
cccagaggtcgatggatcg

SEQ ID NO: 18391 - DNA, 25 bp, synthetic construct
  misc_feature 1..25: note = Probe
  source 1..25: mol_type = other DNA
cccagaggtcgatggatcgaaacca

SEQ ID NO: 18392 - DNA, 38 bp, synthetic construct
  misc_feature 1..38: note = Probe
  source 1..38: mol_type = other DNA
cccagaggtcgatggatcgaaaccatcctctgctaggt

SEQ ID NO: 18393 - DNA, 37 bp, synthetic construct; identical to SEQ ID NO: 4630
  misc_feature 1..37: note = Probe
  source 1..37: mol_type = other DNA

SEQ ID NO: 18394 - DNA, 30 bp, synthetic construct
  misc_feature 1..30: note = Probe
  source 1..30: mol_type = other DNA
cccagcggtgcctcaaccgagcgtccaagc

SEQ ID NO: 18395 - DNA, 16 bp, synthetic construct
  misc_feature 1..16: note = Probe
  source 1..16: mol_type = other DNA
cccagcggtgcctccg

SEQ ID NO: 18396 - DNA, 31 bp, synthetic construct
  misc_feature 1..31: note = Probe
  source 1..31: mol_type = other DNA
cccagcggtgcctccgtgtttcccccacgct

SEQ ID NO: 18397 - DNA, 34 bp, synthetic construct
  misc_feature 1..34: note = Probe
  source 1..34: mol_type = other DNA
cccaggcggcccgggttcgactcccggtgtggga

SEQ ID NO: 18398 - DNA, 35 bp, synthetic construct
  misc_feature 1..35: note = Probe
  source 1..35: mol_type = other DNA
cccaggcggcccgggttcgactcccggtgtgggaa

SEQ ID NO: 18399 - DNA, 36 bp, synthetic construct; identical to SEQ ID NO: 586
  misc_feature 1..36: note = Probe
  source 1..36: mol_type = other DNA

SEQ ID NO: 18400 - DNA, 37 bp, synthetic construct; identical to SEQ ID NO: 4631
  misc_feature 1..37: note = Probe
  source 1..37: mol_type = other DNA

SEQ ID NO: 18401 - DNA, 38 bp, synthetic construct; identical to SEQ ID NO: 4632
  misc_feature 1..38: note = Probe
  source 1..38: mol_type = other DNA

SEQ ID NO: 18402 - DNA, 31 bp, synthetic construct
  misc_feature 1..31: note = Probe
  source 1..31: mol_type = other DNA
cccagggtcgtgggttcgagccccacgttgg

SEQ ID NO: 18403 - DNA, 32 bp, synthetic construct
  misc_feature 1..32: note = Probe
  source 1..32: mol_type = other DNA
cccagggtcgtgggttcgagccccacgttggg

SEQ ID NO: 18404 - DNA, 34 bp, synthetic construct
  misc_feature 1..34: note = Probe
  source 1..34: mol_type = other DNA
cccagggtcgtgggttcgagccccacgttgggcg

SEQ ID NO: 18405 - DNA, 33 bp, synthetic construct
  misc_feature 1..33: note = Probe
  source 1..33: mol_type = other DNA
cccaggtggcccgggttcgactcccggtatggg

SEQ ID NO: 18406 - DNA, 36 bp, synthetic construct
  misc_feature 1..36: note = Probe
  source 1..36: mol_type = other DNA
cccaggtggcccgggttcgactcccggtatgggaac

SEQ ID NO: 18407 - DNA, 38 bp, synthetic construct
  misc_feature 1..38: note = Probe
  source 1..38: mol_type = other DNA
cccaggtggcccgggttcgactcccggtatgggaacaa

SEQ ID NO: 18408 - DNA, 33 bp, synthetic construct; identical to SEQ ID NO: 587
  misc_feature 1..33: note = Probe
  source 1..33: mol_type = other DNA

SEQ ID NO: 18409 - DNA, 45 bp, synthetic construct
  misc_feature 1..45: note = Probe
  source 1..45: mol_type = other DNA
cccataacccagaggtcgatggatcgaaaccatcctctgctaggt

SEQ ID NO: 18410 - DNA, 33 bp, synthetic construct; identical to SEQ ID NO: 4641
  misc_feature 1..33: note = Probe
  source 1..33: mol_type = other DNA

SEQ ID NO: 18411 - DNA, 36 bp, synthetic construct
  misc_feature 1..36: note = Probe
  source 1..36: mol_type = other DNA
cccataccccgaaaatgttggttatacccttcccgt

SEQ ID NO: 18412 - DNA, 41 bp, synthetic construct; identical to SEQ ID NO: 4642
  misc_feature 1..41: note = Probe
  source 1..41: mol_type = other DNA

SEQ ID NO: 18413 - DNA, 42 bp, synthetic construct; identical to SEQ ID NO: 4643
  misc_feature 1..42: note = Probe
  source 1..42: mol_type = other DNA

SEQ ID NO: 18414 - DNA, 43 bp, synthetic construct; identical to SEQ ID NO: 4644
  misc_feature 1..43: note = Probe
  source 1..43: mol_type = other DNA

SEQ ID NO: 18415 - DNA, 28 bp, synthetic construct
  misc_feature 1..28: note = Probe
  source 1..28: mol_type = other DNA
cccatatggtctagcggttaggattcct

SEQ ID NO: 18416 - DNA, 30 bp, synthetic construct; identical to SEQ ID NO: 9682
  misc_feature 1..30: note = Probe
  source 1..30: mol_type = other DNA

SEQ ID NO: 18417 - DNA, 35 bp, synthetic construct; identical to SEQ ID NO: 592
  misc_feature 1..35: note = Probe
  source 1..35: mol_type = other DNA

SEQ ID NO: 18418 - DNA, 38 bp, synthetic construct
  misc_feature 1..38: note = Probe
  source 1..38: mol_type = other DNA
cccatatggtctagcggttaggattcctggttttcacc

SEQ ID NO: 18419 - DNA, 41 bp, synthetic construct
  misc_feature 1..41: note = Probe
  source 1..41: mol_type = other DNA
cccatcctaaagtaaggtcagctaaataagctatcgggccc

SEQ ID NO: 18420 - DNA, 42 bp, synthetic construct
  misc_feature 1..42: note = Probe
  source 1..42: mol_type = other DNA
cccatcctaaagtaaggtcagctaaataagctatcgggccca

SEQ ID NO: 18421 - DNA, 22 bp, synthetic construct
  misc_feature 1..22: note = Probe
  source 1..22: mol_type = other DNA
cccatcctcgtcggccctgttt

SEQ ID NO: 18422 - DNA, 26 bp, synthetic construct
  misc_feature 1..26: note = Probe
  source 1..26: mol_type = other DNA
cccatctggggtggcctgtgactttt

SEQ ID NO: 18423 - DNA, 33 bp, synthetic construct; identical to SEQ ID NO: 4647
  misc_feature 1..33: note = Probe
  source 1..33: mol_type = other DNA

SEQ ID NO: 18424 - DNA, 16 bp, synthetic construct
  misc_feature 1..16: note = Probe
  source 1..16: mol_type = other DNA
cccatgtctaacaaca

SEQ ID NO: 18425 - DNA, 27 bp, synthetic construct
  misc_feature 1..27: note = Probe
  source 1..27: mol_type = other DNA
cccatgtctaacaacatggctttctca

SEQ ID NO: 18426 - DNA, 29 bp, synthetic construct
  misc_feature 1..29: note = Probe
  source 1..29: mol_type = other DNA
cccatgtctaacaacatggctttctcaac

SEQ ID NO: 18427 - DNA, 30 bp, synthetic construct; identical to SEQ ID NO: 4650
  misc_feature 1..30: note = Probe
  source 1..30: mol_type = other DNA

SEQ ID NO: 18428 - DNA, 16 bp, synthetic construct
  misc_feature 1..16: note = Probe
  source 1..16: mol_type = other DNA
cccattcttgcgaccc

SEQ ID NO: 18429 - DNA, 39 bp, synthetic construct; identical to SEQ ID NO: 600
  misc_feature 1..39: note = Probe
  source 1..39: mol_type = other DNA

SEQ ID NO: 18430 - DNA, 42 bp, synthetic construct; identical to SEQ ID NO: 4656
  misc_feature 1..42: note = Probe
  source 1..42: mol_type = other DNA

SEQ ID NO: 18431 - DNA, 22 bp, synthetic construct
  misc_feature 1..22: note = Probe
  source 1..22: mol_type = other DNA
ccccaaaaattttggtgcaact

SEQ ID NO: 18432 - DNA, 24 bp, synthetic construct
  misc_feature 1..24: note = Probe
  source 1..24: mol_type = other DNA
ccccaaaaattttggtgcaactcc

SEQ ID NO: 18433 - DNA, 25 bp, synthetic construct
  misc_feature 1..25: note = Probe
  source 1..25: mol_type = other DNA
ccccaaaaattttggtgcaactcca

SEQ ID NO: 18434 - DNA, 26 bp, synthetic construct
  misc_feature 1..26: note = Probe
  source 1..26: mol_type = other DNA
ccccaaaaattttggtgcaactccaa

SEQ ID NO: 18435 - DNA, 27 bp, synthetic construct
  misc_feature 1..27: note = Probe
  source 1..27: mol_type = other DNA
ccccaaaaattttggtgcaactccaaa

SEQ ID NO: 18436 - DNA, 28 bp, synthetic construct
  misc_feature 1..28: note = Probe
  source 1..28: mol_type = other DNA
ccccaaaaattttggtgcaactccaaat

SEQ ID NO: 18437 - DNA, 29 bp, synthetic construct
  misc_feature 1..29: note = Probe
  source 1..29: mol_type = other DNA
ccccaaaaattttggtgcaactccaaata

SEQ ID NO: 18438 - DNA, 31 bp, synthetic construct
  misc_feature 1..31: note = Probe
  source 1..31: mol_type = other DNA
ccccaaaaattttggtgcaactccaaataaa

SEQ ID NO: 18439 - DNA, 33 bp, synthetic construct
  misc_feature 1..33: note = Probe
  source 1..33: mol_type = other DNA
ccccaaaaattttggtgcaactccaaataaaag

SEQ ID NO: 18440 - DNA, 34 bp, synthetic construct
  misc_feature 1..34: note = Probe
  source 1..34: mol_type = other DNA
ccccaaaaattttggtgcaactccaaataaaagt

SEQ ID NO: 18441 - DNA, 35 bp, synthetic construct
  misc_feature 1..35: note = Probe
  source 1..35: mol_type = other DNA
ccccaaaaattttggtgcaactccaaataaaagta

SEQ ID NO: 18442 - DNA, 36 bp, synthetic construct
  misc_feature 1..36: note = Probe
  source 1..36: mol_type = other DNA
ccccaaaaattttggtgcaactccaaataaaagtaa

SEQ ID NO: 18443 - DNA, 37 bp, synthetic construct; identical to SEQ ID NO: 4672
  misc_feature 1..37: note = Probe
  source 1..37: mol_type = other DNA

SEQ ID NO: 18444 - DNA, 38 bp, synthetic construct; identical to SEQ ID NO: 4673
  misc_feature 1..38: note = Probe
  source 1..38: mol_type = other DNA

SEQ ID NO: 18445 - DNA, 40 bp, synthetic construct
  misc_feature 1..40: note = Probe
  source 1..40: mol_type = other DNA
ccccaaaaattttggtgcaactccaaataaaagtaataac

SEQ ID NO: 18446 - DNA, 19 bp, synthetic construct
  misc_feature 1..19: note = Probe
  source 1..19: mol_type = other DNA
ccccaaacccactccacct

SEQ ID NO: 18447 - DNA, 25 bp, synthetic construct
  misc_feature 1..25: note = Probe
  source 1..25: mol_type = other DNA
ccccaactaaatactaccgtatggc

SEQ ID NO: 18448 - DNA, 23 bp, synthetic construct
  misc_feature 1..23: note = Probe
  source 1..23: mol_type = other DNA
ccccacagtttatgtagcttacc

SEQ ID NO: 18449 - DNA, 28 bp, synthetic construct
  misc_feature 1..28: note = Probe
  source 1..28: mol_type = other DNA
ccccacgttgggcgcgggttgtaacttt

SEQ ID NO: 18450 - DNA, 29 bp, synthetic construct
  misc_feature 1..29: note = Probe
  source 1..29: mol_type = other DNA
ccccacgttgggcgcgggttgtaactttt

SEQ ID NO: 18451 - DNA, 33 bp, synthetic construct
  misc_feature 1..33: note = Probe
  source 1..33: mol_type = other DNA
ccccagtggaaccacggcgtgattcataccttt

SEQ ID NO: 18452 - DNA, 17 bp, synthetic construct
  misc_feature 1..17: note = Probe
  source 1..17: mol_type = other DNA
ccccatgtctaacaaca

SEQ ID NO: 18453 - DNA, 22 bp, synthetic construct
  misc_feature 1..22: note = Probe
  source 1..22: mol_type = other DNA
ccccatgtctaacaacatggct

SEQ ID NO: 18454 - DNA, 23 bp, synthetic construct
  misc_feature 1..23: note = Probe
  source 1..23: mol_type = other DNA
ccccatgtctaacaacatggctt

SEQ ID NO: 18455 - DNA, 24 bp, synthetic construct
  misc_feature 1..24: note = Probe
  source 1..24: mol_type = other DNA
ccccatgtctaacaacatggcttt

SEQ ID NO: 18456 - DNA, 25 bp, synthetic construct
  misc_feature 1..25: note = Probe
  source 1..25: mol_type = other DNA
ccccatgtctaacaacatggctttc

SEQ ID NO: 18457 - DNA, 28 bp, synthetic construct
  misc_feature 1..28: note = Probe
  source 1..28: mol_type = other DNA
ccccatgtctaacaacatggctttctca

SEQ ID NO: 18458 - DNA, 30 bp, synthetic construct; identical to SEQ ID NO: 4683
  misc_feature 1..30: note = Probe
  source 1..30: mol_type = other DNA

SEQ ID NO: 18459 - DNA, 31 bp, synthetic construct; identical to SEQ ID NO: 4684
  misc_feature 1..31: note = Probe
  source 1..31: mol_type = other DNA

SEQ ID NO: 18460 - DNA, 24 bp, synthetic construct
  misc_feature 1..24: note = Probe
  source 1..24: mol_type = other DNA
cccccacagtttatgtagcttacc

SEQ ID NO: 18461 - DNA, 25 bp, synthetic construct
  misc_feature 1..25: note = Probe
  source 1..25: mol_type = other DNA
cccccacagtttatgtagcttacct

SEQ ID NO: 18462 - DNA, 22 bp, synthetic construct
  misc_feature 1..22: note = Probe
  source 1..22: mol_type = other DNA
cccccatgtctaacaacatggc

SEQ ID NO: 18463 - DNA, 23 bp, synthetic construct
  misc_feature 1..23: note = Probe
  source 1..23: mol_type = other DNA
cccccatgtctaacaacatggct

SEQ ID NO: 18464 - DNA, 24 bp, synthetic construct
  misc_feature 1..24: note = Probe
  source 1..24: mol_type = other DNA
cccccatgtctaacaacatggctt

SEQ ID NO: 18465 - DNA, 25 bp, synthetic construct
  misc_feature 1..25: note = Probe
  source 1..25: mol_type = other DNA
cccccatgtctaacaacatggcttt

SEQ ID NO: 18466 - DNA, 26 bp, synthetic construct
  misc_feature 1..26: note = Probe
  source 1..26: mol_type = other DNA
cccccatgtctaacaacatggctttc

SEQ ID NO: 18467 - DNA, 27 bp, synthetic construct
  misc_feature 1..27: note = Probe
  source 1..27: mol_type = other DNA
cccccatgtctaacaacatggctttct

SEQ ID NO: 18468 - DNA, 28 bp, synthetic construct
  misc_feature 1..28: note = Probe
  source 1..28: mol_type = other DNA
cccccatgtctaacaacatggctttctc

SEQ ID NO: 18469 - DNA, 29 bp, synthetic construct
  misc_feature 1..29: note = Probe
  source 1..29: mol_type = other DNA
cccccatgtctaacaacatggctttctca

SEQ ID NO: 18470 - DNA, 30 bp, synthetic construct; identical to SEQ ID NO: 4694
  misc_feature 1..30: note = Probe
  source 1..30: mol_type = other DNA

SEQ ID NO: 18471 - DNA, 31 bp, synthetic construct; identical to SEQ ID NO: 4695
  misc_feature 1..31: note = Probe
  source 1..31: mol_type = other DNA

SEQ ID NO: 18472 - DNA, 32 bp, synthetic construct; identical to SEQ ID NO: 4696
  misc_feature 1..32: note = Probe
  source 1..32: mol_type = other DNA

SEQ ID NO: 18473 - DNA, 21 bp, synthetic construct
  misc_feature 1..21: note = Probe
  source 1..21: mol_type = other DNA
ccccccacagtttatgtagct

SEQ ID NO: 18474 - DNA, 25 bp, synthetic construct
  misc_feature 1..25: note = Probe
  source 1..25: mol_type = other DNA
ccccccacagtttatgtagcttacc

SEQ ID NO: 18475 - DNA, 26 bp, synthetic construct
  misc_feature 1..26: note = Probe
  source 1..26: mol_type = other DNA
ccccccacagtttatgtagcttacct

SEQ ID NO: 18476 - DNA, 27 bp, synthetic construct
  misc_feature 1..27: note = Probe
  source 1..27: mol_type = other DNA
ccccccacagtttatgtagcttacctc

SEQ ID NO: 18477 - DNA, 28 bp, synthetic construct
  misc_feature 1..28: note = Probe
  source 1..28: mol_type = other DNA
ccccccacagtttatgtagcttacctcc

SEQ ID NO: 18478 - DNA, 29 bp, synthetic construct
  misc_feature 1..29: note = Probe
  source 1..29: mol_type = other DNA
ccccccacagtttatgtagcttacctcct

SEQ ID NO: 18479 - DNA, 31 bp, synthetic construct
  misc_feature 1..31: note = Probe
  source 1..31: mol_type = other DNA
ccccccacagtttatgtagcttacctcctca

SEQ ID NO: 18480 - DNA, 36 bp, synthetic construct
  misc_feature 1..36: note = Probe
  source 1..36: mol_type = other DNA
ccccccacagtttatgtagcttacctcctcaaagca

SEQ ID NO: 18481 - DNA, 39 bp, synthetic construct
  misc_feature 1..39: note = Probe
  source 1..39: mol_type = other DNA
ccccccacagtttatgtagcttacctcctcaaagcaata

SEQ ID NO: 18482 - DNA, 41 bp, synthetic construct
  misc_feature 1..41: note = Probe
  source 1..41: mol_type = other DNA
ccccccacagtttatgtagcttacctcctcaaagcaataca

SEQ ID NO: 18483 - DNA, 28 bp, synthetic construct
  misc_feature 1..28: note = Probe
  source 1..28: mol_type = other DNA
ccccctctgtgctccggagttacctcgt

SEQ ID NO: 18484 - DNA, 30 bp, synthetic construct
  misc_feature 1..30: note = Probe
  source 1..30: mol_type = other DNA
ccccctctgtgctccggagttacctcgttt

SEQ ID NO: 18485 - DNA, 23 bp, synthetic construct
  misc_feature 1..23: note = Probe
  source 1..23: mol_type = other DNA
ccccgaaaatgttggttataccc

SEQ ID NO: 18486 - DNA, 27 bp, synthetic construct
  misc_feature 1..27: note = Probe
  source 1..27: mol_type = other DNA
ccccgaaaatgttggttatacccttcc

SEQ ID NO: 18487 - DNA, 28 bp, synthetic construct
  misc_feature 1..28: note = Probe
  source 1..28: mol_type = other DNA
ccccgaaaatgttggttatacccttccc

SEQ ID NO: 18488 - DNA, 29 bp, synthetic construct
  misc_feature 1..29: note = Probe
  source 1..29: mol_type = other DNA
ccccgaaaatgttggttatacccttcccg

SEQ ID NO: 18489 - DNA, 30 bp, synthetic construct; identical to SEQ ID NO: 4700
  misc_feature 1..30: note = Probe
  source 1..30: mol_type = other DNA

SEQ ID NO: 18490 - DNA, 35 bp, synthetic construct; identical to SEQ ID NO: 4702
  misc_feature 1..35: note = Probe
  source 1..35: mol_type = other DNA

SEQ ID NO: 18491 - DNA, 36 bp, synthetic construct
  misc_feature 1..36: note = Probe
  source 1..36: mol_type = other DNA
ccccgaaaatgttggttatacccttcccgtactaat

SEQ ID NO: 18492 - DNA, 37 bp, synthetic construct; identical to SEQ ID NO: 4703
  misc_feature 1..37: note = Probe
  source 1..37: mol_type = other DNA

SEQ ID NO: 18493 - DNA, 30 bp, synthetic construct
  misc_feature 1..30: note = Probe
  source 1..30: mol_type = other DNA
ccccgcctgtcacgcgggagaccggggttc

SEQ ID NO: 18494 - DNA, 34 bp, synthetic construct
  misc_feature 1..34: note = Probe
  source 1..34: mol_type = other DNA
ccccgcctgtcacgcgggagaccggggttcgatt

SEQ ID NO: 18495 - DNA, 29 bp, synthetic construct
  misc_feature 1..29: note = Probe
  source 1..29: mol_type = other DNA
ccccgcgcaggttcgaatcctgccgacta

SEQ ID NO: 18496 - DNA, 29 bp, synthetic construct
  misc_feature 1..29: note = Probe
  source 1..29: mol_type = other DNA
ccccgcgcaggttcgaatcctgctcacag

SEQ ID NO: 18497 - DNA, 16 bp, synthetic construct
  misc_feature 1..16: note = Probe
  source 1..16: mol_type = other DNA
ccccggcacctccaaa

SEQ ID NO: 18498 - DNA, 16 bp, synthetic construct
  misc_feature 1..16: note = Probe
  source 1..16: mol_type = other DNA
ccccggcacctccacc

SEQ ID NO: 18499 - DNA, 18 bp, synthetic construct
  misc_feature 1..18: note = Probe
  source 1..18: mol_type = other DNA
ccccggcacctccaccag

SEQ ID NO: 18500 - DNA, 16 bp, synthetic construct
  misc_feature 1..16: note = Probe
  source 1..16: mol_type = other DNA
ccccggcatctccaaa

SEQ ID NO: 18501 - DNA, 17 bp, synthetic construct
  misc_feature 1..17: note = Probe
  source 1..17: mol_type = other DNA
ccccggcatctccaaat

SEQ ID NO: 18502 - DNA, 17 bp, synthetic construct
  misc_feature 1..17: note = Probe
  source 1..17: mol_type = other DNA
ccccggcatctccagtg

SEQ ID NO: 18503 - DNA, 16 bp, synthetic construct
  misc_feature 1..16: note = Probe
  source 1..16: mol_type = other DNA
ccccggcatctccatt

SEQ ID NO: 18504 - DNA, 17 bp, synthetic construct
  misc_feature 1..17: note = Probe
  source 1..17: mol_type = other DNA
ccccggcatctccattg

SEQ ID NO: 18505 - DNA, 21 bp, synthetic construct
  misc_feature 1..21: note = Probe
  source 1..21: mol_type = other DNA
ccccgggttcaatccccggca

SEQ ID NO: 18506 - DNA, 24 bp, synthetic construct
  misc_feature 1..24: note = Probe
  source 1..24: mol_type = other DNA
ccccgggttcaatccccggcacct

SEQ ID NO: 18507 - DNA, 24 bp, synthetic construct
  misc_feature 1..24: note = Probe
  source 1..24: mol_type = other DNA
ccccgggttcgatccccggcatct

SEQ ID NO: 18508 - DNA, 30 bp, synthetic construct; identical to SEQ ID NO: 4721
  misc_feature 1..30: note = Probe
  source 1..30: mol_type = other DNA

SEQ ID NO: 18509 - DNA, 26 bp, synthetic construct
  misc_feature 1..26: note = Probe
  source 1..26: mol_type = other DNA
cccctggcggtctagtggttaggatt

SEQ ID NO: 18510 - DNA, 28 bp, synthetic construct
  misc_feature 1..28: note = Probe
  source 1..28: mol_type = other DNA
cccctggcggtctagtggttaggattcg

SEQ ID NO: 18511 - DNA, 29 bp, synthetic construct
  misc_feature 1..29: note = Probe
  source 1..29: mol_type = other DNA
cccctggcggtctagtggttaggattcgg

SEQ ID NO: 18512 - DNA, 31 bp, synthetic construct
  misc_feature 1..31: note = Probe
  source 1..31: mol_type = other DNA
cccctggcggtctagtggttaggattcggcg

SEQ ID NO: 18513 - DNA, 32 bp, synthetic construct; identical to SEQ ID NO: 4722
  misc_feature 1..32: note = Probe
  source 1..32: mol_type = other DNA

SEQ ID NO: 18514 - DNA, 33 bp, synthetic construct; identical to SEQ ID NO: 4723
  misc_feature 1..33: note = Probe
  source 1..33: mol_type = other DNA

SEQ ID NO: 18515 - DNA, 34 bp, synthetic construct; identical to SEQ ID NO: 4724
  misc_feature 1..34: note = Probe
  source 1..34: mol_type = other DNA

SEQ ID NO: 18516 - DNA, 35 bp, synthetic construct; identical to SEQ ID NO: 4725
  misc_feature 1..35: note = Probe
  source 1..35: mol_type = other DNA

SEQ ID NO: 18517 - DNA, 36 bp, synthetic construct; identical to SEQ ID NO: 4726
  misc_feature 1..36: note = Probe
  source 1..36: mol_type = other DNA

SEQ ID NO: 18518 - DNA, 37 bp, synthetic construct; identical to SEQ ID NO: 4727
  misc_feature 1..37: note = Probe
  source 1..37: mol_type = other DNA

SEQ ID NO: 18519 - DNA, 21 bp, synthetic construct
  misc_feature 1..21: note = Probe
  source 1..21: mol_type = other DNA
cccgaaaatgttggttatacc

SEQ ID NO: 18520 - DNA, 22 bp, synthetic construct
  misc_feature 1..22: note = Probe
  source 1..22: mol_type = other DNA
cccgaaaatgttggttataccc

SEQ ID NO: 18521 - DNA, 25 bp, synthetic construct
  misc_feature 1..25: note = Probe
  source 1..25: mol_type = other DNA
cccgaaaatgttggttatacccttc

SEQ ID NO: 18522 - DNA, 26 bp, synthetic construct
  misc_feature 1..26: note = Probe
  source 1..26: mol_type = other DNA
cccgaaaatgttggttatacccttcc

SEQ ID NO: 18523 - DNA, 27 bp, synthetic construct
  misc_feature 1..27: note = Probe
  source 1..27: mol_type = other DNA
cccgaaaatgttggttatacccttccc

SEQ ID NO: 18524 - DNA, 28 bp, synthetic construct
  misc_feature 1..28: note = Probe
  source 1..28: mol_type = other DNA
cccgaaaatgttggttatacccttcccg

SEQ ID NO: 18525 - DNA, 29 bp, synthetic construct
  misc_feature 1..29: note = Probe
  source 1..29: mol_type = other DNA
cccgaaaatgttggttatacccttcccgt

SEQ ID NO: 18526 - DNA, 34 bp, synthetic construct; identical to SEQ ID NO: 4734
  misc_feature 1..34: note = Probe
  source 1..34: mol_type = other DNA

SEQ ID NO: 18527 - DNA, 35 bp, synthetic construct; identical to SEQ ID NO: 4735
  misc_feature 1..35: note = Probe
  source 1..35: mol_type = other DNA

SEQ ID NO: 18528 - DNA, 36 bp, synthetic construct
  misc_feature 1..36: note = Probe
  source 1..36: mol_type = other DNA
cccgaaaatgttggttatacccttcccgtactaatt

SEQ ID NO: 18529 - DNA, 15 bp, synthetic construct
  misc_feature 1..15: note = Probe
  source 1..15: mol_type = other DNA
cccgagacaacattt

SEQ ID NO: 18530 - DNA, 22 bp, synthetic construct
  misc_feature 1..22: note = Probe
  source 1..22: mol_type = other DNA
cccgcatcctccactcagcttt

SEQ ID NO: 18531 - DNA, 31 bp, synthetic construct
  misc_feature 1..31: note = Probe
  source 1..31: mol_type = other DNA
cccgcctgtcacgcgggagaccggggttcga

SEQ ID NO: 18532 - DNA, 33 bp, synthetic construct
  misc_feature 1..33: note = Probe
  source 1..33: mol_type = other DNA
cccgcctgtcacgcgggagaccggggttcgatt

SEQ ID NO: 18533 - DNA, 28 bp, synthetic construct
  misc_feature 1..28: note = Probe
  source 1..28: mol_type = other DNA
cccgccttttttcccggcggcgggagaa

SEQ ID NO: 18534 - DNA, 30 bp, synthetic construct; identical to SEQ ID NO: 4742
  misc_feature 1..30: note = Probe
  source 1..30: mol_type = other DNA

SEQ ID NO: 18535 - DNA, 28 bp, synthetic construct
  misc_feature 1..28: note = Probe
  source 1..28: mol_type = other DNA
cccgcgcaggttcgaatcctgccgacta

SEQ ID NO: 18536 - DNA, 25 bp, synthetic construct
  misc_feature 1..25: note = Probe
  source 1..25: mol_type = other DNA
cccggatagctcagtcggtagagca

SEQ ID NO: 18537 - DNA, 28 bp, synthetic construct
  misc_feature 1..28: note = Probe
  source 1..28: mol_type = other DNA
cccggatagctcagtcggtagagcatca

SEQ ID NO: 18538 - DNA, 29 bp, synthetic construct
  misc_feature 1..29: note = Probe
  source 1..29: mol_type = other DNA
cccggatagctcagtcggtagagcatcag

SEQ ID NO: 18539 - DNA, 16 bp, synthetic construct
  misc_feature 1..16: note = Probe
  source 1..16: mol_type = other DNA
cccggcacctccaaac

SEQ ID NO: 18540 - DNA, 16 bp, synthetic construct
  misc_feature 1..16: note = Probe
  source 1..16: mol_type = other DNA
cccggcacctccacca

SEQ ID NO: 18541 - DNA, 17 bp, synthetic construct
  misc_feature 1..17: note = Probe
  source 1..17: mol_type = other DNA
cccggcacctccaccag

SEQ ID NO: 18542 - DNA, 16 bp, synthetic construct
  misc_feature 1..16: note = Probe
  source 1..16: mol_type = other DNA
cccggcatctccattg

SEQ ID NO: 18543 - DNA, 24 bp, synthetic construct
  misc_feature 1..24: note = Probe
  source 1..24: mol_type = other DNA
cccggccaacgcagtgtcagtttt

SEQ ID NO: 18544 - DNA, 26 bp, synthetic construct
  misc_feature 1..26: note = Probe
  source 1..26: mol_type = other DNA
cccggccaacgcagtgtcagtttttc

SEQ ID NO: 18545 - DNA, 29 bp, synthetic construct
  misc_feature 1..29: note = Probe
  source 1..29: mol_type = other DNA
cccggccaacgcagtgtcagtttttctct

SEQ ID NO: 18546 - DNA, 23 bp, synthetic construct
  misc_feature 1..23: note = Probe
  source 1..23: mol_type = other DNA
cccggccaacgcatgcggtacca

SEQ ID NO: 18547 - DNA, 25 bp, synthetic construct
  misc_feature 1..25: note = Probe
  source 1..25: mol_type = other DNA
cccggccaacgcatgcggtaccact

SEQ ID NO: 18548 - DNA, 26 bp, synthetic construct
  misc_feature 1..26: note = Probe
  source 1..26: mol_type = other DNA
cccggccaacgcatgcggtaccactt

SEQ ID NO: 18549 - DNA, 27 bp, synthetic construct
  misc_feature 1..27: note = Probe
  source 1..27: mol_type = other DNA
cccggccaacgcatgcggtaccacttt

SEQ ID NO: 18550 - DNA, 28 bp, synthetic construct
  misc_feature 1..28: note = Probe
  source 1..28: mol_type = other DNA
cccggccaacgcatgcggtaccactttt

SEQ ID NO: 18551 - DNA, 23 bp, synthetic construct
  misc_feature 1..23: note = Probe
  source 1..23: mol_type = other DNA
cccggccaatgcacgagtacagt

SEQ ID NO: 18552 - DNA, 24 bp, synthetic construct
  misc_feature 1..24: note = Probe
  source 1..24: mol_type = other DNA
cccggccaatgcacgagtacagtt

SEQ ID NO: 18553 - DNA, 25 bp, synthetic construct
  misc_feature 1..25: note = Probe
  source 1..25: mol_type = other DNA
cccggccaatgcacgagtacagttt

SEQ ID NO: 18554 - DNA, 26 bp, synthetic construct
  misc_feature 1..26: note = Probe
  source 1..26: mol_type = other DNA
cccggccaatgcacgagtacagtttt

SEQ ID NO: 18555 - DNA, 16 bp, synthetic construct
  misc_feature 1..16: note = Probe
  source 1..16: mol_type = other DNA
cccggcggcgggagaa

SEQ ID NO: 18556 - DNA, 34 bp, synthetic construct; identical to SEQ ID NO: 624
  misc_feature 1..34: note = Probe
  source 1..34: mol_type = other DNA

SEQ ID NO: 18557 - DNA, 36 bp, synthetic construct
  misc_feature 1..36: note = Probe
  source 1..36: mol_type = other DNA
cccggctagctcagtcggtagagcatgagactctta

SEQ ID NO: 18558 - DNA, 39 bp, synthetic construct
  misc_feature 1..39: note = Probe
  source 1..39: mol_type = other DNA
cccggctagctcagtcggtagagcatgagactcttaatc

SEQ ID NO: 18559 - DNA, 50 bp, synthetic construct
  misc_feature 1..50: note = Probe
  source 1..50: mol_type = other DNA
cccggctagctcagtcggtagagcatgagactcttaatctcagggtcgtg

SEQ ID NO: 18560 - DNA, 36 bp, synthetic construct
  misc_feature 1..36: note = Probe
  source 1..36: mol_type = other DNA
cccggctagctcagtcggtagagcatgggactctta

SEQ ID NO: 18561 - DNA, 17 bp, synthetic construct
  misc_feature 1..17: note = Probe
  source 1..17: mol_type = other DNA
cccgggcggaaacaggt

SEQ ID NO: 18562 - DNA, 29 bp, synthetic construct
  misc_feature 1..29: note = Probe
  source 1..29: mol_type = other DNA
cccgggttcaatccccggcacctccacca

SEQ ID NO: 18563 - DNA, 29 bp, synthetic construct
  misc_feature 1..29: note = Probe
  source 1..29: mol_type = other DNA
cccgggttcaattcccggtcagggaacca

SEQ ID NO: 18564 - DNA, 26 bp, synthetic construct
  misc_feature 1..26: note = Probe
  source 1..26: mol_type = other DNA
cccgggttcgatccccagcatctcca

SEQ ID NO: 18565 - DNA, 29 bp, synthetic construct
  misc_feature 1..29: note = Probe
  source 1..29: mol_type = other DNA
cccgggttcgatccccagcatctccagtg

SEQ ID NO: 18566 - DNA, 29 bp, synthetic construct
  misc_feature 1..29: note = Probe
  source 1..29: mol_type = other DNA
cccgggttcgatccccggcatctccattg

SEQ ID NO: 18567 - DNA, 29 bp, synthetic construct
  misc_feature 1..29: note = Probe
  source 1..29: mol_type = other DNA
cccgggttcgattcccggtcagggaattg

SEQ ID NO: 18568 - DNA, 29 bp, synthetic construct
  misc_feature 1..29: note = Probe
  source 1..29: mol_type = other DNA
cccgggttcgattcccggtcatggaacca

SEQ ID NO: 18569 - DNA, 16 bp, synthetic construct
  misc_feature 1..16: note = Probe
  source 1..16: mol_type = other DNA
cccgggtttcggcact

SEQ ID NO: 18570 - DNA, 17 bp, synthetic construct
  misc_feature 1..17: note = Probe
  source 1..17: mol_type = other DNA
cccgggtttcggcaggg

SEQ ID NO: 18571 - DNA, 27 bp, synthetic construct
  misc_feature 1..27: note = Probe
  source 1..27: mol_type = other DNA
cccggtaatcgcataaaacttaaaact

SEQ ID NO: 18572 - DNA, 32 bp, synthetic construct
  misc_feature 1..32: note = Probe
  source 1..32: mol_type = other DNA
cccggtaatcgcataaaacttaaaactttaca

SEQ ID NO: 18573 - DNA, 36 bp, synthetic construct; identical to SEQ ID NO: 4758
  misc_feature 1..36: note = Probe
  source 1..36: mol_type = other DNA

SEQ ID NO: 18574 - DNA, 16 bp, synthetic construct
  misc_feature 1..16: note = Probe
  source 1..16: mol_type = other DNA
cccggtcagggaacca

SEQ ID NO: 18575 - DNA, 33 bp, synthetic construct; identical to SEQ ID NO: 4763
  misc_feature 1..33: note = Probe
  source 1..33: mol_type = other DNA

SEQ ID NO: 18576 - DNA, 21 bp, synthetic construct
  misc_feature 1..21: note = Probe
  source 1..21: mol_type = other DNA
ccctgctaactgggctttttt

SEQ ID NO: 18577 - DNA, 32 bp, synthetic construct
  misc_feature 1..32: note = Probe
  source 1..32: mol_type = other DNA
ccctggcggtctagtggttaggattcggcgct

SEQ ID NO: 18578 - DNA, 16 bp, synthetic construct
  misc_feature 1..16: note = Probe
  source 1..16: mol_type = other DNA
ccctggtggtctagtg

SEQ ID NO: 18579 - DNA, 17 bp, synthetic construct
  misc_feature 1..17: note = Probe
  source 1..17: mol_type = other DNA
ccctggtggtctagtgg

SEQ ID NO: 18580 - DNA, 25 bp, synthetic construct
  misc_feature 1..25: note = Probe
  source 1..25: mol_type = other DNA
ccctggtggtctagtggctaggatt

SEQ ID NO: 18581 - DNA, 27 bp, synthetic construct
  misc_feature 1..27: note = Probe
  source 1..27: mol_type = other DNA
ccctggtggtctagtggctaggattcg

SEQ ID NO: 18582 - DNA, 28 bp, synthetic construct
  misc_feature 1..28: note = Probe
  source 1..28: mol_type = other DNA
ccctggtggtctagtggctaggattcgg

SEQ ID NO: 18583 - DNA, 31 bp, synthetic construct; identical to SEQ ID NO: 633
  misc_feature 1..31: note = Probe
  source 1..31: mol_type = other DNA

SEQ ID NO: 18584 - DNA, 18 bp, synthetic construct
  misc_feature 1..18: note = Probe
  source 1..18: mol_type = other DNA
ccctggtggtctagtggt

SEQ ID NO: 18585 - DNA, 24 bp, synthetic construct
  misc_feature 1..24: note = Probe
  source 1..24: mol_type = other DNA
ccctggtggtctagtggttaggat

SEQ ID NO: 18586 - DNA, 25 bp, synthetic construct
  misc_feature 1..25: note = Probe
  source 1..25: mol_type = other DNA
ccctggtggtctagtggttaggatt

SEQ ID NO: 18587 - DNA, 26 bp, synthetic construct
  misc_feature 1..26: note = Probe
  source 1..26: mol_type = other DNA
ccctggtggtctagtggttaggattc

SEQ ID NO: 18588 - DNA, 27 bp, synthetic construct
  misc_feature 1..27: note = Probe
  source 1..27: mol_type = other DNA
ccctggtggtctagtggttaggattcg

SEQ ID NO: 18589 - DNA, 28 bp, synthetic construct
  misc_feature 1..28: note = Probe
  source 1..28: mol_type = other DNA
ccctggtggtctagtggttaggattcgg

SEQ ID NO: 18590 - DNA, 29 bp, synthetic construct
  misc_feature 1..29: note = Probe
  source 1..29: mol_type = other DNA
ccctggtggtctagtggttaggattcggc

SEQ ID NO: 18591 - DNA, 39 bp, synthetic construct
  misc_feature 1..39: note = Probe
  source 1..39: mol_type = other DNA
ccctggtggtctagtggttaggattcggcgctctcaccg

SEQ ID NO: 18592 - DNA, 49 bp, synthetic construct
  misc_feature 1..49: note = Probe
  source 1..49: mol_type = other DNA
ccctggtggtctagtggttaggattcggcgctctcaccgccgcggcccg

SEQ ID NO: 18593 - DNA, 50 bp, synthetic construct; identical to SEQ ID NO: 4772
  misc_feature 1..50: note = Probe
  source 1..50: mol_type = other DNA

SEQ ID NO: 18594 - DNA, 30 bp, synthetic construct
  misc_feature 1..30: note = Probe
  source 1..30: mol_type = other DNA
cccttcgtggtcgttgccatgttaacgttt

SEQ ID NO: 18595 - DNA, 20 bp, synthetic construct
  misc_feature 1..20: note = Probe
  source 1..20: mol_type = other DNA
ccgaaaatgttggttatacc

SEQ ID NO: 18596 - DNA, 21 bp, synthetic construct
  misc_feature 1..21: note = Probe
  source 1..21: mol_type = other DNA
ccgaaaatgttggttataccc

SEQ ID NO: 18597 - DNA, 25 bp, synthetic construct
  misc_feature 1..25: note = Probe
  source 1..25: mol_type = other DNA
ccgaaaatgttggttatacccttcc

SEQ ID NO: 18598 - DNA, 26 bp, synthetic construct
  misc_feature 1..26: note = Probe
  source 1..26: mol_type = other DNA
ccgaaaatgttggttatacccttccc

SEQ ID NO: 18599 - DNA, 27 bp, synthetic construct
  misc_feature 1..27: note = Probe
  source 1..27: mol_type = other DNA
ccgaaaatgttggttatacccttcccg

SEQ ID NO: 18600 - DNA, 28 bp, synthetic construct
  misc_feature 1..28: note = Probe
  source 1..28: mol_type = other DNA
ccgaaaatgttggttatacccttcccgt

SEQ ID NO: 18601 - DNA, 33 bp, synthetic construct; identical to SEQ ID NO: 4783
  misc_feature 1..33: note = Probe
  source 1..33: mol_type = other DNA

SEQ ID NO: 18602 - DNA, 34 bp, synthetic construct
  misc_feature 1..34: note = Probe
  source 1..34: mol_type = other DNA
ccgaaaatgttggttatacccttcccgtactaat

SEQ ID NO: 18603 - DNA, 35 bp, synthetic construct
  misc_feature 1..35: note = Probe
  source 1..35: mol_type = other DNA
ccgaaaatgttggttatacccttcccgtactaatt

SEQ ID NO: 18604 - DNA, 32 bp, synthetic construct
  misc_feature 1..32: note = Probe
  source 1..32: mol_type = other DNA
ccgaaaggttggtggttcgagcccacccaggg

SEQ ID NO: 18605 - DNA, 35 bp, synthetic construct; identical to SEQ ID NO: 646
  misc_feature 1..35: note = Probe
  source 1..35: mol_type = other DNA

SEQ ID NO: 18606 - DNA, 36 bp, synthetic construct
  misc_feature 1..36: note = Probe
  source 1..36: mol_type = other DNA
ccgaaaggttggtggttcgagcccacccagggacgc

SEQ ID NO: 18607 - DNA, 38 bp, synthetic construct
  misc_feature 1..38: note = Probe
  source 1..38: mol_type = other DNA
ccgaaaggttggtggttcgagcccacccagggacgcct

SEQ ID NO: 18608 - DNA, 33 bp, synthetic construct
  misc_feature 1..33: note = Probe
  source 1..33: mol_type = other DNA
ccgaaaggttggtggttcgatcccacccaggga

SEQ ID NO: 18609 - DNA, 36 bp, synthetic construct
  misc_feature 1..36: note = Probe
  source 1..36: mol_type = other DNA
ccgagaggtcccgggttcaaatcccggacgagcccc

SEQ ID NO: 18610 - DNA, 38 bp, synthetic construct
  misc_feature 1..38: note = Probe
  source 1..38: mol_type = other DNA
ccgagaggtcccgggttcaaatcccggacgagcccctc

SEQ ID NO: 18611 - DNA, 25 bp, synthetic construct
  misc_feature 1..25: note = Probe
  source 1..25: mol_type = other DNA
ccgagcgtccaagctctttccattt

SEQ ID NO: 18612 - DNA, 26 bp, synthetic construct
  misc_feature 1..26: note = Probe
  source 1..26: mol_type = other DNA
ccgagcgtccaagctctttccatttt

SEQ ID NO: 18613 - DNA, 36 bp, synthetic construct; identical to SEQ ID NO: 4787
  misc_feature 1..36: note = Probe
  source 1..36: mol_type = other DNA

SEQ ID NO: 18614 - DNA, 36 bp, synthetic construct
  misc_feature 1..36: note = Probe
  source 1..36: mol_type = other DNA
ccgaggttgtgagttcgatcctcacctggagcactt

SEQ ID NO: 18615 - DNA, 16 bp, synthetic construct
  misc_feature 1..16: note = Probe
  source 1..16: mol_type = other DNA
ccgcagcaacctcggt

SEQ ID NO: 18616 - DNA, 17 bp, synthetic construct
  misc_feature 1..17: note = Probe
  source 1..17: mol_type = other DNA
ccgcagcaacctcggtt

SEQ ID NO: 18617 - DNA, 32 bp, synthetic construct; identical to SEQ ID NO: 4790
  misc_feature 1..32: note = Probe
  source 1..32: mol_type = other DNA

SEQ ID NO: 18618 - DNA, 33 bp, synthetic construct; identical to SEQ ID NO: 4791
  misc_feature 1..33: note = Probe
  source 1..33: mol_type = other DNA

SEQ ID NO: 18619 - DNA, 35 bp, synthetic construct
  misc_feature 1..35: note = Probe
  source 1..35: mol_type = other DNA
ccgcagcaacctcggttcgaatccgagtcacggca

SEQ ID NO: 18620 - DNA, 36 bp, synthetic construct
  misc_feature 1..36: note = Probe
  source 1..36: mol_type = other DNA
ccgcagcaacctcggttcgaatccgagtcacggcaa

SEQ ID NO: 18621 - DNA, 37 bp, synthetic construct; identical to SEQ ID NO: 4792
  misc_feature 1..37: note = Probe
  source 1..37: mol_type = other DNA

SEQ ID NO: 18622 - DNA, 36 bp, synthetic construct
  misc_feature 1..36: note = Probe
  source 1..36: mol_type = other DNA
ccgcagcaacctcggttcgaatccgagtcacggcag

SEQ ID NO: 18623 - DNA, 37 bp, synthetic construct; identical to SEQ ID NO: 4793
  misc_feature 1..37: note = Probe
  source 1..37: mol_type = other DNA

SEQ ID NO: 18624 - DNA, 38 bp, synthetic construct; identical to SEQ ID NO: 4794
  misc_feature 1..38: note = Probe
  source 1..38: mol_type = other DNA

SEQ ID NO: 18625 - DNA, 36 bp, synthetic construct
  misc_feature 1..36: note = Probe
  source 1..36: mol_type = other DNA
ccgcagcaacctcggttcgaatccgagtcacggcat

SEQ ID NO: 18626 - DNA, 37 bp, synthetic construct; identical to SEQ ID NO: 4795
  misc_feature 1..37: note = Probe
  source 1..37: mol_type = other DNA

SEQ ID NO: 18627 - DNA, 38 bp, synthetic construct; identical to SEQ ID NO: 4796
  misc_feature 1..38: note = Probe
  source 1..38: mol_type = other DNA

SEQ ID NO: 18628 - DNA, 33 bp, synthetic construct
  misc_feature 1..33: note = Probe
  source 1..33: mol_type = other DNA
ccgcagcccgggttcgattcccggtcatggaac

SEQ ID NO: 18629 - DNA, 35 bp, synthetic construct
  misc_feature 1..35: note = Probe
  source 1..35: mol_type = other DNA
ccgcagcccgggttcgattcccggtcatggaacca

SEQ ID NO: 18630 - DNA, 38 bp, synthetic construct
  misc_feature 1..38: note = Probe
  source 1..38: mol_type = other DNA
ccgccgcagcccgggttcgattcccggtcatggaacca

SEQ ID NO: 18631 - DNA, 38 bp, synthetic construct
  misc_feature 1..38: note = Probe
  source 1..38: mol_type = other DNA
ccgccgcggcccgggttcgattcccggccagggaattg

SEQ ID NO: 18632 - DNA, 30 bp, synthetic construct
  misc_feature 1..30: note = Probe
  source 1..30: mol_type = other DNA
ccgccgcggcccgggttcgattcccggtca

SEQ ID NO: 18633 - DNA, 31 bp, synthetic construct
  misc_feature 1..31: note = Probe
  source 1..31: mol_type = other DNA
ccgccgcggcccgggttcgattcccggtcag

SEQ ID NO: 18634 - DNA, 36 bp, synthetic construct; identical to SEQ ID NO: 4797
  misc_feature 1..36: note = Probe
  source 1..36: mol_type = other DNA

SEQ ID NO: 18635 - DNA, 37 bp, synthetic construct
  misc_feature 1..37: note = Probe
  source 1..37: mol_type = other DNA
ccgccgcggcccgggttcgattcccggtcagggaaag

SEQ ID NO: 18636 - DNA, 38 bp, synthetic construct
  misc_feature 1..38: note = Probe
  source 1..38: mol_type = other DNA
ccgccgcggcccgggttcgattcccggtcagggaaaga

SEQ ID NO: 18637 - DNA, 36 bp, synthetic construct; identical to SEQ ID NO: 4798
  misc_feature 1..36: note = Probe
  source 1..36: mol_type = other DNA

SEQ ID NO: 18638 - DNA, 37 bp, synthetic construct; identical to SEQ ID NO: 4799
  misc_feature 1..37: note = Probe
  source 1..37: mol_type = other DNA

SEQ ID NO: 18639 - DNA, 38 bp, synthetic construct
  misc_feature 1..38: note = Probe
  source 1..38: mol_type = other DNA
ccgccgcggcccgggttcgattcccggtcagggaagcc

SEQ ID NO: 18640 - DNA, 37 bp, synthetic construct
  misc_feature 1..37: note = Probe
  source 1..37: mol_type = other DNA
ccgccgcggcccgggttcgattcccggtcagggaagt

SEQ ID NO: 18641 - DNA, 38 bp, synthetic construct
  misc_feature 1..38: note = Probe
  source 1..38: mol_type = other DNA
ccgccgcggcccgggttcgattcccggtcagggaagtc

SEQ ID NO: 18642 - DNA, 38 bp, synthetic construct
  misc_feature 1..38: note = Probe
  source 1..38: mol_type = other DNA
ccgccgcggcccgggttcgattcccggtcagggaagtt

SEQ ID NO: 18643 - DNA, 36 bp, synthetic construct; identical to SEQ ID NO: 4800
  misc_feature 1..36: note = Probe
  source 1..36: mol_type = other DNA

SEQ ID NO: 18644 - DNA, 37 bp, synthetic construct
  misc_feature 1..37: note = Probe
  source 1..37: mol_type = other DNA
ccgccgcggcccgggttcgattcccggtcagggaatg

SEQ ID NO: 18645 - DNA, 38 bp, synthetic construct
  misc_feature 1..38: note = Probe
  source 1..38: mol_type = other DNA
ccgccgcggcccgggttcgattcccggtcagggaatga

SEQ ID NO: 18646 - DNA, 37 bp, synthetic construct; identical to SEQ ID NO: 4801
  misc_feature 1..37: note = Probe
  source 1..37: mol_type = other DNA

SEQ ID NO: 18647 - DNA, 38 bp, synthetic construct; identical to SEQ ID NO: 4802
  misc_feature 1..38: note = Probe
  source 1..38: mol_type = other DNA

SEQ ID NO: 18648 - DNA, 24 bp, synthetic construct
  misc_feature 1..24: note = Probe
  source 1..24: mol_type = other DNA
ccgcctgtcacgcgggagaccggg

SEQ ID NO: 18649 - DNA, 25 bp, synthetic construct
  misc_feature 1..25: note = Probe
  source 1..25: mol_type = other DNA
ccgcctgtcacgcgggagaccgggg

SEQ ID NO: 18650 - DNA, 27 bp, synthetic construct
  misc_feature 1..27: note = Probe
  source 1..27: mol_type = other DNA
ccgcctgtcacgcgggagaccggggtt

SEQ ID NO: 18651 - DNA, 28 bp, synthetic construct
  misc_feature 1..28: note = Probe
  source 1..28: mol_type = other DNA
ccgcctgtcacgcgggagaccggggttc

SEQ ID NO: 18652 - DNA, 41 bp, synthetic construct
  misc_feature 1..41: note = Probe
  source 1..41: mol_type = other DNA
ccgcctgtcacgcgggagaccggggttcaattccccgacgg

SEQ ID NO: 18653 - DNA, 32 bp, synthetic construct
  misc_feature 1..32: note = Probe
  source 1..32: mol_type = other DNA
ccgcctgtcacgcgggagaccggggttcgatt

SEQ ID NO: 18654 - DNA, 33 bp, synthetic construct
  misc_feature 1..33: note = Probe
  source 1..33: mol_type = other DNA
ccgcctgtcacgcgggagaccggggttcgattc

SEQ ID NO: 18655 - DNA, 41 bp, synthetic construct
  misc_feature 1..41: note = Probe
  source 1..41: mol_type = other DNA
ccgcctgtcacgcgggagaccggggttcgattccccgacgg

SEQ ID NO: 18656 - DNA, 42 bp, synthetic construct
  misc_feature 1..42: note = Probe
  source 1..42: mol_type = other DNA
ccgcctgtcacgcgggagaccggggttcgattccccgacggg

SEQ ID NO: 18657 - DNA, 50 bp, synthetic construct; identical to SEQ ID NO: 4804
  misc_feature 1..50: note = Probe
  source 1..50: mol_type = other DNA

SEQ ID NO: 18658 - DNA, 22 bp, synthetic construct
  misc_feature 1..22: note = Probe
  source 1..22: mol_type = other DNA
ccgcgcaggttcgaatcctgcc

SEQ ID NO: 18659 - DNA, 16 bp, synthetic construct
  misc_feature 1..16: note = Probe
  source 1..16: mol_type = other DNA
ccgcggcccgggttcg

SEQ ID NO: 18660 - DNA, 28 bp, synthetic construct
  misc_feature 1..28: note = Probe
  source 1..28: mol_type = other DNA
ccgcggcccgggttcgattcccggtcag

SEQ ID NO: 18661 - DNA, 30 bp, synthetic construct
  misc_feature 1..30: note = Probe
  source 1..30: mol_type = other DNA
ccgcggcccgggttcgattcccggtcagga

SEQ ID NO: 18662 - DNA, 30 bp, synthetic construct
  misc_feature 1..30: note = Probe
  source 1..30: mol_type = other DNA
ccgcggcccgggttcgattcccggtcaggg

SEQ ID NO: 18663 - DNA, 33 bp, synthetic construct; identical to SEQ ID NO: 4809
  misc_feature 1..33: note = Probe
  source 1..33: mol_type = other DNA

SEQ ID NO: 18664 - DNA, 34 bp, synthetic construct
  misc_feature 1..34: note = Probe
  source 1..34: mol_type = other DNA
ccgcggcccgggttcgattcccggtcagggaaag

SEQ ID NO: 18665 - DNA, 35 bp, synthetic construct
  misc_feature 1..35: note = Probe
  source 1..35: mol_type = other DNA
ccgcggcccgggttcgattcccggtcagggaaaga

SEQ ID NO: 18666 - DNA, 33 bp, synthetic construct; identical to SEQ ID NO: 4810
  misc_feature 1..33: note = Probe
  source 1..33: mol_type = other DNA

SEQ ID NO: 18667 - DNA, 34 bp, synthetic construct
  misc_feature 1..34: note = Probe
  source 1..34: mol_type = other DNA
ccgcggcccgggttcgattcccggtcagggaagc

SEQ ID NO: 18668 - DNA, 35 bp, synthetic construct
  misc_feature 1..35: note = Probe
  source 1..35: mol_type = other DNA
ccgcggcccgggttcgattcccggtcagggaagcc

SEQ ID NO: 18669 - DNA, 34 bp, synthetic construct
  misc_feature 1..34: note = Probe
  source 1..34: mol_type = other DNA
ccgcggcccgggttcgattcccggtcagggaagt

SEQ ID NO: 18670 - DNA, 33 bp, synthetic construct; identical to SEQ ID NO: 4811
  misc_feature 1..33: note = Probe
  source 1..33: mol_type = other DNA

SEQ ID NO: 18671 - DNA, 34 bp, synthetic construct
  misc_feature 1..34: note = Probe
  source 1..34: mol_type = other DNA
ccgcggcccgggttcgattcccggtcagggaatg

SEQ ID NO: 18672 - DNA, 35 bp, synthetic construct
  misc_feature 1..35: note = Probe
  source 1..35: mol_type = other DNA
ccgcggcccgggttcgattcccggtcagggaatga

SEQ ID NO: 18673 - DNA, 35 bp, synthetic construct; identical to SEQ ID NO: 4812
  misc_feature 1..35: note = Probe
  source 1..35: mol_type = other DNA

SEQ ID NO: 18674 - DNA, 31 bp, synthetic construct
  misc_feature 1..31: note = Probe
  source 1..31: mol_type = other DNA
ccgctgccacacctcagaaggtctcactttt

SEQ ID NO: 18675 - DNA, 24 bp, synthetic construct
  misc_feature 1..24: note = Probe
  source 1..24: mol_type = other DNA
ccgctgccagggttgctgtctttt

SEQ ID NO: 18676 - DNA, 35 bp, synthetic construct
  misc_feature 1..35: note = Probe
  source 1..35: mol_type = other DNA
ccgctggtgtagtggtatcatgcaagattcccatt

SEQ ID NO: 18677 - DNA, 37 bp, synthetic construct
  misc_feature 1..37: note = Probe
  source 1..37: mol_type = other DNA
ccgctggtgtagtggtatcatgcaagattcccattct

SEQ ID NO: 18678 - DNA, 38 bp, synthetic construct
  misc_feature 1..38: note = Probe
  source 1..38: mol_type = other DNA
ccgctggtgtagtggtatcatgcaagattcccattctt

SEQ ID NO: 18679 - DNA, 46 bp, synthetic construct
  misc_feature 1..46: note = Probe
  source 1..46: mol_type = other DNA
ccgctggtgtagtggtatcatgcaagattcccattcttgcgacccg

SEQ ID NO: 18680 - DNA, 48 bp, synthetic construct
  misc_feature 1..48: note = Probe
  source 1..48: mol_type = other DNA
ccgctggtgtagtggtatcatgcaagattcccattcttgcgacccggg

SEQ ID NO: 18681 - DNA, 49 bp, synthetic construct
  misc_feature 1..49: note = Probe
  source 1..49: mol_type = other DNA
ccgctggtgtagtggtatcatgcaagattcccattcttgcgacccgggt

SEQ ID NO: 18682 - DNA, 50 bp, synthetic construct
  misc_feature 1..50: note = Probe
  source 1..50: mol_type = other DNA
ccgctggtgtagtggtatcatgcaagattcccattcttgcgacccgggtt

SEQ ID NO: 18683 - DNA, 25 bp, synthetic construct
  misc_feature 1..25: note = Probe
  source 1..25: mol_type = other DNA
ccggagatgaaaacctttttccaag

SEQ ID NO: 18684 - DNA, 28 bp, synthetic construct
  misc_feature 1..28: note = Probe
  source 1..28: mol_type = other DNA
ccggagatgaaaacctttttccaaggac

SEQ ID NO: 18685 - DNA, 29 bp, synthetic construct
  misc_feature 1..29: note = Probe
  source 1..29: mol_type = other DNA
ccggagatgaaaacctttttccaaggaca

SEQ ID NO: 18686 - DNA, 30 bp, synthetic construct; identical to SEQ ID NO: 4816
  misc_feature 1..30: note = Probe
  source 1..30: mol_type = other DNA

SEQ ID NO: 18687 - DNA, 31 bp, synthetic construct; identical to SEQ ID NO: 4817
  misc_feature 1..31: note = Probe
  source 1..31: mol_type = other DNA

SEQ ID NO: 18688 - DNA, 32 bp, synthetic construct; identical to SEQ ID NO: 4818
  misc_feature 1..32: note = Probe
  source 1..32: mol_type = other DNA

SEQ ID NO: 18689 - DNA, 33 bp, synthetic construct; identical to SEQ ID NO: 4819
  misc_feature 1..33: note = Probe
  source 1..33: mol_type = other DNA

SEQ ID NO: 18690 - DNA, 21 bp, synthetic construct
  misc_feature 1..21: note = Probe
  source 1..21: mol_type = other DNA
ccggagctggggattgtgggt

SEQ ID NO: 18691 - DNA, 24 bp, synthetic construct
  misc_feature 1..24: note = Probe
  source 1..24: mol_type = other DNA
ccggatagctcagtcggtagagca

SEQ ID NO: 18692 - DNA, 27 bp, synthetic construct
  misc_feature 1..27: note = Probe
  source 1..27: mol_type = other DNA
ccggatagctcagtcggtagagcatca

SEQ ID NO: 18693 - DNA, 35 bp, synthetic construct
  misc_feature 1..35: note = Probe
  source 1..35: mol_type = other DNA
ccggatagctcagtcggtagagcatcagactttta

SEQ ID NO: 18694 - DNA, 36 bp, synthetic construct
  misc_feature 1..36: note = Probe
  source 1..36: mol_type = other DNA
ccggatagctcagtcggtagagcatcagacttttaa

SEQ ID NO: 18695 - DNA, 23 bp, synthetic construct
  misc_feature 1..23: note = Probe
  source 1..23: mol_type = other DNA
ccggccaacgcagtgtcagtttt

SEQ ID NO: 18696 - DNA, 26 bp, synthetic construct
  misc_feature 1..26: note = Probe
  source 1..26: mol_type = other DNA
ccggccaacgcagtgtcagtttttct

SEQ ID NO: 18697 - DNA, 28 bp, synthetic construct
  misc_feature 1..28: note = Probe
  source 1..28: mol_type = other DNA
ccggccaacgcagtgtcagtttttctct

SEQ ID NO: 18698 - DNA, 24 bp, synthetic construct
  misc_feature 1..24: note = Probe
  source 1..24: mol_type = other DNA
ccggccaacgcatgcggtaccact

SEQ ID NO: 18699 - DNA, 25 bp, synthetic construct
  misc_feature 1..25: note = Probe
  source 1..25: mol_type = other DNA
ccggccaacgcatgcggtaccactt

SEQ ID NO: 18700 - DNA, 26 bp, synthetic construct
  misc_feature 1..26: note = Probe
  source 1..26: mol_type = other DNA
ccggccaacgcatgcggtaccacttt

SEQ ID NO: 18701 - DNA, 27 bp, synthetic construct
  misc_feature 1..27: note = Probe
  source 1..27: mol_type = other DNA
ccggccaacgcatgcggtaccactttt

SEQ ID NO: 18702 - DNA, 15 bp, synthetic construct
  misc_feature 1..15: note = Probe
  source 1..15: mol_type = other DNA
ccggcggcgggagaa

SEQ ID NO: 18703 - DNA, 31 bp, synthetic construct
  misc_feature 1..31: note = Probe
  source 1..31: mol_type = other DNA
ccggctagctcagtcgatagagcatgagact

SEQ ID NO: 18704 - DNA, 20 bp, synthetic construct
  misc_feature 1..20: note = Probe
  source 1..20: mol_type = other DNA
ccggctagctcagtcggtag

SEQ ID NO: 18705 - DNA, 21 bp, synthetic construct
  misc_feature 1..21: note = Probe
  source 1..21: mol_type = other DNA
ccggctagctcagtcggtaga

SEQ ID NO: 18706 - DNA, 22 bp, synthetic construct
  misc_feature 1..22: note = Probe
  source 1..22: mol_type = other DNA
ccggctagctcagtcggtagag

SEQ ID NO: 18707 - DNA, 23 bp, synthetic construct
  misc_feature 1..23: note = Probe
  source 1..23: mol_type = other DNA
ccggctagctcagtcggtagagc

SEQ ID NO: 18708 - DNA, 26 bp, synthetic construct
  misc_feature 1..26: note = Probe
  source 1..26: mol_type = other DNA
ccggctagctcagtcggtagagcatg

SEQ ID NO: 18709 - DNA, 28 bp, synthetic construct
  misc_feature 1..28: note = Probe
  source 1..28: mol_type = other DNA
ccggctagctcagtcggtagagcatgag

SEQ ID NO: 18710 - DNA, 32 bp, synthetic construct
  misc_feature 1..32: note = Probe
  source 1..32: mol_type = other DNA
ccggctagctcagtcggtagagcatgagaccc

SEQ ID NO: 18711 - DNA, 33 bp, synthetic construct; identical to SEQ ID NO: 4825
  misc_feature 1..33: note = Probe
  source 1..33: mol_type = other DNA

SEQ ID NO: 18712 - DNA, 33 bp, synthetic construct; identical to SEQ ID NO: 683
  misc_feature 1..33: note = Probe
  source 1..33: mol_type = other DNA

SEQ ID NO: 18713 - DNA, 34 bp, synthetic construct; identical to SEQ ID NO: 684
  misc_feature 1..34: note = Probe
  source 1..34: mol_type = other DNA

SEQ ID NO: 18714 - DNA, 38 bp, synthetic construct
  misc_feature 1..38: note = Probe
  source 1..38: mol_type = other DNA
ccggctccatagctcaggggttagagcactggtcttgt

SEQ ID NO: 18715 - DNA, 15 bp, synthetic construct
  misc_feature 1..15: note = Probe
  source 1..15: mol_type = other DNA
ccgggcgcggtggct

SEQ ID NO: 18716 - DNA, 16 bp, synthetic construct
  misc_feature 1..16: note = Probe
  source 1..16: mol_type = other DNA
ccgggcggaaacacac

SEQ ID NO: 18717 - DNA, 30 bp, synthetic construct
  misc_feature 1..30: note = Probe
  source 1..30: mol_type = other DNA
ccgggcggaaacacactaaaaaatcccttt

SEQ ID NO: 18718 - DNA, 31 bp, synthetic construct
  misc_feature 1..31: note = Probe
  source 1..31: mol_type = other DNA
ccgggcggaaacacactaaaaaatccctttt

SEQ ID NO: 18719 - DNA, 16 bp, synthetic construct
  misc_feature 1..16: note = Probe
  source 1..16: mol_type = other DNA
ccgggcggaaacacct

SEQ ID NO: 18720 - DNA, 16 bp, synthetic construct
  misc_feature 1..16: note = Probe
  source 1..16: mol_type = other DNA
ccgggcggaaacaggt

SEQ ID NO: 18721 - DNA, 29 bp, synthetic construct
  misc_feature 1..29: note = Probe
  source 1..29: mol_type = other DNA
ccggggttcgattccccgacggggaggca

SEQ ID NO: 18722 - DNA, 16 bp, synthetic construct
  misc_feature 1..16: note = Probe
  source 1..16: mol_type = other DNA
ccgggtgccccctcaa

SEQ ID NO: 18723 - DNA, 16 bp, synthetic construct
  misc_feature 1..16: note = Probe
  source 1..16: mol_type = other DNA
ccgggtgccccctctt

SEQ ID NO: 18724 - DNA, 21 bp, synthetic construct
  misc_feature 1..21: note = Probe
  source 1..21: mol_type = other DNA
ccggtaatcgcataaaactta

SEQ ID NO: 18725 - DNA, 26 bp, synthetic construct
  misc_feature 1..26: note = Probe
  source 1..26: mol_type = other DNA
ccggtaatcgcataaaacttaaaact

SEQ ID NO: 18726 - DNA, 17 bp, synthetic construct
  misc_feature 1..17: note = Probe
  source 1..17: mol_type = other DNA
ccggttagctcagttgg

SEQ ID NO: 18727 - DNA, 18 bp, synthetic construct
  misc_feature 1..18: note = Probe
  source 1..18: mol_type = other DNA
ccggttagctcagttggt

SEQ ID NO: 18728 - DNA, 15 bp, synthetic construct
  misc_feature 1..15: note = Probe
  source 1..15: mol_type = other DNA
ccgtacggtttttct

SEQ ID NO: 18729 - DNA, 24 bp, synthetic construct
  misc_feature 1..24: note = Probe
  source 1..24: mol_type = other DNA
ccgtagtgtagcggttatcacatt

SEQ ID NO: 18730 - DNA, 27 bp, synthetic construct
  misc_feature 1..27: note = Probe
  source 1..27: mol_type = other DNA
ccgtagtgtagcggttatcacattcgc

SEQ ID NO: 18731 - DNA, 28 bp, synthetic construct
  misc_feature 1..28: note = Probe
  source 1..28: mol_type = other DNA
ccgtagtgtagcggttatcacattcgcc

SEQ ID NO: 18732 - DNA, 29 bp, synthetic construct
  misc_feature 1..29: note = Probe
  source 1..29: mol_type = other DNA
ccgtagtgtagcggttatcacattcgcct

SEQ ID NO: 18733 - DNA, 30 bp, synthetic construct
  misc_feature 1..30: note = Probe
  source 1..30: mol_type = other DNA
ccgtagtgtagcggttatcacattcgcctc

SEQ ID NO: 18734 - DNA, 31 bp, synthetic construct
  misc_feature 1..31: note = Probe
  source 1..31: mol_type = other DNA
ccgtagtgtagcggttatcacattcgcctca

SEQ ID NO: 18735 - DNA, 31 bp, synthetic construct; identical to SEQ ID NO: 4835
  misc_feature 1..31: note = Probe
  source 1..31: mol_type = other DNA

SEQ ID NO: 18736 - DNA, 32 bp, synthetic construct; identical to SEQ ID NO: 4836
  misc_feature 1..32: note = Probe
  source 1..32: mol_type = other DNA

SEQ ID NO: 18737 - DNA, 19 bp, synthetic construct
  misc_feature 1..19: note = Probe
  source 1..19: mol_type = other DNA
ccgtagtgtagtggttatc

SEQ ID NO: 18738 - DNA, 23 bp, synthetic construct
  misc_feature 1..23: note = Probe
  source 1..23: mol_type = other DNA
ccgtagtgtagtggttatcacgt

SEQ ID NO: 18739 - DNA, 24 bp, synthetic construct
  misc_feature 1..24: note = Probe
  source 1..24: mol_type = other DNA
ccgtagtgtagtggttatcacgtt

SEQ ID NO: 18740 - DNA, 26 bp, synthetic construct
  misc_feature 1..26: note = Probe
  source 1..26: mol_type = other DNA
ccgtagtgtagtggttatcacgttcg

SEQ ID NO: 18741 - DNA, 27 bp, synthetic construct
  misc_feature 1..27: note = Probe
  source 1..27: mol_type = other DNA
ccgtagtgtagtggttatcacgttcgc

SEQ ID NO: 18742 - DNA, 28 bp, synthetic construct
  misc_feature 1..28: note = Probe
  source 1..28: mol_type = other DNA
ccgtagtgtagtggttatcacgttcgcc

SEQ ID NO: 18743 - DNA, 29 bp, synthetic construct
  misc_feature 1..29: note = Probe
  source 1..29: mol_type = other DNA
ccgtagtgtagtggttatcacgttcgcct

SEQ ID NO: 18744 - DNA, 36 bp, synthetic construct
  misc_feature 1..36: note = Probe
  source 1..36: mol_type = other DNA
ccgtagtgtagtggttatcacgttcgcctaacacgc

SEQ ID NO: 18745 - DNA, 50 bp, synthetic construct; identical to SEQ ID NO: 4842
  misc_feature 1..50: note = Probe
  source 1..50: mol_type = other DNA

SEQ ID NO: 18746 - DNA, 30 bp, synthetic construct; identical to SEQ ID NO: 4843
  misc_feature 1..30: note = Probe
  source 1..30: mol_type = other DNA

SEQ ID NO: 18747 - DNA, 31 bp, synthetic construct; identical to SEQ ID NO: 4844
  misc_feature 1..31: note = Probe
  source 1..31: mol_type = other DNA

SEQ ID NO: 18748 - DNA, 32 bp, synthetic construct; identical to SEQ ID NO: 4845
  misc_feature 1..32: note = Probe
  source 1..32: mol_type = other DNA

SEQ ID NO: 18749 - DNA, 33 bp, synthetic construct; identical to SEQ ID NO: 4846
  misc_feature 1..33: note = Probe
  source 1..33: mol_type = other DNA

SEQ ID NO: 18750 - DNA, 36 bp, synthetic construct
  misc_feature 1..36: note = Probe
  source 1..36: mol_type = other DNA
ccgtagtgtagtggttatcacgttcgcctcacacgc

SEQ ID NO: 18751 - DNA, 50 bp, synthetic construct; identical to SEQ ID NO: 4847
  misc_feature 1..50: note = Probe
  source 1..50: mol_type = other DNA

SEQ ID NO: 18752 - DNA, 24 bp, synthetic construct
  misc_feature 1..24: note = Probe
  source 1..24: mol_type = other DNA
ccgtgatcgtatagtggttagtac

SEQ ID NO: 18753 - DNA, 25 bp, synthetic construct
  misc_feature 1..25: note = Probe
  source 1..25: mol_type = other DNA
ccgtgatcgtatagtggttagtact

SEQ ID NO: 18754 - DNA, 26 bp, synthetic construct
  misc_feature 1..26: note = Probe
  source 1..26: mol_type = other DNA
ccgtgatcgtatagtggttagtactc

SEQ ID NO: 18755 - DNA, 27 bp, synthetic construct
  misc_feature 1..27: note = Probe
  source 1..27: mol_type = other DNA
ccgtgatcgtatagtggttagtactct

SEQ ID NO: 18756 - DNA, 28 bp, synthetic construct
  misc_feature 1..28: note = Probe
  source 1..28: mol_type = other DNA
ccgtgatcgtatagtggttagtactctg

SEQ ID NO: 18757 - DNA, 30 bp, synthetic construct; identical to SEQ ID NO: 8580
  misc_feature 1..30: note = Probe
  source 1..30: mol_type = other DNA

SEQ ID NO: 18758 - DNA, 32 bp, synthetic construct
  misc_feature 1..32: note = Probe
  source 1..32: mol_type = other DNA
ccgtgatcgtatagtggttagtactctgcgtt

SEQ ID NO: 18759 - DNA, 33 bp, synthetic construct; identical to SEQ ID NO: 688
  misc_feature 1..33: note = Probe
  source 1..33: mol_type = other DNA

SEQ ID NO: 18760 - DNA, 36 bp, synthetic construct
  misc_feature 1..36: note = Probe
  source 1..36: mol_type = other DNA
ccgtgatcgtatagtggttagtactctgcgttgtgg

SEQ ID NO: 18761 - DNA, 37 bp, synthetic construct
  misc_feature 1..37: note = Probe
  source 1..37: mol_type = other DNA
ccgtgatcgtatagtggttagtactctgcgttgtggc

SEQ ID NO: 18762 - DNA, 38 bp, synthetic construct
  misc_feature 1..38: note = Probe
  source 1..38: mol_type = other DNA
ccgtgatcgtatagtggttagtactctgcgttgtggcc

SEQ ID NO: 18763 - DNA, 28 bp, synthetic construct
  misc_feature 1..28: note = Probe
  source 1..28: mol_type = other DNA
ccgtggcttagttggttaaagcgcctgt

SEQ ID NO: 18764 - DNA, 24 bp, synthetic construct
  misc_feature 1..24: note = Probe
  source 1..24: mol_type = other DNA
ccgtggtgtagtggttatcacatt

SEQ ID NO: 18765 - DNA, 27 bp, synthetic construct
  misc_feature 1..27: note = Probe
  source 1..27: mol_type = other DNA
ccgtggtgtagtggttatcacattcgc

SEQ ID NO: 18766 - DNA, 28 bp, synthetic construct
  misc_feature 1..28: note = Probe
  source 1..28: mol_type = other DNA
ccgtggtgtagtggttatcacattcgcc

SEQ ID NO: 18767 - DNA, 20 bp, synthetic construct
  misc_feature 1..20: note = Probe
  source 1..20: mol_type = other DNA
ccgtgtttcccccacgcttt

SEQ ID NO: 18768 - DNA, 21 bp, synthetic construct
  misc_feature 1..21: note = Probe
  source 1..21: mol_type = other DNA
ccgtgtttcccccacgctttt

SEQ ID NO: 18769 - DNA, 29 bp, synthetic construct
  misc_feature 1..29: note = Probe
  source 1..29: mol_type = other DNA
ccgttaacttccaattaactagttttgac

SEQ ID NO: 18770 - DNA, 30 bp, synthetic construct; identical to SEQ ID NO: 4854
  misc_feature 1..30: note = Probe
  source 1..30: mol_type = other DNA

SEQ ID NO: 18771 - DNA, 50 bp, synthetic construct; identical to SEQ ID NO: 4855
  misc_feature 1..50: note = Probe
  source 1..50: mol_type = other DNA

SEQ ID NO: 18772 - DNA, 23 bp, synthetic construct
  misc_feature 1..23: note = Probe
  source 1..23: mol_type = other DNA
cctaacacgcgaaaggtccccgg

SEQ ID NO: 18773 - DNA, 24 bp, synthetic construct
  misc_feature 1..24: note = Probe
  source 1..24: mol_type = other DNA
cctaacacgcgaaaggtccccggt

SEQ ID NO: 18774 - DNA, 24 bp, synthetic construct
  misc_feature 1..24: note = Probe
  source 1..24: mol_type = other DNA
cctagccccaaacccactccacct

SEQ ID NO: 18775 - DNA, 18 bp, synthetic construct
  misc_feature 1..18: note = Probe
  source 1..18: mol_type = other DNA
cctagcctttctattagc

SEQ ID NO: 18776 - DNA, 17 bp, synthetic construct
  misc_feature 1..17: note = Probe
  source 1..17: mol_type = other DNA
cctcaaagcaatacact

SEQ ID NO: 18777 - DNA, 20 bp, synthetic construct
  misc_feature 1..20: note = Probe
  source 1..20: mol_type = other DNA
cctcaaagcaatacactgaa

SEQ ID NO: 18778 - DNA, 20 bp, synthetic construct
  misc_feature 1..20: note = Probe
  source 1..20: mol_type = other DNA
cctcacacgcgaaaggtccc

SEQ ID NO: 18779 - DNA, 23 bp, synthetic construct
  misc_feature 1..23: note = Probe
  source 1..23: mol_type = other DNA
cctcacacgcgaaaggtccccgg

SEQ ID NO: 18780 - DNA, 25 bp, synthetic construct
  misc_feature 1..25: note = Probe
  source 1..25: mol_type = other DNA
cctcacacgcgaaaggtccccggtt

SEQ ID NO: 18781 - DNA, 23 bp, synthetic construct
  misc_feature 1..23: note = Probe
  source 1..23: mol_type = other DNA
cctcacacggggcacaataattt

SEQ ID NO: 18782 - DNA, 23 bp, synthetic construct
  misc_feature 1..23: note = Probe
  source 1..23: mol_type = other DNA
cctcacctggagcaagacccttt

SEQ ID NO: 18783 - DNA, 20 bp, synthetic construct
  misc_feature 1..20: note = Probe
  source 1..20: mol_type = other DNA
cctcagaaggtctcactttt

SEQ ID NO: 18784 - DNA, 24 bp, synthetic construct
  misc_feature 1..24: note = Probe
  source 1..24: mol_type = other DNA
cctcagagggggcagctgccattt

SEQ ID NO: 18785 - DNA, 32 bp, synthetic construct; identical to SEQ ID NO: 4867
  misc_feature 1..32: note = Probe
  source 1..32: mol_type = other DNA

SEQ ID NO: 18786 - DNA, 25 bp, synthetic construct
  misc_feature 1..25: note = Probe
  source 1..25: mol_type = other DNA
cctcatttacataaatattatacta

SEQ ID NO: 18787 - DNA, 16 bp, synthetic construct
  misc_feature 1..16: note = Probe
  source 1..16: mol_type = other DNA
cctcctcaaagcaata

SEQ ID NO: 18788 - DNA, 20 bp, synthetic construct
  misc_feature 1..20: note = Probe
  source 1..20: mol_type = other DNA
cctcctcaaagcaatacact

SEQ ID NO: 18789 - DNA, 16 bp, synthetic construct
  misc_feature 1..16: note = Probe
  source 1..16: mol_type = other DNA
cctcgctggggcctcc

SEQ ID NO: 18790 - DNA, 26 bp, synthetic construct
  misc_feature 1..26: note = Probe
  source 1..26: mol_type = other DNA
cctcgttagcgcagtaggtagcgcgt

SEQ ID NO: 18791 - DNA, 29 bp, synthetic construct
  misc_feature 1..29: note = Probe
  source 1..29: mol_type = other DNA
cctcgttagtatagtggtgagtatccccg

SEQ ID NO: 18792 - DNA, 30 bp, synthetic construct
  misc_feature 1..30: note = Probe
  source 1..30: mol_type = other DNA
cctcgttagtatagtggtgagtatccccgc

SEQ ID NO: 18793 - DNA, 31 bp, synthetic construct
  misc_feature 1..31: note = Probe
  source 1..31: mol_type = other DNA
cctcgttagtatagtggtgagtatccccgcc

SEQ ID NO: 18794 - DNA, 32 bp, synthetic construct; identical to SEQ ID NO: 4870
  misc_feature 1..32: note = Probe
  source 1..32: mol_type = other DNA

SEQ ID NO: 18795 - DNA, 33 bp, synthetic construct; identical to SEQ ID NO: 693
  misc_feature 1..33: note = Probe
  source 1..33: mol_type = other DNA

SEQ ID NO: 18796 - DNA, 38 bp, synthetic construct
  misc_feature 1..38: note = Probe
  source 1..38: mol_type = other DNA
cctcgttagtatagtggtgagtatccccgcctgtcacg

SEQ ID NO: 18797 - DNA, 31 bp, synthetic construct
  misc_feature 1..31: note = Probe
  source 1..31: mol_type = other DNA
cctcgttagtatagtggttagtatccccgcc

SEQ ID NO: 18798 - DNA, 34 bp, synthetic construct
  misc_feature 1..34: note = Probe
  source 1..34: mol_type = other DNA
cctcgttagtatagtggttagtatccccgcctgt

SEQ ID NO: 18799 - DNA, 28 bp, synthetic construct
  misc_feature 1..28: note = Probe
  source 1..28: mol_type = other DNA
cctctttggccttttcgagatactgttt

SEQ ID NO: 18800 - DNA, 25 bp, synthetic construct
  misc_feature 1..25: note = Probe
  source 1..25: mol_type = other DNA
cctgccacgcgggaggcccgggttt

SEQ ID NO: 18801 - DNA, 26 bp, synthetic construct
  misc_feature 1..26: note = Probe
  source 1..26: mol_type = other DNA
cctgccacgcgggaggcccgggtttg

SEQ ID NO: 18802 - DNA, 20 bp, synthetic construct
  misc_feature 1..20: note = Probe
  source 1..20: mol_type = other DNA
cctgctaactgggctttttt

SEQ ID NO: 18803 - DNA, 31 bp, synthetic construct
  misc_feature 1..31: note = Probe
  source 1..31: mol_type = other DNA
cctggcggtctagtggttaggattcggcgct

SEQ ID NO: 18804 - DNA, 32 bp, synthetic construct
  misc_feature 1..32: note = Probe
  source 1..32: mol_type = other DNA
cctggcggtctagtggttaggattcggcgctc

SEQ ID NO: 18805 - DNA, 25 bp, synthetic construct
  misc_feature 1..25: note = Probe
  source 1..25: mol_type = other DNA
cctggctggctcgcgatgtctgttt

SEQ ID NO: 18806 - DNA, 26 bp, synthetic construct
  misc_feature 1..26: note = Probe
  source 1..26: mol_type = other DNA
cctggctggctcgcgatgtctgtttt

SEQ ID NO: 18807 - DNA, 31 bp, synthetic construct
  misc_feature 1..31: note = Probe
  source 1..31: mol_type = other DNA
cctggtggtctagtgcttaggattcggtgct

SEQ ID NO: 18808 - DNA, 27 bp, synthetic construct
  misc_feature 1..27: note = Probe
  source 1..27: mol_type = other DNA
cctggtggtctagtggctaggattcgg

SEQ ID NO: 18809 - DNA, 30 bp, synthetic construct
  misc_feature 1..30: note = Probe
  source 1..30: mol_type = other DNA
cctggtggtctagtggctaggattcggcgc

SEQ ID NO: 18810 - DNA, 23 bp, synthetic construct
  misc_feature 1..23: note = Probe
  source 1..23: mol_type = other DNA
cctggtggtctagtggttaggat

SEQ ID NO: 18811 - DNA, 24 bp, synthetic construct
  misc_feature 1..24: note = Probe
  source 1..24: mol_type = other DNA
cctggtggtctagtggttaggatt

SEQ ID NO: 18812 - DNA, 25 bp, synthetic construct
  misc_feature 1..25: note = Probe
  source 1..25: mol_type = other DNA
cctggtggtctagtggttaggattc

SEQ ID NO: 18813 - DNA, 26 bp, synthetic construct
  misc_feature 1..26: note = Probe
  source 1..26: mol_type = other DNA
cctggtggtctagtggttaggattcg

SEQ ID NO: 18814 - DNA, 27 bp, synthetic construct
  misc_feature 1..27: note = Probe
  source 1..27: mol_type = other DNA
cctggtggtctagtggttaggattcgg

SEQ ID NO: 18815 - DNA, 28 bp, synthetic construct
  misc_feature 1..28: note = Probe
  source 1..28: mol_type = other DNA
cctggtggtctagtggttaggattcggc

SEQ ID NO: 18816 - DNA, 36 bp, synthetic construct; identical to SEQ ID NO: 4877
  misc_feature 1..36: note = Probe
  source 1..36: mol_type = other DNA

SEQ ID NO: 18817 - DNA, 16 bp, synthetic construct
  misc_feature 1..16: note = Probe
  source 1..16: mol_type = other DNA
cctgtcacgcgggaga

SEQ ID NO: 18818 - DNA, 17 bp, synthetic construct
  misc_feature 1..17: note = Probe
  source 1..17: mol_type = other DNA
cctgtcacgcgggagac

SEQ ID NO: 18819 - DNA, 18 bp, synthetic construct
  misc_feature 1..18: note = Probe
  source 1..18: mol_type = other DNA
cctgtcacgcgggagacc

SEQ ID NO: 18820 - DNA, 20 bp, synthetic construct
  misc_feature 1..20: note = Probe
  source 1..20: mol_type = other DNA
cctgtcacgcgggagaccgg

SEQ ID NO: 18821 - DNA, 21 bp, synthetic construct
  misc_feature 1..21: note = Probe
  source 1..21: mol_type = other DNA
cctgtcacgcgggagaccggg

SEQ ID NO: 18822 - DNA, 22 bp, synthetic construct
  misc_feature 1..22: note = Probe
  source 1..22: mol_type = other DNA
cctgtcacgcgggagaccgggg

SEQ ID NO: 18823 - DNA, 25 bp, synthetic construct
  misc_feature 1..25: note = Probe
  source 1..25: mol_type = other DNA
cctgtcacgcgggagaccggggttc

SEQ ID NO: 18824 - DNA, 40 bp, synthetic construct
  misc_feature 1..40: note = Probe
  source 1..40: mol_type = other DNA
cctgtcacgcgggagaccggggttcaattccccgacgggg

SEQ ID NO: 18825 - DNA, 45 bp, synthetic construct; identical to SEQ ID NO: 4880
  misc_feature 1..45: note = Probe
  source 1..45: mol_type = other DNA

SEQ ID NO: 18826 - DNA, 50 bp, synthetic construct; identical to SEQ ID NO: 4881
  misc_feature 1..50: note = Probe
  source 1..50: mol_type = other DNA

SEQ ID NO: 18827 - DNA, 30 bp, synthetic construct
  misc_feature 1..30: note = Probe
  source 1..30: mol_type = other DNA
cctgtcacgcgggagaccggggttcgattc

SEQ ID NO: 18828 - DNA, 36 bp, synthetic construct
  misc_feature 1..36: note = Probe
  source 1..36: mol_type = other DNA
cctgtcacgcgggagaccggggttcgattccccgac

SEQ ID NO: 18829 - DNA, 41 bp, synthetic construct
  misc_feature 1..41: note = Probe
  source 1..41: mol_type = other DNA
cctgtcacgcgggagaccggggttcgattccccgacgggga

SEQ ID NO: 18830 - DNA, 43 bp, synthetic construct
  misc_feature 1..43: note = Probe
  source 1..43: mol_type = other DNA
cctgtcacgcgggagaccggggttcgattccccgacggggaga

SEQ ID NO: 18831 - DNA, 45 bp, synthetic construct; identical to SEQ ID NO: 4883
  misc_feature 1..45: note = Probe
  source 1..45: mol_type = other DNA

SEQ ID NO: 18832 - DNA, 50 bp, synthetic construct
  misc_feature 1..50: note = Probe
  source 1..50: mol_type = other DNA
cctgtcacgcgggagaccggggttcgattccccgacggggagaaaagttg

SEQ ID NO: 18833 - DNA, 45 bp, synthetic construct; identical to SEQ ID NO: 4885
  misc_feature 1..45: note = Probe
  source 1..45: mol_type = other DNA

SEQ ID NO: 18834 - DNA, 43 bp, synthetic construct
  misc_feature 1..43: note = Probe
  source 1..43: mol_type = other DNA
cctgtcacgcgggagaccggggttcgattccccgacggggagg

SEQ ID NO: 18835 - DNA, 45 bp, synthetic construct; identical to SEQ ID NO: 4886
  misc_feature 1..45: note = Probe
  source 1..45: mol_type = other DNA

SEQ ID NO: 18836 - DNA, 48 bp, synthetic construct; identical to SEQ ID NO: 4887
  misc_feature 1..48: note = Probe
  source 1..48: mol_type = other DNA

SEQ ID NO: 18837 - DNA, 49 bp, synthetic construct; identical to SEQ ID NO: 4888
  misc_feature 1..49: note = Probe
  source 1..49: mol_type = other DNA

SEQ ID NO: 18838 - DNA, 50 bp, synthetic construct; identical to SEQ ID NO: 4889
  misc_feature 1..50: note = Probe
  source 1..50: mol_type = other DNA

SEQ ID NO: 18839 - DNA, 50 bp, synthetic construct
  misc_feature 1..50: note = Probe
  source 1..50: mol_type = other DNA
cctgtcacgcgggagaccggggttcgattccccgacggggaggcagccgt

SEQ ID NO: 18840 - DNA, 45 bp, synthetic construct; identical to SEQ ID NO: 4890
  misc_feature 1..45: note = Probe
  source 1..45: mol_type = other DNA

SEQ ID NO: 18841 - DNA, 50 bp, synthetic construct
  misc_feature 1..50: note = Probe
  source 1..50: mol_type = other DNA
cctgtcacgcgggagaccggggttcgattccccgacggggaggccaagta

SEQ ID NO: 18842 - DNA, 21 bp, synthetic construct
  misc_feature 1..21: note = Probe
  source 1..21: mol_type = other DNA
cctgtcccgtacggtttttct

SEQ ID NO: 18843 - DNA, 16 bp, synthetic construct
  misc_feature 1..16: note = Probe
  source 1..16: mol_type = other DNA
cctgttggcttacttt

SEQ ID NO: 18844 - DNA, 31 bp, synthetic construct
  misc_feature 1..31: note = Probe
  source 1..31: mol_type = other DNA
ccttaggtcgctggttcgattccggctcgaa

SEQ ID NO: 18845 - DNA, 32 bp, synthetic construct
  misc_feature 1..32: note = Probe
  source 1..32: mol_type = other DNA
ccttaggtcgctggttcgattccggctcgaag

SEQ ID NO: 18846 - DNA, 16 bp, synthetic construct
  misc_feature 1..16: note = Probe
  source 1..16: mol_type = other DNA
ccttccaagcagttga

SEQ ID NO: 18847 - DNA, 17 bp, synthetic construct
  misc_feature 1..17: note = Probe
  source 1..17: mol_type = other DNA
ccttccaagcagttgac

SEQ ID NO: 18848 - DNA, 18 bp, synthetic construct
  misc_feature 1..18: note = Probe
  source 1..18: mol_type = other DNA
ccttccaagcagttgacc

SEQ ID NO: 18849 - DNA, 20 bp, synthetic construct
  misc_feature 1..20: note = Probe
  source 1..20: mol_type = other DNA
ccttccaagcagttgacccg

SEQ ID NO: 18850 - DNA, 21 bp, synthetic construct
  misc_feature 1..21: note = Probe
  source 1..21: mol_type = other DNA
ccttccaagcagttgacccgg

SEQ ID NO: 18851 - DNA, 22 bp, synthetic construct
  misc_feature 1..22: note = Probe
  source 1..22: mol_type = other DNA
ccttccaagcagttgacccggg

SEQ ID NO: 18852 - DNA, 25 bp, synthetic construct
  misc_feature 1..25: note = Probe
  source 1..25: mol_type = other DNA
ccttccaagcagttgacccgggttc

SEQ ID NO: 18853 - DNA, 26 bp, synthetic construct
  misc_feature 1..26: note = Probe
  source 1..26: mol_type = other DNA
ccttccaagcagttgacccgggttcg

SEQ ID NO: 18854 - DNA, 27 bp, synthetic construct
  misc_feature 1..27: note = Probe
  source 1..27: mol_type = other DNA
ccttccaagcagttgacccgggttcga

SEQ ID NO: 18855 - DNA, 16 bp, synthetic construct
  misc_feature 1..16: note = Probe
  source 1..16: mol_type = other DNA
ccttcgatagctcagc

SEQ ID NO: 18856 - DNA, 17 bp, synthetic construct
  misc_feature 1..17: note = Probe
  source 1..17: mol_type = other DNA
ccttcgatagctcagct

SEQ ID NO: 18857 - DNA, 19 bp, synthetic construct
  misc_feature 1..19: note = Probe
  source 1..19: mol_type = other DNA
ccttcgatagctcagctgg

SEQ ID NO: 18858 - DNA, 16 bp, synthetic construct
  misc_feature 1..16: note = Probe
  source 1..16: mol_type = other DNA
ccttcgatagctcagt

SEQ ID NO: 18859 - DNA, 19 bp, synthetic construct
  misc_feature 1..19: note = Probe
  source 1..19: mol_type = other DNA
ccttcgatagctcagttgg

SEQ ID NO: 18860 - DNA, 20 bp, synthetic construct
  misc_feature 1..20: note = Probe
  source 1..20: mol_type = other DNA
ccttcgatagctcagttggt

SEQ ID NO: 18861 - DNA, 31 bp, synthetic construct
  misc_feature 1..31: note = Probe
  source 1..31: mol_type = other DNA
ccttgcgaaactactttcttgattcaggtgt

SEQ ID NO: 18862 - DNA, 32 bp, synthetic construct
  misc_feature 1..32: note = Probe
  source 1..32: mol_type = other DNA
ccttgcgaaactactttcttgattcaggtgtt

SEQ ID NO: 18863 - DNA, 27 bp, synthetic construct
  misc_feature 1..27: note = Probe
  source 1..27: mol_type = other DNA
ccttttaagttaaagattaagagaacc

SEQ ID NO: 18864 - DNA, 28 bp, synthetic construct
  misc_feature 1..28: note = Probe
  source 1..28: mol_type = other DNA
ccttttaagttaaagattaagagaacca

SEQ ID NO: 18865 - DNA, 50 bp, synthetic construct; identical to SEQ ID NO: 4905
  misc_feature 1..50: note = Probe
  source 1..50: mol_type = other DNA

SEQ ID NO: 18866 - DNA, 15 bp, synthetic construct
  misc_feature 1..15: note = Probe
  source 1..15: mol_type = other DNA
ccttttttccccttt

SEQ ID NO: 18867 - DNA, 24 bp, synthetic construct
  misc_feature 1..24: note = Probe
  source 1..24: mol_type = other DNA
ccttttttcccggcggcgggagaa

SEQ ID NO: 18868 - DNA, 26 bp, synthetic construct
  misc_feature 1..26: note = Probe
  source 1..26: mol_type = other DNA
ccttttttcccggcggcgggagaagt

SEQ ID NO: 18869 - DNA, 20 bp, synthetic construct
  misc_feature 1..20: note = Probe
  source 1..20: mol_type = other DNA
cgaaaatgttggttataccc

SEQ ID NO: 18870 - DNA, 23 bp, synthetic construct
  misc_feature 1..23: note = Probe
  source 1..23: mol_type = other DNA
cgaaaatgttggttatacccttc

SEQ ID NO: 18871 - DNA, 24 bp, synthetic construct
  misc_feature 1..24: note = Probe
  source 1..24: mol_type = other DNA
cgaaaatgttggttatacccttcc

SEQ ID NO: 18872 - DNA, 25 bp, synthetic construct
  misc_feature 1..25: note = Probe
  source 1..25: mol_type = other DNA
cgaaaatgttggttatacccttccc

SEQ ID NO: 18873 - DNA, 26 bp, synthetic construct
  misc_feature 1..26: note = Probe
  source 1..26: mol_type = other DNA
cgaaaatgttggttatacccttcccg

SEQ ID NO: 18874 - DNA, 27 bp, synthetic construct
  misc_feature 1..27: note = Probe
  source 1..27: mol_type = other DNA
cgaaaatgttggttatacccttcccgt

SEQ ID NO: 18875 - DNA, 32 bp, synthetic construct; identical to SEQ ID NO: 4915
  misc_feature 1..32: note = Probe
  source 1..32: mol_type = other DNA

SEQ ID NO: 18876 - DNA, 33 bp, synthetic construct; identical to SEQ ID NO: 4916
  misc_feature 1..33: note = Probe
  source 1..33: mol_type = other DNA

SEQ ID NO: 18877 - DNA, 34 bp, synthetic construct; identical to SEQ ID NO: 4917
  misc_feature 1..34: note = Probe
  source 1..34: mol_type = other DNA

SEQ ID NO: 18878 - DNA, 21 bp, synthetic construct
  misc_feature 1..21: note = Probe
  source 1..21: mol_type = other DNA
cgaaaccgggcggaaacacct

SEQ ID NO: 18879 - DNA, 27 bp, synthetic construct
  misc_feature 1..27: note = Probe
  source 1..27: mol_type = other DNA
cgaaactactttcttgattcaggtgtt

SEQ ID NO: 18880 - DNA, 32 bp, synthetic construct
  misc_feature 1..32: note = Probe
  source 1..32: mol_type = other DNA
cgaaaggtccccggttcgaaaccgggcggaaa

SEQ ID NO: 18881 - DNA, 37 bp, synthetic construct; identical to SEQ ID NO: 4922
  misc_feature 1..37: note = Probe
  source 1..37: mol_type = other DNA

SEQ ID NO: 18882 - DNA, 34 bp, synthetic construct
  misc_feature 1..34: note = Probe
  source 1..34: mol_type = other DNA
cgaaaggttggtggttcgagcccacccagggacg

SEQ ID NO: 18883 - DNA, 36 bp, synthetic construct
  misc_feature 1..36: note = Probe
  source 1..36: mol_type = other DNA
cgaaaggttggtggttcgagcccacccagggacgcc

SEQ ID NO: 18884 - DNA, 37 bp, synthetic construct; identical to SEQ ID NO: 4923
  misc_feature 1..37: note = Probe
  source 1..37: mol_type = other DNA

SEQ ID NO: 18885 - DNA, 29 bp, synthetic construct
  misc_feature 1..29: note = Probe
  source 1..29: mol_type = other DNA
cgaaccccactcctggtagctttaggttt

SEQ ID NO: 18886 - DNA, 30 bp, synthetic construct
  misc_feature 1..30: note = Probe
  source 1..30: mol_type = other DNA
cgaaccccactcctggtagctttaggtttt

SEQ ID NO: 18887 - DNA, 21 bp, synthetic construct
  misc_feature 1..21: note = Probe
  source 1..21: mol_type = other DNA
cgaaccccgtccgtgcctgat

SEQ ID NO: 18888 - DNA, 28 bp, synthetic construct
  misc_feature 1..28: note = Probe
  source 1..28: mol_type = other DNA
cgaacctcagagggggcagctgccattt

SEQ ID NO: 18889 - DNA, 29 bp, synthetic construct
  misc_feature 1..29: note = Probe
  source 1..29: mol_type = other DNA
cgaacctcagagggggcagctgccatttt

SEQ ID NO: 18890 - DNA, 27 bp, synthetic construct
  misc_feature 1..27: note = Probe
  source 1..27: mol_type = other DNA
cgaagaagcagcttcaaacctgccggg

SEQ ID NO: 18891 - DNA, 28 bp, synthetic construct
  misc_feature 1..28: note = Probe
  source 1..28: mol_type = other DNA
cgaagaagcagcttcaaacctgccgggg

SEQ ID NO: 18892 - DNA, 29 bp, synthetic construct
  misc_feature 1..29: note = Probe
  source 1..29: mol_type = other DNA
cgaagaagcagcttcaaacctgccggggc

SEQ ID NO: 18893 - DNA, 30 bp, synthetic construct; identical to SEQ ID NO: 4930
  misc_feature 1..30: note = Probe
  source 1..30: mol_type = other DNA

SEQ ID NO: 18894 - DNA, 31 bp, synthetic construct; identical to SEQ ID NO: 4931
  misc_feature 1..31: note = Probe
  source 1..31: mol_type = other DNA

SEQ ID NO: 18895 - DNA, 32 bp, synthetic construct; identical to SEQ ID NO: 4932
  misc_feature 1..32: note = Probe
  source 1..32: mol_type = other DNA

SEQ ID NO: 18896 - DNA, 33 bp, synthetic construct; identical to SEQ ID NO: 4933
  misc_feature 1..33: note = Probe
  source 1..33: mol_type = other DNA

SEQ ID NO: 18897 - DNA, 34 bp, synthetic construct; identical to SEQ ID NO: 4934
  misc_feature 1..34: note = Probe
  source 1..34: mol_type = other DNA

SEQ ID NO: 18898 - DNA, 36 bp, synthetic construct; identical to SEQ ID NO: 4936
  misc_feature 1..36: note = Probe
  source 1..36: mol_type = other DNA

SEQ ID NO: 18899 - DNA, 38 bp, synthetic construct
  misc_feature 1..38: note = Probe
  source 1..38: mol_type = other DNA
cgaagaagcagcttcaaacctgccggggcttctcccgc

SEQ ID NO: 18900 - DNA, 20 bp, synthetic construct
  misc_feature 1..20: note = Probe
  source 1..20: mol_type = other DNA
cgaatcacgtcggggtcaaa

SEQ ID NO: 18901 - DNA, 24 bp, synthetic construct
  misc_feature 1..24: note = Probe
  source 1..24: mol_type = other DNA
cgaatcacgtcggggtcaaacttt

SEQ ID NO: 18902 - DNA, 21 bp, synthetic construct
  misc_feature 1..21: note = Probe
  source 1..21: mol_type = other DNA
cgaatcccaccgctgccacac

SEQ ID NO: 18903 - DNA, 32 bp, synthetic construct
  misc_feature 1..32: note = Probe
  source 1..32: mol_type = other DNA
cgaatcccaccgctgccagggttgctgtcttt

SEQ ID NO: 18904 - DNA, 33 bp, synthetic construct
  misc_feature 1..33: note = Probe
  source 1..33: mol_type = other DNA
cgaatcccaccgctgccagggttgctgtctttt

SEQ ID NO: 18905 - DNA, 21 bp, synthetic construct
  misc_feature 1..21: note = Probe
  source 1..21: mol_type = other DNA
cgaatcccaccgctgccaggt

SEQ ID NO: 18906 - DNA, 31 bp, synthetic construct
  misc_feature 1..31: note = Probe
  source 1..31: mol_type = other DNA
cgaatcccaccgctgccaggtgcttcccttt

SEQ ID NO: 18907 - DNA, 29 bp, synthetic construct
  misc_feature 1..29: note = Probe
  source 1..29: mol_type = other DNA
cgaatcccactcctgacagttcgtacttt

SEQ ID NO: 18908 - DNA, 21 bp, synthetic construct
  misc_feature 1..21: note = Probe
  source 1..21: mol_type = other DNA
cgaatcccacttctgacacaa

SEQ ID NO: 18909 - DNA, 26 bp, synthetic construct
  misc_feature 1..26: note = Probe
  source 1..26: mol_type = other DNA
cgaatcccacttctgacacatacttt

SEQ ID NO: 18910 - DNA, 27 bp, synthetic construct
  misc_feature 1..27: note = Probe
  source 1..27: mol_type = other DNA
cgaatcccacttctgacacatactttt

SEQ ID NO: 18911 - DNA, 27 bp, synthetic construct
  misc_feature 1..27: note = Probe
  source 1..27: mol_type = other DNA
cgaatcccacttctgacacattcgttt

SEQ ID NO: 18912 - DNA, 33 bp, synthetic construct
  misc_feature 1..33: note = Probe
  source 1..33: mol_type = other DNA
cgaatcccacttctgacagagctcaattacttt

SEQ ID NO: 18913 - DNA, 20 bp, synthetic construct
  misc_feature 1..20: note = Probe
  source 1..20: mol_type = other DNA
cgaatcccagcggggcctgt

SEQ ID NO: 18914 - DNA, 28 bp, synthetic construct
  misc_feature 1..28: note = Probe
  source 1..28: mol_type = other DNA
cgaatcccagcggggcctgttgtagttt

SEQ ID NO: 18915 - DNA, 21 bp, synthetic construct
  misc_feature 1..21: note = Probe
  source 1..21: mol_type = other DNA
cgaatcccagcggtgcctccg

SEQ ID NO: 18916 - DNA, 27 bp, synthetic construct
  misc_feature 1..27: note = Probe
  source 1..27: mol_type = other DNA
cgaatcccatcctcgtcggccctgttt

SEQ ID NO: 18917 - DNA, 21 bp, synthetic construct
  misc_feature 1..21: note = Probe
  source 1..21: mol_type = other DNA
cgaatcctgccgactacggca

SEQ ID NO: 18918 - DNA, 33 bp, synthetic construct
  misc_feature 1..33: note = Probe
  source 1..33: mol_type = other DNA
cgaatcctgccgactacgggaatgtcagctttt

SEQ ID NO: 18919 - DNA, 21 bp, synthetic construct
  misc_feature 1..21: note = Probe
  source 1..21: mol_type = other DNA
cgaatcctgccgactacgtca

SEQ ID NO: 18920 - DNA, 28 bp, synthetic construct
  misc_feature 1..28: note = Probe
  source 1..28: mol_type = other DNA
cgaatcctgctcacagcgtcactagttt

SEQ ID NO: 18921 - DNA, 16 bp, synthetic construct
  misc_feature 1..16: note = Probe
  source 1..16: mol_type = other DNA
cgaccccttatttacc

SEQ ID NO: 18922 - DNA, 17 bp, synthetic construct
  misc_feature 1..17: note = Probe
  source 1..17: mol_type = other DNA
cgaccccttatttaccg

SEQ ID NO: 18923 - DNA, 32 bp, synthetic construct
  misc_feature 1..32: note = Probe
  source 1..32: mol_type = other DNA
cgacccgggttcgattcccgggcggcgcactt

SEQ ID NO: 18924 - DNA, 26 bp, synthetic construct
  misc_feature 1..26: note = Probe
  source 1..26: mol_type = other DNA
cgactcattaaattatgataatcata

SEQ ID NO: 18925 - DNA, 32 bp, synthetic construct; identical to SEQ ID NO: 4942
  misc_feature 1..32: note = Probe
  source 1..32: mol_type = other DNA

SEQ ID NO: 18926 - DNA, 35 bp, synthetic construct; identical to SEQ ID NO: 4943
  misc_feature 1..35: note = Probe
  source 1..35: mol_type = other DNA

SEQ ID NO: 18927 - DNA, 37 bp, synthetic construct; identical to SEQ ID NO: 4944
  misc_feature 1..37: note = Probe
  source 1..37: mol_type = other DNA

SEQ ID NO: 18928 - DNA, 21 bp, synthetic construct
  misc_feature 1..21: note = Probe
  source 1..21: mol_type = other DNA
cgactcccggtatgggaacaa

SEQ ID NO: 18929 - DNA, 27 bp, synthetic construct
  misc_feature 1..27: note = Probe
  source 1..27: mol_type = other DNA
cgactcccggtatgggaacgcttcctt

SEQ ID NO: 18930 - DNA, 28 bp, synthetic construct
  misc_feature 1..28: note = Probe
  source 1..28: mol_type = other DNA
cgactcccggtatgggaacgcttcctta

SEQ ID NO: 18931 - DNA, 29 bp, synthetic construct
  misc_feature 1..29: note = Probe
  source 1..29: mol_type = other DNA
cgactcccggtatgggaacgcttccttat

SEQ ID NO: 18932 - DNA, 30 bp, synthetic construct
  misc_feature 1..30: note = Probe
  source 1..30: mol_type = other DNA
cgactcccggtatgggaacgcttccttatt

SEQ ID NO: 18933 - DNA, 31 bp, synthetic construct
  misc_feature 1..31: note = Probe
  source 1..31: mol_type = other DNA
cgactcccggtatgggaacgcttccttattt

SEQ ID NO: 18934 - DNA, 20 bp, synthetic construct
  misc_feature 1..20: note = Probe
  source 1..20: mol_type = other DNA
cgactcccggtgtgggaacg

SEQ ID NO: 18935 - DNA, 21 bp, synthetic construct
  misc_feature 1..21: note = Probe
  source 1..21: mol_type = other DNA
cgactcccggtgtgggaacgc

SEQ ID NO: 18936 - DNA, 30 bp, synthetic construct
  misc_feature 1..30: note = Probe
  source 1..30: mol_type = other DNA
cgactcccggtgtgggaacgccgaaatttt

SEQ ID NO: 18937 - DNA, 28 bp, synthetic construct
  misc_feature 1..28: note = Probe
  source 1..28: mol_type = other DNA
cgactcccggtgtgggaatgactggacc

SEQ ID NO: 18938 - DNA, 30 bp, synthetic construct
  misc_feature 1..30: note = Probe
  source 1..30: mol_type = other DNA
cgactcctggctggctcgcgatgtctgttt

SEQ ID NO: 18939 - DNA, 30 bp, synthetic construct
  misc_feature 1..30: note = Probe
  source 1..30: mol_type = other DNA
cgagaggtcccgggttcaaatcccggacga

SEQ ID NO: 18940 - DNA, 31 bp, synthetic construct
  misc_feature 1..31: note = Probe
  source 1..31: mol_type = other DNA
cgagaggtcccgggttcaaatcccggacgag

SEQ ID NO: 18941 - DNA, 32 bp, synthetic construct
  misc_feature 1..32: note = Probe
  source 1..32: mol_type = other DNA
cgagaggtcccgggttcaaatcccggacgagc

SEQ ID NO: 18942 - DNA, 34 bp, synthetic construct
  misc_feature 1..34: note = Probe
  source 1..34: mol_type = other DNA
cgagaggtcccgggttcaaatcccggacgagccc

SEQ ID NO: 18943 - DNA, 36 bp, synthetic construct
  misc_feature 1..36: note = Probe
  source 1..36: mol_type = other DNA
cgagaggtcccgggttcaaatcccggacgagccccc

SEQ ID NO: 18944 - DNA, 37 bp, synthetic construct
  misc_feature 1..37: note = Probe
  source 1..37: mol_type = other DNA
cgagaggtcccgggttcaaatcccggacgagccccct

SEQ ID NO: 18945 - DNA, 37 bp, synthetic construct
  misc_feature 1..37: note = Probe
  source 1..37: mol_type = other DNA
cgagaggtcccgggttcaaatcccggacgagcccggt

SEQ ID NO: 18946 - DNA, 16 bp, synthetic construct
  misc_feature 1..16: note = Probe
  source 1..16: mol_type = other DNA
cgagcccacccaggga

SEQ ID NO: 18947 - DNA, 19 bp, synthetic construct
  misc_feature 1..19: note = Probe
  source 1..19: mol_type = other DNA
cgagcccacccagggacgc

SEQ ID NO: 18948 - DNA, 20 bp, synthetic construct
  misc_feature 1..20: note = Probe
  source 1..20: mol_type = other DNA
cgagcccacccagggacgcc

SEQ ID NO: 18949 - DNA, 21 bp, synthetic construct
  misc_feature 1..21: note = Probe
  source 1..21: mol_type = other DNA
cgagcccacccagggacgcct

SEQ ID NO: 18950 - DNA, 20 bp, synthetic construct
  misc_feature 1..20: note = Probe
  source 1..20: mol_type = other DNA
cgagcccacccagggacgcg

SEQ ID NO: 18951 - DNA, 31 bp, synthetic construct
  misc_feature 1..31: note = Probe
  source 1..31: mol_type = other DNA
cgagcccacccagggacgcgtggtgactttt

SEQ ID NO: 18952 - DNA, 20 bp, synthetic construct
  misc_feature 1..20: note = Probe
  source 1..20: mol_type = other DNA
cgagcccacccagggacgct

SEQ ID NO: 18953 - DNA, 20 bp, synthetic construct
  misc_feature 1..20: note = Probe
  source 1..20: mol_type = other DNA
cgagcccacccagggacggt

SEQ ID NO: 18954 - DNA, 32 bp, synthetic construct
  misc_feature 1..32: note = Probe
  source 1..32: mol_type = other DNA
cgagcccacccagggacggtcagtgcttcttt

SEQ ID NO: 18955 - DNA, 33 bp, synthetic construct
  misc_feature 1..33: note = Probe
  source 1..33: mol_type = other DNA
cgagcccacccagggacggtcagtgcttctttt

SEQ ID NO: 18956 - DNA, 26 bp, synthetic construct
  misc_feature 1..26: note = Probe
  source 1..26: mol_type = other DNA
cgagccccacgttgggcgctgtgttt

SEQ ID NO: 18957 - DNA, 27 bp, synthetic construct
  misc_feature 1..27: note = Probe
  source 1..27: mol_type = other DNA
cgagccccacgttgggcgctgtgtttt

SEQ ID NO: 18958 - DNA, 27 bp, synthetic construct
  misc_feature 1..27: note = Probe
  source 1..27: mol_type = other DNA
cgagccccacgttgggcgggtttgttt

SEQ ID NO: 18959 - DNA, 20 bp, synthetic construct
  misc_feature 1..20: note = Probe
  source 1..20: mol_type = other DNA
cgagccccagtggaaccacg

SEQ ID NO: 18960 - DNA, 29 bp, synthetic construct
  misc_feature 1..29: note = Probe
  source 1..29: mol_type = other DNA
cgagcctcacacggggcagtctaacgttt

SEQ ID NO: 18961 - DNA, 30 bp, synthetic construct
  misc_feature 1..30: note = Probe
  source 1..30: mol_type = other DNA
cgagcctcacacggggcagtctaacgtttt

SEQ ID NO: 18962 - DNA, 20 bp, synthetic construct
  misc_feature 1..20: note = Probe
  source 1..20: mol_type = other DNA
cgagcctcacctggagcaag

SEQ ID NO: 18963 - DNA, 27 bp, synthetic construct
  misc_feature 1..27: note = Probe
  source 1..27: mol_type = other DNA
cgagcctcacctggagcaagacccttt

SEQ ID NO: 18964 - DNA, 28 bp, synthetic construct
  misc_feature 1..28: note = Probe
  source 1..28: mol_type = other DNA
cgagcctcacctggagcaagaccctttt

SEQ ID NO: 18965 - DNA, 30 bp, synthetic construct
  misc_feature 1..30: note = Probe
  source 1..30: mol_type = other DNA
cgagctagctcagtcggtagagcatgggac

SEQ ID NO: 18966 - DNA, 31 bp, synthetic construct
  misc_feature 1..31: note = Probe
  source 1..31: mol_type = other DNA
cgagctagctcagtcggtagagcatgggact

SEQ ID NO: 18967 - DNA, 32 bp, synthetic construct
  misc_feature 1..32: note = Probe
  source 1..32: mol_type = other DNA
cgagctagctcagtcggtagagcatgggactc

SEQ ID NO: 18968 - DNA, 28 bp, synthetic construct
  misc_feature 1..28: note = Probe
  source 1..28: mol_type = other DNA
cgaggccccgggttcaatccccggcacc

SEQ ID NO: 18969 - DNA, 29 bp, synthetic construct
  misc_feature 1..29: note = Probe
  source 1..29: mol_type = other DNA
cgaggccccgggttcaatccccggcacct

SEQ ID NO: 18970 - DNA, 24 bp, synthetic construct
  misc_feature 1..24: note = Probe
  source 1..24: mol_type = other DNA
cgaggtagggctttggctgtgggg

SEQ ID NO: 18971 - DNA, 35 bp, synthetic construct
  misc_feature 1..35: note = Probe
  source 1..35: mol_type = other DNA
cgaggttgtgagttcgagcctcacctggagcattg

SEQ ID NO: 18972 - DNA, 30 bp, synthetic construct
  misc_feature 1..30: note = Probe
  source 1..30: mol_type = other DNA
cgagtcccatctggggtggcctgtgacttt

SEQ ID NO: 18973 - DNA, 20 bp, synthetic construct
  misc_feature 1..20: note = Probe
  source 1..20: mol_type = other DNA
cgagtcccatctgggtcgcg

SEQ ID NO: 18974 - DNA, 20 bp, synthetic construct
  misc_feature 1..20: note = Probe
  source 1..20: mol_type = other DNA
cgagtcccggcggagtcgta

SEQ ID NO: 18975 - DNA, 27 bp, synthetic construct
  misc_feature 1..27: note = Probe
  source 1..27: mol_type = other DNA
cgagtcccggcggagtcgtaacgcttt

SEQ ID NO: 18976 - DNA, 28 bp, synthetic construct
  misc_feature 1..28: note = Probe
  source 1..28: mol_type = other DNA
cgagtcccggcggagtcgtaacgctttt

SEQ ID NO: 18977 - DNA, 20 bp, synthetic construct
  misc_feature 1..20: note = Probe
  source 1..20: mol_type = other DNA
cgagtcccttcgtggtcgtc

SEQ ID NO: 18978 - DNA, 24 bp, synthetic construct
  misc_feature 1..24: note = Probe
  source 1..24: mol_type = other DNA
cgagtcccttcgtggtcgtcgttt

SEQ ID NO: 18979 - DNA, 20 bp, synthetic construct
  misc_feature 1..20: note = Probe
  source 1..20: mol_type = other DNA
cgagtcctgccgcggtcgaa

SEQ ID NO: 18980 - DNA, 20 bp, synthetic construct
  misc_feature 1..20: note = Probe
  source 1..20: mol_type = other DNA
cgatcccacccagggacgga

SEQ ID NO: 18981 - DNA, 25 bp, synthetic construct
  misc_feature 1..25: note = Probe
  source 1..25: mol_type = other DNA
cgatccccagcatctccagtgtttt

SEQ ID NO: 18982 - DNA, 21 bp, synthetic construct
  misc_feature 1..21: note = Probe
  source 1..21: mol_type = other DNA
cgatccccagtacctccaggc

SEQ ID NO: 18983 - DNA, 28 bp, synthetic construct
  misc_feature 1..28: note = Probe
  source 1..28: mol_type = other DNA
cgatccccagtacctccaggccgtgttt

SEQ ID NO: 18984 - DNA, 19 bp, synthetic construct
  misc_feature 1..19: note = Probe
  source 1..19: mol_type = other DNA
cgatccccggcatctccaa

SEQ ID NO: 18985 - DNA, 19 bp, synthetic construct
  misc_feature 1..19: note = Probe
  source 1..19: mol_type = other DNA
cgatccccggcatctccag

SEQ ID NO: 18986 - DNA, 20 bp, synthetic construct
  misc_feature 1..20: note = Probe
  source 1..20: mol_type = other DNA
cgatccccggcatctccagt

SEQ ID NO: 18987 - DNA, 27 bp, synthetic construct
  misc_feature 1..27: note = Probe
  source 1..27: mol_type = other DNA
cgatccccggcatctccagtgtagttt

SEQ ID NO: 18988 - DNA, 19 bp, synthetic construct
  misc_feature 1..19: note = Probe
  source 1..19: mol_type = other DNA
cgatccccggcatctccat

SEQ ID NO: 18989 - DNA, 20 bp, synthetic construct
  misc_feature 1..20: note = Probe
  source 1..20: mol_type = other DNA
cgatccccggcatctccatt

SEQ ID NO: 18990 - DNA, 21 bp, synthetic construct
  misc_feature 1..21: note = Probe
  source 1..21: mol_type = other DNA
cgatccccggcatctccattg

SEQ ID NO: 18991 - DNA, 21 bp, synthetic construct
  misc_feature 1..21: note = Probe
  source 1..21: mol_type = other DNA
cgatcccgggcggaaacaggt

SEQ ID NO: 18992 - DNA, 21 bp, synthetic construct
  misc_feature 1..21: note = Probe
  source 1..21: mol_type = other DNA
cgatcctcacacggggcacaa

SEQ ID NO: 18993 - DNA, 27 bp, synthetic construct
  misc_feature 1..27: note = Probe
  source 1..27: mol_type = other DNA
cgatcctcacacggggcacaataattt

SEQ ID NO: 18994 - DNA, 20 bp, synthetic construct
  misc_feature 1..20: note = Probe
  source 1..20: mol_type = other DNA
cgatcctcacctggagcact

SEQ ID NO: 18995 - DNA, 23 bp, synthetic construct
  misc_feature 1..23: note = Probe
  source 1..23: mol_type = other DNA
cgatcctcacctggagcactttt

SEQ ID NO: 18996 - DNA, 20 bp, synthetic construct
  misc_feature 1..20: note = Probe
  source 1..20: mol_type = other DNA
cgatgcccgcatcctccact

SEQ ID NO: 18997 - DNA, 21 bp, synthetic construct
  misc_feature 1..21: note = Probe
  source 1..21: mol_type = other DNA
cgatgcccgcatcctccactc

SEQ ID NO: 18998 - DNA, 20 bp, synthetic construct
  misc_feature 1..20: note = Probe
  source 1..20: mol_type = other DNA
cgatgcccgcatcctccagt

SEQ ID NO: 18999 - DNA, 19 bp, synthetic construct
  misc_feature 1..19: note = Probe
  source 1..19: mol_type = other DNA
cgattccccgacggggaga

SEQ ID NO: 19000 - DNA, 20 bp, synthetic construct
  misc_feature 1..20: note = Probe
  source 1..20: mol_type = other DNA
cgattccccgacggggagac

SEQ ID NO: 19001 - DNA, 19 bp, synthetic construct
  misc_feature 1..19: note = Probe
  source 1..19: mol_type = other DNA
cgattccccgacggggagg

SEQ ID NO: 19002 - DNA, 20 bp, synthetic construct
  misc_feature 1..20: note = Probe
  source 1..20: mol_type = other DNA
cgattccccgacggggaggc

SEQ ID NO: 19003 - DNA, 21 bp, synthetic construct
  misc_feature 1..21: note = Probe
  source 1..21: mol_type = other DNA
cgattccccgacggggaggca

SEQ ID NO: 19004 - DNA, 30 bp, synthetic construct
  misc_feature 1..30: note = Probe
  source 1..30: mol_type = other DNA
cgattccccgacggggaggcacagtaattg

SEQ ID NO: 19005 - DNA, 33 bp, synthetic construct
  misc_feature 1..33: note = Probe
  source 1..33: mol_type = other DNA
cgattccccgacggggaggcacagtaattgttt

SEQ ID NO: 19006 - DNA, 21 bp, synthetic construct
  misc_feature 1..21: note = Probe
  source 1..21: mol_type = other DNA
cgattccccgacggggaggcc

SEQ ID NO: 19007 - DNA, 21 bp, synthetic construct
  misc_feature 1..21: note = Probe
  source 1..21: mol_type = other DNA
cgattcccggccaacgcaagt

SEQ ID NO: 19008 - DNA, 21 bp, synthetic construct
  misc_feature 1..21: note = Probe
  source 1..21: mol_type = other DNA
cgattcccggccaacgcagtg

SEQ ID NO: 19009 - DNA, 23 bp, synthetic construct
  misc_feature 1..23: note = Probe
  source 1..23: mol_type = other DNA
cgattcccggccaacgcagtgtc

SEQ ID NO: 19010 - DNA, 23 bp, synthetic construct
  misc_feature 1..23: note = Probe
  source 1..23: mol_type = other DNA
cgattcccggccaatgcaagttt

SEQ ID NO: 19011 - DNA, 21 bp, synthetic construct
  misc_feature 1..21: note = Probe
  source 1..21: mol_type = other DNA
cgattcccggccaatgcacga

SEQ ID NO: 19012 - DNA, 21 bp, synthetic construct
  misc_feature 1..21: note = Probe
  source 1..21: mol_type = other DNA
cgattcccggccaatgcagca

SEQ ID NO: 19013 - DNA, 21 bp, synthetic construct
  misc_feature 1..21: note = Probe
  source 1..21: mol_type = other DNA
cgattcccggcccatgcagca

SEQ ID NO: 19014 - DNA, 21 bp, synthetic construct
  misc_feature 1..21: note = Probe
  source 1..21: mol_type = other DNA
cgattcccgggcggcgcactt

SEQ ID NO: 19015 - DNA, 20 bp, synthetic construct
  misc_feature 1..20: note = Probe
  source 1..20: mol_type = other DNA
cgattcccgggcggcgcata

SEQ ID NO: 19016 - DNA, 21 bp, synthetic construct
  misc_feature 1..21: note = Probe
  source 1..21: mol_type = other DNA
cgattcccggtcagggaacaa

SEQ ID NO: 19017 - DNA, 20 bp, synthetic construct
  misc_feature 1..20: note = Probe
  source 1..20: mol_type = other DNA
cgattcccggtcagggaagt

SEQ ID NO: 19018 - DNA, 27 bp, synthetic construct
  misc_feature 1..27: note = Probe
  source 1..27: mol_type = other DNA
cgattcccggtcagggaagtcttgttt

SEQ ID NO: 19019 - DNA, 21 bp, synthetic construct
  misc_feature 1..21: note = Probe
  source 1..21: mol_type = other DNA
cgattcccggtcatggaacca

SEQ ID NO: 19020 - DNA, 21 bp, synthetic construct
  misc_feature 1..21: note = Probe
  source 1..21: mol_type = other DNA
cgattccggctcgaaggactt

SEQ ID NO: 19021 - DNA, 33 bp, synthetic construct
  misc_feature 1..33: note = Probe
  source 1..33: mol_type = other DNA
cgattccggctcgaaggacttcgtctgtaattt

SEQ ID NO: 19022 - DNA, 21 bp, synthetic construct
  misc_feature 1..21: note = Probe
  source 1..21: mol_type = other DNA
cgattcctggtcagggaacca

SEQ ID NO: 19023 - DNA, 20 bp, synthetic construct
  misc_feature 1..20: note = Probe
  source 1..20: mol_type = other DNA
cgattccttccttttttgtc

SEQ ID NO: 19024 - DNA, 20 bp, synthetic construct
  misc_feature 1..20: note = Probe
  source 1..20: mol_type = other DNA
cgattctcatagtcctagaa

SEQ ID NO: 19025 - DNA, 21 bp, synthetic construct
  misc_feature 1..21: note = Probe
  source 1..21: mol_type = other DNA
cgattctcatagtcctagaaa

SEQ ID NO: 19026 - DNA, 39 bp, synthetic construct
  misc_feature 1..39: note = Probe
  source 1..39: mol_type = other DNA
cgcagaaggtcctgggttcaagccccagtggaaccatgg

SEQ ID NO: 19027 - DNA, 38 bp, synthetic construct; identical to SEQ ID NO: 4966
  misc_feature 1..38: note = Probe
  source 1..38: mol_type = other DNA

SEQ ID NO: 19028 - DNA, 39 bp, synthetic construct; identical to SEQ ID NO: 4967
  misc_feature 1..39: note = Probe
  source 1..39: mol_type = other DNA

SEQ ID NO: 19029 - DNA, 39 bp, synthetic construct; identical to SEQ ID NO: 4968
  misc_feature 1..39: note = Probe
  source 1..39: mol_type = other DNA

SEQ ID NO: 19030 - DNA, 31 bp, synthetic construct
  misc_feature 1..31: note = Probe
  source 1..31: mol_type = other DNA
cgcagcaacctcggttcgaatccgagtcacg

SEQ ID NO: 19031 - DNA, 32 bp, synthetic construct; identical to SEQ ID NO: 4969
  misc_feature 1..32: note = Probe
  source 1..32: mol_type = other DNA

SEQ ID NO: 19032 - DNA, 36 bp, synthetic construct
  misc_feature 1..36: note = Probe
  source 1..36: mol_type = other DNA
cgcagcaacctcggttcgaatccgagtcacggcaaa

SEQ ID NO: 19033 - DNA, 36 bp, synthetic construct
  misc_feature 1..36: note = Probe
  source 1..36: mol_type = other DNA
cgcagcaacctcggttcgaatccgagtcacggcagg

SEQ ID NO: 19034 - DNA, 37 bp, synthetic construct; identical to SEQ ID NO: 4972
  misc_feature 1..37: note = Probe
  source 1..37: mol_type = other DNA

SEQ ID NO: 19035 - DNA, 36 bp, synthetic construct
  misc_feature 1..36: note = Probe
  source 1..36: mol_type = other DNA
cgcagcaacctcggttcgaatccgagtcacggcatt

SEQ ID NO: 19036 - DNA, 37 bp, synthetic construct; identical to SEQ ID NO: 4973
  misc_feature 1..37: note = Probe
  source 1..37: mol_type = other DNA

SEQ ID NO: 19037 - DNA, 23 bp, synthetic construct
  misc_feature 1..23: note = Probe
  source 1..23: mol_type = other DNA
cgcataaaacttaaaactttaca

SEQ ID NO: 19038 - DNA, 29 bp, synthetic construct
  misc_feature 1..29: note = Probe
  source 1..29: mol_type = other DNA
cgcataaaacttaaaactttacagtcaga

SEQ ID NO: 19039 - DNA, 46 bp, synthetic construct; identical to SEQ ID NO: 4979
  misc_feature 1..46: note = Probe
  source 1..46: mol_type = other DNA

SEQ ID NO: 19040 - DNA, 50 bp, synthetic construct; identical to SEQ ID NO: 4981
  misc_feature 1..50: note = Probe
  source 1..50: mol_type = other DNA

SEQ ID NO: 19041 - DNA, 32 bp, synthetic construct
  misc_feature 1..32: note = Probe
  source 1..32: mol_type = other DNA
cgccaaggtcgcgggttcgatccccgtacggg

SEQ ID NO: 19042 - DNA, 33 bp, synthetic construct
  misc_feature 1..33: note = Probe
  source 1..33: mol_type = other DNA
cgccaaggtcgcgggttcgatccccgtacgggc

SEQ ID NO: 19043 - DNA, 38 bp, synthetic construct
  misc_feature 1..38: note = Probe
  source 1..38: mol_type = other DNA
cgccaaggtcgcgggttcgatccccgtacgggccaact

SEQ ID NO: 19044 - DNA, 38 bp, synthetic construct
  misc_feature 1..38: note = Probe
  source 1..38: mol_type = other DNA
cgccaaggtcgcgggttcgatccccgtacgggccacag

SEQ ID NO: 19045 - DNA, 38 bp, synthetic construct
  misc_feature 1..38: note = Probe
  source 1..38: mol_type = other DNA
cgccaaggtcgcgggttcgatccccgtacgggccacga

SEQ ID NO: 19046 - DNA, 38 bp, synthetic construct
  misc_feature 1..38: note = Probe
  source 1..38: mol_type = other DNA
cgccaaggtcgcgggttcgatccccgtacgggccactg

SEQ ID NO: 19047 - DNA, 38 bp, synthetic construct
  misc_feature 1..38: note = Probe
  source 1..38: mol_type = other DNA
cgccaaggtcgcgggttcgatccccgtacgggccactt

SEQ ID NO: 19048 - DNA, 38 bp, synthetic construct
  misc_feature 1..38: note = Probe
  source 1..38: mol_type = other DNA
cgccaaggtcgcgggttcgatccccgtacgggccagga

SEQ ID NO: 19049 - DNA, 38 bp, synthetic construct
  misc_feature 1..38: note = Probe
  source 1..38: mol_type = other DNA
cgccaaggtcgcgggttcgatccccgtacgggccaggc

SEQ ID NO: 19050 - DNA, 38 bp, synthetic construct
  misc_feature 1..38: note = Probe
  source 1..38: mol_type = other DNA
cgccaaggtcgcgggttcgatccccgtactggccacgt

SEQ ID NO: 19051 - DNA, 20 bp, synthetic construct
  misc_feature 1..20: note = Probe
  source 1..20: mol_type = other DNA
cgccagactcaaggtaagca

SEQ ID NO: 19052 - DNA, 27 bp, synthetic construct
  misc_feature 1..27: note = Probe
  source 1..27: mol_type = other DNA
cgcccggatagctcagtcggtagagca

SEQ ID NO: 19053 - DNA, 32 bp, synthetic construct
  misc_feature 1..32: note = Probe
  source 1..32: mol_type = other DNA
cgcccggatagctcagtcggtagagcatcaga

SEQ ID NO: 19054 - DNA, 33 bp, synthetic construct; identical to SEQ ID NO: 719
  misc_feature 1..33: note = Probe
  source 1..33: mol_type = other DNA

SEQ ID NO: 19055 - DNA, 34 bp, synthetic construct; identical to SEQ ID NO: 720
  misc_feature 1..34: note = Probe
  source 1..34: mol_type = other DNA

SEQ ID NO: 19056 - DNA, 35 bp, synthetic construct
  misc_feature 1..35: note = Probe
  source 1..35: mol_type = other DNA
cgcccggatagctcagtcggtagagcatcagactt

SEQ ID NO: 19057 - DNA, 36 bp, synthetic construct
  misc_feature 1..36: note = Probe
  source 1..36: mol_type = other DNA
cgcccggatagctcagtcggtagagcatcagacttt

SEQ ID NO: 19058 - DNA, 37 bp, synthetic construct
  misc_feature 1..37: note = Probe
  source 1..37: mol_type = other DNA
cgcccggatagctcagtcggtagagcatcagactttt

SEQ ID NO: 19059 - DNA, 34 bp, synthetic construct; identical to SEQ ID NO: 721
  misc_feature 1..34: note = Probe
  source 1..34: mol_type = other DNA

SEQ ID NO: 19060 - DNA, 37 bp, synthetic construct
  misc_feature 1..37: note = Probe
  source 1..37: mol_type = other DNA
cgccgcagcccgggttcgattcccggtcatggaacca

SEQ ID NO: 19061 - DNA, 31 bp, synthetic construct
  misc_feature 1..31: note = Probe
  source 1..31: mol_type = other DNA
cgccgcggcccgggttcgattcccggtcagg

SEQ ID NO: 19062 - DNA, 34 bp, synthetic construct
  misc_feature 1..34: note = Probe
  source 1..34: mol_type = other DNA
cgccgcggcccgggttcgattcccggtcagggaa

SEQ ID NO: 19063 - DNA, 35 bp, synthetic construct; identical to SEQ ID NO: 4985
  misc_feature 1..35: note = Probe
  source 1..35: mol_type = other DNA

SEQ ID NO: 19064 - DNA, 35 bp, synthetic construct; identical to SEQ ID NO: 4986
  misc_feature 1..35: note = Probe
  source 1..35: mol_type = other DNA

SEQ ID NO: 19065 - DNA, 37 bp, synthetic construct; identical to SEQ ID NO: 4987
  misc_feature 1..37: note = Probe
  source 1..37: mol_type = other DNA

SEQ ID NO: 19066 - DNA, 37 bp, synthetic construct; identical to SEQ ID NO: 4988
  misc_feature 1..37: note = Probe
  source 1..37: mol_type = other DNA

SEQ ID NO: 19067 - DNA, 35 bp, synthetic construct; identical to SEQ ID NO: 4989
  misc_feature 1..35: note = Probe
  source 1..35: mol_type = other DNA

SEQ ID NO: 19068 - DNA, 37 bp, synthetic construct; identical to SEQ ID NO: 4990
  misc_feature 1..37: note = Probe
  source 1..37: mol_type = other DNA

SEQ ID NO: 19069 - DNA, 25 bp, synthetic construct
  misc_feature 1..25: note = Probe
  source 1..25: mol_type = other DNA
cgccgctggtgtagtggtatcatgc

SEQ ID NO: 19070 - DNA, 26 bp, synthetic construct
  misc_feature 1..26: note = Probe
  source 1..26: mol_type = other DNA
cgccgctggtgtagtggtatcatgca

SEQ ID NO: 19071 - DNA, 27 bp, synthetic construct
  misc_feature 1..27: note = Probe
  source 1..27: mol_type = other DNA
cgccgctggtgtagtggtatcatgcaa

SEQ ID NO: 19072 - DNA, 29 bp, synthetic construct
  misc_feature 1..29: note = Probe
  source 1..29: mol_type = other DNA
cgccgctggtgtagtggtatcatgcaaga

SEQ ID NO: 19073 - DNA, 30 bp, synthetic construct
  misc_feature 1..30: note = Probe
  source 1..30: mol_type = other DNA
cgccgctggtgtagtggtatcatgcaagat

SEQ ID NO: 19074 - DNA, 33 bp, synthetic construct; identical to SEQ ID NO: 4993
  misc_feature 1..33: note = Probe
  source 1..33: mol_type = other DNA

SEQ ID NO: 19075 - DNA, 34 bp, synthetic construct; identical to SEQ ID NO: 724
  misc_feature 1..34: note = Probe
  source 1..34: mol_type = other DNA

SEQ ID NO: 19076 - DNA, 50 bp, synthetic construct
  misc_feature 1..50: note = Probe
  source 1..50: mol_type = other DNA
cgccgctggtgtagtggtatcatgcaagattcccattcttgcgacccggg

SEQ ID NO: 19077 - DNA, 31 bp, synthetic construct
  misc_feature 1..31: note = Probe
  source 1..31: mol_type = other DNA
cgccgtgatcgtatagtggttagtactctgc

SEQ ID NO: 19078 - DNA, 32 bp, synthetic construct; identical to SEQ ID NO: 4998
  misc_feature 1..32: note = Probe
  source 1..32: mol_type = other DNA

SEQ ID NO: 19079 - DNA, 33 bp, synthetic construct; identical to SEQ ID NO: 4999
  misc_feature 1..33: note = Probe
  source 1..33: mol_type = other DNA

SEQ ID NO: 19080 - DNA, 34 bp, synthetic construct; identical to SEQ ID NO: 5000
  misc_feature 1..34: note = Probe
  source 1..34: mol_type = other DNA

SEQ ID NO: 19081 - DNA, 35 bp, synthetic construct; identical to SEQ ID NO: 5001
  misc_feature 1..35: note = Probe
  source 1..35: mol_type = other DNA

SEQ ID NO: 19082 - DNA, 36 bp, synthetic construct; identical to SEQ ID NO: 5002
  misc_feature 1..36: note = Probe
  source 1..36: mol_type = other DNA

SEQ ID NO: 19083 - DNA, 37 bp, synthetic construct; identical to SEQ ID NO: 5003
  misc_feature 1..37: note = Probe
  source 1..37: mol_type = other DNA

SEQ ID NO: 19084 - DNA, 38 bp, synthetic construct; identical to SEQ ID NO: 5004
  misc_feature 1..38: note = Probe
  source 1..38: mol_type = other DNA

SEQ ID NO: 19085 - DNA, 39 bp, synthetic construct
  misc_feature 1..39: note = Probe
  source 1..39: mol_type = other DNA
cgccgtgatcgtatagtggttagtactctgcgttgtggc

SEQ ID NO: 19086 - DNA, 40 bp, synthetic construct
  misc_feature 1..40: note = Probe
  source 1..40: mol_type = other DNA
cgccgtgatcgtatagtggttagtactctgcgttgtggcc

SEQ ID NO: 19087 - DNA, 41 bp, synthetic construct
  misc_feature 1..41: note = Probe
  source 1..41: mol_type = other DNA
cgccgtgatcgtatagtggttagtactctgcgttgtggccg

SEQ ID NO: 19088 - DNA, 30 bp, synthetic construct
  misc_feature 1..30: note = Probe
  source 1..30: mol_type = other DNA
cgccgtggcttagttggttaaagcgcctgt

SEQ ID NO: 19089 - DNA, 25 bp, synthetic construct
  misc_feature 1..25: note = Probe
  source 1..25: mol_type = other DNA
cgcctgccacgcgggaggcccgggt

SEQ ID NO: 19090 - DNA, 26 bp, synthetic construct
  misc_feature 1..26: note = Probe
  source 1..26: mol_type = other DNA
cgcctgccacgcgggaggcccgggtt

SEQ ID NO: 19091 - DNA, 50 bp, synthetic construct
  misc_feature 1..50: note = Probe
  source 1..50: mol_type = other DNA
cgcctgccacgcgggaggcccgggttcgattcccggcccatgcagcacgc

SEQ ID NO: 19092 - DNA, 27 bp, synthetic construct
  misc_feature 1..27: note = Probe
  source 1..27: mol_type = other DNA
cgcctgccacgcgggaggcccgggttt

SEQ ID NO: 19093 - DNA, 16 bp, synthetic construct
  misc_feature 1..16: note = Probe
  source 1..16: mol_type = other DNA
cgcctgtcacgcggga

SEQ ID NO: 19094 - DNA, 27 bp, synthetic construct
  misc_feature 1..27: note = Probe
  source 1..27: mol_type = other DNA
cgcctgtcacgcgggagaccggggttc

SEQ ID NO: 19095 - DNA, 28 bp, synthetic construct
  misc_feature 1..28: note = Probe
  source 1..28: mol_type = other DNA
cgcctgtcacgcgggagaccggggttca

SEQ ID NO: 19096 - DNA, 50 bp, synthetic construct; identical to SEQ ID NO: 5005
  misc_feature 1..50: note = Probe
  source 1..50: mol_type = other DNA

SEQ ID NO: 19097 - DNA, 28 bp, synthetic construct
  misc_feature 1..28: note = Probe
  source 1..28: mol_type = other DNA
cgcctgtcacgcgggagaccggggttcg

SEQ ID NO: 19098 - DNA, 29 bp, synthetic construct
  misc_feature 1..29: note = Probe
  source 1..29: mol_type = other DNA
cgcctgtcacgcgggagaccggggttcga

SEQ ID NO: 19099 - DNA, 30 bp, synthetic construct
  misc_feature 1..30: note = Probe
  source 1..30: mol_type = other DNA
cgcctgtcacgcgggagaccggggttcgat

SEQ ID NO: 19100 - DNA, 32 bp, synthetic construct
  misc_feature 1..32: note = Probe
  source 1..32: mol_type = other DNA
cgcctgtcacgcgggagaccggggttcgattc

SEQ ID NO: 19101 - DNA, 38 bp, synthetic construct
  misc_feature 1..38: note = Probe
  source 1..38: mol_type = other DNA
cgcctgtcacgcgggagaccggggttcgattccccgac

SEQ ID NO: 19102 - DNA, 45 bp, synthetic construct
  misc_feature 1..45: note = Probe
  source 1..45: mol_type = other DNA
cgcctgtcacgcgggagaccggggttcgattccccgacggggaga

SEQ ID NO: 19103 - DNA, 46 bp, synthetic construct
  misc_feature 1..46: note = Probe
  source 1..46: mol_type = other DNA
cgcctgtcacgcgggagaccggggttcgattccccgacggggagaa

SEQ ID NO: 19104 - DNA, 50 bp, synthetic construct
  misc_feature 1..50: note = Probe
  source 1..50: mol_type = other DNA
cgcctgtcacgcgggagaccggggttcgattccccgacggggagaaaagt

SEQ ID NO: 19105 - DNA, 50 bp, synthetic construct
  misc_feature 1..50: note = Probe
  source 1..50: mol_type = other DNA
cgcctgtcacgcgggagaccggggttcgattccccgacggggagagtact

SEQ ID NO: 19106 - DNA, 45 bp, synthetic construct
  misc_feature 1..45: note = Probe
  source 1..45: mol_type = other DNA
cgcctgtcacgcgggagaccggggttcgattccccgacggggagg

SEQ ID NO: 19107 - DNA, 50 bp, synthetic construct
  misc_feature 1..50: note = Probe
  source 1..50: mol_type = other DNA
cgcctgtcacgcgggagaccggggttcgattccccgacggggaggaggct

SEQ ID NO: 19108 - DNA, 46 bp, synthetic construct
  misc_feature 1..46: note = Probe
  source 1..46: mol_type = other DNA
cgcctgtcacgcgggagaccggggttcgattccccgacggggaggc

SEQ ID NO: 19109 - DNA, 49 bp, synthetic construct
  misc_feature 1..49: note = Probe
  source 1..49: mol_type = other DNA
cgcctgtcacgcgggagaccggggttcgattccccgacggggaggcaca

SEQ ID NO: 19110 - DNA, 50 bp, synthetic construct; identical to SEQ ID NO: 5007
  misc_feature 1..50: note = Probe
  source 1..50: mol_type = other DNA

SEQ ID NO: 19111 - DNA, 50 bp, synthetic construct; identical to SEQ ID NO: 5008
  misc_feature 1..50: note = Probe
  source 1..50: mol_type = other DNA

SEQ ID NO: 19112 - DNA, 49 bp, synthetic construct
  misc_feature 1..49: note = Probe
  source 1..49: mol_type = other DNA
cgcctgtcacgcgggagaccggggttcgattccccgacggggaggccaa

SEQ ID NO: 19113 - DNA, 50 bp, synthetic construct; identical to SEQ ID NO: 5009
  misc_feature 1..50: note = Probe
  source 1..50: mol_type = other DNA

SEQ ID NO: 19114 - DNA, 49 bp, synthetic construct
  misc_feature 1..49: note = Probe
  source 1..49: mol_type = other DNA
cgcctgtcacgcgggagaccggggttcgattccccgacggggaggccgg

SEQ ID NO: 19115 - DNA, 50 bp, synthetic construct
  misc_feature 1..50: note = Probe
  source 1..50: mol_type = other DNA
cgcctgtcacgcgggagaccggggttcgattccccgacggggaggccggg

SEQ ID NO: 19116 - DNA, 25 bp, synthetic construct
  misc_feature 1..25: note = Probe
  source 1..25: mol_type = other DNA
cgccttttttcccggcggcgggaga

SEQ ID NO: 19117 - DNA, 26 bp, synthetic construct
  misc_feature 1..26: note = Probe
  source 1..26: mol_type = other DNA
cgccttttttcccggcggcgggagaa

SEQ ID NO: 19118 - DNA, 28 bp, synthetic construct
  misc_feature 1..28: note = Probe
  source 1..28: mol_type = other DNA
cgccttttttcccggcggcgggagaagt

SEQ ID NO: 19119 - DNA, 29 bp, synthetic construct
  misc_feature 1..29: note = Probe
  source 1..29: mol_type = other DNA
cgccttttttcccggcggcgggagaagta

SEQ ID NO: 19120 - DNA, 16 bp, synthetic construct
  misc_feature 1..16: note = Probe
  source 1..16: mol_type = other DNA
cgcgaaaggtccccgg

SEQ ID NO: 19121 - DNA, 32 bp, synthetic construct
  misc_feature 1..32: note = Probe
  source 1..32: mol_type = other DNA
cgcgaaaggtccccggttcgaaaccgggcgga

SEQ ID NO: 19122 - DNA, 34 bp, synthetic construct
  misc_feature 1..34: note = Probe
  source 1..34: mol_type = other DNA
cgcgaaaggtccccggttcgaaaccgggcggaaa

SEQ ID NO: 19123 - DNA, 36 bp, synthetic construct
  misc_feature 1..36: note = Probe
  source 1..36: mol_type = other DNA
cgcgaaaggtccccggttcgaaaccgggcggaaaca

SEQ ID NO: 19124 - DNA, 39 bp, synthetic construct; identical to SEQ ID NO: 5017
  misc_feature 1..39: note = Probe
  source 1..39: mol_type = other DNA

SEQ ID NO: 19125 - DNA, 39 bp, synthetic construct
  misc_feature 1..39: note = Probe
  source 1..39: mol_type = other DNA
cgcgaaaggtccccggttcgaaaccgggcggaaacacgt

SEQ ID NO: 19126 - DNA, 33 bp, synthetic construct
  misc_feature 1..33: note = Probe
  source 1..33: mol_type = other DNA
cgcgaaaggtccccggttcgatcccgggcggaa

SEQ ID NO: 19127 - DNA, 39 bp, synthetic construct
  misc_feature 1..39: note = Probe
  source 1..39: mol_type = other DNA
cgcgaaaggtccccggttcgatcccgggcggaaacaggt

SEQ ID NO: 19128 - DNA, 38 bp, synthetic construct
  misc_feature 1..38: note = Probe
  source 1..38: mol_type = other DNA
cgcgcattggtggttcagtggtagaattctcgcctgcc

SEQ ID NO: 19129 - DNA, 28 bp, synthetic construct
  misc_feature 1..28: note = Probe
  source 1..28: mol_type = other DNA
cgcggcccgggttcgattcccggtcagg

SEQ ID NO: 19130 - DNA, 29 bp, synthetic construct
  misc_feature 1..29: note = Probe
  source 1..29: mol_type = other DNA
cgcggcccgggttcgattcccggtcaggg

SEQ ID NO: 19131 - DNA, 30 bp, synthetic construct
  misc_feature 1..30: note = Probe
  source 1..30: mol_type = other DNA
cgcggcccgggttcgattcccggtcaggga

SEQ ID NO: 19132 - DNA, 31 bp, synthetic construct
  misc_feature 1..31: note = Probe
  source 1..31: mol_type = other DNA
cgcggcccgggttcgattcccggtcagggaa

SEQ ID NO: 19133 - DNA, 32 bp, synthetic construct; identical to SEQ ID NO: 5019
  misc_feature 1..32: note = Probe
  source 1..32: mol_type = other DNA

SEQ ID NO: 19134 - DNA, 32 bp, synthetic construct; identical to SEQ ID NO: 5020
  misc_feature 1..32: note = Probe
  source 1..32: mol_type = other DNA

SEQ ID NO: 19135 - DNA, 33 bp, synthetic construct
  misc_feature 1..33: note = Probe
  source 1..33: mol_type = other DNA
cgcggcccgggttcgattcccggtcagggaagc

SEQ ID NO: 19136 - DNA, 34 bp, synthetic construct
  misc_feature 1..34: note = Probe
  source 1..34: mol_type = other DNA
cgcggcccgggttcgattcccggtcagggaagcc

SEQ ID NO: 19137 - DNA, 34 bp, synthetic construct
  misc_feature 1..34: note = Probe
  source 1..34: mol_type = other DNA
cgcggcccgggttcgattcccggtcagggaagtt

SEQ ID NO: 19138 - DNA, 32 bp, synthetic construct; identical to SEQ ID NO: 5021
  misc_feature 1..32: note = Probe
  source 1..32: mol_type = other DNA

SEQ ID NO: 19139 - DNA, 34 bp, synthetic construct; identical to SEQ ID NO: 5022
  misc_feature 1..34: note = Probe
  source 1..34: mol_type = other DNA

SEQ ID NO: 19140 - DNA, 32 bp, synthetic construct
  misc_feature 1..32: note = Probe
  source 1..32: mol_type = other DNA
cgcgggagacccgggttcaattcccggccaat

SEQ ID NO: 19141 - DNA, 38 bp, synthetic construct
  misc_feature 1..38: note = Probe
  source 1..38: mol_type = other DNA
cgcgggagacccgggttcaattcccggccaatgcaaaa

SEQ ID NO: 19142 - DNA, 28 bp, synthetic construct
  misc_feature 1..28: note = Probe
  source 1..28: mol_type = other DNA
cgcgggagaccggggttcaattccccga

SEQ ID NO: 19143 - DNA, 36 bp, synthetic construct; identical to SEQ ID NO: 5025
  misc_feature 1..36: note = Probe
  source 1..36: mol_type = other DNA

SEQ ID NO: 19144 - DNA, 37 bp, synthetic construct
  misc_feature 1..37: note = Probe
  source 1..37: mol_type = other DNA
cgcgggagaccggggttcaattccccgacggggaggt

SEQ ID NO: 19145 - DNA, 38 bp, synthetic construct; identical to SEQ ID NO: 5026
  misc_feature 1..38: note = Probe
  source 1..38: mol_type = other DNA

SEQ ID NO: 19146 - DNA, 21 bp, synthetic construct
  misc_feature 1..21: note = Probe
  source 1..21: mol_type = other DNA
cgcgggagaccggggttcgat

SEQ ID NO: 19147 - DNA, 23 bp, synthetic construct
  misc_feature 1..23: note = Probe
  source 1..23: mol_type = other DNA
cgcgggagaccggggttcgattc

SEQ ID NO: 19148 - DNA, 31 bp, synthetic construct
  misc_feature 1..31: note = Probe
  source 1..31: mol_type = other DNA
cgcgggagaccggggttcgattccccaacgg

SEQ ID NO: 19149 - DNA, 33 bp, synthetic construct
  misc_feature 1..33: note = Probe
  source 1..33: mol_type = other DNA
cgcgggagaccggggttcgattccccaacgggg

SEQ ID NO: 19150 - DNA, 35 bp, synthetic construct
  misc_feature 1..35: note = Probe
  source 1..35: mol_type = other DNA
cgcgggagaccggggttcgattccccaacggggag

SEQ ID NO: 19151 - DNA, 38 bp, synthetic construct
  misc_feature 1..38: note = Probe
  source 1..38: mol_type = other DNA
cgcgggagaccggggttcgattccccaacggggaggct

SEQ ID NO: 19152 - DNA, 36 bp, synthetic construct; identical to SEQ ID NO: 5028
  misc_feature 1..36: note = Probe
  source 1..36: mol_type = other DNA

SEQ ID NO: 19153 - DNA, 37 bp, synthetic construct; identical to SEQ ID NO: 5029
  misc_feature 1..37: note = Probe
  source 1..37: mol_type = other DNA

SEQ ID NO: 19154 - DNA, 38 bp, synthetic construct; identical to SEQ ID NO: 5030
  misc_feature 1..38: note = Probe
  source 1..38: mol_type = other DNA

SEQ ID NO: 19155 - DNA, 50 bp, synthetic construct
  misc_feature 1..50: note = Probe
  source 1..50: mol_type = other DNA
cgcgggagaccggggttcgattccccgacggggagaaaagttgctttttg

SEQ ID NO: 19156 - DNA, 37 bp, synthetic construct; identical to SEQ ID NO: 5031
  misc_feature 1..37: note = Probe
  source 1..37: mol_type = other DNA

SEQ ID NO: 19157 - DNA, 38 bp, synthetic construct; identical to SEQ ID NO: 5032
  misc_feature 1..38: note = Probe
  source 1..38: mol_type = other DNA

SEQ ID NO: 19158 - DNA, 37 bp, synthetic construct
  misc_feature 1..37: note = Probe
  source 1..37: mol_type = other DNA
cgcgggagaccggggttcgattccccgacggggagag

SEQ ID NO: 19159 - DNA, 38 bp, synthetic construct; identical to SEQ ID NO: 5033
  misc_feature 1..38: note = Probe
  source 1..38: mol_type = other DNA

SEQ ID NO: 19160 - DNA, 36 bp, synthetic construct; identical to SEQ ID NO: 5034
  misc_feature 1..36: note = Probe
  source 1..36: mol_type = other DNA

SEQ ID NO: 19161 - DNA, 37 bp, synthetic construct; identical to SEQ ID NO: 5035
  misc_feature 1..37: note = Probe
  source 1..37: mol_type = other DNA

SEQ ID NO: 19162 - DNA, 38 bp, synthetic construct
  misc_feature 1..38: note = Probe
  source 1..38: mol_type = other DNA
cgcgggagaccggggttcgattccccgacggggaggag

SEQ ID NO: 19163 - DNA, 37 bp, synthetic construct; identical to SEQ ID NO: 5036
  misc_feature 1..37: note = Probe
  source 1..37: mol_type = other DNA

SEQ ID NO: 19164 - DNA, 38 bp, synthetic construct; identical to SEQ ID NO: 5037
  misc_feature 1..38: note = Probe
  source 1..38: mol_type = other DNA

SEQ ID NO: 19165 - DNA, 39 bp, synthetic construct; identical to SEQ ID NO: 5038
  misc_feature 1..39: note = Probe
  source 1..39: mol_type = other DNA

SEQ ID NO: 19166 - DNA, 46 bp, synthetic construct
  misc_feature 1..46: note = Probe
  source 1..46: mol_type = other DNA
cgcgggagaccggggttcgattccccgacggggaggcacagtaatt

SEQ ID NO: 19167 - DNA, 39 bp, synthetic construct
  misc_feature 1..39: note = Probe
  source 1..39: mol_type = other DNA
cgcgggagaccggggttcgattccccgacggggaggcag

SEQ ID NO: 19168 - DNA, 38 bp, synthetic construct; identical to SEQ ID NO: 5039
  misc_feature 1..38: note = Probe
  source 1..38: mol_type = other DNA

SEQ ID NO: 19169 - DNA, 41 bp, synthetic construct
  misc_feature 1..41: note = Probe
  source 1..41: mol_type = other DNA
cgcgggagaccggggttcgattccccgacggggaggccggg

SEQ ID NO: 19170 - DNA, 32 bp, synthetic construct
  misc_feature 1..32: note = Probe
  source 1..32: mol_type = other DNA
cgcgggaggcccgggttcgattcccggccaat

SEQ ID NO: 19171 - DNA, 33 bp, synthetic construct
  misc_feature 1..33: note = Probe
  source 1..33: mol_type = other DNA
cgcgggaggcccgggttcgattcccggccaatg

SEQ ID NO: 19172 - DNA, 34 bp, synthetic construct
  misc_feature 1..34: note = Probe
  source 1..34: mol_type = other DNA
cgcgggaggcccgggttcgattcccggccaatgc

SEQ ID NO: 19173 - DNA, 36 bp, synthetic construct
  misc_feature 1..36: note = Probe
  source 1..36: mol_type = other DNA
cgcgggaggcccgggttcgattcccggccaatgcaa

SEQ ID NO: 19174 - DNA, 37 bp, synthetic construct
  misc_feature 1..37: note = Probe
  source 1..37: mol_type = other DNA
cgcgggaggcccgggttcgattcccggccaatgcaac

SEQ ID NO: 19175 - DNA, 37 bp, synthetic construct
  misc_feature 1..37: note = Probe
  source 1..37: mol_type = other DNA
cgcgggaggcccgggttcgattcccggccaatgcaag

SEQ ID NO: 19176 - DNA, 38 bp, synthetic construct
  misc_feature 1..38: note = Probe
  source 1..38: mol_type = other DNA
cgcgggaggcccgggttcgattcccggccaatgcaagt

SEQ ID NO: 19177 - DNA, 36 bp, synthetic construct
  misc_feature 1..36: note = Probe
  source 1..36: mol_type = other DNA
cgcgggaggcccgggttcgattcccggccaatgcac

SEQ ID NO: 19178 - DNA, 37 bp, synthetic construct; identical to SEQ ID NO: 5041
  misc_feature 1..37: note = Probe
  source 1..37: mol_type = other DNA

SEQ ID NO: 19179 - DNA, 38 bp, synthetic construct
  misc_feature 1..38: note = Probe
  source 1..38: mol_type = other DNA
cgcgggaggcccgggttcgattcccggccaatgcacga

SEQ ID NO: 19180 - DNA, 37 bp, synthetic construct; identical to SEQ ID NO: 5042
  misc_feature 1..37: note = Probe
  source 1..37: mol_type = other DNA

SEQ ID NO: 19181 - DNA, 38 bp, synthetic construct
  misc_feature 1..38: note = Probe
  source 1..38: mol_type = other DNA
cgcgggaggcccgggttcgattcccggccaatgcactt

SEQ ID NO: 19182 - DNA, 38 bp, synthetic construct; identical to SEQ ID NO: 5043
  misc_feature 1..38: note = Probe
  source 1..38: mol_type = other DNA

SEQ ID NO: 19183 - DNA, 32 bp, synthetic construct
  misc_feature 1..32: note = Probe
  source 1..32: mol_type = other DNA
cgcgggaggcccgggttcgattcccggcccat

SEQ ID NO: 19184 - DNA, 33 bp, synthetic construct
  misc_feature 1..33: note = Probe
  source 1..33: mol_type = other DNA
cgcgggaggcccgggttcgattcccggcccatg

SEQ ID NO: 19185 - DNA, 34 bp, synthetic construct
  misc_feature 1..34: note = Probe
  source 1..34: mol_type = other DNA
cgcgggaggcccgggttcgattcccggcccatgc

SEQ ID NO: 19186 - DNA, 36 bp, synthetic construct
  misc_feature 1..36: note = Probe
  source 1..36: mol_type = other DNA
cgcgggaggcccgggttcgattcccggcccatgcag

SEQ ID NO: 19187 - DNA, 37 bp, synthetic construct; identical to SEQ ID NO: 5044
  misc_feature 1..37: note = Probe
  source 1..37: mol_type = other DNA

SEQ ID NO: 19188 - DNA, 38 bp, synthetic construct
  misc_feature 1..38: note = Probe
  source 1..38: mol_type = other DNA
cgcgggaggcccgggttcgattcccggcccatgcagca

SEQ ID NO: 19189 - DNA, 29 bp, synthetic construct
  misc_feature 1..29: note = Probe
  source 1..29: mol_type = other DNA
cgcgggttcgatccccgtacgggccactg

SEQ ID NO: 19190 - DNA, 25 bp, synthetic construct
  misc_feature 1..25: note = Probe
  source 1..25: mol_type = other DNA
cgcgtcagtctcataatctgaaggt

SEQ ID NO: 19191 - DNA, 24 bp, synthetic construct
  misc_feature 1..24: note = Probe
  source 1..24: mol_type = other DNA
cgctctcaccgccgcggcccgggt

SEQ ID NO: 19192 - DNA, 42 bp, synthetic construct
  misc_feature 1..42: note = Probe
  source 1..42: mol_type = other DNA
cgctctcaccgccgcggcccgggttcgattcccggtcaggga

SEQ ID NO: 19193 - DNA, 46 bp, synthetic construct
  misc_feature 1..46: note = Probe
  source 1..46: mol_type = other DNA
cgctctcaccgccgcggcccgggttcgattcccggtcagggaagcc

SEQ ID NO: 19194 - DNA, 46 bp, synthetic construct
  misc_feature 1..46: note = Probe
  source 1..46: mol_type = other DNA
cgctctcaccgccgcggcccgggttcgattcccggtcagggaagtc

SEQ ID NO: 19195 - DNA, 30 bp, synthetic construct
  misc_feature 1..30: note = Probe
  source 1..30: mol_type = other DNA
cgctctccttttatgagctggtcgcgggaa

SEQ ID NO: 19196 - DNA, 30 bp, synthetic construct
  misc_feature 1..30: note = Probe
  source 1..30: mol_type = other DNA
cgctgccacacctcagaaggtctcactttt

SEQ ID NO: 19197 - DNA, 23 bp, synthetic construct
  misc_feature 1..23: note = Probe
  source 1..23: mol_type = other DNA
cgctgccagggttgctgtctttt

SEQ ID NO: 19198 - DNA, 25 bp, synthetic construct
  misc_feature 1..25: note = Probe
  source 1..25: mol_type = other DNA
cgctggtgtagtggtatcatgcaag

SEQ ID NO: 19199 - DNA, 26 bp, synthetic construct
  misc_feature 1..26: note = Probe
  source 1..26: mol_type = other DNA
cgctggtgtagtggtatcatgcaaga

SEQ ID NO: 19200 - DNA, 28 bp, synthetic construct
  misc_feature 1..28: note = Probe
  source 1..28: mol_type = other DNA
cgctggtgtagtggtatcatgcaagatt

SEQ ID NO: 19201 - DNA, 30 bp, synthetic construct
  misc_feature 1..30: note = Probe
  source 1..30: mol_type = other DNA
cgctggtgtagtggtatcatgcaagattcc

SEQ ID NO: 19202 - DNA, 31 bp, synthetic construct; identical to SEQ ID NO: 737
  misc_feature 1..31: note = Probe
  source 1..31: mol_type = other DNA

SEQ ID NO: 19203 - DNA, 49 bp, synthetic construct
  misc_feature 1..49: note = Probe
  source 1..49: mol_type = other DNA
cgctttcaccgccgcggcccgggttcgattcccggtcagggaattgttt

SEQ ID NO: 19204 - DNA, 25 bp, synthetic construct
  misc_feature 1..25: note = Probe
  source 1..25: mol_type = other DNA
cggaaacacactaaaaaatcccttt

SEQ ID NO: 19205 - DNA, 20 bp, synthetic construct
  misc_feature 1..20: note = Probe
  source 1..20: mol_type = other DNA
cggaagcgtgctgggcccat

SEQ ID NO: 19206 - DNA, 22 bp, synthetic construct
  misc_feature 1..22: note = Probe
  source 1..22: mol_type = other DNA
cggaagcgtgctgggcccataa

SEQ ID NO: 19207 - DNA, 26 bp, synthetic construct
  misc_feature 1..26: note = Probe
  source 1..26: mol_type = other DNA
cggaagcgtgctgggcccataaccca

SEQ ID NO: 19208 - DNA, 31 bp, synthetic construct
  misc_feature 1..31: note = Probe
  source 1..31: mol_type = other DNA
cggaagcgtgctgggcccataacccagaggt

SEQ ID NO: 19209 - DNA, 40 bp, synthetic construct; identical to SEQ ID NO: 5055
  misc_feature 1..40: note = Probe
  source 1..40: mol_type = other DNA

SEQ ID NO: 19210 - DNA, 50 bp, synthetic construct
  misc_feature 1..50: note = Probe
  source 1..50: mol_type = other DNA
cggaagcgtgctgggcccataacccagaggtcgatggatcgaaaccatcc

SEQ ID NO: 19211 - DNA, 16 bp, synthetic construct
  misc_feature 1..16: note = Probe
  source 1..16: mol_type = other DNA
cggagatgaaaacctt

SEQ ID NO: 19212 - DNA, 29 bp, synthetic construct
  misc_feature 1..29: note = Probe
  source 1..29: mol_type = other DNA
cggagatgaaaacctttttccaaggacaa

SEQ ID NO: 19213 - DNA, 30 bp, synthetic construct; identical to SEQ ID NO: 5060
  misc_feature 1..30: note = Probe
  source 1..30: mol_type = other DNA

SEQ ID NO: 19214 - DNA, 31 bp, synthetic construct; identical to SEQ ID NO: 5061
  misc_feature 1..31: note = Probe
  source 1..31: mol_type = other DNA

SEQ ID NO: 19215 - DNA, 32 bp, synthetic construct; identical to SEQ ID NO: 5062
  misc_feature 1..32: note = Probe
  source 1..32: mol_type = other DNA

SEQ ID NO: 19216 - DNA, 33 bp, synthetic construct
  misc_feature 1..33: note = Probe
  source 1..33: mol_type = other DNA
cggagatgaaaacctttttccaaggacaaatca

SEQ ID NO: 19217 - DNA, 16 bp, synthetic construct
  misc_feature 1..16: note = Probe
  source 1..16: mol_type = other DNA
cggagccttcgatagc

SEQ ID NO: 19218 - DNA, 23 bp, synthetic construct
  misc_feature 1..23: note = Probe
  source 1..23: mol_type = other DNA
cggatagctcagtcggtagagca

SEQ ID NO: 19219 - DNA, 25 bp, synthetic construct
  misc_feature 1..25: note = Probe
  source 1..25: mol_type = other DNA
cggatagctcagtcggtagagcatc

SEQ ID NO: 19220 - DNA, 20 bp, synthetic construct
  misc_feature 1..20: note = Probe
  source 1..20: mol_type = other DNA
cggatcagaagattgagggt

SEQ ID NO: 19221 - DNA, 22 bp, synthetic construct
  misc_feature 1..22: note = Probe
  source 1..22: mol_type = other DNA
cggcccgggttcgactcccggt

SEQ ID NO: 19222 - DNA, 24 bp, synthetic construct
  misc_feature 1..24: note = Probe
  source 1..24: mol_type = other DNA
cggcccgggttcgactcccggtgt

SEQ ID NO: 19223 - DNA, 25 bp, synthetic construct
  misc_feature 1..25: note = Probe
  source 1..25: mol_type = other DNA
cggcccgggttcgactcccggtgtg

SEQ ID NO: 19224 - DNA, 28 bp, synthetic construct
  misc_feature 1..28: note = Probe
  source 1..28: mol_type = other DNA
cggcccgggttcgactcccggtgtggga

SEQ ID NO: 19225 - DNA, 29 bp, synthetic construct
  misc_feature 1..29: note = Probe
  source 1..29: mol_type = other DNA
cggcccgggttcgactcccggtgtgggaa

SEQ ID NO: 19226 - DNA, 30 bp, synthetic construct; identical to SEQ ID NO: 766
  misc_feature 1..30: note = Probe
  source 1..30: mol_type = other DNA

SEQ ID NO: 19227 - DNA, 32 bp, synthetic construct; identical to SEQ ID NO: 5067
  misc_feature 1..32: note = Probe
  source 1..32: mol_type = other DNA

SEQ ID NO: 19228 - DNA, 22 bp, synthetic construct
  misc_feature 1..22: note = Probe
  source 1..22: mol_type = other DNA
cggcccgggttcgattcccggt

SEQ ID NO: 19229 - DNA, 23 bp, synthetic construct
  misc_feature 1..23: note = Probe
  source 1..23: mol_type = other DNA
cggcccgggttcgattcccggtc

SEQ ID NO: 19230 - DNA, 24 bp, synthetic construct
  misc_feature 1..24: note = Probe
  source 1..24: mol_type = other DNA
cggcccgggttcgattcccggtca

SEQ ID NO: 19231 - DNA, 26 bp, synthetic construct
  misc_feature 1..26: note = Probe
  source 1..26: mol_type = other DNA
cggcccgggttcgattcccggtcagg

SEQ ID NO: 19232 - DNA, 28 bp, synthetic construct
  misc_feature 1..28: note = Probe
  source 1..28: mol_type = other DNA
cggcccgggttcgattcccggtcaggga

SEQ ID NO: 19233 - DNA, 29 bp, synthetic construct
  misc_feature 1..29: note = Probe
  source 1..29: mol_type = other DNA
cggcccgggttcgattcccggtcagggaa

SEQ ID NO: 19234 - DNA, 30 bp, synthetic construct; identical to SEQ ID NO: 5070
  misc_feature 1..30: note = Probe
  source 1..30: mol_type = other DNA

SEQ ID NO: 19235 - DNA, 30 bp, synthetic construct; identical to SEQ ID NO: 5071
  misc_feature 1..30: note = Probe
  source 1..30: mol_type = other DNA

SEQ ID NO: 19236 - DNA, 30 bp, synthetic construct; identical to SEQ ID NO: 5073
  misc_feature 1..30: note = Probe
  source 1..30: mol_type = other DNA

SEQ ID NO: 19237 - DNA, 32 bp, synthetic construct; identical to SEQ ID NO: 5074
  misc_feature 1..32: note = Probe
  source 1..32: mol_type = other DNA

SEQ ID NO: 19238 - DNA, 27 bp, synthetic construct
  misc_feature 1..27: note = Probe
  source 1..27: mol_type = other DNA
cggcgctctcaccgccgcggcccgggt

SEQ ID NO: 19239 - DNA, 28 bp, synthetic construct
  misc_feature 1..28: note = Probe
  source 1..28: mol_type = other DNA
cggctagctcagtcgatagagcatgaga

SEQ ID NO: 19240 - DNA, 29 bp, synthetic construct
  misc_feature 1..29: note = Probe
  source 1..29: mol_type = other DNA
cggctagctcagtcgatagagcatgagac

SEQ ID NO: 19241 - DNA, 30 bp, synthetic construct
  misc_feature 1..30: note = Probe
  source 1..30: mol_type = other DNA
cggctagctcagtcgatagagcatgagact

SEQ ID NO: 19242 - DNA, 16 bp, synthetic construct
  misc_feature 1..16: note = Probe
  source 1..16: mol_type = other DNA
cggctagctcagtcgg

SEQ ID NO: 19243 - DNA, 19 bp, synthetic construct
  misc_feature 1..19: note = Probe
  source 1..19: mol_type = other DNA
cggctagctcagtcggtag

SEQ ID NO: 19244 - DNA, 22 bp, synthetic construct
  misc_feature 1..22: note = Probe
  source 1..22: mol_type = other DNA
cggctagctcagtcggtagagc

SEQ ID NO: 19245 - DNA, 23 bp, synthetic construct
  misc_feature 1..23: note = Probe
  source 1..23: mol_type = other DNA
cggctagctcagtcggtagagca

SEQ ID NO: 19246 - DNA, 33 bp, synthetic construct; identical to SEQ ID NO: 774
  misc_feature 1..33: note = Probe
  source 1..33: mol_type = other DNA

SEQ ID NO: 19247 - DNA, 39 bp, synthetic construct
  misc_feature 1..39: note = Probe
  source 1..39: mol_type = other DNA
cggctagctcagtcggtagagcatgggactcttaatccc

SEQ ID NO: 19248 - DNA, 26 bp, synthetic construct
  misc_feature 1..26: note = Probe
  source 1..26: mol_type = other DNA
cggctgttaaccgaaaggttggtggt

SEQ ID NO: 19249 - DNA, 27 bp, synthetic construct
  misc_feature 1..27: note = Probe
  source 1..27: mol_type = other DNA
cgggagaccggggttcaattccccgac

SEQ ID NO: 19250 - DNA, 28 bp, synthetic construct
  misc_feature 1..28: note = Probe
  source 1..28: mol_type = other DNA
cgggagaccggggttcaattccccgacg

SEQ ID NO: 19251 - DNA, 34 bp, synthetic construct
  misc_feature 1..34: note = Probe
  source 1..34: mol_type = other DNA
cgggagaccggggttcaattccccgacggggagg

SEQ ID NO: 19252 - DNA, 35 bp, synthetic construct
  misc_feature 1..35: note = Probe
  source 1..35: mol_type = other DNA
cgggagaccggggttcaattccccgacggggaggt

SEQ ID NO: 19253 - DNA, 36 bp, synthetic construct; identical to SEQ ID NO: 5077
  misc_feature 1..36: note = Probe
  source 1..36: mol_type = other DNA

SEQ ID NO: 19254 - DNA, 30 bp, synthetic construct
  misc_feature 1..30: note = Probe
  source 1..30: mol_type = other DNA
cgggagaccggggttcgattccccaacggg

SEQ ID NO: 19255 - DNA, 36 bp, synthetic construct
  misc_feature 1..36: note = Probe
  source 1..36: mol_type = other DNA
cgggagaccggggttcgattccccaacggggaggct

SEQ ID NO: 19256 - DNA, 34 bp, synthetic construct; identical to SEQ ID NO: 5079
  misc_feature 1..34: note = Probe
  source 1..34: mol_type = other DNA

SEQ ID NO: 19257 - DNA, 35 bp, synthetic construct
  misc_feature 1..35: note = Probe
  source 1..35: mol_type = other DNA
cgggagaccggggttcgattccccgacggggagaa

SEQ ID NO: 19258 - DNA, 36 bp, synthetic construct; identical to SEQ ID NO: 5080
  misc_feature 1..36: note = Probe
  source 1..36: mol_type = other DNA

SEQ ID NO: 19259 - DNA, 35 bp, synthetic construct; identical to SEQ ID NO: 5081
  misc_feature 1..35: note = Probe
  source 1..35: mol_type = other DNA

SEQ ID NO: 19260 - DNA, 36 bp, synthetic construct
  misc_feature 1..36: note = Probe
  source 1..36: mol_type = other DNA
cgggagaccggggttcgattccccgacggggagacg

SEQ ID NO: 19261 - DNA, 35 bp, synthetic construct
  misc_feature 1..35: note = Probe
  source 1..35: mol_type = other DNA
cgggagaccggggttcgattccccgacggggagag

SEQ ID NO: 19262 - DNA, 36 bp, synthetic construct
  misc_feature 1..36: note = Probe
  source 1..36: mol_type = other DNA
cgggagaccggggttcgattccccgacggggagagt

SEQ ID NO: 19263 - DNA, 34 bp, synthetic construct; identical to SEQ ID NO: 5082
  misc_feature 1..34: note = Probe
  source 1..34: mol_type = other DNA

SEQ ID NO: 19264 - DNA, 35 bp, synthetic construct
  misc_feature 1..35: note = Probe
  source 1..35: mol_type = other DNA
cgggagaccggggttcgattccccgacggggagga

SEQ ID NO: 19265 - DNA, 36 bp, synthetic construct
  misc_feature 1..36: note = Probe
  source 1..36: mol_type = other DNA
cgggagaccggggttcgattccccgacggggaggag

SEQ ID NO: 19266 - DNA, 35 bp, synthetic construct; identical to SEQ ID NO: 5083
  misc_feature 1..35: note = Probe
  source 1..35: mol_type = other DNA

SEQ ID NO: 19267 - DNA, 36 bp, synthetic construct; identical to SEQ ID NO: 5084
  misc_feature 1..36: note = Probe
  source 1..36: mol_type = other DNA

SEQ ID NO: 19268 - DNA, 37 bp, synthetic construct
  misc_feature 1..37: note = Probe
  source 1..37: mol_type = other DNA
cgggagaccggggttcgattccccgacggggaggcac

SEQ ID NO: 19269 - DNA, 36 bp, synthetic construct; identical to SEQ ID NO: 5085
  misc_feature 1..36: note = Probe
  source 1..36: mol_type = other DNA

SEQ ID NO: 19270 - DNA, 38 bp, synthetic construct
  misc_feature 1..38: note = Probe
  source 1..38: mol_type = other DNA
cgggagaccggggttcgattccccgacggggaggccgg

SEQ ID NO: 19271 - DNA, 36 bp, synthetic construct
  misc_feature 1..36: note = Probe
  source 1..36: mol_type = other DNA
cgggagcccggatagctcagtcggtagagcatcaga

SEQ ID NO: 19272 - DNA, 38 bp, synthetic construct
  misc_feature 1..38: note = Probe
  source 1..38: mol_type = other DNA
cgggagcccggatagctcagtcggtagagcatcagact

SEQ ID NO: 19273 - DNA, 39 bp, synthetic construct
  misc_feature 1..39: note = Probe
  source 1..39: mol_type = other DNA
cgggagcccggatagctcagtcggtagagcatcagactt

SEQ ID NO: 19274 - DNA, 41 bp, synthetic construct
  misc_feature 1..41: note = Probe
  source 1..41: mol_type = other DNA
cgggagcccggatagctcagtcggtagagcatcagactttt

SEQ ID NO: 19275 - DNA, 31 bp, synthetic construct
  misc_feature 1..31: note = Probe
  source 1..31: mol_type = other DNA
cgggagcgcccggatagctcagtcggtagag

SEQ ID NO: 19276 - DNA, 33 bp, synthetic construct
  misc_feature 1..33: note = Probe
  source 1..33: mol_type = other DNA
cgggagcgcccggatagctcagtcggtagagca

SEQ ID NO: 19277 - DNA, 38 bp, synthetic construct
  misc_feature 1..38: note = Probe
  source 1..38: mol_type = other DNA
cgggagcgcccggatagctcagtcggtagagcatcaga

SEQ ID NO: 19278 - DNA, 40 bp, synthetic construct
  misc_feature 1..40: note = Probe
  source 1..40: mol_type = other DNA
cgggagcgcccggatagctcagtcggtagagcatcagact

SEQ ID NO: 19279 - DNA, 41 bp, synthetic construct
  misc_feature 1..41: note = Probe
  source 1..41: mol_type = other DNA
cgggagcgcccggatagctcagtcggtagagcatcagactt

SEQ ID NO: 19280 - DNA, 42 bp, synthetic construct
  misc_feature 1..42: note = Probe
  source 1..42: mol_type = other DNA
cgggagcgcccggatagctcagtcggtagagcatcagacttt

SEQ ID NO: 19281 - DNA, 43 bp, synthetic construct
  misc_feature 1..43: note = Probe
  source 1..43: mol_type = other DNA
cgggagcgcccggatagctcagtcggtagagcatcagactttt

SEQ ID NO: 19282 - DNA, 44 bp, synthetic construct
  misc_feature 1..44: note = Probe
  source 1..44: mol_type = other DNA
cgggagcgcccggatagctcagtcggtagagcatcagactttta

SEQ ID NO: 19283 - DNA, 32 bp, synthetic construct
  misc_feature 1..32: note = Probe
  source 1..32: mol_type = other DNA
cgggaggcccgggttcgattcccggccaatgc

SEQ ID NO: 19284 - DNA, 33 bp, synthetic construct; identical to SEQ ID NO: 5086
  misc_feature 1..33: note = Probe
  source 1..33: mol_type = other DNA

SEQ ID NO: 19285 - DNA, 36 bp, synthetic construct
  misc_feature 1..36: note = Probe
  source 1..36: mol_type = other DNA
cgggaggcccgggttcgattcccggccaatgcaagt

SEQ ID NO: 19286 - DNA, 36 bp, synthetic construct
  misc_feature 1..36: note = Probe
  source 1..36: mol_type = other DNA
cgggaggcccgggttcgattcccggccaatgcacga

SEQ ID NO: 19287 - DNA, 36 bp, synthetic construct
  misc_feature 1..36: note = Probe
  source 1..36: mol_type = other DNA
cgggaggcccgggttcgattcccggccaatgcactt

SEQ ID NO: 19288 - DNA, 36 bp, synthetic construct
  misc_feature 1..36: note = Probe
  source 1..36: mol_type = other DNA
cgggaggcccgggttcgattcccggccaatgcagca

SEQ ID NO: 19289 - DNA, 30 bp, synthetic construct
  misc_feature 1..30: note = Probe
  source 1..30: mol_type = other DNA
cgggaggcccgggttcgattcccggcccat

SEQ ID NO: 19290 - DNA, 31 bp, synthetic construct
  misc_feature 1..31: note = Probe
  source 1..31: mol_type = other DNA
cgggaggcccgggttcgattcccggcccatg

SEQ ID NO: 19291 - DNA, 33 bp, synthetic construct; identical to SEQ ID NO: 5087
  misc_feature 1..33: note = Probe
  source 1..33: mol_type = other DNA

SEQ ID NO: 19292 - DNA, 34 bp, synthetic construct
  misc_feature 1..34: note = Probe
  source 1..34: mol_type = other DNA
cgggaggcccgggttcgattcccggcccatgcag

SEQ ID NO: 19293 - DNA, 35 bp, synthetic construct
  misc_feature 1..35: note = Probe
  source 1..35: mol_type = other DNA
cgggaggcccgggttcgattcccggcccatgcagc

SEQ ID NO: 19294 - DNA, 36 bp, synthetic construct
  misc_feature 1..36: note = Probe
  source 1..36: mol_type = other DNA
cgggaggcccgggttcgattcccggcccatgcagca

SEQ ID NO: 19295 - DNA, 17 bp, synthetic construct
  misc_feature 1..17: note = Probe
  source 1..17: mol_type = other DNA
cgggcccataccccgaa

SEQ ID NO: 19296 - DNA, 41 bp, synthetic construct
  misc_feature 1..41: note = Probe
  source 1..41: mol_type = other DNA
cgggcccataccccgaaaatgttggttatacccttcccgta

SEQ ID NO: 19297 - DNA, 30 bp, synthetic construct
  misc_feature 1..30: note = Probe
  source 1..30: mol_type = other DNA
cgggcgcccggctagctcagtcggtagagc

SEQ ID NO: 19298 - DNA, 31 bp, synthetic construct
  misc_feature 1..31: note = Probe
  source 1..31: mol_type = other DNA
cgggcgcccggctagctcagtcggtagagca

SEQ ID NO: 19299 - DNA, 38 bp, synthetic construct
  misc_feature 1..38: note = Probe
  source 1..38: mol_type = other DNA
cgggcgcccggctagctcagtcggtagagcatgagact

SEQ ID NO: 19300 - DNA, 39 bp, synthetic construct
  misc_feature 1..39: note = Probe
  source 1..39: mol_type = other DNA
cgggcgcccggctagctcagtcggtagagcatgagactc

SEQ ID NO: 19301 - DNA, 29 bp, synthetic construct
  misc_feature 1..29: note = Probe
  source 1..29: mol_type = other DNA
cgggcggaaacacactaaaaaatcccttt

SEQ ID NO: 19302 - DNA, 20 bp, synthetic construct
  misc_feature 1..20: note = Probe
  source 1..20: mol_type = other DNA
cgggctcacatcaccccata

SEQ ID NO: 19303 - DNA, 24 bp, synthetic construct
  misc_feature 1..24: note = Probe
  source 1..24: mol_type = other DNA
cgggctcacatcaccccataaaca

SEQ ID NO: 19304 - DNA, 25 bp, synthetic construct
  misc_feature 1..25: note = Probe
  source 1..25: mol_type = other DNA
cgggctcacatcaccccataaacaa

SEQ ID NO: 19305 - DNA, 26 bp, synthetic construct
  misc_feature 1..26: note = Probe
  source 1..26: mol_type = other DNA
cgggctcacatcaccccataaacaaa

SEQ ID NO: 19306 - DNA, 27 bp, synthetic construct
  misc_feature 1..27: note = Probe
  source 1..27: mol_type = other DNA
cgggctcacatcaccccataaacaaat

SEQ ID NO: 19307 - DNA, 16 bp, synthetic construct
  misc_feature 1..16: note = Probe
  source 1..16: mol_type = other DNA
cggggcacaataattt

SEQ ID NO: 19308 - DNA, 27 bp, synthetic construct
  misc_feature 1..27: note = Probe
  source 1..27: mol_type = other DNA
cggggttcgattccccgacggggagac

SEQ ID NO: 19309 - DNA, 27 bp, synthetic construct
  misc_feature 1..27: note = Probe
  source 1..27: mol_type = other DNA
cggggttcgattccccgacggggaggc

SEQ ID NO: 19310 - DNA, 28 bp, synthetic construct
  misc_feature 1..28: note = Probe
  source 1..28: mol_type = other DNA
cggggttcgattccccgacggggaggca

SEQ ID NO: 19311 - DNA, 17 bp, synthetic construct
  misc_feature 1..17: note = Probe
  source 1..17: mol_type = other DNA
cgggtccccggtagctc

SEQ ID NO: 19312 - DNA, 17 bp, synthetic construct
  misc_feature 1..17: note = Probe
  source 1..17: mol_type = other DNA
cgggtgcgagaggtccc

SEQ ID NO: 19313 - DNA, 21 bp, synthetic construct
  misc_feature 1..21: note = Probe
  source 1..21: mol_type = other DNA
cgggtgcgagaggtcccgggt

SEQ ID NO: 19314 - DNA, 22 bp, synthetic construct
  misc_feature 1..22: note = Probe
  source 1..22: mol_type = other DNA
cgggtgcgagaggtcccgggtt

SEQ ID NO: 19315 - DNA, 27 bp, synthetic construct
  misc_feature 1..27: note = Probe
  source 1..27: mol_type = other DNA
cgggttcaattcccggtcagggaacca

SEQ ID NO: 19316 - DNA, 27 bp, synthetic construct
  misc_feature 1..27: note = Probe
  source 1..27: mol_type = other DNA
cgggttcgactcccggtatgggaacaa

SEQ ID NO: 19317 - DNA, 27 bp, synthetic construct
  misc_feature 1..27: note = Probe
  source 1..27: mol_type = other DNA
cgggttcgactcccggtgtgggaacgc

SEQ ID NO: 19318 - DNA, 27 bp, synthetic construct
  misc_feature 1..27: note = Probe
  source 1..27: mol_type = other DNA
cgggttcgatccccggcatctccattg

SEQ ID NO: 19319 - DNA, 27 bp, synthetic construct
  misc_feature 1..27: note = Probe
  source 1..27: mol_type = other DNA
cgggttcgattcccggtcagggaattg

SEQ ID NO: 19320 - DNA, 27 bp, synthetic construct
  misc_feature 1..27: note = Probe
  source 1..27: mol_type = other DNA
cgggttcgattcccggtcatggaacca

SEQ ID NO: 19321 - DNA, 20 bp, synthetic construct
  misc_feature 1..20: note = Probe
  source 1..20: mol_type = other DNA
cggtaatcgcataaaactta

SEQ ID NO: 19322 - DNA, 26 bp, synthetic construct
  misc_feature 1..26: note = Probe
  source 1..26: mol_type = other DNA
cggtaatcgcataaaacttaaaactt

SEQ ID NO: 19323 - DNA, 30 bp, synthetic construct
  misc_feature 1..30: note = Probe
  source 1..30: mol_type = other DNA
cggtaatcgcataaaacttaaaactttaca

SEQ ID NO: 19324 - DNA, 33 bp, synthetic construct
  misc_feature 1..33: note = Probe
  source 1..33: mol_type = other DNA
cggtaatcgcataaaacttaaaactttacagtc

SEQ ID NO: 19325 - DNA, 36 bp, synthetic construct
  misc_feature 1..36: note = Probe
  source 1..36: mol_type = other DNA
cggtaatcgcataaaacttaaaactttacagtcaga

SEQ ID NO: 19326 - DNA, 39 bp, synthetic construct
  misc_feature 1..39: note = Probe
  source 1..39: mol_type = other DNA
cggtaatcgcataaaacttaaaactttacagtcagaggt

SEQ ID NO: 19327 - DNA, 41 bp, synthetic construct
  misc_feature 1..41: note = Probe
  source 1..41: mol_type = other DNA
cggtaatcgcataaaacttaaaactttacagtcagaggttc

SEQ ID NO: 19328 - DNA, 42 bp, synthetic construct
  misc_feature 1..42: note = Probe
  source 1..42: mol_type = other DNA
cggtaatcgcataaaacttaaaactttacagtcagaggttca

SEQ ID NO: 19329 - DNA, 50 bp, synthetic construct; identical to SEQ ID NO: 791
  misc_feature 1..50: note = Probe
  source 1..50: mol_type = other DNA

SEQ ID NO: 19330 - DNA, 16 bp, synthetic construct
  misc_feature 1..16: note = Probe
  source 1..16: mol_type = other DNA
cggtagagcatgagac

SEQ ID NO: 19331 - DNA, 38 bp, synthetic construct
  misc_feature 1..38: note = Probe
  source 1..38: mol_type = other DNA
cggtagagcatgagactcttaatctcagggtcgtgggt

SEQ ID NO: 19332 - DNA, 16 bp, synthetic construct
  misc_feature 1..16: note = Probe
  source 1..16: mol_type = other DNA
cggtagagcatgggac

SEQ ID NO: 19333 - DNA, 26 bp, synthetic construct
  misc_feature 1..26: note = Probe
  source 1..26: mol_type = other DNA
cggtagagcatgggactcttaatccc

SEQ ID NO: 19334 - DNA, 33 bp, synthetic construct; identical to SEQ ID NO: 5107
  misc_feature 1..33: note = Probe
  source 1..33: mol_type = other DNA

SEQ ID NO: 19335 - DNA, 38 bp, synthetic construct
  misc_feature 1..38: note = Probe
  source 1..38: mol_type = other DNA
cggtagagcatgggactcttaatcccagggtcgtgggt

SEQ ID NO: 19336 - DNA, 38 bp, synthetic construct
  misc_feature 1..38: note = Probe
  source 1..38: mol_type = other DNA
cggtagagcatgggactcttaatctcagggtcgtgggt

SEQ ID NO: 19337 - DNA, 16 bp, synthetic construct
  misc_feature 1..16: note = Probe
  source 1..16: mol_type = other DNA
cggttaggattcctgg

SEQ ID NO: 19338 - DNA, 25 bp, synthetic construct
  misc_feature 1..25: note = Probe
  source 1..25: mol_type = other DNA
cggttaggattcctggttttcaccc

SEQ ID NO: 19339 - DNA, 26 bp, synthetic construct
  misc_feature 1..26: note = Probe
  source 1..26: mol_type = other DNA
cggttcgaatccgagtcacggcaggt

SEQ ID NO: 19340 - DNA, 26 bp, synthetic construct
  misc_feature 1..26: note = Probe
  source 1..26: mol_type = other DNA
cggttcgaatccgagtcacggcattg

SEQ ID NO: 19341 - DNA, 21 bp, synthetic construct
  misc_feature 1..21: note = Probe
  source 1..21: mol_type = other DNA
cgtaaacaggagatcctgggt

SEQ ID NO: 19342 - DNA, 23 bp, synthetic construct
  misc_feature 1..23: note = Probe
  source 1..23: mol_type = other DNA
cgtagtgtagcggttatcacatt

SEQ ID NO: 19343 - DNA, 27 bp, synthetic construct
  misc_feature 1..27: note = Probe
  source 1..27: mol_type = other DNA
cgtagtgtagcggttatcacattcgcc

SEQ ID NO: 19344 - DNA, 23 bp, synthetic construct
  misc_feature 1..23: note = Probe
  source 1..23: mol_type = other DNA
cgtagtgtagtggtcatcacgtt

SEQ ID NO: 19345 - DNA, 26 bp, synthetic construct
  misc_feature 1..26: note = Probe
  source 1..26: mol_type = other DNA
cgtagtgtagtggtcatcacgttcgc

SEQ ID NO: 19346 - DNA, 27 bp, synthetic construct
  misc_feature 1..27: note = Probe
  source 1..27: mol_type = other DNA
cgtagtgtagtggtcatcacgttcgcc

SEQ ID NO: 19347 - DNA, 23 bp, synthetic construct
  misc_feature 1..23: note = Probe
  source 1..23: mol_type = other DNA
cgtagtgtagtggttatcacgtt

SEQ ID NO: 19348 - DNA, 25 bp, synthetic construct
  misc_feature 1..25: note = Probe
  source 1..25: mol_type = other DNA
cgtagtgtagtggttatcacgttcg

SEQ ID NO: 19349 - DNA, 26 bp, synthetic construct
  misc_feature 1..26: note = Probe
  source 1..26: mol_type = other DNA
cgtagtgtagtggttatcacgttcgc

SEQ ID NO: 19350 - DNA, 27 bp, synthetic construct
  misc_feature 1..27: note = Probe
  source 1..27: mol_type = other DNA
cgtagtgtagtggttatcacgttcgcc

SEQ ID NO: 19351 - DNA, 28 bp, synthetic construct
  misc_feature 1..28: note = Probe
  source 1..28: mol_type = other DNA
cgtagtgtagtggttatcacgttcgcct

SEQ ID NO: 19352 - DNA, 29 bp, synthetic construct
  misc_feature 1..29: note = Probe
  source 1..29: mol_type = other DNA
cgtagtgtagtggttatcacgttcgcctc

SEQ ID NO: 19353 - DNA, 30 bp, synthetic construct
  misc_feature 1..30: note = Probe
  source 1..30: mol_type = other DNA
cgtagtgtagtggttatcacgttcgcctca

SEQ ID NO: 19354 - DNA, 32 bp, synthetic construct
  misc_feature 1..32: note = Probe
  source 1..32: mol_type = other DNA
cgtagtgtagtggttatcacgttcgcctcaca

SEQ ID NO: 19355 - DNA, 17 bp, synthetic construct
  misc_feature 1..17: note = Probe
  source 1..17: mol_type = other DNA
cgtatagtggttagtac

SEQ ID NO: 19356 - DNA, 22 bp, synthetic construct
  misc_feature 1..22: note = Probe
  source 1..22: mol_type = other DNA
cgtatagtggttagtactctgc

SEQ ID NO: 19357 - DNA, 23 bp, synthetic construct
  misc_feature 1..23: note = Probe
  source 1..23: mol_type = other DNA
cgtatagtggttagtactctgcg

SEQ ID NO: 19358 - DNA, 25 bp, synthetic construct
  misc_feature 1..25: note = Probe
  source 1..25: mol_type = other DNA
cgtatagtggttagtactctgcgtt

SEQ ID NO: 19359 - DNA, 27 bp, synthetic construct
  misc_feature 1..27: note = Probe
  source 1..27: mol_type = other DNA
cgtatagtggttagtactctgcgttgt

SEQ ID NO: 19360 - DNA, 28 bp, synthetic construct
  misc_feature 1..28: note = Probe
  source 1..28: mol_type = other DNA
cgtatagtggttagtactctgcgttgtg

SEQ ID NO: 19361 - DNA, 38 bp, synthetic construct
  misc_feature 1..38: note = Probe
  source 1..38: mol_type = other DNA
cgtatgaggccccgggttcaatccccggcatctccaga

SEQ ID NO: 19362 - DNA, 39 bp, synthetic construct
  misc_feature 1..39: note = Probe
  source 1..39: mol_type = other DNA
cgtatgaggccccgggttcaatccccggcatctccagac

SEQ ID NO: 19363 - DNA, 24 bp, synthetic construct
  misc_feature 1..24: note = Probe
  source 1..24: mol_type = other DNA
cgtgatcgtatagtggttagtact

SEQ ID NO: 19364 - DNA, 27 bp, synthetic construct
  misc_feature 1..27: note = Probe
  source 1..27: mol_type = other DNA
cgtgatcgtatagtggttagtactctg

SEQ ID NO: 19365 - DNA, 31 bp, synthetic construct
  misc_feature 1..31: note = Probe
  source 1..31: mol_type = other DNA
cgtgatcgtatagtggttagtactctgcgtt

SEQ ID NO: 19366 - DNA, 35 bp, synthetic construct
  misc_feature 1..35: note = Probe
  source 1..35: mol_type = other DNA
cgtgatcgtatagtggttagtactctgcgttgtgg

SEQ ID NO: 19367 - DNA, 36 bp, synthetic construct
  misc_feature 1..36: note = Probe
  source 1..36: mol_type = other DNA
cgtgatcgtatagtggttagtactctgcgttgtggc

SEQ ID NO: 19368 - DNA, 27 bp, synthetic construct
  misc_feature 1..27: note = Probe
  source 1..27: mol_type = other DNA
cgtgctgggcccataacccagaggtcg

SEQ ID NO: 19369 - DNA, 28 bp, synthetic construct
  misc_feature 1..28: note = Probe
  source 1..28: mol_type = other DNA
cgtgctgggcccataacccagaggtcga

SEQ ID NO: 19370 - DNA, 23 bp, synthetic construct
  misc_feature 1..23: note = Probe
  source 1..23: mol_type = other DNA
cgtggtgtagtggttatcacatt

SEQ ID NO: 19371 - DNA, 27 bp, synthetic construct
  misc_feature 1..27: note = Probe
  source 1..27: mol_type = other DNA
cgtggtgtagtggttatcacattcgcc

SEQ ID NO: 19372 - DNA, 23 bp, synthetic construct
  misc_feature 1..23: note = Probe
  source 1..23: mol_type = other DNA
cgtggttgtagtccgtgcgagaa

SEQ ID NO: 19373 - DNA, 25 bp, synthetic construct
  misc_feature 1..25: note = Probe
  source 1..25: mol_type = other DNA
cgtggttgtagtccgtgcgagaata

SEQ ID NO: 19374 - DNA, 26 bp, synthetic construct
  misc_feature 1..26: note = Probe
  source 1..26: mol_type = other DNA
cgtggttgtagtccgtgcgagaataa

SEQ ID NO: 19375 - DNA, 27 bp, synthetic construct
  misc_feature 1..27: note = Probe
  source 1..27: mol_type = other DNA
cgtggttgtagtccgtgcgagaataat

SEQ ID NO: 19376 - DNA, 28 bp, synthetic construct
  misc_feature 1..28: note = Probe
  source 1..28: mol_type = other DNA
cgtggttgtagtccgtgcgagaataatg

SEQ ID NO: 19377 - DNA, 23 bp, synthetic construct
  misc_feature 1..23: note = Probe
  source 1..23: mol_type = other DNA
cgttagcgcagtaggtagcgcgt

SEQ ID NO: 19378 - DNA, 26 bp, synthetic construct
  misc_feature 1..26: note = Probe
  source 1..26: mol_type = other DNA
cgttagtatagtggtgagtatccccg

SEQ ID NO: 19379 - DNA, 27 bp, synthetic construct
  misc_feature 1..27: note = Probe
  source 1..27: mol_type = other DNA
cgttagtatagtggtgagtatccccgc

SEQ ID NO: 19380 - DNA, 28 bp, synthetic construct
  misc_feature 1..28: note = Probe
  source 1..28: mol_type = other DNA
cgttagtatagtggtgagtatccccgcc

SEQ ID NO: 19381 - DNA, 30 bp, synthetic construct
  misc_feature 1..30: note = Probe
  source 1..30: mol_type = other DNA
cgttagtatagtggtgagtatccccgcctg

SEQ ID NO: 19382 - DNA, 33 bp, synthetic construct; identical to SEQ ID NO: 5127
  misc_feature 1..33: note = Probe
  source 1..33: mol_type = other DNA

SEQ ID NO: 19383 - DNA, 26 bp, synthetic construct
  misc_feature 1..26: note = Probe
  source 1..26: mol_type = other DNA
cgttagtctaggctgtcagctcttcc

SEQ ID NO: 19384 - DNA, 17 bp, synthetic construct
  misc_feature 1..17: note = Probe
  source 1..17: mol_type = other DNA
cgttcaggtcgcagtct

SEQ ID NO: 19385 - DNA, 20 bp, synthetic construct
  misc_feature 1..20: note = Probe
  source 1..20: mol_type = other DNA
cgttcaggtcgcagtctccc

SEQ ID NO: 19386 - DNA, 25 bp, synthetic construct
  misc_feature 1..25: note = Probe
  source 1..25: mol_type = other DNA
cgttggtggtatagtggtgagcata

SEQ ID NO: 19387 - DNA, 29 bp, synthetic construct
  misc_feature 1..29: note = Probe
  source 1..29: mol_type = other DNA
cgttggtggtatagtggtgagcatagctg

SEQ ID NO: 19388 - DNA, 30 bp, synthetic construct
  misc_feature 1..30: note = Probe
  source 1..30: mol_type = other DNA
cgttggtggtatagtggtgagcatagctgc

SEQ ID NO: 19389 - DNA, 31 bp, synthetic construct
  misc_feature 1..31: note = Probe
  source 1..31: mol_type = other DNA
cgttggtggtatagtggtgagcatagctgcc

SEQ ID NO: 19390 - DNA, 33 bp, synthetic construct
  misc_feature 1..33: note = Probe
  source 1..33: mol_type = other DNA
cgttggtggtatagtggtgagcatagctgcctt

SEQ ID NO: 19391 - DNA, 34 bp, synthetic construct
  misc_feature 1..34: note = Probe
  source 1..34: mol_type = other DNA
cgttggtggtatagtggtgagcatagctgccttc

SEQ ID NO: 19392 - DNA, 35 bp, synthetic construct; identical to SEQ ID NO: 5129
  misc_feature 1..35: note = Probe
  source 1..35: mol_type = other DNA

SEQ ID NO: 19393 - DNA, 38 bp, synthetic construct
  misc_feature 1..38: note = Probe
  source 1..38: mol_type = other DNA
cgttggtggtatagtggtgagcatagctgccttccaag

SEQ ID NO: 19394 - DNA, 40 bp, synthetic construct
  misc_feature 1..40: note = Probe
  source 1..40: mol_type = other DNA
cgttggtggtatagtggtgagcatagctgccttccaagca

SEQ ID NO: 19395 - DNA, 50 bp, synthetic construct
  misc_feature 1..50: note = Probe
  source 1..50: mol_type = other DNA
cgttggtggtatagtggtgagcatagctgccttccaagcagttgacccgg

SEQ ID NO: 19396 - DNA, 28 bp, synthetic construct
  misc_feature 1..28: note = Probe
  source 1..28: mol_type = other DNA
cgttggtggtatagtggttagcatagct

SEQ ID NO: 19397 - DNA, 29 bp, synthetic construct
  misc_feature 1..29: note = Probe
  source 1..29: mol_type = other DNA
cgttggtggtatagtggttagcatagctg

SEQ ID NO: 19398 - DNA, 34 bp, synthetic construct
  misc_feature 1..34: note = Probe
  source 1..34: mol_type = other DNA
cgttggtggtatagtggttagcatagctgccttc

SEQ ID NO: 19399 - DNA, 35 bp, synthetic construct; identical to SEQ ID NO: 5130
  misc_feature 1..35: note = Probe
  source 1..35: mol_type = other DNA

SEQ ID NO: 19400 - DNA, 38 bp, synthetic construct
  misc_feature 1..38: note = Probe
  source 1..38: mol_type = other DNA
cgttggtggtatagtggttagcatagctgccttccaag

SEQ ID NO: 19401 - DNA, 50 bp, synthetic construct
  misc_feature 1..50: note = Probe
  source 1..50: mol_type = other DNA
cgttggtggtatagtggttagcatagctgccttccaagcagttgacccgg

SEQ ID NO: 19402 - DNA, 19 bp, synthetic construct
  misc_feature 1..19: note = Probe
  source 1..19: mol_type = other DNA
ctaaacctagccccaaacc

SEQ ID NO: 19403 - DNA, 20 bp, synthetic construct
  misc_feature 1..20: note = Probe
  source 1..20: mol_type = other DNA
ctaaacctagccccaaaccc

SEQ ID NO: 19404 - DNA, 29 bp, synthetic construct
  misc_feature 1..29: note = Probe
  source 1..29: mol_type = other DNA
ctaaacctagccccaaacccactccacct

SEQ ID NO: 19405 - DNA, 15 bp, synthetic construct
  misc_feature 1..15: note = Probe
  source 1..15: mol_type = other DNA
ctaaagacaggggtt

SEQ ID NO: 19406 - DNA, 25 bp, synthetic construct
  misc_feature 1..25: note = Probe
  source 1..25: mol_type = other DNA
ctaaagacaggggttaggcctcttt

SEQ ID NO: 19407 - DNA, 26 bp, synthetic construct
  misc_feature 1..26: note = Probe
  source 1..26: mol_type = other DNA
ctaaagacaggggttaggcctctttt

SEQ ID NO: 19408 - DNA, 27 bp, synthetic construct
  misc_feature 1..27: note = Probe
  source 1..27: mol_type = other DNA
ctaaagacaggggttaggcctcttttt

SEQ ID NO: 19409 - DNA, 28 bp, synthetic construct
  misc_feature 1..28: note = Probe
  source 1..28: mol_type = other DNA
ctaaagacaggggttaggcctcttttta

SEQ ID NO: 19410 - DNA, 29 bp, synthetic construct
  misc_feature 1..29: note = Probe
  source 1..29: mol_type = other DNA
ctaaagacaggggttaggcctctttttac

SEQ ID NO: 19411 - DNA, 30 bp, synthetic construct; identical to SEQ ID NO: 5141
  misc_feature 1..30: note = Probe
  source 1..30: mol_type = other DNA

SEQ ID NO: 19412 - DNA, 31 bp, synthetic construct; identical to SEQ ID NO: 5142
  misc_feature 1..31: note = Probe
  source 1..31: mol_type = other DNA

SEQ ID NO: 19413 - DNA, 32 bp, synthetic construct; identical to SEQ ID NO: 5143
  misc_feature 1..32: note = Probe
  source 1..32: mol_type = other DNA

SEQ ID NO: 19414 - DNA, 33 bp, synthetic construct; identical to SEQ ID NO: 5144
  misc_feature 1..33: note = Probe
  source 1..33: mol_type = other DNA

SEQ ID NO: 19415 - DNA, 34 bp, synthetic construct; identical to SEQ ID NO: 5145
  misc_feature 1..34: note = Probe
  source 1..34: mol_type = other DNA

SEQ ID NO: 19416 - DNA, 35 bp, synthetic construct; identical to SEQ ID NO: 5146
  misc_feature 1..35: note = Probe
  source 1..35: mol_type = other DNA

SEQ ID NO: 19417 - DNA, 36 bp, synthetic construct; identical to SEQ ID NO: 5147
  misc_feature 1..36: note = Probe
  source 1..36: mol_type = other DNA

SEQ ID NO: 19418 - DNA, 37 bp, synthetic construct; identical to SEQ ID NO: 5148
  misc_feature 1..37: note = Probe
  source 1..37: mol_type = other DNA

SEQ ID NO: 19419 - DNA, 16 bp, synthetic construct
  misc_feature 1..16: note = Probe
  source 1..16: mol_type = other DNA
ctaaaggtccctggtt

SEQ ID NO: 19420 - DNA, 37 bp, synthetic construct
  misc_feature 1..37: note = Probe
  source 1..37: mol_type = other DNA
ctaaaggtccctggttcgatcccgggtttcggcactt

SEQ ID NO: 19421 - DNA, 20 bp, synthetic construct
  misc_feature 1..20: note = Probe
  source 1..20: mol_type = other DNA
ctaaataagctatcgggccc

SEQ ID NO: 19422 - DNA, 21 bp, synthetic construct
  misc_feature 1..21: note = Probe
  source 1..21: mol_type = other DNA
ctaaataagctatcgggccca

SEQ ID NO: 19423 - DNA, 22 bp, synthetic construct
  misc_feature 1..22: note = Probe
  source 1..22: mol_type = other DNA
ctaaataagctatcgggcccat

SEQ ID NO: 19424 - DNA, 23 bp, synthetic construct
  misc_feature 1..23: note = Probe
  source 1..23: mol_type = other DNA
ctaaataagctatcgggcccata

SEQ ID NO: 19425 - DNA, 22 bp, synthetic construct
  misc_feature 1..22: note = Probe
  source 1..22: mol_type = other DNA
ctaaatcctatatatcttaatg

SEQ ID NO: 19426 - DNA, 22 bp, synthetic construct
  misc_feature 1..22: note = Probe
  source 1..22: mol_type = other DNA
ctaacaacatggctttctcaac

SEQ ID NO: 19427 - DNA, 23 bp, synthetic construct
  misc_feature 1..23: note = Probe
  source 1..23: mol_type = other DNA
ctaacaacatggctttctcaact

SEQ ID NO: 19428 - DNA, 20 bp, synthetic construct
  misc_feature 1..20: note = Probe
  source 1..20: mol_type = other DNA
ctaacacgcgaaaggtcccc

SEQ ID NO: 19429 - DNA, 22 bp, synthetic construct
  misc_feature 1..22: note = Probe
  source 1..22: mol_type = other DNA
ctaacacgcgaaaggtccccgg

SEQ ID NO: 19430 - DNA, 23 bp, synthetic construct
  misc_feature 1..23: note = Probe
  source 1..23: mol_type = other DNA
ctaacacgcgaaaggtccccggt

SEQ ID NO: 19431 - DNA, 24 bp, synthetic construct
  misc_feature 1..24: note = Probe
  source 1..24: mol_type = other DNA
ctaacacgcgaaaggtccccggtt

SEQ ID NO: 19432 - DNA, 16 bp, synthetic construct
  misc_feature 1..16: note = Probe
  source 1..16: mol_type = other DNA
ctaactcatgccccca

SEQ ID NO: 19433 - DNA, 21 bp, synthetic construct
  misc_feature 1..21: note = Probe
  source 1..21: mol_type = other DNA
ctaactcatgcccccatgtct

SEQ ID NO: 19434 - DNA, 25 bp, synthetic construct
  misc_feature 1..25: note = Probe
  source 1..25: mol_type = other DNA
ctaactcatgcccccatgtctaaca

SEQ ID NO: 19435 - DNA, 33 bp, synthetic construct; identical to SEQ ID NO: 5158
  misc_feature 1..33: note = Probe
  source 1..33: mol_type = other DNA

SEQ ID NO: 19436 - DNA, 34 bp, synthetic construct; identical to SEQ ID NO: 5159
  misc_feature 1..34: note = Probe
  source 1..34: mol_type = other DNA

SEQ ID NO: 19437 - DNA, 36 bp, synthetic construct; identical to SEQ ID NO: 5161
  misc_feature 1..36: note = Probe
  source 1..36: mol_type = other DNA

SEQ ID NO: 19438 - DNA, 37 bp, synthetic construct; identical to SEQ ID NO: 5162
  misc_feature 1..37: note = Probe
  source 1..37: mol_type = other DNA

SEQ ID NO: 19439 - DNA, 38 bp, synthetic construct; identical to SEQ ID NO: 5163
  misc_feature 1..38: note = Probe
  source 1..38: mol_type = other DNA

SEQ ID NO: 19440 - DNA, 39 bp, synthetic construct; identical to SEQ ID NO: 5164
  misc_feature 1..39: note = Probe
  source 1..39: mol_type = other DNA

SEQ ID NO: 19441 - DNA, 40 bp, synthetic construct; identical to SEQ ID NO: 5165
  misc_feature 1..40: note = Probe
  source 1..40: mol_type = other DNA

SEQ ID NO: 19442 - DNA, 41 bp, synthetic construct; identical to SEQ ID NO: 5166
  misc_feature 1..41: note = Probe
  source 1..41: mol_type = other DNA

SEQ ID NO: 19443 - DNA, 42 bp, synthetic construct; identical to SEQ ID NO: 5167
  misc_feature 1..42: note = Probe
  source 1..42: mol_type = other DNA

SEQ ID NO: 19444 - DNA, 21 bp, synthetic construct
  misc_feature 1..21: note = Probe
  source 1..21: mol_type = other DNA
ctaagccagggattgtgggtt

SEQ ID NO: 19445 - DNA, 35 bp, synthetic construct
  misc_feature 1..35: note = Probe
  source 1..35: mol_type = other DNA
ctaagtgtttgtgggtttaagtcccattggtctag

SEQ ID NO: 19446 - DNA, 36 bp, synthetic construct
  misc_feature 1..36: note = Probe
  source 1..36: mol_type = other DNA
ctaagtgtttgtgggtttaagtcccattggtctagt

SEQ ID NO: 19447 - DNA, 37 bp, synthetic construct; identical to SEQ ID NO: 5172
  misc_feature 1..37: note = Probe
  source 1..37: mol_type = other DNA

SEQ ID NO: 19448 - DNA, 38 bp, synthetic construct; identical to SEQ ID NO: 5173
  misc_feature 1..38: note = Probe
  source 1..38: mol_type = other DNA

SEQ ID NO: 19449 - DNA, 39 bp, synthetic construct
  misc_feature 1..39: note = Probe
  source 1..39: mol_type = other DNA
ctaagtgtttgtgggtttaagtcccattggtctagtaag

SEQ ID NO: 19450 - DNA, 19 bp, synthetic construct
  misc_feature 1..19: note = Probe
  source 1..19: mol_type = other DNA
ctaataacgccaaggtcgc

SEQ ID NO: 19451 - DNA, 23 bp, synthetic construct
  misc_feature 1..23: note = Probe
  source 1..23: mol_type = other DNA
ctaataacgccaaggtcgcgggt

SEQ ID NO: 19452 - DNA, 24 bp, synthetic construct
  misc_feature 1..24: note = Probe
  source 1..24: mol_type = other DNA
ctaataacgccaaggtcgcgggtt

SEQ ID NO: 19453 - DNA, 18 bp, synthetic construct
  misc_feature 1..18: note = Probe
  source 1..18: mol_type = other DNA
ctaatggataaggcactg

SEQ ID NO: 19454 - DNA, 34 bp, synthetic construct
  misc_feature 1..34: note = Probe
  source 1..34: mol_type = other DNA
ctaatggtggagttaaagactttttctctgattt

SEQ ID NO: 19455 - DNA, 38 bp, synthetic construct; identical to SEQ ID NO: 5175
  misc_feature 1..38: note = Probe
  source 1..38: mol_type = other DNA

SEQ ID NO: 19456 - DNA, 39 bp, synthetic construct; identical to SEQ ID NO: 5176
  misc_feature 1..39: note = Probe
  source 1..39: mol_type = other DNA

SEQ ID NO: 19457 - DNA, 41 bp, synthetic construct; identical to SEQ ID NO: 5177
  misc_feature 1..41: note = Probe
  source 1..41: mol_type = other DNA

SEQ ID NO: 19458 - DNA, 26 bp, synthetic construct
  misc_feature 1..26: note = Probe
  source 1..26: mol_type = other DNA
ctacggatcagaagattctaggttcg

SEQ ID NO: 19459 - DNA, 19 bp, synthetic construct
  misc_feature 1..19: note = Probe
  source 1..19: mol_type = other DNA
ctacttcctcagcaggaga

SEQ ID NO: 19460 - DNA, 20 bp, synthetic construct
  misc_feature 1..20: note = Probe
  source 1..20: mol_type = other DNA
ctacttcctcagcaggagac

SEQ ID NO: 19461 - DNA, 23 bp, synthetic construct
  misc_feature 1..23: note = Probe
  source 1..23: mol_type = other DNA
ctagccccaaacccactccacct

SEQ ID NO: 19462 - DNA, 17 bp, synthetic construct
  misc_feature 1..17: note = Probe
  source 1..17: mol_type = other DNA
ctagcctttctattagc

SEQ ID NO: 19463 - DNA, 24 bp, synthetic construct
  misc_feature 1..24: note = Probe
  source 1..24: mol_type = other DNA
ctagcggttaggattcctggtttt

SEQ ID NO: 19464 - DNA, 25 bp, synthetic construct
  misc_feature 1..25: note = Probe
  source 1..25: mol_type = other DNA
ctagctcagtcggtagagcatgaga

SEQ ID NO: 19465 - DNA, 26 bp, synthetic construct
  misc_feature 1..26: note = Probe
  source 1..26: mol_type = other DNA
ctagctcagtcggtagagcatgagac

SEQ ID NO: 19466 - DNA, 27 bp, synthetic construct
  misc_feature 1..27: note = Probe
  source 1..27: mol_type = other DNA
ctagctcagtcggtagagcatgagact

SEQ ID NO: 19467 - DNA, 30 bp, synthetic construct
  misc_feature 1..30: note = Probe
  source 1..30: mol_type = other DNA
ctagctcagtcggtagagcatgagactctt

SEQ ID NO: 19468 - DNA, 23 bp, synthetic construct
  misc_feature 1..23: note = Probe
  source 1..23: mol_type = other DNA
ctagctcagtcggtagagcatgg

SEQ ID NO: 19469 - DNA, 30 bp, synthetic construct; identical to SEQ ID NO: 807
  misc_feature 1..30: note = Probe
  source 1..30: mol_type = other DNA

SEQ ID NO: 19470 - DNA, 16 bp, synthetic construct
  misc_feature 1..16: note = Probe
  source 1..16: mol_type = other DNA
ctaggggtatgattct

SEQ ID NO: 19471 - DNA, 19 bp, synthetic construct
  misc_feature 1..19: note = Probe
  source 1..19: mol_type = other DNA
ctaggggtatgattctcgc

SEQ ID NO: 19472 - DNA, 20 bp, synthetic construct
  misc_feature 1..20: note = Probe
  source 1..20: mol_type = other DNA
ctaggggtatgattctcgct

SEQ ID NO: 19473 - DNA, 23 bp, synthetic construct
  misc_feature 1..23: note = Probe
  source 1..23: mol_type = other DNA
ctaggggtatgattctcgcttag

SEQ ID NO: 19474 - DNA, 23 bp, synthetic construct
  misc_feature 1..23: note = Probe
  source 1..23: mol_type = other DNA
ctaggggtatgattctcgcttcg

SEQ ID NO: 19475 - DNA, 23 bp, synthetic construct
  misc_feature 1..23: note = Probe
  source 1..23: mol_type = other DNA
ctaggggtatgattctcgctttg

SEQ ID NO: 19476 - DNA, 24 bp, synthetic construct
  misc_feature 1..24: note = Probe
  source 1..24: mol_type = other DNA
ctaggggtatgattctcgctttgg

SEQ ID NO: 19477 - DNA, 38 bp, synthetic construct
  misc_feature 1..38: note = Probe
  source 1..38: mol_type = other DNA
ctagtggctaggattcggcgctttcaccgccgcggccc

SEQ ID NO: 19478 - DNA, 21 bp, synthetic construct
  misc_feature 1..21: note = Probe
  source 1..21: mol_type = other DNA
ctagtggttaggattcggcgc

SEQ ID NO: 19479 - DNA, 23 bp, synthetic construct
  misc_feature 1..23: note = Probe
  source 1..23: mol_type = other DNA
ctagtggttaggattcggcgctc

SEQ ID NO: 19480 - DNA, 24 bp, synthetic construct
  misc_feature 1..24: note = Probe
  source 1..24: mol_type = other DNA
ctagtggttaggattcggcgctct

SEQ ID NO: 19481 - DNA, 29 bp, synthetic construct
  misc_feature 1..29: note = Probe
  source 1..29: mol_type = other DNA
ctagttttgacaacattcaaaaaagagta

SEQ ID NO: 19482 - DNA, 30 bp, synthetic construct
  misc_feature 1..30: note = Probe
  source 1..30: mol_type = other DNA
ctagttttgacaacattcaaaaaagagtaa

SEQ ID NO: 19483 - DNA, 15 bp, synthetic construct
  misc_feature 1..15: note = Probe
  source 1..15: mol_type = other DNA
ctatagcaccccctc

SEQ ID NO: 19484 - DNA, 23 bp, synthetic construct
  misc_feature 1..23: note = Probe
  source 1..23: mol_type = other DNA
ctatagcaccccctctaccccct

SEQ ID NO: 19485 - DNA, 23 bp, synthetic construct
  misc_feature 1..23: note = Probe
  source 1..23: mol_type = other DNA
ctatccattggtcttaggcccca

SEQ ID NO: 19486 - DNA, 50 bp, synthetic construct; identical to SEQ ID NO: 5191
  misc_feature 1..50: note = Probe
  source 1..50: mol_type = other DNA

SEQ ID NO: 19487 - DNA, 23 bp, synthetic construct
  misc_feature 1..23: note = Probe
  source 1..23: mol_type = other DNA
ctatcgggcccataccccgaaaa

SEQ ID NO: 19488 - DNA, 24 bp, synthetic construct
  misc_feature 1..24: note = Probe
  source 1..24: mol_type = other DNA
ctatcgggcccataccccgaaaat

SEQ ID NO: 19489 - DNA, 15 bp, synthetic construct
  misc_feature 1..15: note = Probe
  source 1..15: mol_type = other DNA
ctatctcccctttta

SEQ ID NO: 19490 - DNA, 19 bp, synthetic construct
  misc_feature 1..19: note = Probe
  source 1..19: mol_type = other DNA
ctatctccccttttatact

SEQ ID NO: 19491 - DNA, 20 bp, synthetic construct
  misc_feature 1..20: note = Probe
  source 1..20: mol_type = other DNA
ctatctccccttttatacta

SEQ ID NO: 19492 - DNA, 16 bp, synthetic construct
  misc_feature 1..16: note = Probe
  source 1..16: mol_type = other DNA
ctcaaagcaatacact

SEQ ID NO: 19493 - DNA, 19 bp, synthetic construct
  misc_feature 1..19: note = Probe
  source 1..19: mol_type = other DNA
ctcaaagcaatacactgaa

SEQ ID NO: 19494 - DNA, 31 bp, synthetic construct
  misc_feature 1..31: note = Probe
  source 1..31: mol_type = other DNA
ctcaaagcaatacactgaaaatgtttagacg

SEQ ID NO: 19495 - DNA, 46 bp, synthetic construct; identical to SEQ ID NO: 809
  misc_feature 1..46: note = Probe
  source 1..46: mol_type = other DNA

SEQ ID NO: 19496 - DNA, 21 bp, synthetic construct
  misc_feature 1..21: note = Probe
  source 1..21: mol_type = other DNA
ctcacaagaactgctaactca

SEQ ID NO: 19497 - DNA, 23 bp, synthetic construct
  misc_feature 1..23: note = Probe
  source 1..23: mol_type = other DNA
ctcacaagaactgctaactcatg

SEQ ID NO: 19498 - DNA, 20 bp, synthetic construct
  misc_feature 1..20: note = Probe
  source 1..20: mol_type = other DNA
ctcacacgcgaaaggtcccc

SEQ ID NO: 19499 - DNA, 22 bp, synthetic construct
  misc_feature 1..22: note = Probe
  source 1..22: mol_type = other DNA
ctcacacgcgaaaggtccccgg

SEQ ID NO: 19500 - DNA, 24 bp, synthetic construct
  misc_feature 1..24: note = Probe
  source 1..24: mol_type = other DNA
ctcacacgcgaaaggtccccggtt

SEQ ID NO: 19501 - DNA, 22 bp, synthetic construct
  misc_feature 1..22: note = Probe
  source 1..22: mol_type = other DNA
ctcacacggggcacaataattt

SEQ ID NO: 19502 - DNA, 20 bp, synthetic construct
  misc_feature 1..20: note = Probe
  source 1..20: mol_type = other DNA
ctcacatcaccccataaaca

SEQ ID NO: 19503 - DNA, 21 bp, synthetic construct
  misc_feature 1..21: note = Probe
  source 1..21: mol_type = other DNA
ctcacatcaccccataaacaa

SEQ ID NO: 19504 - DNA, 22 bp, synthetic construct
  misc_feature 1..22: note = Probe
  source 1..22: mol_type = other DNA
ctcacatcaccccataaacaaa

SEQ ID NO: 19505 - DNA, 23 bp, synthetic construct
  misc_feature 1..23: note = Probe
  source 1..23: mol_type = other DNA
ctcacatcaccccataaacaaat

SEQ ID NO: 19506 - DNA, 42 bp, synthetic construct
  misc_feature 1..42: note = Probe
  source 1..42: mol_type = other DNA
ctcaccgccgcggcccgggttcgattcccggtcagggaaaga

SEQ ID NO: 19507 - DNA, 42 bp, synthetic construct
  misc_feature 1..42: note = Probe
  source 1..42: mol_type = other DNA
ctcaccgccgcggcccgggttcgattcccggtcagggaagcc

SEQ ID NO: 19508 - DNA, 42 bp, synthetic construct
  misc_feature 1..42: note = Probe
  source 1..42: mol_type = other DNA
ctcaccgccgcggcccgggttcgattcccggtcagggaagtc

SEQ ID NO: 19509 - DNA, 42 bp, synthetic construct
  misc_feature 1..42: note = Probe
  source 1..42: mol_type = other DNA
ctcaccgccgcggcccgggttcgattcccggtcagggaatga

SEQ ID NO: 19510 - DNA, 19 bp, synthetic construct
  misc_feature 1..19: note = Probe
  source 1..19: mol_type = other DNA
ctcagaaggtctcactttt

SEQ ID NO: 19511 - DNA, 23 bp, synthetic construct
  misc_feature 1..23: note = Probe
  source 1..23: mol_type = other DNA
ctcagagggggcagctgccattt

SEQ ID NO: 19512 - DNA, 17 bp, synthetic construct
  misc_feature 1..17: note = Probe
  source 1..17: mol_type = other DNA
ctcagggatgggttcga

SEQ ID NO: 19513 - DNA, 29 bp, synthetic construct
  misc_feature 1..29: note = Probe
  source 1..29: mol_type = other DNA
ctcagggatgggttcgattctcatagtcc

SEQ ID NO: 19514 - DNA, 32 bp, synthetic construct; identical to SEQ ID NO: 816
  misc_feature 1..32: note = Probe
  source 1..32: mol_type = other DNA

SEQ ID NO: 19515 - DNA, 33 bp, synthetic construct; identical to SEQ ID NO: 5218
  misc_feature 1..33: note = Probe
  source 1..33: mol_type = other DNA

SEQ ID NO: 19516 - DNA, 35 bp, synthetic construct; identical to SEQ ID NO: 5220
  misc_feature 1..35: note = Probe
  source 1..35: mol_type = other DNA

SEQ ID NO: 19517 - DNA, 37 bp, synthetic construct
  misc_feature 1..37: note = Probe
  source 1..37: mol_type = other DNA
ctcagggtcgtgggttcgagccccacgttgggcggca

SEQ ID NO: 19518 - DNA, 26 bp, synthetic construct
  misc_feature 1..26: note = Probe
  source 1..26: mol_type = other DNA
ctcagtaagttgcaatacttaatttc

SEQ ID NO: 19519 - DNA, 27 bp, synthetic construct
  misc_feature 1..27: note = Probe
  source 1..27: mol_type = other DNA
ctcagtaagttgcaatacttaatttct

SEQ ID NO: 19520 - DNA, 28 bp, synthetic construct
  misc_feature 1..28: note = Probe
  source 1..28: mol_type = other DNA
ctcagtaagttgcaatacttaatttctg

SEQ ID NO: 19521 - DNA, 31 bp, synthetic construct
  misc_feature 1..31: note = Probe
  source 1..31: mol_type = other DNA
ctcagtaagttgcaatacttaatttctgtaa

SEQ ID NO: 19522 - DNA, 16 bp, synthetic construct
  misc_feature 1..16: note = Probe
  source 1..16: mol_type = other DNA
ctcagtcggtagagca

SEQ ID NO: 19523 - DNA, 21 bp, synthetic construct
  misc_feature 1..21: note = Probe
  source 1..21: mol_type = other DNA
ctcagtcggtagagcatggga

SEQ ID NO: 19524 - DNA, 25 bp, synthetic construct
  misc_feature 1..25: note = Probe
  source 1..25: mol_type = other DNA
ctcagtcggtagagcatgggactct

SEQ ID NO: 19525 - DNA, 26 bp, synthetic construct
  misc_feature 1..26: note = Probe
  source 1..26: mol_type = other DNA
ctcagtcggtagagcatgggactctt

SEQ ID NO: 19526 - DNA, 31 bp, synthetic construct
  misc_feature 1..31: note = Probe
  source 1..31: mol_type = other DNA
ctcagtggtctagtggttaggattcagcgct

SEQ ID NO: 19527 - DNA, 23 bp, synthetic construct
  misc_feature 1..23: note = Probe
  source 1..23: mol_type = other DNA
ctcataatctgaaggtcctgagt

SEQ ID NO: 19528 - DNA, 33 bp, synthetic construct
  misc_feature 1..33: note = Probe
  source 1..33: mol_type = other DNA
ctcatcagtatagtggtgagtatccccgcctgt

SEQ ID NO: 19529 - DNA, 16 bp, synthetic construct
  misc_feature 1..16: note = Probe
  source 1..16: mol_type = other DNA
ctcatgcccccatgtc

SEQ ID NO: 19530 - DNA, 17 bp, synthetic construct
  misc_feature 1..17: note = Probe
  source 1..17: mol_type = other DNA
ctcatgcccccatgtct

SEQ ID NO: 19531 - DNA, 29 bp, synthetic construct
  misc_feature 1..29: note = Probe
  source 1..29: mol_type = other DNA
ctcatgcccccatgtctaacaacatggct

SEQ ID NO: 19532 - DNA, 30 bp, synthetic construct; identical to SEQ ID NO: 5236
  misc_feature 1..30: note = Probe
  source 1..30: mol_type = other DNA

SEQ ID NO: 19533 - DNA, 31 bp, synthetic construct; identical to SEQ ID NO: 5237
  misc_feature 1..31: note = Probe
  source 1..31: mol_type = other DNA

SEQ ID NO: 19534 - DNA, 32 bp, synthetic construct; identical to SEQ ID NO: 5238
  misc_feature 1..32: note = Probe
  source 1..32: mol_type = other DNA

SEQ ID NO: 19535 - DNA, 33 bp, synthetic construct; identical to SEQ ID NO: 5239
  misc_feature 1..33: note = Probe
  source 1..33: mol_type = other DNA

SEQ ID NO: 19536 - DNA, 34 bp, synthetic construct; identical to SEQ ID NO: 5240
  misc_feature 1..34: note = Probe
  source 1..34: mol_type = other DNA

SEQ ID NO: 19537 - DNA, 35 bp, synthetic construct; identical to SEQ ID NO: 5241
  misc_feature 1..35: note = Probe
  source 1..35: mol_type = other DNA

SEQ ID NO: 19538 - DNA, 36 bp, synthetic construct; identical to SEQ ID NO: 5242
  misc_feature 1..36: note = Probe
  source 1..36: mol_type = other DNA

SEQ ID NO: 19539 - DNA, 37 bp, synthetic construct; identical to SEQ ID NO: 5243
  misc_feature 1..37: note = Probe
  source 1..37: mol_type = other DNA

SEQ ID NO: 19540 - DNA, 38 bp, synthetic construct; identical to SEQ ID NO: 5244
  misc_feature 1..38: note = Probe
  source 1..38: mol_type = other DNA

SEQ ID NO: 19541 - DNA, 39 bp, synthetic construct
  misc_feature 1..39: note = Probe
  source 1..39: mol_type = other DNA
ctcatgcccccatgtctaacaacatggctttctcaactt

SEQ ID NO: 19542 - DNA, 34 bp, synthetic construct; identical to SEQ ID NO: 5247
  misc_feature 1..34: note = Probe
  source 1..34: mol_type = other DNA

SEQ ID NO: 19543 - DNA, 24 bp, synthetic construct
  misc_feature 1..24: note = Probe
  source 1..24: mol_type = other DNA
ctcatttacataaatattatacta

SEQ ID NO: 19544 - DNA, 25 bp, synthetic construct
  misc_feature 1..25: note = Probe
  source 1..25: mol_type = other DNA
ctccagtcatttcgatggcgtgggt

SEQ ID NO: 19545 - DNA, 50 bp, synthetic construct; identical to SEQ ID NO: 5248
  misc_feature 1..50: note = Probe
  source 1..50: mol_type = other DNA

SEQ ID NO: 19546 - DNA, 41 bp, synthetic construct
  misc_feature 1..41: note = Probe
  source 1..41: mol_type = other DNA
ctccagtctcttcgggggcgtgggttcgaatcccaccgctg

SEQ ID NO: 19547 - DNA, 42 bp, synthetic construct
  misc_feature 1..42: note = Probe
  source 1..42: mol_type = other DNA
ctccagtctcttcgggggcgtgggttcgaatcccaccgctgc

SEQ ID NO: 19548 - DNA, 50 bp, synthetic construct; identical to SEQ ID NO: 5249
  misc_feature 1..50: note = Probe
  source 1..50: mol_type = other DNA

SEQ ID NO: 19549 - DNA, 17 bp, synthetic construct
  misc_feature 1..17: note = Probe
  source 1..17: mol_type = other DNA
ctccatagctcaggggt

SEQ ID NO: 19550 - DNA, 27 bp, synthetic construct
  misc_feature 1..27: note = Probe
  source 1..27: mol_type = other DNA
ctccatagctcaggggttagagcactg

SEQ ID NO: 19551 - DNA, 28 bp, synthetic construct
  misc_feature 1..28: note = Probe
  source 1..28: mol_type = other DNA
ctccatagctcaggggttagagcactgg

SEQ ID NO: 19552 - DNA, 29 bp, synthetic construct
  misc_feature 1..29: note = Probe
  source 1..29: mol_type = other DNA
ctccatagctcaggggttagagcactggt

SEQ ID NO: 19553 - DNA, 30 bp, synthetic construct
  misc_feature 1..30: note = Probe
  source 1..30: mol_type = other DNA
ctccatagctcaggggttagagcactggtc

SEQ ID NO: 19554 - DNA, 29 bp, synthetic construct
  misc_feature 1..29: note = Probe
  source 1..29: mol_type = other DNA
ctccatagctcagtggttagagcactggt

SEQ ID NO: 19555 - DNA, 16 bp, synthetic construct
  misc_feature 1..16: note = Probe
  source 1..16: mol_type = other DNA
ctcccgccttttttcc

SEQ ID NO: 19556 - DNA, 17 bp, synthetic construct
  misc_feature 1..17: note = Probe
  source 1..17: mol_type = other DNA
ctcccgccttttttccc

SEQ ID NO: 19557 - DNA, 18 bp, synthetic construct
  misc_feature 1..18: note = Probe
  source 1..18: mol_type = other DNA
ctcccgccttttttcccg

SEQ ID NO: 19558 - DNA, 19 bp, synthetic construct
  misc_feature 1..19: note = Probe
  source 1..19: mol_type = other DNA
ctcccgccttttttcccgg

SEQ ID NO: 19559 - DNA, 20 bp, synthetic construct
  misc_feature 1..20: note = Probe
  source 1..20: mol_type = other DNA
ctcccgccttttttcccggc

SEQ ID NO: 19560 - DNA, 21 bp, synthetic construct
  misc_feature 1..21: note = Probe
  source 1..21: mol_type = other DNA
ctcccgccttttttcccggcg

SEQ ID NO: 19561 - DNA, 22 bp, synthetic construct
  misc_feature 1..22: note = Probe
  source 1..22: mol_type = other DNA
ctcccgccttttttcccggcgg

SEQ ID NO: 19562 - DNA, 23 bp, synthetic construct
  misc_feature 1..23: note = Probe
  source 1..23: mol_type = other DNA
ctcccgccttttttcccggcggc

SEQ ID NO: 19563 - DNA, 24 bp, synthetic construct
  misc_feature 1..24: note = Probe
  source 1..24: mol_type = other DNA
ctcccgccttttttcccggcggcg

SEQ ID NO: 19564 - DNA, 25 bp, synthetic construct
  misc_feature 1..25: note = Probe
  source 1..25: mol_type = other DNA
ctcccgccttttttcccggcggcgg

SEQ ID NO: 19565 - DNA, 26 bp, synthetic construct
  misc_feature 1..26: note = Probe
  source 1..26: mol_type = other DNA
ctcccgccttttttcccggcggcggg

SEQ ID NO: 19566 - DNA, 27 bp, synthetic construct
  misc_feature 1..27: note = Probe
  source 1..27: mol_type = other DNA
ctcccgccttttttcccggcggcggga

SEQ ID NO: 19567 - DNA, 28 bp, synthetic construct
  misc_feature 1..28: note = Probe
  source 1..28: mol_type = other DNA
ctcccgccttttttcccggcggcgggag

SEQ ID NO: 19568 - DNA, 29 bp, synthetic construct
  misc_feature 1..29: note = Probe
  source 1..29: mol_type = other DNA
ctcccgccttttttcccggcggcgggaga

SEQ ID NO: 19569 - DNA, 30 bp, synthetic construct; identical to SEQ ID NO: 5265
  misc_feature 1..30: note = Probe
  source 1..30: mol_type = other DNA

SEQ ID NO: 19570 - DNA, 18 bp, synthetic construct
  misc_feature 1..18: note = Probe
  source 1..18: mol_type = other DNA
ctcccggtatgggaacaa

SEQ ID NO: 19571 - DNA, 17 bp, synthetic construct
  misc_feature 1..17: note = Probe
  source 1..17: mol_type = other DNA
ctcccggtgtgggaacg

SEQ ID NO: 19572 - DNA, 18 bp, synthetic construct
  misc_feature 1..18: note = Probe
  source 1..18: mol_type = other DNA
ctcccggtgtgggaacgc

SEQ ID NO: 19573 - DNA, 28 bp, synthetic construct
  misc_feature 1..28: note = Probe
  source 1..28: mol_type = other DNA
ctcccggtgtgggaacgccgaaatttta

SEQ ID NO: 19574 - DNA, 18 bp, synthetic construct
  misc_feature 1..18: note = Probe
  source 1..18: mol_type = other DNA
ctcccggtgtgggaatga

SEQ ID NO: 19575 - DNA, 28 bp, synthetic construct
  misc_feature 1..28: note = Probe
  source 1..28: mol_type = other DNA
ctccgaggtgattttcatattgaattgc

SEQ ID NO: 19576 - DNA, 15 bp, synthetic construct
  misc_feature 1..15: note = Probe
  source 1..15: mol_type = other DNA
ctccgtgccacctat

SEQ ID NO: 19577 - DNA, 21 bp, synthetic construct
  misc_feature 1..21: note = Probe
  source 1..21: mol_type = other DNA
ctcctcaaagcaatacactga

SEQ ID NO: 19578 - DNA, 27 bp, synthetic construct
  misc_feature 1..27: note = Probe
  source 1..27: mol_type = other DNA
ctcgcctgccacgcgggaggcccgggt

SEQ ID NO: 19579 - DNA, 28 bp, synthetic construct
  misc_feature 1..28: note = Probe
  source 1..28: mol_type = other DNA
ctcggctttccctgctaactgggctttt

SEQ ID NO: 19580 - DNA, 29 bp, synthetic construct
  misc_feature 1..29: note = Probe
  source 1..29: mol_type = other DNA
ctcggctttccctgctaactgggcttttt

SEQ ID NO: 19581 - DNA, 30 bp, synthetic construct
  misc_feature 1..30: note = Probe
  source 1..30: mol_type = other DNA
ctcggctttccctgctaactgggctttttt

SEQ ID NO: 19582 - DNA, 27 bp, synthetic construct
  misc_feature 1..27: note = Probe
  source 1..27: mol_type = other DNA
ctcgttagtatagtggtgagtatcccc

SEQ ID NO: 19583 - DNA, 28 bp, synthetic construct
  misc_feature 1..28: note = Probe
  source 1..28: mol_type = other DNA
ctcgttagtatagtggtgagtatccccg

SEQ ID NO: 19584 - DNA, 29 bp, synthetic construct
  misc_feature 1..29: note = Probe
  source 1..29: mol_type = other DNA
ctcgttagtatagtggtgagtatccccgc

SEQ ID NO: 19585 - DNA, 36 bp, synthetic construct
  misc_feature 1..36: note = Probe
  source 1..36: mol_type = other DNA
ctcgttagtatagtggtgagtatccccgcctgtcac

SEQ ID NO: 19586 - DNA, 37 bp, synthetic construct; identical to SEQ ID NO: 5273
  misc_feature 1..37: note = Probe
  source 1..37: mol_type = other DNA

SEQ ID NO: 19587 - DNA, 38 bp, synthetic construct
  misc_feature 1..38: note = Probe
  source 1..38: mol_type = other DNA
ctcgttagtatagtggtgagtatccccgcctgtcacgc

SEQ ID NO: 19588 - DNA, 34 bp, synthetic construct; identical to SEQ ID NO: 822
  misc_feature 1..34: note = Probe
  source 1..34: mol_type = other DNA

SEQ ID NO: 19589 - DNA, 18 bp, synthetic construct
  misc_feature 1..18: note = Probe
  source 1..18: mol_type = other DNA
ctctcaccgccgcggccc

SEQ ID NO: 19590 - DNA, 22 bp, synthetic construct
  misc_feature 1..22: note = Probe
  source 1..22: mol_type = other DNA
ctctcaccgccgcggcccgggt

SEQ ID NO: 19591 - DNA, 44 bp, synthetic construct
  misc_feature 1..44: note = Probe
  source 1..44: mol_type = other DNA
ctctcaccgccgcggcccgggttcgattcccggtcagggaagcc

SEQ ID NO: 19592 - DNA, 44 bp, synthetic construct
  misc_feature 1..44: note = Probe
  source 1..44: mol_type = other DNA
ctctcaccgccgcggcccgggttcgattcccggtcagggaagtc

SEQ ID NO: 19593 - DNA, 19 bp, synthetic construct
  misc_feature 1..19: note = Probe
  source 1..19: mol_type = other DNA
ctctgaatccagcgatccg

SEQ ID NO: 19594 - DNA, 20 bp, synthetic construct
  misc_feature 1..20: note = Probe
  source 1..20: mol_type = other DNA
ctctgaatccagcgatccga

SEQ ID NO: 19595 - DNA, 21 bp, synthetic construct
  misc_feature 1..21: note = Probe
  source 1..21: mol_type = other DNA
ctctgaatccagcgatccgag

SEQ ID NO: 19596 - DNA, 22 bp, synthetic construct
  misc_feature 1..22: note = Probe
  source 1..22: mol_type = other DNA
ctctgaatccagcgatccgagt

SEQ ID NO: 19597 - DNA, 38 bp, synthetic construct
  misc_feature 1..38: note = Probe
  source 1..38: mol_type = other DNA
ctctgaatccagcgatccgagttcaaatctcggtggaa

SEQ ID NO: 19598 - DNA, 15 bp, synthetic construct
  misc_feature 1..15: note = Probe
  source 1..15: mol_type = other DNA
ctctgcctgccaact

SEQ ID NO: 19599 - DNA, 50 bp, synthetic construct; identical to SEQ ID NO: 5278
  misc_feature 1..50: note = Probe
  source 1..50: mol_type = other DNA

SEQ ID NO: 19600 - DNA, 41 bp, synthetic construct
  misc_feature 1..41: note = Probe
  source 1..41: mol_type = other DNA
ctgaaaatgtttagacgggctcacatcaccccataaacaaa

SEQ ID NO: 19601 - DNA, 42 bp, synthetic construct; identical to SEQ ID NO: 5280
  misc_feature 1..42: note = Probe
  source 1..42: mol_type = other DNA

SEQ ID NO: 19602 - DNA, 43 bp, synthetic construct; identical to SEQ ID NO: 5281
  misc_feature 1..43: note = Probe
  source 1..43: mol_type = other DNA

SEQ ID NO: 19603 - DNA, 44 bp, synthetic construct; identical to SEQ ID NO: 5282
  misc_feature 1..44: note = Probe
  source 1..44: mol_type = other DNA

SEQ ID NO: 19604 - DNA, 16 bp, synthetic construct
  misc_feature 1..16: note = Probe
  source 1..16: mol_type = other DNA
ctgaaggtcctgagtt

SEQ ID NO: 19605 - DNA, 37 bp, synthetic construct; identical to SEQ ID NO: 5284
  misc_feature 1..37: note = Probe
  source 1..37: mol_type = other DNA

SEQ ID NO: 19606 - DNA, 37 bp, synthetic construct
  misc_feature 1..37: note = Probe
  source 1..37: mol_type = other DNA
ctgaaggtcctgagttcgagcctcagagagggcagct

SEQ ID NO: 19607 - DNA, 16 bp, synthetic construct
  misc_feature 1..16: note = Probe
  source 1..16: mol_type = other DNA
ctgaaggtcgtgagtt

SEQ ID NO: 19608 - DNA, 31 bp, synthetic construct
  misc_feature 1..31: note = Probe
  source 1..31: mol_type = other DNA
ctgaaggtcgtgagttcgagcctcacacggg

SEQ ID NO: 19609 - DNA, 31 bp, synthetic construct
  misc_feature 1..31: note = Probe
  source 1..31: mol_type = other DNA
ctgaaggtcgtgagttcgatcctcacacggg

SEQ ID NO: 19610 - DNA, 36 bp, synthetic construct
  misc_feature 1..36: note = Probe
  source 1..36: mol_type = other DNA
ctgaaggtcgtgagttcgatcctcacacggggcaca

SEQ ID NO: 19611 - DNA, 37 bp, synthetic construct; identical to SEQ ID NO: 5287
  misc_feature 1..37: note = Probe
  source 1..37: mol_type = other DNA

SEQ ID NO: 19612 - DNA, 39 bp, synthetic construct; identical to SEQ ID NO: 833
  misc_feature 1..39: note = Probe
  source 1..39: mol_type = other DNA

SEQ ID NO: 19613 - DNA, 42 bp, synthetic construct; identical to SEQ ID NO: 5291
  misc_feature 1..42: note = Probe
  source 1..42: mol_type = other DNA

SEQ ID NO: 19614 - DNA, 33 bp, synthetic construct; identical to SEQ ID NO: 836
  misc_feature 1..33: note = Probe
  source 1..33: mol_type = other DNA

SEQ ID NO: 19615 - DNA, 34 bp, synthetic construct; identical to SEQ ID NO: 5298
  misc_feature 1..34: note = Probe
  source 1..34: mol_type = other DNA

SEQ ID NO: 19616 - DNA, 35 bp, synthetic construct; identical to SEQ ID NO: 5299
  misc_feature 1..35: note = Probe
  source 1..35: mol_type = other DNA

SEQ ID NO: 19617 - DNA, 36 bp, synthetic construct; identical to SEQ ID NO: 5300
  misc_feature 1..36: note = Probe
  source 1..36: mol_type = other DNA

SEQ ID NO: 19618 - DNA, 31 bp, synthetic construct
  misc_feature 1..31: note = Probe
  source 1..31: mol_type = other DNA
ctgagggtccagggttcaagtccctgttcgg

SEQ ID NO: 19619 - DNA, 34 bp, synthetic construct
  misc_feature 1..34: note = Probe
  source 1..34: mol_type = other DNA
ctgagggtccagggttcaagtccctgttcgggcg

SEQ ID NO: 19620 - DNA, 37 bp, synthetic construct; identical to SEQ ID NO: 5304
  misc_feature 1..37: note = Probe
  source 1..37: mol_type = other DNA

SEQ ID NO: 19621 - DNA, 31 bp, synthetic construct
  misc_feature 1..31: note = Probe
  source 1..31: mol_type = other DNA
ctgcagctagctcagtcggtagagcatgaga

SEQ ID NO: 19622 - DNA, 32 bp, synthetic construct
  misc_feature 1..32: note = Probe
  source 1..32: mol_type = other DNA
ctgcagctagctcagtcggtagagcatgagac

SEQ ID NO: 19623 - DNA, 33 bp, synthetic construct; identical to SEQ ID NO: 5307
  misc_feature 1..33: note = Probe
  source 1..33: mol_type = other DNA

SEQ ID NO: 19624 - DNA, 25 bp, synthetic construct
  misc_feature 1..25: note = Probe
  source 1..25: mol_type = other DNA
ctgccacacctcagaaggtctcact

SEQ ID NO: 19625 - DNA, 24 bp, synthetic construct
  misc_feature 1..24: note = Probe
  source 1..24: mol_type = other DNA
ctgccacgcgggaggcccgggttt

SEQ ID NO: 19626 - DNA, 30 bp, synthetic construct; identical to SEQ ID NO: 5308
  misc_feature 1..30: note = Probe
  source 1..30: mol_type = other DNA

SEQ ID NO: 19627 - DNA, 19 bp, synthetic construct
  misc_feature 1..19: note = Probe
  source 1..19: mol_type = other DNA
ctgctaactcatgccccca

SEQ ID NO: 19628 - DNA, 28 bp, synthetic construct
  misc_feature 1..28: note = Probe
  source 1..28: mol_type = other DNA
ctgctaactcatgcccccatgtctaaca

SEQ ID NO: 19629 - DNA, 36 bp, synthetic construct; identical to SEQ ID NO: 5314
  misc_feature 1..36: note = Probe
  source 1..36: mol_type = other DNA

SEQ ID NO: 19630 - DNA, 37 bp, synthetic construct; identical to SEQ ID NO: 5315
  misc_feature 1..37: note = Probe
  source 1..37: mol_type = other DNA

SEQ ID NO: 19631 - DNA, 38 bp, synthetic construct; identical to SEQ ID NO: 5316
  misc_feature 1..38: note = Probe
  source 1..38: mol_type = other DNA

SEQ ID NO: 19632 - DNA, 39 bp, synthetic construct; identical to SEQ ID NO: 5317
  misc_feature 1..39: note = Probe
  source 1..39: mol_type = other DNA

SEQ ID NO: 19633 - DNA, 40 bp, synthetic construct; identical to SEQ ID NO: 5318
  misc_feature 1..40: note = Probe
  source 1..40: mol_type = other DNA

SEQ ID NO: 19634 - DNA, 41 bp, synthetic construct; identical to SEQ ID NO: 5319
  misc_feature 1..41: note = Probe
  source 1..41: mol_type = other DNA

SEQ ID NO: 19635 - DNA, 42 bp, synthetic construct; identical to SEQ ID NO: 5320
  misc_feature 1..42: note = Probe
  source 1..42: mol_type = other DNA

SEQ ID NO: 19636 - DNA, 43 bp, synthetic construct; identical to SEQ ID NO: 5321
  misc_feature 1..43: note = Probe
  source 1..43: mol_type = other DNA

SEQ ID NO: 19637 - DNA, 44 bp, synthetic construct; identical to SEQ ID NO: 5322
  misc_feature 1..44: note = Probe
  source 1..44: mol_type = other DNA

SEQ ID NO: 19638 - DNA, 45 bp, synthetic construct; identical to SEQ ID NO: 5323
  misc_feature 1..45: note = Probe
  source 1..45: mol_type = other DNA

SEQ ID NO: 19639 - DNA, 16 bp, synthetic construct
  misc_feature 1..16: note = Probe
  source 1..16: mol_type = other DNA
ctgctatcggagtttt

SEQ ID NO: 19640 - DNA, 17 bp, synthetic construct
  misc_feature 1..17: note = Probe
  source 1..17: mol_type = other DNA
ctgctatcggagttttt

SEQ ID NO: 19641 - DNA, 24 bp, synthetic construct
  misc_feature 1..24: note = Probe
  source 1..24: mol_type = other DNA
ctggaaagtgcacttggacgaacc

SEQ ID NO: 19642 - DNA, 30 bp, synthetic construct
  misc_feature 1..30: note = Probe
  source 1..30: mol_type = other DNA
ctggcggtctagtggttaggattcggcgct

SEQ ID NO: 19643 - DNA, 24 bp, synthetic construct
  misc_feature 1..24: note = Probe
  source 1..24: mol_type = other DNA
ctggctggctcgcgatgtctgttt

SEQ ID NO: 19644 - DNA, 25 bp, synthetic construct
  misc_feature 1..25: note = Probe
  source 1..25: mol_type = other DNA
ctggctggctcgcgatgtctgtttt

SEQ ID NO: 19645 - DNA, 27 bp, synthetic construct
  misc_feature 1..27: note = Probe
  source 1..27: mol_type = other DNA
ctggggattgtgggttcgagtcccatc

SEQ ID NO: 19646 - DNA, 30 bp, synthetic construct
  misc_feature 1..30: note = Probe
  source 1..30: mol_type = other DNA
ctggggattgtgggttcgagtcccatctgg

SEQ ID NO: 19647 - DNA, 31 bp, synthetic construct
  misc_feature 1..31: note = Probe
  source 1..31: mol_type = other DNA
ctggggattgtgggttcgagtcccatctggg

SEQ ID NO: 19648 - DNA, 37 bp, synthetic construct
  misc_feature 1..37: note = Probe
  source 1..37: mol_type = other DNA
ctggggattgtgggttcgagtcccatctgggtcgcgt

SEQ ID NO: 19649 - DNA, 31 bp, synthetic construct
  misc_feature 1..31: note = Probe
  source 1..31: mol_type = other DNA
ctgggtagctcagtcggtagagcatcagact

SEQ ID NO: 19650 - DNA, 41 bp, synthetic construct
  misc_feature 1..41: note = Probe
  source 1..41: mol_type = other DNA
ctggtctccaatggaggcgtgggttcgaatcccacttctga

SEQ ID NO: 19651 - DNA, 23 bp, synthetic construct
  misc_feature 1..23: note = Probe
  source 1..23: mol_type = other DNA
ctggtctccggatggaggcgtgg

SEQ ID NO: 19652 - DNA, 31 bp, synthetic construct
  misc_feature 1..31: note = Probe
  source 1..31: mol_type = other DNA
ctggtggtctagtggctaggattcggcgctt

SEQ ID NO: 19653 - DNA, 33 bp, synthetic construct; identical to SEQ ID NO: 5328
  misc_feature 1..33: note = Probe
  source 1..33: mol_type = other DNA

SEQ ID NO: 19654 - DNA, 23 bp, synthetic construct
  misc_feature 1..23: note = Probe
  source 1..23: mol_type = other DNA
ctggtggtctagtggttaggatt

SEQ ID NO: 19655 - DNA, 25 bp, synthetic construct
  misc_feature 1..25: note = Probe
  source 1..25: mol_type = other DNA
ctggtggtctagtggttaggattcg

SEQ ID NO: 19656 - DNA, 26 bp, synthetic construct
  misc_feature 1..26: note = Probe
  source 1..26: mol_type = other DNA
ctggtggtctagtggttaggattcgg

SEQ ID NO: 19657 - DNA, 27 bp, synthetic construct
  misc_feature 1..27: note = Probe
  source 1..27: mol_type = other DNA
ctggtggtctagtggttaggattcggc

SEQ ID NO: 19658 - DNA, 36 bp, synthetic construct
  misc_feature 1..36: note = Probe
  source 1..36: mol_type = other DNA
ctggtggtctagtggttaggattcggcgctctcacc

SEQ ID NO: 19659 - DNA, 23 bp, synthetic construct
  misc_feature 1..23: note = Probe
  source 1..23: mol_type = other DNA
ctggtgtagtggtatcatgcaag

SEQ ID NO: 19660 - DNA, 24 bp, synthetic construct
  misc_feature 1..24: note = Probe
  source 1..24: mol_type = other DNA
ctggtgtagtggtatcatgcaaga

SEQ ID NO: 19661 - DNA, 26 bp, synthetic construct
  misc_feature 1..26: note = Probe
  source 1..26: mol_type = other DNA
ctggtgtagtggtatcatgcaagatt

SEQ ID NO: 19662 - DNA, 28 bp, synthetic construct
  misc_feature 1..28: note = Probe
  source 1..28: mol_type = other DNA
ctggtgtagtggtatcatgcaagattcc

SEQ ID NO: 19663 - DNA, 29 bp, synthetic construct
  misc_feature 1..29: note = Probe
  source 1..29: mol_type = other DNA
ctggtgtagtggtatcatgcaagattccc

SEQ ID NO: 19664 - DNA, 25 bp, synthetic construct
  misc_feature 1..25: note = Probe
  source 1..25: mol_type = other DNA
ctgtaaagctaacttagcattaacc

SEQ ID NO: 19665 - DNA, 50 bp, synthetic construct; identical to SEQ ID NO: 844
  misc_feature 1..50: note = Probe
  source 1..50: mol_type = other DNA

SEQ ID NO: 19666 - DNA, 16 bp, synthetic construct
  misc_feature 1..16: note = Probe
  source 1..16: mol_type = other DNA
ctgtcacgcgggagac

SEQ ID NO: 19667 - DNA, 17 bp, synthetic construct
  misc_feature 1..17: note = Probe
  source 1..17: mol_type = other DNA
ctgtcacgcgggagacc

SEQ ID NO: 19668 - DNA, 24 bp, synthetic construct
  misc_feature 1..24: note = Probe
  source 1..24: mol_type = other DNA
ctgtcacgcgggagaccggggttc

SEQ ID NO: 19669 - DNA, 25 bp, synthetic construct
  misc_feature 1..25: note = Probe
  source 1..25: mol_type = other DNA
ctgtcacgcgggagaccggggttca

SEQ ID NO: 19670 - DNA, 26 bp, synthetic construct
  misc_feature 1..26: note = Probe
  source 1..26: mol_type = other DNA
ctgtcacgcgggagaccggggttcaa

SEQ ID NO: 19671 - DNA, 37 bp, synthetic construct
  misc_feature 1..37: note = Probe
  source 1..37: mol_type = other DNA
ctgtcacgcgggagaccggggttcaattccccgacgg

SEQ ID NO: 19672 - DNA, 44 bp, synthetic construct; identical to SEQ ID NO: 5338
  misc_feature 1..44: note = Probe
  source 1..44: mol_type = other DNA

SEQ ID NO: 19673 - DNA, 25 bp, synthetic construct
  misc_feature 1..25: note = Probe
  source 1..25: mol_type = other DNA
ctgtcacgcgggagaccggggttcg

SEQ ID NO: 19674 - DNA, 26 bp, synthetic construct
  misc_feature 1..26: note = Probe
  source 1..26: mol_type = other DNA
ctgtcacgcgggagaccggggttcga

SEQ ID NO: 19675 - DNA, 35 bp, synthetic construct
  misc_feature 1..35: note = Probe
  source 1..35: mol_type = other DNA
ctgtcacgcgggagaccggggttcgattccccgac

SEQ ID NO: 19676 - DNA, 36 bp, synthetic construct
  misc_feature 1..36: note = Probe
  source 1..36: mol_type = other DNA
ctgtcacgcgggagaccggggttcgattccccgacg

SEQ ID NO: 19677 - DNA, 42 bp, synthetic construct
  misc_feature 1..42: note = Probe
  source 1..42: mol_type = other DNA
ctgtcacgcgggagaccggggttcgattccccgacggggaga

SEQ ID NO: 19678 - DNA, 44 bp, synthetic construct
  misc_feature 1..44: note = Probe
  source 1..44: mol_type = other DNA
ctgtcacgcgggagaccggggttcgattccccgacggggagaaa

SEQ ID NO: 19679 - DNA, 44 bp, synthetic construct
  misc_feature 1..44: note = Probe
  source 1..44: mol_type = other DNA
ctgtcacgcgggagaccggggttcgattccccgacggggagacg

SEQ ID NO: 19680 - DNA, 44 bp, synthetic construct; identical to SEQ ID NO: 5339
  misc_feature 1..44: note = Probe
  source 1..44: mol_type = other DNA

SEQ ID NO: 19681 - DNA, 42 bp, synthetic construct
  misc_feature 1..42: note = Probe
  source 1..42: mol_type = other DNA
ctgtcacgcgggagaccggggttcgattccccgacggggagg

SEQ ID NO: 19682 - DNA, 44 bp, synthetic construct; identical to SEQ ID NO: 5340
  misc_feature 1..44: note = Probe
  source 1..44: mol_type = other DNA

SEQ ID NO: 19683 - DNA, 50 bp, synthetic construct; identical to SEQ ID NO: 5341
  misc_feature 1..50: note = Probe
  source 1..50: mol_type = other DNA

SEQ ID NO: 19684 - DNA, 44 bp, synthetic construct
  misc_feature 1..44: note = Probe
  source 1..44: mol_type = other DNA
ctgtcacgcgggagaccggggttcgattccccgacggggaggcc

SEQ ID NO: 19685 - DNA, 21 bp, synthetic construct
  misc_feature 1..21: note = Probe
  source 1..21: mol_type = other DNA
ctgtgctccggagttacctcg

SEQ ID NO: 19686 - DNA, 22 bp, synthetic construct
  misc_feature 1..22: note = Probe
  source 1..22: mol_type = other DNA
ctgtgctccggagttacctcgt

SEQ ID NO: 19687 - DNA, 23 bp, synthetic construct
  misc_feature 1..23: note = Probe
  source 1..23: mol_type = other DNA
ctgtgctccggagttacctcgtt

SEQ ID NO: 19688 - DNA, 24 bp, synthetic construct
  misc_feature 1..24: note = Probe
  source 1..24: mol_type = other DNA
ctgtgctccggagttacctcgttt

SEQ ID NO: 19689 - DNA, 25 bp, synthetic construct
  misc_feature 1..25: note = Probe
  source 1..25: mol_type = other DNA
ctgtgctccggagttacctcgtttt

SEQ ID NO: 19690 - DNA, 26 bp, synthetic construct
  misc_feature 1..26: note = Probe
  source 1..26: mol_type = other DNA
ctgtgctccggagttacctcgttttg

SEQ ID NO: 19691 - DNA, 39 bp, synthetic construct
  misc_feature 1..39: note = Probe
  source 1..39: mol_type = other DNA
ctgttaactaagtgtttgtgggtttaagtcccattggtc

SEQ ID NO: 19692 - DNA, 40 bp, synthetic construct
  misc_feature 1..40: note = Probe
  source 1..40: mol_type = other DNA
ctgttaactaagtgtttgtgggtttaagtcccattggtct

SEQ ID NO: 19693 - DNA, 41 bp, synthetic construct
  misc_feature 1..41: note = Probe
  source 1..41: mol_type = other DNA
ctgttaactaagtgtttgtgggtttaagtcccattggtcta

SEQ ID NO: 19694 - DNA, 43 bp, synthetic construct
  misc_feature 1..43: note = Probe
  source 1..43: mol_type = other DNA
ctgttaactaagtgtttgtgggtttaagtcccattggtctagt

SEQ ID NO: 19695 - DNA, 45 bp, synthetic construct; identical to SEQ ID NO: 5346
  misc_feature 1..45: note = Probe
  source 1..45: mol_type = other DNA

SEQ ID NO: 19696 - DNA, 38 bp, synthetic construct; identical to SEQ ID NO: 5349
  misc_feature 1..38: note = Probe
  source 1..38: mol_type = other DNA

SEQ ID NO: 19697 - DNA, 40 bp, synthetic construct; identical to SEQ ID NO: 5351
  misc_feature 1..40: note = Probe
  source 1..40: mol_type = other DNA

SEQ ID NO: 19698 - DNA, 41 bp, synthetic construct; identical to SEQ ID NO: 5352
  misc_feature 1..41: note = Probe
  source 1..41: mol_type = other DNA

SEQ ID NO: 19699 - DNA, 42 bp, synthetic construct; identical to SEQ ID NO: 5353
  misc_feature 1..42: note = Probe
  source 1..42: mol_type = other DNA

SEQ ID NO: 19700 - DNA, 45 bp, synthetic construct; identical to SEQ ID NO: 5355
  misc_feature 1..45: note = Probe
  source 1..45: mol_type = other DNA

SEQ ID NO: 19701 - DNA, 22 bp, synthetic construct
  misc_feature 1..22: note = Probe
  source 1..22: mol_type = other DNA
cttaaacccccttatttctagg

SEQ ID NO: 19702 - DNA, 23 bp, synthetic construct
  misc_feature 1..23: note = Probe
  source 1..23: mol_type = other DNA
cttaaacccccttatttctagga

SEQ ID NO: 19703 - DNA, 16 bp, synthetic construct
  misc_feature 1..16: note = Probe
  source 1..16: mol_type = other DNA
cttaacacaaagcacc

SEQ ID NO: 19704 - DNA, 17 bp, synthetic construct
  misc_feature 1..17: note = Probe
  source 1..17: mol_type = other DNA
cttaacacaaagcaccc

SEQ ID NO: 19705 - DNA, 18 bp, synthetic construct
  misc_feature 1..18: note = Probe
  source 1..18: mol_type = other DNA
cttaacacaaagcaccca

SEQ ID NO: 19706 - DNA, 19 bp, synthetic construct
  misc_feature 1..19: note = Probe
  source 1..19: mol_type = other DNA
cttaacacaaagcacccaa

SEQ ID NO: 19707 - DNA, 25 bp, synthetic construct
  misc_feature 1..25: note = Probe
  source 1..25: mol_type = other DNA
cttaacacaaagcacccaacttaca

SEQ ID NO: 19708 - DNA, 17 bp, synthetic construct
  misc_feature 1..17: note = Probe
  source 1..17: mol_type = other DNA
cttaacttgaccgctct

SEQ ID NO: 19709 - DNA, 20 bp, synthetic construct
  misc_feature 1..20: note = Probe
  source 1..20: mol_type = other DNA
cttaacttgaccgctctgag

SEQ ID NO: 19710 - DNA, 21 bp, synthetic construct
  misc_feature 1..21: note = Probe
  source 1..21: mol_type = other DNA
cttaacttgaccgctctgagc

SEQ ID NO: 19711 - DNA, 22 bp, synthetic construct
  misc_feature 1..22: note = Probe
  source 1..22: mol_type = other DNA
cttaacttgaccgctctgagct

SEQ ID NO: 19712 - DNA, 16 bp, synthetic construct
  misc_feature 1..16: note = Probe
  source 1..16: mol_type = other DNA
cttacacttaggagat

SEQ ID NO: 19713 - DNA, 25 bp, synthetic construct
  misc_feature 1..25: note = Probe
  source 1..25: mol_type = other DNA
cttacacttaggagatttcaactta

SEQ ID NO: 19714 - DNA, 34 bp, synthetic construct; identical to SEQ ID NO: 5367
  misc_feature 1..34: note = Probe
  source 1..34: mol_type = other DNA

SEQ ID NO: 19715 - DNA, 36 bp, synthetic construct; identical to SEQ ID NO: 5368
  misc_feature 1..36: note = Probe
  source 1..36: mol_type = other DNA

SEQ ID NO: 19716 - DNA, 38 bp, synthetic construct
  misc_feature 1..38: note = Probe
  source 1..38: mol_type = other DNA
cttacacttaggagatttcaacttaacttgaccgctct

SEQ ID NO: 19717 - DNA, 41 bp, synthetic construct; identical to SEQ ID NO: 5370
  misc_feature 1..41: note = Probe
  source 1..41: mol_type = other DNA

SEQ ID NO: 19718 - DNA, 42 bp, synthetic construct; identical to SEQ ID NO: 5371
  misc_feature 1..42: note = Probe
  source 1..42: mol_type = other DNA

SEQ ID NO: 19719 - DNA, 43 bp, synthetic construct; identical to SEQ ID NO: 5372
  misc_feature 1..43: note = Probe
  source 1..43: mol_type = other DNA

SEQ ID NO: 19720 - DNA, 17 bp, synthetic construct
  misc_feature 1..17: note = Probe
  source 1..17: mol_type = other DNA
cttacctcctcaaagca

SEQ ID NO: 19721 - DNA, 20 bp, synthetic construct
  misc_feature 1..20: note = Probe
  source 1..20: mol_type = other DNA
cttacctcctcaaagcaata

SEQ ID NO: 19722 - DNA, 24 bp, synthetic construct
  misc_feature 1..24: note = Probe
  source 1..24: mol_type = other DNA
cttacctcctcaaagcaatacact

SEQ ID NO: 19723 - DNA, 30 bp, synthetic construct
  misc_feature 1..30: note = Probe
  source 1..30: mol_type = other DNA
cttagcattaaccttttaagttaaagatta

SEQ ID NO: 19724 - DNA, 36 bp, synthetic construct; identical to SEQ ID NO: 5376
  misc_feature 1..36: note = Probe
  source 1..36: mol_type = other DNA

SEQ ID NO: 19725 - DNA, 38 bp, synthetic construct
  misc_feature 1..38: note = Probe
  source 1..38: mol_type = other DNA
cttagcattaaccttttaagttaaagattaagagaacc

SEQ ID NO: 19726 - DNA, 50 bp, synthetic construct; identical to SEQ ID NO: 5381
  misc_feature 1..50: note = Probe
  source 1..50: mol_type = other DNA

SEQ ID NO: 19727 - DNA, 24 bp, synthetic construct
  misc_feature 1..24: note = Probe
  source 1..24: mol_type = other DNA
cttaggagatttcaacttaacttg

SEQ ID NO: 19728 - DNA, 26 bp, synthetic construct
  misc_feature 1..26: note = Probe
  source 1..26: mol_type = other DNA
cttaggagatttcaacttaacttgac

SEQ ID NO: 19729 - DNA, 28 bp, synthetic construct
  misc_feature 1..28: note = Probe
  source 1..28: mol_type = other DNA
cttaggagatttcaacttaacttgaccg

SEQ ID NO: 19730 - DNA, 29 bp, synthetic construct
  misc_feature 1..29: note = Probe
  source 1..29: mol_type = other DNA
cttaggagatttcaacttaacttgaccgc

SEQ ID NO: 19731 - DNA, 30 bp, synthetic construct; identical to SEQ ID NO: 5384
  misc_feature 1..30: note = Probe
  source 1..30: mol_type = other DNA

SEQ ID NO: 19732 - DNA, 31 bp, synthetic construct; identical to SEQ ID NO: 5385
  misc_feature 1..31: note = Probe
  source 1..31: mol_type = other DNA

SEQ ID NO: 19733 - DNA, 32 bp, synthetic construct; identical to SEQ ID NO: 5386
  misc_feature 1..32: note = Probe
  source 1..32: mol_type = other DNA

SEQ ID NO: 19734 - DNA, 34 bp, synthetic construct; identical to SEQ ID NO: 5388
  misc_feature 1..34: note = Probe
  source 1..34: mol_type = other DNA

SEQ ID NO: 19735 - DNA, 35 bp, synthetic construct; identical to SEQ ID NO: 5389
  misc_feature 1..35: note = Probe
  source 1..35: mol_type = other DNA

SEQ ID NO: 19736 - DNA, 36 bp, synthetic construct; identical to SEQ ID NO: 5390
  misc_feature 1..36: note = Probe
  source 1..36: mol_type = other DNA

SEQ ID NO: 19737 - DNA, 37 bp, synthetic construct; identical to SEQ ID NO: 5391
  misc_feature 1..37: note = Probe
  source 1..37: mol_type = other DNA

SEQ ID NO: 19738 - DNA, 38 bp, synthetic construct; identical to SEQ ID NO: 5392
  misc_feature 1..38: note = Probe
  source 1..38: mol_type = other DNA

SEQ ID NO: 19739 - DNA, 31 bp, synthetic construct
  misc_feature 1..31: note = Probe
  source 1..31: mol_type = other DNA
cttaggtcgctggttcgattccggctcgaag

SEQ ID NO: 19740 - DNA, 33 bp, synthetic construct
  misc_feature 1..33: note = Probe
  source 1..33: mol_type = other DNA
cttaggtcgctggttcgattccggctcgaagga

SEQ ID NO: 19741 - DNA, 23 bp, synthetic construct
  misc_feature 1..23: note = Probe
  source 1..23: mol_type = other DNA
cttagttggttaaagcgcctgtc

SEQ ID NO: 19742 - DNA, 24 bp, synthetic construct
  misc_feature 1..24: note = Probe
  source 1..24: mol_type = other DNA
cttagttggttaaagcgcctgtct

SEQ ID NO: 19743 - DNA, 15 bp, synthetic construct
  misc_feature 1..15: note = Probe
  source 1..15: mol_type = other DNA
cttcactatggctct

SEQ ID NO: 19744 - DNA, 16 bp, synthetic construct
  misc_feature 1..16: note = Probe
  source 1..16: mol_type = other DNA
cttccaagcagttgac

SEQ ID NO: 19745 - DNA, 17 bp, synthetic construct
  misc_feature 1..17: note = Probe
  source 1..17: mol_type = other DNA
cttccaagcagttgacc

SEQ ID NO: 19746 - DNA, 21 bp, synthetic construct
  misc_feature 1..21: note = Probe
  source 1..21: mol_type = other DNA
cttccaagcagttgacccggg

SEQ ID NO: 19747 - DNA, 24 bp, synthetic construct
  misc_feature 1..24: note = Probe
  source 1..24: mol_type = other DNA
cttccaagcagttgacccgggttc

SEQ ID NO: 19748 - DNA, 44 bp, synthetic construct
  misc_feature 1..44: note = Probe
  source 1..44: mol_type = other DNA
cttccaagcagttgacccgggttcgattcccggccaacgcagtg

SEQ ID NO: 19749 - DNA, 41 bp, synthetic construct
  misc_feature 1..41: note = Probe
  source 1..41: mol_type = other DNA
cttccaattaactagttttgacaacattcaaaaaagagtaa

SEQ ID NO: 19750 - DNA, 42 bp, synthetic construct
  misc_feature 1..42: note = Probe
  source 1..42: mol_type = other DNA
cttccaattaactagttttgacaacattcaaaaaagagtaat

SEQ ID NO: 19751 - DNA, 43 bp, synthetic construct; identical to SEQ ID NO: 5395
  misc_feature 1..43: note = Probe
  source 1..43: mol_type = other DNA

SEQ ID NO: 19752 - DNA, 31 bp, synthetic construct
  misc_feature 1..31: note = Probe
  source 1..31: mol_type = other DNA
cttgcgaaactactttcttgattcaggtgtt

SEQ ID NO: 19753 - DNA, 30 bp, synthetic construct
  misc_feature 1..30: note = Probe
  source 1..30: mol_type = other DNA
cttgcgacccgggttcgattcccgggcggc

SEQ ID NO: 19754 - DNA, 31 bp, synthetic construct
  misc_feature 1..31: note = Probe
  source 1..31: mol_type = other DNA
cttgcgacccgggttcgattcccgggcggcg

SEQ ID NO: 19755 - DNA, 33 bp, synthetic construct
  misc_feature 1..33: note = Probe
  source 1..33: mol_type = other DNA
cttgcgacccgggttcgattcccgggcggcgca

SEQ ID NO: 19756 - DNA, 36 bp, synthetic construct
  misc_feature 1..36: note = Probe
  source 1..36: mol_type = other DNA
cttgcgacccgggttcgattcccgggcggcgcactt

SEQ ID NO: 19757 - DNA, 40 bp, synthetic construct; identical to SEQ ID NO: 5396
  misc_feature 1..40: note = Probe
  source 1..40: mol_type = other DNA

SEQ ID NO: 19758 - DNA, 15 bp, synthetic construct
  misc_feature 1..15: note = Probe
  source 1..15: mol_type = other DNA
ctttaactccaccat

SEQ ID NO: 19759 - DNA, 46 bp, synthetic construct; identical to SEQ ID NO: 5397
  misc_feature 1..46: note = Probe
  source 1..46: mol_type = other DNA

SEQ ID NO: 19760 - DNA, 18 bp, synthetic construct
  misc_feature 1..18: note = Probe
  source 1..18: mol_type = other DNA
ctttacagtcagaggttc

SEQ ID NO: 19761 - DNA, 30 bp, synthetic construct
  misc_feature 1..30: note = Probe
  source 1..30: mol_type = other DNA
ctttacagtcagaggttcaattcctcttct

SEQ ID NO: 19762 - DNA, 35 bp, synthetic construct
  misc_feature 1..35: note = Probe
  source 1..35: mol_type = other DNA
ctttacagtcagaggttcaattcctcttcttaaca

SEQ ID NO: 19763 - DNA, 36 bp, synthetic construct
  misc_feature 1..36: note = Probe
  source 1..36: mol_type = other DNA
ctttacagtcagaggttcaattcctcttcttaacaa

SEQ ID NO: 19764 - DNA, 37 bp, synthetic construct; identical to SEQ ID NO: 5399
  misc_feature 1..37: note = Probe
  source 1..37: mol_type = other DNA

SEQ ID NO: 19765 - DNA, 38 bp, synthetic construct; identical to SEQ ID NO: 5400
  misc_feature 1..38: note = Probe
  source 1..38: mol_type = other DNA

SEQ ID NO: 19766 - DNA, 18 bp, synthetic construct
  misc_feature 1..18: note = Probe
  source 1..18: mol_type = other DNA
ctttgaatccagcgatcc

SEQ ID NO: 19767 - DNA, 20 bp, synthetic construct
  misc_feature 1..20: note = Probe
  source 1..20: mol_type = other DNA
ctttgaatccagcgatccga

SEQ ID NO: 19768 - DNA, 24 bp, synthetic construct
  misc_feature 1..24: note = Probe
  source 1..24: mol_type = other DNA
ctttgaatccagcgatccgagttc

SEQ ID NO: 19769 - DNA, 46 bp, synthetic construct; identical to SEQ ID NO: 5403
  misc_feature 1..46: note = Probe
  source 1..46: mol_type = other DNA

SEQ ID NO: 19770 - DNA, 50 bp, synthetic construct; identical to SEQ ID NO: 5404
  misc_feature 1..50: note = Probe
  source 1..50: mol_type = other DNA

SEQ ID NO: 19771 - DNA, 16 bp, synthetic construct
  misc_feature 1..16: note = Probe
  source 1..16: mol_type = other DNA
ctttgcacgcgtgggt

SEQ ID NO: 19772 - DNA, 31 bp, synthetic construct; identical to SEQ ID NO: 5405
  misc_feature 1..31: note = Probe
  source 1..31: mol_type = other DNA

SEQ ID NO: 19773 - DNA, 32 bp, synthetic construct
  misc_feature 1..32: note = Probe
  source 1..32: mol_type = other DNA
ctttggggggttcgattccttccttttttgtc

SEQ ID NO: 19774 - DNA, 28 bp, synthetic construct
  misc_feature 1..28: note = Probe
  source 1..28: mol_type = other DNA
ctttgggtgctaatggtggagttaaaga

SEQ ID NO: 19775 - DNA, 26 bp, synthetic construct
  misc_feature 1..26: note = Probe
  source 1..26: mol_type = other DNA
cttttaagttaaagattaagagaacc

SEQ ID NO: 19776 - DNA, 27 bp, synthetic construct
  misc_feature 1..27: note = Probe
  source 1..27: mol_type = other DNA
cttttaagttaaagattaagagaacca

SEQ ID NO: 19777 - DNA, 49 bp, synthetic construct; identical to SEQ ID NO: 5407
  misc_feature 1..49: note = Probe
  source 1..49: mol_type = other DNA

SEQ ID NO: 19778 - DNA, 50 bp, synthetic construct; identical to SEQ ID NO: 5408
  misc_feature 1..50: note = Probe
  source 1..50: mol_type = other DNA

SEQ ID NO: 19779 - DNA, 30 bp, synthetic construct
  misc_feature 1..30: note = Probe
  source 1..30: mol_type = other DNA
cttttagtataaatagtaccgttaacttcc

SEQ ID NO: 19780 - DNA, 23 bp, synthetic construct
  misc_feature 1..23: note = Probe
  source 1..23: mol_type = other DNA
cttttttcccggcggcgggagaa

SEQ ID NO: 19781 - DNA, 25 bp, synthetic construct
  misc_feature 1..25: note = Probe
  source 1..25: mol_type = other DNA
cttttttcccggcggcgggagaagt

SEQ ID NO: 19782 - DNA, 16 bp, synthetic construct
  misc_feature 1..16: note = Probe
  source 1..16: mol_type = other DNA
gaaaaagtcatggagg

SEQ ID NO: 19783 - DNA, 17 bp, synthetic construct
  misc_feature 1..17: note = Probe
  source 1..17: mol_type = other DNA
gaaaaagtcatggaggc

SEQ ID NO: 19784 - DNA, 20 bp, synthetic construct
  misc_feature 1..20: note = Probe
  source 1..20: mol_type = other DNA
gaaaaagtcatggaggccat

SEQ ID NO: 19785 - DNA, 23 bp, synthetic construct
  misc_feature 1..23: note = Probe
  source 1..23: mol_type = other DNA
gaaaaagtcatggaggccatggg

SEQ ID NO: 19786 - DNA, 24 bp, synthetic construct
  misc_feature 1..24: note = Probe
  source 1..24: mol_type = other DNA
gaaaaagtcatggaggccatgggg

SEQ ID NO: 19787 - DNA, 25 bp, synthetic construct
  misc_feature 1..25: note = Probe
  source 1..25: mol_type = other DNA
gaaaaagtcatggaggccatggggt

SEQ ID NO: 19788 - DNA, 26 bp, synthetic construct
  misc_feature 1..26: note = Probe
  source 1..26: mol_type = other DNA
gaaaaagtcatggaggccatggggtt

SEQ ID NO: 19789 - DNA, 29 bp, synthetic construct
  misc_feature 1..29: note = Probe
  source 1..29: mol_type = other DNA
gaaaaagtcatggaggccatggggttggc

SEQ ID NO: 19790 - DNA, 30 bp, synthetic construct; identical to SEQ ID NO: 10057
  misc_feature 1..30: note = Probe
  source 1..30: mol_type = other DNA

SEQ ID NO: 19791 - DNA, 31 bp, synthetic construct; identical to SEQ ID NO: 5416
  misc_feature 1..31: note = Probe
  source 1..31: mol_type = other DNA

SEQ ID NO: 19792 - DNA, 32 bp, synthetic construct; identical to SEQ ID NO: 5417
  misc_feature 1..32: note = Probe
  source 1..32: mol_type = other DNA

SEQ ID NO: 19793 - DNA, 33 bp, synthetic construct; identical to SEQ ID NO: 5418
  misc_feature 1..33: note = Probe
  source 1..33: mol_type = other DNA

SEQ ID NO: 19794 - DNA, 50 bp, synthetic construct; identical to SEQ ID NO: 5419
  misc_feature 1..50: note = Probe
  source 1..50: mol_type = other DNA

SEQ ID NO: 19795 - DNA, 24 bp, synthetic construct
  misc_feature 1..24: note = Probe
  source 1..24: mol_type = other DNA
gaaaacctttttccaaggacaaat

SEQ ID NO: 19796 - DNA, 24 bp, synthetic construct
  misc_feature 1..24: note = Probe
  source 1..24: mol_type = other DNA
gaaaatgttggttatacccttccc

SEQ ID NO: 19797 - DNA, 25 bp, synthetic construct
  misc_feature 1..25: note = Probe
  source 1..25: mol_type = other DNA
gaaaatgttggttatacccttcccg

SEQ ID NO: 19798 - DNA, 26 bp, synthetic construct
  misc_feature 1..26: note = Probe
  source 1..26: mol_type = other DNA
gaaaatgttggttatacccttcccgt

SEQ ID NO: 19799 - DNA, 27 bp, synthetic construct
  misc_feature 1..27: note = Probe
  source 1..27: mol_type = other DNA
gaaaatgttggttatacccttcccgta

SEQ ID NO: 19800 - DNA, 29 bp, synthetic construct
  misc_feature 1..29: note = Probe
  source 1..29: mol_type = other DNA
gaaaatgttggttatacccttcccgtact

SEQ ID NO: 19801 - DNA, 31 bp, synthetic construct
  misc_feature 1..31: note = Probe
  source 1..31: mol_type = other DNA
gaaaatgttggttatacccttcccgtactaa

SEQ ID NO: 19802 - DNA, 20 bp, synthetic construct
  misc_feature 1..20: note = Probe
  source 1..20: mol_type = other DNA
gaaaatgtttagacgggctc

SEQ ID NO: 19803 - DNA, 21 bp, synthetic construct
  misc_feature 1..21: note = Probe
  source 1..21: mol_type = other DNA
gaaaatgtttagacgggctca

SEQ ID NO: 19804 - DNA, 23 bp, synthetic construct
  misc_feature 1..23: note = Probe
  source 1..23: mol_type = other DNA
gaaaatgtttagacgggctcaca

SEQ ID NO: 19805 - DNA, 26 bp, synthetic construct
  misc_feature 1..26: note = Probe
  source 1..26: mol_type = other DNA
gaaaatgtttagacgggctcacatca

SEQ ID NO: 19806 - DNA, 29 bp, synthetic construct
  misc_feature 1..29: note = Probe
  source 1..29: mol_type = other DNA
gaaaatgtttagacgggctcacatcaccc

SEQ ID NO: 19807 - DNA, 30 bp, synthetic construct; identical to SEQ ID NO: 861
  misc_feature 1..30: note = Probe
  source 1..30: mol_type = other DNA

SEQ ID NO: 19808 - DNA, 32 bp, synthetic construct; identical to SEQ ID NO: 863
  misc_feature 1..32: note = Probe
  source 1..32: mol_type = other DNA

SEQ ID NO: 19809 - DNA, 33 bp, synthetic construct; identical to SEQ ID NO: 864
  misc_feature 1..33: note = Probe
  source 1..33: mol_type = other DNA

SEQ ID NO: 19810 - DNA, 38 bp, synthetic construct
  misc_feature 1..38: note = Probe
  source 1..38: mol_type = other DNA
gaaaatgtttagacgggctcacatcaccccataaacaa

SEQ ID NO: 19811 - DNA, 39 bp, synthetic construct; identical to SEQ ID NO: 5426
  misc_feature 1..39: note = Probe
  source 1..39: mol_type = other DNA

SEQ ID NO: 19812 - DNA, 40 bp, synthetic construct; identical to SEQ ID NO: 5427
  misc_feature 1..40: note = Probe
  source 1..40: mol_type = other DNA

SEQ ID NO: 19813 - DNA, 41 bp, synthetic construct; identical to SEQ ID NO: 5428
  misc_feature 1..41: note = Probe
  source 1..41: mol_type = other DNA

SEQ ID NO: 19814 - DNA, 42 bp, synthetic construct; identical to SEQ ID NO: 5429
  misc_feature 1..42: note = Probe
  source 1..42: mol_type = other DNA

SEQ ID NO: 19815 - DNA, 43 bp, synthetic construct
  misc_feature 1..43: note = Probe
  source 1..43: mol_type = other DNA
gaaaatgtttagacgggctcacatcaccccataaacaaatagg

SEQ ID NO: 19816 - DNA, 38 bp, synthetic construct
  misc_feature 1..38: note = Probe
  source 1..38: mol_type = other DNA
gaaaccagctttggggggttcgattccttccttttttg

SEQ ID NO: 19817 - DNA, 39 bp, synthetic construct
  misc_feature 1..39: note = Probe
  source 1..39: mol_type = other DNA
gaaaccagctttggggggttcgattccttccttttttgt

SEQ ID NO: 19818 - DNA, 40 bp, synthetic construct
  misc_feature 1..40: note = Probe
  source 1..40: mol_type = other DNA
gaaaccagctttggggggttcgattccttccttttttgtc

SEQ ID NO: 19819 - DNA, 20 bp, synthetic construct
  misc_feature 1..20: note = Probe
  source 1..20: mol_type = other DNA
gaaaccgggcggaaacacct

SEQ ID NO: 19820 - DNA, 26 bp, synthetic construct
  misc_feature 1..26: note = Probe
  source 1..26: mol_type = other DNA
gaaactactttcttgattcaggtgtt

SEQ ID NO: 19821 - DNA, 21 bp, synthetic construct
  misc_feature 1..21: note = Probe
  source 1..21: mol_type = other DNA
gaaagctcacaagaactgcta

SEQ ID NO: 19822 - DNA, 23 bp, synthetic construct
  misc_feature 1..23: note = Probe
  source 1..23: mol_type = other DNA
gaaagctcacaagaactgctaac

SEQ ID NO: 19823 - DNA, 28 bp, synthetic construct
  misc_feature 1..28: note = Probe
  source 1..28: mol_type = other DNA
gaaagctcacaagaactgctaactcatg

SEQ ID NO: 19824 - DNA, 16 bp, synthetic construct
  misc_feature 1..16: note = Probe
  source 1..16: mol_type = other DNA
gaaaggtccccggttc

SEQ ID NO: 19825 - DNA, 30 bp, synthetic construct
  misc_feature 1..30: note = Probe
  source 1..30: mol_type = other DNA
gaaaggtccccggttcgaaaccgggcggaa

SEQ ID NO: 19826 - DNA, 31 bp, synthetic construct
  misc_feature 1..31: note = Probe
  source 1..31: mol_type = other DNA
gaaaggtccccggttcgaaaccgggcggaaa

SEQ ID NO: 19827 - DNA, 33 bp, synthetic construct
  misc_feature 1..33: note = Probe
  source 1..33: mol_type = other DNA
gaaaggtccccggttcgaaaccgggcggaaaca

SEQ ID NO: 19828 - DNA, 36 bp, synthetic construct; identical to SEQ ID NO: 5436
  misc_feature 1..36: note = Probe
  source 1..36: mol_type = other DNA

SEQ ID NO: 19829 - DNA, 36 bp, synthetic construct
  misc_feature 1..36: note = Probe
  source 1..36: mol_type = other DNA
gaaaggtccccggttcgatcccgggcggaaacaggt

SEQ ID NO: 19830 - DNA, 30 bp, synthetic construct
  misc_feature 1..30: note = Probe
  source 1..30: mol_type = other DNA
gaaaggttggtggttcgagcccacccaggg

SEQ ID NO: 19831 - DNA, 32 bp, synthetic construct; identical to SEQ ID NO: 881
  misc_feature 1..32: note = Probe
  source 1..32: mol_type = other DNA

SEQ ID NO: 19832 - DNA, 33 bp, synthetic construct
  misc_feature 1..33: note = Probe
  source 1..33: mol_type = other DNA
gaaaggttggtggttcgagcccacccagggacg

SEQ ID NO: 19833 - DNA, 34 bp, synthetic construct
  misc_feature 1..34: note = Probe
  source 1..34: mol_type = other DNA
gaaaggttggtggttcgagcccacccagggacgc

SEQ ID NO: 19834 - DNA, 35 bp, synthetic construct; identical to SEQ ID NO: 5438
  misc_feature 1..35: note = Probe
  source 1..35: mol_type = other DNA

SEQ ID NO: 19835 - DNA, 36 bp, synthetic construct; identical to SEQ ID NO: 5439
  misc_feature 1..36: note = Probe
  source 1..36: mol_type = other DNA

SEQ ID NO: 19836 - DNA, 31 bp, synthetic construct
  misc_feature 1..31: note = Probe
  source 1..31: mol_type = other DNA
gaaaggttggtggttcgatcccacccaggga

SEQ ID NO: 19837 - DNA, 15 bp, synthetic construct
  misc_feature 1..15: note = Probe
  source 1..15: mol_type = other DNA
gaaagtacgattact

SEQ ID NO: 19838 - DNA, 34 bp, synthetic construct
  misc_feature 1..34: note = Probe
  source 1..34: mol_type = other DNA
gaaatacaacgatggtttttcatatcattggtcg

SEQ ID NO: 19839 - DNA, 36 bp, synthetic construct
  misc_feature 1..36: note = Probe
  source 1..36: mol_type = other DNA
gaaatacaacgatggtttttcatatcattggtcgtg

SEQ ID NO: 19840 - DNA, 38 bp, synthetic construct
  misc_feature 1..38: note = Probe
  source 1..38: mol_type = other DNA
gaaatacaacgatggtttttcatatcattggtcgtggt

SEQ ID NO: 19841 - DNA, 45 bp, synthetic construct
  misc_feature 1..45: note = Probe
  source 1..45: mol_type = other DNA
gaaatacaacgatggtttttcatatcattggtcgtggttgtagtc

SEQ ID NO: 19842 - DNA, 29 bp, synthetic construct
  misc_feature 1..29: note = Probe
  source 1..29: mol_type = other DNA
gaaatccaatggggtctccccgcgcaggt

SEQ ID NO: 19843 - DNA, 29 bp, synthetic construct
  misc_feature 1..29: note = Probe
  source 1..29: mol_type = other DNA
gaaatccattggggtttccccgcgcaggt

SEQ ID NO: 19844 - DNA, 36 bp, synthetic construct; identical to SEQ ID NO: 5445
  misc_feature 1..36: note = Probe
  source 1..36: mol_type = other DNA

SEQ ID NO: 19845 - DNA, 38 bp, synthetic construct; identical to SEQ ID NO: 5447
  misc_feature 1..38: note = Probe
  source 1..38: mol_type = other DNA

SEQ ID NO: 19846 - DNA, 39 bp, synthetic construct; identical to SEQ ID NO: 5448
  misc_feature 1..39: note = Probe
  source 1..39: mol_type = other DNA

SEQ ID NO: 19847 - DNA, 19 bp, synthetic construct
  misc_feature 1..19: note = Probe
  source 1..19: mol_type = other DNA
gaaccaacacctctttaca

SEQ ID NO: 19848 - DNA, 21 bp, synthetic construct
  misc_feature 1..21: note = Probe
  source 1..21: mol_type = other DNA
gaaccaacacctctttacagt

SEQ ID NO: 19849 - DNA, 22 bp, synthetic construct
  misc_feature 1..22: note = Probe
  source 1..22: mol_type = other DNA
gaaccaacacctctttacagtg

SEQ ID NO: 19850 - DNA, 23 bp, synthetic construct
  misc_feature 1..23: note = Probe
  source 1..23: mol_type = other DNA
gaaccaacacctctttacagtga

SEQ ID NO: 19851 - DNA, 24 bp, synthetic construct
  misc_feature 1..24: note = Probe
  source 1..24: mol_type = other DNA
gaaccaacacctctttacagtgaa

SEQ ID NO: 19852 - DNA, 25 bp, synthetic construct
  misc_feature 1..25: note = Probe
  source 1..25: mol_type = other DNA
gaaccaacacctctttacagtgaaa

SEQ ID NO: 19853 - DNA, 26 bp, synthetic construct
  misc_feature 1..26: note = Probe
  source 1..26: mol_type = other DNA
gaaccaacacctctttacagtgaaat

SEQ ID NO: 19854 - DNA, 16 bp, synthetic construct
  misc_feature 1..16: note = Probe
  source 1..16: mol_type = other DNA
gaacccatccctgaga

SEQ ID NO: 19855 - DNA, 27 bp, synthetic construct
  misc_feature 1..27: note = Probe
  source 1..27: mol_type = other DNA
gaacctcagagggggcagctgccattt

SEQ ID NO: 19856 - DNA, 16 bp, synthetic construct
  misc_feature 1..16: note = Probe
  source 1..16: mol_type = other DNA
gaactgctaactcatg

SEQ ID NO: 19857 - DNA, 22 bp, synthetic construct
  misc_feature 1..22: note = Probe
  source 1..22: mol_type = other DNA
gaactgctaactcatgccccca

SEQ ID NO: 19858 - DNA, 26 bp, synthetic construct
  misc_feature 1..26: note = Probe
  source 1..26: mol_type = other DNA
gaactgctaactcatgcccccatgtc

SEQ ID NO: 19859 - DNA, 27 bp, synthetic construct
  misc_feature 1..27: note = Probe
  source 1..27: mol_type = other DNA
gaactgctaactcatgcccccatgtct

SEQ ID NO: 19860 - DNA, 28 bp, synthetic construct
  misc_feature 1..28: note = Probe
  source 1..28: mol_type = other DNA
gaactgctaactcatgcccccatgtcta

SEQ ID NO: 19861 - DNA, 30 bp, synthetic construct
  misc_feature 1..30: note = Probe
  source 1..30: mol_type = other DNA
gaactgctaactcatgcccccatgtctaac

SEQ ID NO: 19862 - DNA, 31 bp, synthetic construct
  misc_feature 1..31: note = Probe
  source 1..31: mol_type = other DNA
gaactgctaactcatgcccccatgtctaaca

SEQ ID NO: 19863 - DNA, 34 bp, synthetic construct
  misc_feature 1..34: note = Probe
  source 1..34: mol_type = other DNA
gaactgctaactcatgcccccatgtctaacaaca

SEQ ID NO: 19864 - DNA, 39 bp, synthetic construct; identical to SEQ ID NO: 5463
  misc_feature 1..39: note = Probe
  source 1..39: mol_type = other DNA

SEQ ID NO: 19865 - DNA, 40 bp, synthetic construct; identical to SEQ ID NO: 5464
  misc_feature 1..40: note = Probe
  source 1..40: mol_type = other DNA

SEQ ID NO: 19866 - DNA, 41 bp, synthetic construct; identical to SEQ ID NO: 5465
  misc_feature 1..41: note = Probe
  source 1..41: mol_type = other DNA

SEQ ID NO: 19867 - DNA, 42 bp, synthetic construct; identical to SEQ ID NO: 5466
  misc_feature 1..42: note = Probe
  source 1..42: mol_type = other DNA

SEQ ID NO: 19868 - DNA, 43 bp, synthetic construct; identical to SEQ ID NO: 5467
  misc_feature 1..43: note = Probe
  source 1..43: mol_type = other DNA

SEQ ID NO: 19869 - DNA, 44 bp, synthetic construct; identical to SEQ ID NO: 5468
  misc_feature 1..44: note = Probe
  source 1..44: mol_type = other DNA

SEQ ID NO: 19870 - DNA, 45 bp, synthetic construct; identical to SEQ ID NO: 5469
  misc_feature 1..45: note = Probe
  source 1..45: mol_type = other DNA

SEQ ID NO: 19871 - DNA, 46 bp, synthetic construct; identical to SEQ ID NO: 5470
  misc_feature 1..46: note = Probe
  source 1..46: mol_type = other DNA

SEQ ID NO: 19872 - DNA, 50 bp, synthetic construct; identical to SEQ ID NO: 5472
  misc_feature 1..50: note = Probe
  source 1..50: mol_type = other DNA

SEQ ID NO: 19873 - DNA, 26 bp, synthetic construct
  misc_feature 1..26: note = Probe
  source 1..26: mol_type = other DNA
gaagaagcagcttcaaacctgccggg

SEQ ID NO: 19874 - DNA, 27 bp, synthetic construct
  misc_feature 1..27: note = Probe
  source 1..27: mol_type = other DNA
gaagaagcagcttcaaacctgccgggg

SEQ ID NO: 19875 - DNA, 28 bp, synthetic construct
  misc_feature 1..28: note = Probe
  source 1..28: mol_type = other DNA
gaagaagcagcttcaaacctgccggggc

SEQ ID NO: 19876 - DNA, 29 bp, synthetic construct
  misc_feature 1..29: note = Probe
  source 1..29: mol_type = other DNA
gaagaagcagcttcaaacctgccggggct

SEQ ID NO: 19877 - DNA, 30 bp, synthetic construct; identical to SEQ ID NO: 5478
  misc_feature 1..30: note = Probe
  source 1..30: mol_type = other DNA

SEQ ID NO: 19878 - DNA, 31 bp, synthetic construct; identical to SEQ ID NO: 5479
  misc_feature 1..31: note = Probe
  source 1..31: mol_type = other DNA

SEQ ID NO: 19879 - DNA, 32 bp, synthetic construct; identical to SEQ ID NO: 5480
  misc_feature 1..32: note = Probe
  source 1..32: mol_type = other DNA

SEQ ID NO: 19880 - DNA, 33 bp, synthetic construct; identical to SEQ ID NO: 5481
  misc_feature 1..33: note = Probe
  source 1..33: mol_type = other DNA

SEQ ID NO: 19881 - DNA, 34 bp, synthetic construct; identical to SEQ ID NO: 5482
  misc_feature 1..34: note = Probe
  source 1..34: mol_type = other DNA

SEQ ID NO: 19882 - DNA, 35 bp, synthetic construct; identical to SEQ ID NO: 5483
  misc_feature 1..35: note = Probe
  source 1..35: mol_type = other DNA

SEQ ID NO: 19883 - DNA, 42 bp, synthetic construct
  misc_feature 1..42: note = Probe
  source 1..42: mol_type = other DNA
gaagaagcagcttcaaacctgccggggcttctcccgcctttt

SEQ ID NO: 19884 - DNA, 26 bp, synthetic construct
  misc_feature 1..26: note = Probe
  source 1..26: mol_type = other DNA
gaagagcccggatagctcagtcggta

SEQ ID NO: 19885 - DNA, 28 bp, synthetic construct
  misc_feature 1..28: note = Probe
  source 1..28: mol_type = other DNA
gaagagcccggatagctcagtcggtaga

SEQ ID NO: 19886 - DNA, 30 bp, synthetic construct
  misc_feature 1..30: note = Probe
  source 1..30: mol_type = other DNA
gaagagcccggatagctcagtcggtagagc

SEQ ID NO: 19887 - DNA, 31 bp, synthetic construct
  misc_feature 1..31: note = Probe
  source 1..31: mol_type = other DNA
gaagagcccggatagctcagtcggtagagca

SEQ ID NO: 19888 - DNA, 32 bp, synthetic construct
  misc_feature 1..32: note = Probe
  source 1..32: mol_type = other DNA
gaagagcccggatagctcagtcggtagagcat

SEQ ID NO: 19889 - DNA, 34 bp, synthetic construct
  misc_feature 1..34: note = Probe
  source 1..34: mol_type = other DNA
gaagagcccggatagctcagtcggtagagcatca

SEQ ID NO: 19890 - DNA, 36 bp, synthetic construct
  misc_feature 1..36: note = Probe
  source 1..36: mol_type = other DNA
gaagagcccggatagctcagtcggtagagcatcaga

SEQ ID NO: 19891 - DNA, 37 bp, synthetic construct
  misc_feature 1..37: note = Probe
  source 1..37: mol_type = other DNA
gaagagcccggatagctcagtcggtagagcatcagac

SEQ ID NO: 19892 - DNA, 38 bp, synthetic construct
  misc_feature 1..38: note = Probe
  source 1..38: mol_type = other DNA
gaagagcccggatagctcagtcggtagagcatcagact

SEQ ID NO: 19893 - DNA, 39 bp, synthetic construct
  misc_feature 1..39: note = Probe
  source 1..39: mol_type = other DNA
gaagagcccggatagctcagtcggtagagcatcagactt

SEQ ID NO: 19894 - DNA, 40 bp, synthetic construct
  misc_feature 1..40: note = Probe
  source 1..40: mol_type = other DNA
gaagagcccggatagctcagtcggtagagcatcagacttt

SEQ ID NO: 19895 - DNA, 41 bp, synthetic construct
  misc_feature 1..41: note = Probe
  source 1..41: mol_type = other DNA
gaagagcccggatagctcagtcggtagagcatcagactttt

SEQ ID NO: 19896 - DNA, 42 bp, synthetic construct
  misc_feature 1..42: note = Probe
  source 1..42: mol_type = other DNA
gaagagcccggatagctcagtcggtagagcatcagactttta

SEQ ID NO: 19897 - DNA, 44 bp, synthetic construct
  misc_feature 1..44: note = Probe
  source 1..44: mol_type = other DNA
gaagagcccggatagctcagtcggtagagcatcagacttttaat

SEQ ID NO: 19898 - DNA, 16 bp, synthetic construct
  misc_feature 1..16: note = Probe
  source 1..16: mol_type = other DNA
gaagatcacgggttcg

SEQ ID NO: 19899 - DNA, 29 bp, synthetic construct
  misc_feature 1..29: note = Probe
  source 1..29: mol_type = other DNA
gaagatcacgggttcgaaccccgtccgtg

SEQ ID NO: 19900 - DNA, 34 bp, synthetic construct
  misc_feature 1..34: note = Probe
  source 1..34: mol_type = other DNA
gaagattccaggttcgactcctggctggctcgtt

SEQ ID NO: 19901 - DNA, 31 bp, synthetic construct; identical to SEQ ID NO: 884
  misc_feature 1..31: note = Probe
  source 1..31: mol_type = other DNA

SEQ ID NO: 19902 - DNA, 32 bp, synthetic construct; identical to SEQ ID NO: 885
  misc_feature 1..32: note = Probe
  source 1..32: mol_type = other DNA

SEQ ID NO: 19903 - DNA, 33 bp, synthetic construct; identical to SEQ ID NO: 886
  misc_feature 1..33: note = Probe
  source 1..33: mol_type = other DNA

SEQ ID NO: 19904 - DNA, 34 bp, synthetic construct
  misc_feature 1..34: note = Probe
  source 1..34: mol_type = other DNA
gaagattctaggttcgactcctggctggctcgcg

SEQ ID NO: 19905 - DNA, 35 bp, synthetic construct; identical to SEQ ID NO: 5488
  misc_feature 1..35: note = Probe
  source 1..35: mol_type = other DNA

SEQ ID NO: 19906 - DNA, 34 bp, synthetic construct
  misc_feature 1..34: note = Probe
  source 1..34: mol_type = other DNA
gaagattctaggttcgactcctggctggctcgct

SEQ ID NO: 19907 - DNA, 30 bp, synthetic construct
  misc_feature 1..30: note = Probe
  source 1..30: mol_type = other DNA
gaagattgagggttcgaatcccttcgtggt

SEQ ID NO: 19908 - DNA, 28 bp, synthetic construct
  misc_feature 1..28: note = Probe
  source 1..28: mol_type = other DNA
gaagattgagggttcgagtcccttcgtg

SEQ ID NO: 19909 - DNA, 31 bp, synthetic construct
  misc_feature 1..31: note = Probe
  source 1..31: mol_type = other DNA
gaagattgagggttcgagtcccttcgtggtc

SEQ ID NO: 19910 - DNA, 32 bp, synthetic construct; identical to SEQ ID NO: 5489
  misc_feature 1..32: note = Probe
  source 1..32: mol_type = other DNA

SEQ ID NO: 19911 - DNA, 34 bp, synthetic construct
  misc_feature 1..34: note = Probe
  source 1..34: mol_type = other DNA
gaagattgagggttcgagtcccttcgtggtcgtc

SEQ ID NO: 19912 - DNA, 35 bp, synthetic construct; identical to SEQ ID NO: 5490
  misc_feature 1..35: note = Probe
  source 1..35: mol_type = other DNA

SEQ ID NO: 19913 - DNA, 16 bp, synthetic construct
  misc_feature 1..16: note = Probe
  source 1..16: mol_type = other DNA
gaagcagcttcaaacc

SEQ ID NO: 19914 - DNA, 27 bp, synthetic construct
  misc_feature 1..27: note = Probe
  source 1..27: mol_type = other DNA
gaagcagcttcaaacctgccggggctt

SEQ ID NO: 19915 - DNA, 28 bp, synthetic construct
  misc_feature 1..28: note = Probe
  source 1..28: mol_type = other DNA
gaagcagcttcaaacctgccggggcttc

SEQ ID NO: 19916 - DNA, 29 bp, synthetic construct
  misc_feature 1..29: note = Probe
  source 1..29: mol_type = other DNA
gaagcagcttcaaacctgccggggcttct

SEQ ID NO: 19917 - DNA, 30 bp, synthetic construct; identical to SEQ ID NO: 5497
  misc_feature 1..30: note = Probe
  source 1..30: mol_type = other DNA

SEQ ID NO: 19918 - DNA, 31 bp, synthetic construct; identical to SEQ ID NO: 5498
  misc_feature 1..31: note = Probe
  source 1..31: mol_type = other DNA

SEQ ID NO: 19919 - DNA, 36 bp, synthetic construct
  misc_feature 1..36: note = Probe
  source 1..36: mol_type = other DNA
gaagcccggctagctcagtcggtagagcatgggact

SEQ ID NO: 19920 - DNA, 16 bp, synthetic construct
  misc_feature 1..16: note = Probe
  source 1..16: mol_type = other DNA
gaagcgggtgctctta

SEQ ID NO: 19921 - DNA, 17 bp, synthetic construct
  misc_feature 1..17: note = Probe
  source 1..17: mol_type = other DNA
gaagcgggtgctcttat

SEQ ID NO: 19922 - DNA, 18 bp, synthetic construct
  misc_feature 1..18: note = Probe
  source 1..18: mol_type = other DNA
gaagcgggtgctcttatt

SEQ ID NO: 19923 - DNA, 19 bp, synthetic construct
  misc_feature 1..19: note = Probe
  source 1..19: mol_type = other DNA
gaagcgggtgctcttattt

SEQ ID NO: 19924 - DNA, 20 bp, synthetic construct
  misc_feature 1..20: note = Probe
  source 1..20: mol_type = other DNA
gaagcgggtgctcttatttt

SEQ ID NO: 19925 - DNA, 21 bp, synthetic construct
  misc_feature 1..21: note = Probe
  source 1..21: mol_type = other DNA
gaagcgggtgctcttattttt

SEQ ID NO: 19926 - DNA, 22 bp, synthetic construct
  misc_feature 1..22: note = Probe
  source 1..22: mol_type = other DNA
gaagcgggtgctcttatttttt

SEQ ID NO: 19927 - DNA, 23 bp, synthetic construct
  misc_feature 1..23: note = Probe
  source 1..23: mol_type = other DNA
gaagcgggtgctcttattttttc

SEQ ID NO: 19928 - DNA, 25 bp, synthetic construct
  misc_feature 1..25: note = Probe
  source 1..25: mol_type = other DNA
gaagcgggtgctcttattttttcta

SEQ ID NO: 19929 - DNA, 16 bp, synthetic construct
  misc_feature 1..16: note = Probe
  source 1..16: mol_type = other DNA
gaagcgtgctgggccc

SEQ ID NO: 19930 - DNA, 36 bp, synthetic construct
  misc_feature 1..36: note = Probe
  source 1..36: mol_type = other DNA
gaagcgtgctgggcccataacccagaggtcgatgga

SEQ ID NO: 19931 - DNA, 37 bp, synthetic construct
  misc_feature 1..37: note = Probe
  source 1..37: mol_type = other DNA
gaagcgtgctgggcccataacccagaggtcgatggat

SEQ ID NO: 19932 - DNA, 30 bp, synthetic construct
  misc_feature 1..30: note = Probe
  source 1..30: mol_type = other DNA
gaaggtcctgagttcgaacctcagaggggg

SEQ ID NO: 19933 - DNA, 32 bp, synthetic construct
  misc_feature 1..32: note = Probe
  source 1..32: mol_type = other DNA
gaaggtcctgagttcgaacctcagagggggca

SEQ ID NO: 19934 - DNA, 33 bp, synthetic construct
  misc_feature 1..33: note = Probe
  source 1..33: mol_type = other DNA
gaaggtcctgagttcgaacctcagagggggcaa

SEQ ID NO: 19935 - DNA, 33 bp, synthetic construct
  misc_feature 1..33: note = Probe
  source 1..33: mol_type = other DNA
gaaggtcctgagttcgaacctcagagggggcag

SEQ ID NO: 19936 - DNA, 34 bp, synthetic construct
  misc_feature 1..34: note = Probe
  source 1..34: mol_type = other DNA
gaaggtcctgagttcgaacctcagagggggcagc

SEQ ID NO: 19937 - DNA, 35 bp, synthetic construct
  misc_feature 1..35: note = Probe
  source 1..35: mol_type = other DNA
gaaggtcctgagttcgaacctcagagggggcagct

SEQ ID NO: 19938 - DNA, 35 bp, synthetic construct
  misc_feature 1..35: note = Probe
  source 1..35: mol_type = other DNA
gaaggtcctgagttcgagcctcagagagggcagct

SEQ ID NO: 19939 - DNA, 30 bp, synthetic construct
  misc_feature 1..30: note = Probe
  source 1..30: mol_type = other DNA
gaaggtcctgggttcaagccccagtggaac

SEQ ID NO: 19940 - DNA, 35 bp, synthetic construct
  misc_feature 1..35: note = Probe
  source 1..35: mol_type = other DNA
gaaggtcctgggttcaagccccagtggaaccatgg

SEQ ID NO: 19941 - DNA, 33 bp, synthetic construct; identical to SEQ ID NO: 892
  misc_feature 1..33: note = Probe
  source 1..33: mol_type = other DNA

SEQ ID NO: 19942 - DNA, 34 bp, synthetic construct; identical to SEQ ID NO: 5512
  misc_feature 1..34: note = Probe
  source 1..34: mol_type = other DNA

SEQ ID NO: 19943 - DNA, 35 bp, synthetic construct; identical to SEQ ID NO: 5513
  misc_feature 1..35: note = Probe
  source 1..35: mol_type = other DNA

SEQ ID NO: 19944 - DNA, 35 bp, synthetic construct
  misc_feature 1..35: note = Probe
  source 1..35: mol_type = other DNA
gaaggtcctgggttcgagccccagtggaaccatag

SEQ ID NO: 19945 - DNA, 30 bp, synthetic construct
  misc_feature 1..30: note = Probe
  source 1..30: mol_type = other DNA
gaaggtcgtgagttcgagcctcacacgggg

SEQ ID NO: 19946 - DNA, 32 bp, synthetic construct
  misc_feature 1..32: note = Probe
  source 1..32: mol_type = other DNA
gaaggtcgtgagttcgagcctcacacggggca

SEQ ID NO: 19947 - DNA, 30 bp, synthetic construct
  misc_feature 1..30: note = Probe
  source 1..30: mol_type = other DNA
gaaggtcgtgagttcgatcctcacacgggg

SEQ ID NO: 19948 - DNA, 33 bp, synthetic construct; identical to SEQ ID NO: 5514
  misc_feature 1..33: note = Probe
  source 1..33: mol_type = other DNA

SEQ ID NO: 19949 - DNA, 35 bp, synthetic construct; identical to SEQ ID NO: 5515
  misc_feature 1..35: note = Probe
  source 1..35: mol_type = other DNA

SEQ ID NO: 19950 - DNA, 41 bp, synthetic construct
  misc_feature 1..41: note = Probe
  source 1..41: mol_type = other DNA
gaaggtcgtgagttcgatcctcacacggggcacaataattt

SEQ ID NO: 19951 - DNA, 35 bp, synthetic construct
  misc_feature 1..35: note = Probe
  source 1..35: mol_type = other DNA
gaaggttgcgtgttcaaatcacgtcggggtcaaac

SEQ ID NO: 19952 - DNA, 35 bp, synthetic construct; identical to SEQ ID NO: 5516
  misc_feature 1..35: note = Probe
  source 1..35: mol_type = other DNA

SEQ ID NO: 19953 - DNA, 32 bp, synthetic construct
  misc_feature 1..32: note = Probe
  source 1..32: mol_type = other DNA
gaaggttgcgtgttcaagtcacgtcggggtca

SEQ ID NO: 19954 - DNA, 16 bp, synthetic construct
  misc_feature 1..16: note = Probe
  source 1..16: mol_type = other DNA
gaatccagcgatccga

SEQ ID NO: 19955 - DNA, 18 bp, synthetic construct
  misc_feature 1..18: note = Probe
  source 1..18: mol_type = other DNA
gaatccagcgatccgagt

SEQ ID NO: 19956 - DNA, 21 bp, synthetic construct
  misc_feature 1..21: note = Probe
  source 1..21: mol_type = other DNA
gaatccagcgatccgagttca

SEQ ID NO: 19957 - DNA, 34 bp, synthetic construct
  misc_feature 1..34: note = Probe
  source 1..34: mol_type = other DNA
gaatccagcgatccgagttcaaatctcggtggaa

SEQ ID NO: 19958 - DNA, 36 bp, synthetic construct
  misc_feature 1..36: note = Probe
  source 1..36: mol_type = other DNA
gaatccagcgatccgagttcaaatctcggtggaacc

SEQ ID NO: 19959 - DNA, 38 bp, synthetic construct
  misc_feature 1..38: note = Probe
  source 1..38: mol_type = other DNA
gaatccagcgatccgagttcaaatctcggtggaacctg

SEQ ID NO: 19960 - DNA, 39 bp, synthetic construct; identical to SEQ ID NO: 5522
  misc_feature 1..39: note = Probe
  source 1..39: mol_type = other DNA

SEQ ID NO: 19961 - DNA, 40 bp, synthetic construct; identical to SEQ ID NO: 5523
  misc_feature 1..40: note = Probe
  source 1..40: mol_type = other DNA

SEQ ID NO: 19962 - DNA, 38 bp, synthetic construct
  misc_feature 1..38: note = Probe
  source 1..38: mol_type = other DNA
gaatccagcgatccgagttcaaatctcggtggaacctt

SEQ ID NO: 19963 - DNA, 34 bp, synthetic construct
  misc_feature 1..34: note = Probe
  source 1..34: mol_type = other DNA
gaatccagcgatccgagttcaaatctcggtggga

SEQ ID NO: 19964 - DNA, 40 bp, synthetic construct; identical to SEQ ID NO: 5526
  misc_feature 1..40: note = Probe
  source 1..40: mol_type = other DNA

SEQ ID NO: 19965 - DNA, 37 bp, synthetic construct
  misc_feature 1..37: note = Probe
  source 1..37: mol_type = other DNA
gaatccagcgatccgagttcaagtctcggtggaacct

SEQ ID NO: 19966 - DNA, 38 bp, synthetic construct
  misc_feature 1..38: note = Probe
  source 1..38: mol_type = other DNA
gaatccagcgatccgagttcaagtctcggtggaacctg

SEQ ID NO: 19967 - DNA, 39 bp, synthetic construct
  misc_feature 1..39: note = Probe
  source 1..39: mol_type = other DNA
gaatccagcgatccgagttcaagtctcggtggaacctgc

SEQ ID NO: 19968 - DNA, 40 bp, synthetic construct
  misc_feature 1..40: note = Probe
  source 1..40: mol_type = other DNA
gaatccagcgatccgagttcaagtctcggtggaacctgct

SEQ ID NO: 19969 - DNA, 37 bp, synthetic construct
  misc_feature 1..37: note = Probe
  source 1..37: mol_type = other DNA
gaatccagcgatccgagttcgagtctcggtggaacct

SEQ ID NO: 19970 - DNA, 38 bp, synthetic construct
  misc_feature 1..38: note = Probe
  source 1..38: mol_type = other DNA
gaatccagcgatccgagttcgagtctcggtggaacctt

SEQ ID NO: 19971 - DNA, 40 bp, synthetic construct; identical to SEQ ID NO: 5528
  misc_feature 1..40: note = Probe
  source 1..40: mol_type = other DNA

SEQ ID NO: 19972 - DNA, 20 bp, synthetic construct
  misc_feature 1..20: note = Probe
  source 1..20: mol_type = other DNA
gaatcccaccgctgccacac

SEQ ID NO: 19973 - DNA, 20 bp, synthetic construct
  misc_feature 1..20: note = Probe
  source 1..20: mol_type = other DNA
gaatcccaccgctgccaggt

SEQ ID NO: 19974 - DNA, 20 bp, synthetic construct
  misc_feature 1..20: note = Probe
  source 1..20: mol_type = other DNA
gaatcccagcggtgcctccg

SEQ ID NO: 19975 - DNA, 28 bp, synthetic construct
  misc_feature 1..28: note = Probe
  source 1..28: mol_type = other DNA
gaatctgacaacagaggcttacgacccc

SEQ ID NO: 19976 - DNA, 31 bp, synthetic construct; identical to SEQ ID NO: 899
  misc_feature 1..31: note = Probe
  source 1..31: mol_type = other DNA

SEQ ID NO: 19977 - DNA, 37 bp, synthetic construct; identical to SEQ ID NO: 901
  misc_feature 1..37: note = Probe
  source 1..37: mol_type = other DNA

SEQ ID NO: 19978 - DNA, 38 bp, synthetic construct; identical to SEQ ID NO: 5537
  misc_feature 1..38: note = Probe
  source 1..38: mol_type = other DNA

SEQ ID NO: 19979 - DNA, 39 bp, synthetic construct; identical to SEQ ID NO: 5538
  misc_feature 1..39: note = Probe
  source 1..39: mol_type = other DNA

SEQ ID NO: 19980 - DNA, 40 bp, synthetic construct; identical to SEQ ID NO: 5539
  misc_feature 1..40: note = Probe
  source 1..40: mol_type = other DNA

SEQ ID NO: 19981 - DNA, 28 bp, synthetic construct
  misc_feature 1..28: note = Probe
  source 1..28: mol_type = other DNA
gaatcttagctttgggtgctaatggtgg

SEQ ID NO: 19982 - DNA, 29 bp, synthetic construct
  misc_feature 1..29: note = Probe
  source 1..29: mol_type = other DNA
gaatcttagctttgggtgctaatggtgga

SEQ ID NO: 19983 - DNA, 30 bp, synthetic construct
  misc_feature 1..30: note = Probe
  source 1..30: mol_type = other DNA
gaatcttagctttgggtgctaatggtggag

SEQ ID NO: 19984 - DNA, 32 bp, synthetic construct
  misc_feature 1..32: note = Probe
  source 1..32: mol_type = other DNA
gaatcttagctttgggtgctaatggtggagtt

SEQ ID NO: 19985 - DNA, 33 bp, synthetic construct; identical to SEQ ID NO: 5540
  misc_feature 1..33: note = Probe
  source 1..33: mol_type = other DNA

SEQ ID NO: 19986 - DNA, 34 bp, synthetic construct
  misc_feature 1..34: note = Probe
  source 1..34: mol_type = other DNA
gaatcttagctttgggtgctaatggtggagttaa

SEQ ID NO: 19987 - DNA, 36 bp, synthetic construct
  misc_feature 1..36: note = Probe
  source 1..36: mol_type = other DNA
gaatcttagctttgggtgctaatggtggagttaaag

SEQ ID NO: 19988 - DNA, 37 bp, synthetic construct
  misc_feature 1..37: note = Probe
  source 1..37: mol_type = other DNA
gaatcttagctttgggtgctaatggtggagttaaaga

SEQ ID NO: 19989 - DNA, 50 bp, synthetic construct; identical to SEQ ID NO: 5541
  misc_feature 1..50: note = Probe
  source 1..50: mol_type = other DNA

SEQ ID NO: 19990 - DNA, 16 bp, synthetic construct
  misc_feature 1..16: note = Probe
  source 1..16: mol_type = other DNA
gaattctcgcctgcca

SEQ ID NO: 19991 - DNA, 17 bp, synthetic construct
  misc_feature 1..17: note = Probe
  source 1..17: mol_type = other DNA
gaattctcgcctgccac

SEQ ID NO: 19992 - DNA, 19 bp, synthetic construct
  misc_feature 1..19: note = Probe
  source 1..19: mol_type = other DNA
gaattctcgcctgccacgc

SEQ ID NO: 19993 - DNA, 28 bp, synthetic construct
  misc_feature 1..28: note = Probe
  source 1..28: mol_type = other DNA
gaattctcgcctgccacgcgggaggccc

SEQ ID NO: 19994 - DNA, 32 bp, synthetic construct
  misc_feature 1..32: note = Probe
  source 1..32: mol_type = other DNA
gaattctcgcctgccacgcgggaggcccgggt

SEQ ID NO: 19995 - DNA, 46 bp, synthetic construct; identical to SEQ ID NO: 5545
  misc_feature 1..46: note = Probe
  source 1..46: mol_type = other DNA

SEQ ID NO: 19996 - DNA, 21 bp, synthetic construct
  misc_feature 1..21: note = Probe
  source 1..21: mol_type = other DNA
gacaacagaggcttacgaccc

SEQ ID NO: 19997 - DNA, 22 bp, synthetic construct
  misc_feature 1..22: note = Probe
  source 1..22: mol_type = other DNA
gacaacagaggcttacgacccc

SEQ ID NO: 19998 - DNA, 23 bp, synthetic construct
  misc_feature 1..23: note = Probe
  source 1..23: mol_type = other DNA
gacaacagaggcttacgacccct

SEQ ID NO: 19999 - DNA, 25 bp, synthetic construct
  misc_feature 1..25: note = Probe
  source 1..25: mol_type = other DNA
gacaacagaggcttacgacccctta

SEQ ID NO: 20000 - DNA, 27 bp, synthetic construct
  misc_feature 1..27: note = Probe
  source 1..27: mol_type = other DNA
gacaacagaggcttacgaccccttatt

SEQ ID NO: 20001 - DNA, 30 bp, synthetic construct; identical to SEQ ID NO: 5550
  misc_feature 1..30: note = Probe
  source 1..30: mol_type = other DNA

SEQ ID NO: 20002 - DNA, 32 bp, synthetic construct; identical to SEQ ID NO: 5551
  misc_feature 1..32: note = Probe
  source 1..32: mol_type = other DNA

SEQ ID NO: 20003 - DNA, 33 bp, synthetic construct; identical to SEQ ID NO: 5552
  misc_feature 1..33: note = Probe
  source 1..33: mol_type = other DNA

SEQ ID NO: 20004 - DNA, 34 bp, synthetic construct; identical to SEQ ID NO: 5553
  misc_feature 1..34: note = Probe
  source 1..34: mol_type = other DNA

SEQ ID NO: 20005 - DNA, 21 bp, synthetic construct
  misc_feature 1..21: note = Probe
  source 1..21: mol_type = other DNA
gacaacattcaaaaaagagta

SEQ ID NO: 20006 - DNA, 22 bp, synthetic construct
  misc_feature 1..22: note = Probe
  source 1..22: mol_type = other DNA
gacaacattcaaaaaagagtaa

SEQ ID NO: 20007 - DNA, 24 bp, synthetic construct
  misc_feature 1..24: note = Probe
  source 1..24: mol_type = other DNA
gacaacattcaaaaaagagtaata

SEQ ID NO: 20008 - DNA, 16 bp, synthetic construct
  misc_feature 1..16: note = Probe
  source 1..16: mol_type = other DNA
gacacacgtacacgtc

SEQ ID NO: 20009 - DNA, 25 bp, synthetic construct
  misc_feature 1..25: note = Probe
  source 1..25: mol_type = other DNA
gacaccccccacagtttatgtagct

SEQ ID NO: 20010 - DNA, 29 bp, synthetic construct
  misc_feature 1..29: note = Probe
  source 1..29: mol_type = other DNA
gacaccccccacagtttatgtagcttacc

SEQ ID NO: 20011 - DNA, 30 bp, synthetic construct
  misc_feature 1..30: note = Probe
  source 1..30: mol_type = other DNA
gacaccccccacagtttatgtagcttacct

SEQ ID NO: 20012 - DNA, 31 bp, synthetic construct
  misc_feature 1..31: note = Probe
  source 1..31: mol_type = other DNA
gacaccccccacagtttatgtagcttacctc

SEQ ID NO: 20013 - DNA, 32 bp, synthetic construct
  misc_feature 1..32: note = Probe
  source 1..32: mol_type = other DNA
gacaccccccacagtttatgtagcttacctcc

SEQ ID NO: 20014 - DNA, 38 bp, synthetic construct
  misc_feature 1..38: note = Probe
  source 1..38: mol_type = other DNA
gacaccgaagtctctgtggcgcaatcggttagcgcgtt

SEQ ID NO: 20015 - DNA, 28 bp, synthetic construct
  misc_feature 1..28: note = Probe
  source 1..28: mol_type = other DNA
gacagcgccgctggtgtagtggtatcat

SEQ ID NO: 20016 - DNA, 29 bp, synthetic construct
  misc_feature 1..29: note = Probe
  source 1..29: mol_type = other DNA
gacagcgccgctggtgtagtggtatcatg

SEQ ID NO: 20017 - DNA, 30 bp, synthetic construct
  misc_feature 1..30: note = Probe
  source 1..30: mol_type = other DNA
gacagcgccgctggtgtagtggtatcatgc

SEQ ID NO: 20018 - DNA, 31 bp, synthetic construct
  misc_feature 1..31: note = Probe
  source 1..31: mol_type = other DNA
gacagcgccgctggtgtagtggtatcatgca

SEQ ID NO: 20019 - DNA, 33 bp, synthetic construct
  misc_feature 1..33: note = Probe
  source 1..33: mol_type = other DNA
gacagcgccgctggtgtagtggtatcatgcaag

SEQ ID NO: 20020 - DNA, 34 bp, synthetic construct
  misc_feature 1..34: note = Probe
  source 1..34: mol_type = other DNA
gacagcgccgctggtgtagtggtatcatgcaaga

SEQ ID NO: 20021 - DNA, 35 bp, synthetic construct
  misc_feature 1..35: note = Probe
  source 1..35: mol_type = other DNA
gacagcgccgctggtgtagtggtatcatgcaagat

SEQ ID NO: 20022 - DNA, 36 bp, synthetic construct
  misc_feature 1..36: note = Probe
  source 1..36: mol_type = other DNA
gacagcgccgctggtgtagtggtatcatgcaagatt

SEQ ID NO: 20023 - DNA, 37 bp, synthetic construct
  misc_feature 1..37: note = Probe
  source 1..37: mol_type = other DNA
gacagcgccgctggtgtagtggtatcatgcaagattc

SEQ ID NO: 20024 - DNA, 39 bp, synthetic construct
  misc_feature 1..39: note = Probe
  source 1..39: mol_type = other DNA
gacagcgccgctggtgtagtggtatcatgcaagattccc

SEQ ID NO: 20025 - DNA, 40 bp, synthetic construct
  misc_feature 1..40: note = Probe
  source 1..40: mol_type = other DNA
gacagcgccgctggtgtagtggtatcatgcaagattccca

SEQ ID NO: 20026 - DNA, 41 bp, synthetic construct
  misc_feature 1..41: note = Probe
  source 1..41: mol_type = other DNA
gacagcgccgctggtgtagtggtatcatgcaagattcccat

SEQ ID NO: 20027 - DNA, 43 bp, synthetic construct
  misc_feature 1..43: note = Probe
  source 1..43: mol_type = other DNA
gacagcgccgctggtgtagtggtatcatgcaagattcccattc

SEQ ID NO: 20028 - DNA, 44 bp, synthetic construct
  misc_feature 1..44: note = Probe
  source 1..44: mol_type = other DNA
gacagcgccgctggtgtagtggtatcatgcaagattcccattct

SEQ ID NO: 20029 - DNA, 25 bp, synthetic construct
  misc_feature 1..25: note = Probe
  source 1..25: mol_type = other DNA
gacaggggttaggcctctttttacc

SEQ ID NO: 20030 - DNA, 26 bp, synthetic construct
  misc_feature 1..26: note = Probe
  source 1..26: mol_type = other DNA
gacaggggttaggcctctttttacca

SEQ ID NO: 20031 - DNA, 28 bp, synthetic construct
  misc_feature 1..28: note = Probe
  source 1..28: mol_type = other DNA
gacaggggttaggcctctttttaccagc

SEQ ID NO: 20032 - DNA, 29 bp, synthetic construct
  misc_feature 1..29: note = Probe
  source 1..29: mol_type = other DNA
gacaggggttaggcctctttttaccagct

SEQ ID NO: 20033 - DNA, 25 bp, synthetic construct
  misc_feature 1..25: note = Probe
  source 1..25: mol_type = other DNA
gacaggtggccggttagctcagttg

SEQ ID NO: 20034 - DNA, 36 bp, synthetic construct
  misc_feature 1..36: note = Probe
  source 1..36: mol_type = other DNA
gacaggtggccggttagctcagttggttagagcgtg

SEQ ID NO: 20035 - DNA, 39 bp, synthetic construct
  misc_feature 1..39: note = Probe
  source 1..39: mol_type = other DNA
gacaggtggccggttagctcagttggttagagcgtggtg

SEQ ID NO: 20036 - DNA, 46 bp, synthetic construct
  misc_feature 1..46: note = Probe
  source 1..46: mol_type = other DNA
gacaggtggccggttagctcagttggttagagcgtggtgctaataa

SEQ ID NO: 20037 - DNA, 25 bp, synthetic construct
  misc_feature 1..25: note = Probe
  source 1..25: mol_type = other DNA
gacagtagcattggtggttcagtgg

SEQ ID NO: 20038 - DNA, 27 bp, synthetic construct
  misc_feature 1..27: note = Probe
  source 1..27: mol_type = other DNA
gacagtagcattggtggttcagtggta

SEQ ID NO: 20039 - DNA, 28 bp, synthetic construct
  misc_feature 1..28: note = Probe
  source 1..28: mol_type = other DNA
gacagtagcattggtggttcagtggtag

SEQ ID NO: 20040 - DNA, 29 bp, synthetic construct
  misc_feature 1..29: note = Probe
  source 1..29: mol_type = other DNA
gacagtagcattggtggttcagtggtaga

SEQ ID NO: 20041 - DNA, 30 bp, synthetic construct
  misc_feature 1..30: note = Probe
  source 1..30: mol_type = other DNA
gacagtagcattggtggttcagtggtagaa

SEQ ID NO: 20042 - DNA, 31 bp, synthetic construct
  misc_feature 1..31: note = Probe
  source 1..31: mol_type = other DNA
gacagtagcattggtggttcagtggtagaat

SEQ ID NO: 20043 - DNA, 32 bp, synthetic construct
  misc_feature 1..32: note = Probe
  source 1..32: mol_type = other DNA
gacagtagcattggtggttcagtggtagaatt

SEQ ID NO: 20044 - DNA, 33 bp, synthetic construct
  misc_feature 1..33: note = Probe
  source 1..33: mol_type = other DNA
gacagtagcattggtggttcagtggtagaattc

SEQ ID NO: 20045 - DNA, 34 bp, synthetic construct
  misc_feature 1..34: note = Probe
  source 1..34: mol_type = other DNA
gacagtagcattggtggttcagtggtagaattct

SEQ ID NO: 20046 - DNA, 36 bp, synthetic construct
  misc_feature 1..36: note = Probe
  source 1..36: mol_type = other DNA
gacagtagcattggtggttcagtggtagaattctcg

SEQ ID NO: 20047 - DNA, 37 bp, synthetic construct
  misc_feature 1..37: note = Probe
  source 1..37: mol_type = other DNA
gacagtagcattggtggttcagtggtagaattctcgc

SEQ ID NO: 20048 - DNA, 38 bp, synthetic construct
  misc_feature 1..38: note = Probe
  source 1..38: mol_type = other DNA
gacagtagcattggtggttcagtggtagaattctcgcc

SEQ ID NO: 20049 - DNA, 39 bp, synthetic construct
  misc_feature 1..39: note = Probe
  source 1..39: mol_type = other DNA
gacagtagcattggtggttcagtggtagaattctcgcct

SEQ ID NO: 20050 - DNA, 40 bp, synthetic construct
  misc_feature 1..40: note = Probe
  source 1..40: mol_type = other DNA
gacagtagcattggtggttcagtggtagaattctcgcctg

SEQ ID NO: 20051 - DNA, 41 bp, synthetic construct
  misc_feature 1..41: note = Probe
  source 1..41: mol_type = other DNA
gacagtagcattggtggttcagtggtagaattctcgcctgc

SEQ ID NO: 20052 - DNA, 42 bp, synthetic construct
  misc_feature 1..42: note = Probe
  source 1..42: mol_type = other DNA
gacagtagcattggtggttcagtggtagaattctcgcctgcc

SEQ ID NO: 20053 - DNA, 27 bp, synthetic construct
  misc_feature 1..27: note = Probe
  source 1..27: mol_type = other DNA
gaccaagagccttcaaagccctcagta

SEQ ID NO: 20054 - DNA, 30 bp, synthetic construct
  misc_feature 1..30: note = Probe
  source 1..30: mol_type = other DNA
gaccaagagccttcaaagccctcagtaagt

SEQ ID NO: 20055 - DNA, 31 bp, synthetic construct
  misc_feature 1..31: note = Probe
  source 1..31: mol_type = other DNA
gaccaagagccttcaaagccctcagtaagtt

SEQ ID NO: 20056 - DNA, 19 bp, synthetic construct
  misc_feature 1..19: note = Probe
  source 1..19: mol_type = other DNA
gacccagtggcctaatgga

SEQ ID NO: 20057 - DNA, 20 bp, synthetic construct
  misc_feature 1..20: note = Probe
  source 1..20: mol_type = other DNA
gacccagtggcctaatggat

SEQ ID NO: 20058 - DNA, 24 bp, synthetic construct
  misc_feature 1..24: note = Probe
  source 1..24: mol_type = other DNA
gacccgggttcgattcccggccaa

SEQ ID NO: 20059 - DNA, 26 bp, synthetic construct
  misc_feature 1..26: note = Probe
  source 1..26: mol_type = other DNA
gacccgggttcgattcccggccaacg

SEQ ID NO: 20060 - DNA, 28 bp, synthetic construct
  misc_feature 1..28: note = Probe
  source 1..28: mol_type = other DNA
gacccgggttcgattcccggccaacgca

SEQ ID NO: 20061 - DNA, 31 bp, synthetic construct; identical to SEQ ID NO: 5567
  misc_feature 1..31: note = Probe
  source 1..31: mol_type = other DNA

SEQ ID NO: 20062 - DNA, 31 bp, synthetic construct; identical to SEQ ID NO: 5568
  misc_feature 1..31: note = Probe
  source 1..31: mol_type = other DNA

SEQ ID NO: 20063 - DNA, 31 bp, synthetic construct
  misc_feature 1..31: note = Probe
  source 1..31: mol_type = other DNA
gacccgggttcgattcccgggcggcgcactt

SEQ ID NO: 20064 - DNA, 27 bp, synthetic construct
  misc_feature 1..27: note = Probe
  source 1..27: mol_type = other DNA
gacccttttggatgttcgcaacccctt

SEQ ID NO: 20065 - DNA, 28 bp, synthetic construct
  misc_feature 1..28: note = Probe
  source 1..28: mol_type = other DNA
gacccttttggatgttcgcaaccccttt

SEQ ID NO: 20066 - DNA, 29 bp, synthetic construct
  misc_feature 1..29: note = Probe
  source 1..29: mol_type = other DNA
gacccttttggatgttcgcaacccctttt

SEQ ID NO: 20067 - DNA, 31 bp, synthetic construct
  misc_feature 1..31: note = Probe
  source 1..31: mol_type = other DNA
gaccgctctgagctaaacctagccccaaacc

SEQ ID NO: 20068 - DNA, 21 bp, synthetic construct
  misc_feature 1..21: note = Probe
  source 1..21: mol_type = other DNA
gaccggggttcaattccccga

SEQ ID NO: 20069 - DNA, 22 bp, synthetic construct
  misc_feature 1..22: note = Probe
  source 1..22: mol_type = other DNA
gaccggggttcaattccccgac

SEQ ID NO: 20070 - DNA, 25 bp, synthetic construct
  misc_feature 1..25: note = Probe
  source 1..25: mol_type = other DNA
gaccggggttcaattccccgacggg

SEQ ID NO: 20071 - DNA, 29 bp, synthetic construct
  misc_feature 1..29: note = Probe
  source 1..29: mol_type = other DNA
gaccggggttcaattccccgacggggagg

SEQ ID NO: 20072 - DNA, 31 bp, synthetic construct; identical to SEQ ID NO: 5571
  misc_feature 1..31: note = Probe
  source 1..31: mol_type = other DNA

SEQ ID NO: 20073 - DNA, 23 bp, synthetic construct
  misc_feature 1..23: note = Probe
  source 1..23: mol_type = other DNA
gaccggggttcgattccccgacg

SEQ ID NO: 20074 - DNA, 26 bp, synthetic construct
  misc_feature 1..26: note = Probe
  source 1..26: mol_type = other DNA
gaccggggttcgattccccgacgggg

SEQ ID NO: 20075 - DNA, 29 bp, synthetic construct
  misc_feature 1..29: note = Probe
  source 1..29: mol_type = other DNA
gaccggggttcgattccccgacggggaga

SEQ ID NO: 20076 - DNA, 31 bp, synthetic construct
  misc_feature 1..31: note = Probe
  source 1..31: mol_type = other DNA
gaccggggttcgattccccgacggggagaaa

SEQ ID NO: 20077 - DNA, 30 bp, synthetic construct; identical to SEQ ID NO: 5576
  misc_feature 1..30: note = Probe
  source 1..30: mol_type = other DNA

SEQ ID NO: 20078 - DNA, 31 bp, synthetic construct
  misc_feature 1..31: note = Probe
  source 1..31: mol_type = other DNA
gaccggggttcgattccccgacggggagacg

SEQ ID NO: 20079 - DNA, 31 bp, synthetic construct; identical to SEQ ID NO: 5577
  misc_feature 1..31: note = Probe
  source 1..31: mol_type = other DNA

SEQ ID NO: 20080 - DNA, 29 bp, synthetic construct
  misc_feature 1..29: note = Probe
  source 1..29: mol_type = other DNA
gaccggggttcgattccccgacggggagg

SEQ ID NO: 20081 - DNA, 30 bp, synthetic construct; identical to SEQ ID NO: 5579
  misc_feature 1..30: note = Probe
  source 1..30: mol_type = other DNA

SEQ ID NO: 20082 - DNA, 31 bp, synthetic construct; identical to SEQ ID NO: 5580
  misc_feature 1..31: note = Probe
  source 1..31: mol_type = other DNA

SEQ ID NO: 20083 - DNA, 31 bp, synthetic construct; identical to SEQ ID NO: 5581
  misc_feature 1..31: note = Probe
  source 1..31: mol_type = other DNA

SEQ ID NO: 20084 - DNA, 16 bp, synthetic construct
  misc_feature 1..16: note = Probe
  source 1..16: mol_type = other DNA
gacctcacgagacttt

SEQ ID NO: 20085 - DNA, 33 bp, synthetic construct
  misc_feature 1..33: note = Probe
  source 1..33: mol_type = other DNA
gacctcgtggcgcaatggtagcgcgtctgactc

SEQ ID NO: 20086 - DNA, 34 bp, synthetic construct
  misc_feature 1..34: note = Probe
  source 1..34: mol_type = other DNA
gacctcgtggcgcaatggtagcgcgtctgactcc

SEQ ID NO: 20087 - DNA, 32 bp, synthetic construct
  misc_feature 1..32: note = Probe
  source 1..32: mol_type = other DNA
gacgagctagctcagtcggtagagcatgggac

SEQ ID NO: 20088 - DNA, 33 bp, synthetic construct; identical to SEQ ID NO: 5583
  misc_feature 1..33: note = Probe
  source 1..33: mol_type = other DNA

SEQ ID NO: 20089 - DNA, 16 bp, synthetic construct
  misc_feature 1..16: note = Probe
  source 1..16: mol_type = other DNA
gacgaggtggccgagt

SEQ ID NO: 20090 - DNA, 17 bp, synthetic construct
  misc_feature 1..17: note = Probe
  source 1..17: mol_type = other DNA
gacgaggtggccgagtg

SEQ ID NO: 20091 - DNA, 20 bp, synthetic construct
  misc_feature 1..20: note = Probe
  source 1..20: mol_type = other DNA
gacgaggtggccgagtggtt

SEQ ID NO: 20092 - DNA, 21 bp, synthetic construct
  misc_feature 1..21: note = Probe
  source 1..21: mol_type = other DNA
gacgaggtggccgagtggtta

SEQ ID NO: 20093 - DNA, 22 bp, synthetic construct
  misc_feature 1..22: note = Probe
  source 1..22: mol_type = other DNA
gacgaggtggccgagtggttaa

SEQ ID NO: 20094 - DNA, 23 bp, synthetic construct
  misc_feature 1..23: note = Probe
  source 1..23: mol_type = other DNA
gacgaggtggccgagtggttaag

SEQ ID NO: 20095 - DNA, 25 bp, synthetic construct
  misc_feature 1..25: note = Probe
  source 1..25: mol_type = other DNA
gacgaggtggccgagtggttaaggc

SEQ ID NO: 20096 - DNA, 26 bp, synthetic construct
  misc_feature 1..26: note = Probe
  source 1..26: mol_type = other DNA
gacgaggtggccgagtggttaaggcg

SEQ ID NO: 20097 - DNA, 26 bp, synthetic construct
  misc_feature 1..26: note = Probe
  source 1..26: mol_type = other DNA
gacggctcgttggtctaggggtatga

SEQ ID NO: 20098 - DNA, 28 bp, synthetic construct
  misc_feature 1..28: note = Probe
  source 1..28: mol_type = other DNA
gacggctcgttggtctaggggtatgatt

SEQ ID NO: 20099 - DNA, 24 bp, synthetic construct
  misc_feature 1..24: note = Probe
  source 1..24: mol_type = other DNA
gacgggccgcgtggcctaatggat

SEQ ID NO: 20100 - DNA, 17 bp, synthetic construct
  misc_feature 1..17: note = Probe
  source 1..17: mol_type = other DNA
gacgggctcacatcacc

SEQ ID NO: 20101 - DNA, 18 bp, synthetic construct
  misc_feature 1..18: note = Probe
  source 1..18: mol_type = other DNA
gacgggctcacatcaccc

SEQ ID NO: 20102 - DNA, 19 bp, synthetic construct
  misc_feature 1..19: note = Probe
  source 1..19: mol_type = other DNA
gacgggctcacatcacccc

SEQ ID NO: 20103 - DNA, 20 bp, synthetic construct
  misc_feature 1..20: note = Probe
  source 1..20: mol_type = other DNA
gacgggctcacatcacccca

SEQ ID NO: 20104 - DNA, 21 bp, synthetic construct
  misc_feature 1..21: note = Probe
  source 1..21: mol_type = other DNA
gacgggctcacatcaccccat

SEQ ID NO: 20105 - DNA, 22 bp, synthetic construct
  misc_feature 1..22: note = Probe
  source 1..22: mol_type = other DNA
gacgggctcacatcaccccata

SEQ ID NO: 20106 - DNA, 23 bp, synthetic construct
  misc_feature 1..23: note = Probe
  source 1..23: mol_type = other DNA
gacgggctcacatcaccccataa

SEQ ID NO: 20107 - DNA, 24 bp, synthetic construct
  misc_feature 1..24: note = Probe
  source 1..24: mol_type = other DNA
gacgggctcacatcaccccataaa

SEQ ID NO: 20108 - DNA, 25 bp, synthetic construct
  misc_feature 1..25: note = Probe
  source 1..25: mol_type = other DNA
gacgggctcacatcaccccataaac

SEQ ID NO: 20109 - DNA, 26 bp, synthetic construct
  misc_feature 1..26: note = Probe
  source 1..26: mol_type = other DNA
gacgggctcacatcaccccataaaca

SEQ ID NO: 20110 - DNA, 27 bp, synthetic construct
  misc_feature 1..27: note = Probe
  source 1..27: mol_type = other DNA
gacgggctcacatcaccccataaacaa

SEQ ID NO: 20111 - DNA, 28 bp, synthetic construct
  misc_feature 1..28: note = Probe
  source 1..28: mol_type = other DNA
gacgggctcacatcaccccataaacaaa

SEQ ID NO: 20112 - DNA, 29 bp, synthetic construct
  misc_feature 1..29: note = Probe
  source 1..29: mol_type = other DNA
gacgggctcacatcaccccataaacaaat

SEQ ID NO: 20113 - DNA, 15 bp, synthetic construct
  misc_feature 1..15: note = Probe
  source 1..15: mol_type = other DNA
gactacaaaaaggat

SEQ ID NO: 20114 - DNA, 22 bp, synthetic construct
  misc_feature 1..22: note = Probe
  source 1..22: mol_type = other DNA
gactacaaaaaggattagactg

SEQ ID NO: 20115 - DNA, 23 bp, synthetic construct
  misc_feature 1..23: note = Probe
  source 1..23: mol_type = other DNA
gactacaaaaaggattagactga

SEQ ID NO: 20116 - DNA, 24 bp, synthetic construct
  misc_feature 1..24: note = Probe
  source 1..24: mol_type = other DNA
gactacaaaaaggattagactgaa

SEQ ID NO: 20117 - DNA, 25 bp, synthetic construct
  misc_feature 1..25: note = Probe
  source 1..25: mol_type = other DNA
gactacaaaaaggattagactgaac

SEQ ID NO: 20118 - DNA, 26 bp, synthetic construct
  misc_feature 1..26: note = Probe
  source 1..26: mol_type = other DNA
gactacaaaaaggattagactgaacc

SEQ ID NO: 20119 - DNA, 27 bp, synthetic construct
  misc_feature 1..27: note = Probe
  source 1..27: mol_type = other DNA
gactacaaaaaggattagactgaaccg

SEQ ID NO: 20120 - DNA, 25 bp, synthetic construct
  misc_feature 1..25: note = Probe
  source 1..25: mol_type = other DNA
gactacggatcagaagattctaggt

SEQ ID NO: 20121 - DNA, 16 bp, synthetic construct
  misc_feature 1..16: note = Probe
  source 1..16: mol_type = other DNA
gactatgagaatcgaa

SEQ ID NO: 20122 - DNA, 18 bp, synthetic construct
  misc_feature 1..18: note = Probe
  source 1..18: mol_type = other DNA
gactatgagaatcgaacc

SEQ ID NO: 20123 - DNA, 19 bp, synthetic construct
  misc_feature 1..19: note = Probe
  source 1..19: mol_type = other DNA
gactatgagaatcgaaccc

SEQ ID NO: 20124 - DNA, 20 bp, synthetic construct
  misc_feature 1..20: note = Probe
  source 1..20: mol_type = other DNA
gactatgagaatcgaaccca

SEQ ID NO: 20125 - DNA, 23 bp, synthetic construct
  misc_feature 1..23: note = Probe
  source 1..23: mol_type = other DNA
gactatgagaatcgaacccatcc

SEQ ID NO: 20126 - DNA, 24 bp, synthetic construct
  misc_feature 1..24: note = Probe
  source 1..24: mol_type = other DNA
gactatgagaatcgaacccatccc

SEQ ID NO: 20127 - DNA, 29 bp, synthetic construct
  misc_feature 1..29: note = Probe
  source 1..29: mol_type = other DNA
gactatgagaatcgaacccatccctgaga

SEQ ID NO: 20128 - DNA, 31 bp, synthetic construct; identical to SEQ ID NO: 5606
  misc_feature 1..31: note = Probe
  source 1..31: mol_type = other DNA

SEQ ID NO: 20129 - DNA, 32 bp, synthetic construct
  misc_feature 1..32: note = Probe
  source 1..32: mol_type = other DNA
gactcattaaattatgataatcatatttacca

SEQ ID NO: 20130 - DNA, 34 bp, synthetic construct
  misc_feature 1..34: note = Probe
  source 1..34: mol_type = other DNA
gactcattaaattatgataatcatatttaccaaa

SEQ ID NO: 20131 - DNA, 36 bp, synthetic construct; identical to SEQ ID NO: 5607
  misc_feature 1..36: note = Probe
  source 1..36: mol_type = other DNA

SEQ ID NO: 20132 - DNA, 20 bp, synthetic construct
  misc_feature 1..20: note = Probe
  source 1..20: mol_type = other DNA
gactcccggtatgggaacaa

SEQ ID NO: 20133 - DNA, 20 bp, synthetic construct
  misc_feature 1..20: note = Probe
  source 1..20: mol_type = other DNA
gactcccggtgtgggaacgc

SEQ ID NO: 20134 - DNA, 28 bp, synthetic construct
  misc_feature 1..28: note = Probe
  source 1..28: mol_type = other DNA
gactcgcggccgccttaagaagccagca

SEQ ID NO: 20135 - DNA, 31 bp, synthetic construct
  misc_feature 1..31: note = Probe
  source 1..31: mol_type = other DNA
gactcggtctctgtggcgcaatcggttagcg

SEQ ID NO: 20136 - DNA, 34 bp, synthetic construct
  misc_feature 1..34: note = Probe
  source 1..34: mol_type = other DNA
gactcggtctctgtggcgcaatcggttagcgcgt

SEQ ID NO: 20137 - DNA, 35 bp, synthetic construct
  misc_feature 1..35: note = Probe
  source 1..35: mol_type = other DNA
gactcggtctctgtggcgcaatcggttagcgcgtt

SEQ ID NO: 20138 - DNA, 36 bp, synthetic construct
  misc_feature 1..36: note = Probe
  source 1..36: mol_type = other DNA
gactcggtctctgtggcgcaatcggttagcgcgttc

SEQ ID NO: 20139 - DNA, 40 bp, synthetic construct
  misc_feature 1..40: note = Probe
  source 1..40: mol_type = other DNA
gactctgaatccagcgatccgagttcaaatctcggtggaa

SEQ ID NO: 20140 - DNA, 46 bp, synthetic construct
  misc_feature 1..46: note = Probe
  source 1..46: mol_type = other DNA
gactctgaatccagcgatccgagttcaaatctcggtggaacctgca

SEQ ID NO: 20141 - DNA, 46 bp, synthetic construct
  misc_feature 1..46: note = Probe
  source 1..46: mol_type = other DNA
gactttgaatccagcgatccgagttcaaatctcggtgggacctcac

SEQ ID NO: 20142 - DNA, 16 bp, synthetic construct
  misc_feature 1..16: note = Probe
  source 1..16: mol_type = other DNA
gagaaagctcacaaga

SEQ ID NO: 20143 - DNA, 17 bp, synthetic construct
  misc_feature 1..17: note = Probe
  source 1..17: mol_type = other DNA
gagaaagctcacaagaa

SEQ ID NO: 20144 - DNA, 49 bp, synthetic construct; identical to SEQ ID NO: 949
  misc_feature 1..49: note = Probe
  source 1..49: mol_type = other DNA

SEQ ID NO: 20145 - DNA, 21 bp, synthetic construct
  misc_feature 1..21: note = Probe
  source 1..21: mol_type = other DNA
gagaaccaacacctctttaca

SEQ ID NO: 20146 - DNA, 24 bp, synthetic construct
  misc_feature 1..24: note = Probe
  source 1..24: mol_type = other DNA
gagaaccaacacctctttacagtg

SEQ ID NO: 20147 - DNA, 25 bp, synthetic construct
  misc_feature 1..25: note = Probe
  source 1..25: mol_type = other DNA
gagaaccaacacctctttacagtga

SEQ ID NO: 20148 - DNA, 26 bp, synthetic construct
  misc_feature 1..26: note = Probe
  source 1..26: mol_type = other DNA
gagaaccaacacctctttacagtgaa

SEQ ID NO: 20149 - DNA, 27 bp, synthetic construct
  misc_feature 1..27: note = Probe
  source 1..27: mol_type = other DNA
gagaaccaacacctctttacagtgaaa

SEQ ID NO: 20150 - DNA, 28 bp, synthetic construct
  misc_feature 1..28: note = Probe
  source 1..28: mol_type = other DNA
gagaaccaacacctctttacagtgaaat

SEQ ID NO: 20151 - DNA, 31 bp, synthetic construct; identical to SEQ ID NO: 951
  misc_feature 1..31: note = Probe
  source 1..31: mol_type = other DNA

SEQ ID NO: 20152 - DNA, 24 bp, synthetic construct
  misc_feature 1..24: note = Probe
  source 1..24: mol_type = other DNA
gagacagcagagtggcgcagcgga

SEQ ID NO: 20153 - DNA, 26 bp, synthetic construct
  misc_feature 1..26: note = Probe
  source 1..26: mol_type = other DNA
gagacagcagagtggcgcagcggaag

SEQ ID NO: 20154 - DNA, 42 bp, synthetic construct
  misc_feature 1..42: note = Probe
  source 1..42: mol_type = other DNA
gagacagcagagtggcgcagcggaagcgtgctgggcccataa

SEQ ID NO: 20155 - DNA, 20 bp, synthetic construct
  misc_feature 1..20: note = Probe
  source 1..20: mol_type = other DNA
gagacccgaggtagggcttt

SEQ ID NO: 20156 - DNA, 30 bp, synthetic construct
  misc_feature 1..30: note = Probe
  source 1..30: mol_type = other DNA
gagacccgaggtagggctttggctgtgggg

SEQ ID NO: 20157 - DNA, 23 bp, synthetic construct
  misc_feature 1..23: note = Probe
  source 1..23: mol_type = other DNA
gagaccggggttcaattccccga

SEQ ID NO: 20158 - DNA, 25 bp, synthetic construct
  misc_feature 1..25: note = Probe
  source 1..25: mol_type = other DNA
gagaccggggttcaattccccgacg

SEQ ID NO: 20159 - DNA, 27 bp, synthetic construct
  misc_feature 1..27: note = Probe
  source 1..27: mol_type = other DNA
gagaccggggttcaattccccgacggg

SEQ ID NO: 20160 - DNA, 30 bp, synthetic construct
  misc_feature 1..30: note = Probe
  source 1..30: mol_type = other DNA
gagaccggggttcaattccccgacggggag

SEQ ID NO: 20161 - DNA, 31 bp, synthetic construct; identical to SEQ ID NO: 5617
  misc_feature 1..31: note = Probe
  source 1..31: mol_type = other DNA

SEQ ID NO: 20162 - DNA, 33 bp, synthetic construct; identical to SEQ ID NO: 5618
  misc_feature 1..33: note = Probe
  source 1..33: mol_type = other DNA

SEQ ID NO: 20163 - DNA, 31 bp, synthetic construct; identical to SEQ ID NO: 5620
  misc_feature 1..31: note = Probe
  source 1..31: mol_type = other DNA

SEQ ID NO: 20164 - DNA, 33 bp, synthetic construct
  misc_feature 1..33: note = Probe
  source 1..33: mol_type = other DNA
gagaccggggttcgattccccgacggggagaaa

SEQ ID NO: 20165 - DNA, 32 bp, synthetic construct; identical to SEQ ID NO: 5622
  misc_feature 1..32: note = Probe
  source 1..32: mol_type = other DNA

SEQ ID NO: 20166 - DNA, 33 bp, synthetic construct
  misc_feature 1..33: note = Probe
  source 1..33: mol_type = other DNA
gagaccggggttcgattccccgacggggagacg

SEQ ID NO: 20167 - DNA, 33 bp, synthetic construct; identical to SEQ ID NO: 5623
  misc_feature 1..33: note = Probe
  source 1..33: mol_type = other DNA

SEQ ID NO: 20168 - DNA, 31 bp, synthetic construct; identical to SEQ ID NO: 5624
  misc_feature 1..31: note = Probe
  source 1..31: mol_type = other DNA

SEQ ID NO: 20169 - DNA, 32 bp, synthetic construct
  misc_feature 1..32: note = Probe
  source 1..32: mol_type = other DNA
gagaccggggttcgattccccgacggggagga

SEQ ID NO: 20170 - DNA, 32 bp, synthetic construct; identical to SEQ ID NO: 5625
  misc_feature 1..32: note = Probe
  source 1..32: mol_type = other DNA

SEQ ID NO: 20171 - DNA, 33 bp, synthetic construct; identical to SEQ ID NO: 5626
  misc_feature 1..33: note = Probe
  source 1..33: mol_type = other DNA

SEQ ID NO: 20172 - DNA, 33 bp, synthetic construct
  misc_feature 1..33: note = Probe
  source 1..33: mol_type = other DNA
gagaccggggttcgattccccgacggggaggcc

SEQ ID NO: 20173 - DNA, 30 bp, synthetic construct
  misc_feature 1..30: note = Probe
  source 1..30: mol_type = other DNA
gagactcgcggccgccttaagaagccagca

SEQ ID NO: 20174 - DNA, 16 bp, synthetic construct
  misc_feature 1..16: note = Probe
  source 1..16: mol_type = other DNA
gagagcgctcggtttt

SEQ ID NO: 20175 - DNA, 17 bp, synthetic construct
  misc_feature 1..17: note = Probe
  source 1..17: mol_type = other DNA
gagagcgctcggttttt

SEQ ID NO: 20176 - DNA, 29 bp, synthetic construct
  misc_feature 1..29: note = Probe
  source 1..29: mol_type = other DNA
gagagcggctcgttggtctaggggtatga

SEQ ID NO: 20177 - DNA, 30 bp, synthetic construct
  misc_feature 1..30: note = Probe
  source 1..30: mol_type = other DNA
gagagcggctcgttggtctaggggtatgat

SEQ ID NO: 20178 - DNA, 31 bp, synthetic construct
  misc_feature 1..31: note = Probe
  source 1..31: mol_type = other DNA
gagagcggctcgttggtctaggggtatgatt

SEQ ID NO: 20179 - DNA, 33 bp, synthetic construct
  misc_feature 1..33: note = Probe
  source 1..33: mol_type = other DNA
gagagcggctcgttggtctaggggtatgattct

SEQ ID NO: 20180 - DNA, 35 bp, synthetic construct
  misc_feature 1..35: note = Probe
  source 1..35: mol_type = other DNA
gagagcggctcgttggtctaggggtatgattctcg

SEQ ID NO: 20181 - DNA, 36 bp, synthetic construct
  misc_feature 1..36: note = Probe
  source 1..36: mol_type = other DNA
gagagcggctcgttggtctaggggtatgattctcgc

SEQ ID NO: 20182 - DNA, 25 bp, synthetic construct
  misc_feature 1..25: note = Probe
  source 1..25: mol_type = other DNA
gagaggcactggtggttcagtggta

SEQ ID NO: 20183 - DNA, 26 bp, synthetic construct
  misc_feature 1..26: note = Probe
  source 1..26: mol_type = other DNA
gagaggcactggtggttcagtggtag

SEQ ID NO: 20184 - DNA, 30 bp, synthetic construct
  misc_feature 1..30: note = Probe
  source 1..30: mol_type = other DNA
gagaggcactggtggttcagtggtagaatt

SEQ ID NO: 20185 - DNA, 32 bp, synthetic construct
  misc_feature 1..32: note = Probe
  source 1..32: mol_type = other DNA
gagaggcactggtggttcagtggtagaattct

SEQ ID NO: 20186 - DNA, 16 bp, synthetic construct
  misc_feature 1..16: note = Probe
  source 1..16: mol_type = other DNA
gagaggtcccgggttc

SEQ ID NO: 20187 - DNA, 30 bp, synthetic construct
  misc_feature 1..30: note = Probe
  source 1..30: mol_type = other DNA
gagaggtcccgggttcaaatcccggacgag

SEQ ID NO: 20188 - DNA, 31 bp, synthetic construct
  misc_feature 1..31: note = Probe
  source 1..31: mol_type = other DNA
gagaggtcccgggttcaaatcccggacgagc

SEQ ID NO: 20189 - DNA, 32 bp, synthetic construct
  misc_feature 1..32: note = Probe
  source 1..32: mol_type = other DNA
gagaggtcccgggttcaaatcccggacgagcc

SEQ ID NO: 20190 - DNA, 33 bp, synthetic construct
  misc_feature 1..33: note = Probe
  source 1..33: mol_type = other DNA
gagaggtcccgggttcaaatcccggacgagccc

SEQ ID NO: 20191 - DNA, 36 bp, synthetic construct; identical to SEQ ID NO: 5628
  misc_feature 1..36: note = Probe
  source 1..36: mol_type = other DNA

SEQ ID NO: 20192 - DNA, 30 bp, synthetic construct
  misc_feature 1..30: note = Probe
  source 1..30: mol_type = other DNA
gagatcctgggttcgaatcccagcggtgcc

SEQ ID NO: 20193 - DNA, 34 bp, synthetic construct
  misc_feature 1..34: note = Probe
  source 1..34: mol_type = other DNA
gagatcctgggttcgaatcccagcggtgcctccg

SEQ ID NO: 20194 - DNA, 20 bp, synthetic construct
  misc_feature 1..20: note = Probe
  source 1..20: mol_type = other DNA
gagatgaaaacctttttcca

SEQ ID NO: 20195 - DNA, 24 bp, synthetic construct
  misc_feature 1..24: note = Probe
  source 1..24: mol_type = other DNA
gagatgaaaacctttttccaagga

SEQ ID NO: 20196 - DNA, 25 bp, synthetic construct
  misc_feature 1..25: note = Probe
  source 1..25: mol_type = other DNA
gagatgaaaacctttttccaaggac

SEQ ID NO: 20197 - DNA, 26 bp, synthetic construct
  misc_feature 1..26: note = Probe
  source 1..26: mol_type = other DNA
gagatgaaaacctttttccaaggaca

SEQ ID NO: 20198 - DNA, 27 bp, synthetic construct
  misc_feature 1..27: note = Probe
  source 1..27: mol_type = other DNA
gagatgaaaacctttttccaaggacaa

SEQ ID NO: 20199 - DNA, 28 bp, synthetic construct
  misc_feature 1..28: note = Probe
  source 1..28: mol_type = other DNA
gagatgaaaacctttttccaaggacaaa

SEQ ID NO: 20200 - DNA, 29 bp, synthetic construct
  misc_feature 1..29: note = Probe
  source 1..29: mol_type = other DNA
gagatgaaaacctttttccaaggacaaat

SEQ ID NO: 20201 - DNA, 30 bp, synthetic construct
  misc_feature 1..30: note = Probe
  source 1..30: mol_type = other DNA
gagatgaaaacctttttccaaggacaaatc

SEQ ID NO: 20202 - DNA, 18 bp, synthetic construct
  misc_feature 1..18: note = Probe
  source 1..18: mol_type = other DNA
gagatgttacctagcgtt

SEQ ID NO: 20203 - DNA, 19 bp, synthetic construct
  misc_feature 1..19: note = Probe
  source 1..19: mol_type = other DNA
gagatgttacctagcgttt

SEQ ID NO: 20204 - DNA, 20 bp, synthetic construct
  misc_feature 1..20: note = Probe
  source 1..20: mol_type = other DNA
gagatgttacctagcgtttt

SEQ ID NO: 20205 - DNA, 21 bp, synthetic construct
  misc_feature 1..21: note = Probe
  source 1..21: mol_type = other DNA
gagatttcaacttaacttgac

SEQ ID NO: 20206 - DNA, 22 bp, synthetic construct
  misc_feature 1..22: note = Probe
  source 1..22: mol_type = other DNA
gagatttcaacttaacttgacc

SEQ ID NO: 20207 - DNA, 23 bp, synthetic construct
  misc_feature 1..23: note = Probe
  source 1..23: mol_type = other DNA
gagatttcaacttaacttgaccg

SEQ ID NO: 20208 - DNA, 24 bp, synthetic construct
  misc_feature 1..24: note = Probe
  source 1..24: mol_type = other DNA
gagatttcaacttaacttgaccgc

SEQ ID NO: 20209 - DNA, 25 bp, synthetic construct
  misc_feature 1..25: note = Probe
  source 1..25: mol_type = other DNA
gagatttcaacttaacttgaccgct

SEQ ID NO: 20210 - DNA, 26 bp, synthetic construct
  misc_feature 1..26: note = Probe
  source 1..26: mol_type = other DNA
gagatttcaacttaacttgaccgctc

SEQ ID NO: 20211 - DNA, 27 bp, synthetic construct
  misc_feature 1..27: note = Probe
  source 1..27: mol_type = other DNA
gagatttcaacttaacttgaccgctct

SEQ ID NO: 20212 - DNA, 28 bp, synthetic construct
  misc_feature 1..28: note = Probe
  source 1..28: mol_type = other DNA
gagatttcaacttaacttgaccgctctg

SEQ ID NO: 20213 - DNA, 29 bp, synthetic construct
  misc_feature 1..29: note = Probe
  source 1..29: mol_type = other DNA
gagatttcaacttaacttgaccgctctga

SEQ ID NO: 20214 - DNA, 30 bp, synthetic construct; identical to SEQ ID NO: 5641
  misc_feature 1..30: note = Probe
  source 1..30: mol_type = other DNA

SEQ ID NO: 20215 - DNA, 31 bp, synthetic construct; identical to SEQ ID NO: 5642
  misc_feature 1..31: note = Probe
  source 1..31: mol_type = other DNA

SEQ ID NO: 20216 - DNA, 32 bp, synthetic construct; identical to SEQ ID NO: 5643
  misc_feature 1..32: note = Probe
  source 1..32: mol_type = other DNA

SEQ ID NO: 20217 - DNA, 22 bp, synthetic construct
  misc_feature 1..22: note = Probe
  source 1..22: mol_type = other DNA
gagcacaatgtagcataagcgc

SEQ ID NO: 20218 - DNA, 25 bp, synthetic construct
  misc_feature 1..25: note = Probe
  source 1..25: mol_type = other DNA
gagcagcctcgttagcgcagtaggc

SEQ ID NO: 20219 - DNA, 29 bp, synthetic construct
  misc_feature 1..29: note = Probe
  source 1..29: mol_type = other DNA
gagcagcctcgttagcgcagtaggcagcg

SEQ ID NO: 20220 - DNA, 30 bp, synthetic construct
  misc_feature 1..30: note = Probe
  source 1..30: mol_type = other DNA
gagcagcctcgttagcgcagtaggcagcgc

SEQ ID NO: 20221 - DNA, 31 bp, synthetic construct; identical to SEQ ID NO: 5644
  misc_feature 1..31: note = Probe
  source 1..31: mol_type = other DNA

SEQ ID NO: 20222 - DNA, 32 bp, synthetic construct
  misc_feature 1..32: note = Probe
  source 1..32: mol_type = other DNA
gagcagcctcgttagcgcagtaggcagcgcgt

SEQ ID NO: 20223 - DNA, 33 bp, synthetic construct
  misc_feature 1..33: note = Probe
  source 1..33: mol_type = other DNA
gagcagcctcgttagcgcagtaggcagcgcgtc

SEQ ID NO: 20224 - DNA, 34 bp, synthetic construct
  misc_feature 1..34: note = Probe
  source 1..34: mol_type = other DNA
gagcagcctcgttagcgcagtaggcagcgcgtca

SEQ ID NO: 20225 - DNA, 35 bp, synthetic construct
  misc_feature 1..35: note = Probe
  source 1..35: mol_type = other DNA
gagcagcctcgttagcgcagtaggcagcgcgtcag

SEQ ID NO: 20226 - DNA, 36 bp, synthetic construct
  misc_feature 1..36: note = Probe
  source 1..36: mol_type = other DNA
gagcagcctcgttagcgcagtaggcagcgcgtcagt

SEQ ID NO: 20227 - DNA, 37 bp, synthetic construct; identical to SEQ ID NO: 5645
  misc_feature 1..37: note = Probe
  source 1..37: mol_type = other DNA

SEQ ID NO: 20228 - DNA, 38 bp, synthetic construct
  misc_feature 1..38: note = Probe
  source 1..38: mol_type = other DNA
gagcagcctcgttagcgcagtaggcagcgcgtcagtct

SEQ ID NO: 20229 - DNA, 40 bp, synthetic construct; identical to SEQ ID NO: 5646
  misc_feature 1..40: note = Probe
  source 1..40: mol_type = other DNA

SEQ ID NO: 20230 - DNA, 41 bp, synthetic construct; identical to SEQ ID NO: 5647
  misc_feature 1..41: note = Probe
  source 1..41: mol_type = other DNA

SEQ ID NO: 20231 - DNA, 42 bp, synthetic construct
  misc_feature 1..42: note = Probe
  source 1..42: mol_type = other DNA
gagcagcctcgttagcgcagtaggcagcgcgtcagtctcata

SEQ ID NO: 20232 - DNA, 50 bp, synthetic construct
  misc_feature 1..50: note = Probe
  source 1..50: mol_type = other DNA
gagcagcctcgttagcgcagtaggcagcgcgtcagtctcataatctgaag

SEQ ID NO: 20233 - DNA, 34 bp, synthetic construct
  misc_feature 1..34: note = Probe
  source 1..34: mol_type = other DNA
gagcatagctgccttccaagcagttgacccgggt

SEQ ID NO: 20234 - DNA, 16 bp, synthetic construct
  misc_feature 1..16: note = Probe
  source 1..16: mol_type = other DNA
gagcatcagactttta

SEQ ID NO: 20235 - DNA, 28 bp, synthetic construct
  misc_feature 1..28: note = Probe
  source 1..28: mol_type = other DNA
gagcatgagactcttaatctcagggtcg

SEQ ID NO: 20236 - DNA, 33 bp, synthetic construct
  misc_feature 1..33: note = Probe
  source 1..33: mol_type = other DNA
gagcatgagactcttaatctcagggtcgtgggt

SEQ ID NO: 20237 - DNA, 28 bp, synthetic construct
  misc_feature 1..28: note = Probe
  source 1..28: mol_type = other DNA
gagcatgggactcttaatcccagggtcg

SEQ ID NO: 20238 - DNA, 29 bp, synthetic construct
  misc_feature 1..29: note = Probe
  source 1..29: mol_type = other DNA
gagcatgggactcttaatcccagggtcgt

SEQ ID NO: 20239 - DNA, 33 bp, synthetic construct
  misc_feature 1..33: note = Probe
  source 1..33: mol_type = other DNA
gagcatgggactcttaatcccagggtcgtgggt

SEQ ID NO: 20240 - DNA, 28 bp, synthetic construct
  misc_feature 1..28: note = Probe
  source 1..28: mol_type = other DNA
gagcccacccagggacgcgctctccttt

SEQ ID NO: 20241 - DNA, 33 bp, synthetic construct
  misc_feature 1..33: note = Probe
  source 1..33: mol_type = other DNA
gagcccggatagctcagtcggtagagcatcaga

SEQ ID NO: 20242 - DNA, 34 bp, synthetic construct
  misc_feature 1..34: note = Probe
  source 1..34: mol_type = other DNA
gagcccggatagctcagtcggtagagcatcagac

SEQ ID NO: 20243 - DNA, 35 bp, synthetic construct
  misc_feature 1..35: note = Probe
  source 1..35: mol_type = other DNA
gagcccggatagctcagtcggtagagcatcagact

SEQ ID NO: 20244 - DNA, 36 bp, synthetic construct
  misc_feature 1..36: note = Probe
  source 1..36: mol_type = other DNA
gagcccggatagctcagtcggtagagcatcagactt

SEQ ID NO: 20245 - DNA, 37 bp, synthetic construct
  misc_feature 1..37: note = Probe
  source 1..37: mol_type = other DNA
gagcccggatagctcagtcggtagagcatcagacttt

SEQ ID NO: 20246 - DNA, 38 bp, synthetic construct
  misc_feature 1..38: note = Probe
  source 1..38: mol_type = other DNA
gagcccggatagctcagtcggtagagcatcagactttt

SEQ ID NO: 20247 - DNA, 39 bp, synthetic construct
  misc_feature 1..39: note = Probe
  source 1..39: mol_type = other DNA
gagcccggatagctcagtcggtagagcatcagactttta

SEQ ID NO: 20248 - DNA, 41 bp, synthetic construct
  misc_feature 1..41: note = Probe
  source 1..41: mol_type = other DNA
gagcccggatagctcagtcggtagagcatcagacttttaat

SEQ ID NO: 20249 - DNA, 20 bp, synthetic construct
  misc_feature 1..20: note = Probe
  source 1..20: mol_type = other DNA
gagcccggtaatcgcataaa

SEQ ID NO: 20250 - DNA, 23 bp, synthetic construct
  misc_feature 1..23: note = Probe
  source 1..23: mol_type = other DNA
gagcccggtaatcgcataaaact

SEQ ID NO: 20251 - DNA, 24 bp, synthetic construct
  misc_feature 1..24: note = Probe
  source 1..24: mol_type = other DNA
gagcccggtaatcgcataaaactt

SEQ ID NO: 20252 - DNA, 26 bp, synthetic construct
  misc_feature 1..26: note = Probe
  source 1..26: mol_type = other DNA
gagcccggtaatcgcataaaacttaa

SEQ ID NO: 20253 - DNA, 27 bp, synthetic construct
  misc_feature 1..27: note = Probe
  source 1..27: mol_type = other DNA
gagcccggtaatcgcataaaacttaaa

SEQ ID NO: 20254 - DNA, 28 bp, synthetic construct
  misc_feature 1..28: note = Probe
  source 1..28: mol_type = other DNA
gagcccggtaatcgcataaaacttaaaa

SEQ ID NO: 20255 - DNA, 29 bp, synthetic construct
  misc_feature 1..29: note = Probe
  source 1..29: mol_type = other DNA
gagcccggtaatcgcataaaacttaaaac

SEQ ID NO: 20256 - DNA, 31 bp, synthetic construct; identical to SEQ ID NO: 961
  misc_feature 1..31: note = Probe
  source 1..31: mol_type = other DNA

SEQ ID NO: 20257 - DNA, 32 bp, synthetic construct; identical to SEQ ID NO: 5657
  misc_feature 1..32: note = Probe
  source 1..32: mol_type = other DNA

SEQ ID NO: 20258 - DNA, 41 bp, synthetic construct
  misc_feature 1..41: note = Probe
  source 1..41: mol_type = other DNA
gagcccggtaatcgcataaaacttaaaactttacagtcaga

SEQ ID NO: 20259 - DNA, 43 bp, synthetic construct
  misc_feature 1..43: note = Probe
  source 1..43: mol_type = other DNA
gagcccggtaatcgcataaaacttaaaactttacagtcagagg

SEQ ID NO: 20260 - DNA, 44 bp, synthetic construct; identical to SEQ ID NO: 5660
  misc_feature 1..44: note = Probe
  source 1..44: mol_type = other DNA

SEQ ID NO: 20261 - DNA, 46 bp, synthetic construct; identical to SEQ ID NO: 5661
  misc_feature 1..46: note = Probe
  source 1..46: mol_type = other DNA

SEQ ID NO: 20262 - DNA, 49 bp, synthetic construct; identical to SEQ ID NO: 5662
  misc_feature 1..49: note = Probe
  source 1..49: mol_type = other DNA

SEQ ID NO: 20263 - DNA, 50 bp, synthetic construct; identical to SEQ ID NO: 965
  misc_feature 1..50: note = Probe
  source 1..50: mol_type = other DNA

SEQ ID NO: 20264 - DNA, 28 bp, synthetic construct
  misc_feature 1..28: note = Probe
  source 1..28: mol_type = other DNA
gagcctcacacggggcagtctaacgttt

SEQ ID NO: 20265 - DNA, 25 bp, synthetic construct
  misc_feature 1..25: note = Probe
  source 1..25: mol_type = other DNA
gagcctcacctggagcaagaccctt

SEQ ID NO: 20266 - DNA, 26 bp, synthetic construct
  misc_feature 1..26: note = Probe
  source 1..26: mol_type = other DNA
gagcctcacctggagcaagacccttt

SEQ ID NO: 20267 - DNA, 27 bp, synthetic construct
  misc_feature 1..27: note = Probe
  source 1..27: mol_type = other DNA
gagcctcacctggagcaagaccctttt

SEQ ID NO: 20268 - DNA, 39 bp, synthetic construct
  misc_feature 1..39: note = Probe
  source 1..39: mol_type = other DNA
gagcctggatagctcagtcggtagagcatcagactttta

SEQ ID NO: 20269 - DNA, 29 bp, synthetic construct
  misc_feature 1..29: note = Probe
  source 1..29: mol_type = other DNA
gagcgacggctcgttggtctaggggtatg

SEQ ID NO: 20270 - DNA, 30 bp, synthetic construct
  misc_feature 1..30: note = Probe
  source 1..30: mol_type = other DNA
gagcgacggctcgttggtctaggggtatga

SEQ ID NO: 20271 - DNA, 31 bp, synthetic construct
  misc_feature 1..31: note = Probe
  source 1..31: mol_type = other DNA
gagcgacggctcgttggtctaggggtatgat

SEQ ID NO: 20272 - DNA, 32 bp, synthetic construct
  misc_feature 1..32: note = Probe
  source 1..32: mol_type = other DNA
gagcgacggctcgttggtctaggggtatgatt

SEQ ID NO: 20273 - DNA, 33 bp, synthetic construct
  misc_feature 1..33: note = Probe
  source 1..33: mol_type = other DNA
gagcgacggctcgttggtctaggggtatgattc

SEQ ID NO: 20274 - DNA, 36 bp, synthetic construct
  misc_feature 1..36: note = Probe
  source 1..36: mol_type = other DNA
gagcgacggctcgttggtctaggggtatgattctcg

SEQ ID NO: 20275 - DNA, 39 bp, synthetic construct
  misc_feature 1..39: note = Probe
  source 1..39: mol_type = other DNA
gagcgcccggatagctcagtcggtagagcatcagacttt

SEQ ID NO: 20276 - DNA, 41 bp, synthetic construct
  misc_feature 1..41: note = Probe
  source 1..41: mol_type = other DNA
gagcgcccggatagctcagtcggtagagcatcagactttta

SEQ ID NO: 20277 - DNA, 28 bp, synthetic construct
  misc_feature 1..28: note = Probe
  source 1..28: mol_type = other DNA
gagctagctcagtcggtagagcatggga

SEQ ID NO: 20278 - DNA, 29 bp, synthetic construct
  misc_feature 1..29: note = Probe
  source 1..29: mol_type = other DNA
gagctagctcagtcggtagagcatgggac

SEQ ID NO: 20279 - DNA, 30 bp, synthetic construct
  misc_feature 1..30: note = Probe
  source 1..30: mol_type = other DNA
gagctagctcagtcggtagagcatgggact

SEQ ID NO: 20280 - DNA, 31 bp, synthetic construct
  misc_feature 1..31: note = Probe
  source 1..31: mol_type = other DNA
gagctagctcagtcggtagagcatgggactc

SEQ ID NO: 20281 - DNA, 16 bp, synthetic construct
  misc_feature 1..16: note = Probe
  source 1..16: mol_type = other DNA
gagctcaattactttt

SEQ ID NO: 20282 - DNA, 16 bp, synthetic construct
  misc_feature 1..16: note = Probe
  source 1..16: mol_type = other DNA
gagctggtcgcgggaa

SEQ ID NO: 20283 - DNA, 16 bp, synthetic construct
  misc_feature 1..16: note = Probe
  source 1..16: mol_type = other DNA
gagcttaaaccccctt

SEQ ID NO: 20284 - DNA, 24 bp, synthetic construct
  misc_feature 1..24: note = Probe
  source 1..24: mol_type = other DNA
gagcttaaacccccttatttctag

SEQ ID NO: 20285 - DNA, 25 bp, synthetic construct
  misc_feature 1..25: note = Probe
  source 1..25: mol_type = other DNA
gagcttaaacccccttatttctagg

SEQ ID NO: 20286 - DNA, 26 bp, synthetic construct
  misc_feature 1..26: note = Probe
  source 1..26: mol_type = other DNA
gagcttaaacccccttatttctagga

SEQ ID NO: 20287 - DNA, 22 bp, synthetic construct
  misc_feature 1..22: note = Probe
  source 1..22: mol_type = other DNA
gaggagaccttgctcagcagat

SEQ ID NO: 20288 - DNA, 23 bp, synthetic construct
  misc_feature 1..23: note = Probe
  source 1..23: mol_type = other DNA
gaggagaccttgctcagcagatg

SEQ ID NO: 20289 - DNA, 30 bp, synthetic construct
  misc_feature 1..30: note = Probe
  source 1..30: mol_type = other DNA
gaggcattggtggttcagtggtagaattct

SEQ ID NO: 20290 - DNA, 32 bp, synthetic construct
  misc_feature 1..32: note = Probe
  source 1..32: mol_type = other DNA
gaggcattggtggttcagtggtagaattctcg

SEQ ID NO: 20291 - DNA, 25 bp, synthetic construct
  misc_feature 1..25: note = Probe
  source 1..25: mol_type = other DNA
gaggccccgggttcaatccccggca

SEQ ID NO: 20292 - DNA, 38 bp, synthetic construct
  misc_feature 1..38: note = Probe
  source 1..38: mol_type = other DNA
gaggccccgggttcaatccccggcatctccagactttt

SEQ ID NO: 20293 - DNA, 25 bp, synthetic construct
  misc_feature 1..25: note = Probe
  source 1..25: mol_type = other DNA
gaggccccgggttcgatccccggca

SEQ ID NO: 20294 - DNA, 28 bp, synthetic construct
  misc_feature 1..28: note = Probe
  source 1..28: mol_type = other DNA
gaggccccgggttcgatccccggcatct

SEQ ID NO: 20295 - DNA, 34 bp, synthetic construct
  misc_feature 1..34: note = Probe
  source 1..34: mol_type = other DNA
gaggccccgggttcgatccccggcatctccattg

SEQ ID NO: 20296 - DNA, 27 bp, synthetic construct
  misc_feature 1..27: note = Probe
  source 1..27: mol_type = other DNA
gaggcgtgggttcgaatcccacttctg

SEQ ID NO: 20297 - DNA, 28 bp, synthetic construct
  misc_feature 1..28: note = Probe
  source 1..28: mol_type = other DNA
gaggcgtgggttcgaatcccacttctga

SEQ ID NO: 20298 - DNA, 30 bp, synthetic construct
  misc_feature 1..30: note = Probe
  source 1..30: mol_type = other DNA
gaggcgtgggttcgaatcccacttctgaca

SEQ ID NO: 20299 - DNA, 31 bp, synthetic construct; identical to SEQ ID NO: 5666
  misc_feature 1..31: note = Probe
  source 1..31: mol_type = other DNA

SEQ ID NO: 20300 - DNA, 32 bp, synthetic construct
  misc_feature 1..32: note = Probe
  source 1..32: mol_type = other DNA
gaggcgtgggttcgaatcccacttctgacaca

SEQ ID NO: 20301 - DNA, 17 bp, synthetic construct
  misc_feature 1..17: note = Probe
  source 1..17: mol_type = other DNA
gaggcttacgacccctt

SEQ ID NO: 20302 - DNA, 18 bp, synthetic construct
  misc_feature 1..18: note = Probe
  source 1..18: mol_type = other DNA
gaggcttacgacccctta

SEQ ID NO: 20303 - DNA, 21 bp, synthetic construct
  misc_feature 1..21: note = Probe
  source 1..21: mol_type = other DNA
gaggcttacgaccccttattt

SEQ ID NO: 20304 - DNA, 22 bp, synthetic construct
  misc_feature 1..22: note = Probe
  source 1..22: mol_type = other DNA
gaggcttacgaccccttattta

SEQ ID NO: 20305 - DNA, 23 bp, synthetic construct
  misc_feature 1..23: note = Probe
  source 1..23: mol_type = other DNA
gaggcttacgaccccttatttac

SEQ ID NO: 20306 - DNA, 25 bp, synthetic construct
  misc_feature 1..25: note = Probe
  source 1..25: mol_type = other DNA
gaggcttacgaccccttatttaccg

SEQ ID NO: 20307 - DNA, 26 bp, synthetic construct
  misc_feature 1..26: note = Probe
  source 1..26: mol_type = other DNA
gaggcttacgaccccttatttaccga

SEQ ID NO: 20308 - DNA, 27 bp, synthetic construct
  misc_feature 1..27: note = Probe
  source 1..27: mol_type = other DNA
gaggcttacgaccccttatttaccgag

SEQ ID NO: 20309 - DNA, 32 bp, synthetic construct
  misc_feature 1..32: note = Probe
  source 1..32: mol_type = other DNA
gagggtccagggttcaagtccctgttcgggcg

SEQ ID NO: 20310 - DNA, 35 bp, synthetic construct
  misc_feature 1..35: note = Probe
  source 1..35: mol_type = other DNA
gagggtccagggttcaagtccctgttcgggcggca

SEQ ID NO: 20311 - DNA, 42 bp, synthetic construct
  misc_feature 1..42: note = Probe
  source 1..42: mol_type = other DNA
gagggtccagggttcaagtccctgttcgggcggcatgtcttt

SEQ ID NO: 20312 - DNA, 40 bp, synthetic construct
  misc_feature 1..40: note = Probe
  source 1..40: mol_type = other DNA
gagggtccagggttcaagtccctgttcgggcggtatcttt

SEQ ID NO: 20313 - DNA, 41 bp, synthetic construct
  misc_feature 1..41: note = Probe
  source 1..41: mol_type = other DNA
gagggtccagggttcaagtccctgttcgggcggtatctttt

SEQ ID NO: 20314 - DNA, 28 bp, synthetic construct
  misc_feature 1..28: note = Probe
  source 1..28: mol_type = other DNA
gagggttctcaccttctctctccgattt

SEQ ID NO: 20315 - DNA, 29 bp, synthetic construct
  misc_feature 1..29: note = Probe
  source 1..29: mol_type = other DNA
gagggttctcaccttctctctccgatttt

SEQ ID NO: 20316 - DNA, 26 bp, synthetic construct
  misc_feature 1..26: note = Probe
  source 1..26: mol_type = other DNA
gaggtagcgggatcgatgcccgcatc

SEQ ID NO: 20317 - DNA, 23 bp, synthetic construct
  misc_feature 1..23: note = Probe
  source 1..23: mol_type = other DNA
gaggtagggctttggctgtgggg

SEQ ID NO: 20318 - DNA, 34 bp, synthetic construct
  misc_feature 1..34: note = Probe
  source 1..34: mol_type = other DNA
gaggtcccgggttcaaatcccggacgagccccct

SEQ ID NO: 20319 - DNA, 25 bp, synthetic construct
  misc_feature 1..25: note = Probe
  source 1..25: mol_type = other DNA
gaggtcccgggttcgatccccagca

SEQ ID NO: 20320 - DNA, 29 bp, synthetic construct
  misc_feature 1..29: note = Probe
  source 1..29: mol_type = other DNA
gaggtcgatggatcgaaaccatcctctgc

SEQ ID NO: 20321 - DNA, 30 bp, synthetic construct
  misc_feature 1..30: note = Probe
  source 1..30: mol_type = other DNA
gaggtcgatggatcgaaaccatcctctgct

SEQ ID NO: 20322 - DNA, 31 bp, synthetic construct
  misc_feature 1..31: note = Probe
  source 1..31: mol_type = other DNA
gaggtcgatggatcgaaaccatcctctgcta

SEQ ID NO: 20323 - DNA, 31 bp, synthetic construct; identical to SEQ ID NO: 5673
  misc_feature 1..31: note = Probe
  source 1..31: mol_type = other DNA

SEQ ID NO: 20324 - DNA, 34 bp, synthetic construct; identical to SEQ ID NO: 5674
  misc_feature 1..34: note = Probe
  source 1..34: mol_type = other DNA

SEQ ID NO: 20325 - DNA, 20 bp, synthetic construct
  misc_feature 1..20: note = Probe
  source 1..20: mol_type = other DNA
gagtaaataataggagctta

SEQ ID NO: 20326 - DNA, 21 bp, synthetic construct
  misc_feature 1..21: note = Probe
  source 1..21: mol_type = other DNA
gagtaaataataggagcttaa

SEQ ID NO: 20327 - DNA, 26 bp, synthetic construct
  misc_feature 1..26: note = Probe
  source 1..26: mol_type = other DNA
gagtaaataataggagcttaaacccc

SEQ ID NO: 20328 - DNA, 27 bp, synthetic construct
  misc_feature 1..27: note = Probe
  source 1..27: mol_type = other DNA
gagtaaataataggagcttaaaccccc

SEQ ID NO: 20329 - DNA, 28 bp, synthetic construct
  misc_feature 1..28: note = Probe
  source 1..28: mol_type = other DNA
gagtaaataataggagcttaaaccccct

SEQ ID NO: 20330 - DNA, 29 bp, synthetic construct
  misc_feature 1..29: note = Probe
  source 1..29: mol_type = other DNA
gagtaaataataggagcttaaaccccctt

SEQ ID NO: 20331 - DNA, 30 bp, synthetic construct; identical to SEQ ID NO: 969
  misc_feature 1..30: note = Probe
  source 1..30: mol_type = other DNA

SEQ ID NO: 20332 - DNA, 33 bp, synthetic construct
  misc_feature 1..33: note = Probe
  source 1..33: mol_type = other DNA
gagtaaataataggagcttaaacccccttattt

SEQ ID NO: 20333 - DNA, 34 bp, synthetic construct
  misc_feature 1..34: note = Probe
  source 1..34: mol_type = other DNA
gagtaaataataggagcttaaacccccttatttc

SEQ ID NO: 20334 - DNA, 37 bp, synthetic construct; identical to SEQ ID NO: 5680
  misc_feature 1..37: note = Probe
  source 1..37: mol_type = other DNA

SEQ ID NO: 20335 - DNA, 38 bp, synthetic construct; identical to SEQ ID NO: 5681
  misc_feature 1..38: note = Probe
  source 1..38: mol_type = other DNA

SEQ ID NO: 20336 - DNA, 39 bp, synthetic construct; identical to SEQ ID NO: 5682
  misc_feature 1..39: note = Probe
  source 1..39: mol_type = other DNA

SEQ ID NO: 20337 - DNA, 40 bp, synthetic construct; identical to SEQ ID NO: 5683
  misc_feature 1..40: note = Probe
  source 1..40: mol_type = other DNA

SEQ ID NO: 20338 - DNA, 16 bp, synthetic construct
  misc_feature 1..16: note = Probe
  source 1..16: mol_type = other DNA
gagtatccccgcctgt

SEQ ID NO: 20339 - DNA, 30 bp, synthetic construct
  misc_feature 1..30: note = Probe
  source 1..30: mol_type = other DNA
gagtatccccgcctgtcacgcgggagaccg

SEQ ID NO: 20340 - DNA, 50 bp, synthetic construct; identical to SEQ ID NO: 5686
  misc_feature 1..50: note = Probe
  source 1..50: mol_type = other DNA

SEQ ID NO: 20341 - DNA, 16 bp, synthetic construct
  misc_feature 1..16: note = Probe
  source 1..16: mol_type = other DNA
gagtgaagcattggac

SEQ ID NO: 20342 - DNA, 17 bp, synthetic construct
  misc_feature 1..17: note = Probe
  source 1..17: mol_type = other DNA
gagtgaagcattggact

SEQ ID NO: 20343 - DNA, 19 bp, synthetic construct
  misc_feature 1..19: note = Probe
  source 1..19: mol_type = other DNA
gagtgaagcattggactgt

SEQ ID NO: 20344 - DNA, 20 bp, synthetic construct
  misc_feature 1..20: note = Probe
  source 1..20: mol_type = other DNA
gagtgaagcattggactgta

SEQ ID NO: 20345 - DNA, 21 bp, synthetic construct
  misc_feature 1..21: note = Probe
  source 1..21: mol_type = other DNA
gagtgaagcattggactgtaa

SEQ ID NO: 20346 - DNA, 28 bp, synthetic construct
  misc_feature 1..28: note = Probe
  source 1..28: mol_type = other DNA
gagtggcgcagcggaagcgtgctgggcc

SEQ ID NO: 20347 - DNA, 29 bp, synthetic construct
  misc_feature 1..29: note = Probe
  source 1..29: mol_type = other DNA
gagtggcgcagcggaagcgtgctgggccc

SEQ ID NO: 20348 - DNA, 30 bp, synthetic construct
  misc_feature 1..30: note = Probe
  source 1..30: mol_type = other DNA
gagtggcgcagcggaagcgtgctgggccca

SEQ ID NO: 20349 - DNA, 31 bp, synthetic construct
  misc_feature 1..31: note = Probe
  source 1..31: mol_type = other DNA
gagtggcgcagcggaagcgtgctgggcccat

SEQ ID NO: 20350 - DNA, 23 bp, synthetic construct
  misc_feature 1..23: note = Probe
  source 1..23: mol_type = other DNA
gagtggggttttgcagtccttag

SEQ ID NO: 20351 - DNA, 24 bp, synthetic construct
  misc_feature 1..24: note = Probe
  source 1..24: mol_type = other DNA
gagtggggttttgcagtccttagc

SEQ ID NO: 20352 - DNA, 25 bp, synthetic construct
  misc_feature 1..25: note = Probe
  source 1..25: mol_type = other DNA
gagtggggttttgcagtccttagct

SEQ ID NO: 20353 - DNA, 24 bp, synthetic construct
  misc_feature 1..24: note = Probe
  source 1..24: mol_type = other DNA
gagtgtagcttaacacaaagcacc

SEQ ID NO: 20354 - DNA, 25 bp, synthetic construct
  misc_feature 1..25: note = Probe
  source 1..25: mol_type = other DNA
gagtgtagcttaacacaaagcaccc

SEQ ID NO: 20355 - DNA, 26 bp, synthetic construct
  misc_feature 1..26: note = Probe
  source 1..26: mol_type = other DNA
gagtgtagcttaacacaaagcaccca

SEQ ID NO: 20356 - DNA, 27 bp, synthetic construct
  misc_feature 1..27: note = Probe
  source 1..27: mol_type = other DNA
gagtgtagcttaacacaaagcacccaa

SEQ ID NO: 20357 - DNA, 28 bp, synthetic construct
  misc_feature 1..28: note = Probe
  source 1..28: mol_type = other DNA
gagtgtagcttaacacaaagcacccaac

SEQ ID NO: 20358 - DNA, 29 bp, synthetic construct
  misc_feature 1..29: note = Probe
  source 1..29: mol_type = other DNA
gagtgtagcttaacacaaagcacccaact

SEQ ID NO: 20359 - DNA, 30 bp, synthetic construct; identical to SEQ ID NO: 5697
  misc_feature 1..30: note = Probe
  source 1..30: mol_type = other DNA

SEQ ID NO: 20360 - DNA, 31 bp, synthetic construct; identical to SEQ ID NO: 5698
  misc_feature 1..31: note = Probe
  source 1..31: mol_type = other DNA

SEQ ID NO: 20361 - DNA, 16 bp, synthetic construct
  misc_feature 1..16: note = Probe
  source 1..16: mol_type = other DNA
gagtgtcaggatggcc

SEQ ID NO: 20362 - DNA, 19 bp, synthetic construct
  misc_feature 1..19: note = Probe
  source 1..19: mol_type = other DNA
gagtgtcaggatggccgag

SEQ ID NO: 20363 - DNA, 20 bp, synthetic construct
  misc_feature 1..20: note = Probe
  source 1..20: mol_type = other DNA
gagtgtcaggatggccgagt

SEQ ID NO: 20364 - DNA, 24 bp, synthetic construct
  misc_feature 1..24: note = Probe
  source 1..24: mol_type = other DNA
gagtgtcaggatggccgagtggtc

SEQ ID NO: 20365 - DNA, 25 bp, synthetic construct
  misc_feature 1..25: note = Probe
  source 1..25: mol_type = other DNA
gagtgtcaggatggccgagtggtct

SEQ ID NO: 20366 - DNA, 33 bp, synthetic construct
  misc_feature 1..33: note = Probe
  source 1..33: mol_type = other DNA
gagtgtcaggatggccgagtggtctaaggcgcc

SEQ ID NO: 20367 - DNA, 34 bp, synthetic construct
  misc_feature 1..34: note = Probe
  source 1..34: mol_type = other DNA
gagtgtcaggatggccgagtggtctaaggcgcca

SEQ ID NO: 20368 - DNA, 36 bp, synthetic construct
  misc_feature 1..36: note = Probe
  source 1..36: mol_type = other DNA
gagtgtcaggatggccgagtggtctaaggcgccaga

SEQ ID NO: 20369 - DNA, 38 bp, synthetic construct
  misc_feature 1..38: note = Probe
  source 1..38: mol_type = other DNA
gagtgtcaggatggccgagtggtctaaggcgccagact

SEQ ID NO: 20370 - DNA, 39 bp, synthetic construct
  misc_feature 1..39: note = Probe
  source 1..39: mol_type = other DNA
gagtgtcaggatggccgagtggtctaaggcgccagactc

SEQ ID NO: 20371 - DNA, 50 bp, synthetic construct
  misc_feature 1..50: note = Probe
  source 1..50: mol_type = other DNA
gagtgtcaggatggccgagtggtctaaggcgccagactcaaggtaagcac

SEQ ID NO: 20372 - DNA, 24 bp, synthetic construct
  misc_feature 1..24: note = Probe
  source 1..24: mol_type = other DNA
gagttaaagactttttctctgatt

SEQ ID NO: 20373 - DNA, 25 bp, synthetic construct
  misc_feature 1..25: note = Probe
  source 1..25: mol_type = other DNA
gagttaaagactttttctctgattt

SEQ ID NO: 20374 - DNA, 23 bp, synthetic construct
  misc_feature 1..23: note = Probe
  source 1..23: mol_type = other DNA
gagttagcggggagtgatatatt

SEQ ID NO: 20375 - DNA, 24 bp, synthetic construct
  misc_feature 1..24: note = Probe
  source 1..24: mol_type = other DNA
gagttagcggggagtgatatatta

SEQ ID NO: 20376 - DNA, 26 bp, synthetic construct
  misc_feature 1..26: note = Probe
  source 1..26: mol_type = other DNA
gagttagcggggagtgatatattatt

SEQ ID NO: 20377 - DNA, 27 bp, synthetic construct
  misc_feature 1..27: note = Probe
  source 1..27: mol_type = other DNA
gagttagcggggagtgatatattattg

SEQ ID NO: 20378 - DNA, 50 bp, synthetic construct; identical to SEQ ID NO: 973
  misc_feature 1..50: note = Probe
  source 1..50: mol_type = other DNA

SEQ ID NO: 20379 - DNA, 20 bp, synthetic construct
  misc_feature 1..20: note = Probe
  source 1..20: mol_type = other DNA
gataacagctatccattggt

SEQ ID NO: 20380 - DNA, 21 bp, synthetic construct
  misc_feature 1..21: note = Probe
  source 1..21: mol_type = other DNA
gataacagctatccattggtc

SEQ ID NO: 20381 - DNA, 22 bp, synthetic construct
  misc_feature 1..22: note = Probe
  source 1..22: mol_type = other DNA
gataacagctatccattggtct

SEQ ID NO: 20382 - DNA, 31 bp, synthetic construct
  misc_feature 1..31: note = Probe
  source 1..31: mol_type = other DNA
gataacagctatccattggtcttaggcccca

SEQ ID NO: 20383 - DNA, 16 bp, synthetic construct
  misc_feature 1..16: note = Probe
  source 1..16: mol_type = other DNA
gataatcatatttacc

SEQ ID NO: 20384 - DNA, 21 bp, synthetic construct
  misc_feature 1..21: note = Probe
  source 1..21: mol_type = other DNA
gataatcatatttaccaaatg

SEQ ID NO: 20385 - DNA, 15 bp, synthetic construct
  misc_feature 1..15: note = Probe
  source 1..15: mol_type = other DNA
gatagactaagcaaa

SEQ ID NO: 20386 - DNA, 21 bp, synthetic construct
  misc_feature 1..21: note = Probe
  source 1..21: mol_type = other DNA
gatagagtaaataataggagc

SEQ ID NO: 20387 - DNA, 28 bp, synthetic construct
  misc_feature 1..28: note = Probe
  source 1..28: mol_type = other DNA
gatagagtaaataataggagcttaaacc

SEQ ID NO: 20388 - DNA, 34 bp, synthetic construct; identical to SEQ ID NO: 975
  misc_feature 1..34: note = Probe
  source 1..34: mol_type = other DNA

SEQ ID NO: 20389 - DNA, 38 bp, synthetic construct
  misc_feature 1..38: note = Probe
  source 1..38: mol_type = other DNA
gatagagtaaataataggagcttaaacccccttatttc

SEQ ID NO: 20390 - DNA, 39 bp, synthetic construct; identical to SEQ ID NO: 5710
  misc_feature 1..39: note = Probe
  source 1..39: mol_type = other DNA

SEQ ID NO: 20391 - DNA, 40 bp, synthetic construct; identical to SEQ ID NO: 976
  misc_feature 1..40: note = Probe
  source 1..40: mol_type = other DNA

SEQ ID NO: 20392 - DNA, 41 bp, synthetic construct; identical to SEQ ID NO: 5711
  misc_feature 1..41: note = Probe
  source 1..41: mol_type = other DNA

SEQ ID NO: 20393 - DNA, 42 bp, synthetic construct; identical to SEQ ID NO: 5712
  misc_feature 1..42: note = Probe
  source 1..42: mol_type = other DNA

SEQ ID NO: 20394 - DNA, 43 bp, synthetic construct; identical to SEQ ID NO: 5713
  misc_feature 1..43: note = Probe
  source 1..43: mol_type = other DNA

SEQ ID NO: 20395 - DNA, 28 bp, synthetic construct
  misc_feature 1..28: note = Probe
  source 1..28: mol_type = other DNA
gatagctcagtcggtagagcatcagact

SEQ ID NO: 20396 - DNA, 30 bp, synthetic construct
  misc_feature 1..30: note = Probe
  source 1..30: mol_type = other DNA
gatagctcagtcggtagagcatcagacttt

SEQ ID NO: 20397 - DNA, 31 bp, synthetic construct
  misc_feature 1..31: note = Probe
  source 1..31: mol_type = other DNA
gatagctcagtcggtagagcatcagactttt

SEQ ID NO: 20398 - DNA, 32 bp, synthetic construct
  misc_feature 1..32: note = Probe
  source 1..32: mol_type = other DNA
gatagctcagtcggtagagcatcagactttta

SEQ ID NO: 20399 - DNA, 26 bp, synthetic construct
  misc_feature 1..26: note = Probe
  source 1..26: mol_type = other DNA
gatagctcagttggtagagcggagga

SEQ ID NO: 20400 - DNA, 27 bp, synthetic construct
  misc_feature 1..27: note = Probe
  source 1..27: mol_type = other DNA
gatagctcagttggtagagcggaggac

SEQ ID NO: 20401 - DNA, 30 bp, synthetic construct
  misc_feature 1..30: note = Probe
  source 1..30: mol_type = other DNA
gatatccaaccttcagctatagggtggaga

SEQ ID NO: 20402 - DNA, 23 bp, synthetic construct
  misc_feature 1..23: note = Probe
  source 1..23: mol_type = other DNA
gatccccagcatctccagtgttt

SEQ ID NO: 20403 - DNA, 24 bp, synthetic construct
  misc_feature 1..24: note = Probe
  source 1..24: mol_type = other DNA
gatccccagcatctccagtgtttt

SEQ ID NO: 20404 - DNA, 20 bp, synthetic construct
  misc_feature 1..20: note = Probe
  source 1..20: mol_type = other DNA
gatccccggcatctccattg

SEQ ID NO: 20405 - DNA, 25 bp, synthetic construct
  misc_feature 1..25: note = Probe
  source 1..25: mol_type = other DNA
gatccgagttcaaatctcggtggaa

SEQ ID NO: 20406 - DNA, 32 bp, synthetic construct; identical to SEQ ID NO: 5721
  misc_feature 1..32: note = Probe
  source 1..32: mol_type = other DNA

SEQ ID NO: 20407 - DNA, 24 bp, synthetic construct
  misc_feature 1..24: note = Probe
  source 1..24: mol_type = other DNA
gatcgaaaccatcctctgctaggt

SEQ ID NO: 20408 - DNA, 26 bp, synthetic construct
  misc_feature 1..26: note = Probe
  source 1..26: mol_type = other DNA
gatcgggaggtagcgtggccgagtgg

SEQ ID NO: 20409 - DNA, 26 bp, synthetic construct
  misc_feature 1..26: note = Probe
  source 1..26: mol_type = other DNA
gatgaaaacctttttccaaggacaaa

SEQ ID NO: 20410 - DNA, 27 bp, synthetic construct
  misc_feature 1..27: note = Probe
  source 1..27: mol_type = other DNA
gatgaaaacctttttccaaggacaaat

SEQ ID NO: 20411 - DNA, 21 bp, synthetic construct
  misc_feature 1..21: note = Probe
  source 1..21: mol_type = other DNA
gatgcagagtggggttttgca

SEQ ID NO: 20412 - DNA, 23 bp, synthetic construct
  misc_feature 1..23: note = Probe
  source 1..23: mol_type = other DNA
gatgcagagtggggttttgcagt

SEQ ID NO: 20413 - DNA, 24 bp, synthetic construct
  misc_feature 1..24: note = Probe
  source 1..24: mol_type = other DNA
gatgcagagtggggttttgcagtc

SEQ ID NO: 20414 - DNA, 26 bp, synthetic construct
  misc_feature 1..26: note = Probe
  source 1..26: mol_type = other DNA
gatgcagagtggggttttgcagtcct

SEQ ID NO: 20415 - DNA, 27 bp, synthetic construct
  misc_feature 1..27: note = Probe
  source 1..27: mol_type = other DNA
gatgcagagtggggttttgcagtcctt

SEQ ID NO: 20416 - DNA, 28 bp, synthetic construct
  misc_feature 1..28: note = Probe
  source 1..28: mol_type = other DNA
gatgcagagtggggttttgcagtcctta

SEQ ID NO: 20417 - DNA, 29 bp, synthetic construct
  misc_feature 1..29: note = Probe
  source 1..29: mol_type = other DNA
gatgcagagtggggttttgcagtccttag

SEQ ID NO: 20418 - DNA, 30 bp, synthetic construct; identical to SEQ ID NO: 5730
  misc_feature 1..30: note = Probe
  source 1..30: mol_type = other DNA

SEQ ID NO: 20419 - DNA, 31 bp, synthetic construct; identical to SEQ ID NO: 5731
  misc_feature 1..31: note = Probe
  source 1..31: mol_type = other DNA

SEQ ID NO: 20420 - DNA, 17 bp, synthetic construct
  misc_feature 1..17: note = Probe
  source 1..17: mol_type = other DNA
gatggccgagcggtcta

SEQ ID NO: 20421 - DNA, 19 bp, synthetic construct
  misc_feature 1..19: note = Probe
  source 1..19: mol_type = other DNA
gatggccgagcggtctaag

SEQ ID NO: 20422 - DNA, 34 bp, synthetic construct
  misc_feature 1..34: note = Probe
  source 1..34: mol_type = other DNA
gatggcgtgggttcgaatcccaccgctgccacac

SEQ ID NO: 20423 - DNA, 26 bp, synthetic construct
  misc_feature 1..26: note = Probe
  source 1..26: mol_type = other DNA
gatggggtgtgataggtggcacggag

SEQ ID NO: 20424 - DNA, 33 bp, synthetic construct; identical to SEQ ID NO: 5734
  misc_feature 1..33: note = Probe
  source 1..33: mol_type = other DNA

SEQ ID NO: 20425 - DNA, 17 bp, synthetic construct
  misc_feature 1..17: note = Probe
  source 1..17: mol_type = other DNA
gattaagagaaccaaca

SEQ ID NO: 20426 - DNA, 19 bp, synthetic construct
  misc_feature 1..19: note = Probe
  source 1..19: mol_type = other DNA
gattaagagaaccaacacc

SEQ ID NO: 20427 - DNA, 29 bp, synthetic construct
  misc_feature 1..29: note = Probe
  source 1..29: mol_type = other DNA
gattaagagaaccaacacctctttacagt

SEQ ID NO: 20428 - DNA, 30 bp, synthetic construct; identical to SEQ ID NO: 10204
  misc_feature 1..30: note = Probe
  source 1..30: mol_type = other DNA

SEQ ID NO: 20429 - DNA, 31 bp, synthetic construct; identical to SEQ ID NO: 5736
  misc_feature 1..31: note = Probe
  source 1..31: mol_type = other DNA

SEQ ID NO: 20430 - DNA, 32 bp, synthetic construct; identical to SEQ ID NO: 5737
  misc_feature 1..32: note = Probe
  source 1..32: mol_type = other DNA

SEQ ID NO: 20431 - DNA, 33 bp, synthetic construct; identical to SEQ ID NO: 5738
  misc_feature 1..33: note = Probe
  source 1..33: mol_type = other DNA

SEQ ID NO: 20432 - DNA, 34 bp, synthetic construct; identical to SEQ ID NO: 5739
  misc_feature 1..34: note = Probe
  source 1..34: mol_type = other DNA

SEQ ID NO: 20433 - DNA, 50 bp, synthetic construct; identical to SEQ ID NO: 977
  misc_feature 1..50: note = Probe
  source 1..50: mol_type = other DNA

SEQ ID NO: 20434 - DNA, 46 bp, synthetic construct
  misc_feature 1..46: note = Probe
  source 1..46: mol_type = other DNA
gattcccattcttgcgacccgggttcgattcccgggcggcgcactt

SEQ ID NO: 20435 - DNA, 31 bp, synthetic construct
  misc_feature 1..31: note = Probe
  source 1..31: mol_type = other DNA
gattccccgacggggagagtactagcagttt

SEQ ID NO: 20436 - DNA, 20 bp, synthetic construct
  misc_feature 1..20: note = Probe
  source 1..20: mol_type = other DNA
gattccccgacggggaggca

SEQ ID NO: 20437 - DNA, 20 bp, synthetic construct
  misc_feature 1..20: note = Probe
  source 1..20: mol_type = other DNA
gattcccggccaacgcaagt

SEQ ID NO: 20438 - DNA, 20 bp, synthetic construct
  misc_feature 1..20: note = Probe
  source 1..20: mol_type = other DNA
gattcccggccaacgcagtg

SEQ ID NO: 20439 - DNA, 20 bp, synthetic construct
  misc_feature 1..20: note = Probe
  source 1..20: mol_type = other DNA
gattcccggcccatgcagca

SEQ ID NO: 20440 - DNA, 20 bp, synthetic construct
  misc_feature 1..20: note = Probe
  source 1..20: mol_type = other DNA
gattcccggtcagggaacaa

SEQ ID NO: 20441 - DNA, 19 bp, synthetic construct
  misc_feature 1..19: note = Probe
  source 1..19: mol_type = other DNA
gattctcatagtcctagaa

SEQ ID NO: 20442 - DNA, 28 bp, synthetic construct
  misc_feature 1..28: note = Probe
  source 1..28: mol_type = other DNA
gattctcgcttcgggtgcgagaggtccc

SEQ ID NO: 20443 - DNA, 29 bp, synthetic construct
  misc_feature 1..29: note = Probe
  source 1..29: mol_type = other DNA
gattgaaacttttcgaaagtacgattact

SEQ ID NO: 20444 - DNA, 27 bp, synthetic construct
  misc_feature 1..27: note = Probe
  source 1..27: mol_type = other DNA
gattgagggttcgagtcccttcgtggt

SEQ ID NO: 20445 - DNA, 23 bp, synthetic construct
  misc_feature 1..23: note = Probe
  source 1..23: mol_type = other DNA
gattgcaggttcgagtcctgccg

SEQ ID NO: 20446 - DNA, 16 bp, synthetic construct
  misc_feature 1..16: note = Probe
  source 1..16: mol_type = other DNA
gattgtgaatctgaca

SEQ ID NO: 20447 - DNA, 17 bp, synthetic construct
  misc_feature 1..17: note = Probe
  source 1..17: mol_type = other DNA
gattgtgaatctgacaa

SEQ ID NO: 20448 - DNA, 19 bp, synthetic construct
  misc_feature 1..19: note = Probe
  source 1..19: mol_type = other DNA
gattgtgaatctgacaaca

SEQ ID NO: 20449 - DNA, 20 bp, synthetic construct
  misc_feature 1..20: note = Probe
  source 1..20: mol_type = other DNA
gattgtgaatctgacaacag

SEQ ID NO: 20450 - DNA, 21 bp, synthetic construct
  misc_feature 1..21: note = Probe
  source 1..21: mol_type = other DNA
gattgtgaatctgacaacaga

SEQ ID NO: 20451 - DNA, 22 bp, synthetic construct
  misc_feature 1..22: note = Probe
  source 1..22: mol_type = other DNA
gattgtgaatctgacaacagag

SEQ ID NO: 20452 - DNA, 24 bp, synthetic construct
  misc_feature 1..24: note = Probe
  source 1..24: mol_type = other DNA
gattgtgaatctgacaacagaggc

SEQ ID NO: 20453 - DNA, 25 bp, synthetic construct
  misc_feature 1..25: note = Probe
  source 1..25: mol_type = other DNA
gattgtgaatctgacaacagaggct

SEQ ID NO: 20454 - DNA, 29 bp, synthetic construct
  misc_feature 1..29: note = Probe
  source 1..29: mol_type = other DNA
gattgtgaatctgacaacagaggcttacg

SEQ ID NO: 20455 - DNA, 30 bp, synthetic construct
  misc_feature 1..30: note = Probe
  source 1..30: mol_type = other DNA
gattgtgaatctgacaacagaggcttacga

SEQ ID NO: 20456 - DNA, 35 bp, synthetic construct; identical to SEQ ID NO: 5752
  misc_feature 1..35: note = Probe
  source 1..35: mol_type = other DNA

SEQ ID NO: 20457 - DNA, 36 bp, synthetic construct; identical to SEQ ID NO: 5753
  misc_feature 1..36: note = Probe
  source 1..36: mol_type = other DNA

SEQ ID NO: 20458 - DNA, 38 bp, synthetic construct; identical to SEQ ID NO: 985
  misc_feature 1..38: note = Probe
  source 1..38: mol_type = other DNA

SEQ ID NO: 20459 - DNA, 39 bp, synthetic construct; identical to SEQ ID NO: 986
  misc_feature 1..39: note = Probe
  source 1..39: mol_type = other DNA

SEQ ID NO: 20460 - DNA, 40 bp, synthetic construct
  misc_feature 1..40: note = Probe
  source 1..40: mol_type = other DNA
gattgtgaatctgacaacagaggcttacgaccccttattt

SEQ ID NO: 20461 - DNA, 43 bp, synthetic construct; identical to SEQ ID NO: 988
  misc_feature 1..43: note = Probe
  source 1..43: mol_type = other DNA

SEQ ID NO: 20462 - DNA, 44 bp, synthetic construct; identical to SEQ ID NO: 5755
  misc_feature 1..44: note = Probe
  source 1..44: mol_type = other DNA

SEQ ID NO: 20463 - DNA, 45 bp, synthetic construct; identical to SEQ ID NO: 5756
  misc_feature 1..45: note = Probe
  source 1..45: mol_type = other DNA

SEQ ID NO: 20464 - DNA, 46 bp, synthetic construct; identical to SEQ ID NO: 5757
  misc_feature 1..46: note = Probe
  source 1..46: mol_type = other DNA

SEQ ID NO: 20465 - DNA, 20 bp, synthetic construct
  misc_feature 1..20: note = Probe
  source 1..20: mol_type = other DNA
gatttcaacttaacttgacc

SEQ ID NO: 20466 - DNA, 21 bp, synthetic construct
  misc_feature 1..21: note = Probe
  source 1..21: mol_type = other DNA
gatttcaacttaacttgaccg

SEQ ID NO: 20467 - DNA, 22 bp, synthetic construct
  misc_feature 1..22: note = Probe
  source 1..22: mol_type = other DNA
gatttcaacttaacttgaccgc

SEQ ID NO: 20468 - DNA, 23 bp, synthetic construct
  misc_feature 1..23: note = Probe
  source 1..23: mol_type = other DNA
gatttcaacttaacttgaccgct

SEQ ID NO: 20469 - DNA, 24 bp, synthetic construct
  misc_feature 1..24: note = Probe
  source 1..24: mol_type = other DNA
gatttcaacttaacttgaccgctc

SEQ ID NO: 20470 - DNA, 25 bp, synthetic construct
  misc_feature 1..25: note = Probe
  source 1..25: mol_type = other DNA
gatttcaacttaacttgaccgctct

SEQ ID NO: 20471 - DNA, 26 bp, synthetic construct
  misc_feature 1..26: note = Probe
  source 1..26: mol_type = other DNA
gatttcaacttaacttgaccgctctg

SEQ ID NO: 20472 - DNA, 27 bp, synthetic construct
  misc_feature 1..27: note = Probe
  source 1..27: mol_type = other DNA
gatttcaacttaacttgaccgctctga

SEQ ID NO: 20473 - DNA, 28 bp, synthetic construct
  misc_feature 1..28: note = Probe
  source 1..28: mol_type = other DNA
gatttcaacttaacttgaccgctctgag

SEQ ID NO: 20474 - DNA, 29 bp, synthetic construct
  misc_feature 1..29: note = Probe
  source 1..29: mol_type = other DNA
gatttcaacttaacttgaccgctctgagc

SEQ ID NO: 20475 - DNA, 30 bp, synthetic construct; identical to SEQ ID NO: 5769
  misc_feature 1..30: note = Probe
  source 1..30: mol_type = other DNA

SEQ ID NO: 20476 - DNA, 29 bp, synthetic construct
  misc_feature 1..29: note = Probe
  source 1..29: mol_type = other DNA
gatttcgactcattaaattatgataatca

SEQ ID NO: 20477 - DNA, 31 bp, synthetic construct; identical to SEQ ID NO: 5771
  misc_feature 1..31: note = Probe
  source 1..31: mol_type = other DNA

SEQ ID NO: 20478 - DNA, 32 bp, synthetic construct; identical to SEQ ID NO: 5772
  misc_feature 1..32: note = Probe
  source 1..32: mol_type = other DNA

SEQ ID NO: 20479 - DNA, 38 bp, synthetic construct
  misc_feature 1..38: note = Probe
  source 1..38: mol_type = other DNA
gatttcgactcattaaattatgataatcatatttacca

SEQ ID NO: 20480 - DNA, 41 bp, synthetic construct
  misc_feature 1..41: note = Probe
  source 1..41: mol_type = other DNA
gatttcgactcattaaattatgataatcatatttaccaaat

SEQ ID NO: 20481 - DNA, 42 bp, synthetic construct; identical to SEQ ID NO: 5774
  misc_feature 1..42: note = Probe
  source 1..42: mol_type = other DNA

SEQ ID NO: 20482 - DNA, 15 bp, synthetic construct
  misc_feature 1..15: note = Probe
  source 1..15: mol_type = other DNA
gcaaaaccccactct

SEQ ID NO: 20483 - DNA, 39 bp, synthetic construct; identical to SEQ ID NO: 5781
  misc_feature 1..39: note = Probe
  source 1..39: mol_type = other DNA

SEQ ID NO: 20484 - DNA, 40 bp, synthetic construct; identical to SEQ ID NO: 5782
  misc_feature 1..40: note = Probe
  source 1..40: mol_type = other DNA

SEQ ID NO: 20485 - DNA, 41 bp, synthetic construct; identical to SEQ ID NO: 5783
  misc_feature 1..41: note = Probe
  source 1..41: mol_type = other DNA

SEQ ID NO: 20486 - DNA, 33 bp, synthetic construct; identical to SEQ ID NO: 5786
  misc_feature 1..33: note = Probe
  source 1..33: mol_type = other DNA

SEQ ID NO: 20487 - DNA, 33 bp, synthetic construct; identical to SEQ ID NO: 5788
  misc_feature 1..33: note = Probe
  source 1..33: mol_type = other DNA

SEQ ID NO: 20488 - DNA, 16 bp, synthetic construct
  misc_feature 1..16: note = Probe
  source 1..16: mol_type = other DNA
gcaactggtcgtttta

SEQ ID NO: 20489 - DNA, 42 bp, synthetic construct
  misc_feature 1..42: note = Probe
  source 1..42: mol_type = other DNA
gcaagcagtcaggatggccgagcggtctaaggcgctgcgttc

SEQ ID NO: 20490 - DNA, 31 bp, synthetic construct; identical to SEQ ID NO: 5789
  misc_feature 1..31: note = Probe
  source 1..31: mol_type = other DNA

SEQ ID NO: 20491 - DNA, 33 bp, synthetic construct; identical to SEQ ID NO: 989
  misc_feature 1..33: note = Probe
  source 1..33: mol_type = other DNA

SEQ ID NO: 20492 - DNA, 41 bp, synthetic construct; identical to SEQ ID NO: 5790
  misc_feature 1..41: note = Probe
  source 1..41: mol_type = other DNA

SEQ ID NO: 20493 - DNA, 50 bp, synthetic construct; identical to SEQ ID NO: 5793
  misc_feature 1..50: note = Probe
  source 1..50: mol_type = other DNA

SEQ ID NO: 20494 - DNA, 19 bp, synthetic construct
  misc_feature 1..19: note = Probe
  source 1..19: mol_type = other DNA
gcaatggatagcgcattgg

SEQ ID NO: 20495 - DNA, 20 bp, synthetic construct
  misc_feature 1..20: note = Probe
  source 1..20: mol_type = other DNA
gcaatggatagcgcattgga

SEQ ID NO: 20496 - DNA, 27 bp, synthetic construct
  misc_feature 1..27: note = Probe
  source 1..27: mol_type = other DNA
gcaatggtggttcagtggtagaattct

SEQ ID NO: 20497 - DNA, 31 bp, synthetic construct; identical to SEQ ID NO: 5794
  misc_feature 1..31: note = Probe
  source 1..31: mol_type = other DNA

SEQ ID NO: 20498 - DNA, 32 bp, synthetic construct; identical to SEQ ID NO: 5795
  misc_feature 1..32: note = Probe
  source 1..32: mol_type = other DNA

SEQ ID NO: 20499 - DNA, 33 bp, synthetic construct
  misc_feature 1..33: note = Probe
  source 1..33: mol_type = other DNA
gcaatggtggttcagtggtagaattctcgcctt

SEQ ID NO: 20500 - DNA, 34 bp, synthetic construct
  misc_feature 1..34: note = Probe
  source 1..34: mol_type = other DNA
gcaatggtggttcagtggtagaattctcgccttt

SEQ ID NO: 20501 - DNA, 16 bp, synthetic construct
  misc_feature 1..16: note = Probe
  source 1..16: mol_type = other DNA
gcacagtaattgtttt

SEQ ID NO: 20502 - DNA, 17 bp, synthetic construct
  misc_feature 1..17: note = Probe
  source 1..17: mol_type = other DNA
gcacagtaattgttttt

SEQ ID NO: 20503 - DNA, 16 bp, synthetic construct
  misc_feature 1..16: note = Probe
  source 1..16: mol_type = other DNA
gcacccaacttacact

SEQ ID NO: 20504 - DNA, 17 bp, synthetic construct
  misc_feature 1..17: note = Probe
  source 1..17: mol_type = other DNA
gcacccaacttacactt

SEQ ID NO: 20505 - DNA, 18 bp, synthetic construct
  misc_feature 1..18: note = Probe
  source 1..18: mol_type = other DNA
gcacccaacttacactta

SEQ ID NO: 20506 - DNA, 20 bp, synthetic construct
  misc_feature 1..20: note = Probe
  source 1..20: mol_type = other DNA
gcacccaacttacacttagg

SEQ ID NO: 20507 - DNA, 21 bp, synthetic construct
  misc_feature 1..21: note = Probe
  source 1..21: mol_type = other DNA
gcacccaacttacacttagga

SEQ ID NO: 20508 - DNA, 22 bp, synthetic construct
  misc_feature 1..22: note = Probe
  source 1..22: mol_type = other DNA
gcacccaacttacacttaggag

SEQ ID NO: 20509 - DNA, 23 bp, synthetic construct
  misc_feature 1..23: note = Probe
  source 1..23: mol_type = other DNA
gcacccaacttacacttaggaga

SEQ ID NO: 20510 - DNA, 24 bp, synthetic construct
  misc_feature 1..24: note = Probe
  source 1..24: mol_type = other DNA
gcacccaacttacacttaggagat

SEQ ID NO: 20511 - DNA, 25 bp, synthetic construct
  misc_feature 1..25: note = Probe
  source 1..25: mol_type = other DNA
gcacccaacttacacttaggagatt

SEQ ID NO: 20512 - DNA, 26 bp, synthetic construct
  misc_feature 1..26: note = Probe
  source 1..26: mol_type = other DNA
gcacccaacttacacttaggagattt

SEQ ID NO: 20513 - DNA, 27 bp, synthetic construct
  misc_feature 1..27: note = Probe
  source 1..27: mol_type = other DNA
gcacccaacttacacttaggagatttc

SEQ ID NO: 20514 - DNA, 28 bp, synthetic construct
  misc_feature 1..28: note = Probe
  source 1..28: mol_type = other DNA
gcacccaacttacacttaggagatttca

SEQ ID NO: 20515 - DNA, 29 bp, synthetic construct
  misc_feature 1..29: note = Probe
  source 1..29: mol_type = other DNA
gcacccaacttacacttaggagatttcaa

SEQ ID NO: 20516 - DNA, 31 bp, synthetic construct; identical to SEQ ID NO: 5808
  misc_feature 1..31: note = Probe
  source 1..31: mol_type = other DNA

SEQ ID NO: 20517 - DNA, 32 bp, synthetic construct; identical to SEQ ID NO: 5809
  misc_feature 1..32: note = Probe
  source 1..32: mol_type = other DNA

SEQ ID NO: 20518 - DNA, 33 bp, synthetic construct; identical to SEQ ID NO: 5810
  misc_feature 1..33: note = Probe
  source 1..33: mol_type = other DNA

SEQ ID NO: 20519 - DNA, 36 bp, synthetic construct
  misc_feature 1..36: note = Probe
  source 1..36: mol_type = other DNA
gcacccaacttacacttaggagatttcaacttaact

SEQ ID NO: 20520 - DNA, 40 bp, synthetic construct
  misc_feature 1..40: note = Probe
  source 1..40: mol_type = other DNA
gcacccaacttacacttaggagatttcaacttaacttgac

SEQ ID NO: 20521 - DNA, 42 bp, synthetic construct; identical to SEQ ID NO: 5813
  misc_feature 1..42: note = Probe
  source 1..42: mol_type = other DNA

SEQ ID NO: 20522 - DNA, 44 bp, synthetic construct; identical to SEQ ID NO: 5815
  misc_feature 1..44: note = Probe
  source 1..44: mol_type = other DNA

SEQ ID NO: 20523 - DNA, 50 bp, synthetic construct; identical to SEQ ID NO: 5820
  misc_feature 1..50: note = Probe
  source 1..50: mol_type = other DNA

SEQ ID NO: 20524 - DNA, 16 bp, synthetic construct
  misc_feature 1..16: note = Probe
  source 1..16: mol_type = other DNA
gcacgaggccccgggt

SEQ ID NO: 20525 - DNA, 18 bp, synthetic construct
  misc_feature 1..18: note = Probe
  source 1..18: mol_type = other DNA
gcacgaggccccgggttc

SEQ ID NO: 20526 - DNA, 32 bp, synthetic construct
  misc_feature 1..32: note = Probe
  source 1..32: mol_type = other DNA
gcacgaggccccgggttcaatccccggcacct

SEQ ID NO: 20527 - DNA, 33 bp, synthetic construct
  misc_feature 1..33: note = Probe
  source 1..33: mol_type = other DNA
gcacgaggccccgggttcaatccccggcacctc

SEQ ID NO: 20528 - DNA, 34 bp, synthetic construct
  misc_feature 1..34: note = Probe
  source 1..34: mol_type = other DNA
gcacgaggccccgggttcaatccccggcacctcc

SEQ ID NO: 20529 - DNA, 36 bp, synthetic construct
  misc_feature 1..36: note = Probe
  source 1..36: mol_type = other DNA
gcacgaggccccgggttcaatccccggcacctccag

SEQ ID NO: 20530 - DNA, 37 bp, synthetic construct
  misc_feature 1..37: note = Probe
  source 1..37: mol_type = other DNA
gcacgaggccccgggttcaatccccggcacctccagc

SEQ ID NO: 20531 - DNA, 38 bp, synthetic construct; identical to SEQ ID NO: 5821
  misc_feature 1..38: note = Probe
  source 1..38: mol_type = other DNA

SEQ ID NO: 20532 - DNA, 36 bp, synthetic construct
  misc_feature 1..36: note = Probe
  source 1..36: mol_type = other DNA
gcacgaggccccgggttcaatccccggcacctccat

SEQ ID NO: 20533 - DNA, 37 bp, synthetic construct
  misc_feature 1..37: note = Probe
  source 1..37: mol_type = other DNA
gcacgaggccccgggttcaatccccggcacctccatt

SEQ ID NO: 20534 - DNA, 38 bp, synthetic construct
  misc_feature 1..38: note = Probe
  source 1..38: mol_type = other DNA
gcacgaggccccgggttcaatccccggcacctccattc

SEQ ID NO: 20535 - DNA, 42 bp, synthetic construct
  misc_feature 1..42: note = Probe
  source 1..42: mol_type = other DNA
gcacgaggccccgggttcaatccccggcacctccattccttt

SEQ ID NO: 20536 - DNA, 38 bp, synthetic construct
  misc_feature 1..38: note = Probe
  source 1..38: mol_type = other DNA
gcacgaggccctgggttcaatccccagcacctccatgt

SEQ ID NO: 20537 - DNA, 38 bp, synthetic construct
  misc_feature 1..38: note = Probe
  source 1..38: mol_type = other DNA
gcacgaggtcctgggttcaatccccaatacctccaggt

SEQ ID NO: 20538 - DNA, 37 bp, synthetic construct
  misc_feature 1..37: note = Probe
  source 1..37: mol_type = other DNA
gcacgaggtcctgggttcgatccccagtacctccagg

SEQ ID NO: 20539 - DNA, 38 bp, synthetic construct
  misc_feature 1..38: note = Probe
  source 1..38: mol_type = other DNA
gcacgaggtcctgggttcgatccccagtacctccaggc

SEQ ID NO: 20540 - DNA, 16 bp, synthetic construct
  misc_feature 1..16: note = Probe
  source 1..16: mol_type = other DNA
gcacgccctcccattt

SEQ ID NO: 20541 - DNA, 17 bp, synthetic construct
  misc_feature 1..17: note = Probe
  source 1..17: mol_type = other DNA
gcacgccctcccatttt

SEQ ID NO: 20542 - DNA, 40 bp, synthetic construct
  misc_feature 1..40: note = Probe
  source 1..40: mol_type = other DNA
gcacgcggttccatagtgtagcggttatcacgtctgcttt

SEQ ID NO: 20543 - DNA, 28 bp, synthetic construct
  misc_feature 1..28: note = Probe
  source 1..28: mol_type = other DNA
gcacgcgtgggttcgaatcccatcctcg

SEQ ID NO: 20544 - DNA, 29 bp, synthetic construct
  misc_feature 1..29: note = Probe
  source 1..29: mol_type = other DNA
gcacgcgtgggttcgaatcccatcctcgt

SEQ ID NO: 20545 - DNA, 16 bp, synthetic construct
  misc_feature 1..16: note = Probe
  source 1..16: mol_type = other DNA
gcacggcaaggggctc

SEQ ID NO: 20546 - DNA, 42 bp, synthetic construct
  misc_feature 1..42: note = Probe
  source 1..42: mol_type = other DNA
gcacgtatgaggccccgggttcaatccccggcatctccagac

SEQ ID NO: 20547 - DNA, 27 bp, synthetic construct
  misc_feature 1..27: note = Probe
  source 1..27: mol_type = other DNA
gcactctggactctgaatccagcgatc

SEQ ID NO: 20548 - DNA, 28 bp, synthetic construct
  misc_feature 1..28: note = Probe
  source 1..28: mol_type = other DNA
gcactctggactctgaatccagcgatcc

SEQ ID NO: 20549 - DNA, 29 bp, synthetic construct
  misc_feature 1..29: note = Probe
  source 1..29: mol_type = other DNA
gcactctggactctgaatccagcgatccg

SEQ ID NO: 20550 - DNA, 30 bp, synthetic construct; identical to SEQ ID NO: 990
  misc_feature 1..30: note = Probe
  source 1..30: mol_type = other DNA

SEQ ID NO: 20551 - DNA, 31 bp, synthetic construct; identical to SEQ ID NO: 5824
  misc_feature 1..31: note = Probe
  source 1..31: mol_type = other DNA

SEQ ID NO: 20552 - DNA, 32 bp, synthetic construct
  misc_feature 1..32: note = Probe
  source 1..32: mol_type = other DNA
gcactctggactctgaatccagcgatccgagt

SEQ ID NO: 20553 - DNA, 27 bp, synthetic construct
  misc_feature 1..27: note = Probe
  source 1..27: mol_type = other DNA
gcactctggactttgaatccagcgatc

SEQ ID NO: 20554 - DNA, 30 bp, synthetic construct
  misc_feature 1..30: note = Probe
  source 1..30: mol_type = other DNA
gcactctggactttgaatccagcgatccga

SEQ ID NO: 20555 - DNA, 31 bp, synthetic construct
  misc_feature 1..31: note = Probe
  source 1..31: mol_type = other DNA
gcactctggactttgaatccagcgatccgag

SEQ ID NO: 20556 - DNA, 32 bp, synthetic construct
  misc_feature 1..32: note = Probe
  source 1..32: mol_type = other DNA
gcactctggactttgaatccagcgatccgagt

SEQ ID NO: 20557 - DNA, 33 bp, synthetic construct
  misc_feature 1..33: note = Probe
  source 1..33: mol_type = other DNA
gcactctggactttgaatccagcgatccgagtt

SEQ ID NO: 20558 - DNA, 27 bp, synthetic construct
  misc_feature 1..27: note = Probe
  source 1..27: mol_type = other DNA
gcactggtggttcagtggtagaattct

SEQ ID NO: 20559 - DNA, 29 bp, synthetic construct
  misc_feature 1..29: note = Probe
  source 1..29: mol_type = other DNA
gcactggtggttcagtggtagaattctcg

SEQ ID NO: 20560 - DNA, 30 bp, synthetic construct; identical to SEQ ID NO: 8615
  misc_feature 1..30: note = Probe
  source 1..30: mol_type = other DNA

SEQ ID NO: 20561 - DNA, 31 bp, synthetic construct; identical to SEQ ID NO: 5827
  misc_feature 1..31: note = Probe
  source 1..31: mol_type = other DNA

SEQ ID NO: 20562 - DNA, 33 bp, synthetic construct; identical to SEQ ID NO: 5828
  misc_feature 1..33: note = Probe
  source 1..33: mol_type = other DNA

SEQ ID NO: 20563 - DNA, 34 bp, synthetic construct
  misc_feature 1..34: note = Probe
  source 1..34: mol_type = other DNA
gcactggtggttcagtggtagaattctcgcctca

SEQ ID NO: 20564 - DNA, 34 bp, synthetic construct; identical to SEQ ID NO: 5829
  misc_feature 1..34: note = Probe
  source 1..34: mol_type = other DNA

SEQ ID NO: 20565 - DNA, 35 bp, synthetic construct
  misc_feature 1..35: note = Probe
  source 1..35: mol_type = other DNA
gcactggtggttcagtggtagaattctcgcctccc

SEQ ID NO: 20566 - DNA, 16 bp, synthetic construct
  misc_feature 1..16: note = Probe
  source 1..16: mol_type = other DNA
gcagaaggtcctgggt

SEQ ID NO: 20567 - DNA, 33 bp, synthetic construct
  misc_feature 1..33: note = Probe
  source 1..33: mol_type = other DNA
gcagaaggtcctgggttcaagccccagtggaac

SEQ ID NO: 20568 - DNA, 38 bp, synthetic construct
  misc_feature 1..38: note = Probe
  source 1..38: mol_type = other DNA
gcagaaggtcctgggttcaagccccagtggaaccatgg

SEQ ID NO: 20569 - DNA, 31 bp, synthetic construct
  misc_feature 1..31: note = Probe
  source 1..31: mol_type = other DNA
gcagaaggtcctgggttcgagccccagtgga

SEQ ID NO: 20570 - DNA, 37 bp, synthetic construct; identical to SEQ ID NO: 5830
  misc_feature 1..37: note = Probe
  source 1..37: mol_type = other DNA

SEQ ID NO: 20571 - DNA, 38 bp, synthetic construct; identical to SEQ ID NO: 5831
  misc_feature 1..38: note = Probe
  source 1..38: mol_type = other DNA

SEQ ID NO: 20572 - DNA, 38 bp, synthetic construct; identical to SEQ ID NO: 5832
  misc_feature 1..38: note = Probe
  source 1..38: mol_type = other DNA

SEQ ID NO: 20573 - DNA, 28 bp, synthetic construct
  misc_feature 1..28: note = Probe
  source 1..28: mol_type = other DNA
gcagagcccggtaatcgcataaaactta

SEQ ID NO: 20574 - DNA, 33 bp, synthetic construct
  misc_feature 1..33: note = Probe
  source 1..33: mol_type = other DNA
gcagagcccggtaatcgcataaaacttaaaact

SEQ ID NO: 20575 - DNA, 30 bp, synthetic construct; identical to SEQ ID NO: 8617
  misc_feature 1..30: note = Probe
  source 1..30: mol_type = other DNA

SEQ ID NO: 20576 - DNA, 31 bp, synthetic construct
  misc_feature 1..31: note = Probe
  source 1..31: mol_type = other DNA
gcagagtggcgcagcggaagcgtgctgggcc

SEQ ID NO: 20577 - DNA, 32 bp, synthetic construct
  misc_feature 1..32: note = Probe
  source 1..32: mol_type = other DNA
gcagagtggcgcagcggaagcgtgctgggccc

SEQ ID NO: 20578 - DNA, 33 bp, synthetic construct; identical to SEQ ID NO: 5833
  misc_feature 1..33: note = Probe
  source 1..33: mol_type = other DNA

SEQ ID NO: 20579 - DNA, 25 bp, synthetic construct
  misc_feature 1..25: note = Probe
  source 1..25: mol_type = other DNA
gcagagtggggttttgcagtcctta

SEQ ID NO: 20580 - DNA, 27 bp, synthetic construct
  misc_feature 1..27: note = Probe
  source 1..27: mol_type = other DNA
gcagagtggggttttgcagtccttagc

SEQ ID NO: 20581 - DNA, 28 bp, synthetic construct
  misc_feature 1..28: note = Probe
  source 1..28: mol_type = other DNA
gcagagtggggttttgcagtccttagct

SEQ ID NO: 20582 - DNA, 32 bp, synthetic construct
  misc_feature 1..32: note = Probe
  source 1..32: mol_type = other DNA
gcagcaacctcggttcgaatccgagtcacggc

SEQ ID NO: 20583 - DNA, 33 bp, synthetic construct
  misc_feature 1..33: note = Probe
  source 1..33: mol_type = other DNA
gcagcaacctcggttcgaatccgagtcacggca

SEQ ID NO: 20584 - DNA, 34 bp, synthetic construct
  misc_feature 1..34: note = Probe
  source 1..34: mol_type = other DNA
gcagcaacctcggttcgaatccgagtcacggcaa

SEQ ID NO: 20585 - DNA, 36 bp, synthetic construct
  misc_feature 1..36: note = Probe
  source 1..36: mol_type = other DNA
gcagcaacctcggttcgaatccgagtcacggcaaag

SEQ ID NO: 20586 - DNA, 34 bp, synthetic construct
  misc_feature 1..34: note = Probe
  source 1..34: mol_type = other DNA
gcagcaacctcggttcgaatccgagtcacggcag

SEQ ID NO: 20587 - DNA, 36 bp, synthetic construct
  misc_feature 1..36: note = Probe
  source 1..36: mol_type = other DNA
gcagcaacctcggttcgaatccgagtcacggcagga

SEQ ID NO: 20588 - DNA, 36 bp, synthetic construct; identical to SEQ ID NO: 5839
  misc_feature 1..36: note = Probe
  source 1..36: mol_type = other DNA

SEQ ID NO: 20589 - DNA, 34 bp, synthetic construct
  misc_feature 1..34: note = Probe
  source 1..34: mol_type = other DNA
gcagcaacctcggttcgaatccgagtcacggcat

SEQ ID NO: 20590 - DNA, 36 bp, synthetic construct; identical to SEQ ID NO: 5840
  misc_feature 1..36: note = Probe
  source 1..36: mol_type = other DNA

SEQ ID NO: 20591 - DNA, 33 bp, synthetic construct
  misc_feature 1..33: note = Probe
  source 1..33: mol_type = other DNA
gcagcccgggttcgattcccggtcatggaacca

SEQ ID NO: 20592 - DNA, 17 bp, synthetic construct
  misc_feature 1..17: note = Probe
  source 1..17: mol_type = other DNA
gcagcgatggccgagtg

SEQ ID NO: 20593 - DNA, 25 bp, synthetic construct
  misc_feature 1..25: note = Probe
  source 1..25: mol_type = other DNA
gcagcgatggccgagtggttaaggc

SEQ ID NO: 20594 - DNA, 22 bp, synthetic construct
  misc_feature 1..22: note = Probe
  source 1..22: mol_type = other DNA
gcagcggaagcgtgctgggccc

SEQ ID NO: 20595 - DNA, 24 bp, synthetic construct
  misc_feature 1..24: note = Probe
  source 1..24: mol_type = other DNA
gcagcggaagcgtgctgggcccat

SEQ ID NO: 20596 - DNA, 16 bp, synthetic construct
  misc_feature 1..16: note = Probe
  source 1..16: mol_type = other DNA
gcagcggagccttcga

SEQ ID NO: 20597 - DNA, 17 bp, synthetic construct
  misc_feature 1..17: note = Probe
  source 1..17: mol_type = other DNA
gcagcggagccttcgat

SEQ ID NO: 20598 - DNA, 30 bp, synthetic construct
  misc_feature 1..30: note = Probe
  source 1..30: mol_type = other DNA
gcagcggagccttcgatagctcagttggta

SEQ ID NO: 20599 - DNA, 38 bp, synthetic construct
  misc_feature 1..38: note = Probe
  source 1..38: mol_type = other DNA
gcagcggagccttcgatagctcagttggtagagcggag

SEQ ID NO: 20600 - DNA, 41 bp, synthetic construct
  misc_feature 1..41: note = Probe
  source 1..41: mol_type = other DNA
gcagcggagccttcgatagctcagttggtagagcggaggac

SEQ ID NO: 20601 - DNA, 44 bp, synthetic construct
  misc_feature 1..44: note = Probe
  source 1..44: mol_type = other DNA
gcagcggagccttcgatagctcagttggtagagcggaggactgt

SEQ ID NO: 20602 - DNA, 45 bp, synthetic construct
  misc_feature 1..45: note = Probe
  source 1..45: mol_type = other DNA
gcagcggagccttcgatagctcagttggtagagcggaggactgta

SEQ ID NO: 20603 - DNA, 46 bp, synthetic construct
  misc_feature 1..46: note = Probe
  source 1..46: mol_type = other DNA
gcagcggagccttcgatagctcagttggtagagcggaggactgtag

SEQ ID NO: 20604 - DNA, 50 bp, synthetic construct
  misc_feature 1..50: note = Probe
  source 1..50: mol_type = other DNA
gcagcggagccttcgatagctcagttggtagagcggaggactgtagtgga

SEQ ID NO: 20605 - DNA, 22 bp, synthetic construct
  misc_feature 1..22: note = Probe
  source 1..22: mol_type = other DNA
gcagctgggtagcgtggccgag

SEQ ID NO: 20606 - DNA, 23 bp, synthetic construct
  misc_feature 1..23: note = Probe
  source 1..23: mol_type = other DNA
gcagctgggtagcgtggccgagc

SEQ ID NO: 20607 - DNA, 24 bp, synthetic construct
  misc_feature 1..24: note = Probe
  source 1..24: mol_type = other DNA
gcagctgggtagcgtggccgagcg

SEQ ID NO: 20608 - DNA, 25 bp, synthetic construct
  misc_feature 1..25: note = Probe
  source 1..25: mol_type = other DNA
gcagctgggtagcgtggccgagcgg

SEQ ID NO: 20609 - DNA, 26 bp, synthetic construct
  misc_feature 1..26: note = Probe
  source 1..26: mol_type = other DNA
gcagctgggtagcgtggccgagcggt

SEQ ID NO: 20610 - DNA, 28 bp, synthetic construct
  misc_feature 1..28: note = Probe
  source 1..28: mol_type = other DNA
gcagctgggtagcgtggccgagcggtct

SEQ ID NO: 20611 - DNA, 29 bp, synthetic construct
  misc_feature 1..29: note = Probe
  source 1..29: mol_type = other DNA
gcagctgggtagcgtggccgagcggtcta

SEQ ID NO: 20612 - DNA, 33 bp, synthetic construct
  misc_feature 1..33: note = Probe
  source 1..33: mol_type = other DNA
gcagcttcaaacctgccggggcttctcccgcct

SEQ ID NO: 20613 - DNA, 41 bp, synthetic construct
  misc_feature 1..41: note = Probe
  source 1..41: mol_type = other DNA
gcagtctcccctggaggcgtgggttcgaatcccactcctga

SEQ ID NO: 20614 - DNA, 32 bp, synthetic construct
  misc_feature 1..32: note = Probe
  source 1..32: mol_type = other DNA
gcagttgacccgggttcgattcccggccaacg

SEQ ID NO: 20615 - DNA, 17 bp, synthetic construct
  misc_feature 1..17: note = Probe
  source 1..17: mol_type = other DNA
gcataaaacttaaaact

SEQ ID NO: 20616 - DNA, 28 bp, synthetic construct
  misc_feature 1..28: note = Probe
  source 1..28: mol_type = other DNA
gcataaaacttaaaactttacagtcaga

SEQ ID NO: 20617 - DNA, 33 bp, synthetic construct; identical to SEQ ID NO: 5847
  misc_feature 1..33: note = Probe
  source 1..33: mol_type = other DNA

SEQ ID NO: 20618 - DNA, 44 bp, synthetic construct; identical to SEQ ID NO: 999
  misc_feature 1..44: note = Probe
  source 1..44: mol_type = other DNA

SEQ ID NO: 20619 - DNA, 50 bp, synthetic construct; identical to SEQ ID NO: 5851
  misc_feature 1..50: note = Probe
  source 1..50: mol_type = other DNA

SEQ ID NO: 20620 - DNA, 27 bp, synthetic construct
  misc_feature 1..27: note = Probe
  source 1..27: mol_type = other DNA
gcatagctgccttccaagcagttgacc

SEQ ID NO: 20621 - DNA, 29 bp, synthetic construct
  misc_feature 1..29: note = Probe
  source 1..29: mol_type = other DNA
gcatagctgccttccaagcagttgacccg

SEQ ID NO: 20622 - DNA, 30 bp, synthetic construct
  misc_feature 1..30: note = Probe
  source 1..30: mol_type = other DNA
gcatagctgccttccaagcagttgacccgg

SEQ ID NO: 20623 - DNA, 32 bp, synthetic construct
  misc_feature 1..32: note = Probe
  source 1..32: mol_type = other DNA
gcatagctgccttccaagcagttgacccgggt

SEQ ID NO: 20624 - DNA, 33 bp, synthetic construct; identical to SEQ ID NO: 5854
  misc_feature 1..33: note = Probe
  source 1..33: mol_type = other DNA

SEQ ID NO: 20625 - DNA, 27 bp, synthetic construct
  misc_feature 1..27: note = Probe
  source 1..27: mol_type = other DNA
gcataggtggttcagtggtagaattct

SEQ ID NO: 20626 - DNA, 31 bp, synthetic construct; identical to SEQ ID NO: 5857
  misc_feature 1..31: note = Probe
  source 1..31: mol_type = other DNA

SEQ ID NO: 20627 - DNA, 32 bp, synthetic construct; identical to SEQ ID NO: 5858
  misc_feature 1..32: note = Probe
  source 1..32: mol_type = other DNA

SEQ ID NO: 20628 - DNA, 33 bp, synthetic construct; identical to SEQ ID NO: 5859
  misc_feature 1..33: note = Probe
  source 1..33: mol_type = other DNA

SEQ ID NO: 20629 - DNA, 34 bp, synthetic construct
  misc_feature 1..34: note = Probe
  source 1..34: mol_type = other DNA
gcataggtggttcagtggtagaattcttgcctgc

SEQ ID NO: 20630 - DNA, 35 bp, synthetic construct
  misc_feature 1..35: note = Probe
  source 1..35: mol_type = other DNA
gcataggtggttcagtggtagaattcttgcctgcc

SEQ ID NO: 20631 - DNA, 33 bp, synthetic construct
  misc_feature 1..33: note = Probe
  source 1..33: mol_type = other DNA
gcatctgtttccgtagtgtagtggttatcacgt

SEQ ID NO: 20632 - DNA, 34 bp, synthetic construct
  misc_feature 1..34: note = Probe
  source 1..34: mol_type = other DNA
gcatctgtttccgtagtgtagtggttatcacgtt

SEQ ID NO: 20633 - DNA, 29 bp, synthetic construct
  misc_feature 1..29: note = Probe
  source 1..29: mol_type = other DNA
gcatgaggtcccgggttcgatccccagca

SEQ ID NO: 20634 - DNA, 31 bp, synthetic construct
  misc_feature 1..31: note = Probe
  source 1..31: mol_type = other DNA
gcatgaggtcccgggttcgatccccagcatc

SEQ ID NO: 20635 - DNA, 32 bp, synthetic construct
  misc_feature 1..32: note = Probe
  source 1..32: mol_type = other DNA
gcatgaggtcccgggttcgatccccagcatct

SEQ ID NO: 20636 - DNA, 33 bp, synthetic construct
  misc_feature 1..33: note = Probe
  source 1..33: mol_type = other DNA
gcatgaggtcccgggttcgatccccagcatctc

SEQ ID NO: 20637 - DNA, 36 bp, synthetic construct
  misc_feature 1..36: note = Probe
  source 1..36: mol_type = other DNA
gcatgaggtcccgggttcgatccccagcatctccag

SEQ ID NO: 20638 - DNA, 37 bp, synthetic construct
  misc_feature 1..37: note = Probe
  source 1..37: mol_type = other DNA
gcatgaggtcccgggttcgatccccagcatctccagt

SEQ ID NO: 20639 - DNA, 38 bp, synthetic construct; identical to SEQ ID NO: 5861
  misc_feature 1..38: note = Probe
  source 1..38: mol_type = other DNA

SEQ ID NO: 20640 - DNA, 25 bp, synthetic construct
  misc_feature 1..25: note = Probe
  source 1..25: mol_type = other DNA
gcatgggtgattcagtggtagaatt

SEQ ID NO: 20641 - DNA, 27 bp, synthetic construct
  misc_feature 1..27: note = Probe
  source 1..27: mol_type = other DNA
gcatgggtgattcagtggtagaatttt

SEQ ID NO: 20642 - DNA, 19 bp, synthetic construct
  misc_feature 1..19: note = Probe
  source 1..19: mol_type = other DNA
gcatgggtggttcagtggt

SEQ ID NO: 20643 - DNA, 20 bp, synthetic construct
  misc_feature 1..20: note = Probe
  source 1..20: mol_type = other DNA
gcatgggtggttcagtggta

SEQ ID NO: 20644 - DNA, 21 bp, synthetic construct
  misc_feature 1..21: note = Probe
  source 1..21: mol_type = other DNA
gcatgggtggttcagtggtag

SEQ ID NO: 20645 - DNA, 22 bp, synthetic construct
  misc_feature 1..22: note = Probe
  source 1..22: mol_type = other DNA
gcatgggtggttcagtggtaga

SEQ ID NO: 20646 - DNA, 23 bp, synthetic construct
  misc_feature 1..23: note = Probe
  source 1..23: mol_type = other DNA
gcatgggtggttcagtggtagaa

SEQ ID NO: 20647 - DNA, 24 bp, synthetic construct
  misc_feature 1..24: note = Probe
  source 1..24: mol_type = other DNA
gcatgggtggttcagtggtagaat

SEQ ID NO: 20648 - DNA, 25 bp, synthetic construct
  misc_feature 1..25: note = Probe
  source 1..25: mol_type = other DNA
gcatgggtggttcagtggtagaatt

SEQ ID NO: 20649 - DNA, 26 bp, synthetic construct
  misc_feature 1..26: note = Probe
  source 1..26: mol_type = other DNA
gcatgggtggttcagtggtagaattc

SEQ ID NO: 20650 - DNA, 27 bp, synthetic construct
  misc_feature 1..27: note = Probe
  source 1..27: mol_type = other DNA
gcatgggtggttcagtggtagaattct

SEQ ID NO: 20651 - DNA, 37 bp, synthetic construct; identical to SEQ ID NO: 5870
  misc_feature 1..37: note = Probe
  source 1..37: mol_type = other DNA

SEQ ID NO: 20652 - DNA, 42 bp, synthetic construct
  misc_feature 1..42: note = Probe
  source 1..42: mol_type = other DNA
gcatgggtggttcagtggtagaattctcgcctgccacgcggg

SEQ ID NO: 20653 - DNA, 43 bp, synthetic construct; identical to SEQ ID NO: 5873
  misc_feature 1..43: note = Probe
  source 1..43: mol_type = other DNA

SEQ ID NO: 20654 - DNA, 46 bp, synthetic construct
  misc_feature 1..46: note = Probe
  source 1..46: mol_type = other DNA
gcatgggtggttcagtggtagaattctcgcctgccacgcgggaggc

SEQ ID NO: 20655 - DNA, 16 bp, synthetic construct
  misc_feature 1..16: note = Probe
  source 1..16: mol_type = other DNA
gcatgtctttgctttt

SEQ ID NO: 20656 - DNA, 23 bp, synthetic construct
  misc_feature 1..23: note = Probe
  source 1..23: mol_type = other DNA
gcattaaccttttaagttaaaga

SEQ ID NO: 20657 - DNA, 25 bp, synthetic construct
  misc_feature 1..25: note = Probe
  source 1..25: mol_type = other DNA
gcattaaccttttaagttaaagatt

SEQ ID NO: 20658 - DNA, 30 bp, synthetic construct
  misc_feature 1..30: note = Probe
  source 1..30: mol_type = other DNA
gcattaaccttttaagttaaagattaagag

SEQ ID NO: 20659 - DNA, 31 bp, synthetic construct
  misc_feature 1..31: note = Probe
  source 1..31: mol_type = other DNA
gcattaaccttttaagttaaagattaagaga

SEQ ID NO: 20660 - DNA, 32 bp, synthetic construct
  misc_feature 1..32: note = Probe
  source 1..32: mol_type = other DNA
gcattaaccttttaagttaaagattaagagaa

SEQ ID NO: 20661 - DNA, 36 bp, synthetic construct
  misc_feature 1..36: note = Probe
  source 1..36: mol_type = other DNA
gcattaaccttttaagttaaagattaagagaaccaa

SEQ ID NO: 20662 - DNA, 38 bp, synthetic construct
  misc_feature 1..38: note = Probe
  source 1..38: mol_type = other DNA
gcattaaccttttaagttaaagattaagagaaccaaca

SEQ ID NO: 20663 - DNA, 40 bp, synthetic construct; identical to SEQ ID NO: 5880
  misc_feature 1..40: note = Probe
  source 1..40: mol_type = other DNA

SEQ ID NO: 20664 - DNA, 50 bp, synthetic construct; identical to SEQ ID NO: 5882
  misc_feature 1..50: note = Probe
  source 1..50: mol_type = other DNA

SEQ ID NO: 20665 - DNA, 27 bp, synthetic construct
  misc_feature 1..27: note = Probe
  source 1..27: mol_type = other DNA
gcattggtggttcaatggtagaattct

SEQ ID NO: 20666 - DNA, 29 bp, synthetic construct
  misc_feature 1..29: note = Probe
  source 1..29: mol_type = other DNA
gcattggtggttcaatggtagaattctcg

SEQ ID NO: 20667 - DNA, 31 bp, synthetic construct; identical to SEQ ID NO: 5884
  misc_feature 1..31: note = Probe
  source 1..31: mol_type = other DNA

SEQ ID NO: 20668 - DNA, 32 bp, synthetic construct; identical to SEQ ID NO: 1013
  misc_feature 1..32: note = Probe
  source 1..32: mol_type = other DNA

SEQ ID NO: 20669 - DNA, 33 bp, synthetic construct; identical to SEQ ID NO: 5885
  misc_feature 1..33: note = Probe
  source 1..33: mol_type = other DNA

SEQ ID NO: 20670 - DNA, 34 bp, synthetic construct
  misc_feature 1..34: note = Probe
  source 1..34: mol_type = other DNA
gcattggtggttcaatggtagaattctcgcctcc

SEQ ID NO: 20671 - DNA, 35 bp, synthetic construct
  misc_feature 1..35: note = Probe
  source 1..35: mol_type = other DNA
gcattggtggttcaatggtagaattctcgcctccc

SEQ ID NO: 20672 - DNA, 16 bp, synthetic construct
  misc_feature 1..16: note = Probe
  source 1..16: mol_type = other DNA
gcattggtggttcagt

SEQ ID NO: 20673 - DNA, 17 bp, synthetic construct
  misc_feature 1..17: note = Probe
  source 1..17: mol_type = other DNA
gcattggtggttcagtg

SEQ ID NO: 20674 - DNA, 18 bp, synthetic construct
  misc_feature 1..18: note = Probe
  source 1..18: mol_type = other DNA
gcattggtggttcagtgg

SEQ ID NO: 20675 - DNA, 19 bp, synthetic construct
  misc_feature 1..19: note = Probe
  source 1..19: mol_type = other DNA
gcattggtggttcagtggt

SEQ ID NO: 20676 - DNA, 20 bp, synthetic construct
  misc_feature 1..20: note = Probe
  source 1..20: mol_type = other DNA
gcattggtggttcagtggta

SEQ ID NO: 20677 - DNA, 21 bp, synthetic construct
  misc_feature 1..21: note = Probe
  source 1..21: mol_type = other DNA
gcattggtggttcagtggtag

SEQ ID NO: 20678 - DNA, 22 bp, synthetic construct
  misc_feature 1..22: note = Probe
  source 1..22: mol_type = other DNA
gcattggtggttcagtggtaga

SEQ ID NO: 20679 - DNA, 23 bp, synthetic construct
  misc_feature 1..23: note = Probe
  source 1..23: mol_type = other DNA
gcattggtggttcagtggtagaa

SEQ ID NO: 20680 - DNA, 24 bp, synthetic construct
  misc_feature 1..24: note = Probe
  source 1..24: mol_type = other DNA
gcattggtggttcagtggtagaat

SEQ ID NO: 20681 - DNA, 25 bp, synthetic construct
  misc_feature 1..25: note = Probe
  source 1..25: mol_type = other DNA
gcattggtggttcagtggtagaatt

SEQ ID NO: 20682 - DNA, 26 bp, synthetic construct
  misc_feature 1..26: note = Probe
  source 1..26: mol_type = other DNA
gcattggtggttcagtggtagaattc

SEQ ID NO: 20683 - DNA, 27 bp, synthetic construct
  misc_feature 1..27: note = Probe
  source 1..27: mol_type = other DNA
gcattggtggttcagtggtagaattct

SEQ ID NO: 20684 - DNA, 28 bp, synthetic construct
  misc_feature 1..28: note = Probe
  source 1..28: mol_type = other DNA
gcattggtggttcagtggtagaattctc

SEQ ID NO: 20685 - DNA, 29 bp, synthetic construct
  misc_feature 1..29: note = Probe
  source 1..29: mol_type = other DNA
gcattggtggttcagtggtagaattctcg

SEQ ID NO: 20686 - DNA, 30 bp, synthetic construct; identical to SEQ ID NO: 5900
  misc_feature 1..30: note = Probe
  source 1..30: mol_type = other DNA

SEQ ID NO: 20687 - DNA, 31 bp, synthetic construct; identical to SEQ ID NO: 5901
  misc_feature 1..31: note = Probe
  source 1..31: mol_type = other DNA

SEQ ID NO: 20688 - DNA, 32 bp, synthetic construct; identical to SEQ ID NO: 5902
  misc_feature 1..32: note = Probe
  source 1..32: mol_type = other DNA

SEQ ID NO: 20689 - DNA, 33 bp, synthetic construct; identical to SEQ ID NO: 5903
  misc_feature 1..33: note = Probe
  source 1..33: mol_type = other DNA

SEQ ID NO: 20690 - DNA, 34 bp, synthetic construct; identical to SEQ ID NO: 5904
  misc_feature 1..34: note = Probe
  source 1..34: mol_type = other DNA

SEQ ID NO: 20691 - DNA, 35 bp, synthetic construct; identical to SEQ ID NO: 5905
  misc_feature 1..35: note = Probe
  source 1..35: mol_type = other DNA

SEQ ID NO: 20692 - DNA, 36 bp, synthetic construct; identical to SEQ ID NO: 5906
  misc_feature 1..36: note = Probe
  source 1..36: mol_type = other DNA

SEQ ID NO: 20693 - DNA, 33 bp, synthetic construct; identical to SEQ ID NO: 5908
  misc_feature 1..33: note = Probe
  source 1..33: mol_type = other DNA

SEQ ID NO: 20694 - DNA, 34 bp, synthetic construct; identical to SEQ ID NO: 5909
  misc_feature 1..34: note = Probe
  source 1..34: mol_type = other DNA

SEQ ID NO: 20695 - DNA, 35 bp, synthetic construct; identical to SEQ ID NO: 5910
  misc_feature 1..35: note = Probe
  source 1..35: mol_type = other DNA

SEQ ID NO: 20696 - DNA, 36 bp, synthetic construct; identical to SEQ ID NO: 5911
  misc_feature 1..36: note = Probe
  source 1..36: mol_type = other DNA

SEQ ID NO: 20697 - DNA, 37 bp, synthetic construct; identical to SEQ ID NO: 5912
  misc_feature 1..37: note = Probe
  source 1..37: mol_type = other DNA

SEQ ID NO: 20698 - DNA, 41 bp, synthetic construct; identical to SEQ ID NO: 1017
  misc_feature 1..41: note = Probe
  source 1..41: mol_type = other DNA

SEQ ID NO: 20699 - DNA, 42 bp, synthetic construct; identical to SEQ ID NO: 5913
  misc_feature 1..42: note = Probe
  source 1..42: mol_type = other DNA

SEQ ID NO: 20700 - DNA, 43 bp, synthetic construct; identical to SEQ ID NO: 5914
  misc_feature 1..43: note = Probe
  source 1..43: mol_type = other DNA

SEQ ID NO: 20701 - DNA, 45 bp, synthetic construct; identical to SEQ ID NO: 5915
  misc_feature 1..45: note = Probe
  source 1..45: mol_type = other DNA

SEQ ID NO: 20702 - DNA, 46 bp, synthetic construct; identical to SEQ ID NO: 5916
  misc_feature 1..46: note = Probe
  source 1..46: mol_type = other DNA

SEQ ID NO: 20703 - DNA, 48 bp, synthetic construct; identical to SEQ ID NO: 5918
  misc_feature 1..48: note = Probe
  source 1..48: mol_type = other DNA

SEQ ID NO: 20704 - DNA, 37 bp, synthetic construct; identical to SEQ ID NO: 5919
  misc_feature 1..37: note = Probe
  source 1..37: mol_type = other DNA

SEQ ID NO: 20705 - DNA, 38 bp, synthetic construct
  misc_feature 1..38: note = Probe
  source 1..38: mol_type = other DNA
gcattggtggttcagtggtagaattctcgcctgccatg

SEQ ID NO: 20706 - DNA, 39 bp, synthetic construct
  misc_feature 1..39: note = Probe
  source 1..39: mol_type = other DNA
gcattggtggttcagtggtagaattctcgcctgccatgc

SEQ ID NO: 20707 - DNA, 46 bp, synthetic construct
  misc_feature 1..46: note = Probe
  source 1..46: mol_type = other DNA
gcattggtggttcagtggtagaattctcgcctgccatgcgggcggc

SEQ ID NO: 20708 - DNA, 50 bp, synthetic construct; identical to SEQ ID NO: 5921
  misc_feature 1..50: note = Probe
  source 1..50: mol_type = other DNA

SEQ ID NO: 20709 - DNA, 16 bp, synthetic construct
  misc_feature 1..16: note = Probe
  source 1..16: mol_type = other DNA
gccaaggtcgcgggtt

SEQ ID NO: 20710 - DNA, 17 bp, synthetic construct
  misc_feature 1..17: note = Probe
  source 1..17: mol_type = other DNA
gccaaggtcgcgggttc

SEQ ID NO: 20711 - DNA, 27 bp, synthetic construct
  misc_feature 1..27: note = Probe
  source 1..27: mol_type = other DNA
gccaaggtcgcgggttcgatccccgta

SEQ ID NO: 20712 - DNA, 32 bp, synthetic construct
  misc_feature 1..32: note = Probe
  source 1..32: mol_type = other DNA
gccaaggtcgcgggttcgatccccgtacgggc

SEQ ID NO: 20713 - DNA, 37 bp, synthetic construct; identical to SEQ ID NO: 5922
  misc_feature 1..37: note = Probe
  source 1..37: mol_type = other DNA

SEQ ID NO: 20714 - DNA, 37 bp, synthetic construct; identical to SEQ ID NO: 5923
  misc_feature 1..37: note = Probe
  source 1..37: mol_type = other DNA

SEQ ID NO: 20715 - DNA, 37 bp, synthetic construct
  misc_feature 1..37: note = Probe
  source 1..37: mol_type = other DNA
gccaaggtcgcgggttcgatccccgtacgggccagga

SEQ ID NO: 20716 - DNA, 37 bp, synthetic construct
  misc_feature 1..37: note = Probe
  source 1..37: mol_type = other DNA
gccaaggtcgcgggttcgatccccgtacgggccaggc

SEQ ID NO: 20717 - DNA, 22 bp, synthetic construct
  misc_feature 1..22: note = Probe
  source 1..22: mol_type = other DNA
gccaatgcacgagtacagtttt

SEQ ID NO: 20718 - DNA, 25 bp, synthetic construct
  misc_feature 1..25: note = Probe
  source 1..25: mol_type = other DNA
gccacacctcagaaggtctcacttt

SEQ ID NO: 20719 - DNA, 26 bp, synthetic construct
  misc_feature 1..26: note = Probe
  source 1..26: mol_type = other DNA
gccacacctcagaaggtctcactttt

SEQ ID NO: 20720 - DNA, 39 bp, synthetic construct; identical to SEQ ID NO: 5925
  misc_feature 1..39: note = Probe
  source 1..39: mol_type = other DNA

SEQ ID NO: 20721 - DNA, 42 bp, synthetic construct; identical to SEQ ID NO: 5926
  misc_feature 1..42: note = Probe
  source 1..42: mol_type = other DNA

SEQ ID NO: 20722 - DNA, 42 bp, synthetic construct
  misc_feature 1..42: note = Probe
  source 1..42: mol_type = other DNA
gccacgcgggaggcccgggttcgattcccggccaatgcagca

SEQ ID NO: 20723 - DNA, 42 bp, synthetic construct; identical to SEQ ID NO: 5929
  misc_feature 1..42: note = Probe
  source 1..42: mol_type = other DNA

SEQ ID NO: 20724 - DNA, 22 bp, synthetic construct
  misc_feature 1..22: note = Probe
  source 1..22: mol_type = other DNA
gccacgcgggaggcccgggttt

SEQ ID NO: 20725 - DNA, 23 bp, synthetic construct
  misc_feature 1..23: note = Probe
  source 1..23: mol_type = other DNA
gccacgcgggaggcccgggtttg

SEQ ID NO: 20726 - DNA, 36 bp, synthetic construct
  misc_feature 1..36: note = Probe
  source 1..36: mol_type = other DNA
gccagagggggtatagctcagtggtagagcatttga

SEQ ID NO: 20727 - DNA, 38 bp, synthetic construct
  misc_feature 1..38: note = Probe
  source 1..38: mol_type = other DNA
gccagagggggtatagctcagtggtagagcatttgact

SEQ ID NO: 20728 - DNA, 16 bp, synthetic construct
  misc_feature 1..16: note = Probe
  source 1..16: mol_type = other DNA
gccagggattgtgggt

SEQ ID NO: 20729 - DNA, 17 bp, synthetic construct
  misc_feature 1..17: note = Probe
  source 1..17: mol_type = other DNA
gccagggattgtgggtt

SEQ ID NO: 20730 - DNA, 38 bp, synthetic construct
  misc_feature 1..38: note = Probe
  source 1..38: mol_type = other DNA
gccagggattgtgggttcgagtcccacccggggtaaag

SEQ ID NO: 20731 - DNA, 38 bp, synthetic construct
  misc_feature 1..38: note = Probe
  source 1..38: mol_type = other DNA
gccagggattgtgggttcgagtcccacctggggtgtcg

SEQ ID NO: 20732 - DNA, 28 bp, synthetic construct
  misc_feature 1..28: note = Probe
  source 1..28: mol_type = other DNA
gccagggattgtgggttcgagtcccatc

SEQ ID NO: 20733 - DNA, 31 bp, synthetic construct
  misc_feature 1..31: note = Probe
  source 1..31: mol_type = other DNA
gccagggattgtgggttcgagtcccatctgg

SEQ ID NO: 20734 - DNA, 33 bp, synthetic construct
  misc_feature 1..33: note = Probe
  source 1..33: mol_type = other DNA
gccagggattgtgggttcgagtcccatctgggg

SEQ ID NO: 20735 - DNA, 35 bp, synthetic construct
  misc_feature 1..35: note = Probe
  source 1..35: mol_type = other DNA
gccagggattgtgggttcgagtcccatctggggtg

SEQ ID NO: 20736 - DNA, 37 bp, synthetic construct
  misc_feature 1..37: note = Probe
  source 1..37: mol_type = other DNA
gccagggattgtgggttcgagtcccatctggggtggc

SEQ ID NO: 20737 - DNA, 38 bp, synthetic construct; identical to SEQ ID NO: 5932
  misc_feature 1..38: note = Probe
  source 1..38: mol_type = other DNA

SEQ ID NO: 20738 - DNA, 38 bp, synthetic construct
  misc_feature 1..38: note = Probe
  source 1..38: mol_type = other DNA
gccatcggtgcatgggtggttcagtggtagaattctcg

SEQ ID NO: 20739 - DNA, 16 bp, synthetic construct
  misc_feature 1..16: note = Probe
  source 1..16: mol_type = other DNA
gcccacccagggacgc

SEQ ID NO: 20740 - DNA, 17 bp, synthetic construct
  misc_feature 1..17: note = Probe
  source 1..17: mol_type = other DNA
gcccacccagggacgcc

SEQ ID NO: 20741 - DNA, 18 bp, synthetic construct
  misc_feature 1..18: note = Probe
  source 1..18: mol_type = other DNA
gcccacccagggacgcct

SEQ ID NO: 20742 - DNA, 27 bp, synthetic construct
  misc_feature 1..27: note = Probe
  source 1..27: mol_type = other DNA
gcccacccagggacgcgtggtgacttt

SEQ ID NO: 20743 - DNA, 28 bp, synthetic construct
  misc_feature 1..28: note = Probe
  source 1..28: mol_type = other DNA
gcccacccagggacgcgtggtgactttt

SEQ ID NO: 20744 - DNA, 26 bp, synthetic construct
  misc_feature 1..26: note = Probe
  source 1..26: mol_type = other DNA
gcccagctagctcagtcggtagagca

SEQ ID NO: 20745 - DNA, 31 bp, synthetic construct
  misc_feature 1..31: note = Probe
  source 1..31: mol_type = other DNA
gcccagctagctcagtcggtagagcataaga

SEQ ID NO: 20746 - DNA, 32 bp, synthetic construct; identical to SEQ ID NO: 5934
  misc_feature 1..32: note = Probe
  source 1..32: mol_type = other DNA

SEQ ID NO: 20747 - DNA, 33 bp, synthetic construct; identical to SEQ ID NO: 5935
  misc_feature 1..33: note = Probe
  source 1..33: mol_type = other DNA

SEQ ID NO: 20748 - DNA, 34 bp, synthetic construct
  misc_feature 1..34: note = Probe
  source 1..34: mol_type = other DNA
gcccagctagctcagtcggtagagcataagactc

SEQ ID NO: 20749 - DNA, 28 bp, synthetic construct
  misc_feature 1..28: note = Probe
  source 1..28: mol_type = other DNA
gcccagctagctcagtcggtagagcatg

SEQ ID NO: 20750 - DNA, 29 bp, synthetic construct
  misc_feature 1..29: note = Probe
  source 1..29: mol_type = other DNA
gcccagctagctcagtcggtagagcatga

SEQ ID NO: 20751 - DNA, 30 bp, synthetic construct; identical to SEQ ID NO: 10349
  misc_feature 1..30: note = Probe
  source 1..30: mol_type = other DNA

SEQ ID NO: 20752 - DNA, 31 bp, synthetic construct; identical to SEQ ID NO: 5936
  misc_feature 1..31: note = Probe
  source 1..31: mol_type = other DNA

SEQ ID NO: 20753 - DNA, 32 bp, synthetic construct; identical to SEQ ID NO: 5937
  misc_feature 1..32: note = Probe
  source 1..32: mol_type = other DNA

SEQ ID NO: 20754 - DNA, 33 bp, synthetic construct; identical to SEQ ID NO: 5938
  misc_feature 1..33: note = Probe
  source 1..33: mol_type = other DNA

SEQ ID NO: 20755 - DNA, 34 bp, synthetic construct; identical to SEQ ID NO: 5939
  misc_feature 1..34: note = Probe
  source 1..34: mol_type = other DNA

SEQ ID NO: 20756 - DNA, 36 bp, synthetic construct; identical to SEQ ID NO: 5940
  misc_feature 1..36: note = Probe
  source 1..36: mol_type = other DNA

SEQ ID NO: 20757 - DNA, 23 bp, synthetic construct
  misc_feature 1..23: note = Probe
  source 1..23: mol_type = other DNA
gcccagtagaactgacagtacct

SEQ ID NO: 20758 - DNA, 46 bp, synthetic construct; identical to SEQ ID NO: 5942
  misc_feature 1..46: note = Probe
  source 1..46: mol_type = other DNA

SEQ ID NO: 20759 - DNA, 43 bp, synthetic construct; identical to SEQ ID NO: 5948
  misc_feature 1..43: note = Probe
  source 1..43: mol_type = other DNA

SEQ ID NO: 20760 - DNA, 44 bp, synthetic construct; identical to SEQ ID NO: 5949
  misc_feature 1..44: note = Probe
  source 1..44: mol_type = other DNA

SEQ ID NO: 20761 - DNA, 20 bp, synthetic construct
  misc_feature 1..20: note = Probe
  source 1..20: mol_type = other DNA
gccccaaacccactccacct

SEQ ID NO: 20762 - DNA, 26 bp, synthetic construct
  misc_feature 1..26: note = Probe
  source 1..26: mol_type = other DNA
gccccaactaaatactaccgtatggc

SEQ ID NO: 20763 - DNA, 30 bp, synthetic construct
  misc_feature 1..30: note = Probe
  source 1..30: mol_type = other DNA
gccccacgttgggcgcgggttgtaactttt

SEQ ID NO: 20764 - DNA, 16 bp, synthetic construct
  misc_feature 1..16: note = Probe
  source 1..16: mol_type = other DNA
gccccagtggaaccac

SEQ ID NO: 20765 - DNA, 20 bp, synthetic construct
  misc_feature 1..20: note = Probe
  source 1..20: mol_type = other DNA
gccccagtggcctaatggat

SEQ ID NO: 20766 - DNA, 29 bp, synthetic construct
  misc_feature 1..29: note = Probe
  source 1..29: mol_type = other DNA
gccccagtggcctaatggataaggcattg

SEQ ID NO: 20767 - DNA, 30 bp, synthetic construct; identical to SEQ ID NO: 10357
  misc_feature 1..30: note = Probe
  source 1..30: mol_type = other DNA

SEQ ID NO: 20768 - DNA, 31 bp, synthetic construct
  misc_feature 1..31: note = Probe
  source 1..31: mol_type = other DNA
gccccagtggcctaatggataaggcattggc

SEQ ID NO: 20769 - DNA, 33 bp, synthetic construct
  misc_feature 1..33: note = Probe
  source 1..33: mol_type = other DNA
gccccagtggcctaatggataaggcattggcct

SEQ ID NO: 20770 - DNA, 34 bp, synthetic construct
  misc_feature 1..34: note = Probe
  source 1..34: mol_type = other DNA
gccccagtggcctaatggataaggcattggcctc

SEQ ID NO: 20771 - DNA, 35 bp, synthetic construct
  misc_feature 1..35: note = Probe
  source 1..35: mol_type = other DNA
gccccagtggcctaatggataaggcattggcctcc

SEQ ID NO: 20772 - DNA, 41 bp, synthetic construct
  misc_feature 1..41: note = Probe
  source 1..41: mol_type = other DNA
gccccagtggcctaatggataaggcattggcctcctaagcc

SEQ ID NO: 20773 - DNA, 15 bp, synthetic construct
  misc_feature 1..15: note = Probe
  source 1..15: mol_type = other DNA
gcccccatgtctaac

SEQ ID NO: 20774 - DNA, 16 bp, synthetic construct
  misc_feature 1..16: note = Probe
  source 1..16: mol_type = other DNA
gcccccatgtctaaca

SEQ ID NO: 20775 - DNA, 17 bp, synthetic construct
  misc_feature 1..17: note = Probe
  source 1..17: mol_type = other DNA
gcccccatgtctaacaa

SEQ ID NO: 20776 - DNA, 18 bp, synthetic construct
  misc_feature 1..18: note = Probe
  source 1..18: mol_type = other DNA
gcccccatgtctaacaac

SEQ ID NO: 20777 - DNA, 19 bp, synthetic construct
  misc_feature 1..19: note = Probe
  source 1..19: mol_type = other DNA
gcccccatgtctaacaaca

SEQ ID NO: 20778 - DNA, 20 bp, synthetic construct
  misc_feature 1..20: note = Probe
  source 1..20: mol_type = other DNA
gcccccatgtctaacaacat

SEQ ID NO: 20779 - DNA, 21 bp, synthetic construct
  misc_feature 1..21: note = Probe
  source 1..21: mol_type = other DNA
gcccccatgtctaacaacatg

SEQ ID NO: 20780 - DNA, 22 bp, synthetic construct
  misc_feature 1..22: note = Probe
  source 1..22: mol_type = other DNA
gcccccatgtctaacaacatgg

SEQ ID NO: 20781 - DNA, 23 bp, synthetic construct
  misc_feature 1..23: note = Probe
  source 1..23: mol_type = other DNA
gcccccatgtctaacaacatggc

SEQ ID NO: 20782 - DNA, 24 bp, synthetic construct
  misc_feature 1..24: note = Probe
  source 1..24: mol_type = other DNA
gcccccatgtctaacaacatggct

SEQ ID NO: 20783 - DNA, 25 bp, synthetic construct
  misc_feature 1..25: note = Probe
  source 1..25: mol_type = other DNA
gcccccatgtctaacaacatggctt

SEQ ID NO: 20784 - DNA, 26 bp, synthetic construct
  misc_feature 1..26: note = Probe
  source 1..26: mol_type = other DNA
gcccccatgtctaacaacatggcttt

SEQ ID NO: 20785 - DNA, 27 bp, synthetic construct
  misc_feature 1..27: note = Probe
  source 1..27: mol_type = other DNA
gcccccatgtctaacaacatggctttc

SEQ ID NO: 20786 - DNA, 28 bp, synthetic construct
  misc_feature 1..28: note = Probe
  source 1..28: mol_type = other DNA
gcccccatgtctaacaacatggctttct

SEQ ID NO: 20787 - DNA, 29 bp, synthetic construct
  misc_feature 1..29: note = Probe
  source 1..29: mol_type = other DNA
gcccccatgtctaacaacatggctttctc

SEQ ID NO: 20788 - DNA, 30 bp, synthetic construct; identical to SEQ ID NO: 5966
  misc_feature 1..30: note = Probe
  source 1..30: mol_type = other DNA

SEQ ID NO: 20789 - DNA, 31 bp, synthetic construct; identical to SEQ ID NO: 5967
  misc_feature 1..31: note = Probe
  source 1..31: mol_type = other DNA

SEQ ID NO: 20790 - DNA, 32 bp, synthetic construct; identical to SEQ ID NO: 5968
  misc_feature 1..32: note = Probe
  source 1..32: mol_type = other DNA

SEQ ID NO: 20791 - DNA, 33 bp, synthetic construct; identical to SEQ ID NO: 5969
  misc_feature 1..33: note = Probe
  source 1..33: mol_type = other DNA

SEQ ID NO: 20792 - DNA, 34 bp, synthetic construct; identical to SEQ ID NO: 5970
  misc_feature 1..34: note = Probe
  source 1..34: mol_type = other DNA

SEQ ID NO: 20793 - DNA, 35 bp, synthetic construct; identical to SEQ ID NO: 5971
  misc_feature 1..35: note = Probe
  source 1..35: mol_type = other DNA

SEQ ID NO: 20794 - DNA, 36 bp, synthetic construct; identical to SEQ ID NO: 5972
  misc_feature 1..36: note = Probe
  source 1..36: mol_type = other DNA

SEQ ID NO: 20795 - DNA, 37 bp, synthetic construct; identical to SEQ ID NO: 5973
  misc_feature 1..37: note = Probe
  source 1..37: mol_type = other DNA

SEQ ID NO: 20796 - DNA, 38 bp, synthetic construct; identical to SEQ ID NO: 5974
  misc_feature 1..38: note = Probe
  source 1..38: mol_type = other DNA

SEQ ID NO: 20797 - DNA, 39 bp, synthetic construct; identical to SEQ ID NO: 5975
  misc_feature 1..39: note = Probe
  source 1..39: mol_type = other DNA

SEQ ID NO: 20798 - DNA, 40 bp, synthetic construct; identical to SEQ ID NO: 5976
  misc_feature 1..40: note = Probe
  source 1..40: mol_type = other DNA

SEQ ID NO: 20799 - DNA, 24 bp, synthetic construct
  misc_feature 1..24: note = Probe
  source 1..24: mol_type = other DNA
gccccgggttcaatccccggcacc

SEQ ID NO: 20800 - DNA, 30 bp, synthetic construct
  misc_feature 1..30: note = Probe
  source 1..30: mol_type = other DNA
gccccgggttcaatccccggcacctccagc

SEQ ID NO: 20801 - DNA, 31 bp, synthetic construct
  misc_feature 1..31: note = Probe
  source 1..31: mol_type = other DNA
gccccgggttcaatccccggcatctccagac

SEQ ID NO: 20802 - DNA, 22 bp, synthetic construct
  misc_feature 1..22: note = Probe
  source 1..22: mol_type = other DNA
gccccgggttcgatccccggca

SEQ ID NO: 20803 - DNA, 26 bp, synthetic construct
  misc_feature 1..26: note = Probe
  source 1..26: mol_type = other DNA
gccccgggttcgatccccggcatctc

SEQ ID NO: 20804 - DNA, 30 bp, synthetic construct
  misc_feature 1..30: note = Probe
  source 1..30: mol_type = other DNA
gccccgggttcgatccccggcatctccatt

SEQ ID NO: 20805 - DNA, 31 bp, synthetic construct; identical to SEQ ID NO: 5979
  misc_feature 1..31: note = Probe
  source 1..31: mol_type = other DNA

SEQ ID NO: 20806 - DNA, 28 bp, synthetic construct
  misc_feature 1..28: note = Probe
  source 1..28: mol_type = other DNA
gcccctcatttacataaatattatacta

SEQ ID NO: 20807 - DNA, 31 bp, synthetic construct
  misc_feature 1..31: note = Probe
  source 1..31: mol_type = other DNA
gcccgactacctcagtcggtggagcatggga

SEQ ID NO: 20808 - DNA, 33 bp, synthetic construct; identical to SEQ ID NO: 5982
  misc_feature 1..33: note = Probe
  source 1..33: mol_type = other DNA

SEQ ID NO: 20809 - DNA, 16 bp, synthetic construct
  misc_feature 1..16: note = Probe
  source 1..16: mol_type = other DNA
gcccgcatcctccact

SEQ ID NO: 20810 - DNA, 17 bp, synthetic construct
  misc_feature 1..17: note = Probe
  source 1..17: mol_type = other DNA
gcccgcatcctccactc

SEQ ID NO: 20811 - DNA, 33 bp, synthetic construct; identical to SEQ ID NO: 5983
  misc_feature 1..33: note = Probe
  source 1..33: mol_type = other DNA

SEQ ID NO: 20812 - DNA, 34 bp, synthetic construct
  misc_feature 1..34: note = Probe
  source 1..34: mol_type = other DNA
gcccggagagctcagtgggtagagcatcagactt

SEQ ID NO: 20813 - DNA, 16 bp, synthetic construct
  misc_feature 1..16: note = Probe
  source 1..16: mol_type = other DNA
gcccggatagctcagt

SEQ ID NO: 20814 - DNA, 17 bp, synthetic construct
  misc_feature 1..17: note = Probe
  source 1..17: mol_type = other DNA
gcccggatagctcagtc

SEQ ID NO: 20815 - DNA, 38 bp, synthetic construct; identical to SEQ ID NO: 5987
  misc_feature 1..38: note = Probe
  source 1..38: mol_type = other DNA

SEQ ID NO: 20816 - DNA, 39 bp, synthetic construct; identical to SEQ ID NO: 5988
  misc_feature 1..39: note = Probe
  source 1..39: mol_type = other DNA

SEQ ID NO: 20817 - DNA, 41 bp, synthetic construct; identical to SEQ ID NO: 5989
  misc_feature 1..41: note = Probe
  source 1..41: mol_type = other DNA

SEQ ID NO: 20818 - DNA, 31 bp, synthetic construct
  misc_feature 1..31: note = Probe
  source 1..31: mol_type = other DNA
gcccggatagttcagttggtagagcatcaga

SEQ ID NO: 20819 - DNA, 32 bp, synthetic construct; identical to SEQ ID NO: 5990
  misc_feature 1..32: note = Probe
  source 1..32: mol_type = other DNA

SEQ ID NO: 20820 - DNA, 33 bp, synthetic construct; identical to SEQ ID NO: 5991
  misc_feature 1..33: note = Probe
  source 1..33: mol_type = other DNA

SEQ ID NO: 20821 - DNA, 34 bp, synthetic construct; identical to SEQ ID NO: 5992
  misc_feature 1..34: note = Probe
  source 1..34: mol_type = other DNA

SEQ ID NO: 20822 - DNA, 28 bp, synthetic construct
  misc_feature 1..28: note = Probe
  source 1..28: mol_type = other DNA
gcccggctagctcagtcgatagagcatg

SEQ ID NO: 20823 - DNA, 29 bp, synthetic construct
  misc_feature 1..29: note = Probe
  source 1..29: mol_type = other DNA
gcccggctagctcagtcgatagagcatga

SEQ ID NO: 20824 - DNA, 30 bp, synthetic construct
  misc_feature 1..30: note = Probe
  source 1..30: mol_type = other DNA
gcccggctagctcagtcgatagagcatgag

SEQ ID NO: 20825 - DNA, 32 bp, synthetic construct; identical to SEQ ID NO: 5994
  misc_feature 1..32: note = Probe
  source 1..32: mol_type = other DNA

SEQ ID NO: 20826 - DNA, 34 bp, synthetic construct; identical to SEQ ID NO: 5995
  misc_feature 1..34: note = Probe
  source 1..34: mol_type = other DNA

SEQ ID NO: 20827 - DNA, 36 bp, synthetic construct; identical to SEQ ID NO: 5996
  misc_feature 1..36: note = Probe
  source 1..36: mol_type = other DNA

SEQ ID NO: 20828 - DNA, 19 bp, synthetic construct
  misc_feature 1..19: note = Probe
  source 1..19: mol_type = other DNA
gcccggctagctcagtcgg

SEQ ID NO: 20829 - DNA, 20 bp, synthetic construct
  misc_feature 1..20: note = Probe
  source 1..20: mol_type = other DNA
gcccggctagctcagtcggt

SEQ ID NO: 20830 - DNA, 21 bp, synthetic construct
  misc_feature 1..21: note = Probe
  source 1..21: mol_type = other DNA
gcccggctagctcagtcggta

SEQ ID NO: 20831 - DNA, 37 bp, synthetic construct; identical to SEQ ID NO: 1069
  misc_feature 1..37: note = Probe
  source 1..37: mol_type = other DNA

SEQ ID NO: 20832 - DNA, 38 bp, synthetic construct
  misc_feature 1..38: note = Probe
  source 1..38: mol_type = other DNA
gcccggctagctcagtcggtagagcatgagacccttaa

SEQ ID NO: 20833 - DNA, 42 bp, synthetic construct; identical to SEQ ID NO: 1077
  misc_feature 1..42: note = Probe
  source 1..42: mol_type = other DNA

SEQ ID NO: 20834 - DNA, 43 bp, synthetic construct
  misc_feature 1..43: note = Probe
  source 1..43: mol_type = other DNA
gcccggctagctcagtcggtagagcatgagactcttaatctca

SEQ ID NO: 20835 - DNA, 43 bp, synthetic construct; identical to SEQ ID NO: 6003
  misc_feature 1..43: note = Probe
  source 1..43: mol_type = other DNA

SEQ ID NO: 20836 - DNA, 46 bp, synthetic construct; identical to SEQ ID NO: 6004
  misc_feature 1..46: note = Probe
  source 1..46: mol_type = other DNA

SEQ ID NO: 20837 - DNA, 48 bp, synthetic construct; identical to SEQ ID NO: 6005
  misc_feature 1..48: note = Probe
  source 1..48: mol_type = other DNA

SEQ ID NO: 20838 - DNA, 50 bp, synthetic construct; identical to SEQ ID NO: 6007
  misc_feature 1..50: note = Probe
  source 1..50: mol_type = other DNA

SEQ ID NO: 20839 - DNA, 30 bp, synthetic construct
  misc_feature 1..30: note = Probe
  source 1..30: mol_type = other DNA
gcccgggttcgactcccggtatgggaacaa

SEQ ID NO: 20840 - DNA, 41 bp, synthetic construct
  misc_feature 1..41: note = Probe
  source 1..41: mol_type = other DNA
gcccgggttcgactcccggtatgggaacaaaagtggctttt

SEQ ID NO: 20841 - DNA, 30 bp, synthetic construct
  misc_feature 1..30: note = Probe
  source 1..30: mol_type = other DNA
gcccgggttcgattcccggtcagggaattg

SEQ ID NO: 20842 - DNA, 30 bp, synthetic construct
  misc_feature 1..30: note = Probe
  source 1..30: mol_type = other DNA
gcccgggttcgattcccggtcatggaacca

SEQ ID NO: 20843 - DNA, 17 bp, synthetic construct
  misc_feature 1..17: note = Probe
  source 1..17: mol_type = other DNA
gcccggtaatcgcataa

SEQ ID NO: 20844 - DNA, 23 bp, synthetic construct
  misc_feature 1..23: note = Probe
  source 1..23: mol_type = other DNA
gcccggtaatcgcataaaactta

SEQ ID NO: 20845 - DNA, 28 bp, synthetic construct
  misc_feature 1..28: note = Probe
  source 1..28: mol_type = other DNA
gcccggtaatcgcataaaacttaaaact

SEQ ID NO: 20846 - DNA, 33 bp, synthetic construct
  misc_feature 1..33: note = Probe
  source 1..33: mol_type = other DNA
gcccggtaatcgcataaaacttaaaactttaca

SEQ ID NO: 20847 - DNA, 36 bp, synthetic construct
  misc_feature 1..36: note = Probe
  source 1..36: mol_type = other DNA
gcccggtaatcgcataaaacttaaaactttacagtc

SEQ ID NO: 20848 - DNA, 37 bp, synthetic construct; identical to SEQ ID NO: 1093
  misc_feature 1..37: note = Probe
  source 1..37: mol_type = other DNA

SEQ ID NO: 20849 - DNA, 34 bp, synthetic construct
  misc_feature 1..34: note = Probe
  source 1..34: mol_type = other DNA
gcccgtctctgtggcgcaatcggttagcgcgttc

SEQ ID NO: 20850 - DNA, 16 bp, synthetic construct
  misc_feature 1..16: note = Probe
  source 1..16: mol_type = other DNA
gccctcagtaagttgc

SEQ ID NO: 20851 - DNA, 31 bp, synthetic construct; identical to SEQ ID NO: 6014
  misc_feature 1..31: note = Probe
  source 1..31: mol_type = other DNA

SEQ ID NO: 20852 - DNA, 25 bp, synthetic construct
  misc_feature 1..25: note = Probe
  source 1..25: mol_type = other DNA
gccctgggttcaatccccagcacct

SEQ ID NO: 20853 - DNA, 31 bp, synthetic construct
  misc_feature 1..31: note = Probe
  source 1..31: mol_type = other DNA
gccctgggttcaatccccagcacctccatgt

SEQ ID NO: 20854 - DNA, 22 bp, synthetic construct
  misc_feature 1..22: note = Probe
  source 1..22: mol_type = other DNA
gccgaaatagctcagttgggag

SEQ ID NO: 20855 - DNA, 23 bp, synthetic construct
  misc_feature 1..23: note = Probe
  source 1..23: mol_type = other DNA
gccgaaatagctcagttgggaga

SEQ ID NO: 20856 - DNA, 25 bp, synthetic construct
  misc_feature 1..25: note = Probe
  source 1..25: mol_type = other DNA
gccgaaatagctcagttgggagagc

SEQ ID NO: 20857 - DNA, 31 bp, synthetic construct
  misc_feature 1..31: note = Probe
  source 1..31: mol_type = other DNA
gccgaggttgtgagttcgatcctcacctgga

SEQ ID NO: 20858 - DNA, 36 bp, synthetic construct
  misc_feature 1..36: note = Probe
  source 1..36: mol_type = other DNA
gccgcagcccgggttcgattcccggtcatggaacca

SEQ ID NO: 20859 - DNA, 30 bp, synthetic construct
  misc_feature 1..30: note = Probe
  source 1..30: mol_type = other DNA
gccgcgcattggtggttcagtggtagaatt

SEQ ID NO: 20860 - DNA, 33 bp, synthetic construct
  misc_feature 1..33: note = Probe
  source 1..33: mol_type = other DNA
gccgcggcccgggttcgattcccggccagggaa

SEQ ID NO: 20861 - DNA, 36 bp, synthetic construct
  misc_feature 1..36: note = Probe
  source 1..36: mol_type = other DNA
gccgcggcccgggttcgattcccggccagggaattg

SEQ ID NO: 20862 - DNA, 28 bp, synthetic construct
  misc_feature 1..28: note = Probe
  source 1..28: mol_type = other DNA
gccgcggcccgggttcgattcccggtca

SEQ ID NO: 20863 - DNA, 31 bp, synthetic construct
  misc_feature 1..31: note = Probe
  source 1..31: mol_type = other DNA
gccgcggcccgggttcgattcccggtcagga

SEQ ID NO: 20864 - DNA, 33 bp, synthetic construct
  misc_feature 1..33: note = Probe
  source 1..33: mol_type = other DNA
gccgcggcccgggttcgattcccggtcaggaaa

SEQ ID NO: 20865 - DNA, 34 bp, synthetic construct; identical to SEQ ID NO: 6023
  misc_feature 1..34: note = Probe
  source 1..34: mol_type = other DNA

SEQ ID NO: 20866 - DNA, 35 bp, synthetic construct
  misc_feature 1..35: note = Probe
  source 1..35: mol_type = other DNA
gccgcggcccgggttcgattcccggtcagggaaag

SEQ ID NO: 20867 - DNA, 36 bp, synthetic construct
  misc_feature 1..36: note = Probe
  source 1..36: mol_type = other DNA
gccgcggcccgggttcgattcccggtcagggaaaga

SEQ ID NO: 20868 - DNA, 34 bp, synthetic construct; identical to SEQ ID NO: 6024
  misc_feature 1..34: note = Probe
  source 1..34: mol_type = other DNA

SEQ ID NO: 20869 - DNA, 35 bp, synthetic construct
  misc_feature 1..35: note = Probe
  source 1..35: mol_type = other DNA
gccgcggcccgggttcgattcccggtcagggaagc

SEQ ID NO: 20870 - DNA, 36 bp, synthetic construct; identical to SEQ ID NO: 6025
  misc_feature 1..36: note = Probe
  source 1..36: mol_type = other DNA

SEQ ID NO: 20871 - DNA, 35 bp, synthetic construct
  misc_feature 1..35: note = Probe
  source 1..35: mol_type = other DNA
gccgcggcccgggttcgattcccggtcagggaagt

SEQ ID NO: 20872 - DNA, 36 bp, synthetic construct
  misc_feature 1..36: note = Probe
  source 1..36: mol_type = other DNA
gccgcggcccgggttcgattcccggtcagggaagtc

SEQ ID NO: 20873 - DNA, 36 bp, synthetic construct; identical to SEQ ID NO: 6026
  misc_feature 1..36: note = Probe
  source 1..36: mol_type = other DNA

SEQ ID NO: 20874 - DNA, 34 bp, synthetic construct; identical to SEQ ID NO: 6027
  misc_feature 1..34: note = Probe
  source 1..34: mol_type = other DNA

SEQ ID NO: 20875 - DNA, 35 bp, synthetic construct
  misc_feature 1..35: note = Probe
  source 1..35: mol_type = other DNA
gccgcggcccgggttcgattcccggtcagggaatg

SEQ ID NO: 20876 - DNA, 36 bp, synthetic construct
  misc_feature 1..36: note = Probe
  source 1..36: mol_type = other DNA
gccgcggcccgggttcgattcccggtcagggaatga

SEQ ID NO: 20877 - DNA, 35 bp, synthetic construct
  misc_feature 1..35: note = Probe
  source 1..35: mol_type = other DNA
gccgcggcccgggttcgattcccggtcagggaatt

SEQ ID NO: 20878 - DNA, 36 bp, synthetic construct; identical to SEQ ID NO: 6028
  misc_feature 1..36: note = Probe
  source 1..36: mol_type = other DNA

SEQ ID NO: 20879 - DNA, 37 bp, synthetic construct
  misc_feature 1..37: note = Probe
  source 1..37: mol_type = other DNA
gccgcggcccgggttcgattcccggtcagggaattgt

SEQ ID NO: 20880 - DNA, 23 bp, synthetic construct
  misc_feature 1..23: note = Probe
  source 1..23: mol_type = other DNA
gccgctggtgtagtggtatcatg

SEQ ID NO: 20881 - DNA, 24 bp, synthetic construct
  misc_feature 1..24: note = Probe
  source 1..24: mol_type = other DNA
gccgctggtgtagtggtatcatgc

SEQ ID NO: 20882 - DNA, 29 bp, synthetic construct
  misc_feature 1..29: note = Probe
  source 1..29: mol_type = other DNA
gccgctggtgtagtggtatcatgcaagat

SEQ ID NO: 20883 - DNA, 38 bp, synthetic construct
  misc_feature 1..38: note = Probe
  source 1..38: mol_type = other DNA
gccgctggtgtagtggtatcatgcaagattcccattct

SEQ ID NO: 20884 - DNA, 18 bp, synthetic construct
  misc_feature 1..18: note = Probe
  source 1..18: mol_type = other DNA
gccgggtactttcgtatt

SEQ ID NO: 20885 - DNA, 20 bp, synthetic construct
  misc_feature 1..20: note = Probe
  source 1..20: mol_type = other DNA
gccgggtactttcgtatttt

SEQ ID NO: 20886 - DNA, 21 bp, synthetic construct
  misc_feature 1..21: note = Probe
  source 1..21: mol_type = other DNA
gccgggtactttcgtattttt

SEQ ID NO: 20887 - DNA, 22 bp, synthetic construct
  misc_feature 1..22: note = Probe
  source 1..22: mol_type = other DNA
gccgggtactttcgtattttta

SEQ ID NO: 20888 - DNA, 30 bp, synthetic construct
  misc_feature 1..30: note = Probe
  source 1..30: mol_type = other DNA
gccgggtactttcgtatttttaaatacaga

SEQ ID NO: 20889 - DNA, 16 bp, synthetic construct
  misc_feature 1..16: note = Probe
  source 1..16: mol_type = other DNA
gccggtagtcgactcg

SEQ ID NO: 20890 - DNA, 33 bp, synthetic construct
  misc_feature 1..33: note = Probe
  source 1..33: mol_type = other DNA
gccgtcgtcctcgttagtatagtggtgagtatc

SEQ ID NO: 20891 - DNA, 38 bp, synthetic construct
  misc_feature 1..38: note = Probe
  source 1..38: mol_type = other DNA
gccgtctcccacatggtctagcggttaggattcctggt

SEQ ID NO: 20892 - DNA, 39 bp, synthetic construct
  misc_feature 1..39: note = Probe
  source 1..39: mol_type = other DNA
gccgtctcccacatggtctagcggttaggattcctggtt

SEQ ID NO: 20893 - DNA, 40 bp, synthetic construct
  misc_feature 1..40: note = Probe
  source 1..40: mol_type = other DNA
gccgtctcccacatggtctagcggttaggattcctggttt

SEQ ID NO: 20894 - DNA, 41 bp, synthetic construct
  misc_feature 1..41: note = Probe
  source 1..41: mol_type = other DNA
gccgtctcccacatggtctagcggttaggattcctggtttt

SEQ ID NO: 20895 - DNA, 17 bp, synthetic construct
  misc_feature 1..17: note = Probe
  source 1..17: mol_type = other DNA
gccgtgatcgtatagtg

SEQ ID NO: 20896 - DNA, 18 bp, synthetic construct
  misc_feature 1..18: note = Probe
  source 1..18: mol_type = other DNA
gccgtgatcgtatagtgg

SEQ ID NO: 20897 - DNA, 19 bp, synthetic construct
  misc_feature 1..19: note = Probe
  source 1..19: mol_type = other DNA
gccgtgatcgtatagtggt

SEQ ID NO: 20898 - DNA, 20 bp, synthetic construct
  misc_feature 1..20: note = Probe
  source 1..20: mol_type = other DNA
gccgtgatcgtatagtggtt

SEQ ID NO: 20899 - DNA, 21 bp, synthetic construct
  misc_feature 1..21: note = Probe
  source 1..21: mol_type = other DNA
gccgtgatcgtatagtggtta

SEQ ID NO: 20900 - DNA, 22 bp, synthetic construct
  misc_feature 1..22: note = Probe
  source 1..22: mol_type = other DNA
gccgtgatcgtatagtggttag

SEQ ID NO: 20901 - DNA, 23 bp, synthetic construct
  misc_feature 1..23: note = Probe
  source 1..23: mol_type = other DNA
gccgtgatcgtatagtggttagt

SEQ ID NO: 20902 - DNA, 24 bp, synthetic construct
  misc_feature 1..24: note = Probe
  source 1..24: mol_type = other DNA
gccgtgatcgtatagtggttagta

SEQ ID NO: 20903 - DNA, 25 bp, synthetic construct
  misc_feature 1..25: note = Probe
  source 1..25: mol_type = other DNA
gccgtgatcgtatagtggttagtac

SEQ ID NO: 20904 - DNA, 26 bp, synthetic construct
  misc_feature 1..26: note = Probe
  source 1..26: mol_type = other DNA
gccgtgatcgtatagtggttagtact

SEQ ID NO: 20905 - DNA, 27 bp, synthetic construct
  misc_feature 1..27: note = Probe
  source 1..27: mol_type = other DNA
gccgtgatcgtatagtggttagtactc

SEQ ID NO: 20906 - DNA, 28 bp, synthetic construct
  misc_feature 1..28: note = Probe
  source 1..28: mol_type = other DNA
gccgtgatcgtatagtggttagtactct

SEQ ID NO: 20907 - DNA, 29 bp, synthetic construct
  misc_feature 1..29: note = Probe
  source 1..29: mol_type = other DNA
gccgtgatcgtatagtggttagtactctg

SEQ ID NO: 20908 - DNA, 32 bp, synthetic construct; identical to SEQ ID NO: 1107
  misc_feature 1..32: note = Probe
  source 1..32: mol_type = other DNA

SEQ ID NO: 20909 - DNA, 37 bp, synthetic construct; identical to SEQ ID NO: 6039
  misc_feature 1..37: note = Probe
  source 1..37: mol_type = other DNA

SEQ ID NO: 20910 - DNA, 38 bp, synthetic construct
  misc_feature 1..38: note = Probe
  source 1..38: mol_type = other DNA
gccgtgatcgtatagtggttagtactctgcgttgtggc

SEQ ID NO: 20911 - DNA, 40 bp, synthetic construct
  misc_feature 1..40: note = Probe
  source 1..40: mol_type = other DNA
gccgtgatcgtatagtggttagtactctgcgttgtggccg

SEQ ID NO: 20912 - DNA, 41 bp, synthetic construct
  misc_feature 1..41: note = Probe
  source 1..41: mol_type = other DNA
gccgtgatcgtatagtggttagtactctgcgttgtggccgc

SEQ ID NO: 20913 - DNA, 42 bp, synthetic construct
  misc_feature 1..42: note = Probe
  source 1..42: mol_type = other DNA
gccgtgatcgtatagtggttagtactctgcgttgtggccgca

SEQ ID NO: 20914 - DNA, 50 bp, synthetic construct; identical to SEQ ID NO: 6040
  misc_feature 1..50: note = Probe
  source 1..50: mol_type = other DNA

SEQ ID NO: 20915 - DNA, 26 bp, synthetic construct
  misc_feature 1..26: note = Probe
  source 1..26: mol_type = other DNA
gcctaacacgcgaaaggtccccggtt

SEQ ID NO: 20916 - DNA, 36 bp, synthetic construct
  misc_feature 1..36: note = Probe
  source 1..36: mol_type = other DNA
gcctaccggtttccgtagtgtagcggttatcacatt

SEQ ID NO: 20917 - DNA, 16 bp, synthetic construct
  misc_feature 1..16: note = Probe
  source 1..16: mol_type = other DNA
gcctccttagcgcagt

SEQ ID NO: 20918 - DNA, 16 bp, synthetic construct
  misc_feature 1..16: note = Probe
  source 1..16: mol_type = other DNA
gcctcgttagcgcagt

SEQ ID NO: 20919 - DNA, 19 bp, synthetic construct
  misc_feature 1..19: note = Probe
  source 1..19: mol_type = other DNA
gcctcgttagcgcagtagg

SEQ ID NO: 20920 - DNA, 20 bp, synthetic construct
  misc_feature 1..20: note = Probe
  source 1..20: mol_type = other DNA
gcctcgttagcgcagtaggc

SEQ ID NO: 20921 - DNA, 20 bp, synthetic construct
  misc_feature 1..20: note = Probe
  source 1..20: mol_type = other DNA
gcctcgttagcgcagtaggt

SEQ ID NO: 20922 - DNA, 21 bp, synthetic construct
  misc_feature 1..21: note = Probe
  source 1..21: mol_type = other DNA
gcctcgttagcgcagtaggta

SEQ ID NO: 20923 - DNA, 23 bp, synthetic construct
  misc_feature 1..23: note = Probe
  source 1..23: mol_type = other DNA
gcctcgttagcgcagtaggtagc

SEQ ID NO: 20924 - DNA, 25 bp, synthetic construct
  misc_feature 1..25: note = Probe
  source 1..25: mol_type = other DNA
gcctcgttagcgcagtaggtagcgc

SEQ ID NO: 20925 - DNA, 31 bp, synthetic construct; identical to SEQ ID NO: 6052
  misc_feature 1..31: note = Probe
  source 1..31: mol_type = other DNA

SEQ ID NO: 20926 - DNA, 33 bp, synthetic construct; identical to SEQ ID NO: 1113
  misc_feature 1..33: note = Probe
  source 1..33: mol_type = other DNA

SEQ ID NO: 20927 - DNA, 36 bp, synthetic construct
  misc_feature 1..36: note = Probe
  source 1..36: mol_type = other DNA
gcctcgttagcgcagtaggtagcgcgtcagtctcat

SEQ ID NO: 20928 - DNA, 29 bp, synthetic construct
  misc_feature 1..29: note = Probe
  source 1..29: mol_type = other DNA
gcctgatatccaaccttcagctatagggt

SEQ ID NO: 20929 - DNA, 20 bp, synthetic construct
  misc_feature 1..20: note = Probe
  source 1..20: mol_type = other DNA
gcctgccacgcgggaggccc

SEQ ID NO: 20930 - DNA, 46 bp, synthetic construct
  misc_feature 1..46: note = Probe
  source 1..46: mol_type = other DNA
gcctgccacgcgggaggcccgggttcgattcccggccaatgcaagt

SEQ ID NO: 20931 - DNA, 46 bp, synthetic construct
  misc_feature 1..46: note = Probe
  source 1..46: mol_type = other DNA
gcctgccacgcgggaggcccgggttcgattcccggccaatgcacga

SEQ ID NO: 20932 - DNA, 46 bp, synthetic construct
  misc_feature 1..46: note = Probe
  source 1..46: mol_type = other DNA
gcctgccacgcgggaggcccgggttcgattcccggccaatgcactt

SEQ ID NO: 20933 - DNA, 46 bp, synthetic construct
  misc_feature 1..46: note = Probe
  source 1..46: mol_type = other DNA
gcctgccacgcgggaggcccgggttcgattcccggccaatgcagca

SEQ ID NO: 20934 - DNA, 40 bp, synthetic construct
  misc_feature 1..40: note = Probe
  source 1..40: mol_type = other DNA
gcctgccacgcgggaggcccgggttcgattcccggcccat

SEQ ID NO: 20935 - DNA, 46 bp, synthetic construct
  misc_feature 1..46: note = Probe
  source 1..46: mol_type = other DNA
gcctgccacgcgggaggcccgggttcgattcccggcccatgcagca

SEQ ID NO: 20936 - DNA, 50 bp, synthetic construct
  misc_feature 1..50: note = Probe
  source 1..50: mol_type = other DNA
gcctgccacgcgggaggcccgggttcgattcccggcccatgcagcacgaa

SEQ ID NO: 20937 - DNA, 49 bp, synthetic construct
  misc_feature 1..49: note = Probe
  source 1..49: mol_type = other DNA
gcctgccacgcgggaggcccgggttcgattcccggcccatgcagcacgc

SEQ ID NO: 20938 - DNA, 50 bp, synthetic construct
  misc_feature 1..50: note = Probe
  source 1..50: mol_type = other DNA
gcctgccacgcgggaggcccgggttcgattcccggcccatgcagcacgcc

SEQ ID NO: 20939 - DNA, 26 bp, synthetic construct
  misc_feature 1..26: note = Probe
  source 1..26: mol_type = other DNA
gcctgccacgcgggaggcccgggttt

SEQ ID NO: 20940 - DNA, 26 bp, synthetic construct
  misc_feature 1..26: note = Probe
  source 1..26: mol_type = other DNA
gcctggatagctcagtcggtagagca

SEQ ID NO: 20941 - DNA, 29 bp, synthetic construct
  misc_feature 1..29: note = Probe
  source 1..29: mol_type = other DNA
gcctggatagctcagtcggtagagcatca

SEQ ID NO: 20942 - DNA, 30 bp, synthetic construct; identical to SEQ ID NO: 10425
  misc_feature 1..30: note = Probe
  source 1..30: mol_type = other DNA

SEQ ID NO: 20943 - DNA, 26 bp, synthetic construct
  misc_feature 1..26: note = Probe
  source 1..26: mol_type = other DNA
gcctggatagctcagttggtagagca

SEQ ID NO: 20944 - DNA, 35 bp, synthetic construct; identical to SEQ ID NO: 1124
  misc_feature 1..35: note = Probe
  source 1..35: mol_type = other DNA

SEQ ID NO: 20945 - DNA, 36 bp, synthetic construct; identical to SEQ ID NO: 1125
  misc_feature 1..36: note = Probe
  source 1..36: mol_type = other DNA

SEQ ID NO: 20946 - DNA, 26 bp, synthetic construct
  misc_feature 1..26: note = Probe
  source 1..26: mol_type = other DNA
gcctgggtagctcagtcggtagagca

SEQ ID NO: 20947 - DNA, 29 bp, synthetic construct
  misc_feature 1..29: note = Probe
  source 1..29: mol_type = other DNA
gcctgggtagctcagtcggtagagcatca

SEQ ID NO: 20948 - DNA, 35 bp, synthetic construct; identical to SEQ ID NO: 1129
  misc_feature 1..35: note = Probe
  source 1..35: mol_type = other DNA

SEQ ID NO: 20949 - DNA, 36 bp, synthetic construct; identical to SEQ ID NO: 1130
  misc_feature 1..36: note = Probe
  source 1..36: mol_type = other DNA

SEQ ID NO: 20950 - DNA, 17 bp, synthetic construct
  misc_feature 1..17: note = Probe
  source 1..17: mol_type = other DNA
gcctgtcacgcgggaga

SEQ ID NO: 20951 - DNA, 23 bp, synthetic construct
  misc_feature 1..23: note = Probe
  source 1..23: mol_type = other DNA
gcctgtcacgcgggagaccgggg

SEQ ID NO: 20952 - DNA, 26 bp, synthetic construct
  misc_feature 1..26: note = Probe
  source 1..26: mol_type = other DNA
gcctgtcacgcgggagaccggggttc

SEQ ID NO: 20953 - DNA, 28 bp, synthetic construct
  misc_feature 1..28: note = Probe
  source 1..28: mol_type = other DNA
gcctgtcacgcgggagaccggggttcaa

SEQ ID NO: 20954 - DNA, 36 bp, synthetic construct
  misc_feature 1..36: note = Probe
  source 1..36: mol_type = other DNA
gcctgtcacgcgggagaccggggttcaattccccga

SEQ ID NO: 20955 - DNA, 38 bp, synthetic construct
  misc_feature 1..38: note = Probe
  source 1..38: mol_type = other DNA
gcctgtcacgcgggagaccggggttcaattccccgacg

SEQ ID NO: 20956 - DNA, 42 bp, synthetic construct
  misc_feature 1..42: note = Probe
  source 1..42: mol_type = other DNA
gcctgtcacgcgggagaccggggttcaattccccgacgggga

SEQ ID NO: 20957 - DNA, 46 bp, synthetic construct; identical to SEQ ID NO: 6060
  misc_feature 1..46: note = Probe
  source 1..46: mol_type = other DNA

SEQ ID NO: 20958 - DNA, 49 bp, synthetic construct; identical to SEQ ID NO: 6061
  misc_feature 1..49: note = Probe
  source 1..49: mol_type = other DNA

SEQ ID NO: 20959 - DNA, 50 bp, synthetic construct
  misc_feature 1..50: note = Probe
  source 1..50: mol_type = other DNA
gcctgtcacgcgggagaccggggttcaattccccgacggggaggtgtgta

SEQ ID NO: 20960 - DNA, 27 bp, synthetic construct
  misc_feature 1..27: note = Probe
  source 1..27: mol_type = other DNA
gcctgtcacgcgggagaccggggttcg

SEQ ID NO: 20961 - DNA, 29 bp, synthetic construct
  misc_feature 1..29: note = Probe
  source 1..29: mol_type = other DNA
gcctgtcacgcgggagaccggggttcgat

SEQ ID NO: 20962 - DNA, 30 bp, synthetic construct
  misc_feature 1..30: note = Probe
  source 1..30: mol_type = other DNA
gcctgtcacgcgggagaccggggttcgatt

SEQ ID NO: 20963 - DNA, 31 bp, synthetic construct
  misc_feature 1..31: note = Probe
  source 1..31: mol_type = other DNA
gcctgtcacgcgggagaccggggttcgattc

SEQ ID NO: 20964 - DNA, 46 bp, synthetic construct
  misc_feature 1..46: note = Probe
  source 1..46: mol_type = other DNA
gcctgtcacgcgggagaccggggttcgattccccaacggggaggct

SEQ ID NO: 20965 - DNA, 37 bp, synthetic construct
  misc_feature 1..37: note = Probe
  source 1..37: mol_type = other DNA
gcctgtcacgcgggagaccggggttcgattccccgac

SEQ ID NO: 20966 - DNA, 42 bp, synthetic construct
  misc_feature 1..42: note = Probe
  source 1..42: mol_type = other DNA
gcctgtcacgcgggagaccggggttcgattccccgacgggga

SEQ ID NO: 20967 - DNA, 44 bp, synthetic construct; identical to SEQ ID NO: 6062
  misc_feature 1..44: note = Probe
  source 1..44: mol_type = other DNA

SEQ ID NO: 20968 - DNA, 46 bp, synthetic construct
  misc_feature 1..46: note = Probe
  source 1..46: mol_type = other DNA
gcctgtcacgcgggagaccggggttcgattccccgacggggagaaa

SEQ ID NO: 20969 - DNA, 50 bp, synthetic construct; identical to SEQ ID NO: 6063
  misc_feature 1..50: note = Probe
  source 1..50: mol_type = other DNA

SEQ ID NO: 20970 - DNA, 46 bp, synthetic construct; identical to SEQ ID NO: 6064
  misc_feature 1..46: note = Probe
  source 1..46: mol_type = other DNA

SEQ ID NO: 20971 - DNA, 44 bp, synthetic construct; identical to SEQ ID NO: 6065
  misc_feature 1..44: note = Probe
  source 1..44: mol_type = other DNA

SEQ ID NO: 20972 - DNA, 46 bp, synthetic construct
  misc_feature 1..46: note = Probe
  source 1..46: mol_type = other DNA
gcctgtcacgcgggagaccggggttcgattccccgacggggaggag

SEQ ID NO: 20973 - DNA, 50 bp, synthetic construct
  misc_feature 1..50: note = Probe
  source 1..50: mol_type = other DNA
gcctgtcacgcgggagaccggggttcgattccccgacggggaggaggctt

SEQ ID NO: 20974 - DNA, 46 bp, synthetic construct; identical to SEQ ID NO: 6066
  misc_feature 1..46: note = Probe
  source 1..46: mol_type = other DNA

SEQ ID NO: 20975 - DNA, 49 bp, synthetic construct; identical to SEQ ID NO: 6067
  misc_feature 1..49: note = Probe
  source 1..49: mol_type = other DNA

SEQ ID NO: 20976 - DNA, 50 bp, synthetic construct; identical to SEQ ID NO: 6068
  misc_feature 1..50: note = Probe
  source 1..50: mol_type = other DNA

SEQ ID NO: 20977 - DNA, 49 bp, synthetic construct; identical to SEQ ID NO: 6069
  misc_feature 1..49: note = Probe
  source 1..49: mol_type = other DNA

SEQ ID NO: 20978 - DNA, 50 bp, synthetic construct
  misc_feature 1..50: note = Probe
  source 1..50: mol_type = other DNA
gcctgtcacgcgggagaccggggttcgattccccgacggggaggcagccg

SEQ ID NO: 20979 - DNA, 46 bp, synthetic construct; identical to SEQ ID NO: 6070
  misc_feature 1..46: note = Probe
  source 1..46: mol_type = other DNA

SEQ ID NO: 20980 - DNA, 50 bp, synthetic construct
  misc_feature 1..50: note = Probe
  source 1..50: mol_type = other DNA
gcctgtcacgcgggagaccggggttcgattccccgacggggaggccaagt

SEQ ID NO: 20981 - DNA, 50 bp, synthetic construct
  misc_feature 1..50: note = Probe
  source 1..50: mol_type = other DNA
gcctgtcacgcgggagaccggggttcgattccccgacggggaggccgggt

SEQ ID NO: 20982 - DNA, 21 bp, synthetic construct
  misc_feature 1..21: note = Probe
  source 1..21: mol_type = other DNA
gcctgtgacttttgtcctttt

SEQ ID NO: 20983 - DNA, 22 bp, synthetic construct
  misc_feature 1..22: note = Probe
  source 1..22: mol_type = other DNA
gcctgtgacttttgtccttttt

SEQ ID NO: 20984 - DNA, 21 bp, synthetic construct
  misc_feature 1..21: note = Probe
  source 1..21: mol_type = other DNA
gccttaattttaataatcaac

SEQ ID NO: 20985 - DNA, 46 bp, synthetic construct
  misc_feature 1..46: note = Probe
  source 1..46: mol_type = other DNA
gccttccaagcagttgacccgggttcgattcccggccaacgcaagt

SEQ ID NO: 20986 - DNA, 46 bp, synthetic construct
  misc_feature 1..46: note = Probe
  source 1..46: mol_type = other DNA
gccttccaagcagttgacccgggttcgattcccggccaacgcagtg

SEQ ID NO: 20987 - DNA, 30 bp, synthetic construct
  misc_feature 1..30: note = Probe
  source 1..30: mol_type = other DNA
gccttccttcgttggctctgcctgccaact

SEQ ID NO: 20988 - DNA, 33 bp, synthetic construct
  misc_feature 1..33: note = Probe
  source 1..33: mol_type = other DNA
gccttgcgaaactactttcttgattcaggtgtt

SEQ ID NO: 20989 - DNA, 32 bp, synthetic construct; identical to SEQ ID NO: 6071
  misc_feature 1..32: note = Probe
  source 1..32: mol_type = other DNA

SEQ ID NO: 20990 - DNA, 25 bp, synthetic construct
  misc_feature 1..25: note = Probe
  source 1..25: mol_type = other DNA
gccttttttcccggcggcgggagaa

SEQ ID NO: 20991 - DNA, 27 bp, synthetic construct
  misc_feature 1..27: note = Probe
  source 1..27: mol_type = other DNA
gccttttttcccggcggcgggagaagt

SEQ ID NO: 20992 - DNA, 28 bp, synthetic construct
  misc_feature 1..28: note = Probe
  source 1..28: mol_type = other DNA
gcgaaactactttcttgattcaggtgtt

SEQ ID NO: 20993 - DNA, 29 bp, synthetic construct
  misc_feature 1..29: note = Probe
  source 1..29: mol_type = other DNA
gcgaaactactttcttgattcaggtgttt

SEQ ID NO: 20994 - DNA, 31 bp, synthetic construct
  misc_feature 1..31: note = Probe
  source 1..31: mol_type = other DNA
gcgaaaggtccccggttcgaaaccgggcgga

SEQ ID NO: 20995 - DNA, 32 bp, synthetic construct; identical to SEQ ID NO: 6077
  misc_feature 1..32: note = Probe
  source 1..32: mol_type = other DNA

SEQ ID NO: 20996 - DNA, 33 bp, synthetic construct
  misc_feature 1..33: note = Probe
  source 1..33: mol_type = other DNA
gcgaaaggtccccggttcgaaaccgggcggaaa

SEQ ID NO: 20997 - DNA, 38 bp, synthetic construct; identical to SEQ ID NO: 6078
  misc_feature 1..38: note = Probe
  source 1..38: mol_type = other DNA

SEQ ID NO: 20998 - DNA, 38 bp, synthetic construct
  misc_feature 1..38: note = Probe
  source 1..38: mol_type = other DNA
gcgaaaggtccccggttcgatcccgggcggaaacaggt

SEQ ID NO: 20999 - DNA, 33 bp, synthetic construct; identical to SEQ ID NO: 6080
  misc_feature 1..33: note = Probe
  source 1..33: mol_type = other DNA

SEQ ID NO: 21000 - DNA, 16 bp, synthetic construct
  misc_feature 1..16: note = Probe
  source 1..16: mol_type = other DNA
gcgagaggtcccgggt

SEQ ID NO: 21001 - DNA, 17 bp, synthetic construct
  misc_feature 1..17: note = Probe
  source 1..17: mol_type = other DNA
gcgagaggtcccgggtt

SEQ ID NO: 21002 - DNA, 31 bp, synthetic construct
  misc_feature 1..31: note = Probe
  source 1..31: mol_type = other DNA
gcgagaggtcccgggttcaaatcccggacga

SEQ ID NO: 21003 - DNA, 32 bp, synthetic construct
  misc_feature 1..32: note = Probe
  source 1..32: mol_type = other DNA
gcgagaggtcccgggttcaaatcccggacgag

SEQ ID NO: 21004 - DNA, 33 bp, synthetic construct
  misc_feature 1..33: note = Probe
  source 1..33: mol_type = other DNA
gcgagaggtcccgggttcaaatcccggacgagc

SEQ ID NO: 21005 - DNA, 34 bp, synthetic construct
  misc_feature 1..34: note = Probe
  source 1..34: mol_type = other DNA
gcgagaggtcccgggttcaaatcccggacgagcc

SEQ ID NO: 21006 - DNA, 35 bp, synthetic construct
  misc_feature 1..35: note = Probe
  source 1..35: mol_type = other DNA
gcgagaggtcccgggttcaaatcccggacgagccc

SEQ ID NO: 21007 - DNA, 38 bp, synthetic construct
  misc_feature 1..38: note = Probe
  source 1..38: mol_type = other DNA
gcgagaggtcccgggttcaaatcccggacgagccccct

SEQ ID NO: 21008 - DNA, 25 bp, synthetic construct
  misc_feature 1..25: note = Probe
  source 1..25: mol_type = other DNA
gcgaggcattggtggttcagtggta

SEQ ID NO: 21009 - DNA, 27 bp, synthetic construct
  misc_feature 1..27: note = Probe
  source 1..27: mol_type = other DNA
gcgaggcattggtggttcagtggtaga

SEQ ID NO: 21010 - DNA, 28 bp, synthetic construct
  misc_feature 1..28: note = Probe
  source 1..28: mol_type = other DNA
gcgaggcattggtggttcagtggtagaa

SEQ ID NO: 21011 - DNA, 30 bp, synthetic construct
  misc_feature 1..30: note = Probe
  source 1..30: mol_type = other DNA
gcgaggcattggtggttcagtggtagaatt

SEQ ID NO: 21012 - DNA, 31 bp, synthetic construct
  misc_feature 1..31: note = Probe
  source 1..31: mol_type = other DNA
gcgaggcattggtggttcagtggtagaattc

SEQ ID NO: 21013 - DNA, 32 bp, synthetic construct
  misc_feature 1..32: note = Probe
  source 1..32: mol_type = other DNA
gcgaggcattggtggttcagtggtagaattct

SEQ ID NO: 21014 - DNA, 34 bp, synthetic construct
  misc_feature 1..34: note = Probe
  source 1..34: mol_type = other DNA
gcgaggcattggtggttcagtggtagaattctcg

SEQ ID NO: 21015 - DNA, 27 bp, synthetic construct
  misc_feature 1..27: note = Probe
  source 1..27: mol_type = other DNA
gcgatccgagttcaaatctcggtggaa

SEQ ID NO: 21016 - DNA, 31 bp, synthetic construct
  misc_feature 1..31: note = Probe
  source 1..31: mol_type = other DNA
gcgatccgagttcaaatctcggtggaacctg

SEQ ID NO: 21017 - DNA, 33 bp, synthetic construct; identical to SEQ ID NO: 6084
  misc_feature 1..33: note = Probe
  source 1..33: mol_type = other DNA

SEQ ID NO: 21018 - DNA, 31 bp, synthetic construct
  misc_feature 1..31: note = Probe
  source 1..31: mol_type = other DNA
gcgatccgagttcaaatctcggtggaacctt

SEQ ID NO: 21019 - DNA, 33 bp, synthetic construct; identical to SEQ ID NO: 6086
  misc_feature 1..33: note = Probe
  source 1..33: mol_type = other DNA

SEQ ID NO: 21020 - DNA, 27 bp, synthetic construct
  misc_feature 1..27: note = Probe
  source 1..27: mol_type = other DNA
gcgatccgagttcaagtctcggtggaa

SEQ ID NO: 21021 - DNA, 24 bp, synthetic construct
  misc_feature 1..24: note = Probe
  source 1..24: mol_type = other DNA
gcgcagcggaagcgtgctgggccc

SEQ ID NO: 21022 - DNA, 25 bp, synthetic construct
  misc_feature 1..25: note = Probe
  source 1..25: mol_type = other DNA
gcgcagcggaagcgtgctgggccca

SEQ ID NO: 21023 - DNA, 36 bp, synthetic construct
  misc_feature 1..36: note = Probe
  source 1..36: mol_type = other DNA
gcgcagggccagtggcgcaatggataacgcgtctga

SEQ ID NO: 21024 - DNA, 39 bp, synthetic construct
  misc_feature 1..39: note = Probe
  source 1..39: mol_type = other DNA
gcgcagggccagtggcgcaatggataacgcgtctgacta

SEQ ID NO: 21025 - DNA, 33 bp, synthetic construct
  misc_feature 1..33: note = Probe
  source 1..33: mol_type = other DNA
gcgcattggtggttcagtggtagaattctcgcc

SEQ ID NO: 21026 - DNA, 36 bp, synthetic construct
  misc_feature 1..36: note = Probe
  source 1..36: mol_type = other DNA
gcgccagactcaaggtaagcaccttgcctgcgggct

SEQ ID NO: 21027 - DNA, 28 bp, synthetic construct
  misc_feature 1..28: note = Probe
  source 1..28: mol_type = other DNA
gcgcccggatagctcagtcggtagagca

SEQ ID NO: 21028 - DNA, 33 bp, synthetic construct
  misc_feature 1..33: note = Probe
  source 1..33: mol_type = other DNA
gcgcccggatagctcagtcggtagagcatcaga

SEQ ID NO: 21029 - DNA, 38 bp, synthetic construct
  misc_feature 1..38: note = Probe
  source 1..38: mol_type = other DNA
gcgcccggatagctcagtcggtagagcatcagactttt

SEQ ID NO: 21030 - DNA, 18 bp, synthetic construct
  misc_feature 1..18: note = Probe
  source 1..18: mol_type = other DNA
gcgccgctggtgtagtgg

SEQ ID NO: 21031 - DNA, 19 bp, synthetic construct
  misc_feature 1..19: note = Probe
  source 1..19: mol_type = other DNA
gcgccgctggtgtagtggt

SEQ ID NO: 21032 - DNA, 24 bp, synthetic construct
  misc_feature 1..24: note = Probe
  source 1..24: mol_type = other DNA
gcgccgctggtgtagtggtatcat

SEQ ID NO: 21033 - DNA, 37 bp, synthetic construct; identical to SEQ ID NO: 1156
  misc_feature 1..37: note = Probe
  source 1..37: mol_type = other DNA

SEQ ID NO: 21034 - DNA, 38 bp, synthetic construct; identical to SEQ ID NO: 6089
  misc_feature 1..38: note = Probe
  source 1..38: mol_type = other DNA

SEQ ID NO: 21035 - DNA, 42 bp, synthetic construct; identical to SEQ ID NO: 6090
  misc_feature 1..42: note = Probe
  source 1..42: mol_type = other DNA

SEQ ID NO: 21036 - DNA, 43 bp, synthetic construct; identical to SEQ ID NO: 6091
  misc_feature 1..43: note = Probe
  source 1..43: mol_type = other DNA

SEQ ID NO: 21037 - DNA, 47 bp, synthetic construct; identical to SEQ ID NO: 6094
  misc_feature 1..47: note = Probe
  source 1..47: mol_type = other DNA

SEQ ID NO: 21038 - DNA, 48 bp, synthetic construct; identical to SEQ ID NO: 6095
  misc_feature 1..48: note = Probe
  source 1..48: mol_type = other DNA

SEQ ID NO: 21039 - DNA, 33 bp, synthetic construct
  misc_feature 1..33: note = Probe
  source 1..33: mol_type = other DNA
gcgcgggggtatagctcagtggtagagcatttg

SEQ ID NO: 21040 - DNA, 25 bp, synthetic construct
  misc_feature 1..25: note = Probe
  source 1..25: mol_type = other DNA
gcgctctcaccgccgcggcccgggt

SEQ ID NO: 21041 - DNA, 27 bp, synthetic construct
  misc_feature 1..27: note = Probe
  source 1..27: mol_type = other DNA
gcgctctcaccgccgcggcccgggttc

SEQ ID NO: 21042 - DNA, 41 bp, synthetic construct
  misc_feature 1..41: note = Probe
  source 1..41: mol_type = other DNA
gcgctctcaccgccgcggcccgggttcgattcccggtcagg

SEQ ID NO: 21043 - DNA, 42 bp, synthetic construct
  misc_feature 1..42: note = Probe
  source 1..42: mol_type = other DNA
gcgctctcaccgccgcggcccgggttcgattcccggtcagga

SEQ ID NO: 21044 - DNA, 42 bp, synthetic construct
  misc_feature 1..42: note = Probe
  source 1..42: mol_type = other DNA
gcgctctcaccgccgcggcccgggttcgattcccggtcaggg

SEQ ID NO: 21045 - DNA, 50 bp, synthetic construct
  misc_feature 1..50: note = Probe
  source 1..50: mol_type = other DNA
gcgctctcaccgccgcggcccgggttcgattcccggtcagggaaagagta

SEQ ID NO: 21046 - DNA, 50 bp, synthetic construct; identical to SEQ ID NO: 6097
  misc_feature 1..50: note = Probe
  source 1..50: mol_type = other DNA

SEQ ID NO: 21047 - DNA, 19 bp, synthetic construct
  misc_feature 1..19: note = Probe
  source 1..19: mol_type = other DNA
gcggaagcgtgctgggccc

SEQ ID NO: 21048 - DNA, 35 bp, synthetic construct; identical to SEQ ID NO: 1163
  misc_feature 1..35: note = Probe
  source 1..35: mol_type = other DNA

SEQ ID NO: 21049 - DNA, 38 bp, synthetic construct
  misc_feature 1..38: note = Probe
  source 1..38: mol_type = other DNA
gcggaagcgtgctgggcccataacccagaggtcgatgg

SEQ ID NO: 21050 - DNA, 39 bp, synthetic construct
  misc_feature 1..39: note = Probe
  source 1..39: mol_type = other DNA
gcggaagcgtgctgggcccataacccagaggtcgatgga

SEQ ID NO: 21051 - DNA, 40 bp, synthetic construct
  misc_feature 1..40: note = Probe
  source 1..40: mol_type = other DNA
gcggaagcgtgctgggcccataacccagaggtcgatggat

SEQ ID NO: 21052 - DNA, 26 bp, synthetic construct
  misc_feature 1..26: note = Probe
  source 1..26: mol_type = other DNA
gcggcccgggttcgactcccggtgtg

SEQ ID NO: 21053 - DNA, 27 bp, synthetic construct
  misc_feature 1..27: note = Probe
  source 1..27: mol_type = other DNA
gcggcccgggttcgactcccggtgtgg

SEQ ID NO: 21054 - DNA, 28 bp, synthetic construct
  misc_feature 1..28: note = Probe
  source 1..28: mol_type = other DNA
gcggcccgggttcgactcccggtgtggg

SEQ ID NO: 21055 - DNA, 29 bp, synthetic construct
  misc_feature 1..29: note = Probe
  source 1..29: mol_type = other DNA
gcggcccgggttcgactcccggtgtggga

SEQ ID NO: 21056 - DNA, 33 bp, synthetic construct; identical to SEQ ID NO: 6099
  misc_feature 1..33: note = Probe
  source 1..33: mol_type = other DNA

SEQ ID NO: 21057 - DNA, 25 bp, synthetic construct
  misc_feature 1..25: note = Probe
  source 1..25: mol_type = other DNA
gcggcccgggttcgattcccggtca

SEQ ID NO: 21058 - DNA, 26 bp, synthetic construct
  misc_feature 1..26: note = Probe
  source 1..26: mol_type = other DNA
gcggcccgggttcgattcccggtcag

SEQ ID NO: 21059 - DNA, 28 bp, synthetic construct
  misc_feature 1..28: note = Probe
  source 1..28: mol_type = other DNA
gcggcccgggttcgattcccggtcaggg

SEQ ID NO: 21060 - DNA, 31 bp, synthetic construct; identical to SEQ ID NO: 6101
  misc_feature 1..31: note = Probe
  source 1..31: mol_type = other DNA

SEQ ID NO: 21061 - DNA, 31 bp, synthetic construct; identical to SEQ ID NO: 6102
  misc_feature 1..31: note = Probe
  source 1..31: mol_type = other DNA

SEQ ID NO: 21062 - DNA, 32 bp, synthetic construct
  misc_feature 1..32: note = Probe
  source 1..32: mol_type = other DNA
gcggcccgggttcgattcccggtcagggaagc

SEQ ID NO: 21063 - DNA, 33 bp, synthetic construct
  misc_feature 1..33: note = Probe
  source 1..33: mol_type = other DNA
gcggcccgggttcgattcccggtcagggaagcc

SEQ ID NO: 21064 - DNA, 31 bp, synthetic construct; identical to SEQ ID NO: 6103
  misc_feature 1..31: note = Probe
  source 1..31: mol_type = other DNA

SEQ ID NO: 21065 - DNA, 33 bp, synthetic construct; identical to SEQ ID NO: 6104
  misc_feature 1..33: note = Probe
  source 1..33: mol_type = other DNA

SEQ ID NO: 21066 - DNA, 19 bp, synthetic construct
  misc_feature 1..19: note = Probe
  source 1..19: mol_type = other DNA
gcggcttagcctgtggctc

SEQ ID NO: 21067 - DNA, 31 bp, synthetic construct
  misc_feature 1..31: note = Probe
  source 1..31: mol_type = other DNA
gcgggagacccgggttcaattcccggccaat

SEQ ID NO: 21068 - DNA, 16 bp, synthetic construct
  misc_feature 1..16: note = Probe
  source 1..16: mol_type = other DNA
gcgggagaccggggtt

SEQ ID NO: 21069 - DNA, 17 bp, synthetic construct
  misc_feature 1..17: note = Probe
  source 1..17: mol_type = other DNA
gcgggagaccggggttc

SEQ ID NO: 21070 - DNA, 28 bp, synthetic construct
  misc_feature 1..28: note = Probe
  source 1..28: mol_type = other DNA
gcgggagaccggggttcaattccccgac

SEQ ID NO: 21071 - DNA, 29 bp, synthetic construct
  misc_feature 1..29: note = Probe
  source 1..29: mol_type = other DNA
gcgggagaccggggttcaattccccgacg

SEQ ID NO: 21072 - DNA, 35 bp, synthetic construct; identical to SEQ ID NO: 6108
  misc_feature 1..35: note = Probe
  source 1..35: mol_type = other DNA

SEQ ID NO: 21073 - DNA, 36 bp, synthetic construct
  misc_feature 1..36: note = Probe
  source 1..36: mol_type = other DNA
gcgggagaccggggttcaattccccgacggggaggt

SEQ ID NO: 21074 - DNA, 37 bp, synthetic construct; identical to SEQ ID NO: 6109
  misc_feature 1..37: note = Probe
  source 1..37: mol_type = other DNA

SEQ ID NO: 21075 - DNA, 19 bp, synthetic construct
  misc_feature 1..19: note = Probe
  source 1..19: mol_type = other DNA
gcgggagaccggggttcga

SEQ ID NO: 21076 - DNA, 20 bp, synthetic construct
  misc_feature 1..20: note = Probe
  source 1..20: mol_type = other DNA
gcgggagaccggggttcgat

SEQ ID NO: 21077 - DNA, 21 bp, synthetic construct
  misc_feature 1..21: note = Probe
  source 1..21: mol_type = other DNA
gcgggagaccggggttcgatt

SEQ ID NO: 21078 - DNA, 31 bp, synthetic construct
  misc_feature 1..31: note = Probe
  source 1..31: mol_type = other DNA
gcgggagaccggggttcgattccccaacggg

SEQ ID NO: 21079 - DNA, 33 bp, synthetic construct
  misc_feature 1..33: note = Probe
  source 1..33: mol_type = other DNA
gcgggagaccggggttcgattccccaacgggga

SEQ ID NO: 21080 - DNA, 37 bp, synthetic construct
  misc_feature 1..37: note = Probe
  source 1..37: mol_type = other DNA
gcgggagaccggggttcgattccccaacggggaggct

SEQ ID NO: 21081 - DNA, 35 bp, synthetic construct; identical to SEQ ID NO: 6112
  misc_feature 1..35: note = Probe
  source 1..35: mol_type = other DNA

SEQ ID NO: 21082 - DNA, 36 bp, synthetic construct; identical to SEQ ID NO: 6113
  misc_feature 1..36: note = Probe
  source 1..36: mol_type = other DNA

SEQ ID NO: 21083 - DNA, 37 bp, synthetic construct; identical to SEQ ID NO: 6114
  misc_feature 1..37: note = Probe
  source 1..37: mol_type = other DNA

SEQ ID NO: 21084 - DNA, 36 bp, synthetic construct; identical to SEQ ID NO: 6115
  misc_feature 1..36: note = Probe
  source 1..36: mol_type = other DNA

SEQ ID NO: 21085 - DNA, 37 bp, synthetic construct; identical to SEQ ID NO: 6116
  misc_feature 1..37: note = Probe
  source 1..37: mol_type = other DNA

SEQ ID NO: 21086 - DNA, 36 bp, synthetic construct
  misc_feature 1..36: note = Probe
  source 1..36: mol_type = other DNA
gcgggagaccggggttcgattccccgacggggagag

SEQ ID NO: 21087 - DNA, 37 bp, synthetic construct; identical to SEQ ID NO: 6117
  misc_feature 1..37: note = Probe
  source 1..37: mol_type = other DNA

SEQ ID NO: 21088 - DNA, 35 bp, synthetic construct; identical to SEQ ID NO: 6118
  misc_feature 1..35: note = Probe
  source 1..35: mol_type = other DNA

SEQ ID NO: 21089 - DNA, 36 bp, synthetic construct; identical to SEQ ID NO: 6119
  misc_feature 1..36: note = Probe
  source 1..36: mol_type = other DNA

SEQ ID NO: 21090 - DNA, 37 bp, synthetic construct
  misc_feature 1..37: note = Probe
  source 1..37: mol_type = other DNA
gcgggagaccggggttcgattccccgacggggaggag

SEQ ID NO: 21091 - DNA, 36 bp, synthetic construct; identical to SEQ ID NO: 6120
  misc_feature 1..36: note = Probe
  source 1..36: mol_type = other DNA

SEQ ID NO: 21092 - DNA, 37 bp, synthetic construct; identical to SEQ ID NO: 6121
  misc_feature 1..37: note = Probe
  source 1..37: mol_type = other DNA

SEQ ID NO: 21093 - DNA, 38 bp, synthetic construct
  misc_feature 1..38: note = Probe
  source 1..38: mol_type = other DNA
gcgggagaccggggttcgattccccgacggggaggcac

SEQ ID NO: 21094 - DNA, 46 bp, synthetic construct
  misc_feature 1..46: note = Probe
  source 1..46: mol_type = other DNA
gcgggagaccggggttcgattccccgacggggaggcacagtaattg

SEQ ID NO: 21095 - DNA, 37 bp, synthetic construct; identical to SEQ ID NO: 6122
  misc_feature 1..37: note = Probe
  source 1..37: mol_type = other DNA

SEQ ID NO: 21096 - DNA, 16 bp, synthetic construct
  misc_feature 1..16: note = Probe
  source 1..16: mol_type = other DNA
gcgggaggcccgggtt

SEQ ID NO: 21097 - DNA, 31 bp, synthetic construct
  misc_feature 1..31: note = Probe
  source 1..31: mol_type = other DNA
gcgggaggcccgggttcgattcccggccaat

SEQ ID NO: 21098 - DNA, 32 bp, synthetic construct
  misc_feature 1..32: note = Probe
  source 1..32: mol_type = other DNA
gcgggaggcccgggttcgattcccggccaatg

SEQ ID NO: 21099 - DNA, 33 bp, synthetic construct; identical to SEQ ID NO: 6124
  misc_feature 1..33: note = Probe
  source 1..33: mol_type = other DNA

SEQ ID NO: 21100 - DNA, 34 bp, synthetic construct; identical to SEQ ID NO: 6125
  misc_feature 1..34: note = Probe
  source 1..34: mol_type = other DNA

SEQ ID NO: 21101 - DNA, 37 bp, synthetic construct; identical to SEQ ID NO: 6126
  misc_feature 1..37: note = Probe
  source 1..37: mol_type = other DNA

SEQ ID NO: 21102 - DNA, 36 bp, synthetic construct
  misc_feature 1..36: note = Probe
  source 1..36: mol_type = other DNA
gcgggaggcccgggttcgattcccggccaatgcacg

SEQ ID NO: 21103 - DNA, 37 bp, synthetic construct; identical to SEQ ID NO: 6127
  misc_feature 1..37: note = Probe
  source 1..37: mol_type = other DNA

SEQ ID NO: 21104 - DNA, 36 bp, synthetic construct
  misc_feature 1..36: note = Probe
  source 1..36: mol_type = other DNA
gcgggaggcccgggttcgattcccggccaatgcact

SEQ ID NO: 21105 - DNA, 37 bp, synthetic construct; identical to SEQ ID NO: 6128
  misc_feature 1..37: note = Probe
  source 1..37: mol_type = other DNA

SEQ ID NO: 21106 - DNA, 31 bp, synthetic construct
  misc_feature 1..31: note = Probe
  source 1..31: mol_type = other DNA
gcgggaggcccgggttcgattcccggcccat

SEQ ID NO: 21107 - DNA, 32 bp, synthetic construct; identical to SEQ ID NO: 6129
  misc_feature 1..32: note = Probe
  source 1..32: mol_type = other DNA

SEQ ID NO: 21108 - DNA, 33 bp, synthetic construct
  misc_feature 1..33: note = Probe
  source 1..33: mol_type = other DNA
gcgggaggcccgggttcgattcccggcccatgc

SEQ ID NO: 21109 - DNA, 34 bp, synthetic construct
  misc_feature 1..34: note = Probe
  source 1..34: mol_type = other DNA
gcgggaggcccgggttcgattcccggcccatgca

SEQ ID NO: 21110 - DNA, 37 bp, synthetic construct
  misc_feature 1..37: note = Probe
  source 1..37: mol_type = other DNA
gcgggaggcccgggttcgattcccggcccatgcagca

SEQ ID NO: 21111 - DNA, 17 bp, synthetic construct
  misc_feature 1..17: note = Probe
  source 1..17: mol_type = other DNA
gcgggaggcccgggttt

SEQ ID NO: 21112 - DNA, 36 bp, synthetic construct
  misc_feature 1..36: note = Probe
  source 1..36: mol_type = other DNA
gcggttccatagtgtagcggttatcacgtctgcttt

SEQ ID NO: 21113 - DNA, 26 bp, synthetic construct
  misc_feature 1..26: note = Probe
  source 1..26: mol_type = other DNA
gcgtcagtctcataatctgaaggtcg

SEQ ID NO: 21114 - DNA, 28 bp, synthetic construct
  misc_feature 1..28: note = Probe
  source 1..28: mol_type = other DNA
gcgtgctgggcccataacccagaggtcg

SEQ ID NO: 21115 - DNA, 31 bp, synthetic construct; identical to SEQ ID NO: 1178
  misc_feature 1..31: note = Probe
  source 1..31: mol_type = other DNA

SEQ ID NO: 21116 - DNA, 36 bp, synthetic construct
  misc_feature 1..36: note = Probe
  source 1..36: mol_type = other DNA
gcgtgctgggcccataacccagaggtcgatggatcg

SEQ ID NO: 21117 - DNA, 20 bp, synthetic construct
  misc_feature 1..20: note = Probe
  source 1..20: mol_type = other DNA
gcgtggccgagtggtctaag

SEQ ID NO: 21118 - DNA, 21 bp, synthetic construct
  misc_feature 1..21: note = Probe
  source 1..21: mol_type = other DNA
gcgttcaggtcgcagtctccc

SEQ ID NO: 21119 - DNA, 17 bp, synthetic construct
  misc_feature 1..17: note = Probe
  source 1..17: mol_type = other DNA
gcgttggtggtatagtg

SEQ ID NO: 21120 - DNA, 19 bp, synthetic construct
  misc_feature 1..19: note = Probe
  source 1..19: mol_type = other DNA
gcgttggtggtatagtggt

SEQ ID NO: 21121 - DNA, 24 bp, synthetic construct
  misc_feature 1..24: note = Probe
  source 1..24: mol_type = other DNA
gcgttggtggtatagtggtaagca

SEQ ID NO: 21122 - DNA, 26 bp, synthetic construct
  misc_feature 1..26: note = Probe
  source 1..26: mol_type = other DNA
gcgttggtggtatagtggtaagcata

SEQ ID NO: 21123 - DNA, 39 bp, synthetic construct
  misc_feature 1..39: note = Probe
  source 1..39: mol_type = other DNA
gcgttggtggtatagtggtaagcatagctgccttccaag

SEQ ID NO: 21124 - DNA, 41 bp, synthetic construct
  misc_feature 1..41: note = Probe
  source 1..41: mol_type = other DNA
gcgttggtggtatagtggtaagcatagctgccttccaagca

SEQ ID NO: 21125 - DNA, 48 bp, synthetic construct; identical to SEQ ID NO: 6139
  misc_feature 1..48: note = Probe
  source 1..48: mol_type = other DNA

SEQ ID NO: 21126 - DNA, 49 bp, synthetic construct; identical to SEQ ID NO: 6140
  misc_feature 1..49: note = Probe
  source 1..49: mol_type = other DNA

SEQ ID NO: 21127 - DNA, 20 bp, synthetic construct
  misc_feature 1..20: note = Probe
  source 1..20: mol_type = other DNA
gcgttggtggtatagtggtg

SEQ ID NO: 21128 - DNA, 22 bp, synthetic construct
  misc_feature 1..22: note = Probe
  source 1..22: mol_type = other DNA
gcgttggtggtatagtggtgag

SEQ ID NO: 21129 - DNA, 23 bp, synthetic construct
  misc_feature 1..23: note = Probe
  source 1..23: mol_type = other DNA
gcgttggtggtatagtggtgagc

SEQ ID NO: 21130 - DNA, 24 bp, synthetic construct
  misc_feature 1..24: note = Probe
  source 1..24: mol_type = other DNA
gcgttggtggtatagtggtgagca

SEQ ID NO: 21131 - DNA, 25 bp, synthetic construct
  misc_feature 1..25: note = Probe
  source 1..25: mol_type = other DNA
gcgttggtggtatagtggtgagcat

SEQ ID NO: 21132 - DNA, 26 bp, synthetic construct
  misc_feature 1..26: note = Probe
  source 1..26: mol_type = other DNA
gcgttggtggtatagtggtgagcata

SEQ ID NO: 21133 - DNA, 27 bp, synthetic construct
  misc_feature 1..27: note = Probe
  source 1..27: mol_type = other DNA
gcgttggtggtatagtggtgagcatag

SEQ ID NO: 21134 - DNA, 28 bp, synthetic construct
  misc_feature 1..28: note = Probe
  source 1..28: mol_type = other DNA
gcgttggtggtatagtggtgagcatagc

SEQ ID NO: 21135 - DNA, 29 bp, synthetic construct
  misc_feature 1..29: note = Probe
  source 1..29: mol_type = other DNA
gcgttggtggtatagtggtgagcatagct

SEQ ID NO: 21136 - DNA, 30 bp, synthetic construct; identical to SEQ ID NO: 6150
  misc_feature 1..30: note = Probe
  source 1..30: mol_type = other DNA

SEQ ID NO: 21137 - DNA, 31 bp, synthetic construct; identical to SEQ ID NO: 6151
  misc_feature 1..31: note = Probe
  source 1..31: mol_type = other DNA

SEQ ID NO: 21138 - DNA, 32 bp, synthetic construct; identical to SEQ ID NO: 6152
  misc_feature 1..32: note = Probe
  source 1..32: mol_type = other DNA

SEQ ID NO: 21139 - DNA, 33 bp, synthetic construct; identical to SEQ ID NO: 6153
  misc_feature 1..33: note = Probe
  source 1..33: mol_type = other DNA

SEQ ID NO: 21140 - DNA, 34 bp, synthetic construct; identical to SEQ ID NO: 6154
  misc_feature 1..34: note = Probe
  source 1..34: mol_type = other DNA

SEQ ID NO: 21141 - DNA, 35 bp, synthetic construct; identical to SEQ ID NO: 6155
  misc_feature 1..35: note = Probe
  source 1..35: mol_type = other DNA

SEQ ID NO: 21142 - DNA, 36 bp, synthetic construct; identical to SEQ ID NO: 6156
  misc_feature 1..36: note = Probe
  source 1..36: mol_type = other DNA

SEQ ID NO: 21143 - DNA, 37 bp, synthetic construct; identical to SEQ ID NO: 6157
  misc_feature 1..37: note = Probe
  source 1..37: mol_type = other DNA

SEQ ID NO: 21144 - DNA, 38 bp, synthetic construct
  misc_feature 1..38: note = Probe
  source 1..38: mol_type = other DNA
gcgttggtggtatagtggtgagcatagctgccttccaa

SEQ ID NO: 21145 - DNA, 42 bp, synthetic construct
  misc_feature 1..42: note = Probe
  source 1..42: mol_type = other DNA
gcgttggtggtatagtggtgagcatagctgccttccaagcag

SEQ ID NO: 21146 - DNA, 46 bp, synthetic construct; identical to SEQ ID NO: 6161
  misc_feature 1..46: note = Probe
  source 1..46: mol_type = other DNA

SEQ ID NO: 21147 - DNA, 28 bp, synthetic construct
  misc_feature 1..28: note = Probe
  source 1..28: mol_type = other DNA
gcgttggtggtatagtggtgagcatagt

SEQ ID NO: 21148 - DNA, 29 bp, synthetic construct
  misc_feature 1..29: note = Probe
  source 1..29: mol_type = other DNA
gcgttggtggtatagtggtgagcatagtt

SEQ ID NO: 21149 - DNA, 32 bp, synthetic construct
  misc_feature 1..32: note = Probe
  source 1..32: mol_type = other DNA
gcgttggtggtatagtggtgagcatagttgcc

SEQ ID NO: 21150 - DNA, 34 bp, synthetic construct
  misc_feature 1..34: note = Probe
  source 1..34: mol_type = other DNA
gcgttggtggtatagtggtgagcatagttgcctt

SEQ ID NO: 21151 - DNA, 35 bp, synthetic construct
  misc_feature 1..35: note = Probe
  source 1..35: mol_type = other DNA
gcgttggtggtatagtggtgagcatagttgccttc

SEQ ID NO: 21152 - DNA, 36 bp, synthetic construct
  misc_feature 1..36: note = Probe
  source 1..36: mol_type = other DNA
gcgttggtggtatagtggtgagcatagttgccttcc

SEQ ID NO: 21153 - DNA, 20 bp, synthetic construct
  misc_feature 1..20: note = Probe
  source 1..20: mol_type = other DNA
gcgttggtggtatagtggtt

SEQ ID NO: 21154 - DNA, 22 bp, synthetic construct
  misc_feature 1..22: note = Probe
  source 1..22: mol_type = other DNA
gcgttggtggtatagtggttag

SEQ ID NO: 21155 - DNA, 23 bp, synthetic construct
  misc_feature 1..23: note = Probe
  source 1..23: mol_type = other DNA
gcgttggtggtatagtggttagc

SEQ ID NO: 21156 - DNA, 24 bp, synthetic construct
  misc_feature 1..24: note = Probe
  source 1..24: mol_type = other DNA
gcgttggtggtatagtggttagca

SEQ ID NO: 21157 - DNA, 26 bp, synthetic construct
  misc_feature 1..26: note = Probe
  source 1..26: mol_type = other DNA
gcgttggtggtatagtggttagcata

SEQ ID NO: 21158 - DNA, 27 bp, synthetic construct
  misc_feature 1..27: note = Probe
  source 1..27: mol_type = other DNA
gcgttggtggtatagtggttagcatag

SEQ ID NO: 21159 - DNA, 28 bp, synthetic construct
  misc_feature 1..28: note = Probe
  source 1..28: mol_type = other DNA
gcgttggtggtatagtggttagcatagc

SEQ ID NO: 21160 - DNA, 29 bp, synthetic construct
  misc_feature 1..29: note = Probe
  source 1..29: mol_type = other DNA
gcgttggtggtatagtggttagcatagct

SEQ ID NO: 21161 - DNA, 30 bp, synthetic construct; identical to SEQ ID NO: 6172
  misc_feature 1..30: note = Probe
  source 1..30: mol_type = other DNA

SEQ ID NO: 21162 - DNA, 31 bp, synthetic construct; identical to SEQ ID NO: 6173
  misc_feature 1..31: note = Probe
  source 1..31: mol_type = other DNA

SEQ ID NO: 21163 - DNA, 32 bp, synthetic construct; identical to SEQ ID NO: 6174
  misc_feature 1..32: note = Probe
  source 1..32: mol_type = other DNA

SEQ ID NO: 21164 - DNA, 33 bp, synthetic construct; identical to SEQ ID NO: 6175
  misc_feature 1..33: note = Probe
  source 1..33: mol_type = other DNA

SEQ ID NO: 21165 - DNA, 34 bp, synthetic construct; identical to SEQ ID NO: 6176
  misc_feature 1..34: note = Probe
  source 1..34: mol_type = other DNA

SEQ ID NO: 21166 - DNA, 35 bp, synthetic construct; identical to SEQ ID NO: 6177
  misc_feature 1..35: note = Probe
  source 1..35: mol_type = other DNA

SEQ ID NO: 21167 - DNA, 36 bp, synthetic construct; identical to SEQ ID NO: 6178
  misc_feature 1..36: note = Probe
  source 1..36: mol_type = other DNA

SEQ ID NO: 21168 - DNA, 37 bp, synthetic construct; identical to SEQ ID NO: 6179
  misc_feature 1..37: note = Probe
  source 1..37: mol_type = other DNA

SEQ ID NO: 21169 - DNA, 38 bp, synthetic construct
  misc_feature 1..38: note = Probe
  source 1..38: mol_type = other DNA
gcgttggtggtatagtggttagcatagctgccttccaa

SEQ ID NO: 21170 - DNA, 42 bp, synthetic construct
  misc_feature 1..42: note = Probe
  source 1..42: mol_type = other DNA
gcgttggtggtatagtggttagcatagctgccttccaagcag

SEQ ID NO: 21171 - DNA, 43 bp, synthetic construct; identical to SEQ ID NO: 6182
  misc_feature 1..43: note = Probe
  source 1..43: mol_type = other DNA

SEQ ID NO: 21172 - DNA, 48 bp, synthetic construct; identical to SEQ ID NO: 6184
  misc_feature 1..48: note = Probe
  source 1..48: mol_type = other DNA

SEQ ID NO: 21173 - DNA, 27 bp, synthetic construct
  misc_feature 1..27: note = Probe
  source 1..27: mol_type = other DNA
gcgttggtggtttagtggtagaattct

SEQ ID NO: 21174 - DNA, 29 bp, synthetic construct
  misc_feature 1..29: note = Probe
  source 1..29: mol_type = other DNA
gcgttggtggtttagtggtagaattctcg

SEQ ID NO: 21175 - DNA, 30 bp, synthetic construct; identical to SEQ ID NO: 10512
  misc_feature 1..30: note = Probe
  source 1..30: mol_type = other DNA

SEQ ID NO: 21176 - DNA, 31 bp, synthetic construct; identical to SEQ ID NO: 6187
  misc_feature 1..31: note = Probe
  source 1..31: mol_type = other DNA

SEQ ID NO: 21177 - DNA, 32 bp, synthetic construct; identical to SEQ ID NO: 6188
  misc_feature 1..32: note = Probe
  source 1..32: mol_type = other DNA

SEQ ID NO: 21178 - DNA, 33 bp, synthetic construct
  misc_feature 1..33: note = Probe
  source 1..33: mol_type = other DNA
gcgttggtggtttagtggtagaattctcgcctc

SEQ ID NO: 21179 - DNA, 16 bp, synthetic construct
  misc_feature 1..16: note = Probe
  source 1..16: mol_type = other DNA
gctaaacctagcccca

SEQ ID NO: 21180 - DNA, 17 bp, synthetic construct
  misc_feature 1..17: note = Probe
  source 1..17: mol_type = other DNA
gctaaacctagccccaa

SEQ ID NO: 21181 - DNA, 18 bp, synthetic construct
  misc_feature 1..18: note = Probe
  source 1..18: mol_type = other DNA
gctaaacctagccccaaa

SEQ ID NO: 21182 - DNA, 19 bp, synthetic construct
  misc_feature 1..19: note = Probe
  source 1..19: mol_type = other DNA
gctaaacctagccccaaac

SEQ ID NO: 21183 - DNA, 20 bp, synthetic construct
  misc_feature 1..20: note = Probe
  source 1..20: mol_type = other DNA
gctaaacctagccccaaacc

SEQ ID NO: 21184 - DNA, 21 bp, synthetic construct
  misc_feature 1..21: note = Probe
  source 1..21: mol_type = other DNA
gctaaacctagccccaaaccc

SEQ ID NO: 21185 - DNA, 22 bp, synthetic construct
  misc_feature 1..22: note = Probe
  source 1..22: mol_type = other DNA
gctaaacctagccccaaaccca

SEQ ID NO: 21186 - DNA, 23 bp, synthetic construct
  misc_feature 1..23: note = Probe
  source 1..23: mol_type = other DNA
gctaaacctagccccaaacccac

SEQ ID NO: 21187 - DNA, 24 bp, synthetic construct
  misc_feature 1..24: note = Probe
  source 1..24: mol_type = other DNA
gctaaacctagccccaaacccact

SEQ ID NO: 21188 - DNA, 25 bp, synthetic construct
  misc_feature 1..25: note = Probe
  source 1..25: mol_type = other DNA
gctaaacctagccccaaacccactc

SEQ ID NO: 21189 - DNA, 26 bp, synthetic construct
  misc_feature 1..26: note = Probe
  source 1..26: mol_type = other DNA
gctaaacctagccccaaacccactcc

SEQ ID NO: 21190 - DNA, 27 bp, synthetic construct
  misc_feature 1..27: note = Probe
  source 1..27: mol_type = other DNA
gctaaacctagccccaaacccactcca

SEQ ID NO: 21191 - DNA, 28 bp, synthetic construct
  misc_feature 1..28: note = Probe
  source 1..28: mol_type = other DNA
gctaaacctagccccaaacccactccac

SEQ ID NO: 21192 - DNA, 29 bp, synthetic construct
  misc_feature 1..29: note = Probe
  source 1..29: mol_type = other DNA
gctaaacctagccccaaacccactccacc

SEQ ID NO: 21193 - DNA, 30 bp, synthetic construct; identical to SEQ ID NO: 6203
  misc_feature 1..30: note = Probe
  source 1..30: mol_type = other DNA

SEQ ID NO: 21194 - DNA, 22 bp, synthetic construct
  misc_feature 1..22: note = Probe
  source 1..22: mol_type = other DNA
gctaaataagctatcgggccca

SEQ ID NO: 21195 - DNA, 23 bp, synthetic construct
  misc_feature 1..23: note = Probe
  source 1..23: mol_type = other DNA
gctaaataagctatcgggcccat

SEQ ID NO: 21196 - DNA, 24 bp, synthetic construct
  misc_feature 1..24: note = Probe
  source 1..24: mol_type = other DNA
gctaaataagctatcgggcccata

SEQ ID NO: 21197 - DNA, 25 bp, synthetic construct
  misc_feature 1..25: note = Probe
  source 1..25: mol_type = other DNA
gctaaataagctatcgggcccatac

SEQ ID NO: 21198 - DNA, 36 bp, synthetic construct
  misc_feature 1..36: note = Probe
  source 1..36: mol_type = other DNA
gctaaataagctatcgggcccataccccgaaaatgt

SEQ ID NO: 21199 - DNA, 23 bp, synthetic construct
  misc_feature 1..23: note = Probe
  source 1..23: mol_type = other DNA
gctaaatcctatatatcttaatg

SEQ ID NO: 21200 - DNA, 16 bp, synthetic construct
  misc_feature 1..16: note = Probe
  source 1..16: mol_type = other DNA
gctaactcatgccccc

SEQ ID NO: 21201 - DNA, 17 bp, synthetic construct
  misc_feature 1..17: note = Probe
  source 1..17: mol_type = other DNA
gctaactcatgccccca

SEQ ID NO: 21202 - DNA, 20 bp, synthetic construct
  misc_feature 1..20: note = Probe
  source 1..20: mol_type = other DNA
gctaactcatgcccccatgt

SEQ ID NO: 21203 - DNA, 21 bp, synthetic construct
  misc_feature 1..21: note = Probe
  source 1..21: mol_type = other DNA
gctaactcatgcccccatgtc

SEQ ID NO: 21204 - DNA, 22 bp, synthetic construct
  misc_feature 1..22: note = Probe
  source 1..22: mol_type = other DNA
gctaactcatgcccccatgtct

SEQ ID NO: 21205 - DNA, 23 bp, synthetic construct
  misc_feature 1..23: note = Probe
  source 1..23: mol_type = other DNA
gctaactcatgcccccatgtcta

SEQ ID NO: 21206 - DNA, 26 bp, synthetic construct
  misc_feature 1..26: note = Probe
  source 1..26: mol_type = other DNA
gctaactcatgcccccatgtctaaca

SEQ ID NO: 21207 - DNA, 29 bp, synthetic construct
  misc_feature 1..29: note = Probe
  source 1..29: mol_type = other DNA
gctaactcatgcccccatgtctaacaaca

SEQ ID NO: 21208 - DNA, 34 bp, synthetic construct; identical to SEQ ID NO: 6217
  misc_feature 1..34: note = Probe
  source 1..34: mol_type = other DNA

SEQ ID NO: 21209 - DNA, 35 bp, synthetic construct; identical to SEQ ID NO: 6218
  misc_feature 1..35: note = Probe
  source 1..35: mol_type = other DNA

SEQ ID NO: 21210 - DNA, 36 bp, synthetic construct; identical to SEQ ID NO: 6219
  misc_feature 1..36: note = Probe
  source 1..36: mol_type = other DNA

SEQ ID NO: 21211 - DNA, 37 bp, synthetic construct; identical to SEQ ID NO: 6220
  misc_feature 1..37: note = Probe
  source 1..37: mol_type = other DNA

SEQ ID NO: 21212 - DNA, 38 bp, synthetic construct; identical to SEQ ID NO: 6221
  misc_feature 1..38: note = Probe
  source 1..38: mol_type = other DNA

SEQ ID NO: 21213 - DNA, 39 bp, synthetic construct; identical to SEQ ID NO: 6222
  misc_feature 1..39: note = Probe
  source 1..39: mol_type = other DNA

SEQ ID NO: 21214 - DNA, 40 bp, synthetic construct; identical to SEQ ID NO: 6223
  misc_feature 1..40: note = Probe
  source 1..40: mol_type = other DNA

SEQ ID NO: 21215 - DNA, 41 bp, synthetic construct; identical to SEQ ID NO: 6224
  misc_feature 1..41: note = Probe
  source 1..41: mol_type = other DNA

SEQ ID NO: 21216 - DNA, 42 bp, synthetic construct; identical to SEQ ID NO: 6225
  misc_feature 1..42: note = Probe
  source 1..42: mol_type = other DNA

SEQ ID NO: 21217 - DNA, 43 bp, synthetic construct; identical to SEQ ID NO: 6226
  misc_feature 1..43: note = Probe
  source 1..43: mol_type = other DNA

SEQ ID NO: 21218 - DNA, 50 bp, synthetic construct; identical to SEQ ID NO: 6227
  misc_feature 1..50: note = Probe
  source 1..50: mol_type = other DNA

SEQ ID NO: 21219 - DNA, 25 bp, synthetic construct
  misc_feature 1..25: note = Probe
  source 1..25: mol_type = other DNA
gctaaggaagtcctgtgctcagttt

SEQ ID NO: 21220 - DNA, 26 bp, synthetic construct
  misc_feature 1..26: note = Probe
  source 1..26: mol_type = other DNA
gctaaggaagtcctgtgctcagtttt

SEQ ID NO: 21221 - DNA, 27 bp, synthetic construct
  misc_feature 1..27: note = Probe
  source 1..27: mol_type = other DNA
gctaaggaagtcctgtgctcagttttg

SEQ ID NO: 21222 - DNA, 24 bp, synthetic construct
  misc_feature 1..24: note = Probe
  source 1..24: mol_type = other DNA
gctaataacgccaaggtcgcgggt

SEQ ID NO: 21223 - DNA, 25 bp, synthetic construct
  misc_feature 1..25: note = Probe
  source 1..25: mol_type = other DNA
gctaataacgccaaggtcgcgggtt

SEQ ID NO: 21224 - DNA, 16 bp, synthetic construct
  misc_feature 1..16: note = Probe
  source 1..16: mol_type = other DNA
gctaatggtggagtta

SEQ ID NO: 21225 - DNA, 17 bp, synthetic construct
  misc_feature 1..17: note = Probe
  source 1..17: mol_type = other DNA
gctaatggtggagttaa

SEQ ID NO: 21226 - DNA, 20 bp, synthetic construct
  misc_feature 1..20: note = Probe
  source 1..20: mol_type = other DNA
gctaatggtggagttaaaga

SEQ ID NO: 21227 - DNA, 32 bp, synthetic construct; identical to SEQ ID NO: 1198
  misc_feature 1..32: note = Probe
  source 1..32: mol_type = other DNA

SEQ ID NO: 21228 - DNA, 34 bp, synthetic construct; identical to SEQ ID NO: 6233
  misc_feature 1..34: note = Probe
  source 1..34: mol_type = other DNA

SEQ ID NO: 21229 - DNA, 35 bp, synthetic construct; identical to SEQ ID NO: 6234
  misc_feature 1..35: note = Probe
  source 1..35: mol_type = other DNA

SEQ ID NO: 21230 - DNA, 37 bp, synthetic construct; identical to SEQ ID NO: 6235
  misc_feature 1..37: note = Probe
  source 1..37: mol_type = other DNA

SEQ ID NO: 21231 - DNA, 38 bp, synthetic construct; identical to SEQ ID NO: 6236
  misc_feature 1..38: note = Probe
  source 1..38: mol_type = other DNA

SEQ ID NO: 21232 - DNA, 39 bp, synthetic construct; identical to SEQ ID NO: 6237
  misc_feature 1..39: note = Probe
  source 1..39: mol_type = other DNA

SEQ ID NO: 21233 - DNA, 40 bp, synthetic construct; identical to SEQ ID NO: 6238
  misc_feature 1..40: note = Probe
  source 1..40: mol_type = other DNA

SEQ ID NO: 21234 - DNA, 41 bp, synthetic construct; identical to SEQ ID NO: 6239
  misc_feature 1..41: note = Probe
  source 1..41: mol_type = other DNA

SEQ ID NO: 21235 - DNA, 42 bp, synthetic construct; identical to SEQ ID NO: 6240
  misc_feature 1..42: note = Probe
  source 1..42: mol_type = other DNA

SEQ ID NO: 21236 - DNA, 23 bp, synthetic construct
  misc_feature 1..23: note = Probe
  source 1..23: mol_type = other DNA
gctacttttaaattctgacctca

SEQ ID NO: 21237 - DNA, 21 bp, synthetic construct
  misc_feature 1..21: note = Probe
  source 1..21: mol_type = other DNA
gctagctcagtcggtagagca

SEQ ID NO: 21238 - DNA, 24 bp, synthetic construct
  misc_feature 1..24: note = Probe
  source 1..24: mol_type = other DNA
gctagctcagtcggtagagcatga

SEQ ID NO: 21239 - DNA, 26 bp, synthetic construct
  misc_feature 1..26: note = Probe
  source 1..26: mol_type = other DNA
gctagctcagtcggtagagcatgaga

SEQ ID NO: 21240 - DNA, 27 bp, synthetic construct
  misc_feature 1..27: note = Probe
  source 1..27: mol_type = other DNA
gctagctcagtcggtagagcatgagac

SEQ ID NO: 21241 - DNA, 28 bp, synthetic construct
  misc_feature 1..28: note = Probe
  source 1..28: mol_type = other DNA
gctagctcagtcggtagagcatgagact

SEQ ID NO: 21242 - DNA, 29 bp, synthetic construct
  misc_feature 1..29: note = Probe
  source 1..29: mol_type = other DNA
gctagctcagtcggtagagcatgagactc

SEQ ID NO: 21243 - DNA, 30 bp, synthetic construct
  misc_feature 1..30: note = Probe
  source 1..30: mol_type = other DNA
gctagctcagtcggtagagcatgagactct

SEQ ID NO: 21244 - DNA, 24 bp, synthetic construct
  misc_feature 1..24: note = Probe
  source 1..24: mol_type = other DNA
gctagctcagtcggtagagcatgg

SEQ ID NO: 21245 - DNA, 25 bp, synthetic construct
  misc_feature 1..25: note = Probe
  source 1..25: mol_type = other DNA
gctagctcagtcggtagagcatggg

SEQ ID NO: 21246 - DNA, 30 bp, synthetic construct
  misc_feature 1..30: note = Probe
  source 1..30: mol_type = other DNA
gctagctcagtcggtagagcatgggactct

SEQ ID NO: 21247 - DNA, 44 bp, synthetic construct
  misc_feature 1..44: note = Probe
  source 1..44: mol_type = other DNA
gctagctcagtcggtagagcatgggactcttaatcccagggtcg

SEQ ID NO: 21248 - DNA, 29 bp, synthetic construct
  misc_feature 1..29: note = Probe
  source 1..29: mol_type = other DNA
gctataagcattggtggttcagtggtaga

SEQ ID NO: 21249 - DNA, 34 bp, synthetic construct
  misc_feature 1..34: note = Probe
  source 1..34: mol_type = other DNA
gctataagcattggtggttcagtggtagaattct

SEQ ID NO: 21250 - DNA, 24 bp, synthetic construct
  misc_feature 1..24: note = Probe
  source 1..24: mol_type = other DNA
gctatccattggtcttaggcccca

SEQ ID NO: 21251 - DNA, 20 bp, synthetic construct
  misc_feature 1..20: note = Probe
  source 1..20: mol_type = other DNA
gctatcgggcccataccccg

SEQ ID NO: 21252 - DNA, 21 bp, synthetic construct
  misc_feature 1..21: note = Probe
  source 1..21: mol_type = other DNA
gctatcgggcccataccccga

SEQ ID NO: 21253 - DNA, 22 bp, synthetic construct
  misc_feature 1..22: note = Probe
  source 1..22: mol_type = other DNA
gctatcgggcccataccccgaa

SEQ ID NO: 21254 - DNA, 23 bp, synthetic construct
  misc_feature 1..23: note = Probe
  source 1..23: mol_type = other DNA
gctatcgggcccataccccgaaa

SEQ ID NO: 21255 - DNA, 24 bp, synthetic construct
  misc_feature 1..24: note = Probe
  source 1..24: mol_type = other DNA
gctatcgggcccataccccgaaaa

SEQ ID NO: 21256 - DNA, 25 bp, synthetic construct
  misc_feature 1..25: note = Probe
  source 1..25: mol_type = other DNA
gctatcgggcccataccccgaaaat

SEQ ID NO: 21257 - DNA, 26 bp, synthetic construct
  misc_feature 1..26: note = Probe
  source 1..26: mol_type = other DNA
gctatcgggcccataccccgaaaatg

SEQ ID NO: 21258 - DNA, 27 bp, synthetic construct
  misc_feature 1..27: note = Probe
  source 1..27: mol_type = other DNA
gctatcgggcccataccccgaaaatgt

SEQ ID NO: 21259 - DNA, 28 bp, synthetic construct
  misc_feature 1..28: note = Probe
  source 1..28: mol_type = other DNA
gctatcgggcccataccccgaaaatgtt

SEQ ID NO: 21260 - DNA, 29 bp, synthetic construct
  misc_feature 1..29: note = Probe
  source 1..29: mol_type = other DNA
gctatcgggcccataccccgaaaatgttg

SEQ ID NO: 21261 - DNA, 30 bp, synthetic construct; identical to SEQ ID NO: 6264
  misc_feature 1..30: note = Probe
  source 1..30: mol_type = other DNA

SEQ ID NO: 21262 - DNA, 31 bp, synthetic construct; identical to SEQ ID NO: 6265
  misc_feature 1..31: note = Probe
  source 1..31: mol_type = other DNA

SEQ ID NO: 21263 - DNA, 32 bp, synthetic construct
  misc_feature 1..32: note = Probe
  source 1..32: mol_type = other DNA
gctatcgggcccataccccgaaaatgttggtt

SEQ ID NO: 21264 - DNA, 39 bp, synthetic construct
  misc_feature 1..39: note = Probe
  source 1..39: mol_type = other DNA
gctatcgggcccataccccgaaaatgttggttataccct

SEQ ID NO: 21265 - DNA, 42 bp, synthetic construct
  misc_feature 1..42: note = Probe
  source 1..42: mol_type = other DNA
gctatcgggcccataccccgaaaatgttggttatacccttcc

SEQ ID NO: 21266 - DNA, 50 bp, synthetic construct; identical to SEQ ID NO: 6269
  misc_feature 1..50: note = Probe
  source 1..50: mol_type = other DNA

SEQ ID NO: 21267 - DNA, 20 bp, synthetic construct
  misc_feature 1..20: note = Probe
  source 1..20: mol_type = other DNA
gctcacaagaactgctaact

SEQ ID NO: 21268 - DNA, 23 bp, synthetic construct
  misc_feature 1..23: note = Probe
  source 1..23: mol_type = other DNA
gctcacaagaactgctaactcat

SEQ ID NO: 21269 - DNA, 24 bp, synthetic construct
  misc_feature 1..24: note = Probe
  source 1..24: mol_type = other DNA
gctcacaagaactgctaactcatg

SEQ ID NO: 21270 - DNA, 50 bp, synthetic construct; identical to SEQ ID NO: 1205
  misc_feature 1..50: note = Probe
  source 1..50: mol_type = other DNA

SEQ ID NO: 21271 - DNA, 16 bp, synthetic construct
  misc_feature 1..16: note = Probe
  source 1..16: mol_type = other DNA
gctcacatcaccccat

SEQ ID NO: 21272 - DNA, 17 bp, synthetic construct
  misc_feature 1..17: note = Probe
  source 1..17: mol_type = other DNA
gctcacatcaccccata

SEQ ID NO: 21273 - DNA, 18 bp, synthetic construct
  misc_feature 1..18: note = Probe
  source 1..18: mol_type = other DNA
gctcacatcaccccataa

SEQ ID NO: 21274 - DNA, 21 bp, synthetic construct
  misc_feature 1..21: note = Probe
  source 1..21: mol_type = other DNA
gctcacatcaccccataaaca

SEQ ID NO: 21275 - DNA, 22 bp, synthetic construct
  misc_feature 1..22: note = Probe
  source 1..22: mol_type = other DNA
gctcacatcaccccataaacaa

SEQ ID NO: 21276 - DNA, 23 bp, synthetic construct
  misc_feature 1..23: note = Probe
  source 1..23: mol_type = other DNA
gctcacatcaccccataaacaaa

SEQ ID NO: 21277 - DNA, 24 bp, synthetic construct
  misc_feature 1..24: note = Probe
  source 1..24: mol_type = other DNA
gctcacatcaccccataaacaaat

SEQ ID NO: 21278 - DNA, 24 bp, synthetic construct
  misc_feature 1..24: note = Probe
  source 1..24: mol_type = other DNA
gctcagtcggtagagcatcagact

SEQ ID NO: 21279 - DNA, 25 bp, synthetic construct
  misc_feature 1..25: note = Probe
  source 1..25: mol_type = other DNA
gctcagtcggtagagcatcagactt

SEQ ID NO: 21280 - DNA, 27 bp, synthetic construct
  misc_feature 1..27: note = Probe
  source 1..27: mol_type = other DNA
gctcagtcggtagagcatcagactttt

SEQ ID NO: 21281 - DNA, 28 bp, synthetic construct
  misc_feature 1..28: note = Probe
  source 1..28: mol_type = other DNA
gctcagtcggtagagcatcagactttta

SEQ ID NO: 21282 - DNA, 24 bp, synthetic construct
  misc_feature 1..24: note = Probe
  source 1..24: mol_type = other DNA
gctcagtcggtagagcatgagact

SEQ ID NO: 21283 - DNA, 25 bp, synthetic construct
  misc_feature 1..25: note = Probe
  source 1..25: mol_type = other DNA
gctcagtcggtagagcatgagactc

SEQ ID NO: 21284 - DNA, 24 bp, synthetic construct
  misc_feature 1..24: note = Probe
  source 1..24: mol_type = other DNA
gctcagtcggtagagcatgggact

SEQ ID NO: 21285 - DNA, 25 bp, synthetic construct
  misc_feature 1..25: note = Probe
  source 1..25: mol_type = other DNA
gctcagtcggtagagcatgggactc

SEQ ID NO: 21286 - DNA, 36 bp, synthetic construct
  misc_feature 1..36: note = Probe
  source 1..36: mol_type = other DNA
gctccagtggcgcaatcggttagcgcgcggtactta

SEQ ID NO: 21287 - DNA, 38 bp, synthetic construct
  misc_feature 1..38: note = Probe
  source 1..38: mol_type = other DNA
gctccagtggcgcaatcggttagcgcgcggtacttata

SEQ ID NO: 21288 - DNA, 29 bp, synthetic construct
  misc_feature 1..29: note = Probe
  source 1..29: mol_type = other DNA
gctccgaggtgattttcatattgaattgc

SEQ ID NO: 21289 - DNA, 30 bp, synthetic construct; identical to SEQ ID NO: 1206
  misc_feature 1..30: note = Probe
  source 1..30: mol_type = other DNA

SEQ ID NO: 21290 - DNA, 31 bp, synthetic construct; identical to SEQ ID NO: 6282
  misc_feature 1..31: note = Probe
  source 1..31: mol_type = other DNA

SEQ ID NO: 21291 - DNA, 32 bp, synthetic construct; identical to SEQ ID NO: 6283
  misc_feature 1..32: note = Probe
  source 1..32: mol_type = other DNA

SEQ ID NO: 21292 - DNA, 33 bp, synthetic construct
  misc_feature 1..33: note = Probe
  source 1..33: mol_type = other DNA
gctccgaggtgattttcatattgaattgcaaat

SEQ ID NO: 21293 - DNA, 34 bp, synthetic construct; identical to SEQ ID NO: 6284
  misc_feature 1..34: note = Probe
  source 1..34: mol_type = other DNA

SEQ ID NO: 21294 - DNA, 44 bp, synthetic construct
  misc_feature 1..44: note = Probe
  source 1..44: mol_type = other DNA
gctccgaggtgattttcatattgaattgcaaattcgaagaagca

SEQ ID NO: 21295 - DNA, 50 bp, synthetic construct; identical to SEQ ID NO: 6286
  misc_feature 1..50: note = Probe
  source 1..50: mol_type = other DNA

SEQ ID NO: 21296 - DNA, 26 bp, synthetic construct
  misc_feature 1..26: note = Probe
  source 1..26: mol_type = other DNA
gctcgaaggacttcgtctgtaatttt

SEQ ID NO: 21297 - DNA, 30 bp, synthetic construct
  misc_feature 1..30: note = Probe
  source 1..30: mol_type = other DNA
gctcgttggtctaggggtatgattctcgct

SEQ ID NO: 21298 - DNA, 23 bp, synthetic construct
  misc_feature 1..23: note = Probe
  source 1..23: mol_type = other DNA
gctctcaccgccgcggcccgggt

SEQ ID NO: 21299 - DNA, 29 bp, synthetic construct
  misc_feature 1..29: note = Probe
  source 1..29: mol_type = other DNA
gctctccttttatgagctggtcgcgggaa

SEQ ID NO: 21300 - DNA, 24 bp, synthetic construct
  misc_feature 1..24: note = Probe
  source 1..24: mol_type = other DNA
gctgataacaccaaggtcgcgggc

SEQ ID NO: 21301 - DNA, 18 bp, synthetic construct
  misc_feature 1..18: note = Probe
  source 1..18: mol_type = other DNA
gctgcatagcaagccttt

SEQ ID NO: 21302 - DNA, 29 bp, synthetic construct
  misc_feature 1..29: note = Probe
  source 1..29: mol_type = other DNA
gctgccacacctcagaaggtctcactttt

SEQ ID NO: 21303 - DNA, 21 bp, synthetic construct
  misc_feature 1..21: note = Probe
  source 1..21: mol_type = other DNA
gctgccagggttgctgtcttt

SEQ ID NO: 21304 - DNA, 22 bp, synthetic construct
  misc_feature 1..22: note = Probe
  source 1..22: mol_type = other DNA
gctgccagggttgctgtctttt

SEQ ID NO: 21305 - DNA, 31 bp, synthetic construct
  misc_feature 1..31: note = Probe
  source 1..31: mol_type = other DNA
gctggggattgtgggttcgagtcccatctgg

SEQ ID NO: 21306 - DNA, 35 bp, synthetic construct
  misc_feature 1..35: note = Probe
  source 1..35: mol_type = other DNA
gctggggattgtgggttcgagtcccatctgggtcg

SEQ ID NO: 21307 - DNA, 36 bp, synthetic construct
  misc_feature 1..36: note = Probe
  source 1..36: mol_type = other DNA
gctggggattgtgggttcgagtcccatctgggtcgc

SEQ ID NO: 21308 - DNA, 38 bp, synthetic construct; identical to SEQ ID NO: 6290
  misc_feature 1..38: note = Probe
  source 1..38: mol_type = other DNA

SEQ ID NO: 21309 - DNA, 20 bp, synthetic construct
  misc_feature 1..20: note = Probe
  source 1..20: mol_type = other DNA
gctggtgtagtggtatcatg

SEQ ID NO: 21310 - DNA, 26 bp, synthetic construct
  misc_feature 1..26: note = Probe
  source 1..26: mol_type = other DNA
gctggtgtagtggtatcatgcaagat

SEQ ID NO: 21311 - DNA, 29 bp, synthetic construct
  misc_feature 1..29: note = Probe
  source 1..29: mol_type = other DNA
gctggtgtagtggtatcatgcaagattcc

SEQ ID NO: 21312 - DNA, 30 bp, synthetic construct; identical to SEQ ID NO: 1207
  misc_feature 1..30: note = Probe
  source 1..30: mol_type = other DNA

SEQ ID NO: 21313 - DNA, 41 bp, synthetic construct
  misc_feature 1..41: note = Probe
  source 1..41: mol_type = other DNA
gctgttaaccgaaaggttggtggttcgagcccacccaggga

SEQ ID NO: 21314 - DNA, 40 bp, synthetic construct; identical to SEQ ID NO: 6299
  misc_feature 1..40: note = Probe
  source 1..40: mol_type = other DNA

SEQ ID NO: 21315 - DNA, 41 bp, synthetic construct
  misc_feature 1..41: note = Probe
  source 1..41: mol_type = other DNA
gctgttaactaagtgtttgtgggtttaagtcccattggtct

SEQ ID NO: 21316 - DNA, 42 bp, synthetic construct
  misc_feature 1..42: note = Probe
  source 1..42: mol_type = other DNA
gctgttaactaagtgtttgtgggtttaagtcccattggtcta

SEQ ID NO: 21317 - DNA, 46 bp, synthetic construct; identical to SEQ ID NO: 6302
  misc_feature 1..46: note = Probe
  source 1..46: mol_type = other DNA

SEQ ID NO: 21318 - DNA, 24 bp, synthetic construct
  misc_feature 1..24: note = Probe
  source 1..24: mol_type = other DNA
gctgttacagaaattaagtattgc

SEQ ID NO: 21319 - DNA, 27 bp, synthetic construct
  misc_feature 1..27: note = Probe
  source 1..27: mol_type = other DNA
gctgttacagaaattaagtattgcaac

SEQ ID NO: 21320 - DNA, 29 bp, synthetic construct
  misc_feature 1..29: note = Probe
  source 1..29: mol_type = other DNA
gctgttacagaaattaagtattgcaactt

SEQ ID NO: 21321 - DNA, 30 bp, synthetic construct; identical to SEQ ID NO: 6308
  misc_feature 1..30: note = Probe
  source 1..30: mol_type = other DNA

SEQ ID NO: 21322 - DNA, 23 bp, synthetic construct
  misc_feature 1..23: note = Probe
  source 1..23: mol_type = other DNA
gcttaaacccccttatttctagg

SEQ ID NO: 21323 - DNA, 24 bp, synthetic construct
  misc_feature 1..24: note = Probe
  source 1..24: mol_type = other DNA
gcttaaacccccttatttctagga

SEQ ID NO: 21324 - DNA, 17 bp, synthetic construct
  misc_feature 1..17: note = Probe
  source 1..17: mol_type = other DNA
gcttacgaccccttatt

SEQ ID NO: 21325 - DNA, 21 bp, synthetic construct
  misc_feature 1..21: note = Probe
  source 1..21: mol_type = other DNA
gcttacgaccccttatttacc

SEQ ID NO: 21326 - DNA, 22 bp, synthetic construct
  misc_feature 1..22: note = Probe
  source 1..22: mol_type = other DNA
gcttacgaccccttatttaccg

SEQ ID NO: 21327 - DNA, 23 bp, synthetic construct
  misc_feature 1..23: note = Probe
  source 1..23: mol_type = other DNA
gcttagttggttaaagcgcctgt

SEQ ID NO: 21328 - DNA, 24 bp, synthetic construct
  misc_feature 1..24: note = Probe
  source 1..24: mol_type = other DNA
gcttcaaacctgccggggcttctc

SEQ ID NO: 21329 - DNA, 15 bp, synthetic construct
  misc_feature 1..15: note = Probe
  source 1..15: mol_type = other DNA
gcttcgctgcgtgag

SEQ ID NO: 21330 - DNA, 28 bp, synthetic construct
  misc_feature 1..28: note = Probe
  source 1..28: mol_type = other DNA
gcttctgtaatgtagtggttatcacatt

SEQ ID NO: 21331 - DNA, 33 bp, synthetic construct; identical to SEQ ID NO: 6322
  misc_feature 1..33: note = Probe
  source 1..33: mol_type = other DNA

SEQ ID NO: 21332 - DNA, 34 bp, synthetic construct
  misc_feature 1..34: note = Probe
  source 1..34: mol_type = other DNA
gcttctgtaatgtagtggttatcacattcgcctc

SEQ ID NO: 21333 - DNA, 39 bp, synthetic construct
  misc_feature 1..39: note = Probe
  source 1..39: mol_type = other DNA
gcttctgtagtgtagtggttatcacgttcgcctcacacg

SEQ ID NO: 21334 - DNA, 46 bp, synthetic construct
  misc_feature 1..46: note = Probe
  source 1..46: mol_type = other DNA
gctttacacgcagaaggtcctgggttcgagccccagtggaaccacg

SEQ ID NO: 21335 - DNA, 50 bp, synthetic construct
  misc_feature 1..50: note = Probe
  source 1..50: mol_type = other DNA
gctttacacgcagaaggtcctgggttcgagccccagtggaaccacggcgt

SEQ ID NO: 21336 - DNA, 26 bp, synthetic construct
  misc_feature 1..26: note = Probe
  source 1..26: mol_type = other DNA
gctttaggtttttctcttaaatcatt

SEQ ID NO: 21337 - DNA, 25 bp, synthetic construct
  misc_feature 1..25: note = Probe
  source 1..25: mol_type = other DNA
gctttgcacgtatgaggccccgggt

SEQ ID NO: 21338 - DNA, 26 bp, synthetic construct
  misc_feature 1..26: note = Probe
  source 1..26: mol_type = other DNA
gctttgcacgtatgaggccccgggtt

SEQ ID NO: 21339 - DNA, 27 bp, synthetic construct
  misc_feature 1..27: note = Probe
  source 1..27: mol_type = other DNA
gctttgcacgtatgaggccccgggttc

SEQ ID NO: 21340 - DNA, 26 bp, synthetic construct
  misc_feature 1..26: note = Probe
  source 1..26: mol_type = other DNA
gctttggggggttcgattccttcctt

SEQ ID NO: 21341 - DNA, 27 bp, synthetic construct
  misc_feature 1..27: note = Probe
  source 1..27: mol_type = other DNA
gctttggggggttcgattccttccttt

SEQ ID NO: 21342 - DNA, 28 bp, synthetic construct
  misc_feature 1..28: note = Probe
  source 1..28: mol_type = other DNA
gctttggggggttcgattccttcctttt

SEQ ID NO: 21343 - DNA, 30 bp, synthetic construct
  misc_feature 1..30: note = Probe
  source 1..30: mol_type = other DNA
gctttggggggttcgattccttcctttttt

SEQ ID NO: 21344 - DNA, 31 bp, synthetic construct; identical to SEQ ID NO: 6328
  misc_feature 1..31: note = Probe
  source 1..31: mol_type = other DNA

SEQ ID NO: 21345 - DNA, 32 bp, synthetic construct; identical to SEQ ID NO: 6329
  misc_feature 1..32: note = Probe
  source 1..32: mol_type = other DNA

SEQ ID NO: 21346 - DNA, 33 bp, synthetic construct; identical to SEQ ID NO: 6330
  misc_feature 1..33: note = Probe
  source 1..33: mol_type = other DNA

SEQ ID NO: 21347 - DNA, 34 bp, synthetic construct
  misc_feature 1..34: note = Probe
  source 1..34: mol_type = other DNA
gctttggggggttcgattccttccttttttgtct

SEQ ID NO: 21348 - DNA, 22 bp, synthetic construct
  misc_feature 1..22: note = Probe
  source 1..22: mol_type = other DNA
ggaaagtgcacttggacgaacc

SEQ ID NO: 21349 - DNA, 40 bp, synthetic construct
  misc_feature 1..40: note = Probe
  source 1..40: mol_type = other DNA
ggaaagtgcacttggacgaaccagagtgtagcttaacaca

SEQ ID NO: 21350 - DNA, 41 bp, synthetic construct
  misc_feature 1..41: note = Probe
  source 1..41: mol_type = other DNA
ggaaagtgcacttggacgaaccagagtgtagcttaacacaa

SEQ ID NO: 21351 - DNA, 29 bp, synthetic construct
  misc_feature 1..29: note = Probe
  source 1..29: mol_type = other DNA
ggaacagataataagccgtgcccagccgt

SEQ ID NO: 21352 - DNA, 16 bp, synthetic construct
  misc_feature 1..16: note = Probe
  source 1..16: mol_type = other DNA
ggaagcgtgctgggcc

SEQ ID NO: 21353 - DNA, 24 bp, synthetic construct
  misc_feature 1..24: note = Probe
  source 1..24: mol_type = other DNA
ggaagcgtgctgggcccataaccc

SEQ ID NO: 21354 - DNA, 30 bp, synthetic construct
  misc_feature 1..30: note = Probe
  source 1..30: mol_type = other DNA
ggaagcgtgctgggcccataacccagaggt

SEQ ID NO: 21355 - DNA, 34 bp, synthetic construct; identical to SEQ ID NO: 1227
  misc_feature 1..34: note = Probe
  source 1..34: mol_type = other DNA

SEQ ID NO: 21356 - DNA, 35 bp, synthetic construct; identical to SEQ ID NO: 1228
  misc_feature 1..35: note = Probe
  source 1..35: mol_type = other DNA

SEQ ID NO: 21357 - DNA, 36 bp, synthetic construct; identical to SEQ ID NO: 1229
  misc_feature 1..36: note = Probe
  source 1..36: mol_type = other DNA

SEQ ID NO: 21358 - DNA, 37 bp, synthetic construct; identical to SEQ ID NO: 6332
  misc_feature 1..37: note = Probe
  source 1..37: mol_type = other DNA

SEQ ID NO: 21359 - DNA, 39 bp, synthetic construct; identical to SEQ ID NO: 6333
  misc_feature 1..39: note = Probe
  source 1..39: mol_type = other DNA

SEQ ID NO: 21360 - DNA, 16 bp, synthetic construct
  misc_feature 1..16: note = Probe
  source 1..16: mol_type = other DNA
ggaatgtcagcttttt

SEQ ID NO: 21361 - DNA, 30 bp, synthetic construct
  misc_feature 1..30: note = Probe
  source 1..30: mol_type = other DNA
ggaatgtcagctttttgccgtcaacactta

SEQ ID NO: 21362 - DNA, 16 bp, synthetic construct
  misc_feature 1..16: note = Probe
  source 1..16: mol_type = other DNA
ggacctcacgagactt

SEQ ID NO: 21363 - DNA, 16 bp, synthetic construct
  misc_feature 1..16: note = Probe
  source 1..16: mol_type = other DNA
ggactatgagaatcga

SEQ ID NO: 21364 - DNA, 17 bp, synthetic construct
  misc_feature 1..17: note = Probe
  source 1..17: mol_type = other DNA
ggactatgagaatcgaa

SEQ ID NO: 21365 - DNA, 18 bp, synthetic construct
  misc_feature 1..18: note = Probe
  source 1..18: mol_type = other DNA
ggactatgagaatcgaac

SEQ ID NO: 21366 - DNA, 19 bp, synthetic construct
  misc_feature 1..19: note = Probe
  source 1..19: mol_type = other DNA
ggactatgagaatcgaacc

SEQ ID NO: 21367 - DNA, 20 bp, synthetic construct
  misc_feature 1..20: note = Probe
  source 1..20: mol_type = other DNA
ggactatgagaatcgaaccc

SEQ ID NO: 21368 - DNA, 21 bp, synthetic construct
  misc_feature 1..21: note = Probe
  source 1..21: mol_type = other DNA
ggactatgagaatcgaaccca

SEQ ID NO: 21369 - DNA, 22 bp, synthetic construct
  misc_feature 1..22: note = Probe
  source 1..22: mol_type = other DNA
ggactatgagaatcgaacccat

SEQ ID NO: 21370 - DNA, 23 bp, synthetic construct
  misc_feature 1..23: note = Probe
  source 1..23: mol_type = other DNA
ggactatgagaatcgaacccatc

SEQ ID NO: 21371 - DNA, 24 bp, synthetic construct
  misc_feature 1..24: note = Probe
  source 1..24: mol_type = other DNA
ggactatgagaatcgaacccatcc

SEQ ID NO: 21372 - DNA, 25 bp, synthetic construct
  misc_feature 1..25: note = Probe
  source 1..25: mol_type = other DNA
ggactatgagaatcgaacccatccc

SEQ ID NO: 21373 - DNA, 26 bp, synthetic construct
  misc_feature 1..26: note = Probe
  source 1..26: mol_type = other DNA
ggactatgagaatcgaacccatccct

SEQ ID NO: 21374 - DNA, 27 bp, synthetic construct
  misc_feature 1..27: note = Probe
  source 1..27: mol_type = other DNA
ggactatgagaatcgaacccatccctg

SEQ ID NO: 21375 - DNA, 28 bp, synthetic construct
  misc_feature 1..28: note = Probe
  source 1..28: mol_type = other DNA
ggactatgagaatcgaacccatccctga

SEQ ID NO: 21376 - DNA, 29 bp, synthetic construct
  misc_feature 1..29: note = Probe
  source 1..29: mol_type = other DNA
ggactatgagaatcgaacccatccctgag

SEQ ID NO: 21377 - DNA, 30 bp, synthetic construct; identical to SEQ ID NO: 6337
  misc_feature 1..30: note = Probe
  source 1..30: mol_type = other DNA

SEQ ID NO: 21378 - DNA, 23 bp, synthetic construct
  misc_feature 1..23: note = Probe
  source 1..23: mol_type = other DNA
ggactctgaatccagcgatccga

SEQ ID NO: 21379 - DNA, 24 bp, synthetic construct
  misc_feature 1..24: note = Probe
  source 1..24: mol_type = other DNA
ggactctgaatccagcgatccgag

SEQ ID NO: 21380 - DNA, 45 bp, synthetic construct; identical to SEQ ID NO: 6343
  misc_feature 1..45: note = Probe
  source 1..45: mol_type = other DNA

SEQ ID NO: 21381 - DNA, 24 bp, synthetic construct
  misc_feature 1..24: note = Probe
  source 1..24: mol_type = other DNA
ggagaccggggttcaattccccga

SEQ ID NO: 21382 - DNA, 26 bp, synthetic construct
  misc_feature 1..26: note = Probe
  source 1..26: mol_type = other DNA
ggagaccggggttcaattccccgacg

SEQ ID NO: 21383 - DNA, 32 bp, synthetic construct; identical to SEQ ID NO: 6344
  misc_feature 1..32: note = Probe
  source 1..32: mol_type = other DNA

SEQ ID NO: 21384 - DNA, 33 bp, synthetic construct; identical to SEQ ID NO: 6345
  misc_feature 1..33: note = Probe
  source 1..33: mol_type = other DNA

SEQ ID NO: 21385 - DNA, 34 bp, synthetic construct; identical to SEQ ID NO: 6346
  misc_feature 1..34: note = Probe
  source 1..34: mol_type = other DNA

SEQ ID NO: 21386 - DNA, 16 bp, synthetic construct
  misc_feature 1..16: note = Probe
  source 1..16: mol_type = other DNA
ggagaccggggttcga

SEQ ID NO: 21387 - DNA, 34 bp, synthetic construct
  misc_feature 1..34: note = Probe
  source 1..34: mol_type = other DNA
ggagaccggggttcgattccccaacggggaggct

SEQ ID NO: 21388 - DNA, 32 bp, synthetic construct; identical to SEQ ID NO: 6348
  misc_feature 1..32: note = Probe
  source 1..32: mol_type = other DNA

SEQ ID NO: 21389 - DNA, 33 bp, synthetic construct; identical to SEQ ID NO: 6349
  misc_feature 1..33: note = Probe
  source 1..33: mol_type = other DNA

SEQ ID NO: 21390 - DNA, 34 bp, synthetic construct; identical to SEQ ID NO: 6350
  misc_feature 1..34: note = Probe
  source 1..34: mol_type = other DNA

SEQ ID NO: 21391 - DNA, 33 bp, synthetic construct; identical to SEQ ID NO: 6351
  misc_feature 1..33: note = Probe
  source 1..33: mol_type = other DNA

SEQ ID NO: 21392 - DNA, 34 bp, synthetic construct
  misc_feature 1..34: note = Probe
  source 1..34: mol_type = other DNA
ggagaccggggttcgattccccgacggggagacg

SEQ ID NO: 21393 - DNA, 33 bp, synthetic construct
  misc_feature 1..33: note = Probe
  source 1..33: mol_type = other DNA
ggagaccggggttcgattccccgacggggagag

SEQ ID NO: 21394 - DNA, 34 bp, synthetic construct; identical to SEQ ID NO: 6352
  misc_feature 1..34: note = Probe
  source 1..34: mol_type = other DNA

SEQ ID NO: 21395 - DNA, 32 bp, synthetic construct; identical to SEQ ID NO: 6353
  misc_feature 1..32: note = Probe
  source 1..32: mol_type = other DNA

SEQ ID NO: 21396 - DNA, 33 bp, synthetic construct
  misc_feature 1..33: note = Probe
  source 1..33: mol_type = other DNA
ggagaccggggttcgattccccgacggggagga

SEQ ID NO: 21397 - DNA, 34 bp, synthetic construct
  misc_feature 1..34: note = Probe
  source 1..34: mol_type = other DNA
ggagaccggggttcgattccccgacggggaggag

SEQ ID NO: 21398 - DNA, 33 bp, synthetic construct; identical to SEQ ID NO: 6354
  misc_feature 1..33: note = Probe
  source 1..33: mol_type = other DNA

SEQ ID NO: 21399 - DNA, 34 bp, synthetic construct; identical to SEQ ID NO: 6355
  misc_feature 1..34: note = Probe
  source 1..34: mol_type = other DNA

SEQ ID NO: 21400 - DNA, 35 bp, synthetic construct
  misc_feature 1..35: note = Probe
  source 1..35: mol_type = other DNA
ggagaccggggttcgattccccgacggggaggcac

SEQ ID NO: 21401 - DNA, 34 bp, synthetic construct
  misc_feature 1..34: note = Probe
  source 1..34: mol_type = other DNA
ggagaccggggttcgattccccgacggggaggcc

SEQ ID NO: 21402 - DNA, 30 bp, synthetic construct
  misc_feature 1..30: note = Probe
  source 1..30: mol_type = other DNA
ggagatcctgggttcgaatcccagcggggc

SEQ ID NO: 21403 - DNA, 31 bp, synthetic construct
  misc_feature 1..31: note = Probe
  source 1..31: mol_type = other DNA
ggagatcctgggttcgaatcccagcggggcc

SEQ ID NO: 21404 - DNA, 32 bp, synthetic construct
  misc_feature 1..32: note = Probe
  source 1..32: mol_type = other DNA
ggagatcctgggttcgaatcccagcggggcct

SEQ ID NO: 21405 - DNA, 33 bp, synthetic construct
  misc_feature 1..33: note = Probe
  source 1..33: mol_type = other DNA
ggagatcctgggttcgaatcccagcggggcctg

SEQ ID NO: 21406 - DNA, 33 bp, synthetic construct
  misc_feature 1..33: note = Probe
  source 1..33: mol_type = other DNA
ggagatcctgggttcgaatcccagcggggcctt

SEQ ID NO: 21407 - DNA, 29 bp, synthetic construct
  misc_feature 1..29: note = Probe
  source 1..29: mol_type = other DNA
ggagatcctgggttcgaatcccagcggtg

SEQ ID NO: 21408 - DNA, 30 bp, synthetic construct
  misc_feature 1..30: note = Probe
  source 1..30: mol_type = other DNA
ggagatcctgggttcgaatcccagcggtgc

SEQ ID NO: 21409 - DNA, 31 bp, synthetic construct
  misc_feature 1..31: note = Probe
  source 1..31: mol_type = other DNA
ggagatcctgggttcgaatcccagcggtgcc

SEQ ID NO: 21410 - DNA, 32 bp, synthetic construct; identical to SEQ ID NO: 6356
  misc_feature 1..32: note = Probe
  source 1..32: mol_type = other DNA

SEQ ID NO: 21411 - DNA, 33 bp, synthetic construct; identical to SEQ ID NO: 6357
  misc_feature 1..33: note = Probe
  source 1..33: mol_type = other DNA

SEQ ID NO: 21412 - DNA, 35 bp, synthetic construct
  misc_feature 1..35: note = Probe
  source 1..35: mol_type = other DNA
ggagatcctgggttcgaatcccagcggtgcctccg

SEQ ID NO: 21413 - DNA, 16 bp, synthetic construct
  misc_feature 1..16: note = Probe
  source 1..16: mol_type = other DNA
ggagatgaaaaccttt

SEQ ID NO: 21414 - DNA, 26 bp, synthetic construct
  misc_feature 1..26: note = Probe
  source 1..26: mol_type = other DNA
ggagatgaaaacctttttccaaggac

SEQ ID NO: 21415 - DNA, 28 bp, synthetic construct
  misc_feature 1..28: note = Probe
  source 1..28: mol_type = other DNA
ggagatgaaaacctttttccaaggacaa

SEQ ID NO: 21416 - DNA, 29 bp, synthetic construct
  misc_feature 1..29: note = Probe
  source 1..29: mol_type = other DNA
ggagatgaaaacctttttccaaggacaaa

SEQ ID NO: 21417 - DNA, 30 bp, synthetic construct; identical to SEQ ID NO: 6362
  misc_feature 1..30: note = Probe
  source 1..30: mol_type = other DNA

SEQ ID NO: 21418 - DNA, 31 bp, synthetic construct; identical to SEQ ID NO: 6363
  misc_feature 1..31: note = Probe
  source 1..31: mol_type = other DNA

SEQ ID NO: 21419 - DNA, 32 bp, synthetic construct
  misc_feature 1..32: note = Probe
  source 1..32: mol_type = other DNA
ggagatgaaaacctttttccaaggacaaatca

SEQ ID NO: 21420 - DNA, 16 bp, synthetic construct
  misc_feature 1..16: note = Probe
  source 1..16: mol_type = other DNA
ggagatttcaacttaa

SEQ ID NO: 21421 - DNA, 22 bp, synthetic construct
  misc_feature 1..22: note = Probe
  source 1..22: mol_type = other DNA
ggagatttcaacttaacttgac

SEQ ID NO: 21422 - DNA, 23 bp, synthetic construct
  misc_feature 1..23: note = Probe
  source 1..23: mol_type = other DNA
ggagatttcaacttaacttgacc

SEQ ID NO: 21423 - DNA, 24 bp, synthetic construct
  misc_feature 1..24: note = Probe
  source 1..24: mol_type = other DNA
ggagatttcaacttaacttgaccg

SEQ ID NO: 21424 - DNA, 25 bp, synthetic construct
  misc_feature 1..25: note = Probe
  source 1..25: mol_type = other DNA
ggagatttcaacttaacttgaccgc

SEQ ID NO: 21425 - DNA, 26 bp, synthetic construct
  misc_feature 1..26: note = Probe
  source 1..26: mol_type = other DNA
ggagatttcaacttaacttgaccgct

SEQ ID NO: 21426 - DNA, 27 bp, synthetic construct
  misc_feature 1..27: note = Probe
  source 1..27: mol_type = other DNA
ggagatttcaacttaacttgaccgctc

SEQ ID NO: 21427 - DNA, 28 bp, synthetic construct
  misc_feature 1..28: note = Probe
  source 1..28: mol_type = other DNA
ggagatttcaacttaacttgaccgctct

SEQ ID NO: 21428 - DNA, 29 bp, synthetic construct
  misc_feature 1..29: note = Probe
  source 1..29: mol_type = other DNA
ggagatttcaacttaacttgaccgctctg

SEQ ID NO: 21429 - DNA, 30 bp, synthetic construct; identical to SEQ ID NO: 6372
  misc_feature 1..30: note = Probe
  source 1..30: mol_type = other DNA

SEQ ID NO: 21430 - DNA, 31 bp, synthetic construct; identical to SEQ ID NO: 6373
  misc_feature 1..31: note = Probe
  source 1..31: mol_type = other DNA

SEQ ID NO: 21431 - DNA, 32 bp, synthetic construct; identical to SEQ ID NO: 6374
  misc_feature 1..32: note = Probe
  source 1..32: mol_type = other DNA

SEQ ID NO: 21432 - DNA, 33 bp, synthetic construct; identical to SEQ ID NO: 6375
  misc_feature 1..33: note = Probe
  source 1..33: mol_type = other DNA

SEQ ID NO: 21433 - DNA, 39 bp, synthetic construct
  misc_feature 1..39: note = Probe
  source 1..39: mol_type = other DNA
ggagcccggatagctcagtcggtagagcatcagactttt

SEQ ID NO: 21434 - DNA, 40 bp, synthetic construct
  misc_feature 1..40: note = Probe
  source 1..40: mol_type = other DNA
ggagcccggatagctcagtcggtagagcatcagactttta

SEQ ID NO: 21435 - DNA, 31 bp, synthetic construct
  misc_feature 1..31: note = Probe
  source 1..31: mol_type = other DNA
ggagcgcccggatagctcagtcggtagagca

SEQ ID NO: 21436 - DNA, 36 bp, synthetic construct
  misc_feature 1..36: note = Probe
  source 1..36: mol_type = other DNA
ggagcgcccggatagctcagtcggtagagcatcaga

SEQ ID NO: 21437 - DNA, 38 bp, synthetic construct
  misc_feature 1..38: note = Probe
  source 1..38: mol_type = other DNA
ggagcgcccggatagctcagtcggtagagcatcagact

SEQ ID NO: 21438 - DNA, 39 bp, synthetic construct
  misc_feature 1..39: note = Probe
  source 1..39: mol_type = other DNA
ggagcgcccggatagctcagtcggtagagcatcagactt

SEQ ID NO: 21439 - DNA, 40 bp, synthetic construct
  misc_feature 1..40: note = Probe
  source 1..40: mol_type = other DNA
ggagcgcccggatagctcagtcggtagagcatcagacttt

SEQ ID NO: 21440 - DNA, 41 bp, synthetic construct
  misc_feature 1..41: note = Probe
  source 1..41: mol_type = other DNA
ggagcgcccggatagctcagtcggtagagcatcagactttt

SEQ ID NO: 21441 - DNA, 42 bp, synthetic construct
  misc_feature 1..42: note = Probe
  source 1..42: mol_type = other DNA
ggagcgcccggatagctcagtcggtagagcatcagactttta

SEQ ID NO: 21442 - DNA, 30 bp, synthetic construct
  misc_feature 1..30: note = Probe
  source 1..30: mol_type = other DNA
ggagcgttggtggtatagtggtaagcatag

SEQ ID NO: 21443 - DNA, 33 bp, synthetic construct
  misc_feature 1..33: note = Probe
  source 1..33: mol_type = other DNA
ggagcgttggtggtatagtggtaagcatagctg

SEQ ID NO: 21444 - DNA, 38 bp, synthetic construct
  misc_feature 1..38: note = Probe
  source 1..38: mol_type = other DNA
ggagcgttggtggtatagtggtaagcatagctgccttc

SEQ ID NO: 21445 - DNA, 23 bp, synthetic construct
  misc_feature 1..23: note = Probe
  source 1..23: mol_type = other DNA
ggagcgttttgtggatttgtttt

SEQ ID NO: 21446 - DNA, 35 bp, synthetic construct
  misc_feature 1..35: note = Probe
  source 1..35: mol_type = other DNA
ggagctccagtggcgcaatcggttagcgcgcggta

SEQ ID NO: 21447 - DNA, 38 bp, synthetic construct
  misc_feature 1..38: note = Probe
  source 1..38: mol_type = other DNA
ggagctccagtggcgcaatcggttagcgcgcggtactt

SEQ ID NO: 21448 - DNA, 39 bp, synthetic construct
  misc_feature 1..39: note = Probe
  source 1..39: mol_type = other DNA
ggagctccagtggcgcaatcggttagcgcgcggtactta

SEQ ID NO: 21449 - DNA, 40 bp, synthetic construct
  misc_feature 1..40: note = Probe
  source 1..40: mol_type = other DNA
ggagctccagtggcgcaatcggttagcgcgcggtacttat

SEQ ID NO: 21450 - DNA, 41 bp, synthetic construct
  misc_feature 1..41: note = Probe
  source 1..41: mol_type = other DNA
ggagctccagtggcgcaatcggttagcgcgcggtacttata

SEQ ID NO: 21451 - DNA, 44 bp, synthetic construct
  misc_feature 1..44: note = Probe
  source 1..44: mol_type = other DNA
ggagctccagtggcgcaatcggttagcgcgcggtacttatatga

SEQ ID NO: 21452 - DNA, 17 bp, synthetic construct
  misc_feature 1..17: note = Probe
  source 1..17: mol_type = other DNA
ggagcttaaaccccctt

SEQ ID NO: 21453 - DNA, 22 bp, synthetic construct
  misc_feature 1..22: note = Probe
  source 1..22: mol_type = other DNA
ggagcttaaacccccttatttc

SEQ ID NO: 21454 - DNA, 23 bp, synthetic construct
  misc_feature 1..23: note = Probe
  source 1..23: mol_type = other DNA
ggagcttaaacccccttatttct

SEQ ID NO: 21455 - DNA, 24 bp, synthetic construct
  misc_feature 1..24: note = Probe
  source 1..24: mol_type = other DNA
ggagcttaaacccccttatttcta

SEQ ID NO: 21456 - DNA, 25 bp, synthetic construct
  misc_feature 1..25: note = Probe
  source 1..25: mol_type = other DNA
ggagcttaaacccccttatttctag

SEQ ID NO: 21457 - DNA, 26 bp, synthetic construct
  misc_feature 1..26: note = Probe
  source 1..26: mol_type = other DNA
ggagcttaaacccccttatttctagg

SEQ ID NO: 21458 - DNA, 27 bp, synthetic construct
  misc_feature 1..27: note = Probe
  source 1..27: mol_type = other DNA
ggagcttaaacccccttatttctagga

SEQ ID NO: 21459 - DNA, 31 bp, synthetic construct
  misc_feature 1..31: note = Probe
  source 1..31: mol_type = other DNA
ggaggcccgggttcgattcccggccaatgca

SEQ ID NO: 21460 - DNA, 34 bp, synthetic construct
  misc_feature 1..34: note = Probe
  source 1..34: mol_type = other DNA
ggaggcccgggttcgattcccggccaatgcacga

SEQ ID NO: 21461 - DNA, 34 bp, synthetic construct
  misc_feature 1..34: note = Probe
  source 1..34: mol_type = other DNA
ggaggcccgggttcgattcccggccaatgcagca

SEQ ID NO: 21462 - DNA, 31 bp, synthetic construct
  misc_feature 1..31: note = Probe
  source 1..31: mol_type = other DNA
ggaggcccgggttcgattcccggcccatgca

SEQ ID NO: 21463 - DNA, 28 bp, synthetic construct
  misc_feature 1..28: note = Probe
  source 1..28: mol_type = other DNA
ggaggcgtgggttcgaatcccactcctg

SEQ ID NO: 21464 - DNA, 28 bp, synthetic construct
  misc_feature 1..28: note = Probe
  source 1..28: mol_type = other DNA
ggaggcgtgggttcgaatcccacttctg

SEQ ID NO: 21465 - DNA, 29 bp, synthetic construct
  misc_feature 1..29: note = Probe
  source 1..29: mol_type = other DNA
ggaggcgtgggttcgaatcccacttctga

SEQ ID NO: 21466 - DNA, 31 bp, synthetic construct
  misc_feature 1..31: note = Probe
  source 1..31: mol_type = other DNA
ggaggcgtgggttcgaatcccacttctgaca

SEQ ID NO: 21467 - DNA, 32 bp, synthetic construct
  misc_feature 1..32: note = Probe
  source 1..32: mol_type = other DNA
ggaggcgtgggttcgaatcccacttctgacac

SEQ ID NO: 21468 - DNA, 25 bp, synthetic construct
  misc_feature 1..25: note = Probe
  source 1..25: mol_type = other DNA
ggagttaaagactttttctctgatt

SEQ ID NO: 21469 - DNA, 26 bp, synthetic construct
  misc_feature 1..26: note = Probe
  source 1..26: mol_type = other DNA
ggagttaaagactttttctctgattt

SEQ ID NO: 21470 - DNA, 38 bp, synthetic construct
  misc_feature 1..38: note = Probe
  source 1..38: mol_type = other DNA
ggataaggcattggcctcctaagccagggattgtgggt

SEQ ID NO: 21471 - DNA, 24 bp, synthetic construct
  misc_feature 1..24: note = Probe
  source 1..24: mol_type = other DNA
ggatagctcagtcggtagagcatc

SEQ ID NO: 21472 - DNA, 33 bp, synthetic construct
  misc_feature 1..33: note = Probe
  source 1..33: mol_type = other DNA
ggatagctcagtcggtagagcatcagactttta

SEQ ID NO: 21473 - DNA, 25 bp, synthetic construct
  misc_feature 1..25: note = Probe
  source 1..25: mol_type = other DNA
ggatcgatgcccgcatcctccactc

SEQ ID NO: 21474 - DNA, 25 bp, synthetic construct
  misc_feature 1..25: note = Probe
  source 1..25: mol_type = other DNA
ggatcgatgcccgcattctccatac

SEQ ID NO: 21475 - DNA, 20 bp, synthetic construct
  misc_feature 1..20: note = Probe
  source 1..20: mol_type = other DNA
ggatggccgagcggtctaag

SEQ ID NO: 21476 - DNA, 25 bp, synthetic construct
  misc_feature 1..25: note = Probe
  source 1..25: mol_type = other DNA
ggatggccgagtggtctaaggcgcc

SEQ ID NO: 21477 - DNA, 27 bp, synthetic construct
  misc_feature 1..27: note = Probe
  source 1..27: mol_type = other DNA
ggatggggtgtgataggtggcacggag

SEQ ID NO: 21478 - DNA, 28 bp, synthetic construct
  misc_feature 1..28: note = Probe
  source 1..28: mol_type = other DNA
ggatggggtgtgataggtggcacggaga

SEQ ID NO: 21479 - DNA, 30 bp, synthetic construct
  misc_feature 1..30: note = Probe
  source 1..30: mol_type = other DNA
ggatggggtgtgataggtggcacggagaat

SEQ ID NO: 21480 - DNA, 34 bp, synthetic construct; identical to SEQ ID NO: 1254
  misc_feature 1..34: note = Probe
  source 1..34: mol_type = other DNA

SEQ ID NO: 21481 - DNA, 30 bp, synthetic construct
  misc_feature 1..30: note = Probe
  source 1..30: mol_type = other DNA
ggatgggttcgattctcatagtcctagaaa

SEQ ID NO: 21482 - DNA, 30 bp, synthetic construct
  misc_feature 1..30: note = Probe
  source 1..30: mol_type = other DNA
ggatgttttactgagaacagttcagcgagg

SEQ ID NO: 21483 - DNA, 16 bp, synthetic construct
  misc_feature 1..16: note = Probe
  source 1..16: mol_type = other DNA
ggattcctggttttca

SEQ ID NO: 21484 - DNA, 19 bp, synthetic construct
  misc_feature 1..19: note = Probe
  source 1..19: mol_type = other DNA
ggattcctggttttcaccc

SEQ ID NO: 21485 - DNA, 23 bp, synthetic construct
  misc_feature 1..23: note = Probe
  source 1..23: mol_type = other DNA
ggattcctggttttcacccaggc

SEQ ID NO: 21486 - DNA, 24 bp, synthetic construct
  misc_feature 1..24: note = Probe
  source 1..24: mol_type = other DNA
ggattcctggttttcacccaggcg

SEQ ID NO: 21487 - DNA, 27 bp, synthetic construct
  misc_feature 1..27: note = Probe
  source 1..27: mol_type = other DNA
ggattcctggttttcacccaggcggcc

SEQ ID NO: 21488 - DNA, 29 bp, synthetic construct
  misc_feature 1..29: note = Probe
  source 1..29: mol_type = other DNA
ggattcctggttttcacccaggtggcccg

SEQ ID NO: 21489 - DNA, 16 bp, synthetic construct
  misc_feature 1..16: note = Probe
  source 1..16: mol_type = other DNA
ggattcggcgctctca

SEQ ID NO: 21490 - DNA, 25 bp, synthetic construct
  misc_feature 1..25: note = Probe
  source 1..25: mol_type = other DNA
ggattcggcgctctcaccgccgcgg

SEQ ID NO: 21491 - DNA, 27 bp, synthetic construct
  misc_feature 1..27: note = Probe
  source 1..27: mol_type = other DNA
ggattcggcgctctcaccgccgcggcc

SEQ ID NO: 21492 - DNA, 30 bp, synthetic construct
  misc_feature 1..30: note = Probe
  source 1..30: mol_type = other DNA
ggattcggcgctctcaccgccgcggcccgg

SEQ ID NO: 21493 - DNA, 32 bp, synthetic construct
  misc_feature 1..32: note = Probe
  source 1..32: mol_type = other DNA
ggattcggcgctctcaccgccgcggcccgggt

SEQ ID NO: 21494 - DNA, 23 bp, synthetic construct
  misc_feature 1..23: note = Probe
  source 1..23: mol_type = other DNA
ggattcggcgctttcaccgccgc

SEQ ID NO: 21495 - DNA, 24 bp, synthetic construct
  misc_feature 1..24: note = Probe
  source 1..24: mol_type = other DNA
ggattcggcgctttcaccgccgcg

SEQ ID NO: 21496 - DNA, 27 bp, synthetic construct
  misc_feature 1..27: note = Probe
  source 1..27: mol_type = other DNA
ggattcggcgctttcaccgccgcggcc

SEQ ID NO: 21497 - DNA, 29 bp, synthetic construct
  misc_feature 1..29: note = Probe
  source 1..29: mol_type = other DNA
ggattcggcgctttcaccgccgcggcccg

SEQ ID NO: 21498 - DNA, 27 bp, synthetic construct
  misc_feature 1..27: note = Probe
  source 1..27: mol_type = other DNA
ggattggtggtccagtggtagaattct

SEQ ID NO: 21499 - DNA, 23 bp, synthetic construct
  misc_feature 1..23: note = Probe
  source 1..23: mol_type = other DNA
ggattgtgggttcgagtcccatc

SEQ ID NO: 21500 - DNA, 50 bp, synthetic construct; identical to SEQ ID NO: 6392
  misc_feature 1..50: note = Probe
  source 1..50: mol_type = other DNA

SEQ ID NO: 21501 - DNA, 28 bp, synthetic construct
  misc_feature 1..28: note = Probe
  source 1..28: mol_type = other DNA
ggcagaacagcagagtggcgcagcggaa

SEQ ID NO: 21502 - DNA, 31 bp, synthetic construct
  misc_feature 1..31: note = Probe
  source 1..31: mol_type = other DNA
ggcagagggggtatagctcagtggtagagca

SEQ ID NO: 21503 - DNA, 33 bp, synthetic construct
  misc_feature 1..33: note = Probe
  source 1..33: mol_type = other DNA
ggcagagggggtatagctcagtggtagagcatt

SEQ ID NO: 21504 - DNA, 35 bp, synthetic construct
  misc_feature 1..35: note = Probe
  source 1..35: mol_type = other DNA
ggcagagggggtatagctcagtggtagagcatttg

SEQ ID NO: 21505 - DNA, 36 bp, synthetic construct
  misc_feature 1..36: note = Probe
  source 1..36: mol_type = other DNA
ggcagagggggtatagctcagtggtagagcatttga

SEQ ID NO: 21506 - DNA, 37 bp, synthetic construct
  misc_feature 1..37: note = Probe
  source 1..37: mol_type = other DNA
ggcagagggggtatagctcagtggtagagcatttgac

SEQ ID NO: 21507 - DNA, 32 bp, synthetic construct
  misc_feature 1..32: note = Probe
  source 1..32: mol_type = other DNA
ggcagagtggtgcagcggaagcgtgctgggcc

SEQ ID NO: 21508 - DNA, 33 bp, synthetic construct
  misc_feature 1..33: note = Probe
  source 1..33: mol_type = other DNA
ggcagagtggtgcagcggaagcgtgctgggccc

SEQ ID NO: 21509 - DNA, 33 bp, synthetic construct; identical to SEQ ID NO: 6396
  misc_feature 1..33: note = Probe
  source 1..33: mol_type = other DNA

SEQ ID NO: 21510 - DNA, 34 bp, synthetic construct
  misc_feature 1..34: note = Probe
  source 1..34: mol_type = other DNA
ggcattggtggttcagtggtagaattctcgcctg

SEQ ID NO: 21511 - DNA, 36 bp, synthetic construct
  misc_feature 1..36: note = Probe
  source 1..36: mol_type = other DNA
ggcattggtggttcagtggtagaattctcgcctgcc

SEQ ID NO: 21512 - DNA, 38 bp, synthetic construct
  misc_feature 1..38: note = Probe
  source 1..38: mol_type = other DNA
ggccatggggttggcttgaaaccagctttggggggttc

SEQ ID NO: 21513 - DNA, 50 bp, synthetic construct; identical to SEQ ID NO: 6398
  misc_feature 1..50: note = Probe
  source 1..50: mol_type = other DNA

SEQ ID NO: 21514 - DNA, 16 bp, synthetic construct
  misc_feature 1..16: note = Probe
  source 1..16: mol_type = other DNA
ggcccataccccgaaa

SEQ ID NO: 21515 - DNA, 17 bp, synthetic construct
  misc_feature 1..17: note = Probe
  source 1..17: mol_type = other DNA
ggcccataccccgaaaa

SEQ ID NO: 21516 - DNA, 18 bp, synthetic construct
  misc_feature 1..18: note = Probe
  source 1..18: mol_type = other DNA
ggcccataccccgaaaat

SEQ ID NO: 21517 - DNA, 19 bp, synthetic construct
  misc_feature 1..19: note = Probe
  source 1..19: mol_type = other DNA
ggcccataccccgaaaatg

SEQ ID NO: 21518 - DNA, 20 bp, synthetic construct
  misc_feature 1..20: note = Probe
  source 1..20: mol_type = other DNA
ggcccataccccgaaaatgt

SEQ ID NO: 21519 - DNA, 21 bp, synthetic construct
  misc_feature 1..21: note = Probe
  source 1..21: mol_type = other DNA
ggcccataccccgaaaatgtt

SEQ ID NO: 21520 - DNA, 22 bp, synthetic construct
  misc_feature 1..22: note = Probe
  source 1..22: mol_type = other DNA
ggcccataccccgaaaatgttg

SEQ ID NO: 21521 - DNA, 24 bp, synthetic construct
  misc_feature 1..24: note = Probe
  source 1..24: mol_type = other DNA
ggcccataccccgaaaatgttggt

SEQ ID NO: 21522 - DNA, 25 bp, synthetic construct
  misc_feature 1..25: note = Probe
  source 1..25: mol_type = other DNA
ggcccataccccgaaaatgttggtt

SEQ ID NO: 21523 - DNA, 26 bp, synthetic construct
  misc_feature 1..26: note = Probe
  source 1..26: mol_type = other DNA
ggcccataccccgaaaatgttggtta

SEQ ID NO: 21524 - DNA, 28 bp, synthetic construct
  misc_feature 1..28: note = Probe
  source 1..28: mol_type = other DNA
ggcccataccccgaaaatgttggttata

SEQ ID NO: 21525 - DNA, 29 bp, synthetic construct
  misc_feature 1..29: note = Probe
  source 1..29: mol_type = other DNA
ggcccataccccgaaaatgttggttatac

SEQ ID NO: 21526 - DNA, 30 bp, synthetic construct; identical to SEQ ID NO: 6411
  misc_feature 1..30: note = Probe
  source 1..30: mol_type = other DNA

SEQ ID NO: 21527 - DNA, 31 bp, synthetic construct; identical to SEQ ID NO: 6412
  misc_feature 1..31: note = Probe
  source 1..31: mol_type = other DNA

SEQ ID NO: 21528 - DNA, 32 bp, synthetic construct; identical to SEQ ID NO: 6413
  misc_feature 1..32: note = Probe
  source 1..32: mol_type = other DNA

SEQ ID NO: 21529 - DNA, 33 bp, synthetic construct; identical to SEQ ID NO: 6414
  misc_feature 1..33: note = Probe
  source 1..33: mol_type = other DNA

SEQ ID NO: 21530 - DNA, 34 bp, synthetic construct; identical to SEQ ID NO: 6415
  misc_feature 1..34: note = Probe
  source 1..34: mol_type = other DNA

SEQ ID NO: 21531 - DNA, 35 bp, synthetic construct; identical to SEQ ID NO: 6416
  misc_feature 1..35: note = Probe
  source 1..35: mol_type = other DNA

SEQ ID NO: 21532 - DNA, 36 bp, synthetic construct; identical to SEQ ID NO: 6417
  misc_feature 1..36: note = Probe
  source 1..36: mol_type = other DNA

SEQ ID NO: 21533 - DNA, 38 bp, synthetic construct
  misc_feature 1..38: note = Probe
  source 1..38: mol_type = other DNA
ggcccataccccgaaaatgttggttatacccttcccgt

SEQ ID NO: 21534 - DNA, 39 bp, synthetic construct; identical to SEQ ID NO: 6419
  misc_feature 1..39: note = Probe
  source 1..39: mol_type = other DNA

SEQ ID NO: 21535 - DNA, 40 bp, synthetic construct
  misc_feature 1..40: note = Probe
  source 1..40: mol_type = other DNA
ggcccataccccgaaaatgttggttatacccttcccgtac

SEQ ID NO: 21536 - DNA, 41 bp, synthetic construct
  misc_feature 1..41: note = Probe
  source 1..41: mol_type = other DNA
ggcccataccccgaaaatgttggttatacccttcccgtact

SEQ ID NO: 21537 - DNA, 42 bp, synthetic construct
  misc_feature 1..42: note = Probe
  source 1..42: mol_type = other DNA
ggcccataccccgaaaatgttggttatacccttcccgtacta

SEQ ID NO: 21538 - DNA, 44 bp, synthetic construct; identical to SEQ ID NO: 6421
  misc_feature 1..44: note = Probe
  source 1..44: mol_type = other DNA

SEQ ID NO: 21539 - DNA, 45 bp, synthetic construct; identical to SEQ ID NO: 6422
  misc_feature 1..45: note = Probe
  source 1..45: mol_type = other DNA

SEQ ID NO: 21540 - DNA, 31 bp, synthetic construct
  misc_feature 1..31: note = Probe
  source 1..31: mol_type = other DNA
ggccccatggtgtaatggttagcactctgga

SEQ ID NO: 21541 - DNA, 32 bp, synthetic construct; identical to SEQ ID NO: 1262
  misc_feature 1..32: note = Probe
  source 1..32: mol_type = other DNA

SEQ ID NO: 21542 - DNA, 35 bp, synthetic construct
  misc_feature 1..35: note = Probe
  source 1..35: mol_type = other DNA
ggccccatggtgtaatggttagcactctggacttt

SEQ ID NO: 21543 - DNA, 38 bp, synthetic construct
  misc_feature 1..38: note = Probe
  source 1..38: mol_type = other DNA
ggccccatggtgtaatggttagcactctggactttgaa

SEQ ID NO: 21544 - DNA, 26 bp, synthetic construct
  misc_feature 1..26: note = Probe
  source 1..26: mol_type = other DNA
ggccccgggttcaatccccggcacct

SEQ ID NO: 21545 - DNA, 30 bp, synthetic construct
  misc_feature 1..30: note = Probe
  source 1..30: mol_type = other DNA
ggccccgggttcaatccccggcacctccag

SEQ ID NO: 21546 - DNA, 22 bp, synthetic construct
  misc_feature 1..22: note = Probe
  source 1..22: mol_type = other DNA
ggccccgggttcgatccccggc

SEQ ID NO: 21547 - DNA, 27 bp, synthetic construct
  misc_feature 1..27: note = Probe
  source 1..27: mol_type = other DNA
ggccccgggttcgatccccggcatctc

SEQ ID NO: 21548 - DNA, 31 bp, synthetic construct
  misc_feature 1..31: note = Probe
  source 1..31: mol_type = other DNA
ggccccgggttcgatccccggcatctccatt

SEQ ID NO: 21549 - DNA, 32 bp, synthetic construct; identical to SEQ ID NO: 6430
  misc_feature 1..32: note = Probe
  source 1..32: mol_type = other DNA

SEQ ID NO: 21550 - DNA, 33 bp, synthetic construct
  misc_feature 1..33: note = Probe
  source 1..33: mol_type = other DNA
ggcccggatagctcagtcggtagagcatcagac

SEQ ID NO: 21551 - DNA, 34 bp, synthetic construct
  misc_feature 1..34: note = Probe
  source 1..34: mol_type = other DNA
ggcccggatagctcagtcggtagagcatcagact

SEQ ID NO: 21552 - DNA, 36 bp, synthetic construct
  misc_feature 1..36: note = Probe
  source 1..36: mol_type = other DNA
ggcccggatagctcagtcggtagagcatcagacttt

SEQ ID NO: 21553 - DNA, 37 bp, synthetic construct
  misc_feature 1..37: note = Probe
  source 1..37: mol_type = other DNA
ggcccggatagctcagtcggtagagcatcagactttt

SEQ ID NO: 21554 - DNA, 38 bp, synthetic construct
  misc_feature 1..38: note = Probe
  source 1..38: mol_type = other DNA
ggcccggatagctcagtcggtagagcatcagactttta

SEQ ID NO: 21555 - DNA, 29 bp, synthetic construct
  misc_feature 1..29: note = Probe
  source 1..29: mol_type = other DNA
ggcccgggttcgactcccggtatgggaac

SEQ ID NO: 21556 - DNA, 31 bp, synthetic construct; identical to SEQ ID NO: 6431
  misc_feature 1..31: note = Probe
  source 1..31: mol_type = other DNA

SEQ ID NO: 21557 - DNA, 42 bp, synthetic construct
  misc_feature 1..42: note = Probe
  source 1..42: mol_type = other DNA
ggcccgggttcgactcccggtatgggaacaaaagtggctttt

SEQ ID NO: 21558 - DNA, 22 bp, synthetic construct
  misc_feature 1..22: note = Probe
  source 1..22: mol_type = other DNA
ggcccgggttcgactcccggtg

SEQ ID NO: 21559 - DNA, 23 bp, synthetic construct
  misc_feature 1..23: note = Probe
  source 1..23: mol_type = other DNA
ggcccgggttcgactcccggtgt

SEQ ID NO: 21560 - DNA, 25 bp, synthetic construct
  misc_feature 1..25: note = Probe
  source 1..25: mol_type = other DNA
ggcccgggttcgactcccggtgtgg

SEQ ID NO: 21561 - DNA, 31 bp, synthetic construct; identical to SEQ ID NO: 6432
  misc_feature 1..31: note = Probe
  source 1..31: mol_type = other DNA

SEQ ID NO: 21562 - DNA, 23 bp, synthetic construct
  misc_feature 1..23: note = Probe
  source 1..23: mol_type = other DNA
ggcccgggttcgattcccggtca

SEQ ID NO: 21563 - DNA, 31 bp, synthetic construct; identical to SEQ ID NO: 6433
  misc_feature 1..31: note = Probe
  source 1..31: mol_type = other DNA

SEQ ID NO: 21564 - DNA, 16 bp, synthetic construct
  misc_feature 1..16: note = Probe
  source 1..16: mol_type = other DNA
ggccctatagctcagg

SEQ ID NO: 21565 - DNA, 17 bp, synthetic construct
  misc_feature 1..17: note = Probe
  source 1..17: mol_type = other DNA
ggccctatagctcaggg

SEQ ID NO: 21566 - DNA, 18 bp, synthetic construct
  misc_feature 1..18: note = Probe
  source 1..18: mol_type = other DNA
ggccctatagctcagggg

SEQ ID NO: 21567 - DNA, 19 bp, synthetic construct
  misc_feature 1..19: note = Probe
  source 1..19: mol_type = other DNA
ggccctatagctcaggggt

SEQ ID NO: 21568 - DNA, 26 bp, synthetic construct
  misc_feature 1..26: note = Probe
  source 1..26: mol_type = other DNA
ggccctatagctcaggggttagagca

SEQ ID NO: 21569 - DNA, 29 bp, synthetic construct
  misc_feature 1..29: note = Probe
  source 1..29: mol_type = other DNA
ggccctatagctcaggggttagagcactg

SEQ ID NO: 21570 - DNA, 32 bp, synthetic construct; identical to SEQ ID NO: 1269
  misc_feature 1..32: note = Probe
  source 1..32: mol_type = other DNA

SEQ ID NO: 21571 - DNA, 33 bp, synthetic construct; identical to SEQ ID NO: 1270
  misc_feature 1..33: note = Probe
  source 1..33: mol_type = other DNA

SEQ ID NO: 21572 - DNA, 34 bp, synthetic construct
  misc_feature 1..34: note = Probe
  source 1..34: mol_type = other DNA
ggccctatagctcaggggttagagcactggtctt

SEQ ID NO: 21573 - DNA, 36 bp, synthetic construct; identical to SEQ ID NO: 1271
  misc_feature 1..36: note = Probe
  source 1..36: mol_type = other DNA

SEQ ID NO: 21574 - DNA, 41 bp, synthetic construct
  misc_feature 1..41: note = Probe
  source 1..41: mol_type = other DNA
ggccgcccggctagctcagtcggtagagcatgagactctta

SEQ ID NO: 21575 - DNA, 20 bp, synthetic construct
  misc_feature 1..20: note = Probe
  source 1..20: mol_type = other DNA
ggccgcgtggcctaatggat

SEQ ID NO: 21576 - DNA, 16 bp, synthetic construct
  misc_feature 1..16: note = Probe
  source 1..16: mol_type = other DNA
ggccggttagctcagt

SEQ ID NO: 21577 - DNA, 19 bp, synthetic construct
  misc_feature 1..19: note = Probe
  source 1..19: mol_type = other DNA
ggccggttagctcagttgg

SEQ ID NO: 21578 - DNA, 20 bp, synthetic construct
  misc_feature 1..20: note = Probe
  source 1..20: mol_type = other DNA
ggccggttagctcagttggt

SEQ ID NO: 21579 - DNA, 24 bp, synthetic construct
  misc_feature 1..24: note = Probe
  source 1..24: mol_type = other DNA
ggccggttagctcagttggttaga

SEQ ID NO: 21580 - DNA, 26 bp, synthetic construct
  misc_feature 1..26: note = Probe
  source 1..26: mol_type = other DNA
ggccggttagctcagttggttagagc

SEQ ID NO: 21581 - DNA, 32 bp, synthetic construct
  misc_feature 1..32: note = Probe
  source 1..32: mol_type = other DNA
ggccggttagctcagttggttagagcgtggtg

SEQ ID NO: 21582 - DNA, 33 bp, synthetic construct; identical to SEQ ID NO: 6449
  misc_feature 1..33: note = Probe
  source 1..33: mol_type = other DNA

SEQ ID NO: 21583 - DNA, 34 bp, synthetic construct; identical to SEQ ID NO: 6450
  misc_feature 1..34: note = Probe
  source 1..34: mol_type = other DNA

SEQ ID NO: 21584 - DNA, 35 bp, synthetic construct
  misc_feature 1..35: note = Probe
  source 1..35: mol_type = other DNA
ggccggttagctcagttggttagagcgtggtgcta

SEQ ID NO: 21585 - DNA, 28 bp, synthetic construct
  misc_feature 1..28: note = Probe
  source 1..28: mol_type = other DNA
ggcgcaatcggttagcgcgcggtactta

SEQ ID NO: 21586 - DNA, 29 bp, synthetic construct
  misc_feature 1..29: note = Probe
  source 1..29: mol_type = other DNA
ggcgcaatcggttagcgcgcggtacttat

SEQ ID NO: 21587 - DNA, 30 bp, synthetic construct
  misc_feature 1..30: note = Probe
  source 1..30: mol_type = other DNA
ggcgcaatcggttagcgcgcggtacttata

SEQ ID NO: 21588 - DNA, 26 bp, synthetic construct
  misc_feature 1..26: note = Probe
  source 1..26: mol_type = other DNA
ggcgctctcaccgccgcggcccgggt

SEQ ID NO: 21589 - DNA, 27 bp, synthetic construct
  misc_feature 1..27: note = Probe
  source 1..27: mol_type = other DNA
ggcgctctcaccgccgcggcccgggtt

SEQ ID NO: 21590 - DNA, 33 bp, synthetic construct; identical to SEQ ID NO: 6455
  misc_feature 1..33: note = Probe
  source 1..33: mol_type = other DNA

SEQ ID NO: 21591 - DNA, 34 bp, synthetic construct
  misc_feature 1..34: note = Probe
  source 1..34: mol_type = other DNA
ggcggcccgggttcgactcccggtgtgggaacgc

SEQ ID NO: 21592 - DNA, 18 bp, synthetic construct
  misc_feature 1..18: note = Probe
  source 1..18: mol_type = other DNA
ggcgtgattcataccttt

SEQ ID NO: 21593 - DNA, 19 bp, synthetic construct
  misc_feature 1..19: note = Probe
  source 1..19: mol_type = other DNA
ggcgtgattcatacctttt

SEQ ID NO: 21594 - DNA, 20 bp, synthetic construct
  misc_feature 1..20: note = Probe
  source 1..20: mol_type = other DNA
ggcgtgattcataccttttt

SEQ ID NO: 21595 - DNA, 31 bp, synthetic construct
  misc_feature 1..31: note = Probe
  source 1..31: mol_type = other DNA
ggcgtgggttcgaatcccaccgctgccacac

SEQ ID NO: 21596 - DNA, 31 bp, synthetic construct
  misc_feature 1..31: note = Probe
  source 1..31: mol_type = other DNA
ggcgtgggttcgaatcccaccgctgccaggt

SEQ ID NO: 21597 - DNA, 24 bp, synthetic construct
  misc_feature 1..24: note = Probe
  source 1..24: mol_type = other DNA
ggctaaatcctatatatcttaatg

SEQ ID NO: 21598 - DNA, 17 bp, synthetic construct
  misc_feature 1..17: note = Probe
  source 1..17: mol_type = other DNA
ggctagctcagtcggta

SEQ ID NO: 21599 - DNA, 21 bp, synthetic construct
  misc_feature 1..21: note = Probe
  source 1..21: mol_type = other DNA
ggctagctcagtcggtagagc

SEQ ID NO: 21600 - DNA, 26 bp, synthetic construct
  misc_feature 1..26: note = Probe
  source 1..26: mol_type = other DNA
ggctagctcagtcggtagagcatgag

SEQ ID NO: 21601 - DNA, 29 bp, synthetic construct
  misc_feature 1..29: note = Probe
  source 1..29: mol_type = other DNA
ggctagctcagtcggtagagcatgagacc

SEQ ID NO: 21602 - DNA, 30 bp, synthetic construct
  misc_feature 1..30: note = Probe
  source 1..30: mol_type = other DNA
ggctagctcagtcggtagagcatgagaccc

SEQ ID NO: 21603 - DNA, 31 bp, synthetic construct
  misc_feature 1..31: note = Probe
  source 1..31: mol_type = other DNA
ggctagctcagtcggtagagcatgagaccct

SEQ ID NO: 21604 - DNA, 32 bp, synthetic construct; identical to SEQ ID NO: 1287
  misc_feature 1..32: note = Probe
  source 1..32: mol_type = other DNA

SEQ ID NO: 21605 - DNA, 33 bp, synthetic construct; identical to SEQ ID NO: 6459
  misc_feature 1..33: note = Probe
  source 1..33: mol_type = other DNA

SEQ ID NO: 21606 - DNA, 50 bp, synthetic construct; identical to SEQ ID NO: 6461
  misc_feature 1..50: note = Probe
  source 1..50: mol_type = other DNA

SEQ ID NO: 21607 - DNA, 34 bp, synthetic construct
  misc_feature 1..34: note = Probe
  source 1..34: mol_type = other DNA
ggctagctcagtcggtagagcatgggactcttaa

SEQ ID NO: 21608 - DNA, 50 bp, synthetic construct; identical to SEQ ID NO: 6462
  misc_feature 1..50: note = Probe
  source 1..50: mol_type = other DNA

SEQ ID NO: 21609 - DNA, 33 bp, synthetic construct
  misc_feature 1..33: note = Probe
  source 1..33: mol_type = other DNA
ggctaggattcggcgctttcaccgccgcggccc

SEQ ID NO: 21610 - DNA, 16 bp, synthetic construct
  misc_feature 1..16: note = Probe
  source 1..16: mol_type = other DNA
ggctcacatcacccca

SEQ ID NO: 21611 - DNA, 17 bp, synthetic construct
  misc_feature 1..17: note = Probe
  source 1..17: mol_type = other DNA
ggctcacatcaccccat

SEQ ID NO: 21612 - DNA, 18 bp, synthetic construct
  misc_feature 1..18: note = Probe
  source 1..18: mol_type = other DNA
ggctcacatcaccccata

SEQ ID NO: 21613 - DNA, 19 bp, synthetic construct
  misc_feature 1..19: note = Probe
  source 1..19: mol_type = other DNA
ggctcacatcaccccataa

SEQ ID NO: 21614 - DNA, 20 bp, synthetic construct
  misc_feature 1..20: note = Probe
  source 1..20: mol_type = other DNA
ggctcacatcaccccataaa

SEQ ID NO: 21615 - DNA, 21 bp, synthetic construct
  misc_feature 1..21: note = Probe
  source 1..21: mol_type = other DNA
ggctcacatcaccccataaac

SEQ ID NO: 21616 - DNA, 22 bp, synthetic construct
  misc_feature 1..22: note = Probe
  source 1..22: mol_type = other DNA
ggctcacatcaccccataaaca

SEQ ID NO: 21617 - DNA, 23 bp, synthetic construct
  misc_feature 1..23: note = Probe
  source 1..23: mol_type = other DNA
ggctcacatcaccccataaacaa

SEQ ID NO: 21618 - DNA, 24 bp, synthetic construct
  misc_feature 1..24: note = Probe
  source 1..24: mol_type = other DNA
ggctcacatcaccccataaacaaa

SEQ ID NO: 21619 - DNA, 25 bp, synthetic construct
  misc_feature 1..25: note = Probe
  source 1..25: mol_type = other DNA
ggctcacatcaccccataaacaaat

SEQ ID NO: 21620 - DNA, 26 bp, synthetic construct
  misc_feature 1..26: note = Probe
  source 1..26: mol_type = other DNA
ggctcacatcaccccataaacaaata

SEQ ID NO: 21621 - DNA, 16 bp, synthetic construct
  misc_feature 1..16: note = Probe
  source 1..16: mol_type = other DNA
ggctccatagctcagg

SEQ ID NO: 21622 - DNA, 17 bp, synthetic construct
  misc_feature 1..17: note = Probe
  source 1..17: mol_type = other DNA
ggctccatagctcaggg

SEQ ID NO: 21623 - DNA, 18 bp, synthetic construct
  misc_feature 1..18: note = Probe
  source 1..18: mol_type = other DNA
ggctccatagctcagggg

SEQ ID NO: 21624 - DNA, 19 bp, synthetic construct
  misc_feature 1..19: note = Probe
  source 1..19: mol_type = other DNA
ggctccatagctcaggggt

SEQ ID NO: 21625 - DNA, 20 bp, synthetic construct
  misc_feature 1..20: note = Probe
  source 1..20: mol_type = other DNA
ggctccatagctcaggggtt

SEQ ID NO: 21626 - DNA, 23 bp, synthetic construct
  misc_feature 1..23: note = Probe
  source 1..23: mol_type = other DNA
ggctccatagctcaggggttaga

SEQ ID NO: 21627 - DNA, 25 bp, synthetic construct
  misc_feature 1..25: note = Probe
  source 1..25: mol_type = other DNA
ggctccatagctcaggggttagagc

SEQ ID NO: 21628 - DNA, 26 bp, synthetic construct
  misc_feature 1..26: note = Probe
  source 1..26: mol_type = other DNA
ggctccatagctcaggggttagagca

SEQ ID NO: 21629 - DNA, 28 bp, synthetic construct
  misc_feature 1..28: note = Probe
  source 1..28: mol_type = other DNA
ggctccatagctcaggggttagagcact

SEQ ID NO: 21630 - DNA, 29 bp, synthetic construct
  misc_feature 1..29: note = Probe
  source 1..29: mol_type = other DNA
ggctccatagctcaggggttagagcactg

SEQ ID NO: 21631 - DNA, 30 bp, synthetic construct; identical to SEQ ID NO: 10696
  misc_feature 1..30: note = Probe
  source 1..30: mol_type = other DNA

SEQ ID NO: 21632 - DNA, 31 bp, synthetic construct; identical to SEQ ID NO: 6482
  misc_feature 1..31: note = Probe
  source 1..31: mol_type = other DNA

SEQ ID NO: 21633 - DNA, 32 bp, synthetic construct; identical to SEQ ID NO: 6483
  misc_feature 1..32: note = Probe
  source 1..32: mol_type = other DNA

SEQ ID NO: 21634 - DNA, 33 bp, synthetic construct; identical to SEQ ID NO: 6484
  misc_feature 1..33: note = Probe
  source 1..33: mol_type = other DNA

SEQ ID NO: 21635 - DNA, 34 bp, synthetic construct; identical to SEQ ID NO: 6485
  misc_feature 1..34: note = Probe
  source 1..34: mol_type = other DNA

SEQ ID NO: 21636 - DNA, 35 bp, synthetic construct; identical to SEQ ID NO: 6486
  misc_feature 1..35: note = Probe
  source 1..35: mol_type = other DNA

SEQ ID NO: 21637 - DNA, 36 bp, synthetic construct; identical to SEQ ID NO: 6487
  misc_feature 1..36: note = Probe
  source 1..36: mol_type = other DNA

SEQ ID NO: 21638 - DNA, 37 bp, synthetic construct; identical to SEQ ID NO: 6488
  misc_feature 1..37: note = Probe
  source 1..37: mol_type = other DNA

SEQ ID NO: 21639 - DNA, 29 bp, synthetic construct
  misc_feature 1..29: note = Probe
  source 1..29: mol_type = other DNA
ggctccatagctcagtggttagagcactg

SEQ ID NO: 21640 - DNA, 33 bp, synthetic construct; identical to SEQ ID NO: 1300
  misc_feature 1..33: note = Probe
  source 1..33: mol_type = other DNA

SEQ ID NO: 21641 - DNA, 36 bp, synthetic construct; identical to SEQ ID NO: 1301
  misc_feature 1..36: note = Probe
  source 1..36: mol_type = other DNA

SEQ ID NO: 21642 - DNA, 20 bp, synthetic construct
  misc_feature 1..20: note = Probe
  source 1..20: mol_type = other DNA
ggctccgtggcgcaatggat

SEQ ID NO: 21643 - DNA, 29 bp, synthetic construct
  misc_feature 1..29: note = Probe
  source 1..29: mol_type = other DNA
ggctccgtggcgcaatggatagcgcattg

SEQ ID NO: 21644 - DNA, 31 bp, synthetic construct
  misc_feature 1..31: note = Probe
  source 1..31: mol_type = other DNA
ggctccgtggcgcaatggatagcgcattgga

SEQ ID NO: 21645 - DNA, 32 bp, synthetic construct; identical to SEQ ID NO: 1304
  misc_feature 1..32: note = Probe
  source 1..32: mol_type = other DNA

SEQ ID NO: 21646 - DNA, 35 bp, synthetic construct
  misc_feature 1..35: note = Probe
  source 1..35: mol_type = other DNA
ggctccgtggcgcaatggatagcgcattggacttc

SEQ ID NO: 21647 - DNA, 25 bp, synthetic construct
  misc_feature 1..25: note = Probe
  source 1..25: mol_type = other DNA
ggctcgaaggacttcgtctgtaatt

SEQ ID NO: 21648 - DNA, 24 bp, synthetic construct
  misc_feature 1..24: note = Probe
  source 1..24: mol_type = other DNA
ggctcgttggtctaggggtatgat

SEQ ID NO: 21649 - DNA, 25 bp, synthetic construct
  misc_feature 1..25: note = Probe
  source 1..25: mol_type = other DNA
ggctcgttggtctaggggtatgatt

SEQ ID NO: 21650 - DNA, 26 bp, synthetic construct
  misc_feature 1..26: note = Probe
  source 1..26: mol_type = other DNA
ggctcgttggtctaggggtatgattc

SEQ ID NO: 21651 - DNA, 27 bp, synthetic construct
  misc_feature 1..27: note = Probe
  source 1..27: mol_type = other DNA
ggctcgttggtctaggggtatgattct

SEQ ID NO: 21652 - DNA, 28 bp, synthetic construct
  misc_feature 1..28: note = Probe
  source 1..28: mol_type = other DNA
ggctcgttggtctaggggtatgattctc

SEQ ID NO: 21653 - DNA, 29 bp, synthetic construct
  misc_feature 1..29: note = Probe
  source 1..29: mol_type = other DNA
ggctcgttggtctaggggtatgattctcg

SEQ ID NO: 21654 - DNA, 30 bp, synthetic construct; identical to SEQ ID NO: 6496
  misc_feature 1..30: note = Probe
  source 1..30: mol_type = other DNA

SEQ ID NO: 21655 - DNA, 31 bp, synthetic construct; identical to SEQ ID NO: 6497
  misc_feature 1..31: note = Probe
  source 1..31: mol_type = other DNA

SEQ ID NO: 21656 - DNA, 32 bp, synthetic construct; identical to SEQ ID NO: 6498
  misc_feature 1..32: note = Probe
  source 1..32: mol_type = other DNA

SEQ ID NO: 21657 - DNA, 33 bp, synthetic construct; identical to SEQ ID NO: 6499
  misc_feature 1..33: note = Probe
  source 1..33: mol_type = other DNA

SEQ ID NO: 21658 - DNA, 34 bp, synthetic construct; identical to SEQ ID NO: 6500
  misc_feature 1..34: note = Probe
  source 1..34: mol_type = other DNA

SEQ ID NO: 21659 - DNA, 33 bp, synthetic construct; identical to SEQ ID NO: 1307
  misc_feature 1..33: note = Probe
  source 1..33: mol_type = other DNA

SEQ ID NO: 21660 - DNA, 31 bp, synthetic construct; identical to SEQ ID NO: 6502
  misc_feature 1..31: note = Probe
  source 1..31: mol_type = other DNA

SEQ ID NO: 21661 - DNA, 33 bp, synthetic construct; identical to SEQ ID NO: 6503
  misc_feature 1..33: note = Probe
  source 1..33: mol_type = other DNA

SEQ ID NO: 21662 - DNA, 34 bp, synthetic construct
  misc_feature 1..34: note = Probe
  source 1..34: mol_type = other DNA
ggctcgttggtctaggggtatgattctcggtttg

SEQ ID NO: 21663 - DNA, 30 bp, synthetic construct; identical to SEQ ID NO: 10734
  misc_feature 1..30: note = Probe
  source 1..30: mol_type = other DNA

SEQ ID NO: 21664 - DNA, 32 bp, synthetic construct; identical to SEQ ID NO: 6504
  misc_feature 1..32: note = Probe
  source 1..32: mol_type = other DNA

SEQ ID NO: 21665 - DNA, 22 bp, synthetic construct
  misc_feature 1..22: note = Probe
  source 1..22: mol_type = other DNA
ggctggctcgcgatgtctgttt

SEQ ID NO: 21666 - DNA, 23 bp, synthetic construct
  misc_feature 1..23: note = Probe
  source 1..23: mol_type = other DNA
ggctggctcgcgatgtctgtttt

SEQ ID NO: 21667 - DNA, 32 bp, synthetic construct
  misc_feature 1..32: note = Probe
  source 1..32: mol_type = other DNA
ggctgggggatgtagctcagtggtagagcgcg

SEQ ID NO: 21668 - DNA, 34 bp, synthetic construct
  misc_feature 1..34: note = Probe
  source 1..34: mol_type = other DNA
ggctgggggatgtagctcagtggtagagcgcgcg

SEQ ID NO: 21669 - DNA, 32 bp, synthetic construct; identical to SEQ ID NO: 6505
  misc_feature 1..32: note = Probe
  source 1..32: mol_type = other DNA

SEQ ID NO: 21670 - DNA, 38 bp, synthetic construct
  misc_feature 1..38: note = Probe
  source 1..38: mol_type = other DNA
ggctgtggctccgtggcttagctggttaaagcgcctgt

SEQ ID NO: 21671 - DNA, 25 bp, synthetic construct
  misc_feature 1..25: note = Probe
  source 1..25: mol_type = other DNA
ggctgttaaccgaaaggttggtggt

SEQ ID NO: 21672 - DNA, 42 bp, synthetic construct
  misc_feature 1..42: note = Probe
  source 1..42: mol_type = other DNA
ggctgttaaccgaaaggttggtggttcgagcccacccaggga

SEQ ID NO: 21673 - DNA, 22 bp, synthetic construct
  misc_feature 1..22: note = Probe
  source 1..22: mol_type = other DNA
ggcttacgaccccttatttacc

SEQ ID NO: 21674 - DNA, 23 bp, synthetic construct
  misc_feature 1..23: note = Probe
  source 1..23: mol_type = other DNA
ggcttacgaccccttatttaccg

SEQ ID NO: 21675 - DNA, 24 bp, synthetic construct
  misc_feature 1..24: note = Probe
  source 1..24: mol_type = other DNA
ggcttagttggttaaagcgcctgt

SEQ ID NO: 21676 - DNA, 31 bp, synthetic construct
  misc_feature 1..31: note = Probe
  source 1..31: mol_type = other DNA
ggcttgtcctcgttagtatagtggtgagtat

SEQ ID NO: 21677 - DNA, 33 bp, synthetic construct
  misc_feature 1..33: note = Probe
  source 1..33: mol_type = other DNA
ggcttgtcctcgttagtatagtggtgagtatcc

SEQ ID NO: 21678 - DNA, 34 bp, synthetic construct
  misc_feature 1..34: note = Probe
  source 1..34: mol_type = other DNA
ggcttgtcctcgttagtatagtggtgagtatccc

SEQ ID NO: 21679 - DNA, 36 bp, synthetic construct
  misc_feature 1..36: note = Probe
  source 1..36: mol_type = other DNA
ggcttgtcctcgttagtatagtggtgagtatccccg

SEQ ID NO: 21680 - DNA, 38 bp, synthetic construct
  misc_feature 1..38: note = Probe
  source 1..38: mol_type = other DNA
ggcttgtcctcgttagtatagtggtgagtatccccgcc

SEQ ID NO: 21681 - DNA, 40 bp, synthetic construct
  misc_feature 1..40: note = Probe
  source 1..40: mol_type = other DNA
ggcttgtcctcgttagtatagtggtgagtatccccgcctg

SEQ ID NO: 21682 - DNA, 41 bp, synthetic construct
  misc_feature 1..41: note = Probe
  source 1..41: mol_type = other DNA
ggcttgtcctcgttagtatagtggtgagtatccccgcctgt

SEQ ID NO: 21683 - DNA, 42 bp, synthetic construct
  misc_feature 1..42: note = Probe
  source 1..42: mol_type = other DNA
ggcttgtcctcgttagtatagtggtgagtatccccgcctgtc

SEQ ID NO: 21684 - DNA, 17 bp, synthetic construct
  misc_feature 1..17: note = Probe
  source 1..17: mol_type = other DNA
gggacctcacgagactt

SEQ ID NO: 21685 - DNA, 31 bp, synthetic construct
  misc_feature 1..31: note = Probe
  source 1..31: mol_type = other DNA
gggacgaggtggccgagtggttaaggcgatg

SEQ ID NO: 21686 - DNA, 39 bp, synthetic construct
  misc_feature 1..39: note = Probe
  source 1..39: mol_type = other DNA
gggacgaggtggccgagtggttaaggcgatggactgcta

SEQ ID NO: 21687 - DNA, 25 bp, synthetic construct
  misc_feature 1..25: note = Probe
  source 1..25: mol_type = other DNA
gggagaccggggttcaattccccga

SEQ ID NO: 21688 - DNA, 27 bp, synthetic construct
  misc_feature 1..27: note = Probe
  source 1..27: mol_type = other DNA
gggagaccggggttcaattccccgacg

SEQ ID NO: 21689 - DNA, 30 bp, synthetic construct; identical to SEQ ID NO: 1312
  misc_feature 1..30: note = Probe
  source 1..30: mol_type = other DNA

SEQ ID NO: 21690 - DNA, 31 bp, synthetic construct; identical to SEQ ID NO: 6508
  misc_feature 1..31: note = Probe
  source 1..31: mol_type = other DNA

SEQ ID NO: 21691 - DNA, 32 bp, synthetic construct; identical to SEQ ID NO: 6509
  misc_feature 1..32: note = Probe
  source 1..32: mol_type = other DNA

SEQ ID NO: 21692 - DNA, 33 bp, synthetic construct; identical to SEQ ID NO: 6510
  misc_feature 1..33: note = Probe
  source 1..33: mol_type = other DNA

SEQ ID NO: 21693 - DNA, 34 bp, synthetic construct
  misc_feature 1..34: note = Probe
  source 1..34: mol_type = other DNA
gggagaccggggttcaattccccgacggggaggt

SEQ ID NO: 21694 - DNA, 35 bp, synthetic construct; identical to SEQ ID NO: 6511
  misc_feature 1..35: note = Probe
  source 1..35: mol_type = other DNA

SEQ ID NO: 21695 - DNA, 31 bp, synthetic construct
  misc_feature 1..31: note = Probe
  source 1..31: mol_type = other DNA
gggagaccggggttcgattccccaacgggga

SEQ ID NO: 21696 - DNA, 32 bp, synthetic construct
  misc_feature 1..32: note = Probe
  source 1..32: mol_type = other DNA
gggagaccggggttcgattccccaacggggag

SEQ ID NO: 21697 - DNA, 33 bp, synthetic construct
  misc_feature 1..33: note = Probe
  source 1..33: mol_type = other DNA
gggagaccggggttcgattccccaacggggagg

SEQ ID NO: 21698 - DNA, 35 bp, synthetic construct; identical to SEQ ID NO: 6512
  misc_feature 1..35: note = Probe
  source 1..35: mol_type = other DNA

SEQ ID NO: 21699 - DNA, 33 bp, synthetic construct; identical to SEQ ID NO: 6516
  misc_feature 1..33: note = Probe
  source 1..33: mol_type = other DNA

SEQ ID NO: 21700 - DNA, 34 bp, synthetic construct
  misc_feature 1..34: note = Probe
  source 1..34: mol_type = other DNA
gggagaccggggttcgattccccgacggggagaa

SEQ ID NO: 21701 - DNA, 35 bp, synthetic construct; identical to SEQ ID NO: 6517
  misc_feature 1..35: note = Probe
  source 1..35: mol_type = other DNA

SEQ ID NO: 21702 - DNA, 49 bp, synthetic construct
  misc_feature 1..49: note = Probe
  source 1..49: mol_type = other DNA
gggagaccggggttcgattccccgacggggagaaaagttgctttttgca

SEQ ID NO: 21703 - DNA, 50 bp, synthetic construct
  misc_feature 1..50: note = Probe
  source 1..50: mol_type = other DNA
gggagaccggggttcgattccccgacggggagaaaagttgctttttgcat

SEQ ID NO: 21704 - DNA, 34 bp, synthetic construct
  misc_feature 1..34: note = Probe
  source 1..34: mol_type = other DNA
gggagaccggggttcgattccccgacggggagac

SEQ ID NO: 21705 - DNA, 35 bp, synthetic construct; identical to SEQ ID NO: 6518
  misc_feature 1..35: note = Probe
  source 1..35: mol_type = other DNA

SEQ ID NO: 21706 - DNA, 34 bp, synthetic construct
  misc_feature 1..34: note = Probe
  source 1..34: mol_type = other DNA
gggagaccggggttcgattccccgacggggagag

SEQ ID NO: 21707 - DNA, 35 bp, synthetic construct
  misc_feature 1..35: note = Probe
  source 1..35: mol_type = other DNA
gggagaccggggttcgattccccgacggggagagt

SEQ ID NO: 21708 - DNA, 33 bp, synthetic construct; identical to SEQ ID NO: 6519
  misc_feature 1..33: note = Probe
  source 1..33: mol_type = other DNA

SEQ ID NO: 21709 - DNA, 34 bp, synthetic construct
  misc_feature 1..34: note = Probe
  source 1..34: mol_type = other DNA
gggagaccggggttcgattccccgacggggagga

SEQ ID NO: 21710 - DNA, 35 bp, synthetic construct
  misc_feature 1..35: note = Probe
  source 1..35: mol_type = other DNA
gggagaccggggttcgattccccgacggggaggag

SEQ ID NO: 21711 - DNA, 34 bp, synthetic construct
  misc_feature 1..34: note = Probe
  source 1..34: mol_type = other DNA
gggagaccggggttcgattccccgacggggaggc

SEQ ID NO: 21712 - DNA, 35 bp, synthetic construct; identical to SEQ ID NO: 6520
  misc_feature 1..35: note = Probe
  source 1..35: mol_type = other DNA

SEQ ID NO: 21713 - DNA, 36 bp, synthetic construct
  misc_feature 1..36: note = Probe
  source 1..36: mol_type = other DNA
gggagaccggggttcgattccccgacggggaggcac

SEQ ID NO: 21714 - DNA, 35 bp, synthetic construct; identical to SEQ ID NO: 6521
  misc_feature 1..35: note = Probe
  source 1..35: mol_type = other DNA

SEQ ID NO: 21715 - DNA, 25 bp, synthetic construct
  misc_feature 1..25: note = Probe
  source 1..25: mol_type = other DNA
gggagcccggatagctcagtcggta

SEQ ID NO: 21716 - DNA, 27 bp, synthetic construct
  misc_feature 1..27: note = Probe
  source 1..27: mol_type = other DNA
gggagcccggatagctcagtcggtaga

SEQ ID NO: 21717 - DNA, 29 bp, synthetic construct
  misc_feature 1..29: note = Probe
  source 1..29: mol_type = other DNA
gggagcccggatagctcagtcggtagagc

SEQ ID NO: 21718 - DNA, 30 bp, synthetic construct
  misc_feature 1..30: note = Probe
  source 1..30: mol_type = other DNA
gggagcccggatagctcagtcggtagagca

SEQ ID NO: 21719 - DNA, 33 bp, synthetic construct
  misc_feature 1..33: note = Probe
  source 1..33: mol_type = other DNA
gggagcccggatagctcagtcggtagagcatca

SEQ ID NO: 21720 - DNA, 34 bp, synthetic construct
  misc_feature 1..34: note = Probe
  source 1..34: mol_type = other DNA
gggagcccggatagctcagtcggtagagcatcag

SEQ ID NO: 21721 - DNA, 35 bp, synthetic construct
  misc_feature 1..35: note = Probe
  source 1..35: mol_type = other DNA
gggagcccggatagctcagtcggtagagcatcaga

SEQ ID NO: 21722 - DNA, 36 bp, synthetic construct
  misc_feature 1..36: note = Probe
  source 1..36: mol_type = other DNA
gggagcccggatagctcagtcggtagagcatcagac

SEQ ID NO: 21723 - DNA, 37 bp, synthetic construct
  misc_feature 1..37: note = Probe
  source 1..37: mol_type = other DNA
gggagcccggatagctcagtcggtagagcatcagact

SEQ ID NO: 21724 - DNA, 38 bp, synthetic construct
  misc_feature 1..38: note = Probe
  source 1..38: mol_type = other DNA
gggagcccggatagctcagtcggtagagcatcagactt

SEQ ID NO: 21725 - DNA, 39 bp, synthetic construct
  misc_feature 1..39: note = Probe
  source 1..39: mol_type = other DNA
gggagcccggatagctcagtcggtagagcatcagacttt

SEQ ID NO: 21726 - DNA, 40 bp, synthetic construct
  misc_feature 1..40: note = Probe
  source 1..40: mol_type = other DNA
gggagcccggatagctcagtcggtagagcatcagactttt

SEQ ID NO: 21727 - DNA, 41 bp, synthetic construct
  misc_feature 1..41: note = Probe
  source 1..41: mol_type = other DNA
gggagcccggatagctcagtcggtagagcatcagactttta

SEQ ID NO: 21728 - DNA, 42 bp, synthetic construct
  misc_feature 1..42: note = Probe
  source 1..42: mol_type = other DNA
gggagcccggatagctcagtcggtagagcatcagacttttaa

SEQ ID NO: 21729 - DNA, 22 bp, synthetic construct
  misc_feature 1..22: note = Probe
  source 1..22: mol_type = other DNA
gggagcgcccggatagctcagt

SEQ ID NO: 21730 - DNA, 27 bp, synthetic construct
  misc_feature 1..27: note = Probe
  source 1..27: mol_type = other DNA
gggagcgcccggatagctcagtcggta

SEQ ID NO: 21731 - DNA, 28 bp, synthetic construct
  misc_feature 1..28: note = Probe
  source 1..28: mol_type = other DNA
gggagcgcccggatagctcagtcggtag

SEQ ID NO: 21732 - DNA, 29 bp, synthetic construct
  misc_feature 1..29: note = Probe
  source 1..29: mol_type = other DNA
gggagcgcccggatagctcagtcggtaga

SEQ ID NO: 21733 - DNA, 30 bp, synthetic construct
  misc_feature 1..30: note = Probe
  source 1..30: mol_type = other DNA
gggagcgcccggatagctcagtcggtagag

SEQ ID NO: 21734 - DNA, 31 bp, synthetic construct
  misc_feature 1..31: note = Probe
  source 1..31: mol_type = other DNA
gggagcgcccggatagctcagtcggtagagc

SEQ ID NO: 21735 - DNA, 32 bp, synthetic construct
  misc_feature 1..32: note = Probe
  source 1..32: mol_type = other DNA
gggagcgcccggatagctcagtcggtagagca

SEQ ID NO: 21736 - DNA, 33 bp, synthetic construct
  misc_feature 1..33: note = Probe
  source 1..33: mol_type = other DNA
gggagcgcccggatagctcagtcggtagagcat

SEQ ID NO: 21737 - DNA, 35 bp, synthetic construct
  misc_feature 1..35: note = Probe
  source 1..35: mol_type = other DNA
gggagcgcccggatagctcagtcggtagagcatca

SEQ ID NO: 21738 - DNA, 36 bp, synthetic construct
  misc_feature 1..36: note = Probe
  source 1..36: mol_type = other DNA
gggagcgcccggatagctcagtcggtagagcatcag

SEQ ID NO: 21739 - DNA, 37 bp, synthetic construct
  misc_feature 1..37: note = Probe
  source 1..37: mol_type = other DNA
gggagcgcccggatagctcagtcggtagagcatcaga

SEQ ID NO: 21740 - DNA, 38 bp, synthetic construct
  misc_feature 1..38: note = Probe
  source 1..38: mol_type = other DNA
gggagcgcccggatagctcagtcggtagagcatcagac

SEQ ID NO: 21741 - DNA, 39 bp, synthetic construct; identical to SEQ ID NO: 6522
  misc_feature 1..39: note = Probe
  source 1..39: mol_type = other DNA

SEQ ID NO: 21742 - DNA, 40 bp, synthetic construct
  misc_feature 1..40: note = Probe
  source 1..40: mol_type = other DNA
gggagcgcccggatagctcagtcggtagagcatcagactt

SEQ ID NO: 21743 - DNA, 41 bp, synthetic construct
  misc_feature 1..41: note = Probe
  source 1..41: mol_type = other DNA
gggagcgcccggatagctcagtcggtagagcatcagacttt

SEQ ID NO: 21744 - DNA, 42 bp, synthetic construct
  misc_feature 1..42: note = Probe
  source 1..42: mol_type = other DNA
gggagcgcccggatagctcagtcggtagagcatcagactttt

SEQ ID NO: 21745 - DNA, 43 bp, synthetic construct
  misc_feature 1..43: note = Probe
  source 1..43: mol_type = other DNA
gggagcgcccggatagctcagtcggtagagcatcagactttta

SEQ ID NO: 21746 - DNA, 44 bp, synthetic construct
  misc_feature 1..44: note = Probe
  source 1..44: mol_type = other DNA
gggagcgcccggatagctcagtcggtagagcatcagacttttaa

SEQ ID NO: 21747 - DNA, 45 bp, synthetic construct
  misc_feature 1..45: note = Probe
  source 1..45: mol_type = other DNA
gggagcgcccggatagctcagtcggtagagcatcagacttttaat

SEQ ID NO: 21748 - DNA, 50 bp, synthetic construct
  misc_feature 1..50: note = Probe
  source 1..50: mol_type = other DNA
gggagcgcccggatagctcagtcggtagagcatcagacttttaatctgag

SEQ ID NO: 21749 - DNA, 24 bp, synthetic construct
  misc_feature 1..24: note = Probe
  source 1..24: mol_type = other DNA
gggagcgttttgtggatttgtttt

SEQ ID NO: 21750 - DNA, 25 bp, synthetic construct
  misc_feature 1..25: note = Probe
  source 1..25: mol_type = other DNA
gggaggcccgggttcgattcccggc

SEQ ID NO: 21751 - DNA, 26 bp, synthetic construct
  misc_feature 1..26: note = Probe
  source 1..26: mol_type = other DNA
gggaggcccgggttcgattcccggcc

SEQ ID NO: 21752 - DNA, 29 bp, synthetic construct
  misc_feature 1..29: note = Probe
  source 1..29: mol_type = other DNA
gggaggcccgggttcgattcccggccaat

SEQ ID NO: 21753 - DNA, 30 bp, synthetic construct
  misc_feature 1..30: note = Probe
  source 1..30: mol_type = other DNA
gggaggcccgggttcgattcccggccaatg

SEQ ID NO: 21754 - DNA, 31 bp, synthetic construct; identical to SEQ ID NO: 6525
  misc_feature 1..31: note = Probe
  source 1..31: mol_type = other DNA

SEQ ID NO: 21755 - DNA, 32 bp, synthetic construct; identical to SEQ ID NO: 6526
  misc_feature 1..32: note = Probe
  source 1..32: mol_type = other DNA

SEQ ID NO: 21756 - DNA, 35 bp, synthetic construct
  misc_feature 1..35: note = Probe
  source 1..35: mol_type = other DNA
gggaggcccgggttcgattcccggccaatgcaagt

SEQ ID NO: 21757 - DNA, 33 bp, synthetic construct
  misc_feature 1..33: note = Probe
  source 1..33: mol_type = other DNA
gggaggcccgggttcgattcccggccaatgcac

SEQ ID NO: 21758 - DNA, 35 bp, synthetic construct
  misc_feature 1..35: note = Probe
  source 1..35: mol_type = other DNA
gggaggcccgggttcgattcccggccaatgcacga

SEQ ID NO: 21759 - DNA, 35 bp, synthetic construct
  misc_feature 1..35: note = Probe
  source 1..35: mol_type = other DNA
gggaggcccgggttcgattcccggccaatgcagca

SEQ ID NO: 21760 - DNA, 29 bp, synthetic construct
  misc_feature 1..29: note = Probe
  source 1..29: mol_type = other DNA
gggaggcccgggttcgattcccggcccat

SEQ ID NO: 21761 - DNA, 30 bp, synthetic construct
  misc_feature 1..30: note = Probe
  source 1..30: mol_type = other DNA
gggaggcccgggttcgattcccggcccatg

SEQ ID NO: 21762 - DNA, 31 bp, synthetic construct; identical to SEQ ID NO: 6527
  misc_feature 1..31: note = Probe
  source 1..31: mol_type = other DNA

SEQ ID NO: 21763 - DNA, 32 bp, synthetic construct; identical to SEQ ID NO: 6528
  misc_feature 1..32: note = Probe
  source 1..32: mol_type = other DNA

SEQ ID NO: 21764 - DNA, 33 bp, synthetic construct
  misc_feature 1..33: note = Probe
  source 1..33: mol_type = other DNA
gggaggcccgggttcgattcccggcccatgcag

SEQ ID NO: 21765 - DNA, 34 bp, synthetic construct
  misc_feature 1..34: note = Probe
  source 1..34: mol_type = other DNA
gggaggcccgggttcgattcccggcccatgcagc

SEQ ID NO: 21766 - DNA, 35 bp, synthetic construct
  misc_feature 1..35: note = Probe
  source 1..35: mol_type = other DNA
gggaggcccgggttcgattcccggcccatgcagca

SEQ ID NO: 21767 - DNA, 21 bp, synthetic construct
  misc_feature 1..21: note = Probe
  source 1..21: mol_type = other DNA
gggaggtagcgtggccgagtg

SEQ ID NO: 21768 - DNA, 23 bp, synthetic construct
  misc_feature 1..23: note = Probe
  source 1..23: mol_type = other DNA
gggaggtagcgtggccgagtggt

SEQ ID NO: 21769 - DNA, 24 bp, synthetic construct
  misc_feature 1..24: note = Probe
  source 1..24: mol_type = other DNA
gggaggtagcgtggccgagtggtc

SEQ ID NO: 21770 - DNA, 25 bp, synthetic construct
  misc_feature 1..25: note = Probe
  source 1..25: mol_type = other DNA
gggaggtagcgtggccgagtggtct

SEQ ID NO: 21771 - DNA, 26 bp, synthetic construct
  misc_feature 1..26: note = Probe
  source 1..26: mol_type = other DNA
gggaggtagcgtggccgagtggtcta

SEQ ID NO: 21772 - DNA, 27 bp, synthetic construct
  misc_feature 1..27: note = Probe
  source 1..27: mol_type = other DNA
gggaggtagcgtggccgagtggtctaa

SEQ ID NO: 21773 - DNA, 33 bp, synthetic construct
  misc_feature 1..33: note = Probe
  source 1..33: mol_type = other DNA
gggaggtagcgtggccgagtggtctaaggcgct

SEQ ID NO: 21774 - DNA, 37 bp, synthetic construct
  misc_feature 1..37: note = Probe
  source 1..37: mol_type = other DNA
gggaggtagcgtggccgagtggtctaaggcgctggat

SEQ ID NO: 21775 - DNA, 38 bp, synthetic construct
  misc_feature 1..38: note = Probe
  source 1..38: mol_type = other DNA
gggaggtagcgtggccgagtggtctaaggcgctggatt

SEQ ID NO: 21776 - DNA, 39 bp, synthetic construct
  misc_feature 1..39: note = Probe
  source 1..39: mol_type = other DNA
gggaggtagcgtggccgagtggtctaaggcgctggattt

SEQ ID NO: 21777 - DNA, 40 bp, synthetic construct
  misc_feature 1..40: note = Probe
  source 1..40: mol_type = other DNA
gggaggtagcgtggccgagtggtctaaggcgctggattta

SEQ ID NO: 21778 - DNA, 41 bp, synthetic construct
  misc_feature 1..41: note = Probe
  source 1..41: mol_type = other DNA
gggaggtagcgtggccgagtggtctaaggcgctggatttag

SEQ ID NO: 21779 - DNA, 42 bp, synthetic construct
  misc_feature 1..42: note = Probe
  source 1..42: mol_type = other DNA
gggaggtagcgtggccgagtggtctaaggcgctggatttagg

SEQ ID NO: 21780 - DNA, 43 bp, synthetic construct
  misc_feature 1..43: note = Probe
  source 1..43: mol_type = other DNA
gggaggtagcgtggccgagtggtctaaggcgctggatttaggc

SEQ ID NO: 21781 - DNA, 44 bp, synthetic construct
  misc_feature 1..44: note = Probe
  source 1..44: mol_type = other DNA
gggaggtagcgtggccgagtggtctaaggcgctggatttaggct

SEQ ID NO: 21782 - DNA, 50 bp, synthetic construct
  misc_feature 1..50: note = Probe
  source 1..50: mol_type = other DNA
gggaggtagcgtggccgagtggtctaaggcgctggatttaggctccagtc

SEQ ID NO: 21783 - DNA, 25 bp, synthetic construct
  misc_feature 1..25: note = Probe
  source 1..25: mol_type = other DNA
gggatgggttcgattctcatagtcc

SEQ ID NO: 21784 - DNA, 26 bp, synthetic construct
  misc_feature 1..26: note = Probe
  source 1..26: mol_type = other DNA
gggatgggttcgattctcatagtcct

SEQ ID NO: 21785 - DNA, 30 bp, synthetic construct; identical to SEQ ID NO: 6529
  misc_feature 1..30: note = Probe
  source 1..30: mol_type = other DNA

SEQ ID NO: 21786 - DNA, 31 bp, synthetic construct; identical to SEQ ID NO: 6530
  misc_feature 1..31: note = Probe
  source 1..31: mol_type = other DNA

SEQ ID NO: 21787 - DNA, 29 bp, synthetic construct
  misc_feature 1..29: note = Probe
  source 1..29: mol_type = other DNA
gggattagctcaaatggtagagcgctcgc

SEQ ID NO: 21788 - DNA, 24 bp, synthetic construct
  misc_feature 1..24: note = Probe
  source 1..24: mol_type = other DNA
gggattgtgggttcgagtcccatc

SEQ ID NO: 21789 - DNA, 25 bp, synthetic construct
  misc_feature 1..25: note = Probe
  source 1..25: mol_type = other DNA
gggattgtgggttcgagtcccatct

SEQ ID NO: 21790 - DNA, 26 bp, synthetic construct
  misc_feature 1..26: note = Probe
  source 1..26: mol_type = other DNA
gggattgtgggttcgagtcccatctg

SEQ ID NO: 21791 - DNA, 27 bp, synthetic construct
  misc_feature 1..27: note = Probe
  source 1..27: mol_type = other DNA
gggattgtgggttcgagtcccatctgg

SEQ ID NO: 21792 - DNA, 32 bp, synthetic construct; identical to SEQ ID NO: 1323
  misc_feature 1..32: note = Probe
  source 1..32: mol_type = other DNA

SEQ ID NO: 21793 - DNA, 19 bp, synthetic construct
  misc_feature 1..19: note = Probe
  source 1..19: mol_type = other DNA
gggccagtggcgcaatgga

SEQ ID NO: 21794 - DNA, 20 bp, synthetic construct
  misc_feature 1..20: note = Probe
  source 1..20: mol_type = other DNA
gggccagtggcgcaatggat

SEQ ID NO: 21795 - DNA, 26 bp, synthetic construct
  misc_feature 1..26: note = Probe
  source 1..26: mol_type = other DNA
gggcccataacccagaggtcgatgga

SEQ ID NO: 21796 - DNA, 28 bp, synthetic construct
  misc_feature 1..28: note = Probe
  source 1..28: mol_type = other DNA
gggcccataacccagaggtcgatggatc

SEQ ID NO: 21797 - DNA, 29 bp, synthetic construct
  misc_feature 1..29: note = Probe
  source 1..29: mol_type = other DNA
gggcccataacccagaggtcgatggatcg

SEQ ID NO: 21798 - DNA, 50 bp, synthetic construct; identical to SEQ ID NO: 6540
  misc_feature 1..50: note = Probe
  source 1..50: mol_type = other DNA

SEQ ID NO: 21799 - DNA, 16 bp, synthetic construct
  misc_feature 1..16: note = Probe
  source 1..16: mol_type = other DNA
gggcccataccccgaa

SEQ ID NO: 21800 - DNA, 17 bp, synthetic construct
  misc_feature 1..17: note = Probe
  source 1..17: mol_type = other DNA
gggcccataccccgaaa

SEQ ID NO: 21801 - DNA, 21 bp, synthetic construct
  misc_feature 1..21: note = Probe
  source 1..21: mol_type = other DNA
gggcccataccccgaaaatgt

SEQ ID NO: 21802 - DNA, 22 bp, synthetic construct
  misc_feature 1..22: note = Probe
  source 1..22: mol_type = other DNA
gggcccataccccgaaaatgtt

SEQ ID NO: 21803 - DNA, 25 bp, synthetic construct
  misc_feature 1..25: note = Probe
  source 1..25: mol_type = other DNA
gggcccataccccgaaaatgttggt

SEQ ID NO: 21804 - DNA, 26 bp, synthetic construct
  misc_feature 1..26: note = Probe
  source 1..26: mol_type = other DNA
gggcccataccccgaaaatgttggtt

SEQ ID NO: 21805 - DNA, 27 bp, synthetic construct
  misc_feature 1..27: note = Probe
  source 1..27: mol_type = other DNA
gggcccataccccgaaaatgttggtta

SEQ ID NO: 21806 - DNA, 31 bp, synthetic construct; identical to SEQ ID NO: 6549
  misc_feature 1..31: note = Probe
  source 1..31: mol_type = other DNA

SEQ ID NO: 21807 - DNA, 32 bp, synthetic construct; identical to SEQ ID NO: 6550
  misc_feature 1..32: note = Probe
  source 1..32: mol_type = other DNA

SEQ ID NO: 21808 - DNA, 33 bp, synthetic construct; identical to SEQ ID NO: 6551
  misc_feature 1..33: note = Probe
  source 1..33: mol_type = other DNA

SEQ ID NO: 21809 - DNA, 34 bp, synthetic construct; identical to SEQ ID NO: 6552
  misc_feature 1..34: note = Probe
  source 1..34: mol_type = other DNA

SEQ ID NO: 21810 - DNA, 36 bp, synthetic construct
  misc_feature 1..36: note = Probe
  source 1..36: mol_type = other DNA
gggcccataccccgaaaatgttggttatacccttcc

SEQ ID NO: 21811 - DNA, 37 bp, synthetic construct; identical to SEQ ID NO: 6554
  misc_feature 1..37: note = Probe
  source 1..37: mol_type = other DNA

SEQ ID NO: 21812 - DNA, 38 bp, synthetic construct
  misc_feature 1..38: note = Probe
  source 1..38: mol_type = other DNA
gggcccataccccgaaaatgttggttatacccttcccg

SEQ ID NO: 21813 - DNA, 39 bp, synthetic construct
  misc_feature 1..39: note = Probe
  source 1..39: mol_type = other DNA
gggcccataccccgaaaatgttggttatacccttcccgt

SEQ ID NO: 21814 - DNA, 40 bp, synthetic construct; identical to SEQ ID NO: 6555
  misc_feature 1..40: note = Probe
  source 1..40: mol_type = other DNA

SEQ ID NO: 21815 - DNA, 41 bp, synthetic construct
  misc_feature 1..41: note = Probe
  source 1..41: mol_type = other DNA
gggcccataccccgaaaatgttggttatacccttcccgtac

SEQ ID NO: 21816 - DNA, 46 bp, synthetic construct; identical to SEQ ID NO: 6558
  misc_feature 1..46: note = Probe
  source 1..46: mol_type = other DNA

SEQ ID NO: 21817 - DNA, 33 bp, synthetic construct
  misc_feature 1..33: note = Probe
  source 1..33: mol_type = other DNA
gggcccggatagctcagtcggtagagcatcaga

SEQ ID NO: 21818 - DNA, 37 bp, synthetic construct
  misc_feature 1..37: note = Probe
  source 1..37: mol_type = other DNA
gggcccggatagctcagtcggtagagcatcagacttt

SEQ ID NO: 21819 - DNA, 38 bp, synthetic construct
  misc_feature 1..38: note = Probe
  source 1..38: mol_type = other DNA
gggcccggatagctcagtcggtagagcatcagactttt

SEQ ID NO: 21820 - DNA, 29 bp, synthetic construct
  misc_feature 1..29: note = Probe
  source 1..29: mol_type = other DNA
gggcgcccggctagctcagtcggtagagc

SEQ ID NO: 21821 - DNA, 30 bp, synthetic construct
  misc_feature 1..30: note = Probe
  source 1..30: mol_type = other DNA
gggcgcccggctagctcagtcggtagagca

SEQ ID NO: 21822 - DNA, 33 bp, synthetic construct
  misc_feature 1..33: note = Probe
  source 1..33: mol_type = other DNA
gggcggtcctcgttagtatagtggtgagtatcc

SEQ ID NO: 21823 - DNA, 17 bp, synthetic construct
  misc_feature 1..17: note = Probe
  source 1..17: mol_type = other DNA
gggctcacatcacccca

SEQ ID NO: 21824 - DNA, 19 bp, synthetic construct
  misc_feature 1..19: note = Probe
  source 1..19: mol_type = other DNA
gggctcacatcaccccata

SEQ ID NO: 21825 - DNA, 20 bp, synthetic construct
  misc_feature 1..20: note = Probe
  source 1..20: mol_type = other DNA
gggctcacatcaccccataa

SEQ ID NO: 21826 - DNA, 23 bp, synthetic construct
  misc_feature 1..23: note = Probe
  source 1..23: mol_type = other DNA
gggctcacatcaccccataaaca

SEQ ID NO: 21827 - DNA, 25 bp, synthetic construct
  misc_feature 1..25: note = Probe
  source 1..25: mol_type = other DNA
gggctcacatcaccccataaacaaa

SEQ ID NO: 21828 - DNA, 26 bp, synthetic construct
  misc_feature 1..26: note = Probe
  source 1..26: mol_type = other DNA
gggctcacatcaccccataaacaaat

SEQ ID NO: 21829 - DNA, 16 bp, synthetic construct
  misc_feature 1..16: note = Probe
  source 1..16: mol_type = other DNA
ggggaattagctcaaa

SEQ ID NO: 21830 - DNA, 23 bp, synthetic construct
  misc_feature 1..23: note = Probe
  source 1..23: mol_type = other DNA
ggggaattagctcaaatggtaga

SEQ ID NO: 21831 - DNA, 25 bp, synthetic construct
  misc_feature 1..25: note = Probe
  source 1..25: mol_type = other DNA
ggggaattagctcaaatggtagagc

SEQ ID NO: 21832 - DNA, 25 bp, synthetic construct
  misc_feature 1..25: note = Probe
  source 1..25: mol_type = other DNA
ggggacgcgttggtggtgtagtggt

SEQ ID NO: 21833 - DNA, 26 bp, synthetic construct
  misc_feature 1..26: note = Probe
  source 1..26: mol_type = other DNA
ggggacgcgttggtggtgtagtggtg

SEQ ID NO: 21834 - DNA, 27 bp, synthetic construct
  misc_feature 1..27: note = Probe
  source 1..27: mol_type = other DNA
ggggacgcgttggtggtgtagtggtga

SEQ ID NO: 21835 - DNA, 28 bp, synthetic construct
  misc_feature 1..28: note = Probe
  source 1..28: mol_type = other DNA
ggggacgcgttggtggtgtagtggtgag

SEQ ID NO: 21836 - DNA, 29 bp, synthetic construct
  misc_feature 1..29: note = Probe
  source 1..29: mol_type = other DNA
ggggacgcgttggtggtgtagtggtgagc

SEQ ID NO: 21837 - DNA, 30 bp, synthetic construct
  misc_feature 1..30: note = Probe
  source 1..30: mol_type = other DNA
ggggacgcgttggtggtgtagtggtgagca

SEQ ID NO: 21838 - DNA, 33 bp, synthetic construct
  misc_feature 1..33: note = Probe
  source 1..33: mol_type = other DNA
ggggacgcgttggtggtgtagtggtgagcacag

SEQ ID NO: 21839 - DNA, 36 bp, synthetic construct
  misc_feature 1..36: note = Probe
  source 1..36: mol_type = other DNA
ggggacgcgttggtggtgtagtggtgagcacagctg

SEQ ID NO: 21840 - DNA, 38 bp, synthetic construct
  misc_feature 1..38: note = Probe
  source 1..38: mol_type = other DNA
ggggacgcgttggtggtgtagtggtgagcacagctgcc

SEQ ID NO: 21841 - DNA, 41 bp, synthetic construct
  misc_feature 1..41: note = Probe
  source 1..41: mol_type = other DNA
ggggacgcgttggtggtgtagtggtgagcacagctgccttt

SEQ ID NO: 21842 - DNA, 42 bp, synthetic construct
  misc_feature 1..42: note = Probe
  source 1..42: mol_type = other DNA
ggggacgcgttggtggtgtagtggtgagcacagctgcctttc

SEQ ID NO: 21843 - DNA, 50 bp, synthetic construct
  misc_feature 1..50: note = Probe
  source 1..50: mol_type = other DNA
ggggacgcgttggtggtgtagtggtgagcacagctgcctttcaagcagtt

SEQ ID NO: 21844 - DNA, 28 bp, synthetic construct
  misc_feature 1..28: note = Probe
  source 1..28: mol_type = other DNA
ggggagaggcactggtggttcagtggta

SEQ ID NO: 21845 - DNA, 29 bp, synthetic construct
  misc_feature 1..29: note = Probe
  source 1..29: mol_type = other DNA
ggggagaggcactggtggttcagtggtag

SEQ ID NO: 21846 - DNA, 30 bp, synthetic construct
  misc_feature 1..30: note = Probe
  source 1..30: mol_type = other DNA
ggggagaggcactggtggttcagtggtaga

SEQ ID NO: 21847 - DNA, 31 bp, synthetic construct
  misc_feature 1..31: note = Probe
  source 1..31: mol_type = other DNA
ggggagaggcactggtggttcagtggtagaa

SEQ ID NO: 21848 - DNA, 33 bp, synthetic construct
  misc_feature 1..33: note = Probe
  source 1..33: mol_type = other DNA
ggggagaggcactggtggttcagtggtagaatt

SEQ ID NO: 21849 - DNA, 50 bp, synthetic construct
  misc_feature 1..50: note = Probe
  source 1..50: mol_type = other DNA
ggggagaggcactggtggttcagtggtagaattctcgcctcacacgcggg

SEQ ID NO: 21850 - DNA, 21 bp, synthetic construct
  misc_feature 1..21: note = Probe
  source 1..21: mol_type = other DNA
ggggatgtagctcagtggtag

SEQ ID NO: 21851 - DNA, 23 bp, synthetic construct
  misc_feature 1..23: note = Probe
  source 1..23: mol_type = other DNA
ggggatgtagctcagtggtagag

SEQ ID NO: 21852 - DNA, 27 bp, synthetic construct
  misc_feature 1..27: note = Probe
  source 1..27: mol_type = other DNA
ggggatgtagctcagtggtagagcgca

SEQ ID NO: 21853 - DNA, 29 bp, synthetic construct
  misc_feature 1..29: note = Probe
  source 1..29: mol_type = other DNA
ggggatgtagctcagtggtagagcgcatg

SEQ ID NO: 21854 - DNA, 33 bp, synthetic construct; identical to SEQ ID NO: 6572
  misc_feature 1..33: note = Probe
  source 1..33: mol_type = other DNA

SEQ ID NO: 21855 - DNA, 34 bp, synthetic construct
  misc_feature 1..34: note = Probe
  source 1..34: mol_type = other DNA
ggggatgtagctcagtggtagagcgcatgctttg

SEQ ID NO: 21856 - DNA, 35 bp, synthetic construct; identical to SEQ ID NO: 1339
  misc_feature 1..35: note = Probe
  source 1..35: mol_type = other DNA

SEQ ID NO: 21857 - DNA, 36 bp, synthetic construct
  misc_feature 1..36: note = Probe
  source 1..36: mol_type = other DNA
ggggatgtagctcagtggtagagcgcatgctttgca

SEQ ID NO: 21858 - DNA, 39 bp, synthetic construct
  misc_feature 1..39: note = Probe
  source 1..39: mol_type = other DNA
ggggatgtagctcagtggtagagcgcatgctttgcacgt

SEQ ID NO: 21859 - DNA, 29 bp, synthetic construct
  misc_feature 1..29: note = Probe
  source 1..29: mol_type = other DNA
ggggatgtagctcagtggtagagcgcgcg

SEQ ID NO: 21860 - DNA, 30 bp, synthetic construct; identical to SEQ ID NO: 10779
  misc_feature 1..30: note = Probe
  source 1..30: mol_type = other DNA

SEQ ID NO: 21861 - DNA, 32 bp, synthetic construct; identical to SEQ ID NO: 1340
  misc_feature 1..32: note = Probe
  source 1..32: mol_type = other DNA

SEQ ID NO: 21862 - DNA, 33 bp, synthetic construct; identical to SEQ ID NO: 6573
  misc_feature 1..33: note = Probe
  source 1..33: mol_type = other DNA

SEQ ID NO: 21863 - DNA, 25 bp, synthetic construct
  misc_feature 1..25: note = Probe
  source 1..25: mol_type = other DNA
ggggattgtgggttcgagtcccatc

SEQ ID NO: 21864 - DNA, 28 bp, synthetic construct
  misc_feature 1..28: note = Probe
  source 1..28: mol_type = other DNA
ggggattgtgggttcgagtcccatctgg

SEQ ID NO: 21865 - DNA, 30 bp, synthetic construct
  misc_feature 1..30: note = Probe
  source 1..30: mol_type = other DNA
ggggattgtgggttcgagtcccatctgggt

SEQ ID NO: 21866 - DNA, 34 bp, synthetic construct
  misc_feature 1..34: note = Probe
  source 1..34: mol_type = other DNA
ggggcccggatagctcagtcggtagagcatcaga

SEQ ID NO: 21867 - DNA, 36 bp, synthetic construct
  misc_feature 1..36: note = Probe
  source 1..36: mol_type = other DNA
ggggcccggatagctcagtcggtagagcatcagact

SEQ ID NO: 21868 - DNA, 37 bp, synthetic construct
  misc_feature 1..37: note = Probe
  source 1..37: mol_type = other DNA
ggggcccggatagctcagtcggtagagcatcagactt

SEQ ID NO: 21869 - DNA, 38 bp, synthetic construct
  misc_feature 1..38: note = Probe
  source 1..38: mol_type = other DNA
ggggcccggatagctcagtcggtagagcatcagacttt

SEQ ID NO: 21870 - DNA, 39 bp, synthetic construct
  misc_feature 1..39: note = Probe
  source 1..39: mol_type = other DNA
ggggcccggatagctcagtcggtagagcatcagactttt

SEQ ID NO: 21871 - DNA, 23 bp, synthetic construct
  misc_feature 1..23: note = Probe
  source 1..23: mol_type = other DNA
ggggcgtgggttcgaatcccacc

SEQ ID NO: 21872 - DNA, 33 bp, synthetic construct
  misc_feature 1..33: note = Probe
  source 1..33: mol_type = other DNA
ggggcgtgggttcgaatcccaccgctgccaggt

SEQ ID NO: 21873 - DNA, 16 bp, synthetic construct
  misc_feature 1..16: note = Probe
  source 1..16: mol_type = other DNA
gggggattagctcaaa

SEQ ID NO: 21874 - DNA, 26 bp, synthetic construct
  misc_feature 1..26: note = Probe
  source 1..26: mol_type = other DNA
gggggattagctcaaatggtagagcg

SEQ ID NO: 21875 - DNA, 30 bp, synthetic construct; identical to SEQ ID NO: 10791
  misc_feature 1..30: note = Probe
  source 1..30: mol_type = other DNA

SEQ ID NO: 21876 - DNA, 31 bp, synthetic construct
  misc_feature 1..31: note = Probe
  source 1..31: mol_type = other DNA
gggggattagctcaaatggtagagcgctcgc

SEQ ID NO: 21877 - DNA, 33 bp, synthetic construct; identical to SEQ ID NO: 6577
  misc_feature 1..33: note = Probe
  source 1..33: mol_type = other DNA

SEQ ID NO: 21878 - DNA, 24 bp, synthetic construct
  misc_feature 1..24: note = Probe
  source 1..24: mol_type = other DNA
gggggcgtgggttcgaatcccacc

SEQ ID NO: 21879 - DNA, 25 bp, synthetic construct
  misc_feature 1..25: note = Probe
  source 1..25: mol_type = other DNA
gggggcgtgggttcgaatcccaccg

SEQ ID NO: 21880 - DNA, 25 bp, synthetic construct
  misc_feature 1..25: note = Probe
  source 1..25: mol_type = other DNA
gggggtatagctcaggggtagagca

SEQ ID NO: 21881 - DNA, 33 bp, synthetic construct
  misc_feature 1..33: note = Probe
  source 1..33: mol_type = other DNA
gggggtatagctcaggggtagagcacttgactg

SEQ ID NO: 21882 - DNA, 30 bp, synthetic construct
  misc_feature 1..30: note = Probe
  source 1..30: mol_type = other DNA
gggggtatagctcaggggtagagcatttga

SEQ ID NO: 21883 - DNA, 25 bp, synthetic construct
  misc_feature 1..25: note = Probe
  source 1..25: mol_type = other DNA
gggggtatagctcaggtggtagagc

SEQ ID NO: 21884 - DNA, 26 bp, synthetic construct
  misc_feature 1..26: note = Probe
  source 1..26: mol_type = other DNA
gggggtatagctcaggtggtagagca

SEQ ID NO: 21885 - DNA, 28 bp, synthetic construct
  misc_feature 1..28: note = Probe
  source 1..28: mol_type = other DNA
gggggtatagctcaggtggtagagcatt

SEQ ID NO: 21886 - DNA, 31 bp, synthetic construct
  misc_feature 1..31: note = Probe
  source 1..31: mol_type = other DNA
gggggtatagctcaggtggtagagcatttga

SEQ ID NO: 21887 - DNA, 16 bp, synthetic construct
  misc_feature 1..16: note = Probe
  source 1..16: mol_type = other DNA
gggggtatagctcagt

SEQ ID NO: 21888 - DNA, 17 bp, synthetic construct
  misc_feature 1..17: note = Probe
  source 1..17: mol_type = other DNA
gggggtatagctcagtg

SEQ ID NO: 21889 - DNA, 18 bp, synthetic construct
  misc_feature 1..18: note = Probe
  source 1..18: mol_type = other DNA
gggggtatagctcagtgg

SEQ ID NO: 21890 - DNA, 19 bp, synthetic construct
  misc_feature 1..19: note = Probe
  source 1..19: mol_type = other DNA
gggggtatagctcagtggg

SEQ ID NO: 21891 - DNA, 23 bp, synthetic construct
  misc_feature 1..23: note = Probe
  source 1..23: mol_type = other DNA
gggggtatagctcagtgggtaga

SEQ ID NO: 21892 - DNA, 25 bp, synthetic construct
  misc_feature 1..25: note = Probe
  source 1..25: mol_type = other DNA
gggggtatagctcagtgggtagagc

SEQ ID NO: 21893 - DNA, 29 bp, synthetic construct
  misc_feature 1..29: note = Probe
  source 1..29: mol_type = other DNA
gggggtatagctcagtgggtagagcattt

SEQ ID NO: 21894 - DNA, 30 bp, synthetic construct; identical to SEQ ID NO: 10810
  misc_feature 1..30: note = Probe
  source 1..30: mol_type = other DNA

SEQ ID NO: 21895 - DNA, 31 bp, synthetic construct
  misc_feature 1..31: note = Probe
  source 1..31: mol_type = other DNA
gggggtatagctcagtgggtagagcatttga

SEQ ID NO: 21896 - DNA, 32 bp, synthetic construct
  misc_feature 1..32: note = Probe
  source 1..32: mol_type = other DNA
gggggtatagctcagtgggtagagcatttgac

SEQ ID NO: 21897 - DNA, 19 bp, synthetic construct
  misc_feature 1..19: note = Probe
  source 1..19: mol_type = other DNA
gggggtatagctcagtggt

SEQ ID NO: 21898 - DNA, 20 bp, synthetic construct
  misc_feature 1..20: note = Probe
  source 1..20: mol_type = other DNA
gggggtatagctcagtggta

SEQ ID NO: 21899 - DNA, 22 bp, synthetic construct
  misc_feature 1..22: note = Probe
  source 1..22: mol_type = other DNA
gggggtatagctcagtggtaga

SEQ ID NO: 21900 - DNA, 23 bp, synthetic construct
  misc_feature 1..23: note = Probe
  source 1..23: mol_type = other DNA
gggggtatagctcagtggtagag

SEQ ID NO: 21901 - DNA, 24 bp, synthetic construct
  misc_feature 1..24: note = Probe
  source 1..24: mol_type = other DNA
gggggtatagctcagtggtagagc

SEQ ID NO: 21902 - DNA, 25 bp, synthetic construct
  misc_feature 1..25: note = Probe
  source 1..25: mol_type = other DNA
gggggtatagctcagtggtagagca

SEQ ID NO: 21903 - DNA, 26 bp, synthetic construct
  misc_feature 1..26: note = Probe
  source 1..26: mol_type = other DNA
gggggtatagctcagtggtagagcat

SEQ ID NO: 21904 - DNA, 27 bp, synthetic construct
  misc_feature 1..27: note = Probe
  source 1..27: mol_type = other DNA
gggggtatagctcagtggtagagcatt

SEQ ID NO: 21905 - DNA, 28 bp, synthetic construct
  misc_feature 1..28: note = Probe
  source 1..28: mol_type = other DNA
gggggtatagctcagtggtagagcattt

SEQ ID NO: 21906 - DNA, 29 bp, synthetic construct
  misc_feature 1..29: note = Probe
  source 1..29: mol_type = other DNA
gggggtatagctcagtggtagagcatttg

SEQ ID NO: 21907 - DNA, 30 bp, synthetic construct; identical to SEQ ID NO: 6598
  misc_feature 1..30: note = Probe
  source 1..30: mol_type = other DNA

SEQ ID NO: 21908 - DNA, 31 bp, synthetic construct; identical to SEQ ID NO: 6599
  misc_feature 1..31: note = Probe
  source 1..31: mol_type = other DNA

SEQ ID NO: 21909 - DNA, 32 bp, synthetic construct; identical to SEQ ID NO: 6600
  misc_feature 1..32: note = Probe
  source 1..32: mol_type = other DNA

SEQ ID NO: 21910 - DNA, 33 bp, synthetic construct; identical to SEQ ID NO: 6601
  misc_feature 1..33: note = Probe
  source 1..33: mol_type = other DNA

SEQ ID NO: 21911 - DNA, 34 bp, synthetic construct; identical to SEQ ID NO: 6602
  misc_feature 1..34: note = Probe
  source 1..34: mol_type = other DNA

SEQ ID NO: 21912 - DNA, 35 bp, synthetic construct; identical to SEQ ID NO: 6603
  misc_feature 1..35: note = Probe
  source 1..35: mol_type = other DNA

SEQ ID NO: 21913 - DNA, 25 bp, synthetic construct
  misc_feature 1..25: note = Probe
  source 1..25: mol_type = other DNA
gggggtatagctcagtggtagagcg

SEQ ID NO: 21914 - DNA, 16 bp, synthetic construct
  misc_feature 1..16: note = Probe
  source 1..16: mol_type = other DNA
gggggtgtagctcagt

SEQ ID NO: 21915 - DNA, 18 bp, synthetic construct
  misc_feature 1..18: note = Probe
  source 1..18: mol_type = other DNA
gggggtgtagctcagtgg

SEQ ID NO: 21916 - DNA, 20 bp, synthetic construct
  misc_feature 1..20: note = Probe
  source 1..20: mol_type = other DNA
gggggtgtagctcagtggta

SEQ ID NO: 21917 - DNA, 23 bp, synthetic construct
  misc_feature 1..23: note = Probe
  source 1..23: mol_type = other DNA
gggggtgtagctcagtggtagag

SEQ ID NO: 21918 - DNA, 24 bp, synthetic construct
  misc_feature 1..24: note = Probe
  source 1..24: mol_type = other DNA
gggggtgtagctcagtggtagagc

SEQ ID NO: 21919 - DNA, 30 bp, synthetic construct
  misc_feature 1..30: note = Probe
  source 1..30: mol_type = other DNA
gggggtgtagctcagtggtagagcacatgc

SEQ ID NO: 21920 - DNA, 31 bp, synthetic construct; identical to SEQ ID NO: 6611
  misc_feature 1..31: note = Probe
  source 1..31: mol_type = other DNA

SEQ ID NO: 21921 - DNA, 32 bp, synthetic construct; identical to SEQ ID NO: 6612
  misc_feature 1..32: note = Probe
  source 1..32: mol_type = other DNA

SEQ ID NO: 21922 - DNA, 33 bp, synthetic construct
  misc_feature 1..33: note = Probe
  source 1..33: mol_type = other DNA
gggggtgtagctcagtggtagagcacatgcttt

SEQ ID NO: 21923 - DNA, 32 bp, synthetic construct; identical to SEQ ID NO: 1365
  misc_feature 1..32: note = Probe
  source 1..32: mol_type = other DNA

SEQ ID NO: 21924 - DNA, 33 bp, synthetic construct; identical to SEQ ID NO: 6614
  misc_feature 1..33: note = Probe
  source 1..33: mol_type = other DNA

SEQ ID NO: 21925 - DNA, 27 bp, synthetic construct
  misc_feature 1..27: note = Probe
  source 1..27: mol_type = other DNA
gggggtgtagctcagtggtagagcgcg

SEQ ID NO: 21926 - DNA, 33 bp, synthetic construct; identical to SEQ ID NO: 6616
  misc_feature 1..33: note = Probe
  source 1..33: mol_type = other DNA

SEQ ID NO: 21927 - DNA, 34 bp, synthetic construct
  misc_feature 1..34: note = Probe
  source 1..34: mol_type = other DNA
gggggtgtagctcagtggtagagcgcgtgcttag

SEQ ID NO: 21928 - DNA, 35 bp, synthetic construct
  misc_feature 1..35: note = Probe
  source 1..35: mol_type = other DNA
gggggtgtagctcagtggtagagcgcgtgcttagc

SEQ ID NO: 21929 - DNA, 33 bp, synthetic construct; identical to SEQ ID NO: 6617
  misc_feature 1..33: note = Probe
  source 1..33: mol_type = other DNA

SEQ ID NO: 21930 - DNA, 34 bp, synthetic construct
  misc_feature 1..34: note = Probe
  source 1..34: mol_type = other DNA
gggggtgtagctcagtggtagagcgcgtgcttcg

SEQ ID NO: 21931 - DNA, 31 bp, synthetic construct; identical to SEQ ID NO: 6619
  misc_feature 1..31: note = Probe
  source 1..31: mol_type = other DNA

SEQ ID NO: 21932 - DNA, 32 bp, synthetic construct; identical to SEQ ID NO: 6620
  misc_feature 1..32: note = Probe
  source 1..32: mol_type = other DNA

SEQ ID NO: 21933 - DNA, 33 bp, synthetic construct; identical to SEQ ID NO: 6621
  misc_feature 1..33: note = Probe
  source 1..33: mol_type = other DNA

SEQ ID NO: 21934 - DNA, 34 bp, synthetic construct; identical to SEQ ID NO: 6622
  misc_feature 1..34: note = Probe
  source 1..34: mol_type = other DNA

SEQ ID NO: 21935 - DNA, 16 bp, synthetic construct
  misc_feature 1..16: note = Probe
  source 1..16: mol_type = other DNA
ggggtatgattctcgc

SEQ ID NO: 21936 - DNA, 17 bp, synthetic construct
  misc_feature 1..17: note = Probe
  source 1..17: mol_type = other DNA
ggggtatgattctcgct

SEQ ID NO: 21937 - DNA, 21 bp, synthetic construct
  misc_feature 1..21: note = Probe
  source 1..21: mol_type = other DNA
ggggttaggcctctttttacc

SEQ ID NO: 21938 - DNA, 24 bp, synthetic construct
  misc_feature 1..24: note = Probe
  source 1..24: mol_type = other DNA
ggggttaggcctctttttaccagc

SEQ ID NO: 21939 - DNA, 25 bp, synthetic construct
  misc_feature 1..25: note = Probe
  source 1..25: mol_type = other DNA
ggggttaggcctctttttaccagct

SEQ ID NO: 21940 - DNA, 28 bp, synthetic construct
  misc_feature 1..28: note = Probe
  source 1..28: mol_type = other DNA
ggggttcctcgcagcttcgctgcgtgag

SEQ ID NO: 21941 - DNA, 27 bp, synthetic construct
  misc_feature 1..27: note = Probe
  source 1..27: mol_type = other DNA
ggggttcgattccccgacggggaggca

SEQ ID NO: 21942 - DNA, 21 bp, synthetic construct
  misc_feature 1..21: note = Probe
  source 1..21: mol_type = other DNA
ggggttttgcagtccttagct

SEQ ID NO: 21943 - DNA, 30 bp, synthetic construct
  misc_feature 1..30: note = Probe
  source 1..30: mol_type = other DNA
gggtacgcgttggtggtatagtggtgagca

SEQ ID NO: 21944 - DNA, 31 bp, synthetic construct
  misc_feature 1..31: note = Probe
  source 1..31: mol_type = other DNA
gggtacgcgttggtggtatagtggtgagcat

SEQ ID NO: 21945 - DNA, 33 bp, synthetic construct
  misc_feature 1..33: note = Probe
  source 1..33: mol_type = other DNA
gggtacgcgttggtggtatagtggtgagcatag

SEQ ID NO: 21946 - DNA, 36 bp, synthetic construct
  misc_feature 1..36: note = Probe
  source 1..36: mol_type = other DNA
gggtacgcgttggtggtatagtggtgagcatagctg

SEQ ID NO: 21947 - DNA, 38 bp, synthetic construct
  misc_feature 1..38: note = Probe
  source 1..38: mol_type = other DNA
gggtacgcgttggtggtatagtggtgagcatagctgcc

SEQ ID NO: 21948 - DNA, 42 bp, synthetic construct
  misc_feature 1..42: note = Probe
  source 1..42: mol_type = other DNA
gggtacgcgttggtggtatagtggtgagcatagctgccttcc

SEQ ID NO: 21949 - DNA, 50 bp, synthetic construct
  misc_feature 1..50: note = Probe
  source 1..50: mol_type = other DNA
gggtacgcgttggtggtatagtggtgagcatagctgccttccaagcagtt

SEQ ID NO: 21950 - DNA, 33 bp, synthetic construct; identical to SEQ ID NO: 1373
  misc_feature 1..33: note = Probe
  source 1..33: mol_type = other DNA

SEQ ID NO: 21951 - DNA, 28 bp, synthetic construct
  misc_feature 1..28: note = Probe
  source 1..28: mol_type = other DNA
gggtatagctcagtggtagagcatttga

SEQ ID NO: 21952 - DNA, 30 bp, synthetic construct; identical to SEQ ID NO: 6643
  misc_feature 1..30: note = Probe
  source 1..30: mol_type = other DNA

SEQ ID NO: 21953 - DNA, 31 bp, synthetic construct; identical to SEQ ID NO: 6644
  misc_feature 1..31: note = Probe
  source 1..31: mol_type = other DNA

SEQ ID NO: 21954 - DNA, 32 bp, synthetic construct; identical to SEQ ID NO: 6645
  misc_feature 1..32: note = Probe
  source 1..32: mol_type = other DNA

SEQ ID NO: 21955 - DNA, 33 bp, synthetic construct; identical to SEQ ID NO: 6646
  misc_feature 1..33: note = Probe
  source 1..33: mol_type = other DNA

SEQ ID NO: 21956 - DNA, 16 bp, synthetic construct
  misc_feature 1..16: note = Probe
  source 1..16: mol_type = other DNA
gggtatgattctcgct

SEQ ID NO: 21957 - DNA, 33 bp, synthetic construct; identical to SEQ ID NO: 6649
  misc_feature 1..33: note = Probe
  source 1..33: mol_type = other DNA

SEQ ID NO: 21958 - DNA, 34 bp, synthetic construct
  misc_feature 1..34: note = Probe
  source 1..34: mol_type = other DNA
gggtatgattctcgcttagggtgcgagaggtccc

SEQ ID NO: 21959 - DNA, 38 bp, synthetic construct
  misc_feature 1..38: note = Probe
  source 1..38: mol_type = other DNA
gggtatgattctcgcttagggtgcgagaggtcccgggt

SEQ ID NO: 21960 - DNA, 39 bp, synthetic construct
  misc_feature 1..39: note = Probe
  source 1..39: mol_type = other DNA
gggtatgattctcgcttagggtgcgagaggtcccgggtt

SEQ ID NO: 21961 - DNA, 33 bp, synthetic construct; identical to SEQ ID NO: 6650
  misc_feature 1..33: note = Probe
  source 1..33: mol_type = other DNA

SEQ ID NO: 21962 - DNA, 38 bp, synthetic construct
  misc_feature 1..38: note = Probe
  source 1..38: mol_type = other DNA
gggtatgattctcgcttcgggtgcgagaggtcccgggt

SEQ ID NO: 21963 - DNA, 33 bp, synthetic construct; identical to SEQ ID NO: 6651
  misc_feature 1..33: note = Probe
  source 1..33: mol_type = other DNA

SEQ ID NO: 21964 - DNA, 34 bp, synthetic construct
  misc_feature 1..34: note = Probe
  source 1..34: mol_type = other DNA
gggtatgattctcgctttgggtgcgagaggtccc

SEQ ID NO: 21965 - DNA, 36 bp, synthetic construct
  misc_feature 1..36: note = Probe
  source 1..36: mol_type = other DNA
gggtatgattctcgctttgggtgcgagaggtcccgg

SEQ ID NO: 21966 - DNA, 37 bp, synthetic construct
  misc_feature 1..37: note = Probe
  source 1..37: mol_type = other DNA
gggtatgattctcgctttgggtgcgagaggtcccggg

SEQ ID NO: 21967 - DNA, 38 bp, synthetic construct
  misc_feature 1..38: note = Probe
  source 1..38: mol_type = other DNA
gggtatgattctcgctttgggtgcgagaggtcccgggt

SEQ ID NO: 21968 - DNA, 39 bp, synthetic construct
  misc_feature 1..39: note = Probe
  source 1..39: mol_type = other DNA
gggtatgattctcgctttgggtgcgagaggtcccgggtt

SEQ ID NO: 21969 - DNA, 34 bp, synthetic construct
  misc_feature 1..34: note = Probe
  source 1..34: mol_type = other DNA
gggtatgattctcggtttgggtccgagaggtccc

SEQ ID NO: 21970 - DNA, 38 bp, synthetic construct
  misc_feature 1..38: note = Probe
  source 1..38: mol_type = other DNA
gggtatgattctcggtttgggtccgagaggtcccgggt

SEQ ID NO: 21971 - DNA, 24 bp, synthetic construct
  misc_feature 1..24: note = Probe
  source 1..24: mol_type = other DNA
gggtccagggttcaagtccctgtt

SEQ ID NO: 21972 - DNA, 28 bp, synthetic construct
  misc_feature 1..28: note = Probe
  source 1..28: mol_type = other DNA
gggtccagggttcaagtccctgttcggg

SEQ ID NO: 21973 - DNA, 33 bp, synthetic construct
  misc_feature 1..33: note = Probe
  source 1..33: mol_type = other DNA
gggtccagggttcaagtccctgttcgggcggca

SEQ ID NO: 21974 - DNA, 33 bp, synthetic construct
  misc_feature 1..33: note = Probe
  source 1..33: mol_type = other DNA
gggtccagggttcaagtccctgttcgggcgtct

SEQ ID NO: 21975 - DNA, 16 bp, synthetic construct
  misc_feature 1..16: note = Probe
  source 1..16: mol_type = other DNA
gggtccccggtagctc

SEQ ID NO: 21976 - DNA, 17 bp, synthetic construct
  misc_feature 1..17: note = Probe
  source 1..17: mol_type = other DNA
gggtccccggtagctcg

SEQ ID NO: 21977 - DNA, 25 bp, synthetic construct
  misc_feature 1..25: note = Probe
  source 1..25: mol_type = other DNA
gggtccccggtagctcgccgtgatc

SEQ ID NO: 21978 - DNA, 26 bp, synthetic construct
  misc_feature 1..26: note = Probe
  source 1..26: mol_type = other DNA
gggtccccggtagctcgccgtgatcg

SEQ ID NO: 21979 - DNA, 27 bp, synthetic construct
  misc_feature 1..27: note = Probe
  source 1..27: mol_type = other DNA
gggtccccggtagctcgccgtgatcgt

SEQ ID NO: 21980 - DNA, 28 bp, synthetic construct
  misc_feature 1..28: note = Probe
  source 1..28: mol_type = other DNA
gggtccccggtagctcgccgtgatcgta

SEQ ID NO: 21981 - DNA, 29 bp, synthetic construct
  misc_feature 1..29: note = Probe
  source 1..29: mol_type = other DNA
gggtccccggtagctcgccgtgatcgtat

SEQ ID NO: 21982 - DNA, 30 bp, synthetic construct
  misc_feature 1..30: note = Probe
  source 1..30: mol_type = other DNA
gggtccccggtagctcgccgtgatcgtata

SEQ ID NO: 21983 - DNA, 31 bp, synthetic construct
  misc_feature 1..31: note = Probe
  source 1..31: mol_type = other DNA
gggtccccggtagctcgccgtgatcgtatag

SEQ ID NO: 21984 - DNA, 34 bp, synthetic construct
  misc_feature 1..34: note = Probe
  source 1..34: mol_type = other DNA
gggtccccggtagctcgccgtgatcgtatagtgg

SEQ ID NO: 21985 - DNA, 42 bp, synthetic construct
  misc_feature 1..42: note = Probe
  source 1..42: mol_type = other DNA
gggtccccggtagctcgccgtgatcgtatagtggttagtact

SEQ ID NO: 21986 - DNA, 39 bp, synthetic construct
  misc_feature 1..39: note = Probe
  source 1..39: mol_type = other DNA
gggtcgcgagttcaattctcgctggggcctgtgtgtttt

SEQ ID NO: 21987 - DNA, 33 bp, synthetic construct
  misc_feature 1..33: note = Probe
  source 1..33: mol_type = other DNA
gggtcgcgagttcgatcctcgctggggcctcct

SEQ ID NO: 21988 - DNA, 28 bp, synthetic construct
  misc_feature 1..28: note = Probe
  source 1..28: mol_type = other DNA
gggtcgtgggttcgagccccacgttggg

SEQ ID NO: 21989 - DNA, 39 bp, synthetic construct; identical to SEQ ID NO: 6655
  misc_feature 1..39: note = Probe
  source 1..39: mol_type = other DNA

SEQ ID NO: 21990 - DNA, 50 bp, synthetic construct; identical to SEQ ID NO: 6656
  misc_feature 1..50: note = Probe
  source 1..50: mol_type = other DNA

SEQ ID NO: 21991 - DNA, 22 bp, synthetic construct
  misc_feature 1..22: note = Probe
  source 1..22: mol_type = other DNA
gggtggcgccgtggcttagttg

SEQ ID NO: 21992 - DNA, 36 bp, synthetic construct
  misc_feature 1..36: note = Probe
  source 1..36: mol_type = other DNA
gggtggcgccgtggcttagttggttaaagcgcctgt

SEQ ID NO: 21993 - DNA, 38 bp, synthetic construct
  misc_feature 1..38: note = Probe
  source 1..38: mol_type = other DNA
gggtggcgccgtggcttagttggttaaagcgcctgtct

(The sequence listing continues in the following parts.)

What is claimed is:

1. A method of identifying bona fide tRNA fragments from deep sequencing transcriptomic data, the method comprising:
defining a tRNA space comprising at least one reference mature tRNA;
identifying, in a genome, at least one genomic locus of each of the at least one reference mature tRNAs;
forming a modified instance of the genome, the modified genome including a CCA trinucleotide replacing three genomic nucleotides immediately downstream from each genomic locus of each of the at least one reference mature tRNAs that is post-transcriptionally modified;
mapping sequenced reads to the at least one genomic locus in the modified genome through exact multi-mapping; and
determining whether each sequenced read corresponds to a bona fide tRNA fragment based upon the mapping.

2. The method of claim 1, wherein the identifying step comprises excluding genomic loci that differ from the reference mature tRNAs by at least an insertion, deletion, or replacement of a nucleotide.

3. The method of claim 1, wherein the exact multi-mapping comprises excluding sequenced reads that map to locations outside the genomic loci of the reference mature tRNAs.

4. The method of claim 1, wherein the genome comprises a full nuclear and mitochondrial genome.

5. The method of claim 1, wherein the forming of the modified instance of the genome comprises not replacing the three genomic nucleotides immediately downstream from any genomic locus that is within three genomic nucleotides of any other downstream genomic locus.

6. The method of claim 1, wherein the mapping step comprises excluding CCA-ending sequenced reads that include transcripts originating from genomic locations outside the genomic loci of the reference mature tRNAs.

7. The method of claim 1, wherein the method further comprises excluding sequenced reads with tRNAs intron sequences.

8. The method of claim 1, wherein the method further comprises assessing the mapped sequence reads for at least one property selected from the group consisting of a sequence of a tRNA fragment, an overall abundance of a tRNA fragment, a relative abundance of a tRNA fragment to a reference, a length of a tRNA fragment, a starting and ending point of a tRNA fragment, the genomic origin of a tRNA fragment, and a terminal modification of a tRNA fragment.

9. The method of claim 8, wherein the overall abundance of a tRNA fragment is based on the number of sequenced reads that mapped to tRNA loci.

10. The method of claim 1, wherein the method further comprises characterizing mapped sequence reads as:
a) fragments whose 5′ terminus begins exactly at the first nucleotide of the corresponding reference mature tRNA;
b) fragments that are strictly internal to the corresponding reference mature tRNA sequence (i-tRFs); and
c) fragments whose 3′ terminus coincides with any of the bases of the CCA terminal addition.

11. The method of claim 1, wherein the method further comprises collecting all tRNA fragments that are supported by at least one mapped sequenced read.

12. The method of claim 11, wherein the method further comprises:
applying filtering criteria to the collected tRNA fragments; and
determining whether each collected tRNA fragment has statistical support based upon the filtering criteria.

13. The method of claim 1, wherein each sequenced read comprises a length in the range of about 15 nucleotides to about 80 nucleotides.

14. A modified genome for tRNA mapping, the modified genome comprising:
at least one genomic locus corresponding to a reference mature tRNA that is post-transcriptionally modified; and
a CCA trinucleotide replacing three genomic nucleotides immediately downstream from each of the at least one genomic loci corresponding to the reference mature tRNA that is post-transcriptionally modified.

15. A system for identifying tRNA fragments according to the method of claim 1, the system comprising a processor comprising an algorithm for analyzing the tRNA fragments.

16. A method of identifying a subject in need of therapeutic intervention to treat breast cancer comprising,
isolating fragments of tRNAs from a breast tissue sample obtained from the subject; and
characterizing the tRNA fragments and their relative abundances in the sample by deep sequencing;
analyzing the tRNA fragments and their abundances using partial least squares-discriminant analysis; and
determining the presence of breast cancer in the sample obtained from the subject based on the analysis of the tRNA fragments, thereby identifying a subject in need of therapeutic intervention;
wherein the tRNA fragments comprise SEQ ID NOs: 8582, 8599-8601, 8622-8623, 8634, 8657, 8663-8665, 8676, 8698, 8703-8706, 8718-8720, 8722, 8724, 8738, 8745, 8758, 8761, 8767-8772, and 8840.

17. The method of claim 16, wherein the tRNA fragments are isolated by a method selected from the group consisting of size selection, sequencing, and amplification.

18. The method of claim 16, wherein tRNA fragments of a length in the range of about 15 nucleotides to about 80 nucleotides in length are isolated.

19. The method of claim 16, wherein the tRNA fragments having a predominant length of 16, 17, 26, or 29 nucleotides is indicative of a breast cancer subtype.

20. The method of claim 16, wherein characterizing the tRNA fragments comprises sequence-specific methods that preserve at least one terminus of the tRNA fragments.

21. The method of claim 16, wherein characterizing the tRNA fragments comprises hybridization to a panel of oligonucleotides.

22. The method of claim 21, wherein the tRNA fragments are enriched prior to the hybridization.

23. The method of claim 21, wherein the oligonucleotide panel comprises at least two or more polynucleotides that selectively hybridize to the tRNA fragments.

24. The method of claim 16, wherein the tRNA fragments comprise at least one sequence with identifiers selected from the group consisting of SEQ ID NOS: 8768, 8758, 8761, 8840 and 8582.

25. The method of claim 16, wherein the signature comprises at least one sequence with identifiers selected from the group consisting of SEQ ID NOs: 11, 18, 19, 28, 31, 34, 43, 51, 59, 83, 189, 194, 209, 268, 305, 306, 307, 316, 320, 398, 404, 611, 632, 653, 696, 751, 768, 816, 817, 860, 869, 870, 871, 920, 921, 925, 951, 960, 967, 989, 1005, 1030, 1133, 1201, 1202, 1223, 1229, 1230, 1231, 1240, 1248, 1298, 1318, 1406, 1412, 1421, 1425, 1453, 1510, 1577, 1582, 1631, 1637, 1645, 1661, 1695, 1727 and 1794 to distinguish Alzheimer's disease brain from normal brain.

26. The method of claim 16, wherein the signature comprises at least one sequence with identifiers selected from the group consisting of SEQ ID NO:8613 and SEQ ID NO: 8823 to distinguish triple negative breast cancer from HER2+ breast cancer.

27. The method of claim 16, wherein the signature comprises at least one sequence with identifiers selected from the group consisting of SEQ ID NOs: 8542, 8543, 8566, 8579, 8582, 8587, 8589, 8590, 8594, 8671-8673, 8707, 8731, 8774-8778, 8803, 8827-8828, 8831-8832, 8837-8838, and 8852 to distinguish triple negative breast cancer from normal.

28. The method of claim 16, wherein the signature comprises at least one sequence with identifiers selected from the group consisting of SEQ ID NOs: 8596, 8601, 8622, 8657, 8664, and 8811 to distinguish triple positive breast cancer from triple negative breast cancer.

29. The method of claim 16, wherein the signature comprises at least one sequence with identifiers selected from the group consisting of SEQ ID NOs: 12462, 12463, 12464, 12465, 12466, 12467, 12468, 12469, 12470, 12471, 12472, 12473, 12474, 12475, 12476, 12477, 12478, 12479, 12480, 12481, 12482, 12483, 12484, 12485, 12486, 12487, 12488, 12489, 12490, 12492, 12493, 12494, 12495, 12496, 12497, 12498, 12499, 12500, 12501, 12502, 12503, 12504, 12505, 12506, 12507, 12508, 12509, 12510, 12511, 12512, 12513, 12514, 12515, 12516, 12517, 12518, 12519, 12520, 12522, 12523, 12524, 12525, 12526, 12527, 12529, 12530, 12531, 12532, 12533, 12534, 12536, 12537, 12538, 12540, 12541, 12542, 12543, 12544, 12545, 12546, 12547, 12548, 12549, 12550, 12551, 12552, 12553, 12554, 12555, 12556, 12557, 12558, 12559, 12560, 12561, 12562, 12563, 12564, 12565, 12566, 12567, 12568, 12569, 12570, 12572, 12573, 12574, 12575, 12576, 12577, 12578, 12580, 12581, 12582, 12584, 12585, 12586, 12587, 12588, 12589, 12590, 12591, 12592, 12593, 12594, 12595, 12596, 12597, 12598, 12599, 12600, 12601, 12602, 12603, 12604, 12607, 12608, 12609, 12614, 12615, 12616, 12617, 12618, 12619, 12620, 12621, 12622, 12623, 12624, 12625, 12626, 12627, 12628, 12629, 12631, 12632, 12633, 12634, 12635, 12636, 12637, 12638, 12639, 12640, 12641, 12642, 12643, 12645, 12647, 12648, 12649, 12652, 12653, 12654, 12655, 12657, 12658, 12659, 12660, 12661, 12663, 12664, 12665, 12666, 12667, 12668, 12669, 12670, 12671, 12672, 12674, 12677, 12678, 12679, 12680, 12682, 12684, 12685, 12686, 12687, 12688, 12689, 12690, 12691, 12692, 12693, 12694, 12695, 12696, 12697, 12698, 12699, 12700, 12703, 12704, 12705, 12706, 12708, 12710, 12711, 12712, 12713, 12714, 12715, 12716, 12717, 12718, 12719, 12720, 12721, 12724, 12726, 12727, 12728, 12729, 12730, 12731, 12732, 12733, 12734, 12736, 12738, 12739, 12740, 12741, 12742, 12743, 12744, 12745, 12746, 12747, 12749, 12750, 12751, 12754, 12756, 12758, 12760, 12761, 12763, 12764, 12765, 12766, 12767, 12768, 12769, 12770, 12771, 12773, 12774, 12776, 12777, 12779, 12780, 12781, 12782, 12783, 12785, 12786, 12788, 12789, 12790, 12791, 12792, 12795, 12799, 12800, 12801, 12802, 12803, 12804, 12805, 12806, 12807, 12809, 12811, 12812, 12813, 12814, 12815, 12817, 12818, 12819, 12820, 12821, 12824, 12825, 12826, 12827, 12828, 12829, 12831, 12832, 12833, 12834, 12835, 12836, 12837, 12838, 12840, 12841, 12842, 12843, 12844, 12846, 12847, 12848, 12849, 12850, 12851, 12852, 12853, 12854, 12855, 12856, 12857, 12858, 12859, 12860, 12861, 12864, 12865, 12867, 12868, 12869, 12870, 12871, 12872, 12873, 12874, 12875, 12876, 12877, 12878, 12879, 12880, 12881, 12882, 12883, 12884, 12885, 12886, 12887, 12888, 12889, 12890, 12891, 12892, 12893, 12894, 12895, 12896, 12897, 12899, 12900, 12901, 12902, 12903, 12904, 12905, 12906, 12907, 12909, 12910, 12911, 12912, 12913, 12914, 12916, 12918, 12919, 12920, 12922, 12923, 12924, 12925, 12926, 12927, 12928, 12929, 12930, 12931, 12932, 12933, 12934, 12935, 12936, 12937, 12938, 12939, 12940, 12941, 12942, 12943, 12944, 12946, 12947, 12948, 12949, 12950, 12951, 12954, 12955, 12956, 12957, 12958, 12959, 12960, 12961, 12962, 12963, 12965, 12966, 12967, 12968, 12969, 12970, 12971, 12972, 12973, 12974, 12975, 12978, 12979, 12980, 12981, 12982, 12983, 12984, 12985, 12986, 12987, 12988, 12990, 12991, 12992, 12993, 12994, 12996, 12997, 12998, 12999, 13000, 13001, 13002, 13003, 13004, 13005, 13006, 13007, 13008, 13009, 13011, 13012, 13013, 13014, 13016, 13017, 13018, 13019, 13020, 13021, 13022, 13023, 13024, 13025, 13028, 13029, 13030, 13031, 13033, 13034, 13035, 13036, 13037, 13038, 13039, 13040, 13044, 13045, 13046, 13047, 13049, 13050, 13051, 13052, 13053, 13054, 13055, 13056, 13057, 13058, 13059, 13061, 13063, 13065, 13066, 13067, 13068, 13069, 13070, 13071, 13072, 13073, 13074, 13075, 13076, 13077, 13078, 13079, 13080, 13081, 13082, 13083, 13084, 13085, 13086, 13087, 13088, 13089, 13090, 13091, 13092, 13093, 13094, 13095, 13096, 13097, 13098, 13100, 13101, 13102, 13103, 13104, 13105, 13106, 13107, 13110, 13112, 13113, 13114, 13117, 13118, 13119, 13120, 13121, 13122, 13123, 13124, 13125, 13127, 13128, 13129, 13130, 13131, 13132, 13133, 13134, 13135, 13136, 13137, 13138, 13139, 13140, 13141, 13142, 13143, 13145, 13146, 13148, 13149, 13150, 13151, 13152, 13153, 13154, 13155, 13157, 13158, 13159, 13160, 13161, 13162, 13163, 13164, 13165, 13166, 13167, 13168, 13169, 13170, 13171, 13174, 13175, 13177, 13178, 13179, 13181, 13182, 13183, 13184, 13185, 13186, 13187, 13189, 13190, 13191, 13193, 13195, 13196, 13198, 13199, 13200, 13201, 13202, 13203, 13204, 13205, 13206, 13207, 13208, 13209, 13210, 13211, 13212, 13213, 13214, 13215, 13216, 13217, 13218, 13219, 13221, 13222, 13223, 13225, 13228, 13230, 13231, 13232, 13233, 13234, 13236, 13237, 13238, 13239, 13240, 13241, 13242, 13243, 13245, 13246, 13247, 13248, 13249, 13250, 13251, 13252, 13253, 13255, 13256, 13257, 13258, 13259, 13260, 13261, 13262, 13263, 13264, 13268, 13269, 13270, 13271, 13273, 13274, 13275, 13276, 13277, 13278, 13279, 13280, 13281, 13283, 13285, 13286, 13287, 13288, 13289, 13290, 13292, 13293, 13294, 13295, 13296, 13297, 13298, 13299, 13300, 13301, 13302, 13303, 13304, 13306, 13309, 13310, 13312, 13313, 13314, 13315, 13316, 13317, 13318, 13319, 13320, 13323, 13324, 13325, 13326, 13327, 13328, 13329, 13330, 13331, 13332, 13333, 13334, 13335, 13336, 13337, 13338, 13339, 13340, 13341, 13342, 13343, 13345, 13346, 13347, 13348, 13349, 13350, 13351, 13352, 13353, 13354, 13355, 13357, 13358, 13359, 13360, 13361, 13362, 13363, 13364, 13365, 13366, 13367, 13369, 13370, 13371, 13372, 13373, 13374, 13375, 13376, 13377, 13378, 13379, 13380, 13381, 13382, 13383, 13384, 13385, 13386, 13387, 13388, 13389, 13390, 13391, 13392, 13393, 13394, 13395, 13396, 13397, 13398, 13399, 13400, 13401, 13402, 13403, 13404, 13405, 13406, 13407, 13408, 13409, 13410, 13411, 13412, 13413, 13414, 13415, 13416, 13417, 13421, 13422, 13424, 13426, 13427, 13428, 13429, 13430, 13431, 13432, 13433, 13434, 13436, 13437, 13438, 13439, 13440, 13441, 13442, 13443, 13445, 13446, 13447, 13448, 13449, 13450, 13452, 13453, 13454, 13455, 13456, 13457, 13458, 13459, 13460, 13461, 13462, 13463, 13464, 13465, 13466, 13467, 13468, 13469, 13470, 13471, 13472, 13473, 13474, 13475, 13476, 13477, 13478, 13479, 13480, 13481, 13482, 13484, 13485, 13486, 13488, 13489, 13491, 13492, 13493, 13494, 13495, 13496, 13498, 13500, 13501, 13503, 13504, 13505, 13506, 13507, 13508, 13509, 13510, 13511, 13512, 13513, 13514, 13516, 13517, 13519, 13520, 13522, 13523, 13524, 13525, 13528, 13529, 13530, 13531, 13532, 13533, 13534, 13535, 13536, 13537, 13538, 13539, 13540, 13541, 13542, 13543, 13544, 13545, 13546, 13547, 13548, 13550, 13551, 13552, 13553, 13554, 13556, 13557, 13558, 13559, 13560, 13561, 13562, 13563, 13567, 13568, 13569, 13570, 13571, 13572, 13573, 13574, 13576, 13577, 13578, 13579, 13580, 13581, 13582, 13583, 13584, 13585, 13586, 13587, 13588, 13589, 13590, 13591, 13592, 13593, 13594, 13595, 13596, 13597, 13598, 13599, 13600, 13601, 13602, 13603, 13604, 13605, 13606, 13607, 13608, 13609, 13610, 13611, 13612, 13613, 13614, 13615, 13616, 13617, 13619, 13620, 13621, 13622, 13623, 13624, 13626, 13627, 13628, 13629, 13632, 13633, 13634, 13635, 13636, 13637, 13638, 13639, 13640, 13641, 13642, 13643, 13644, 13645, 13646, 13647, 13648, 13649, 13650, 13651, 13654, 13655, 13656, 13657, 13658, 13659, 13660, 13661, 13662, 13663, 13664, 13665, 13666, 13667, 13668, 13669, 13670, 13671, 13672, 13673, 13674, 13675, 13676, 13677, 13678, 13679, 13680, 13681, 13682, 13683, 13684, 13685, 13687, 13688, 13690, 13691, 13693, 13695, 13696, 13697, 13699, 13700, 13702, 13703, 13704, 13706, 13707, 13708, 13709, 13710, 13711, 13712, 13713, 13714, 13716, 13717, 13718, 13719, 13720, 13721, 13722, 13723, 13724, 13725, 13726, 13727, 13728, 13729, 13730, 13731, 13732, 13733, 13734, 13735, 13737, 13738, 13739, 13740, 13741, 13742, 13743, 13744, 13745, 13746, 13747, 13748, 13749, 13750, 13751, 13752, 13754, 13755, 13756, 13757, 13758, 13759, 13760, 13762, 13763, 13764, 13765, 13766, 13767, 13768, 13769, 13770, 13771, 13772, 13774, 13775, 13776, 13777, 13778, 13779, 13780, 13781, 13782, 13783, 13784, 13785, 13786, 13787, 13788, 13789, 13790, 13792, 13793, 13794, 13795, 13796, 13799, 13801, 13802, 13803, 13804, 13806, 13807, 13808, 13809, 13810, 13811, 13812, 13813, 13815, 13816, 13817, 13818, 13819, 13820, 13821, 13822, 13823, 13824, 13825, 13826, 13827, 13828, 13829, 13830, 13831, 13833, 13834, 13835, 13836, 13837, 13838, 13839, 13841, 13842, 13843, 13844, 13845, 13846, 13849, 13850, 13851, 13852, 13853, 13854, 13855, 13856, 13857, 13858, 13859, 13860, 13861, 13862, 13863, 13864, 13865, 13866, 13868, 13869, 13870, 13871, 13873, 13874, 13875, 13876, 13878, 13879, 13880, 13881, 13882, 13884, 13885, 13887, 13888, 13889, 13890, 13893, 13895, 13896, 13897, 13898, 13899, 13900, 13901, 13902, 13903, 13904, 13905, 13906, 13908, 13909, 13910, 13911, 13912, 13914, 13915, 13916, 13917, 13919, 13920, 13921, 13922, 13923, 13924, 13925, 13926, 13928, 13929, 13930, 13931, 13932, 13933, 13934, 13935, 13936, 13937, 13938, 13939, 13940, 13941, 13942, 13944, 13945, 13946, 13948, 13950, 13952, 13953, 13954, 13955, 13956, 13960, 13961, 13962, 13963, 13964, 13965, 13966, 13967, 13968, 13970, 13971, 13972, 13973, 13974, 13975, 13976, 13977, 13978, 13979, 13980, 13982, 13983, 13984, 13985, 13986, 13987, 13988, 13989, 13990, 13991, 13992, 13993, 13994, 13995, 13996, 13997, 13998, 13999, 14000, 14001, 14002, 14003, 14004, 14005, 14006, 14007, 14008, 14010, 14011, 14012, 14013, 14014, 14015, 14016, 14017, 14018, 14019, 14020, 14021, 14022, 14023, 14024, 14025, 14026, 14027, 14028, 14030, 14031, 14032, 14034, 14035, 14037, 14038, 14039, 14040, 14041, 14042, 14043, 14044, 14045, 14046, 14047, 14048, 14049, 14050, 14051, 14052, 14053, 14055, 14059, 14060, 14061, 14062, 14064, 14065, 14067, 14068, 14069, 14070, 14071, 14072, 14073, 14074, 14075, 14076, 14077, 14078, 14079, 14080, 14082, 14084, 14085, 14086, 14088, 14089, 14090, 14092, 14093, 14095, 14096, 14097, 14098, 14099, 14100, 14103, 14104, 14105, 14108, 14109, 14110, 14111, 14112, 14113, 14116, 14117, 14118, 14119, 14121, 14122, 14123, 14124, 14125, 14126, 14127, 14128, 14129, 14130, 14131, 14132, 14133, 14135, 14136, 14137, 14139, 14141, 14142, 14143, 14144, 14145, 14146, 14147, 14148, 14151, 14152, 14153, 14154, 14155, 14156, 14157, 14158, 14159, 14160, 14161, 14162, 14163, 14166, 14167, 14168, 14169, 14170, 14171, 14172, 14173, 14175, 14176, 14177, 14178, 14179, 14180, 14181, 14182, 14183, 14185, 14186, 14187, 14188, 14190, 14191, 14192, 14193, 14194, 14195, 14197, 14198, 14199, 14201, 14204, 14205, 14207, 14208, 14212, 14213, 14215, 14216, 14217, 14218, 14219, 14222, 14223, 14224, 14225, 14226, 14227, 14228, 14229, 14230, 14231, 14232, 14233, 14234, 14235, 14236, 14237, 14238, 14239, 14240, 14241, 14242, 14243, 14244, 14245, 14246, 14247, 14248, 14249, 14250, 14251, 14252, 14253, 14254, 14255, 14256, 14257, 14258, 14259, 14260, 14261, 14262, 14263, 14265, 14266, 14267, 14268, 14271, 14273, 14274, 14276, 14280, 14281, 14282, 14283, 14284, 14285, 14287, 14288, 14290, 14292, 14293, 14294, 14295, 14296, 14297, 14298, 14299, 14300, 14301, 14302, 14303, 14304, 14305, 14306, 14307, 14308, 14309, 14310, 14311, 14313, 14314, 14315, 14316, 14317, 14320, 14321, 14322, 14323, 14324, 14325, 14326, 14328, 14329, 14330, 14331, 14332, 14333, 14334, 14335, 14336, 14338, 14339, 14340, 14342, 14343, 14344, 14346, 14347, 14348, 14349, 14350, 14351, 14353, 14354, 14355, 14356, 14357, 14358, 14359, 14360, 14361, 14363, 14365, 14366, 14367, 14368, 14369, 14370, 14371, 14372, 14373, 14374, 14375, 14376, 14377, 14378, 14379, 14380, 14382, 14383, 14384, 14385, 14386, 14389, 14390, 14391, 14392, 14393, 14394, 14395, 14396, 14397, 14399, 14400, 14401, 14402, 14403, 14404, 14405, 14406, 14407, 14408, 14409, 14410, 14411, 14412, 14413, 14415, 14416, 14417, 14418, 14419, 14420, 14421, 14422, 14424, 14427, 14428, 14429, 14430, 14432, 14434, 14435, 14436, 14437, 14438, 14440, 14441, 14442, 14443, 14444, 14445, 14446, 14447, 14448, 14450, 14451, 14452, 14453, 14454, 14455, 14456, 14457, 14458, 14459, 14460, 14461, 14463, 14465, 14467, 14469, 14470, 14471, 14473, 14475 to distinguish chronic lymphocytic leukemia from normal B-cells.

30. The method of claim 16, wherein the signature comprises at least one sequence with identifiers selected from the group consisting of SEQ ID NOs: 24995-24996, 25025, 25031, 25033, 25087-25091, 25093-25094, 25128, 25150, 25161-25162, 25165, 25182, 25219-25220, 25230, 25277-25278, 25284, 25316, 25356-25357, 25359-25360, 25363-25364, 25397-25398, 25415, 25424, 25432, 25480, 25484-25486, 25498-25499, 25505, 25524, 25550-25552, 25570, 25580, 25583, 25609-25610, 25619, 25646-25647, 25685-25687, 25691, 25714, 25720, 25727-25728, 25731, 25741, 25746-25747, 25846-25847, 25868, 25882, 25904, 25908-25912, and 25914-25915 to distinguish B-cells from breast cells.

31. The method of claim 16, wherein the signature comprises at least one sequence with identifiers selected from the group consisting of SEQ ID NOs: 24880-24883, 24896-24897, 24959-24963, 24965, 24973, 25006, 25027, 25052, 25054, 25102-25103, 25110-25111, 25118, 25123, 25150, 25152-25153, 25183-25184, 25188, 25198, 25202, 25204-25206, 25210, 25212-25214, 25224-25225, 25245, 25252-25254, 25257, 25259-25261, 25270, 25273, 25286, 25294, 25296, 25313-25314, 25334, 25416, 25425, 25449-25450, 25454, 25476-25478, 25583, 25609-25612, 25665, 25667, 25705, 25714, 25786, 25894, and 25896-25897 to distinguish B-cells from Caucasian people from B-cells from black people.

32. The method of claim 16, wherein the signature comprises at least one sequence with identifiers selected from the group consisting of SEQ ID NO: 24881, 24926, 24952, 24981, 24990, 24995, 24998, 25010, 25047, 25051, 25075, 25101-25102, 2511 25111, 25118, 25121, 25149, 25211, 25218, 25238, 25309, 25359, 25373, 25376, 25386-25387, 25402, 25410, 25415-25416, 25420-25421, 25468, 25474, 25476, 25484-25487, 25493, 25524, 25536, 25560, 25596, 25604, 25620, 25631, 25651, 25662, 25664, 25714, 25723, 25803, 25829, 25850-25851, 25886-25887, 25898, 25902-25903, 25905, 25914, 25921, 25923, 25937 to distinguish B-cells from men from B-cells from women.

33. The method of claim 16, wherein the signature comprises at least one sequence with identifiers selected from the group consisting of SEQ ID NOs: 36100, 36101, 36105, 36107, 36111, 36112, 36114, 36115, 36116, 36119, 36120, 36121, 36122, 36123, 36139, 36143, 36146, 36147, 36148, 36149, 36155, 36156, 36157, 36163, 36171, 36173, 36176, 36177, 36178, 36179, 36180, 36181, 36182, 36183, 36188, 36189, 36194, 36197, 36200, 36203, 36204, 36215, 36217, 36218, 36219, 36222, 36223, 36227, 36228, 36230, 36231, 36234, 36238, 36239, 36240, 36241, 36242, 36243, 36246, 36248, 36252, 36254, 36262, 36265, 36266, 36269, 36270, 36271, 36272, 36273, 36276, 36278, 36279, 36282, 36285, 36287, 36288, 36289, 36293, 36294, 36295, 36296, 36297, 36298, 36299, 36303, 36304, 36305, 36306, 36307, 36308, 36313, 36319, 36320, 36322, 36323, 36326, 36327, 36331, 36332, 36333, 36335, 36336, 36338, 36339, 36341, 36342, 36344, 36347, 36355, 36356, 36357, 36372, 36373, 36374, 36375, 36376, 36378, 36381, 36384, 36387, 36391, 36392, 36395, 36397, 36399, 36400, 36401, 36405, 36406, 36408, 36409, 36428, 36429, 36430, 36431, 36432, 36433, 36435, 36436, 36437, 36444, 36450, 36451, 36452, 36453, 36455, 36456, 36457, 36460, 36461, 36462, 36463, 36464, 36465, 36466, 36467, 36468, 36469, 36470, 36471, 36472, 36478, 36485, 36490, 36491, 36498, 36499, 36504, 36505, 36506, 36507, 36508, 36509, 36510, 36511, 36512, 36513, 36517, 36520, 36521, 36523, 36524, 36529, 36530, 36533, 36534, 36535, 36538, 36539, 36541, 36542, 36543, 36544, 36545, 36546, 36547, 36550, 36553, 36554, 36561, 36562, 36572, 36573, 36574, 36575, 36578, 36579, 36580, 36581, 36582, 36584, 36586, 36589, 36590, 36591, 36593, 36594, 36597, 36599, 36600, 36601, 36607, 36608, 36609, 36610, 36611, 36612, 36614, 36615, 36616, 36617, 36618, 36619, 36620, 36621, 36627, 36628, 36629, 36637, 36638, 36639, 36640, 36641, 36642, 36643, 36644, 36645, 36646, 36647, 36649, 36650, 36658, 36665, 36669, 36670, 36671, 36673, 36674, 36675, 36676, 36677, 36678, 36679, 36680, 36682, 36683, 36684, 36689, 36690, 36691, 36692, 36693, 36694, 36695, 36696, 36697, 36698, 36701, 36702, 36703, 36705, 36706, 36707, 36708, 36709, 36710, 36711, 36712, 36714, 36715, 36716, 36718, 36719, 36720, 36721, 36722, 36726, 36727, 36728, 36729, 36730, 36731, 36732, 36733, 36734, 36735, 36738, 36739, 36741, 36742, 36744, 36745, 36746, 36747, 36749, 36751, 36754, 36755, 36756, 36757, 36759, 36760, 36761, 36762, 36763, 36764, 36765, 36768, 36769, 36770, 36771, 36772, 36775, 36776, 36777, 36778, 36788, 36789, 36793, 36794, 36796, 36797, 36798, 36799, 36800, 36803, 36805, 36806, 36809, 36810, 36812, 36814, 36817, 36825, 36826, 36827, 36829, 36830, 36831, 36832, 36834, 36835, 36838, 36839, 36841, 36844, 36846, 36848, 36849, 36851, 36854, 36855, 36857, 36859, 36860, 36861, 36862, 36863, 36864, 36868, 36869, 36871, 36872, 36877, 36878, 36879, 36880, 36881, 36883, 36884, 36885, 36886, 36887, 36889, 36890, 36891, 36892, 36895, 36897, 36901, 36902, 36903, 36904, 36905, 36907, 36909, 36910, 36911, 36913, 36914, 36915, 36916, 36917, 36918, 36919, 36925, 36931, 36938, 36939, 36941, 36942, 36945, 36946, 36948, 36952, 36953, 36955, 36956, 36957, 36958, 36961, 36963, 36964, 36965, 36967, 36968, 36973, 36976, 36977, 36978, 36979, 36980, 36981, 36982, 36983, 36985, 36988, 36989, 36990, 36991, 36992, 36997, 36998, 36999, 37001, 37004, 37005, 37008, 37009, 37012, 37013, 37014, 37021, 37022, 37023, 37024, 37025, 37026, 37029, 37032, 37033, 37036, 37039, 37044, 37046, 37048, 37049, 37050, 37051, 37054, 37055, 37056, 37057, 37058, 37059, 37060, 37063, 37065, 37066, 37075, 37077, 37078, 37079, 37080, 37081, 37083, 37087, 37088, 37089, 37090, 37091, 37094, 37095, 37099, 37100, 37101, 37110, 37115, 37116, 37117, 37119, 37120, 37121, 37123, 37124, 37125, 37127, 37132, 37133, 37134, 37135, 37137, 37138, 37139, 37141, 37142, 37143, 37144, 37145, 37146, 37149, 37150, 37151, 37152, 37155, 37157, 37160, 37161, 37162, 37163, 37164, 37165, 37166, 37167, 37168, 37169, 37171, 37174, 37175, 37177, 37178, 37181, 37182, 37183, 37184, 37185, 37187, 37193, 37194, 37195, 37196, 37197, 37198, 37199, 37201, 37202, 37203, 37206, 37207, 37208, 37209, 37211, 37213, 37214, 37216, 37217, 37226, 37227, 37228, 37229, 37230, 37231, 37234, 37235, 37237, 37244, 37245, 37247, 37248, 37249, 37251, 37253, 37254, 37255, 37261, 37262, 37265, 37271, 37272, 37273, 37274, 37278, 37279, 37283, 37303, 37304, 37305, 37306, 37307, 37308, 37312, 37316, 37319, 37321, 37323, 37324, 37325, 37326, 37327, 37334, 37335, 37336, 37337, 37338, 37339, 37340, 37341, 37342, 37348, 37356, 37363, 37365, 37368, 37369, 37370, 37372, 37374, 37375, 37376, 37382, 37383, 37385, 37386, 37388, 37391, 37394, 37395, 37398, 37400, 37401, 37402, 37403, 37404, 37405, 37407, 37408, 37410, 37419, 37420, 37422, 37423, 37424, 37425, 37426, 37429, 37430, 37431, 37432, 37433, 37445, 37446, 37448, 37449, 37453, 37454, 37456, 37461, 37462, 37463, 37464, and 37466 to distinguish normal pancreas from pancreatic cancer.

34. The method of claim 16, wherein the signature comprises at least one sequence with identifiers selected from the group consisting of SEQ ID NOs: 51377-51378, 51406, 51438, 51496, 51565, 51691, 51699, 51736-51737, 51745, and 51759 to distinguish platelets from people with a propensity to clot vs. platelets from people with a propensity to hemorrhage.

35. The method of claim 16, wherein the signature comprises at least one sequence with identifiers selected from the group consisting of SEQ ID NOs: 42434, 42520, 42537, 42577, 42751, 42979, 43019, 43090, 43128, 43156, 43310, 43352, 43398, 43426, 43437 to distinguish normal prostate from prostate cancer.

36. The method of claim 16, wherein characterizing the tRNA fragments comprises at least one assessment selected from the group consisting of sequencing the tRNA fragments, measuring overall abundance of one of the tRNA fragments mapped to the genome, measuring a relative abundance of the one tRNA fragment to a reference, assessing a length of the one tRNA fragment, identifying starting and ending points of the one tRNA fragment, identifying genomic origin of the one tRNA fragment, and identifying a terminal modification of the one tRNA fragment.

37. A method of diagnosing, identifying or monitoring breast cancer in a subject in need thereof, the method comprising:
isolating tRNA fragments from a cell obtained from the subject;
hybridizing the tRNA fragments to a panel of oligonucleotides engineered to detect tRNA fragments;
analyzing levels of the tRNA fragments present in the cell; wherein a differential in the measured tRNA fragments' levels to the reference is indicative of a diagnosis or identification of breast cancer in the subject; and
providing a treatment regimen to the subject dependent on the differential in measured tRNA fragments' levels to the reference.

38. A panel of engineered oligonucleotides comprising a mixture of oligonucleotides that are about 15 to about 40 basepairs (bp) in length and capable of hybridizing tRNA fragments, wherein the tRNAs are less than 80 nucleotides in length.

39. A kit for high-throughput analysis of tRNAs fragments in a sample comprising:
the panel of engineered oligonucleotides of claim 28;
hybridization reagents; and
tRNA isolation reagents.

40. A method of identifying a cell's tissue of origin to treat a disease or disease progression in a subject in need thereof comprising:
isolating fragments of tRNAs from a cell obtained from the subject;
characterizing the identity of the tRNA fragments and their relative abundance in the cell to identify a signature, wherein the signature is indicative of the cell's tissue of origin; and
providing a treatment regimen to the subject dependent on the cell's tissue of origin.
